United States Patent Application Publication US 2021/0260178 A1 - sequence listing, part 25

SEQ ID NO: 41126 - RNA, 1785 nt, Artificial Sequence
  mRNA product Design b-4 (A100) comprising derived and/or modified sequence from LASV(LP;Clade I)__AAF86701__GPCmut12 (opt1)
aggagagucccgcagucggcguccagcggcucugcuuguucgugugugugucguugcaggccuuauucaagcuuaccaugggccagaucaucaccuucuuccaggaggugccccacgucaucgaggaggugaugaacaucgugcugaucgcccucagccugcuggccauccucaaggggcuguacaacaucgcgaccugcggcaucaucgggcuggucgccuuccucuuccugugcggcaaguccugcagccugacgcucaagggcggguacgagcugcagacccuggagcucaacauggagacccugaacaugugcaugccgcuguccugcaccaagaacagcucccaccacuacauccgcgugggcaacgagacggggcucgagcugacccugaccaacaccagcaucaucaaccacaaguucugcaaccucuccgacgcccacaagaagaaccuguacgaccacgcccugaugagcaucaucuccacguuccaccucagcauccccaacuucaaccaguacgaggccauguccugcgacuucaacggcgggaagaucagcgugcaguacaaccugucccacagcuacgcgggcgacgccgccgagcacugcgggaccgucgccaacggcgugcugcagaccuucaugcggauggcguggggcgggcgcuacaucgcccucgacuccggcaaggggaacugggacugcaucaugaccagcuaccaguaccugaucauccagaacacgaccugggaggaccacugccaguucucccggcccagccccaucggcuaccugggccuccugucccagcgcacccgggacaucuacaucagccgccggcugcucgggaccuucacguggacccugagcgacuccgagggcaacgagacccccgggggcuacugccugacccgcuggaugcucaucgaggccgagcugaagugcuucgggaacacggccguggccaagugcaacgagaagcacgacgaggaguucugcgacaugcugcggcuguucgacuucugcaagcaggcgauccgccggcugaaggccgaggcccagaugagcauccagcugaucaacaaggccgucaacgcccucaucaacgaccagcugaucaugaagaaccaccuccgcgacaucaugggcauccccuacugcaacuacuccaaguacugcuaccucaaccacaccagcuccggccggaccagccugcccaagugcugccugaucuccaacgggagcuaccucaacgagacccaguucuccgacgacaucgagcagcaggcggacaacaugaucacggagaugcugcagaaggaguacaucgagcgccagggcaagaccccgcuggggcugguggacaucuucaucuucagcaccuccuucuaccucaucagcaucuuccugcaccugaucaagaucccgacccaccggcacaucgugggcaagcccugccccaagccccaccgccucaaccacaugggggucugcuccugcggccuguacaagcacccgggcgugcccacgaaguggaagcggugaggacuaguaauaaggaaacuguaugaaugucugugggcaggaagugaagagauccuucuguaaagguuuuuggaauuaugucugcugaauaauaaacuuuuuugaaauaauaaaucugguagaaaaaugagaucuaaaaaaaaaaaaaaaaaaaaaaaaaaaaaaaaaaaaaaaaaaaaaaaaaaaaaaaaaaaaaaaaaaaaaaaaaaaaaaaaaaaaaaaaaaaaaaaaaaaa

SEQ ID NO: 41127 - RNA, 1785 nt, Artificial Sequence
  mRNA product Design b-4 (A100) comprising derived and/or modified sequence from LASV(803213;Clade II)__AAF86703__GPCmut12 (opt1)
aggagagucccgcagucggcguccagcggcucugcuuguucgugugugugucguugcaggccuuauucaagcuuaccaugggccagaucaucaccuucuuccaggaggugccccacgucaucgaggaggugaugaacaucgugcugaucgcccucagccugcuggccauccucaaggggaucuacaacgucgcgaccugcggccuguucgggcugaucuccuuccuccugcugugcggccgcagcugcuccgugacguacaaggggguguacgagcuccagacccuggagcugaacauggccaaccucaacaugugcaugccgcugagcugcaccaagaacaacucccaccacuacaucauggucggcaacgagaccggccuggagcucacgcugaccaacaccagcaucaucaaccacaaguucugcaaccuguccgacgcccacaagaagaaccucuacgaccacgcccugaugagcaucaucuccaccuuccaccugagcauccccaacuucaaccaguacgaggccauguccugcgacuucaacgggggcaagaucagcgugcaguacaaccucucccacagcuucgcgguggacgccgccaaccacugcgggacgaucgccaacggcguccugcagaccuucaugcggauggcguggggcggguccuacaucgcccuggacagcggcaaggggaacugggacugcaucaugaccuccuaccaguaccucaucauccagaacaccacgugggaggaccacugccaguucagccgccccucccccaucggcuaccuggggcugcucagccagcggacccgcgacaucuacaucagccggcgccugcugggcaccuucaccuggacgcucuccgacagcgagggcaacgaggcccccgggggcuacugccugacccgguggaugcugaucgaggccgagcucaagugcuucgggaacaccgccguggcgaagugcaacgagaagcacgacgaggaguucugcgacaugcugcgccuguucgacuucugcaagcaggccaucaagcggcucaagaccgaggcccagauguccauccagcugaucaacaaggccgugaacgcccugaucaacgaccagcucaucaugaagaaccaccuccgcgacaucaugggcauccccuacugcaacuacagccgguacugcuaccugaaccacacggucaccgggaagaccucccugccccgcugcugccuggugagcaacggcuccuaccugaacgagacccacuucagcgacgacaucgagcagcaggcggacaacaugaucacggagaugcuccagaaggaguacauggaccggcagggcaagaccccgcuggggcugguggaccuguucgucuucuccaccagcuucuaccucaucuccaucuuccugcaccuggugaagaucccgacccaccgccacaucgugggcaagcccugccccaagccccaccggcucaaccacauggggaucugcagcugcggccuguacaagcacccggggguccccgugaaguggaagcgcugaggacuaguaauaaggaaacuguaugaaugucugugggcaggaagugaagagauccuucuguaaagguuuuuggaauuaugucugcugaauaauaaacuuuuuugaaauaauaaaucugguagaaaaaugagaucuaaaaaaaaaaaaaaaaaaaaaaaaaaaaaaaaaaaaaaaaaaaaaaaaaaaaaaaaaaaaaaaaaaaaaaaaaaaaaaaaaaaaaaaaaaaaaaaaaaaa

SEQ ID NO: 41128 - RNA, 1785 nt, Artificial Sequence
  mRNA product Design b-4 (A100) comprising derived and/or modified sequence from LASV(GA391;Clade III)__CAA36645__GPCmut12 (opt1)
aggagagucccgcagucggcguccagcggcucugcuuguucgugugugugucguugcaggccuuauucaagcuuaccaugggccagaucgugaccuucuuccaggaggucccccacgugaucgaggaggugaugaacaucguccugaucgcccucagcauccuggccauccugaaggggcucuacaacguggcgaccugcggccugaucgggcuggugaccuuccuccugcuguccggccgcagcugcucccucaucuacaaggggaccuacgagcugcagacccuggagcucaacauggagacccugaacaugugcaugccgcugagcugcacgaagaacaacucccaccacuacauccgggucggcaacgagaccggccucgagcugacccugaccaacacgagcauccucaaccacaaguucugcaaccuguccgacgcccacaagcgcaaccuguacgaccacagccucauguccaucaucagcaccuuccaccuguccauccccaacuucaaccaguacgaggccaugagcugcgacuucaacgggggcaagaucaccgugcaguacaaccugucccacagcuucgccguggacgccgcggggcacugcggcacccucgccaacgggguccugcagacguucaugcggauggccuggggcggcuccuacaucgcccuggacagcgggcgcggcaacugggacugcaucaugaccuccuaccaguaccucaucauccagaacaccaccugggacgaccacugccaguucagccggcccucccccaucggguaccugggccugcucagccagcgcacgcgggacaucuacaucagccgccggcugcugggcaccuucaccuggacccucuccgacagcgaggggaacgagacgccgggcggguacugccugacccgcuggaugcugaucgaggcggagcucaagugcuucggcaacaccgccguggccaagugcaacgagaagcacgacgaggaguucugcgacaugcugcggcuguucgacuucugcaagcaggccauccgccggcucaagaccgaggcccagauguccauccagcugaucaacaaggcggugaacgcccugaucaacgaccagcucaucaugaagaaccaccuccgcgacaucauggggauccccuacugcaacuacagccgguacugcuaccugaaccacacguccaccggcaagaccagccugccccgcugcugccugaucuccaacggcagcuaccugaacgagaccaaguucuccgacgacaucgagcagcaggccgacaacaugaucacggagaugcugcagaaggaguacaucgaccggcaggggaagacgccccucggccuggucgaccuguucguguucagcaccuccuucuaccucaucagcaucuuccugcaccuggugaagaucccgacccaccgccacaucgucgggaagcccugccccaagccccaccggcucaaccacaugggcaucugcuccugcgggcuguacaagcagccgggcgugcccgugcgcuggaagcggugaggacuaguaauaaggaaacuguaugaaugucugugggcaggaagugaagagauccuucuguaaagguuuuuggaauuaugucugcugaauaauaaacuuuuuugaaauaauaaaucugguagaaaaaugagaucuaaaaaaaaaaaaaaaaaaaaaaaaaaaaaaaaaaaaaaaaaaaaaaaaaaaaaaaaaaaaaaaaaaaaaaaaaaaaaaaaaaaaaaaaaaaaaaaaaaaa

SEQ ID NO: 41129 - RNA, 1788 nt, Artificial Sequence
  mRNA product Design b-4 (A100) comprising derived and/or modified sequence from LASV(AV;Clade V)__CCA30314__GPCmut12 (opt1)
aggagagucccgcagucggcguccagcggcucugcuuguucgugugugugucguugcaggccuuauucaagcuuaccaugggccagaucgugaccuucuuccaggaggucccccacgugaucgaggaggugaugaacaucguccugaucgcccucagcauccuggccgugcugaaggggcucuacaacaucgcgaccugcggccugaucgggcugaucacguuccuccugcugugcggccgcuccugcagcuccaaccucuacaaggggguguacgagcugcagagccuggaccucaacauggagacccugaacaugugcaugccgcuguccugcaccaagaacaacagccaccacuacauccgggucggcaacgacaccggccucgagcugacgcugaccaacaccuccauccucaaccacaaguucugcaaccugagcgacgcccacaagaaggaccuguacgaccacgcccucauguccaucaucagcaccuuccaccuguccauccccaacuucaaccaguacgaggccaugagcugcgacuucaacgggggcaagaucuccgugcaguacaaccugagccacuccuacgccaucgacgcggccaaccacugcgggacgguggccaacggcauccuccagaccuucaugcgcauggccuggggcgggagcuacaucgcgcuggacuccggccgggggaacugggacugcaucaugaccagcuaccaguaccugaucauccagaacaccacgugggagaaccacugccaguucucccgccccagccccaucggcuaccucgggcugcugagccagcggacccgcgacaucuacaucucccggcgccuccugggcaccuucaccuggacgcugagcgacuccgagggcaacgccacccccgggggcuacugccucacccgguggaugcugaucgaggccgagcugaagugcuucgggaacaccgccgucgccaagugcaacgagaagcacgacgaggaguucugcgacaugcuccgccuguucgacuucugcaagcaggcgaucagccggcugaaguccgaggcccagaugagcauccagcucaucaacaaggccgugaacgcccugaucaacgaccagcugaucaugaagaaccaccuccgcgacaucaugggcauccccuacugcaacuacuccaaguacugcuaccugaaccacacgaucaccgggaagaccagccugcccaagugcugccucguguccaacggcagcuaccugaacgagacccacuucuccgacgacaucgagcagcaggccgacaacaugaucacggagaugcugcagaaggaguacauggagcggcagggcaagaccccgcuggggcucgucgaccuguucguguucagcaccuccuucuaccugaucagcaucuuccuccgccuggugaagaucccgacccaccggcacaucgucggcaagcccugccccaagccccaccgccugaaccacauggggaucugcuccugcggccucuacaagcagccgggggugcccgugcgguggaagcgcugaggacuaguaauaaggaaacuguaugaaugucugugggcaggaagugaagagauccuucuguaaagguuuuuggaauuaugucugcugaauaauaaacuuuuuugaaauaauaaaucugguagaaaaaugagaucuaaaaaaaaaaaaaaaaaaaaaaaaaaaaaaaaaaaaaaaaaaaaaaaaaaaaaaaaaaaaaaaaaaaaaaaaaaaaaaaaaaaaaaaaaaaaaaaaaaaa

SEQ ID NO: 41130 - RNA, 1785 nt, Artificial Sequence
  mRNA product Design b-4 (A100) comprising derived and/or modified sequence from LASV(Togo/2016/7082;Clade VI)__AMR44577__GPCmut12 (opt1)
aggagagucccgcagucggcguccagcggcucugcuuguucgugugugugucguugcaggccuuauucaagcuuaccaugggccagaucaucaccuucuuccaggaggugccccacgucaucgaggaggugaugaacaucgugcugaucgcccucagccugcuggccauccucaagggggucuacaacguggcgaccugcggcaucaucgggcuggugacguuccuguuccucugcggccgcuccugcagccugaucuacaagggguccuacgagcugcagacccucgagcugaacauggagacccugaacaugugcaugccgcucagcugcaccaagaacuccagccaccacuacauccgggucggcaacgagacgggccuggagcugacccucaccaacaccuccaucaucaaccacaaguucugcaaccugagcgacgcccacaagcgcaaccuguacgaccacgcccucauguccauccugagcacguuccaccuguccauccccaacuucaaccaguacgaggccaugagcugcgacuucaacgggggcaagaucuccgugcaguacaaccucagccacgccuacgcgguggacgccgccgagcacugcgggaccgucgccaacggcgugcugcagaccuucaugcggauggcguggggcggguccuacaucgcccuggacagcggccgcgggaacugggacugcaucaugaccuccuaccaguaccucaucauccagaacacgaccugggaggaccacugccaguucagccggcccucccccaucggcuaccuggggcugcucagccagcgcacccgggacaucuacaucagccgccggcugcugggcaccuucacguggacccucuccgacagcgagggcaacgagacccccgggggcuacugccugacccgcuggaugcugaucgaggccgagcucaagugcuucgggaacacggccguggccaagugcaacgagaagcacgacgaggaguucugcgacaugcugcggcuguucgacuucugcaagcaggcgauccagcgccucaaguccgaggcccagaugagcauccagcugaucaacaaggccgucaacgcccugaucaacgaccagcucaucaugaagaaccaccuccgggacaugaugggcauccccuacugcaacuacuccaaguacugcuaccugaaccacaccagcuccgggcgcaccagccugcccaagugcugccugguguccaacggcagcuaccugaacgagacccacuucuccgacgacaucgagcagcaggccgacaacaugaucacggagaugcuccagaaggaguacaucgaccggcagggcaagaccccgcuggggcugguggaccuguucgucuucagcaccuccuucuaccucaucagcaucuuccugcaccugaucaagaucccgacccaccgccacaucgugggcaagcccugccccaagccccaccggcucaaccacauggggaucugcuccugcggccuguacaagcagccgggggugcccacgcgcuggaagcggugaggacuaguaauaaggaaacuguaugaaugucugugggcaggaagugaagagauccuucuguaaagguuuuuggaauuaugucugcugaauaauaaacuuuuuugaaauaauaaaucugguagaaaaaugagaucuaaaaaaaaaaaaaaaaaaaaaaaaaaaaaaaaaaaaaaaaaaaaaaaaaaaaaaaaaaaaaaaaaaaaaaaaaaaaaaaaaaaaaaaaaaaaaaaaaaaa

SEQ ID NO: 41131 - RNA, 1785 nt, Artificial Sequence
  mRNA product Design b-4 (A100) comprising derived and/or modified sequence from LASV(KAK-428;Clade n.d. (VII))__ANH09740__GPCmut12 (opt1)
aggagagucccgcagucggcguccagcggcucugcuuguucgugugugugucguugcaggccuuauucaagcuuaccaugggccagaucgugaccuucuuccaggaggucccccacgugaucgaggaggugaugaacaucguccugaucgcccucagccugcuggccauccucaaggggcuguacaacuucgcgaccugcggcgugaucgggcugaucacguuccuccugcugugcggccgcuccugcagcgccaccuacaaggggcaguacgagcuccagacccuggagcugaacauggagucccucaacaugugcaugccgcugagcugcaccaagaacaacucccaccacuacauccgggccggcaacaacacgggccuggagcucacccugaccaacaccagcaucaucucccacaaguucugcaaccugagcgacgcccacaagaagaaccucuacgaccacacgcugauguccaucaucaccaccuuccaccugagcauccccaacuucaaccaguacgaggccauguccugcgacuucaacgggggcaagaucagcauccaguacaaccucucccacagcuacgcgggggacgccgcccagcacugcggcaccguggccaacgggguccugcagacguucaugcgcauggcguggggcggcuccuaccuggcccucgacagcgggcggcgcggcugggacugcaucaucuccagcuaccaguaccugaucauccagaacaccaccugggacgaccacugccaguucucccggcccagccccaucggguaccugggcuucgugagccagaagacccgcgacaucuacaucucccggcgccuccugggcacguucaccuggacccugagcgacuccgaggggcacgacaugccgggcggguacugccucacccgguggaugcugaucgaggccgaccugaagugcuucggcaacacggccguggccaagugcaacgagaagcacgacgaggaguucugcgacauguggcgccucuucgacuucugcaagcaggcgauccagcggcugaaggccgaggcccagaugaacauccagcugaucaacaaggccgucaacgcccucaucaacgaccagcugaugaugaagaaccaccuccgcgacaucauggggauccccuacugcaacuacagcaaguucugcuaccugaacaacaccaccaccggccggacgucccugccccgcugcugccugaucagcaacggcuccuaccucaacgagacccacuucagcgacgacaucgagcagcaggcggacaacaugaucaccgagaugcugcagaaggaguacauggaccggcaggggaagacgccccugggccucguggaccuguucguguucuccaccagcuucuaccugaucaccaucuuccugcaccucgucaagaucccgacccaccgccacaucguggggaagcccugccccaagccccaccggcugaaccacaugggcaucugcuccugcgggcuguacaagcagccgggcgugcccguccgcuggaagcggugaggacuaguaauaaggaaacuguaugaaugucugugggcaggaagugaagagauccuucuguaaagguuuuuggaauuaugucugcugaauaauaaacuuuuuugaaauaauaaaucugguagaaaaaugagaucuaaaaaaaaaaaaaaaaaaaaaaaaaaaaaaaaaaaaaaaaaaaaaaaaaaaaaaaaaaaaaaaaaaaaaaaaaaaaaaaaaaaaaaaaaaaaaaaaaaaa

SEQ ID NO: 41132 - RNA, 1785 nt, Artificial Sequence; identical to SEQ ID NO: 41126
  mRNA product Design b-4 (A100) comprising derived and/or modified sequence from LASV(Pinneo-NIG-1969;Clade I)__AIT17836__GPCmut12 (opt1)

SEQ ID NO: 41133 - RNA, 1785 nt, Artificial Sequence
  mRNA product Design b-4 (A100) comprising derived and/or modified sequence from LASV(ISTH0009-NIG-2011;Clade II)__AIT17404__GPCmut12 (opt1)
aggagagucccgcagucggcguccagcggcucugcuuguucgugugugugucguugcaggccuuauucaagcuuaccaugggccagaucaucaccuucuuccaggaggugccccacgucaucgaggaggugaugaacaucgugcugaucgcccucagccugcuggccauccucaaggggaucuacaacgucgcgaccugcggccuguucgggcugguguccuuccuccugcugugcggccgcagcugcuccacgaccuacaaggggguguacgagcuccagacccuggagcuggacauggccagccucaacaugugcaugccgcuguccugcaccaagaacaacagccaccacuacaucauggucggcaacgagacgggccuggagcucacccugaccaacaccuccaucaucaaccacaaguucugcaaccugagcgacgcccacaagaagaaccucuacgaccacgcccugauguccaucaucagcacguuccaccuguccauccccaacuucaaccaguacgaggccaugagcugcgacuucaacgggggcaagaucuccgugcaguacaaccucagccacgcguacgccguggacgccgccaaccacugcgggaccaucgcgaacggcguccugcagaccuucaugcggauggccuggggcggguccuacaucgcccuggacagcggcaagggguccugggacugcaucaugaccagcuaccaguaccucaucauccagaacacgaccugggaggaccacugccaguucucccgccccagccccaucggcuaccuggggcugcucagccagcggacccgcgacaucuacaucucccggcgccugcugggcaccuucacguggacccucagcgacuccgagggcaacgagacccccgggggcuacugccugacccgguggaugcugaucgaggccgagcucaagugcuucgggaacacggccguggcgaagugcaacgagaagcacgacgaggaguucugcgacaugcugcgccuguucgacuucugcaagcaggccauccggcgccucaagaccgaggcccagaugagcauccagcugaucaacaaggccgugaacgcccugaucaacgaccagcucaucaugaagaaccaccuccgggacaucaugggcauccccuacugcaacuacuccaaguacugcuaccugaaccacaccgucaccgggaagacgagccugccccgcugcugccugguguccaacggcagcuaccugaacgagacccacuucuccgacgacaucgagcagcaggcggacaacaugaucaccgagcuccugcagaaggaguacauggaccggcagggcaagaccccgcuggggcugguggaccucuucgucuucagcacguccuucuaccugaucagcaucuuccugcaccucaucaagaucccgacccaccgccacaucaccggcaagcccugccccaagccccaccggcugaaccacauggggaucugcuccugcggccuguacaagcacccgggggugcccgugaaguggaagcgcugaggacuaguaauaaggaaacuguaugaaugucugugggcaggaagugaagagauccuucuguaaagguuuuuggaauuaugucugcugaauaauaaacuuuuuugaaauaauaaaucugguagaaaaaugagaucuaaaaaaaaaaaaaaaaaaaaaaaaaaaaaaaaaaaaaaaaaaaaaaaaaaaaaaaaaaaaaaaaaaaaaaaaaaaaaaaaaaaaaaaaaaaaaaaaaaaa

SEQ ID NO: 41134 - RNA, 1785 nt, Artificial Sequence
  mRNA product Design b-4 (A100) comprising derived and/or modified sequence from LASV(ISTH2010-NIG-2012;Clade II)__AIT17482__GPCmut12 (opt1)
aggagagucccgcagucggcguccagcggcucugcuuguucgugugugugucguugcaggccuuauucaagcuuaccaugggccagaucaucaccuucuuccaggaggugccccacgucaucgaggaggugaugaacaucgugcugaucgcccucagccugcuggccauccucaaggggaucuacaacgucgcgaccugcggccuguucgggcugguguccuuccuccugcugugcggccgcagcugcuccacgaccuacaaggggguguacgagcuccagacccuggagcuggacauggccagccucaacaugugcaugccgcuguccugcaccaagaacaacagccaccacuacaucauggucggcaacgagacgggccuggagcucacccugaccaacaccuccaucaucaaccacaaguucugcaaccugagcgacgcccacaagaagaaccucuacgaccacgcccugauguccaucaucagcacguuccaccuguccauccccaacuucaaccaguacgaggccaugagcugcgacuucaacgggggcaagaucuccgugcaguacaaccucagccacgcguacgccguggacgccgccaaccacugcgggaccaucgcgaacggcguccugcagaccuucaugcggauggccuggggcggguccuacaucgcccuggacagcggcaagggguccugggacugcaucaugaccagcuaccaguaccucaucauccagaacaucacgugggaggaccacugccaguucucccgccccagccccaucggcuaccuggggcugcucagccagcggacccgcgacaucuacaucucccggcgccugcugggcaccuucaccuggacgcucagcgacuccgagggcaacgagacccccgggggcuacugccugacccgguggaugcugaucgaggccgagcucaagugcuucgggaacaccgccguggcgaagugcaacgagaagcacgacgaggaguucugcgacaugcugcgccuguucgacuucugcaagcaggccauccggcgccucaagacggaggcccagaugagcauccagcugaucaacaaggccgugaacgcccugaucaacgaccagcucaucaugaagaaccaccuccgggacaucaugggcauccccuacugcaacuacuccaaguacugcuaccugaaccacaccgucaccgggaagaccagccugccccgcugcugccugguguccaacggcagcuaccugaacgagacgcacuucuccgacgacaucgagcagcaggcggacaacaugaucaccgagcuccugcagaaggaguacaucgaccggcagggcaagaccccgcuggggcugguggaccucuucgucuucagcaccuccuucuaccugaucagcaucuuccugcaccucgugaagaucccgacgcaccgccacguggucggcaagcccugccccaagccccaccggcugaaccacauggggaucugcuccugcggccuguacaagcacccgggggugcccgugaaguggaagcgcugaggacuaguaauaaggaaacuguaugaaugucugugggcaggaagugaagagauccuucuguaaagguuuuuggaauuaugucugcugaauaauaaacuuuuuugaaauaauaaaucugguagaaaaaugagaucuaaaaaaaaaaaaaaaaaaaaaaaaaaaaaaaaaaaaaaaaaaaaaaaaaaaaaaaaaaaaaaaaaaaaaaaaaaaaaaaaaaaaaaaaaaaaaaaaaaaa

SEQ ID NO: 41135 - RNA, 1785 nt, Artificial Sequence
  mRNA product Design b-4 (A100) comprising derived and/or modified sequence from LASV(Lassa virus/H.sapiens-wt/NGA/2015/ISTH_0543;Clade II)__AVO03639__GPCmut12 (opt1)
aggagagucccgcagucggcguccagcggcucugcuuguucgugugugugucguugcaggccuuauucaagcuuaccaugggccagaucaucaccuucuuccaggaggugccccacgucaucgaggaggugaugaacaucgugcugaucgcccucagccugcuggccauccucaaggggaucuacaacgucgcgaccugcggccuguucgggcugguguccuuccuccugcugugcggccgcagcugcuccacgaccuacaaggggguguacgagcuccagacccuggagcuggacauggccaaccucaacaugugcaugccgcugagcugcaccaagaacaacucccaccacuacaucauggucggcaacgagacgggccuggagcucacccugaccaacaccagcaucaucaaccacaaguucugcaaccuguccgacgcccacaagaagaaccucuacgaccacgcccugaugagcaucaucuccacguuccaccugagcauccccaacuucaaccaguacgaggccauguccugcgacuucaacgggggcaagaucagcgugcaguacaaccucucccacaccuacgcgguggacgccgccaaccacugcgggaccaucgccaacggcguccugcagaccuucaugcggauggcguggggcgggagcuacaucgcccuggacuccggcaaggggagcugggacugcaucaugacguccuaccaguaccucgugauccagaacaccaccugggaggaccacugccaguucagccgccccucccccaucggcuaccuggggcugcucagccagcggacccgcgacaucuacaucagccggcgccugcugggcacguucaccuggacccucuccgacagcgagggcaacgagacccccgggggcuacugccugacgcgguggaugcugaucgaggccgagcucaagugcuucgggaacaccgccguggccaagugcaacgagaagcacgacgaggaguucugcgacaugcugcgccuguucgacuucugcaagcaggcgauccggcgccucaagaccgaggcccagauguccauccagcugaucaacaaggccgucaacgcccugaucaacgaccagcucaucaugaagaaccaccuccgggacaucaugggcaucccguacugcaacuacagcaaguacugcuaccugaaccacaccgugacggggaagaccucccugccccgcugcugccuggugagcaacggcuccuaccugaacgagacccacuucagcgacgacaucgagcagcaggccgacaacaugaucaccgagcuccugcagaaggaguacaucgaccggcagggcaagacgccccuggggcuggucgaccucuucguguucuccaccagcuucuaccugaucuccaucuuccugcaccucgugaagaucccgacccaccgccacaucaccggcaagcccugccccaagccccaccggcugaaccacauggggaucugcagcugcggccuguacaagcacccggggguccccgugaaguggaagcgcugaggacuaguaauaaggaaacuguaugaaugucugugggcaggaagugaagagauccuucuguaaagguuuuuggaauuaugucugcugaauaauaaacuuuuuugaaauaauaaaucugguagaaaaaugagaucuaaaaaaaaaaaaaaaaaaaaaaaaaaaaaaaaaaaaaaaaaaaaaaaaaaaaaaaaaaaaaaaaaaaaaaaaaaaaaaaaaaaaaaaaaaaaaaaaaaaa

SEQ ID NO: 41136 - RNA, 1785 nt, Artificial Sequence
  mRNA product Design b-4 (A100) comprising derived and/or modified sequence from LASV(Lassa virus/H.sapiens-wt/NGA/2016/ISTH_0009;Clade II)__AVO03571__GPCmut12 (opt1)
aggagagucccgcagucggcguccagcggcucugcuuguucgugugugugucguugcaggccuuauucaagcuuaccaugggccagaucaucaccuucuuccaggaggugccccacgucaucgaggaggugaugaacaucgugcugaucgcccucagccugcuggccauccucaaggggaucuacaacgucgcgaccugcggccugcuggggcucguguccuuccugcugcucugcggccgcagcugcuccacgaccuacaaggggguguacgagcugcagacccuggagcucgacauggccagccugaacaugugcaugccgcuguccugcaccaagaacaacagccaccacuacaucauggucggcaacgagacgggccucgagcugacccugaccaacaccuccaucaucaaccacaaguucugcaaccucagcgacgcccacaagaagaaccuguacgaccacgcccugauguccaucaucagcacguuccaccucuccauccccaacuucaaccaguacgaggccaugagcugcgacuucaacgggggccggaucuccgugcaguacaaccugagccacuccuacgcgguggacgccgccaaccacugcgggaccaucgccaacggcguccugcagaccuucaugcgcauggcguggggcgggagcuacaucgcccucgacuccggcaaggggagcugggacugcaucaugaccuccuaccaguaccugaucauccagaacacgaccugggaggaccacugccaguucagccggcccagccccaucggcuaccuggggcuccugucccagcgcacccgggacaucuacaucagccgccggcugcucggcaccuucacguggacccuguccgacagcgagggcaacgagacccccgggggcuacugccugacccgcuggaugcucaucgaggccgagcugaagugcuucgggaacacggccguggccaagugcaacgagaagcacgacgaggaguucugcgacaugcugcggcuguucgacuucugcaagcaggcgauccgccggcugaagaccgaggcccagauguccauccagcugaucaacaaggccgugaacgcccucaucaacgaccagcugaucaugaagaaccaccuccgcgacaucaugggcauccccuacugcaacuacagcaaguacugcuaccucaaccacaccgucaccgggaagacgucccugccccggugcugccuggugagcaacggcuccuaccucaacgagacccacuucagcgacgacaucgagcagcaggccgacaacaugaucaccgagcugcugcagaaggaguacaucgaccgccagggcaagaccccgcuggggcucguggaccuguucgucuucuccacgagcuucuaccugaucuccaucuuccuccaccuggugaagaucccgacccaccggcacaucaccggcaagcccugccccaagccccaccgccugaaccacauggggaucugcagcugcggccucuacaaccacccgggggugcccgucaaguggaagcggugaggacuaguaauaaggaaacuguaugaaugucugugggcaggaagugaagagauccuucuguaaagguuuuuggaauuaugucugcugaauaauaaacuuuuuugaaauaauaaaucugguagaaaaaugagaucuaaaaaaaaaaaaaaaaaaaaaaaaaaaaaaaaaaaaaaaaaaaaaaaaaaaaaaaaaaaaaaaaaaaaaaaaaaaaaaaaaaaaaaaaaaaaaaaaaaaa

SEQ ID NO: 41137 - RNA, 1785 nt, Artificial Sequence
  mRNA product Design b-4 (A100) comprising derived and/or modified sequence from LASV(Lassa virus/H.sapiens-wt/NGA/2016/ISTH_0017;Clade II)__AVO03567__GPCmut12 (opt1)
aggagagucccgcagucggcguccagcggcucugcuuguucgugugugugucguugcaggccuuauucaagcuuaccaugggccagaucaucaccuucuuccaggaggugccccacgucaucgaggaggugaugaacaucgugcugaucgcccucagccugcuggccauccucaaggggaucuacaacgucgcgaccugcggccuguucgggcugguguccuuccuccugcugugcggccgcagcugcuccacgaccuacaaggggguguacgagcuccagacccuggagcuggacauggccagccucaacaugugcaugccgcuguccugcaccaagaacaacagccaccacuacaucauggucggcaacgagacgggccuggagcucacccugaccaacaccuccaucaucaaccacaaguucugcaaccugagcgacgcccacaagaagaaccucuacgaccacgcccugauguccaucaucagcacguuccaccuguccauccccaacuucaaccaguacgaggccaugagcugcgacuucaacgggggcaagaucuccgugcaguacaaccucagccacaccuacgcgaucgacgccgccaaccacugcgggaccaucgccaacggcgugcugcagaccuucaugcggauggcguggggcggguccuacaucgcccuggacagcggcaagggguccugggacugcaucaugacgagcuaccaguaccucaucauccagaacaccaccugggaggaccacugccaguucucccgccccagccccaucggcuaccuggggcugcucagccagcggacccgcgacaucuacaucucccggcgccugcugggcacguucaccuggacccucagcgacuccgagggcaacgagacccccgggggcuacugccugacgcgguggaugcugaucgaggccgagcucaagugcuucgggaacaccgccgucgccaagugcaacgagaagcacgacgaggaguucugcgacaugcugcgccuguucgacuucugcaagcaggcgauccggcgccucaagaccgaggcccagaugagcauccagcugaucaacaaggccgugaacgcccugaucaacgaccagcucaucaugaagaaccaccuccgggacaucaugggcaucccguacugcaacuacuccaaguacugcuaccugaaccacaccgugacggggaagaccagccugccccgcugcugccuggucuccaacggcagcuaccugaacgagacccacuucuccgacgacaucgagcagcaggccgacaacaugaucaccgagcuccugcagaaggaguacauggaccggcagggcaagacgccccuggggcugguggaccucuucguguucagcaccuccuucuaccugaucagcaucuuccugcaccucguccgcaucccgacccaccggcacgugaucggcaagcccugccccaagccccaccgccugaaccacauggggaucugcuccugcggccuguacaagcacccgggggugcccgucaaguggaagcggugaggacuaguaauaaggaaacuguaugaaugucugugggcaggaagugaagagauccuucuguaaagguuuuuggaauuaugucugcugaauaauaaacuuuuuugaaauaauaaaucugguagaaaaaugagaucuaaaaaaaaaaaaaaaaaaaaaaaaaaaaaaaaaaaaaaaaaaaaaaaaaaaaaaaaaaaaaaaaaaaaaaaaaaaaaaaaaaaaaaaaaaaaaaaaaaaa

SEQ ID NO: 41138 - RNA, 1785 nt, Artificial Sequence
  mRNA product Design b-4 (A100) comprising derived and/or modified sequence from LASV(Lassa virus/H.sapiens-wt/NGA/2018/ISTH_0959;Clade II)__AVV65099__GPCmut12 (opt1)
aggagagucccgcagucggcguccagcggcucugcuuguucgugugugugucguugcaggccuuauucaagcuuaccaugggccagaucaucaccuucuuccaggaggugccccacgucaucgaggaggugaugaacaucgugcugaucgcccucagccugcuggccauccucaaggggaucuacaacgucgugaccugcggccuguucgggcugguguccuuccuccugcugugcggccgcagcugcuccacgaccuacaagggggucuacgagcuccagacccuggagcuggacauggcgagccucaacaugugcaugccgcuguccugcaccaagaacaacagccaccacuacaucauggugggcaacgagacgggccuggagcucacccugaccaacaccuccaucaucaaccacaaguucugcaaccugagcgacgcccacaagaagaaccucuacgaccacgcccugauguccaucaucagcacguuccaccuguccauccccaacuucaaccaguacgaggccaugagcugcgacuucaacgggggcaagaucuccgugcaguacaaccucagccacgccuacgcgaucgacgccgccaaccacugcgggaccaucgccaacggcguccugcagaccuucaugcggauggcguggggcggguccuacaucgcccuggacagcggcaagggguccugggacugcaucaugaccagcuaccaguaccucaucauccagaacacgaccugggaggaccacugccaguucucccgccccagccccaucggcuaccuggggcugcucagccagcggacccgcgacaucuacaucucccggcgccugcugggcaccuucacguggacccucagcgacuccgagggcaacgagacccccgggggcuacugccugacccgguggaugcugaucgaggccgagcucaagugcuucgggaacacggccguggccaagugcaacgagaagcacgacgaggaguucugcgacaugcugcgccuguucgacuucugcaagcaggcgauccggcgccucaagaccgaggcccagaugagcauccagcugaucaacaaggccgugaacgcccugaucaacgaccagcucaucaugaagaaccaccuccgggacaucaugggcauccccuacugcaacuacuccaaguacugcuaccugaaccacaccgucaccgggaagacgagccugccccgcugcugccugguguccaacggcagcuaccugaacgagacccacuucuccgacgacaucgagcagcaggccgacaacaugaucaccgagcuccugcagaaggaguacaucgaccggcagggcaagaccccgcuggggcugguggaccucuucgucuucagcacguccuucuaccugaucagcaucuuccugcaccucgugaagaucccgacccaccgccacgugaucggcaagcccugccccaagccccaccggcugaaccacauggggaucugcuccugcggccuguacaagcacccggggguccccgugaaguggaagcgcugaggacuaguaauaaggaaacuguaugaaugucugugggcaggaagugaagagauccuucuguaaagguuuuuggaauuaugucugcugaauaauaaacuuuuuugaaauaauaaaucugguagaaaaaugagaucuaaaaaaaaaaaaaaaaaaaaaaaaaaaaaaaaaaaaaaaaaaaaaaaaaaaaaaaaaaaaaaaaaaaaaaaaaaaaaaaaaaaaaaaaaaaaaaaaaaaa

SEQ ID NO: 41139 - RNA, 1785 nt, Artificial Sequence
  mRNA product Design b-4 (A100) comprising derived and/or modified sequence from LASV(LASV003-NIG-2008;Clade II)__AIT17580__GPCmut12 (opt1)
aggagagucccgcagucggcguccagcggcucugcuuguucgugugugugucguugcaggccuuauucaagcuuaccaugggccagaucaucaccuucuuccaggaggugccccacgucaucgaggaggugaugaacaucgugcugaucgcccucagccugcuggccauccucaaggggaucuacaacgucgcgaccugcggccuguucgggcugguguccuuccuccugcugugcggccgcagcugcuccacgaccuacaaggggguguacgagcuccagacccuggagcuggacauggccagccucaacaugugcaugccgcuguccugcaccaagaacaacagccaccacuacaucauggucggcaacgagacgggccuggagcucacccugaccaacaccuccaucaucaaccacaaguucugcaaccugagcgacgcccacaagaagaaccucuacgaccacgcccugauguccaucaucagcacguuccaccuguccauccccaacuucaaccaguacgaggccaugagcugcgacuucaacgggggcaagaucuccgugcaguacaaccucagccacaccuacgcgguggacgccgccaaccacugcgggaccaucgccaacggcguccugcagaccuucaugcggauggcguggggcggguccuacaucgcccuggacagcggcaagggguccugggacugcaucaugacgagcuaccaguaccucaucauccagaacaccaccugggaggaccacugccaguucucccgccccagccccaucggcuaccuggggcugcucagccagcggacccgcgacaucuacaucucccggcgccugcugggcacguucaccuggacccucagcgacuccgagagcaacgagaccccgggcggguacugccugacgcgguggaugcugaucgaggccgagcucaagugcuucggcaacaccgccguggccaagugcaacgagaagcacgacgaggaguucugcgacaugcugcgccuguucgacuucugcaagcaggcgauccggcgccucaaggccgaggcccagauguccauccagcugaucaacaaggccgugaacgcccugaucaacgaccagcucaucaugaagaaccaccuccgggacaucauggggauccccuacugcaacuacagcaaguacugcuaccugaaccacaccgucaccggccgcacgucccugccccggugcugccuggugagcaacggguccuaccugaacgagacccacuucagcgacgacaucgagcagcaggcggacaacaugaucaccgagcuccugcagaaggaguacauggaccgccagggcaagacgccccugggccugguggaccucuucgucuucuccaccagcuucuaccugaucuccaucuuccugcaccucgugaagaucccgacccaccggcacgugaucgggaagcccugccccaagccccaccgccugaaccacaugggcaucugcagcugcgggcuguacaagcacccgggcguccccgugaaguggaagcggugaggacuaguaauaaggaaacuguaugaaugucugugggcaggaagugaagagauccuucuguaaagguuuuuggaauuaugucugcugaauaauaaacuuuuuugaaauaauaaaucugguagaaaaaugagaucuaaaaaaaaaaaaaaaaaaaaaaaaaaaaaaaaaaaaaaaaaaaaaaaaaaaaaaaaaaaaaaaaaaaaaaaaaaaaaaaaaaaaaaaaaaaaaaaaaaaa

SEQ ID NO: 41140 - RNA, 1785 nt, Artificial Sequence
  mRNA product Design b-4 (A100) comprising derived and/or modified sequence from LASV(LASV035-NIG-2009;Clade II)__AIT17588__GPCmut12 (opt1)
aggagagucccgcagucggcguccagcggcucugcuuguucgugugugugucguugcaggccuuauucaagcuuaccaugggccagaucaucaccuucuuccaggaggugccccacgucaucgaggaggugaugaacaucgugcugaucgcccucagccugcuggccauccucaaggggaucuacaacgucgcgaccugcggccuguucgggcugguguccuuccuccugcugugcggccgcagcugcuccacgaccuacaaggggguguacgagcuccagacccuggagcuggacauggccagccucaacaugugcaugccgcuguccugcaccaagaacaacagccaccacuacaucauggucggcaacgagacgggccuggagcucacccugaccaacaccuccaucaucaaccacaaguucugcaaccugagcgacgcccacaagaagaaccucuacgaccacgcccugauguccaucaucagcacguuccaccuguccauccccaacuucaaccaguacgaggccaugagcugcgacuucaacgggggcaagaucuccgugcaguacaaccucagccacgcguacgccguggacgccgccaaccacugcgggaccaucgcgaacggcguccugcagaccuucaugcggauggccuggggcggguccuacaucgcccuggacagcggcaagggguccugggacugcaucaugaccagcuaccaguaccucaucauccagaacacgaccugggaggaccacugccaguucucccgccccagccccaucggcuaccuggggcugcucagccagcggacccgcgacaucuacaucucccggcgccugcugggcaccuucacguggacccucagcgacuccgagggcaacgagacccccgggggcuacugccugacccgguggaugcugaucgaggccgagcucaagugcuucgggaacacggccguggcgaagugcaacgagaagcacgacgaggaguucugcgacaugcugcgccuguucgacuucugcaagcaggccauccggcgccucaaggccgaggcccagaugagcauccagcugaucaacaaggccgugaacgcgcugaucaacgaccagcucaucaugaagaaccaccuccgggacaucaugggcauccccuacugcaacuacuccaaguacugcuaccugaaccacaccgucaccgggaagaccagccugccccgcugcugccugguguccaacggcagcuaccugaacgagacgcacuucuccgacgacaucgagcagcaggccgacaacaugaucaccgagcuccugcagaaggaguacaucgaccggcagggcaagaccccgcuggggcugguggaccucuucgucuucagcaccuccuucuaccugaucagcaucuuccugcaccucgugaagaucccgacgcaccgccacgugaucggcaagcccugccccaagccccaccggcugaaccacauggggaucugcuccugcggccuguacaagcacccggggguccccgugaaguggaagcgcugaggacuaguaauaaggaaacuguaugaaugucugugggcaggaagugaagagauccuucuguaaagguuuuuggaauuaugucugcugaauaauaaacuuuuuugaaauaauaaaucugguagaaaaaugagaucuaaaaaaaaaaaaaaaaaaaaaaaaaaaaaaaaaaaaaaaaaaaaaaaaaaaaaaaaaaaaaaaaaaaaaaaaaaaaaaaaaaaaaaaaaaaaaaaaaaaa

SEQ ID NO: 41141 - RNA, 1785 nt, Artificial Sequence
  mRNA product Design b-4 (A100) comprising derived and/or modified sequence from LASV(LASV1000-NIG-2009;Clade II)__AIT17782__GPCmut12 (opt1)
aggagagucccgcagucggcguccagcggcucugcuuguucgugugugugucguugcaggccuuauucaagcuuaccaugggccagaucaucaccuucuuccaggaggugccccacgucaucgaggaggugaugaacaucgugcugaucgcccucagccugcuggccauccucaaggggaucuacaacgucgcgaccugcggccuguucgggcugguguccuuccuccugcugugcggccgcagcugcuccacgaccuacaaggggguguacgagcuccagacccuggagcuggacauggccagccucaacaugugcaugccgcuguccugcaccaagaacaacagccaccacuacaucauggucggcaacgagacgggccuggagcucacccugaccaacaccuccaucaucaaccacaaguucugcaaccugagcgacgcccacaagaagaaccucuacgaccacgcccugauguccaucaucagcacguuccaccuguccauccccaacuucaaccaguacgaggccaugagcugcgacuucaacgggggcaagaucuccgugcaguacaaccucagccacaccuacgcgguggacgccgccaaccacugcgggaccaucgccaacggcguccugcagaccuucaugcggauggcguggggcggguccuacaucgcccuggacagcggcaagggguccugggacugcaucaugacgagcuaccaguaccucaucauccagaacaccaccugggaggaccacugccaguucucccgccccagccccaucggcuaccuggggcugcucagccagcggacccgcgacaucuacaucucccggcgccugcugggcacguucaccuggacccucagcgacuccgagggcaacgagacccccgggggcuacugccugacgcgguggaugcugaucgaggccgagcucaagugcuucgggaacaccgccguggccaagugcaacgagaagcacgacgaggaguucugcgacaugcugcgccuguucgacuucugcaagcaggcgaucaagcggcucaagaccgaggcccagaugagcauccagcugaucaacaaggccgugaacgcccugaucaacgaccagcucaucaugaagaaccaccuccgcgacaucaugggcaucccguacugcaacuacuccaaguacugcuaccugaaccacaccgucacggggaagaccagccugccccggugcugccugguguccaacggcagcuaccugaacgagacccacuucuccgacgacaucgagcagcaggccgacaacaugaucaccgagcuccugcagaaggaguacaucgaccgccagggcaagacgccccuggggcugguggaccucuucgucuucagcaccuccuucuaccugaucagcaucuuccugcaccucgugaagaucccgacccaccggcacguggucggcaagcccugccccaagccccaccgccugaaccacauggggaucugcuccugcggccuguacaagcacccgggggugcccgugaaguggaagcggugaggacuaguaauaaggaaacuguaugaaugucugugggcaggaagugaagagauccuucuguaaagguuuuuggaauuaugucugcugaauaauaaacuuuuuugaaauaauaaaucugguagaaaaaugagaucuaaaaaaaaaaaaaaaaaaaaaaaaaaaaaaaaaaaaaaaaaaaaaaaaaaaaaaaaaaaaaaaaaaaaaaaaaaaaaaaaaaaaaaaaaaaaaaaaaaaa

SEQ ID NO: 41142 - RNA, 1785 nt, Artificial Sequence
  mRNA product Design b-4 (A100) comprising derived and/or modified sequence from LASV(LASV221-NIG-2010;Clade II)__AIT17624__GPCmut12 (opt1)
aggagagucccgcagucggcguccagcggcucugcuuguucgugugugugucguugcaggccuuauucaagcuuaccaugggccagaucaucaccuucuuccaggaggugccccacgucaucgaggaggugaugaacaucgugcugaucgcccucagccugcuggccauccucaaggggaucuacaacgucgcgaccugcggccuguucgggcugguguccuuccuccugcugugcggccgcagcugcuccacgaccuacaaggggguguacgagcuccagacccuggagcuggacauggccagccucaacaugugcaugccgcuguccugcaccaagaacaacagccaccacuacaucauggucggcaacgagacgggccuggagcucacccugaccaacaccuccaucaucaaccacaaguucugcaaccugagcgacgcccacaagaagaaccucuacgaccacgcccugauguccaucaucagcacguuccaccuguccauccccaacuucaaccaguacgaggccaugagcugcgacuucaacgggggcaagaucuccgugcaguacaaccucagccacaccuacgcgaucgacgccgccaaccacugcgggaccaucgccaacggcgugcugcagaccuucaugcggauggcguggggcggguccuacaucgcccuggacagcggcaagggguccugggacugcaucaugacgagcuaccaguaccucaucauccagaacaccaccugggaggaccacugccaguucucccgccccagccccaucggcuaccuggggcugcucagccagcggacccgcgacaucuacaucucccggcgccugcugggcacguucaccuggacccucagcgacuccgagggcaacgagacccccgggggcuacugccugacgcgguggaugcugaucgaggccgagcucaagugcuucgggaacaccgccgucgccaagugcaacgagaagcacgacgaggaguucugcgacaugcugcgccuguucgacuucugcaagcaggcgauccggcgccucaagaccgaggcccagaugagcauccagcugaucaacaaggccgugaacgcccugaucaacgaccagcucaucaugaagaaccaccuccgggacaucaugggcaucccguacugcaacuacuccaaguacugcuaccugaaccacaccgugacggggaagaccagccugccccgcugcugccuggucuccaacggcagcuaccugaacgagacccacuucuccgacgacaucgagcagcaggccgacaacaugaucaccgagaugcuccagaaggaguacauggaccggcagggcaagacgccccuggggcugguggaccuguucguguucagcaccuccuucuaccucaucagcaucuuccugcaccuggucaagaucccgacccaccgccacgugaucggcaagcccugccccaagccccaccggcucaaccacauggggaucugcuccugcggccuguacaagcacccgggggugcccgucaaguggaagcgcugaggacuaguaauaaggaaacuguaugaaugucugugggcaggaagugaagagauccuucuguaaagguuuuuggaauuaugucugcugaauaauaaacuuuuuugaaauaauaaaucugguagaaaaaugagaucuaaaaaaaaaaaaaaaaaaaaaaaaaaaaaaaaaaaaaaaaaaaaaaaaaaaaaaaaaaaaaaaaaaaaaaaaaaaaaaaaaaaaaaaaaaaaaaaaaaaa

SEQ ID NO: 41143 - RNA, 1785 nt, Artificial Sequence
  mRNA product Design b-4 (A100) comprising derived and/or modified sequence from LASV(LASV237-NIG-2010;Clade II)__AIT17638__GPCmut12 (opt1)
aggagagucccgcagucggcguccagcggcucugcuuguucgugugugugucguugcaggccuuauucaagcuuaccaugggccagaucaucaccuucuuccaggaggugccccacgucaucgaggaggugaugaacaucgugcugaucgcccucagccugcuggccauccucaaggggaucuacaacgucgcgaccugcggccuguucgggcugguguccuuccuccugcugugcggccgcagcugcuccacgaccuacaaggggguguacgagcuccagacccuggagcuggacauggccagccucaacaugugcaugccgcuguccugcaccaagaacaacagccaccacuacaucauggucggcaacgagacgggccuggagcucacccugaccaacaccuccaucaucaaccacaaguucugcaaccugagcgacgcccacaagaaggaccucuacgaccacgcccugauguccaucaucagcacguuccaccuguccauccccaacuucaaccaguacgaggccaugagcugcgacuucaacgggggcaagaucuccgugcaguacaaccucagccacaccuacgcgguggacgccgccaaccacugcgggaccaucgccaacggcguccugcagaccuucaugcggauggcguggggcggguccuacaucgcccuggacagcggcaagggguccugggacugcaucaugacgagcuaccaguaccucaucauccagaacaccaccugggaggaccacugccaguucucccgccccagccccaucggcuaccuggggcugcucagccagcggacccgcgacaucuacaucucccggcgccugcugggcacguucaccuggacccucagcgacuccgagggcaacgagacccccgggggcuacugccugacgcgguggaugcugaucgaggccgagcucaagugcuucgggaacaccgccguggccaagugcaacgagaagcacgacgaggaguucugcgacaugcugcgccuguucgacuucugcaagcaggcgauccggcgccucaagaccgaggcccagaugagcauccagcugaucaacaaggccgugaacgcccugaucaacgaccagcucaucaugaagaaccaccuccgggacaucaugggcaucccguacugcaacuacuccaaguacugcuaccugaaccacaccgucacggggaagaccagccugccccgcugcugccugguguccaacggcagcuaccugaacgagacccacuucuccgacgacaucgagcagcaggccgacaacaugaucaccgagcuccugcagaaggaguacauggaccggcagggcaagacgccccuggggcugguggaccucuucgucuucagcaccuccuucuaccugaucagcaucuuccugcaccucaucaagaucccgacccaccgccacaucaccggcaagcccugccccaagccccaccggcugaaccacauggggaucugcuccugcggccuguacaagcacccgggggugcccgugaaguggaagcgcugaggacuaguaauaaggaaacuguaugaaugucugugggcaggaagugaagagauccuucuguaaagguuuuuggaauuaugucugcugaauaauaaacuuuuuugaaauaauaaaucugguagaaaaaugagaucuaaaaaaaaaaaaaaaaaaaaaaaaaaaaaaaaaaaaaaaaaaaaaaaaaaaaaaaaaaaaaaaaaaaaaaaaaaaaaaaaaaaaaaaaaaaaaaaaaaaa

SEQ ID NO: 41144 - RNA, 1785 nt, Artificial Sequence
  mRNA product Design b-4 (A100) comprising derived and/or modified sequence from LASV(LASV253-NIG-2011;Clade II)__AIT17670__GPCmut12 (opt1)
aggagagucccgcagucggcguccagcggcucugcuuguucgugugugugucguugcaggccuuauucaagcuuaccaugggccagaucaucaccuucuuccaggaggugccccacgucaucgaggaggugaugaacaucgugcugaucgcccucagccugcuggccauccucaaggggaucuacaacgucgcgaccugcggccuguucgggcugguguccuuccuccugcugugcggccgcagcugcuccacgaccuacaaggggguguacgagcuccagacccuggagcuggacauggccagccucaacaugugcaugccgcuguccugcaccaagaacaacagccaccacuacaucauggucggcaacgagacgggccuggagcucacccugaccaacaccuccaucaucaaccacaaguucugcaaccugagcgacgcccacaagaagaaccucuacgaccacgcccugauguccaucaucagcacguuccaccuguccauccccaacuucaaccaguacgaggccaugagcugcgacuucaacgggggcaagaucuccgugcaguacaaccucagccacaccuacgcgguggacgccgccaaccacugcgggaccaucgccaacggcguccugcagaccuucaugcggauggcguggggcggguccuacaucgcccuggacagcggcaagggguccugggacugcaucaugacgagcuaccaguaccucaucauccagaacaccaccugggaggaccacugccaguucucccgccccagccccaucggcuaccuggggcugcucagccagcggacccgcgacaucuacaucucccggcgccugcugggcacguucaccuggacccucagcgacuccgagggcaacgagacccccgggggcuacugccugacgcgguggaugcugaucgaggccgagcucaagugcuucgggaacaccgccguggccaagugcaacgagaagcacgacgaggaguucugcgacaugcugcgccuguucgacuucugcaagcaggcgauccggcgccucaaggccgaggcccagaugagcauccagcugaucaacaaggccgugaacgcccugaucaacgaccagcucaucaugaagaaccaccuccgggacaucaugggcauccccuacugcaacuacuccaaguacugcuaccugaaccacaccgucaccgggcgcacgagccugccccggugcugccugguguccaacggcagcuaccugaacgagacccacuucuccgacgacaucgagcagcaggcggacaacaugaucaccgagcuccugcagaaggaguacaucgaccgccagggcaagaccccgcuggggcugguggaccucuucgucuucagcacguccuucuaccugaucagcaucuuccugcaccucgugaagaucccgacccaccggcacaucaucggcaagcccugccccaagccccaccgccugaaccacauggggaucugcuccugcggccuguacaagcacccgggggugcccgucaaguggaagcggugaggacuaguaauaaggaaacuguaugaaugucugugggcaggaagugaagagauccuucuguaaagguuuuuggaauuaugucugcugaauaauaaacuuuuuugaaauaauaaaucugguagaaaaaugagaucuaaaaaaaaaaaaaaaaaaaaaaaaaaaaaaaaaaaaaaaaaaaaaaaaaaaaaaaaaaaaaaaaaaaaaaaaaaaaaaaaaaaaaaaaaaaaaaaaaaaa

SEQ ID NO: 41145 - RNA, 1785 nt, Artificial Sequence
  mRNA product Design b-4 (A100) comprising derived and/or modified sequence from LASV(LASV254-NIG-2011;Clade II)__AIT17674__GPCmut12 (opt1)
aggagagucccgcagucggcguccagcggcucugcuuguucgugugugugucguugcaggccuuauucaagcuuaccaugggccagaucaucaccuucuuccaggaggugccccacgucaucgaggaggugaugaacaucgugcugaucgcccucagccugcuggccauccucaaggggaucuacaacgucgcgaccugcggccuguucgggcugguguccuuccuccugcugugcggccgcagcugcuccacgaccuacaaggggguguacgagcuccagacccuggagcuggacaugaccaaccucaacaugugcaugccgcugagcugcacgaagaacaacucccaccacuacaucauggucggcaacgagaccggccuggagcucacccugaccaacacgagcaucaucaaccacaaguucugcaaccuguccgacgcccacaagaagaaccucuacaaccacgcccugaugagcaucaucuccaccuuccaccugagcauccccaacuucaaccaguacgaggccauguccugcgacuucaacgggggcaagaucagcgugcaguacaaccucucccacagcuacgccguggacgcggccaaccacugcgggaccaucgccaacggcguccugcagaccuucaugcggauggccuggggcggguccuacaucgcgcuggacagcggcaaggggaacugggacugcaucaugacguccuaccaguaccucaucauccagaacaccaccugggaggaccacugccaguucagccgccccucccccaucggcuaccuggggcugcucagccagcggacccgcgacaucuacaucagccggcgccugcugggcacguucaccuggacccucuccgacagcgagggcaacgagacccccgggggcuacugccugacgcgguggaugcugaucgaggccgagcucaagugcuucgggaacaccgccguggccaagugcaacgagaagcacgacgaggaguucugcgacaugcugcgccuguucgacuucugcaagcaggccauccggcgccucaagaccgaggcgcaggccaacauccagcugaucaacaaggccgugaacgcccugaucaacgaccagcucaucaugaagaaccaccuccgggacaucaugggcaucccguacugcaacuacuccaaguacugcuaccugaaccacaccgucacggggaagaccagccugccccgcugcugccugguguccaacggcagcuaccugaacgagacccacuucuccgacgacaucgagcagcaggccgacaacaugaucaccgagcuccugcagaaggaguacauggaccggcagggcaagacgccccuggggcugguggaccucuucgucuucagcaccuccuucuaccugaucagcaucuuccugcaccucgugaagaucccgacccaccgccacgugaucggcaagcccugccccaagccccaccggcugaaccacauggggaucugcuccugcggccuguacaagcacccggggguccccgugaaguggaagcgcugaggacuaguaauaaggaaacuguaugaaugucugugggcaggaagugaagagauccuucuguaaagguuuuuggaauuaugucugcugaauaauaaacuuuuuugaaauaauaaaucugguagaaaaaugagaucuaaaaaaaaaaaaaaaaaaaaaaaaaaaaaaaaaaaaaaaaaaaaaaaaaaaaaaaaaaaaaaaaaaaaaaaaaaaaaaaaaaaaaaaaaaaaaaaaaaaa

SEQ ID NO: 41146 - RNA, 1785 nt, Artificial Sequence
  mRNA product Design b-4 (A100) comprising derived and/or modified sequence from LASV(Nig08-A19;Clade III)__ADU56618__GPCmut12 (opt1)
aggagagucccgcagucggcguccagcggcucugcuuguucgugugugugucguugcaggccuuauucaagcuuaccaugggccagaucgugaccuucuuccaggaggucccccacgugaucgaggaggugaugaacaucguccugaucgcccucagcauccuggccauccugaaggggcucuacaacaucgcgaccugcggccugaucgggcuggugacguuccuccugcuguccggccgcagcugcuccaugaccuacaaggggguguacgagcuccagacccuggagcugaacaugaacacccucaacaugugcaugccgcugagcugcacgaagaacaacucccaccacuacaucauggucggcaacgagaccggccuggagcucacccugaccaacacgagccugcuccaccacaaguucugcaaccuguccgacgcccacaagaagaaccuguacgaccacacccucaugagcaucaucuccaccuuccaccugagcauccccaacuucaaccaguacgaggccauguccugcgacuucaacgggggcaagaucaccgugcaguacaaccugagccacuccuacgccaucgacgccgcgaaccacugcgggacgguggccaacggcguccuccagaccuucaugcggauggccuggggcgggagcuacaucgcccuggacuccggccgcgggaagugggacugcaucaugaccagcuaccaguaccugaucauccagaacaccacgugggaggaccacugccaguucucccggcccagccccaucggcuaccucgggcugcugucccagcgcacccgggacaucuacaucagccgccggcuccugggcaccuucaccuggacgcugagcgacuccgagggcaacgagacccccgggggcuacugccucacccgcuggaugcugaucgaggcggagcugaagugcuucgggaacaccgccguggccaagugcaacgagaagcacgacgaggaguucugcgacaugcuccggcuguucgacuucugcaagcaggccauccgccggcugaaggccgaggcgcagaugagcauccagcucaucaacaaggccgugaacgcccugaucaacgaccagcugaucaugaagaaccaccuccgcgacaucaugggcauccccuacugcaacuacuccaaguacugcuaccugaaccacacgagcaccgggcggaccucccugccccgcugcugccucgucagcaacggcuccuaccugaacgagacccacuucagcgacgacaucgagcagcaggccgacaacaugaucacggagaugcugcagaaggaguaccuggaccggcagggcaagaccccgcucgggcugguggaccuguucguguucuccaccagcuucuaccucaucuccaucuuccugcaccuggucaagaucccgacccaccgccacaucgugggcaagcccugccccaagccccaccggcucaaccacauggggaucugcagcugcggccuguacaagcagccgggggugcccguccgcuggaagcggugaggacuaguaauaaggaaacuguaugaaugucugugggcaggaagugaagagauccuucuguaaagguuuuuggaauuaugucugcugaauaauaaacuuuuuugaaauaauaaaucugguagaaaaaugagaucuaaaaaaaaaaaaaaaaaaaaaaaaaaaaaaaaaaaaaaaaaaaaaaaaaaaaaaaaaaaaaaaaaaaaaaaaaaaaaaaaaaaaaaaaaaaaaaaaaaaa

SEQ ID NO: 41147 - RNA, 1788 nt, Artificial Sequence
  mRNA product Design b-4 (A100) comprising derived and/or modified sequence from LASV(G1180-SLE-2010;Clade IV)__AIT17168__GPCmut12 (opt1)
aggagagucccgcagucggcguccagcggcucugcuuguucgugugugugucguugcaggccuuauucaagcuuaccaugggccagaucgugaccuucuuccaggaggucccccacgugaucgaggaggugaugaacaucguccugaucgcccucagcauccuggccgugcugaaggggcucuacaacuucgcgaccugcggccugguggggcugcucacguuccugcugcucugcggccgcuccugcaccgccagccgguacaagggggucuacgagcugcagacccuggagcucaacauggagacccugaacaugugcaugccgcuguccugcacgaagaacaacagccaccacuacaucauggugggcaacgagaccggccucgagcugacccugaccaacacguccaucaucaaccacaaguucugcaaccucagcgacgcccacaagaagaaccuguacgaccacgcccugauguccaucaucagcaccuuccaccucuccauccccaacuucaaccaguacgaggccaugagcugcgacuucaacgggggcaagaucuccgugcaguacaaccugagccacuccuacgcgggggacgccgccaaccacugcggcaccgucgccaacggggugcugcagaccuucaugcgcauggcguggggcggcagcuacaucgcccucgacuccgggcacggcagcugggacugcaucaugacguccuaccaguaccugaucauccagaacaccaccugggaggaccacugccaguucagccggcccucccccaucggguaccugggccuccugagccagcgcacccgggacaucuacaucagccgccggcugcucggcacguucaccuggacccuguccgacagcgaggggaaggacaccccgggcggguacugccugacgcgcuggaugcucaucgaggccgagcugaagugcuucggcaacaccgccguggccaagugcaacgagaagcacgacgaggaguucugcgacaugcugcggcuguucgacuucugcaagcaggcgauccagcgccugaaggccgaggcccagauguccauccagcugaucaacaaggccgucaacgcccucaucaacgaccagcugaucaugaagaaccaccuccgggacaucauggggauccccuacugcaacuacagcaaguacugcuaccucaaccacaccaccacgggcaagaccucccugcccaagugcugccuggugagcaacggcuccuaccucaacgagacccacuucagcgacgacaucgagcagcaggcggacaacaugaucaccgagaugcugcagaaggaguacauggagcgccaggggaagacgccccugggccugguggaccucuucgucuucuccaccagcuucuaccugaucuccaucuuccugcaccucgugaagaucccgacccaccggcacaucgugggcaagagcugccccaagccccaccgccugaaccacauggggaucugcuccugcgggcuguacaagcagcccggcgucccggugaaguggaagcggugaggacuaguaauaaggaaacuguaugaaugucugugggcaggaagugaagagauccuucuguaaagguuuuuggaauuaugucugcugaauaauaaacuuuuuugaaauaauaaaucugguagaaaaaugagaucuaaaaaaaaaaaaaaaaaaaaaaaaaaaaaaaaaaaaaaaaaaaaaaaaaaaaaaaaaaaaaaaaaaaaaaaaaaaaaaaaaaaaaaaaaaaaaaaaaaaa

SEQ ID NO: 41148 - RNA, 1788 nt, Artificial Sequence
  mRNA product Design b-4 (A100) comprising derived and/or modified sequence from LASV(G1442-SLE-2011;Clade IV)__AIT17180__GPCmut12 (opt1)
aggagagucccgcagucggcguccagcggcucugcuuguucgugugugugucguugcaggccuuauucaagcuuaccaugggccagaucgugaccuucuuccaggaggucccccacgugaucgaggaggugaugaacaucguccugaucgcccucagcauccuggccgugcugaaggggcucuacaacguggcgaccugcggccugaucgggcuggucaccuuccuccugcugugcggccgcuccugcaccaccacccucuacaaggggguguacgagcugcagacgcuggagcucaacauggagacccugaacaugugcaugccgcugagcugcaccaagaacaacucccaccacuacauccgggugggcaacgagaccggccucgagcugacgcugaccaacaccagcaucaucaaccacaaguucugcaaccucuccgacgcccacaagaagaaccuguacgaccacgcccugaugagcaucaucuccaccuuccaccucagcauccccaacuucaaccaguacgaggccauguccugcgacuucaacgggggcaagaucagcguccaguacaaccugucccacagcuacgccggggacgcggccaaccacugcggcacgguggccaacggggugcugcagaccuucaugcgcauggccuggggcggcuccuacaucgcgcucgacagcgggcggggcaacugggacugcaucaugaccuccuaccaguaccugaucauccagaacaccacgugggacgaccacugccaguucagccgccccucccccaucggguaccugggccuccugagccagcggacccgcgacgucuacaucucccggcgccugcucggcaccuucaccuggacgcugagcgacagcgaggggaaggacaccccgggcggguacugccugacccgguggaugcucaucgaggccgagcugaagugcuucggcaacaccgccguggccaagugcaacgagaagcacgacgaggaguucugcgacaugcugcgccucuucgacuucugcaagcaggccauccagcggcugaaggcggaggcccagauguccauccagcugaucaacaaggccgugaacgcccucaucaacgaccagcugaucaugaagaaccaccuccgcgacaucauggggauccccuacugcaacuacagcaaguacugcuaccugaacaacacggccaccggcaagaccucccugcccaagugcugccugaucagcaacggcuccuaccucaacgagacccacuucagcgacgacaucgagcaggaggcggacaacaugaucacggagaugcugcagaaggaguacauggagcggcaggggaagacgccccugggccuggucgaccucuucguguucuccaccagcuucuaccugaucuccaucuuccugcaccucgugaagaucccgacccaccgccacaucgucggcaagagcugccccaagccccaccggcugaaccacauggggaucugcuccugcgggcuguacaagcagcccggcgugccggugcgcuggaagcggugaggacuaguaauaaggaaacuguaugaaugucugugggcaggaagugaagagauccuucuguaaagguuuuuggaauuaugucugcugaauaauaaacuuuuuugaaauaauaaaucugguagaaaaaugagaucuaaaaaaaaaaaaaaaaaaaaaaaaaaaaaaaaaaaaaaaaaaaaaaaaaaaaaaaaaaaaaaaaaaaaaaaaaaaaaaaaaaaaaaaaaaaaaaaaaaaa

SEQ ID NO: 41149 - RNA, 1788 nt, Artificial Sequence
  mRNA product Design b-4 (A100) comprising derived and/or modified sequence from LASV(G3010-SLE-2013;Clade IV)__AIT17344__GPCmut12 (opt1)
aggagagucccgcagucggcguccagcggcucugcuuguucgugugugugucguugcaggccuuauucaagcuuaccaugggccagaucgugaccuucuuccaggaggucccccacgugaucgaggaggugaugaacaucguccugaucgcccucagcauccuggccgugcugaaggggcucuacaacuucgcgaccugcggccugguggggcuggucacguuccuccugcugugcggccgcuccugcaccaccagccucuacaaggggguguacgagcugcagacccuggagcucaacauggagacgcugaacaugugcaugccgcuguccugcaccaagaacaacagccaccacuacaucauggugggcaacgagaccggccucgagcugacccugacgaacaccuccaucaucaaccacaaguucugcaaccucagcgacgcccacaagaagaaccuguacaaccacgcccugauguccaucaucagcaccuuccaccucuccauccccaacuucaaccaguacgaggccaugagcugcgacuucaacgggggcaagaucuccguccaguacaaccugagccacuccuacgccggggacgcggccagccacugcggcaccguggccaacggggugcugcagacguucaugcggauggccuggggcggcuccuacaucgcgcucgacagcggguacggcaagugggacugcaucaugaccuccuaccaguaccugaucauccagaacaccaccugggaggaccacugccaguucagccgccccucccccaucggguaccugggccuccugagccagcggacgcgcgacaucuacaucagccggcgccugcucggcaccuucaccuggacccuguccgacagcgaggggaaggacacgccgggcggguacugccugacccgguggaugcucaucgaggccgagcugaagugcuucggcaacaccgccgucgccaagugcaacgagaagcacgacgaggaguucugcgacaugcugcgccucuucgacuucugcaagcaggccauccagcggcugaagaccgaggcgcagauguccauccagcugaucaacaaggccgugaacgcccucaucaacgaccagcugaucaugaagaaccaccuccgcgacaucauggggauccccuacugcaacuacagcaaguacugcuaccugaaccacacgaccaccggcaagaccucccugcccaagugcugccuggugagcaacggcuccuaccucaacgagacgcacuucagcgacgacaucgagcagcaggccgacaacaugaucaccgagaugcugcagaaggaguacauggagcggcaggggaagacgccccugggccuggucgaccucuucguguucuccaccagcuucuaccugaucuccaucuuccugcaccucgugaagaucccgacccaccgccacaucgucggcaagagcugccccaagccccaccggcugaaccacauggggaucugcuccugcgggcuguacaagcagcccggcgugccggugcgcuggaagcggugaggacuaguaauaaggaaacuguaugaaugucugugggcaggaagugaagagauccuucuguaaagguuuuuggaauuaugucugcugaauaauaaacuuuuuugaaauaauaaaucugguagaaaaaugagaucuaaaaaaaaaaaaaaaaaaaaaaaaaaaaaaaaaaaaaaaaaaaaaaaaaaaaaaaaaaaaaaaaaaaaaaaaaaaaaaaaaaaaaaaaaaaaaaaaaaaa

SEQ ID NO: 41150 - RNA, 1788 nt, Artificial Sequence
  mRNA product Design b-4 (A100) comprising derived and/or modified sequence from LASV(G502-SLE-2009;Clade IV)__AIT17126__GPCmut12 (opt1)
aggagagucccgcagucggcguccagcggcucugcuuguucgugugugugucguugcaggccuuauucaagcuuaccaugggccagaucgugaccuucuuccaggaggucccccacgugaucgaggaggugaugaacaucguccugaucgcccucagcauccuggccgugcugaaggggcucuacaacuucgcgaccugcggccugguggggcugcucacguuccugcugcucugcggccgcuccugcaccaccgggcuguacaagggcgucuacgagcugcagacccucgagcugaacauggagacgcugaacaugugcaugccgcucagcugcaccaagaacaacucccaccacuacaucauggugggcaacgagaccgggcuggagcugacccucacgaacaccagcaucaucaaccacaaguucugcaaccuguccgacgcccacaagaagaaccuguacgaccacgcccucaugagcaucaucuccaccuuccaccugagcauccccaacuucaaccaguacgaggccauguccugcgacuucaacggcgggaagaucagcgugcaguacaaccugucccacagcuacgccggcgacgcggccgaccacugcgggaccgucgccaacggcgugcuccagacguucaugcggauggccuggggcggguccuacaucgcgcuggacagcggccgcgggcggugggacugcaucaugaccuccuaccaguaccugaucauccagaacaccaccugggaggaccacugccaguucagccgccccucccccaucggcuaccucggccugcugagccagcggacgcgcgacaucuacaucucccggcgccuccuggggaccuucaccuggacccugagcgacagcgagggcaaggacacgcccgggggcuacugccucacccgguggaugcugaucgaggccgagcugaagugcuucgggaacaccgccguggccaagugcaacgagaagcacgacgaggaguucugcgacaugcuccgccuguucgacuucugcaagcaggccauccagcggcugaaggcggaggcccagauguccauccagcucaucaacaaggccgucaacgcccugaucaacgaccagcuggugaugaagaaccaccuccgcgacaucaugggcauccccuacugcaacuacagccgguacugcuaccugaaccacaccacgaccggccgcaccucccugcccaagugcugccucgugagcaacggguccuaccugaacgagacccacuucagcgacgacaucgagcagcaggccgacaacaugaucacggagaugcugcagaaggaguacauggagcggcagggcaagaccccgcuggggcucgucgaccuguucguguucuccaccagcuucuaccugaucuccaucuuccuccaccuggugaagaucccgacccaccgccacaucgucggcaagagcugccccaagccccaccggcugaaccacauggggaucugcuccugcggccucuacaagcagcccggcgugccggugaaguggaagcgcugaggacuaguaauaaggaaacuguaugaaugucugugggcaggaagugaagagauccuucuguaaagguuuuuggaauuaugucugcugaauaauaaacuuuuuugaaauaauaaaucugguagaaaaaugagaucuaaaaaaaaaaaaaaaaaaaaaaaaaaaaaaaaaaaaaaaaaaaaaaaaaaaaaaaaaaaaaaaaaaaaaaaaaaaaaaaaaaaaaaaaaaaaaaaaaaaa

SEQ ID NO: 41151 - RNA, 1788 nt, Artificial Sequence
  mRNA product Design b-4 (A100) comprising derived and/or modified sequence from LASV(G733-SLE-2010;Clade IV)__AIT17154__GPCmut12 (opt1)
aggagagucccgcagucggcguccagcggcucugcuuguucgugugugugucguugcaggccuuauucaagcuuaccaugggccagaucgugaccuucuuccaggaggucccccacgugaucgaggaggugaugaacaucguccugaucgcccucagcauccuggccgugcugaaggggcucuacaacuucgcgaccugcggcaucguggggcuggucuccuuccugcuccugugcggccgcagcugcacgaccucccuguacaaggggguguacgagcuccagacccuggagcugaacauggagacccucaacaugugcaugccgcugagcugcacgaagaacaacucccaccacuacaucauggugggcaacgagaccggccuggagcucacccugaccaacacgagcaucaucaaccacaaguucugcaaccuguccgacgcccacaagaagaaccucuacgaccacgcccugaugagcaucaucuccaccuuccaccugagcauccccaacuucaaccaguacgaggccauguccugcgacuucaacgggggcaagaucagcguccaguacaaccucucccacagcuacgccggggacgcggccaaccacugcggcaccaucgccaacggggugcugcagaccuucaugcggauggccuggggcggcuccuacaucgcgcuggacagcgggcgcgaccggugggacugcaucaugacguccuaccaguaccucaucauccagaacaccaccugggaggaccacugccaguucagccgccccucccccaucggcuaccuggggcugcucagccagcggacccgcgacaucuacaucagccggcgccugcugggcacguucaccuggacccucuccgacagcgagggcaaggacacccccgggggcuacugccugacgcgguggaugcugaucgaggccgagcucaagugcuucgggaacaccgccguggccaagugcaacgagaagcacgacgaggaguucugcgacaugcugcgccuguucgacuucugcaagcaggccauccagcggcucaaggcggaggcccagauguccauccagcugaucaacaaggccgucaacgcccugaucaacgaccagcucaucaugaagaaccaccuccgcgacaucaugggcaucccguacugcaacuacagcaaguacugcuaccugaaccacaccaccacggggaagaccucccugcccaagugcugccuggugagcaacggcuccuaccugaacgagacccacuucagcgacgacaucgagcagcaggccgacaacaugaucaccgagaugcuccagaaggaguacauggagcggcagggcaagacgccccuggggcugguggaccuguucgucuucuccaccagcuucuaccucaucuccaucuuccugcaccuggugaagaucccgacccaccgccacguggucggcaagagcugccccaagccccaccggcucaaccacauggggaucugcuccugcggccuguacgggcagcccggcgugccggugaaguggaagcgcugaggacuaguaauaaggaaacuguaugaaugucugugggcaggaagugaagagauccuucuguaaagguuuuuggaauuaugucugcugaauaauaaacuuuuuugaaauaauaaaucugguagaaaaaugagaucuaaaaaaaaaaaaaaaaaaaaaaaaaaaaaaaaaaaaaaaaaaaaaaaaaaaaaaaaaaaaaaaaaaaaaaaaaaaaaaaaaaaaaaaaaaaaaaaaaaaa

SEQ ID NO: 41152 - RNA, 1788 nt, Artificial Sequence
  mRNA product Design b-4 (A100) comprising derived and/or modified sequence from MOPV/LASV reassortant(IGS-1;Clade IV)__AFY05576__GPCmut12 (opt1)
aggagagucccgcagucggcguccagcggcucugcuuguucgugugugugucguugcaggccuuauucaagcuuaccaugggccagaucgugaccuucuuccaggaggucccccacgugaucgaggaggugaugaacaucguccugaucgcccucagcgugcuggccgugcugaaggggcucuacaacuucgcgaccugcggccuggucgggcuggugaccuuccuccugcugugcggccgcuccugcaccaccagccucuacaaggggguguacgagcugcagacccuggagcucaacauggagacgcugaacaugugcaugccgcuguccugcaccaagaacaacagccaccacuacaucauggucggcaacgagaccggccucgagcugacccugacgaacaccuccaucaucaaccacaaguucugcaaccucagcgacgcccacaagaagaaccuguacgaccacgcccugauguccaucaucagcaccuuccaccucuccauccccaacuucaaccaguacgaggccaugagcugcgacuucaacgggggcaagaucuccgugcaguacaaccugagccacuccuacgccggggacgcggccaaccacugcggcaccguggccaacgggguccugcagacguucaugcggauggccuggggcggcagcuacaucgcgcucgacuccgggcgcggcaacugggacugcaucaugaccagcuaccaguaccugaucauccagaacaccaccugggaggaccacugccaguucucccggcccagccccaucggguaccugggccuccugucccagcgcacgcgggacaucuacaucagccgccggcugcucggcaccuucaccuggacccugagcgacuccgagggggaggacacgccgggcggguacugccugacccgcuggaugcucaucgaggccgagcugaagugcuucggcaacaccgccguggccaagugcaacgagaagcacgacgaggaguucugcgacaugcugcggcuguucgacuucugcaagcaggccauccagcgccugaaggcggaggcccagaugagcauccagcugaucaacaaggccgugaacgcccucaucaacgaccagcugaucaugaagaaccaccuccgggacaucauggggauccccuacugcaacuacuccaaguacugcuaccucaaccacaccacgaccggccgcaccagccugcccaagugcugccuggucuccaacggcagcuaccucaacgagacccacuucuccgacgacaucgagcagcaggccgacaacaugaucacggagaugcugcagaaggaguacauggagcggcaggggaagacgccccugggccugguggaccucuucguguucagcaccuccuucuaccugaucagcaucuuccugcaccucgucaagaucccgacccaccgccacaucguggggaaguccugccccaagccccaccggcugaaccacaugggcaucugcagcugcgggcuguacaagcagcccggcgugccggucaaguggaagcgcugaggacuaguaauaaggaaacuguaugaaugucugugggcaggaagugaagagauccuucuguaaagguuuuuggaauuaugucugcugaauaauaaacuuuuuugaaauaauaaaucugguagaaaaaugagaucuaaaaaaaaaaaaaaaaaaaaaaaaaaaaaaaaaaaaaaaaaaaaaaaaaaaaaaaaaaaaaaaaaaaaaaaaaaaaaaaaaaaaaaaaaaaaaaaaaaaa

SEQ ID NO: 41153 - RNA, 1788 nt, Artificial Sequence
  mRNA product Design b-4 (A100) comprising derived and/or modified sequence from LASV(LM765-SLE-2012;Clade IV)__AIT17814__GPCmut12 (opt1)
aggagagucccgcagucggcguccagcggcucugcuuguucgugugugugucguugcaggccuuauucaagcuuaccaugggccagaucgugaccuucuuccaggaggucccccacgugaucgaggaggugaugaacaucguccugaucgcccucagcauccuggccgugcugaaggggcucuacaacuucgcgaccugcggccugguggggcuggucacguuccuccugcugugcggccgcuccugcaccaccagccucuacaaggggguguacgagcugcagacccuggagcucaacauggagacgcugaacaugugcaugccgcuguccugcaccaagaacaacagccaccacuacaucauggugggcaacgagaccggccucgagcugacccugacgaacaccuccaucaucgaccacaaguucugcaaccucagcgacgcccaccggaagaaccuguacgaccacgcccugauguccaucaucagcaccuuccaccucuccauccccaacuucaaccaguacgaggccaugagcugcgacuucaacgggggcaagaucuccguccaguacaaccugagccacuccuacgccaaggacgcggccgaccacugcgggaccguggccaacggcgugcugcagacguucaugcgcauggccuggggcgggagcuacaucgcgcucgacuccggccgggggcgcugggacugcaucaugaccagcuaccaguaccugaucauccagaacaccaccugggaggaccacugccaguucucccggcccagccccaucggcuaccuggggcuccugucccagcgcacgcgggacaucuacaucagccgccggcugcucggcaccuucaccuggacccugagcgacuccgagggcaaggacacgcccgggggcuacugccugacccgcuggaugcucaucgaggccgagcugaagugcuucgggaacaccgccgucgccaagugcaacgagaagcacgacgaggaguucugcgacaugcugcggcuguucgacuucugcaagcaggccauccagcgccugaaggcggaggcccagaugagcauccagcugaucaacaaggccgugaacgcccucaucaacgaccagcugaucaugaagaaccaccuccgggacaucaugggcauccccuacugcaacuacuccaaguacugcuaccucaaccacaccacgaccgggaagaccagccugcccaagugcugccugguguccaacggcagcuaccucaacgagacccacuucuccgacgacaucgagcagcaggccgacaacaugaucacggagaugcugcagaaggaguacauggagcgccagggcaagaccccgcuggggcuggucgaccucuucguguucagcaccuccuucuaccugaucagcaucuuccugcaccucgugaagaucccgacccaccggcacaucgucggcaagcccugccccaagccccaccgccugaaccacauggggaucugcuccugcggccuguacaagcagccgggggugcccgugaaguggaagcggugaggacuaguaauaaggaaacuguaugaaugucugugggcaggaagugaagagauccuucuguaaagguuuuuggaauuaugucugcugaauaauaaacuuuuuugaaauaauaaaucugguagaaaaaugagaucuaaaaaaaaaaaaaaaaaaaaaaaaaaaaaaaaaaaaaaaaaaaaaaaaaaaaaaaaaaaaaaaaaaaaaaaaaaaaaaaaaaaaaaaaaaaaaaaaaaaa

SEQ ID NO: 41154 - RNA, 1788 nt, Artificial Sequence
  mRNA product Design b-4 (A100) comprising derived and/or modified sequence from LASV(LM776-SLE-2012;Clade IV)__AIT17824__GPCmut12 (opt1)
aggagagucccgcagucggcguccagcggcucugcuuguucgugugugugucguugcaggccuuauucaagcuuaccaugggccagaucgugaccuucuuccaggaggucccccacgugaucgaggaggugaugaacaucguccugaucgcccucagcauccuggccgugcugaaggggcucuacaacuucgcgaccugcggccugguggggcuggucaccuuccuccugcugugcggccgcuccugcaccaccagcguguacaaggggguguacgagcuccagacccuggagcugaacauggagacgcucaacaugugcaugccgcuguccugcaccaagaacaacagccaccacuacaucauggucggcaacgagaccggccuggagcucacccugacgaacaccuccaucaucaaccacaaguucugcaaccugagcgacgcccacaagaagaaccucuacgaccacgcccugauguccaucaucagcaccuuccaccuguccauccccaacuucaaccaguacgaggccaugagcugcgacuucaacgggggcaagaucuccgugcaguacaaccucagccacuccuacgccggggacgcggccaaccacugcggcaccguggccaacgggguccugcagacguucaugcggauggccuggggcggcagcuacaucgcgcuggacuccgggcacggcaagugggacugcaucaugaccagcuaccaguaccucaucauccagaacaccaccugggaggaccacugccaguucucccgccccagccccaucggguaccugggccugcucucccagcggacgcgcgacaucuacaucagccggcgccugcugggcaccuucaccuggacccucagcgacuccgaggggaaggacacgccgggcggguacugccugacccgguggaugcugaucgaggccgagcucaagugcuucggcaacaccgccguggccaagugcaacgagaagcacgacgaggaguucugcgacaugcugcgccuguucgacuucugcaagcaggccauccagcggcucaaggcggaggcccagaugagcauccagcugaucaacaaggccgugaacgcccugaucaacgaccagcucaucaugaagaaccaccuccgcgacaucauggggauccccuacugcaacuacuccaaguacugcuaccugaaccacaccacgaccggcaagaccagccugcccaagugcugccuggucuccaacggcagcuaccugaacgagacccacuucuccgacgacaucgagcagcaggccgacaacaugaucacggagaugcuccagaaggaguacauggagcggcaggggaagacgccccugggccugguggaccuguucguguucagcaccuccuucuaccucaucagcaucuuccugcaccuggucaagaucccgacccaccgccacaucguggggaaguccugccccaagccccaccggcucaaccacaugggcaucugcagcugcgggcuguacaagcagcccggcgugccgguccgcuggaagcggugaggacuaguaauaaggaaacuguaugaaugucugugggcaggaagugaagagauccuucuguaaagguuuuuggaauuaugucugcugaauaauaaacuuuuuugaaauaauaaaucugguagaaaaaugagaucuaaaaaaaaaaaaaaaaaaaaaaaaaaaaaaaaaaaaaaaaaaaaaaaaaaaaaaaaaaaaaaaaaaaaaaaaaaaaaaaaaaaaaaaaaaaaaaaaaaaa

SEQ ID NO: 41155 - RNA, 1788 nt, Artificial Sequence
  mRNA product Design b-4 (A100) comprising derived and/or modified sequence from LASV(Mad39;Clade IV)__ANH09722__GPCmut12 (opt1)
aggagagucccgcagucggcguccagcggcucugcuuguucgugugugugucguugcaggccuuauucaagcuuaccaugggccagaucgugaccuucuuccaggaggucccccacgugaucgaggaggugaugaacaucguccugaucgcccucagcauccuggccgugcugaaggggcucuacaacguggcgaccugcggccugaucgggcuggucacguuccuccugcugugcggccgcuccugcaccaccacccucuacaaggggguguacgagcugcaggcccuggagcucaacauggagacgcugaacaugugcaugccgcugagcugcaccaagaacaacucccaccacuacauccgggugggcaacgagaccggccucgagcugacccugacgaacaccagccucaucaaccacaaguucugcaaccuguccgacgcccacaagaagaaccuguacgaccacgcccucaugagcaucaucuccaccuuccaccugagcauccccaacuucaaccaguacgaggccauguccugcgacuucaacgacgggaagaucagcguccaguacaaccugucccacaccuacgcgggcgacacggccaaccacugcgggaccguggccaacggcgugcuccagaccuucaugcgcauggccuggggcgggagcuacaucgcgcuggacuccggccgcgggggcugggacugcaucaugaccagcuaccaguaccugaucauccagaacacgaccugggaggaccacugccaguucucccggcccagccccaucggguaccucggccugcugucccagcggacccgcgacaucuacaucagccggcgccuccugggcaccuucacguggacccuguccgacagcgaggggaaggacaccccgggcggguacugccucacccgguggaugcugaucgaggccgagcugaagugcuucggcaacacggccgucgccaagugcaacgagaagcacgacgaggaguucugcgacaugcuccgccuguucgacuucugcaagcaggccauccagcggcugaaggcggaggcccagaugagcauccagcucaucaacaaggccgugaacgcccugaucaacgaccagcugaucaugaagaaccaccuccgcgacaucauggggauccccuacugcaacuacuccaaguacugcuaccugaaccacaccgugaccggcaagaccagccugcccaagugcugccucgucuccaacggcagcuaccugaacgagacgcacuucuccgacgacaucgagcagcaggccgacaacaugaucaccgagaugcugcagaaggaguacauggagcggcaggggaagacgccccugggccucguggaccuguucguguucagcaccuccuucuaccugaucagcaucuuccuccaccuggucaagaucccgacccaccgccacgugguggggaagcccugccccaagccccaccggcugaaccacaugggcaucugcuccugcggguucuacaagcagccgggcguccccgugcgcuggaagcggugaggacuaguaauaaggaaacuguaugaaugucugugggcaggaagugaagagauccuucuguaaagguuuuuggaauuaugucugcugaauaauaaacuuuuuugaaauaauaaaucugguagaaaaaugagaucuaaaaaaaaaaaaaaaaaaaaaaaaaaaaaaaaaaaaaaaaaaaaaaaaaaaaaaaaaaaaaaaaaaaaaaaaaaaaaaaaaaaaaaaaaaaaaaaaaaaa

SEQ ID NO: 41156 - RNA, 1788 nt, Artificial Sequence
  mRNA product Design b-4 (A100) comprising derived and/or modified sequence from LASV(Z0947-SLE-2011;Clade IV)__AIT17840__GPCmut12 (opt1)
aggagagucccgcagucggcguccagcggcucugcuuguucgugugugugucguugcaggccuuauucaagcuuaccaugggccagaucgugaccuucuuccaggaggucccccacgugaucgaggaggugaugaacaucguccugaucgcccucagcauccuggccgugcugaaggggcucuacaacuucgcgaccugcggccugguggggcuggucacguuccuccugcugugcggccgcuccugcaccaucagccucuacaaggggguguacgagcugcagacccuggagcucaacauggagacccugaacaugugcaugccgcuguccugcacgaagaacaacagccaccacuacaucauggugggcaacgagaccggccucgagcugacccugaccaacacguccaucaucaaccacaaguucugcaaccucagcgacgcccacaagaagaaccuguacgaccacgcccugauguccaucaucagcaccuuccaccucuccauccccaacuucaaccaguacgaggccaugagcugcgacuucaacgggggcaagaucuccguccaguacaaccugagccacuccuacgccggggacgcggccaaccacugcggcaccguggccaacggggugcugcagaccuucaugcggauggccuggggcggcagcuacaucgcgcucgacuccgggcgcgaccggugggacugcaucaugacgagcuaccaguaccugaucauccagaacaccaccugggaggaccacugccaguucucccgccccagccccaucggcuaccuggggcuccugucccagcggacccgcgacaucuacaucagccggcgccugcucggcacguucaccuggacccugagcgacuccgagggcaaggacacccccgggggcuacugccugacgcgguggaugcucaucgaggccgagcugaagugcuucgggaacaccgccgucgccaagugcaacgagaagcacgacgaggaguucugcgacaugcugcgccucuucgacuucugcaagcaggccauccagcggcugaaggcggaggcccagaugagcauccagcugaucaacaaggccgugaacgcccucaucaacgaccagcugaucaugaagaaccaccuccgcgacaucaugggcaucccguacugcaacuacuccaaguacugcuaccugaaccacaccaccacggggaagaccagccugcccaagugcugccugguguccaacggcagcuaccucaacgagacccacuucuccgacgacaucgagcagcaggccgacaacaugaucaccgagaugcugcagaaggaguacauggagcggcagggcaagacgccccuggggcuggucgaccucuucguguucagcaccuccuucuaccugaucagcaucuuccugcaccucgugaagaucccgacccaccgccacaucgucggcaagcccugccccaagccccaccggcugaaccacauggggaucugcuccugcggccuguacaagcagccgggggugcccgugaaguggaagcgcugaggacuaguaauaaggaaacuguaugaaugucugugggcaggaagugaagagauccuucuguaaagguuuuuggaauuaugucugcugaauaauaaacuuuuuugaaauaauaaaucugguagaaaaaugagaucuaaaaaaaaaaaaaaaaaaaaaaaaaaaaaaaaaaaaaaaaaaaaaaaaaaaaaaaaaaaaaaaaaaaaaaaaaaaaaaaaaaaaaaaaaaaaaaaaaaaa

SEQ ID NO: 41157 - RNA, 1788 nt, Artificial Sequence
  mRNA product Design b-4 (A100) comprising derived and/or modified sequence from LASV(Josiah;Clade IV)__NP_694870__GPCmut12 (opt4)
aggagagucccgcagucggcguccagcggcucugcuuguucgugugugugucguugcaggccuuauucaagcuuaccaugggccagaucgugaccuucuuccaggaggugccccacgugaucgaggaggugaugaacaucgugcugaucgcccugagcgugcuggccgugcugaagggccuguacaacuucgccaccugcggccuggugggccuggugaccuuccugcugcugugcggcagaagcugcaccaccagccuguacaagggcguguacgagcugcagacccuggagcugaacauggagacccugaacaugugcaugccccugagcugcaccaagaacaacagccaccacuacaucauggugggcaacgagaccggccuggagcugacccugaccaacaccagcaucaucaaccacaaguucugcaaccugagcgacgcccacaagaagaaccuguacgaccacgcccugaugagcaucaucagcaccuuccaccugagcauccccaacuucaaccaguacgaggccaugagcugcgacuucaacggcggcaagaucagcgugcaguacaaccugagccacagcuacgccggcgacgccgccaaccacugcggcaccguggccaacggcgugcugcagaccuucaugagaauggccuggggcggcagcuacaucgcccuggacagcggcagaggcaacugggacugcaucaugaccagcuaccaguaccugaucauccagaacaccaccugggaggaccacugccaguucagcagacccagccccaucggcuaccugggccugcugagccagagaaccagagacaucuacaucagcagaagacugcugggcaccuucaccuggacccugagcgacagcgagggcaaggacacccccggcggcuacugccugaccagauggaugcugaucgaggccgagcugaagugcuucggcaacaccgccguggccaagugcaacgagaagcacgacgaggaguucugcgacaugcugagacuguucgacuucugcaagcaggccauccagagacugaaggccgaggcccagaugagcauccagcugaucaacaaggccgugaacgcccugaucaacgaccagcugaucaugaagaaccaccugagagacaucaugggcauccccuacugcaacuacagcaaguacugcuaccugaaccacaccaccaccggcagaaccagccugcccaagugcugccuggugagcaacggcagcuaccugaacgagacccacuucagcgacgacaucgagcagcaggccgacaacaugaucaccgagaugcugcagaaggaguacauggagagacagggcaagaccccccugggccugguggaccuguucguguucagcaccagcuucuaccugaucagcaucuuccugcaccuggugaagauccccacccacagacacaucgugggcaagagcugccccaagccccacagacugaaccacaugggcaucugcagcugcggccuguacaagcagcccggcgugcccgugaaguggaagagaugaggacuaguaauaaggaaacuguaugaaugucugugggcaggaagugaagagauccuucuguaaagguuuuuggaauuaugucugcugaauaauaaacuuuuuugaaauaauaaaucugguagaaaaaugagaucuaaaaaaaaaaaaaaaaaaaaaaaaaaaaaaaaaaaaaaaaaaaaaaaaaaaaaaaaaaaaaaaaaaaaaaaaaaaaaaaaaaaaaaaaaaaaaaaaaaaa

SEQ ID NO: 41158 - RNA, 1785 nt, Artificial Sequence
  mRNA product Design b-4 (A100) comprising derived and/or modified sequence from LASV(LP;Clade I)__AAF86701__GPCmut12 (opt4)
aggagagucccgcagucggcguccagcggcucugcuuguucgugugugugucguugcaggccuuauucaagcuuaccaugggccagaucaucaccuucuuccaggaggugccccacgugaucgaggaggugaugaacaucgugcugaucgcccugagccugcuggccauccugaagggccuguacaacaucgccaccugcggcaucaucggccugguggccuuccuguuccugugcggcaagagcugcagccugacccugaagggcggcuacgagcugcagacccuggagcugaacauggagacccugaacaugugcaugccccugagcugcaccaagaacagcagccaccacuacaucagagugggcaacgagaccggccuggagcugacccugaccaacaccagcaucaucaaccacaaguucugcaaccugagcgacgcccacaagaagaaccuguacgaccacgcccugaugagcaucaucagcaccuuccaccugagcauccccaacuucaaccaguacgaggccaugagcugcgacuucaacggcggcaagaucagcgugcaguacaaccugagccacagcuacgccggcgacgccgccgagcacugcggcaccguggccaacggcgugcugcagaccuucaugagaauggccuggggcggcagauacaucgcccuggacagcggcaagggcaacugggacugcaucaugaccagcuaccaguaccugaucauccagaacaccaccugggaggaccacugccaguucagcagacccagccccaucggcuaccugggccugcugagccagagaaccagagacaucuacaucagcagaagacugcugggcaccuucaccuggacccugagcgacagcgagggcaacgagacccccggcggcuacugccugaccagauggaugcugaucgaggccgagcugaagugcuucggcaacaccgccguggccaagugcaacgagaagcacgacgaggaguucugcgacaugcugagacuguucgacuucugcaagcaggccaucagaagacugaaggccgaggcccagaugagcauccagcugaucaacaaggccgugaacgcccugaucaacgaccagcugaucaugaagaaccaccugagagacaucaugggcauccccuacugcaacuacagcaaguacugcuaccugaaccacaccagcagcggcagaaccagccugcccaagugcugccugaucagcaacggcagcuaccugaacgagacccaguucagcgacgacaucgagcagcaggccgacaacaugaucaccgagaugcugcagaaggaguacaucgagagacagggcaagaccccccugggccugguggacaucuucaucuucagcaccagcuucuaccugaucagcaucuuccugcaccugaucaagauccccacccacagacacaucgugggcaagcccugccccaagccccacagacugaaccacaugggcgugugcagcugcggccuguacaagcaccccggcgugcccaccaaguggaagagaugaggacuaguaauaaggaaacuguaugaaugucugugggcaggaagugaagagauccuucuguaaagguuuuuggaauuaugucugcugaauaauaaacuuuuuugaaauaauaaaucugguagaaaaaugagaucuaaaaaaaaaaaaaaaaaaaaaaaaaaaaaaaaaaaaaaaaaaaaaaaaaaaaaaaaaaaaaaaaaaaaaaaaaaaaaaaaaaaaaaaaaaaaaaaaaaaa

SEQ ID NO: 41159 - RNA, 1785 nt, Artificial Sequence
  mRNA product Design b-4 (A100) comprising derived and/or modified sequence from LASV(803213;Clade II)__AAF86703__GPCmut12 (opt4)
aggagagucccgcagucggcguccagcggcucugcuuguucgugugugugucguugcaggccuuauucaagcuuaccaugggccagaucaucaccuucuuccaggaggugccccacgugaucgaggaggugaugaacaucgugcugaucgcccugagccugcuggccauccugaagggcaucuacaacguggccaccugcggccuguucggccugaucagcuuccugcugcugugcggcagaagcugcagcgugaccuacaagggcguguacgagcugcagacccuggagcugaacauggccaaccugaacaugugcaugccccugagcugcaccaagaacaacagccaccacuacaucauggugggcaacgagaccggccuggagcugacccugaccaacaccagcaucaucaaccacaaguucugcaaccugagcgacgcccacaagaagaaccuguacgaccacgcccugaugagcaucaucagcaccuuccaccugagcauccccaacuucaaccaguacgaggccaugagcugcgacuucaacggcggcaagaucagcgugcaguacaaccugagccacagcuucgccguggacgccgccaaccacugcggcaccaucgccaacggcgugcugcagaccuucaugagaauggccuggggcggcagcuacaucgcccuggacagcggcaagggcaacugggacugcaucaugaccagcuaccaguaccugaucauccagaacaccaccugggaggaccacugccaguucagcagacccagccccaucggcuaccugggccugcugagccagagaaccagagacaucuacaucagcagaagacugcugggcaccuucaccuggacccugagcgacagcgagggcaacgaggcccccggcggcuacugccugaccagauggaugcugaucgaggccgagcugaagugcuucggcaacaccgccguggccaagugcaacgagaagcacgacgaggaguucugcgacaugcugagacuguucgacuucugcaagcaggccaucaagagacugaagaccgaggcccagaugagcauccagcugaucaacaaggccgugaacgcccugaucaacgaccagcugaucaugaagaaccaccugagagacaucaugggcauccccuacugcaacuacagcagauacugcuaccugaaccacaccgugaccggcaagaccagccugcccagaugcugccuggugagcaacggcagcuaccugaacgagacccacuucagcgacgacaucgagcagcaggccgacaacaugaucaccgagaugcugcagaaggaguacauggacagacagggcaagaccccccugggccugguggaccuguucguguucagcaccagcuucuaccugaucagcaucuuccugcaccuggugaagauccccacccacagacacaucgugggcaagcccugccccaagccccacagacugaaccacaugggcaucugcagcugcggccuguacaagcaccccggcgugcccgugaaguggaagagaugaggacuaguaauaaggaaacuguaugaaugucugugggcaggaagugaagagauccuucuguaaagguuuuuggaauuaugucugcugaauaauaaacuuuuuugaaauaauaaaucugguagaaaaaugagaucuaaaaaaaaaaaaaaaaaaaaaaaaaaaaaaaaaaaaaaaaaaaaaaaaaaaaaaaaaaaaaaaaaaaaaaaaaaaaaaaaaaaaaaaaaaaaaaaaaaaa

SEQ ID NO: 41160 - RNA, 1785 nt, Artificial Sequence
  mRNA product Design b-4 (A100) comprising derived and/or modified sequence from LASV(GA391;Clade III)__CAA36645__GPCmut12 (opt4)
aggagagucccgcagucggcguccagcggcucugcuuguucgugugugugucguugcaggccuuauucaagcuuaccaugggccagaucgugaccuucuuccaggaggugccccacgugaucgaggaggugaugaacaucgugcugaucgcccugagcauccuggccauccugaagggccuguacaacguggccaccugcggccugaucggccuggugaccuuccugcugcugagcggcagaagcugcagccugaucuacaagggcaccuacgagcugcagacccuggagcugaacauggagacccugaacaugugcaugccccugagcugcaccaagaacaacagccaccacuacaucagagugggcaacgagaccggccuggagcugacccugaccaacaccagcauccugaaccacaaguucugcaaccugagcgacgcccacaagagaaaccuguacgaccacagccugaugagcaucaucagcaccuuccaccugagcauccccaacuucaaccaguacgaggccaugagcugcgacuucaacggcggcaagaucaccgugcaguacaaccugagccacagcuucgccguggacgccgccggccacugcggcacccuggccaacggcgugcugcagaccuucaugagaauggccuggggcggcagcuacaucgcccuggacagcggcagaggcaacugggacugcaucaugaccagcuaccaguaccugaucauccagaacaccaccugggacgaccacugccaguucagcagacccagccccaucggcuaccugggccugcugagccagagaaccagagacaucuacaucagcagaagacugcugggcaccuucaccuggacccugagcgacagcgagggcaacgagacccccggcggcuacugccugaccagauggaugcugaucgaggccgagcugaagugcuucggcaacaccgccguggccaagugcaacgagaagcacgacgaggaguucugcgacaugcugagacuguucgacuucugcaagcaggccaucagaagacugaagaccgaggcccagaugagcauccagcugaucaacaaggccgugaacgcccugaucaacgaccagcugaucaugaagaaccaccugagagacaucaugggcauccccuacugcaacuacagcagauacugcuaccugaaccacaccagcaccggcaagaccagccugcccagaugcugccugaucagcaacggcagcuaccugaacgagaccaaguucagcgacgacaucgagcagcaggccgacaacaugaucaccgagaugcugcagaaggaguacaucgacagacagggcaagaccccccugggccugguggaccuguucguguucagcaccagcuucuaccugaucagcaucuuccugcaccuggugaagauccccacccacagacacaucgugggcaagcccugccccaagccccacagacugaaccacaugggcaucugcagcugcggccuguacaagcagcccggcgugcccgugagauggaagagaugaggacuaguaauaaggaaacuguaugaaugucugugggcaggaagugaagagauccuucuguaaagguuuuuggaauuaugucugcugaauaauaaacuuuuuugaaauaauaaaucugguagaaaaaugagaucuaaaaaaaaaaaaaaaaaaaaaaaaaaaaaaaaaaaaaaaaaaaaaaaaaaaaaaaaaaaaaaaaaaaaaaaaaaaaaaaaaaaaaaaaaaaaaaaaaaaa

SEQ ID NO: 41161 - RNA, 1788 nt, Artificial Sequence
  mRNA product Design b-4 (A100) comprising derived and/or modified sequence from LASV(AV;Clade V)__CCA30314__GPCmut12 (opt4)
aggagagucccgcagucggcguccagcggcucugcuuguucgugugugugucguugcaggccuuauucaagcuuaccaugggccagaucgugaccuucuuccaggaggugccccacgugaucgaggaggugaugaacaucgugcugaucgcccugagcauccuggccgugcugaagggccuguacaacaucgccaccugcggccugaucggccugaucaccuuccugcugcugugcggcagaagcugcagcagcaaccuguacaagggcguguacgagcugcagagccuggaccugaacauggagacccugaacaugugcaugccccugagcugcaccaagaacaacagccaccacuacaucagagugggcaacgacaccggccuggagcugacccugaccaacaccagcauccugaaccacaaguucugcaaccugagcgacgcccacaagaaggaccuguacgaccacgcccugaugagcaucaucagcaccuuccaccugagcauccccaacuucaaccaguacgaggccaugagcugcgacuucaacggcggcaagaucagcgugcaguacaaccugagccacagcuacgccaucgacgccgccaaccacugcggcaccguggccaacggcauccugcagaccuucaugagaauggccuggggcggcagcuacaucgcccuggacagcggcagaggcaacugggacugcaucaugaccagcuaccaguaccugaucauccagaacaccaccugggagaaccacugccaguucagcagacccagccccaucggcuaccugggccugcugagccagagaaccagagacaucuacaucagcagaagacugcugggcaccuucaccuggacccugagcgacagcgagggcaacgccacccccggcggcuacugccugaccagauggaugcugaucgaggccgagcugaagugcuucggcaacaccgccguggccaagugcaacgagaagcacgacgaggaguucugcgacaugcugagacuguucgacuucugcaagcaggccaucagcagacugaagagcgaggcccagaugagcauccagcugaucaacaaggccgugaacgcccugaucaacgaccagcugaucaugaagaaccaccugagagacaucaugggcauccccuacugcaacuacagcaaguacugcuaccugaaccacaccaucaccggcaagaccagccugcccaagugcugccuggugagcaacggcagcuaccugaacgagacccacuucagcgacgacaucgagcagcaggccgacaacaugaucaccgagaugcugcagaaggaguacauggagagacagggcaagaccccccugggccugguggaccuguucguguucagcaccagcuucuaccugaucagcaucuuccugagacuggugaagauccccacccacagacacaucgugggcaagcccugccccaagccccacagacugaaccacaugggcaucugcagcugcggccuguacaagcagcccggcgugcccgugagauggaagagaugaggacuaguaauaaggaaacuguaugaaugucugugggcaggaagugaagagauccuucuguaaagguuuuuggaauuaugucugcugaauaauaaacuuuuuugaaauaauaaaucugguagaaaaaugagaucuaaaaaaaaaaaaaaaaaaaaaaaaaaaaaaaaaaaaaaaaaaaaaaaaaaaaaaaaaaaaaaaaaaaaaaaaaaaaaaaaaaaaaaaaaaaaaaaaaaaa

SEQ ID NO: 41162 - RNA, 1785 nt, Artificial Sequence
  mRNA product Design b-4 (A100) comprising derived and/or modified sequence from LASV(Togo/2016/7082;Clade VI)__AMR44577__GPCmut12 (opt4)
aggagagucccgcagucggcguccagcggcucugcuuguucgugugugugucguugcaggccuuauucaagcuuaccaugggccagaucaucaccuucuuccaggaggugccccacgugaucgaggaggugaugaacaucgugcugaucgcccugagccugcuggccauccugaagggcguguacaacguggccaccugcggcaucaucggccuggugaccuuccuguuccugugcggcagaagcugcagccugaucuacaagggcagcuacgagcugcagacccuggagcugaacauggagacccugaacaugugcaugccccugagcugcaccaagaacagcagccaccacuacaucagagugggcaacgagaccggccuggagcugacccugaccaacaccagcaucaucaaccacaaguucugcaaccugagcgacgcccacaagagaaaccuguacgaccacgcccugaugagcauccugagcaccuuccaccugagcauccccaacuucaaccaguacgaggccaugagcugcgacuucaacggcggcaagaucagcgugcaguacaaccugagccacgccuacgccguggacgccgccgagcacugcggcaccguggccaacggcgugcugcagaccuucaugagaauggccuggggcggcagcuacaucgcccuggacagcggcagaggcaacugggacugcaucaugaccagcuaccaguaccugaucauccagaacaccaccugggaggaccacugccaguucagcagacccagccccaucggcuaccugggccugcugagccagagaaccagagacaucuacaucagcagaagacugcugggcaccuucaccuggacccugagcgacagcgagggcaacgagacccccggcggcuacugccugaccagauggaugcugaucgaggccgagcugaagugcuucggcaacaccgccguggccaagugcaacgagaagcacgacgaggaguucugcgacaugcugagacuguucgacuucugcaagcaggccauccagagacugaagagcgaggcccagaugagcauccagcugaucaacaaggccgugaacgcccugaucaacgaccagcugaucaugaagaaccaccugagagacaugaugggcauccccuacugcaacuacagcaaguacugcuaccugaaccacaccagcagcggcagaaccagccugcccaagugcugccuggugagcaacggcagcuaccugaacgagacccacuucagcgacgacaucgagcagcaggccgacaacaugaucaccgagaugcugcagaaggaguacaucgacagacagggcaagaccccccugggccugguggaccuguucguguucagcaccagcuucuaccugaucagcaucuuccugcaccugaucaagauccccacccacagacacaucgugggcaagcccugccccaagccccacagacugaaccacaugggcaucugcagcugcggccuguacaagcagcccggcgugcccaccagauggaagagaugaggacuaguaauaaggaaacuguaugaaugucugugggcaggaagugaagagauccuucuguaaagguuuuuggaauuaugucugcugaauaauaaacuuuuuugaaauaauaaaucugguagaaaaaugagaucuaaaaaaaaaaaaaaaaaaaaaaaaaaaaaaaaaaaaaaaaaaaaaaaaaaaaaaaaaaaaaaaaaaaaaaaaaaaaaaaaaaaaaaaaaaaaaaaaaaaa

SEQ ID NO: 41163 - RNA, 1785 nt, Artificial Sequence
  mRNA product Design b-4 (A100) comprising derived and/or modified sequence from LASV(KAK-428;Clade n.d. (VII))__ANH09740__GPCmut12 (opt4)
aggagagucccgcagucggcguccagcggcucugcuuguucgugugugugucguugcaggccuuauucaagcuuaccaugggccagaucgugaccuucuuccaggaggugccccacgugaucgaggaggugaugaacaucgugcugaucgcccugagccugcuggccauccugaagggccuguacaacuucgccaccugcggcgugaucggccugaucaccuuccugcugcugugcggcagaagcugcagcgccaccuacaagggccaguacgagcugcagacccuggagcugaacauggagagccugaacaugugcaugccccugagcugcaccaagaacaacagccaccacuacaucagagccggcaacaacaccggccuggagcugacccugaccaacaccagcaucaucagccacaaguucugcaaccugagcgacgcccacaagaagaaccuguacgaccacacccugaugagcaucaucaccaccuuccaccugagcauccccaacuucaaccaguacgaggccaugagcugcgacuucaacggcggcaagaucagcauccaguacaaccugagccacagcuacgccggcgacgccgcccagcacugcggcaccguggccaacggcgugcugcagaccuucaugagaauggccuggggcggcagcuaccuggcccuggacagcggcagaagaggcugggacugcaucaucagcagcuaccaguaccugaucauccagaacaccaccugggacgaccacugccaguucagcagacccagccccaucggcuaccugggcuucgugagccagaagaccagagacaucuacaucagcagaagacugcugggcaccuucaccuggacccugagcgacagcgagggccacgacaugcccggcggcuacugccugaccagauggaugcugaucgaggccgaccugaagugcuucggcaacaccgccguggccaagugcaacgagaagcacgacgaggaguucugcgacauguggagacuguucgacuucugcaagcaggccauccagagacugaaggccgaggcccagaugaacauccagcugaucaacaaggccgugaacgcccugaucaacgaccagcugaugaugaagaaccaccugagagacaucaugggcauccccuacugcaacuacagcaaguucugcuaccugaacaacaccaccaccggcagaaccagccugcccagaugcugccugaucagcaacggcagcuaccugaacgagacccacuucagcgacgacaucgagcagcaggccgacaacaugaucaccgagaugcugcagaaggaguacauggacagacagggcaagaccccccugggccugguggaccuguucguguucagcaccagcuucuaccugaucaccaucuuccugcaccuggugaagauccccacccacagacacaucgugggcaagcccugccccaagccccacagacugaaccacaugggcaucugcagcugcggccuguacaagcagcccggcgugcccgugagauggaagagaugaggacuaguaauaaggaaacuguaugaaugucugugggcaggaagugaagagauccuucuguaaagguuuuuggaauuaugucugcugaauaauaaacuuuuuugaaauaauaaaucugguagaaaaaugagaucuaaaaaaaaaaaaaaaaaaaaaaaaaaaaaaaaaaaaaaaaaaaaaaaaaaaaaaaaaaaaaaaaaaaaaaaaaaaaaaaaaaaaaaaaaaaaaaaaaaaa

SEQ ID NO: 41164 - RNA, 1785 nt, Artificial Sequence; identical to SEQ ID NO: 41158
  mRNA product Design b-4 (A100) comprising derived and/or modified sequence from LASV(Pinneo-NIG-1969;Clade I)__AIT17836__GPCmut12 (opt4)

SEQ ID NO: 41165 - RNA, 1785 nt, Artificial Sequence
  mRNA product Design b-4 (A100) comprising derived and/or modified sequence from LASV(ISTH0009-NIG-2011;Clade II)__AIT17404__GPCmut12 (opt4)
aggagagucccgcagucggcguccagcggcucugcuuguucgugugugugucguugcaggccuuauucaagcuuaccaugggccagaucaucaccuucuuccaggaggugccccacgugaucgaggaggugaugaacaucgugcugaucgcccugagccugcuggccauccugaagggcaucuacaacguggccaccugcggccuguucggccuggugagcuuccugcugcugugcggcagaagcugcagcaccaccuacaagggcguguacgagcugcagacccuggagcuggacauggccagccugaacaugugcaugccccugagcugcaccaagaacaacagccaccacuacaucauggugggcaacgagaccggccuggagcugacccugaccaacaccagcaucaucaaccacaaguucugcaaccugagcgacgcccacaagaagaaccuguacgaccacgcccugaugagcaucaucagcaccuuccaccugagcauccccaacuucaaccaguacgaggccaugagcugcgacuucaacggcggcaagaucagcgugcaguacaaccugagccacgccuacgccguggacgccgccaaccacugcggcaccaucgccaacggcgugcugcagaccuucaugagaauggccuggggcggcagcuacaucgcccuggacagcggcaagggcagcugggacugcaucaugaccagcuaccaguaccugaucauccagaacaccaccugggaggaccacugccaguucagcagacccagccccaucggcuaccugggccugcugagccagagaaccagagacaucuacaucagcagaagacugcugggcaccuucaccuggacccugagcgacagcgagggcaacgagacccccggcggcuacugccugaccagauggaugcugaucgaggccgagcugaagugcuucggcaacaccgccguggccaagugcaacgagaagcacgacgaggaguucugcgacaugcugagacuguucgacuucugcaagcaggccaucagaagacugaagaccgaggcccagaugagcauccagcugaucaacaaggccgugaacgcccugaucaacgaccagcugaucaugaagaaccaccugagagacaucaugggcauccccuacugcaacuacagcaaguacugcuaccugaaccacaccgugaccggcaagaccagccugcccagaugcugccuggugagcaacggcagcuaccugaacgagacccacuucagcgacgacaucgagcagcaggccgacaacaugaucaccgagcugcugcagaaggaguacauggacagacagggcaagaccccccugggccugguggaccuguucguguucagcaccagcuucuaccugaucagcaucuuccugcaccugaucaagauccccacccacagacacaucaccggcaagcccugccccaagccccacagacugaaccacaugggcaucugcagcugcggccuguacaagcaccccggcgugcccgugaaguggaagagaugaggacuaguaauaaggaaacuguaugaaugucugugggcaggaagugaagagauccuucuguaaagguuuuuggaauuaugucugcugaauaauaaacuuuuuugaaauaauaaaucugguagaaaaaugagaucuaaaaaaaaaaaaaaaaaaaaaaaaaaaaaaaaaaaaaaaaaaaaaaaaaaaaaaaaaaaaaaaaaaaaaaaaaaaaaaaaaaaaaaaaaaaaaaaaaaaa

SEQ ID NO: 41166 - RNA, 1785 nt, Artificial Sequence
  mRNA product Design b-4 (A100) comprising derived and/or modified sequence from LASV(ISTH2010-NIG-2012;Clade II)__AIT17482__GPCmut12 (opt4)
aggagagucccgcagucggcguccagcggcucugcuuguucgugugugugucguugcaggccuuauucaagcuuaccaugggccagaucaucaccuucuuccaggaggugccccacgugaucgaggaggugaugaacaucgugcugaucgcccugagccugcuggccauccugaagggcaucuacaacguggccaccugcggccuguucggccuggugagcuuccugcugcugugcggcagaagcugcagcaccaccuacaagggcguguacgagcugcagacccuggagcuggacauggccagccugaacaugugcaugccccugagcugcaccaagaacaacagccaccacuacaucauggugggcaacgagaccggccuggagcugacccugaccaacaccagcaucaucaaccacaaguucugcaaccugagcgacgcccacaagaagaaccuguacgaccacgcccugaugagcaucaucagcaccuuccaccugagcauccccaacuucaaccaguacgaggccaugagcugcgacuucaacggcggcaagaucagcgugcaguacaaccugagccacgccuacgccguggacgccgccaaccacugcggcaccaucgccaacggcgugcugcagaccuucaugagaauggccuggggcggcagcuacaucgcccuggacagcggcaagggcagcugggacugcaucaugaccagcuaccaguaccugaucauccagaacaucaccugggaggaccacugccaguucagcagacccagccccaucggcuaccugggccugcugagccagagaaccagagacaucuacaucagcagaagacugcugggcaccuucaccuggacccugagcgacagcgagggcaacgagacccccggcggcuacugccugaccagauggaugcugaucgaggccgagcugaagugcuucggcaacaccgccguggccaagugcaacgagaagcacgacgaggaguucugcgacaugcugagacuguucgacuucugcaagcaggccaucagaagacugaagaccgaggcccagaugagcauccagcugaucaacaaggccgugaacgcccugaucaacgaccagcugaucaugaagaaccaccugagagacaucaugggcauccccuacugcaacuacagcaaguacugcuaccugaaccacaccgugaccggcaagaccagccugcccagaugcugccuggugagcaacggcagcuaccugaacgagacccacuucagcgacgacaucgagcagcaggccgacaacaugaucaccgagcugcugcagaaggaguacaucgacagacagggcaagaccccccugggccugguggaccuguucguguucagcaccagcuucuaccugaucagcaucuuccugcaccuggugaagauccccacccacagacacguggugggcaagcccugccccaagccccacagacugaaccacaugggcaucugcagcugcggccuguacaagcaccccggcgugcccgugaaguggaagagaugaggacuaguaauaaggaaacuguaugaaugucugugggcaggaagugaagagauccuucuguaaagguuuuuggaauuaugucugcugaauaauaaacuuuuuugaaauaauaaaucugguagaaaaaugagaucuaaaaaaaaaaaaaaaaaaaaaaaaaaaaaaaaaaaaaaaaaaaaaaaaaaaaaaaaaaaaaaaaaaaaaaaaaaaaaaaaaaaaaaaaaaaaaaaaaaaa

SEQ ID NO: 41167 - RNA, 1785 nt, Artificial Sequence
  mRNA product Design b-4 (A100) comprising derived and/or modified sequence from LASV(Lassa virus/H.sapiens-wt/NGA/2015/ISTH_0543;Clade II)__AVO03639__GPCmut12 (opt4)
aggagagucccgcagucggcguccagcggcucugcuuguucgugugugugucguugcaggccuuauucaagcuuaccaugggccagaucaucaccuucuuccaggaggugccccacgugaucgaggaggugaugaacaucgugcugaucgcccugagccugcuggccauccugaagggcaucuacaacguggccaccugcggccuguucggccuggugagcuuccugcugcugugcggcagaagcugcagcaccaccuacaagggcguguacgagcugcagacccuggagcuggacauggccaaccugaacaugugcaugccccugagcugcaccaagaacaacagccaccacuacaucauggugggcaacgagaccggccuggagcugacccugaccaacaccagcaucaucaaccacaaguucugcaaccugagcgacgcccacaagaagaaccuguacgaccacgcccugaugagcaucaucagcaccuuccaccugagcauccccaacuucaaccaguacgaggccaugagcugcgacuucaacggcggcaagaucagcgugcaguacaaccugagccacaccuacgccguggacgccgccaaccacugcggcaccaucgccaacggcgugcugcagaccuucaugagaauggccuggggcggcagcuacaucgcccuggacagcggcaagggcagcugggacugcaucaugaccagcuaccaguaccuggugauccagaacaccaccugggaggaccacugccaguucagcagacccagccccaucggcuaccugggccugcugagccagagaaccagagacaucuacaucagcagaagacugcugggcaccuucaccuggacccugagcgacagcgagggcaacgagacccccggcggcuacugccugaccagauggaugcugaucgaggccgagcugaagugcuucggcaacaccgccguggccaagugcaacgagaagcacgacgaggaguucugcgacaugcugagacuguucgacuucugcaagcaggccaucagaagacugaagaccgaggcccagaugagcauccagcugaucaacaaggccgugaacgcccugaucaacgaccagcugaucaugaagaaccaccugagagacaucaugggcauccccuacugcaacuacagcaaguacugcuaccugaaccacaccgugaccggcaagaccagccugcccagaugcugccuggugagcaacggcagcuaccugaacgagacccacuucagcgacgacaucgagcagcaggccgacaacaugaucaccgagcugcugcagaaggaguacaucgacagacagggcaagaccccccugggccugguggaccuguucguguucagcaccagcuucuaccugaucagcaucuuccugcaccuggugaagauccccacccacagacacaucaccggcaagcccugccccaagccccacagacugaaccacaugggcaucugcagcugcggccuguacaagcaccccggcgugcccgugaaguggaagagaugaggacuaguaauaaggaaacuguaugaaugucugugggcaggaagugaagagauccuucuguaaagguuuuuggaauuaugucugcugaauaauaaacuuuuuugaaauaauaaaucugguagaaaaaugagaucuaaaaaaaaaaaaaaaaaaaaaaaaaaaaaaaaaaaaaaaaaaaaaaaaaaaaaaaaaaaaaaaaaaaaaaaaaaaaaaaaaaaaaaaaaaaaaaaaaaaa

SEQ ID NO: 41168 - RNA, 1785 nt, Artificial Sequence
  mRNA product Design b-4 (A100) comprising derived and/or modified sequence from LASV(Lassa virus/H.sapiens-wt/NGA/2016/ISTH_0009;Clade II)__AVO03571__GPCmut12 (opt4)
aggagagucccgcagucggcguccagcggcucugcuuguucgugugugugucguugcaggccuuauucaagcuuaccaugggccagaucaucaccuucuuccaggaggugccccacgugaucgaggaggugaugaacaucgugcugaucgcccugagccugcuggccauccugaagggcaucuacaacguggccaccugcggccugcugggccuggugagcuuccugcugcugugcggcagaagcugcagcaccaccuacaagggcguguacgagcugcagacccuggagcuggacauggccagccugaacaugugcaugccccugagcugcaccaagaacaacagccaccacuacaucauggugggcaacgagaccggccuggagcugacccugaccaacaccagcaucaucaaccacaaguucugcaaccugagcgacgcccacaagaagaaccuguacgaccacgcccugaugagcaucaucagcaccuuccaccugagcauccccaacuucaaccaguacgaggccaugagcugcgacuucaacggcggcagaaucagcgugcaguacaaccugagccacagcuacgccguggacgccgccaaccacugcggcaccaucgccaacggcgugcugcagaccuucaugagaauggccuggggcggcagcuacaucgcccuggacagcggcaagggcagcugggacugcaucaugaccagcuaccaguaccugaucauccagaacaccaccugggaggaccacugccaguucagcagacccagccccaucggcuaccugggccugcugagccagagaaccagagacaucuacaucagcagaagacugcugggcaccuucaccuggacccugagcgacagcgagggcaacgagacccccggcggcuacugccugaccagauggaugcugaucgaggccgagcugaagugcuucggcaacaccgccguggccaagugcaacgagaagcacgacgaggaguucugcgacaugcugagacuguucgacuucugcaagcaggccaucagaagacugaagaccgaggcccagaugagcauccagcugaucaacaaggccgugaacgcccugaucaacgaccagcugaucaugaagaaccaccugagagacaucaugggcauccccuacugcaacuacagcaaguacugcuaccugaaccacaccgugaccggcaagaccagccugcccagaugcugccuggugagcaacggcagcuaccugaacgagacccacuucagcgacgacaucgagcagcaggccgacaacaugaucaccgagcugcugcagaaggaguacaucgacagacagggcaagaccccccugggccugguggaccuguucguguucagcaccagcuucuaccugaucagcaucuuccugcaccuggugaagauccccacccacagacacaucaccggcaagcccugccccaagccccacagacugaaccacaugggcaucugcagcugcggccuguacaaccaccccggcgugcccgugaaguggaagagaugaggacuaguaauaaggaaacuguaugaaugucugugggcaggaagugaagagauccuucuguaaagguuuuuggaauuaugucugcugaauaauaaacuuuuuugaaauaauaaaucugguagaaaaaugagaucuaaaaaaaaaaaaaaaaaaaaaaaaaaaaaaaaaaaaaaaaaaaaaaaaaaaaaaaaaaaaaaaaaaaaaaaaaaaaaaaaaaaaaaaaaaaaaaaaaaaa

SEQ ID NO: 41169 - RNA, 1785 nt, Artificial Sequence
  mRNA product Design b-4 (A100) comprising derived and/or modified sequence from LASV(Lassa virus/H.sapiens-wt/NGA/2016/ISTH_0017;Clade II)__AVO03567__GPCmut12 (opt4)
aggagagucccgcagucggcguccagcggcucugcuuguucgugugugugucguugcaggccuuauucaagcuuaccaugggccagaucaucaccuucuuccaggaggugccccacgugaucgaggaggugaugaacaucgugcugaucgcccugagccugcuggccauccugaagggcaucuacaacguggccaccugcggccuguucggccuggugagcuuccugcugcugugcggcagaagcugcagcaccaccuacaagggcguguacgagcugcagacccuggagcuggacauggccagccugaacaugugcaugccccugagcugcaccaagaacaacagccaccacuacaucauggugggcaacgagaccggccuggagcugacccugaccaacaccagcaucaucaaccacaaguucugcaaccugagcgacgcccacaagaagaaccuguacgaccacgcccugaugagcaucaucagcaccuuccaccugagcauccccaacuucaaccaguacgaggccaugagcugcgacuucaacggcggcaagaucagcgugcaguacaaccugagccacaccuacgccaucgacgccgccaaccacugcggcaccaucgccaacggcgugcugcagaccuucaugagaauggccuggggcggcagcuacaucgcccuggacagcggcaagggcagcugggacugcaucaugaccagcuaccaguaccugaucauccagaacaccaccugggaggaccacugccaguucagcagacccagccccaucggcuaccugggccugcugagccagagaaccagagacaucuacaucagcagaagacugcugggcaccuucaccuggacccugagcgacagcgagggcaacgagacccccggcggcuacugccugaccagauggaugcugaucgaggccgagcugaagugcuucggcaacaccgccguggccaagugcaacgagaagcacgacgaggaguucugcgacaugcugagacuguucgacuucugcaagcaggccaucagaagacugaagaccgaggcccagaugagcauccagcugaucaacaaggccgugaacgcccugaucaacgaccagcugaucaugaagaaccaccugagagacaucaugggcauccccuacugcaacuacagcaaguacugcuaccugaaccacaccgugaccggcaagaccagccugcccagaugcugccuggugagcaacggcagcuaccugaacgagacccacuucagcgacgacaucgagcagcaggccgacaacaugaucaccgagcugcugcagaaggaguacauggacagacagggcaagaccccccugggccugguggaccuguucguguucagcaccagcuucuaccugaucagcaucuuccugcaccuggugagaauccccacccacagacacgugaucggcaagcccugccccaagccccacagacugaaccacaugggcaucugcagcugcggccuguacaagcaccccggcgugcccgugaaguggaagagaugaggacuaguaauaaggaaacuguaugaaugucugugggcaggaagugaagagauccuucuguaaagguuuuuggaauuaugucugcugaauaauaaacuuuuuugaaauaauaaaucugguagaaaaaugagaucuaaaaaaaaaaaaaaaaaaaaaaaaaaaaaaaaaaaaaaaaaaaaaaaaaaaaaaaaaaaaaaaaaaaaaaaaaaaaaaaaaaaaaaaaaaaaaaaaaaaa

SEQ ID NO: 41170 - RNA, 1785 nt, Artificial Sequence
  mRNA product Design b-4 (A100) comprising derived and/or modified sequence from LASV(Lassa virus/H.sapiens-wt/NGA/2018/ISTH_0959;Clade II)__AVV65099__GPCmut12 (opt4)
aggagagucccgcagucggcguccagcggcucugcuuguucgugugugugucguugcaggccuuauucaagcuuaccaugggccagaucaucaccuucuuccaggaggugccccacgugaucgaggaggugaugaacaucgugcugaucgcccugagccugcuggccauccugaagggcaucuacaacguggugaccugcggccuguucggccuggugagcuuccugcugcugugcggcagaagcugcagcaccaccuacaagggcguguacgagcugcagacccuggagcuggacauggccagccugaacaugugcaugccccugagcugcaccaagaacaacagccaccacuacaucauggugggcaacgagaccggccuggagcugacccugaccaacaccagcaucaucaaccacaaguucugcaaccugagcgacgcccacaagaagaaccuguacgaccacgcccugaugagcaucaucagcaccuuccaccugagcauccccaacuucaaccaguacgaggccaugagcugcgacuucaacggcggcaagaucagcgugcaguacaaccugagccacgccuacgccaucgacgccgccaaccacugcggcaccaucgccaacggcgugcugcagaccuucaugagaauggccuggggcggcagcuacaucgcccuggacagcggcaagggcagcugggacugcaucaugaccagcuaccaguaccugaucauccagaacaccaccugggaggaccacugccaguucagcagacccagccccaucggcuaccugggccugcugagccagagaaccagagacaucuacaucagcagaagacugcugggcaccuucaccuggacccugagcgacagcgagggcaacgagacccccggcggcuacugccugaccagauggaugcugaucgaggccgagcugaagugcuucggcaacaccgccguggccaagugcaacgagaagcacgacgaggaguucugcgacaugcugagacuguucgacuucugcaagcaggccaucagaagacugaagaccgaggcccagaugagcauccagcugaucaacaaggccgugaacgcccugaucaacgaccagcugaucaugaagaaccaccugagagacaucaugggcauccccuacugcaacuacagcaaguacugcuaccugaaccacaccgugaccggcaagaccagccugcccagaugcugccuggugagcaacggcagcuaccugaacgagacccacuucagcgacgacaucgagcagcaggccgacaacaugaucaccgagcugcugcagaaggaguacaucgacagacagggcaagaccccccugggccugguggaccuguucguguucagcaccagcuucuaccugaucagcaucuuccugcaccuggugaagauccccacccacagacacgugaucggcaagcccugccccaagccccacagacugaaccacaugggcaucugcagcugcggccuguacaagcaccccggcgugcccgugaaguggaagagaugaggacuaguaauaaggaaacuguaugaaugucugugggcaggaagugaagagauccuucuguaaagguuuuuggaauuaugucugcugaauaauaaacuuuuuugaaauaauaaaucugguagaaaaaugagaucuaaaaaaaaaaaaaaaaaaaaaaaaaaaaaaaaaaaaaaaaaaaaaaaaaaaaaaaaaaaaaaaaaaaaaaaaaaaaaaaaaaaaaaaaaaaaaaaaaaaa

SEQ ID NO: 41171 - RNA, 1785 nt, Artificial Sequence
  mRNA product Design b-4 (A100) comprising derived and/or modified sequence from LASV(LASV003-NIG-2008;Clade II)__AIT17580__GPCmut12 (opt4)
aggagagucccgcagucggcguccagcggcucugcuuguucgugugugugucguugcaggccuuauucaagcuuaccaugggccagaucaucaccuucuuccaggaggugccccacgugaucgaggaggugaugaacaucgugcugaucgcccugagccugcuggccauccugaagggcaucuacaacguggccaccugcggccuguucggccuggugagcuuccugcugcugugcggcagaagcugcagcaccaccuacaagggcguguacgagcugcagacccuggagcuggacauggccagccugaacaugugcaugccccugagcugcaccaagaacaacagccaccacuacaucauggugggcaacgagaccggccuggagcugacccugaccaacaccagcaucaucaaccacaaguucugcaaccugagcgacgcccacaagaagaaccuguacgaccacgcccugaugagcaucaucagcaccuuccaccugagcauccccaacuucaaccaguacgaggccaugagcugcgacuucaacggcggcaagaucagcgugcaguacaaccugagccacaccuacgccguggacgccgccaaccacugcggcaccaucgccaacggcgugcugcagaccuucaugagaauggccuggggcggcagcuacaucgcccuggacagcggcaagggcagcugggacugcaucaugaccagcuaccaguaccugaucauccagaacaccaccugggaggaccacugccaguucagcagacccagccccaucggcuaccugggccugcugagccagagaaccagagacaucuacaucagcagaagacugcugggcaccuucaccuggacccugagcgacagcgagagcaacgagacccccggcggcuacugccugaccagauggaugcugaucgaggccgagcugaagugcuucggcaacaccgccguggccaagugcaacgagaagcacgacgaggaguucugcgacaugcugagacuguucgacuucugcaagcaggccaucagaagacugaaggccgaggcccagaugagcauccagcugaucaacaaggccgugaacgcccugaucaacgaccagcugaucaugaagaaccaccugagagacaucaugggcauccccuacugcaacuacagcaaguacugcuaccugaaccacaccgugaccggcagaaccagccugcccagaugcugccuggugagcaacggcagcuaccugaacgagacccacuucagcgacgacaucgagcagcaggccgacaacaugaucaccgagcugcugcagaaggaguacauggacagacagggcaagaccccccugggccugguggaccuguucguguucagcaccagcuucuaccugaucagcaucuuccugcaccuggugaagauccccacccacagacacgugaucggcaagcccugccccaagccccacagacugaaccacaugggcaucugcagcugcggccuguacaagcaccccggcgugcccgugaaguggaagagaugaggacuaguaauaaggaaacuguaugaaugucugugggcaggaagugaagagauccuucuguaaagguuuuuggaauuaugucugcugaauaauaaacuuuuuugaaauaauaaaucugguagaaaaaugagaucuaaaaaaaaaaaaaaaaaaaaaaaaaaaaaaaaaaaaaaaaaaaaaaaaaaaaaaaaaaaaaaaaaaaaaaaaaaaaaaaaaaaaaaaaaaaaaaaaaaaa

SEQ ID NO: 41172 - RNA, 1785 nt, Artificial Sequence
  mRNA product Design b-4 (A100) comprising derived and/or modified sequence from LASV(LASV035-NIG-2009;Clade II)__AIT17588__GPCmut12 (opt4)
aggagagucccgcagucggcguccagcggcucugcuuguucgugugugugucguugcaggccuuauucaagcuuaccaugggccagaucaucaccuucuuccaggaggugccccacgugaucgaggaggugaugaacaucgugcugaucgcccugagccugcuggccauccugaagggcaucuacaacguggccaccugcggccuguucggccuggugagcuuccugcugcugugcggcagaagcugcagcaccaccuacaagggcguguacgagcugcagacccuggagcuggacauggccagccugaacaugugcaugccccugagcugcaccaagaacaacagccaccacuacaucauggugggcaacgagaccggccuggagcugacccugaccaacaccagcaucaucaaccacaaguucugcaaccugagcgacgcccacaagaagaaccuguacgaccacgcccugaugagcaucaucagcaccuuccaccugagcauccccaacuucaaccaguacgaggccaugagcugcgacuucaacggcggcaagaucagcgugcaguacaaccugagccacgccuacgccguggacgccgccaaccacugcggcaccaucgccaacggcgugcugcagaccuucaugagaauggccuggggcggcagcuacaucgcccuggacagcggcaagggcagcugggacugcaucaugaccagcuaccaguaccugaucauccagaacaccaccugggaggaccacugccaguucagcagacccagccccaucggcuaccugggccugcugagccagagaaccagagacaucuacaucagcagaagacugcugggcaccuucaccuggacccugagcgacagcgagggcaacgagacccccggcggcuacugccugaccagauggaugcugaucgaggccgagcugaagugcuucggcaacaccgccguggccaagugcaacgagaagcacgacgaggaguucugcgacaugcugagacuguucgacuucugcaagcaggccaucagaagacugaaggccgaggcccagaugagcauccagcugaucaacaaggccgugaacgcccugaucaacgaccagcugaucaugaagaaccaccugagagacaucaugggcauccccuacugcaacuacagcaaguacugcuaccugaaccacaccgugaccggcaagaccagccugcccagaugcugccuggugagcaacggcagcuaccugaacgagacccacuucagcgacgacaucgagcagcaggccgacaacaugaucaccgagcugcugcagaaggaguacaucgacagacagggcaagaccccccugggccugguggaccuguucguguucagcaccagcuucuaccugaucagcaucuuccugcaccuggugaagauccccacccacagacacgugaucggcaagcccugccccaagccccacagacugaaccacaugggcaucugcagcugcggccuguacaagcaccccggcgugcccgugaaguggaagagaugaggacuaguaauaaggaaacuguaugaaugucugugggcaggaagugaagagauccuucuguaaagguuuuuggaauuaugucugcugaauaauaaacuuuuuugaaauaauaaaucugguagaaaaaugagaucuaaaaaaaaaaaaaaaaaaaaaaaaaaaaaaaaaaaaaaaaaaaaaaaaaaaaaaaaaaaaaaaaaaaaaaaaaaaaaaaaaaaaaaaaaaaaaaaaaaaa

SEQ ID NO: 41173 - RNA, 1785 nt, Artificial Sequence
  mRNA product Design b-4 (A100) comprising derived and/or modified sequence from LASV(LASV1000-NIG-2009;Clade II)__AIT17782__GPCmut12 (opt4)
aggagagucccgcagucggcguccagcggcucugcuuguucgugugugugucguugcaggccuuauucaagcuuaccaugggccagaucaucaccuucuuccaggaggugccccacgugaucgaggaggugaugaacaucgugcugaucgcccugagccugcuggccauccugaagggcaucuacaacguggccaccugcggccuguucggccuggugagcuuccugcugcugugcggcagaagcugcagcaccaccuacaagggcguguacgagcugcagacccuggagcuggacauggccagccugaacaugugcaugccccugagcugcaccaagaacaacagccaccacuacaucauggugggcaacgagaccggccuggagcugacccugaccaacaccagcaucaucaaccacaaguucugcaaccugagcgacgcccacaagaagaaccuguacgaccacgcccugaugagcaucaucagcaccuuccaccugagcauccccaacuucaaccaguacgaggccaugagcugcgacuucaacggcggcaagaucagcgugcaguacaaccugagccacaccuacgccguggacgccgccaaccacugcggcaccaucgccaacggcgugcugcagaccuucaugagaauggccuggggcggcagcuacaucgcccuggacagcggcaagggcagcugggacugcaucaugaccagcuaccaguaccugaucauccagaacaccaccugggaggaccacugccaguucagcagacccagccccaucggcuaccugggccugcugagccagagaaccagagacaucuacaucagcagaagacugcugggcaccuucaccuggacccugagcgacagcgagggcaacgagacccccggcggcuacugccugaccagauggaugcugaucgaggccgagcugaagugcuucggcaacaccgccguggccaagugcaacgagaagcacgacgaggaguucugcgacaugcugagacuguucgacuucugcaagcaggccaucaagagacugaagaccgaggcccagaugagcauccagcugaucaacaaggccgugaacgcccugaucaacgaccagcugaucaugaagaaccaccugagagacaucaugggcauccccuacugcaacuacagcaaguacugcuaccugaaccacaccgugaccggcaagaccagccugcccagaugcugccuggugagcaacggcagcuaccugaacgagacccacuucagcgacgacaucgagcagcaggccgacaacaugaucaccgagcugcugcagaaggaguacaucgacagacagggcaagaccccccugggccugguggaccuguucguguucagcaccagcuucuaccugaucagcaucuuccugcaccuggugaagauccccacccacagacacguggugggcaagcccugccccaagccccacagacugaaccacaugggcaucugcagcugcggccuguacaagcaccccggcgugcccgugaaguggaagagaugaggacuaguaauaaggaaacuguaugaaugucugugggcaggaagugaagagauccuucuguaaagguuuuuggaauuaugucugcugaauaauaaacuuuuuugaaauaauaaaucugguagaaaaaugagaucuaaaaaaaaaaaaaaaaaaaaaaaaaaaaaaaaaaaaaaaaaaaaaaaaaaaaaaaaaaaaaaaaaaaaaaaaaaaaaaaaaaaaaaaaaaaaaaaaaaaa

SEQ ID NO: 41174 - RNA, 1785 nt, Artificial Sequence
  mRNA product Design b-4 (A100) comprising derived and/or modified sequence from LASV(LASV221-NIG-2010;Clade II)__AIT17624__GPCmut12 (opt4)
aggagagucccgcagucggcguccagcggcucugcuuguucgugugugugucguugcaggccuuauucaagcuuaccaugggccagaucaucaccuucuuccaggaggugccccacgugaucgaggaggugaugaacaucgugcugaucgcccugagccugcuggccauccugaagggcaucuacaacguggccaccugcggccuguucggccuggugagcuuccugcugcugugcggcagaagcugcagcaccaccuacaagggcguguacgagcugcagacccuggagcuggacauggccagccugaacaugugcaugccccugagcugcaccaagaacaacagccaccacuacaucauggugggcaacgagaccggccuggagcugacccugaccaacaccagcaucaucaaccacaaguucugcaaccugagcgacgcccacaagaagaaccuguacgaccacgcccugaugagcaucaucagcaccuuccaccugagcauccccaacuucaaccaguacgaggccaugagcugcgacuucaacggcggcaagaucagcgugcaguacaaccugagccacaccuacgccaucgacgccgccaaccacugcggcaccaucgccaacggcgugcugcagaccuucaugagaauggccuggggcggcagcuacaucgcccuggacagcggcaagggcagcugggacugcaucaugaccagcuaccaguaccugaucauccagaacaccaccugggaggaccacugccaguucagcagacccagccccaucggcuaccugggccugcugagccagagaaccagagacaucuacaucagcagaagacugcugggcaccuucaccuggacccugagcgacagcgagggcaacgagacccccggcggcuacugccugaccagauggaugcugaucgaggccgagcugaagugcuucggcaacaccgccguggccaagugcaacgagaagcacgacgaggaguucugcgacaugcugagacuguucgacuucugcaagcaggccaucagaagacugaagaccgaggcccagaugagcauccagcugaucaacaaggccgugaacgcccugaucaacgaccagcugaucaugaagaaccaccugagagacaucaugggcauccccuacugcaacuacagcaaguacugcuaccugaaccacaccgugaccggcaagaccagccugcccagaugcugccuggugagcaacggcagcuaccugaacgagacccacuucagcgacgacaucgagcagcaggccgacaacaugaucaccgagaugcugcagaaggaguacauggacagacagggcaagaccccccugggccugguggaccuguucguguucagcaccagcuucuaccugaucagcaucuuccugcaccuggugaagauccccacccacagacacgugaucggcaagcccugccccaagccccacagacugaaccacaugggcaucugcagcugcggccuguacaagcaccccggcgugcccgugaaguggaagagaugaggacuaguaauaaggaaacuguaugaaugucugugggcaggaagugaagagauccuucuguaaagguuuuuggaauuaugucugcugaauaauaaacuuuuuugaaauaauaaaucugguagaaaaaugagaucuaaaaaaaaaaaaaaaaaaaaaaaaaaaaaaaaaaaaaaaaaaaaaaaaaaaaaaaaaaaaaaaaaaaaaaaaaaaaaaaaaaaaaaaaaaaaaaaaaaaa

SEQ ID NO: 41175 - RNA, 1785 nt, Artificial Sequence
  mRNA product Design b-4 (A100) comprising derived and/or modified sequence from LASV(LASV237-NIG-2010;Clade II)__AIT17638__GPCmut12 (opt4)
aggagagucccgcagucggcguccagcggcucugcuuguucgugugugugucguugcaggccuuauucaagcuuaccaugggccagaucaucaccuucuuccaggaggugccccacgugaucgaggaggugaugaacaucgugcugaucgcccugagccugcuggccauccugaagggcaucuacaacguggccaccugcggccuguucggccuggugagcuuccugcugcugugcggcagaagcugcagcaccaccuacaagggcguguacgagcugcagacccuggagcuggacauggccagccugaacaugugcaugccccugagcugcaccaagaacaacagccaccacuacaucauggugggcaacgagaccggccuggagcugacccugaccaacaccagcaucaucaaccacaaguucugcaaccugagcgacgcccacaagaaggaccuguacgaccacgcccugaugagcaucaucagcaccuuccaccugagcauccccaacuucaaccaguacgaggccaugagcugcgacuucaacggcggcaagaucagcgugcaguacaaccugagccacaccuacgccguggacgccgccaaccacugcggcaccaucgccaacggcgugcugcagaccuucaugagaauggccuggggcggcagcuacaucgcccuggacagcggcaagggcagcugggacugcaucaugaccagcuaccaguaccugaucauccagaacaccaccugggaggaccacugccaguucagcagacccagccccaucggcuaccugggccugcugagccagagaaccagagacaucuacaucagcagaagacugcugggcaccuucaccuggacccugagcgacagcgagggcaacgagacccccggcggcuacugccugaccagauggaugcugaucgaggccgagcugaagugcuucggcaacaccgccguggccaagugcaacgagaagcacgacgaggaguucugcgacaugcugagacuguucgacuucugcaagcaggccaucagaagacugaagaccgaggcccagaugagcauccagcugaucaacaaggccgugaacgcccugaucaacgaccagcugaucaugaagaaccaccugagagacaucaugggcauccccuacugcaacuacagcaaguacugcuaccugaaccacaccgugaccggcaagaccagccugcccagaugcugccuggugagcaacggcagcuaccugaacgagacccacuucagcgacgacaucgagcagcaggccgacaacaugaucaccgagcugcugcagaaggaguacauggacagacagggcaagaccccccugggccugguggaccuguucguguucagcaccagcuucuaccugaucagcaucuuccugcaccugaucaagauccccacccacagacacaucaccggcaagcccugccccaagccccacagacugaaccacaugggcaucugcagcugcggccuguacaagcaccccggcgugcccgugaaguggaagagaugaggacuaguaauaaggaaacuguaugaaugucugugggcaggaagugaagagauccuucuguaaagguuuuuggaauuaugucugcugaauaauaaacuuuuuugaaauaauaaaucugguagaaaaaugagaucuaaaaaaaaaaaaaaaaaaaaaaaaaaaaaaaaaaaaaaaaaaaaaaaaaaaaaaaaaaaaaaaaaaaaaaaaaaaaaaaaaaaaaaaaaaaaaaaaaaaa

SEQ ID NO: 41176 - RNA, 1785 nt, Artificial Sequence
  mRNA product Design b-4 (A100) comprising derived and/or modified sequence from LASV(LASV253-NIG-2011;Clade II)__AIT17670__GPCmut12 (opt4)
aggagagucccgcagucggcguccagcggcucugcuuguucgugugugugucguugcaggccuuauucaagcuuaccaugggccagaucaucaccuucuuccaggaggugccccacgugaucgaggaggugaugaacaucgugcugaucgcccugagccugcuggccauccugaagggcaucuacaacguggccaccugcggccuguucggccuggugagcuuccugcugcugugcggcagaagcugcagcaccaccuacaagggcguguacgagcugcagacccuggagcuggacauggccagccugaacaugugcaugccccugagcugcaccaagaacaacagccaccacuacaucauggugggcaacgagaccggccuggagcugacccugaccaacaccagcaucaucaaccacaaguucugcaaccugagcgacgcccacaagaagaaccuguacgaccacgcccugaugagcaucaucagcaccuuccaccugagcauccccaacuucaaccaguacgaggccaugagcugcgacuucaacggcggcaagaucagcgugcaguacaaccugagccacaccuacgccguggacgccgccaaccacugcggcaccaucgccaacggcgugcugcagaccuucaugagaauggccuggggcggcagcuacaucgcccuggacagcggcaagggcagcugggacugcaucaugaccagcuaccaguaccugaucauccagaacaccaccugggaggaccacugccaguucagcagacccagccccaucggcuaccugggccugcugagccagagaaccagagacaucuacaucagcagaagacugcugggcaccuucaccuggacccugagcgacagcgagggcaacgagacccccggcggcuacugccugaccagauggaugcugaucgaggccgagcugaagugcuucggcaacaccgccguggccaagugcaacgagaagcacgacgaggaguucugcgacaugcugagacuguucgacuucugcaagcaggccaucagaagacugaaggccgaggcccagaugagcauccagcugaucaacaaggccgugaacgcccugaucaacgaccagcugaucaugaagaaccaccugagagacaucaugggcauccccuacugcaacuacagcaaguacugcuaccugaaccacaccgugaccggcagaaccagccugcccagaugcugccuggugagcaacggcagcuaccugaacgagacccacuucagcgacgacaucgagcagcaggccgacaacaugaucaccgagcugcugcagaaggaguacaucgacagacagggcaagaccccccugggccugguggaccuguucguguucagcaccagcuucuaccugaucagcaucuuccugcaccuggugaagauccccacccacagacacaucaucggcaagcccugccccaagccccacagacugaaccacaugggcaucugcagcugcggccuguacaagcaccccggcgugcccgugaaguggaagagaugaggacuaguaauaaggaaacuguaugaaugucugugggcaggaagugaagagauccuucuguaaagguuuuuggaauuaugucugcugaauaauaaacuuuuuugaaauaauaaaucugguagaaaaaugagaucuaaaaaaaaaaaaaaaaaaaaaaaaaaaaaaaaaaaaaaaaaaaaaaaaaaaaaaaaaaaaaaaaaaaaaaaaaaaaaaaaaaaaaaaaaaaaaaaaaaaa

SEQ ID NO: 41177 - RNA, 1785 nt, Artificial Sequence
  mRNA product Design b-4 (A100) comprising derived and/or modified sequence from LASV(LASV254-NIG-2011;Clade II)__AIT17674__GPCmut12 (opt4)
aggagagucccgcagucggcguccagcggcucugcuuguucgugugugugucguugcaggccuuauucaagcuuaccaugggccagaucaucaccuucuuccaggaggugccccacgugaucgaggaggugaugaacaucgugcugaucgcccugagccugcuggccauccugaagggcaucuacaacguggccaccugcggccuguucggccuggugagcuuccugcugcugugcggcagaagcugcagcaccaccuacaagggcguguacgagcugcagacccuggagcuggacaugaccaaccugaacaugugcaugccccugagcugcaccaagaacaacagccaccacuacaucauggugggcaacgagaccggccuggagcugacccugaccaacaccagcaucaucaaccacaaguucugcaaccugagcgacgcccacaagaagaaccuguacaaccacgcccugaugagcaucaucagcaccuuccaccugagcauccccaacuucaaccaguacgaggccaugagcugcgacuucaacggcggcaagaucagcgugcaguacaaccugagccacagcuacgccguggacgccgccaaccacugcggcaccaucgccaacggcgugcugcagaccuucaugagaauggccuggggcggcagcuacaucgcccuggacagcggcaagggcaacugggacugcaucaugaccagcuaccaguaccugaucauccagaacaccaccugggaggaccacugccaguucagcagacccagccccaucggcuaccugggccugcugagccagagaaccagagacaucuacaucagcagaagacugcugggcaccuucaccuggacccugagcgacagcgagggcaacgagacccccggcggcuacugccugaccagauggaugcugaucgaggccgagcugaagugcuucggcaacaccgccguggccaagugcaacgagaagcacgacgaggaguucugcgacaugcugagacuguucgacuucugcaagcaggccaucagaagacugaagaccgaggcccaggccaacauccagcugaucaacaaggccgugaacgcccugaucaacgaccagcugaucaugaagaaccaccugagagacaucaugggcauccccuacugcaacuacagcaaguacugcuaccugaaccacaccgugaccggcaagaccagccugcccagaugcugccuggugagcaacggcagcuaccugaacgagacccacuucagcgacgacaucgagcagcaggccgacaacaugaucaccgagcugcugcagaaggaguacauggacagacagggcaagaccccccugggccugguggaccuguucguguucagcaccagcuucuaccugaucagcaucuuccugcaccuggugaagauccccacccacagacacgugaucggcaagcccugccccaagccccacagacugaaccacaugggcaucugcagcugcggccuguacaagcaccccggcgugcccgugaaguggaagagaugaggacuaguaauaaggaaacuguaugaaugucugugggcaggaagugaagagauccuucuguaaagguuuuuggaauuaugucugcugaauaauaaacuuuuuugaaauaauaaaucugguagaaaaaugagaucuaaaaaaaaaaaaaaaaaaaaaaaaaaaaaaaaaaaaaaaaaaaaaaaaaaaaaaaaaaaaaaaaaaaaaaaaaaaaaaaaaaaaaaaaaaaaaaaaaaaa

SEQ ID NO: 41178 - RNA, 1785 nt, Artificial Sequence
  mRNA product Design b-4 (A100) comprising derived and/or modified sequence from LASV(Nig08-A19;Clade III)__ADU56618__GPCmut12 (opt4)
aggagagucccgcagucggcguccagcggcucugcuuguucgugugugugucguugcaggccuuauucaagcuuaccaugggccagaucgugaccuucuuccaggaggugccccacgugaucgaggaggugaugaacaucgugcugaucgcccugagcauccuggccauccugaagggccuguacaacaucgccaccugcggccugaucggccuggugaccuuccugcugcugagcggcagaagcugcagcaugaccuacaagggcguguacgagcugcagacccuggagcugaacaugaacacccugaacaugugcaugccccugagcugcaccaagaacaacagccaccacuacaucauggugggcaacgagaccggccuggagcugacccugaccaacaccagccugcugcaccacaaguucugcaaccugagcgacgcccacaagaagaaccuguacgaccacacccugaugagcaucaucagcaccuuccaccugagcauccccaacuucaaccaguacgaggccaugagcugcgacuucaacggcggcaagaucaccgugcaguacaaccugagccacagcuacgccaucgacgccgccaaccacugcggcaccguggccaacggcgugcugcagaccuucaugagaauggccuggggcggcagcuacaucgcccuggacagcggcagaggcaagugggacugcaucaugaccagcuaccaguaccugaucauccagaacaccaccugggaggaccacugccaguucagcagacccagccccaucggcuaccugggccugcugagccagagaaccagagacaucuacaucagcagaagacugcugggcaccuucaccuggacccugagcgacagcgagggcaacgagacccccggcggcuacugccugaccagauggaugcugaucgaggccgagcugaagugcuucggcaacaccgccguggccaagugcaacgagaagcacgacgaggaguucugcgacaugcugagacuguucgacuucugcaagcaggccaucagaagacugaaggccgaggcccagaugagcauccagcugaucaacaaggccgugaacgcccugaucaacgaccagcugaucaugaagaaccaccugagagacaucaugggcauccccuacugcaacuacagcaaguacugcuaccugaaccacaccagcaccggcagaaccagccugcccagaugcugccuggugagcaacggcagcuaccugaacgagacccacuucagcgacgacaucgagcagcaggccgacaacaugaucaccgagaugcugcagaaggaguaccuggacagacagggcaagaccccccugggccugguggaccuguucguguucagcaccagcuucuaccugaucagcaucuuccugcaccuggugaagauccccacccacagacacaucgugggcaagcccugccccaagccccacagacugaaccacaugggcaucugcagcugcggccuguacaagcagcccggcgugcccgugagauggaagagaugaggacuaguaauaaggaaacuguaugaaugucugugggcaggaagugaagagauccuucuguaaagguuuuuggaauuaugucugcugaauaauaaacuuuuuugaaauaauaaaucugguagaaaaaugagaucuaaaaaaaaaaaaaaaaaaaaaaaaaaaaaaaaaaaaaaaaaaaaaaaaaaaaaaaaaaaaaaaaaaaaaaaaaaaaaaaaaaaaaaaaaaaaaaaaaaaa

SEQ ID NO: 41179 - RNA, 1788 nt, Artificial Sequence
  mRNA product Design b-4 (A100) comprising derived and/or modified sequence from LASV(G1180-SLE-2010;Clade IV)__AIT17168__GPCmut12 (opt4)
aggagagucccgcagucggcguccagcggcucugcuuguucgugugugugucguugcaggccuuauucaagcuuaccaugggccagaucgugaccuucuuccaggaggugccccacgugaucgaggaggugaugaacaucgugcugaucgcccugagcauccuggccgugcugaagggccuguacaacuucgccaccugcggccuggugggccugcugaccuuccugcugcugugcggcagaagcugcaccgccagcagauacaagggcguguacgagcugcagacccuggagcugaacauggagacccugaacaugugcaugccccugagcugcaccaagaacaacagccaccacuacaucauggugggcaacgagaccggccuggagcugacccugaccaacaccagcaucaucaaccacaaguucugcaaccugagcgacgcccacaagaagaaccuguacgaccacgcccugaugagcaucaucagcaccuuccaccugagcauccccaacuucaaccaguacgaggccaugagcugcgacuucaacggcggcaagaucagcgugcaguacaaccugagccacagcuacgccggcgacgccgccaaccacugcggcaccguggccaacggcgugcugcagaccuucaugagaauggccuggggcggcagcuacaucgcccuggacagcggccacggcagcugggacugcaucaugaccagcuaccaguaccugaucauccagaacaccaccugggaggaccacugccaguucagcagacccagccccaucggcuaccugggccugcugagccagagaaccagagacaucuacaucagcagaagacugcugggcaccuucaccuggacccugagcgacagcgagggcaaggacacccccggcggcuacugccugaccagauggaugcugaucgaggccgagcugaagugcuucggcaacaccgccguggccaagugcaacgagaagcacgacgaggaguucugcgacaugcugagacuguucgacuucugcaagcaggccauccagagacugaaggccgaggcccagaugagcauccagcugaucaacaaggccgugaacgcccugaucaacgaccagcugaucaugaagaaccaccugagagacaucaugggcauccccuacugcaacuacagcaaguacugcuaccugaaccacaccaccaccggcaagaccagccugcccaagugcugccuggugagcaacggcagcuaccugaacgagacccacuucagcgacgacaucgagcagcaggccgacaacaugaucaccgagaugcugcagaaggaguacauggagagacagggcaagaccccccugggccugguggaccuguucguguucagcaccagcuucuaccugaucagcaucuuccugcaccuggugaagauccccacccacagacacaucgugggcaagagcugccccaagccccacagacugaaccacaugggcaucugcagcugcggccuguacaagcagcccggcgugcccgugaaguggaagagaugaggacuaguaauaaggaaacuguaugaaugucugugggcaggaagugaagagauccuucuguaaagguuuuuggaauuaugucugcugaauaauaaacuuuuuugaaauaauaaaucugguagaaaaaugagaucuaaaaaaaaaaaaaaaaaaaaaaaaaaaaaaaaaaaaaaaaaaaaaaaaaaaaaaaaaaaaaaaaaaaaaaaaaaaaaaaaaaaaaaaaaaaaaaaaaaaa

SEQ ID NO: 41180 - RNA, 1788 nt, Artificial Sequence
  mRNA product Design b-4 (A100) comprising derived and/or modified sequence from LASV(G1442-SLE-2011;Clade IV)__AIT17180__GPCmut12 (opt4)
aggagagucccgcagucggcguccagcggcucugcuuguucgugugugugucguugcaggccuuauucaagcuuaccaugggccagaucgugaccuucuuccaggaggugccccacgugaucgaggaggugaugaacaucgugcugaucgcccugagcauccuggccgugcugaagggccuguacaacguggccaccugcggccugaucggccuggugaccuuccugcugcugugcggcagaagcugcaccaccacccuguacaagggcguguacgagcugcagacccuggagcugaacauggagacccugaacaugugcaugccccugagcugcaccaagaacaacagccaccacuacaucagagugggcaacgagaccggccuggagcugacccugaccaacaccagcaucaucaaccacaaguucugcaaccugagcgacgcccacaagaagaaccuguacgaccacgcccugaugagcaucaucagcaccuuccaccugagcauccccaacuucaaccaguacgaggccaugagcugcgacuucaacggcggcaagaucagcgugcaguacaaccugagccacagcuacgccggcgacgccgccaaccacugcggcaccguggccaacggcgugcugcagaccuucaugagaauggccuggggcggcagcuacaucgcccuggacagcggcagaggcaacugggacugcaucaugaccagcuaccaguaccugaucauccagaacaccaccugggacgaccacugccaguucagcagacccagccccaucggcuaccugggccugcugagccagagaaccagagacguguacaucagcagaagacugcugggcaccuucaccuggacccugagcgacagcgagggcaaggacacccccggcggcuacugccugaccagauggaugcugaucgaggccgagcugaagugcuucggcaacaccgccguggccaagugcaacgagaagcacgacgaggaguucugcgacaugcugagacuguucgacuucugcaagcaggccauccagagacugaaggccgaggcccagaugagcauccagcugaucaacaaggccgugaacgcccugaucaacgaccagcugaucaugaagaaccaccugagagacaucaugggcauccccuacugcaacuacagcaaguacugcuaccugaacaacaccgccaccggcaagaccagccugcccaagugcugccugaucagcaacggcagcuaccugaacgagacccacuucagcgacgacaucgagcaggaggccgacaacaugaucaccgagaugcugcagaaggaguacauggagagacagggcaagaccccccugggccugguggaccuguucguguucagcaccagcuucuaccugaucagcaucuuccugcaccuggugaagauccccacccacagacacaucgugggcaagagcugccccaagccccacagacugaaccacaugggcaucugcagcugcggccuguacaagcagcccggcgugcccgugagauggaagagaugaggacuaguaauaaggaaacuguaugaaugucugugggcaggaagugaagagauccuucuguaaagguuuuuggaauuaugucugcugaauaauaaacuuuuuugaaauaauaaaucugguagaaaaaugagaucuaaaaaaaaaaaaaaaaaaaaaaaaaaaaaaaaaaaaaaaaaaaaaaaaaaaaaaaaaaaaaaaaaaaaaaaaaaaaaaaaaaaaaaaaaaaaaaaaaaaa

SEQ ID NO: 41181 - RNA, 1788 nt, Artificial Sequence
  mRNA product Design b-4 (A100) comprising derived and/or modified sequence from LASV(G3010-SLE-2013;Clade IV)__AIT17344__GPCmut12 (opt4)
aggagagucccgcagucggcguccagcggcucugcuuguucgugugugugucguugcaggccuuauucaagcuuaccaugggccagaucgugaccuucuuccaggaggugccccacgugaucgaggaggugaugaacaucgugcugaucgcccugagcauccuggccgugcugaagggccuguacaacuucgccaccugcggccuggugggccuggugaccuuccugcugcugugcggcagaagcugcaccaccagccuguacaagggcguguacgagcugcagacccuggagcugaacauggagacccugaacaugugcaugccccugagcugcaccaagaacaacagccaccacuacaucauggugggcaacgagaccggccuggagcugacccugaccaacaccagcaucaucaaccacaaguucugcaaccugagcgacgcccacaagaagaaccuguacaaccacgcccugaugagcaucaucagcaccuuccaccugagcauccccaacuucaaccaguacgaggccaugagcugcgacuucaacggcggcaagaucagcgugcaguacaaccugagccacagcuacgccggcgacgccgccagccacugcggcaccguggccaacggcgugcugcagaccuucaugagaauggccuggggcggcagcuacaucgcccuggacagcggcuacggcaagugggacugcaucaugaccagcuaccaguaccugaucauccagaacaccaccugggaggaccacugccaguucagcagacccagccccaucggcuaccugggccugcugagccagagaaccagagacaucuacaucagcagaagacugcugggcaccuucaccuggacccugagcgacagcgagggcaaggacacccccggcggcuacugccugaccagauggaugcugaucgaggccgagcugaagugcuucggcaacaccgccguggccaagugcaacgagaagcacgacgaggaguucugcgacaugcugagacuguucgacuucugcaagcaggccauccagagacugaagaccgaggcccagaugagcauccagcugaucaacaaggccgugaacgcccugaucaacgaccagcugaucaugaagaaccaccugagagacaucaugggcauccccuacugcaacuacagcaaguacugcuaccugaaccacaccaccaccggcaagaccagccugcccaagugcugccuggugagcaacggcagcuaccugaacgagacccacuucagcgacgacaucgagcagcaggccgacaacaugaucaccgagaugcugcagaaggaguacauggagagacagggcaagaccccccugggccugguggaccuguucguguucagcaccagcuucuaccugaucagcaucuuccugcaccuggugaagauccccacccacagacacaucgugggcaagagcugccccaagccccacagacugaaccacaugggcaucugcagcugcggccuguacaagcagcccggcgugcccgugagauggaagagaugaggacuaguaauaaggaaacuguaugaaugucugugggcaggaagugaagagauccuucuguaaagguuuuuggaauuaugucugcugaauaauaaacuuuuuugaaauaauaaaucugguagaaaaaugagaucuaaaaaaaaaaaaaaaaaaaaaaaaaaaaaaaaaaaaaaaaaaaaaaaaaaaaaaaaaaaaaaaaaaaaaaaaaaaaaaaaaaaaaaaaaaaaaaaaaaaa

SEQ ID NO: 41182 - RNA, 1788 nt, Artificial Sequence
  mRNA product Design b-4 (A100) comprising derived and/or modified sequence from LASV(G502-SLE-2009;Clade IV)__AIT17126__GPCmut12 (opt4)
aggagagucccgcagucggcguccagcggcucugcuuguucgugugugugucguugcaggccuuauucaagcuuaccaugggccagaucgugaccuucuuccaggaggugccccacgugaucgaggaggugaugaacaucgugcugaucgcccugagcauccuggccgugcugaagggccuguacaacuucgccaccugcggccuggugggccugcugaccuuccugcugcugugcggcagaagcugcaccaccggccuguacaagggcguguacgagcugcagacccuggagcugaacauggagacccugaacaugugcaugccccugagcugcaccaagaacaacagccaccacuacaucauggugggcaacgagaccggccuggagcugacccugaccaacaccagcaucaucaaccacaaguucugcaaccugagcgacgcccacaagaagaaccuguacgaccacgcccugaugagcaucaucagcaccuuccaccugagcauccccaacuucaaccaguacgaggccaugagcugcgacuucaacggcggcaagaucagcgugcaguacaaccugagccacagcuacgccggcgacgccgccgaccacugcggcaccguggccaacggcgugcugcagaccuucaugagaauggccuggggcggcagcuacaucgcccuggacagcggcagaggcagaugggacugcaucaugaccagcuaccaguaccugaucauccagaacaccaccugggaggaccacugccaguucagcagacccagccccaucggcuaccugggccugcugagccagagaaccagagacaucuacaucagcagaagacugcugggcaccuucaccuggacccugagcgacagcgagggcaaggacacccccggcggcuacugccugaccagauggaugcugaucgaggccgagcugaagugcuucggcaacaccgccguggccaagugcaacgagaagcacgacgaggaguucugcgacaugcugagacuguucgacuucugcaagcaggccauccagagacugaaggccgaggcccagaugagcauccagcugaucaacaaggccgugaacgcccugaucaacgaccagcuggugaugaagaaccaccugagagacaucaugggcauccccuacugcaacuacagcagauacugcuaccugaaccacaccaccaccggcagaaccagccugcccaagugcugccuggugagcaacggcagcuaccugaacgagacccacuucagcgacgacaucgagcagcaggccgacaacaugaucaccgagaugcugcagaaggaguacauggagagacagggcaagaccccccugggccugguggaccuguucguguucagcaccagcuucuaccugaucagcaucuuccugcaccuggugaagauccccacccacagacacaucgugggcaagagcugccccaagccccacagacugaaccacaugggcaucugcagcugcggccuguacaagcagcccggcgugcccgugaaguggaagagaugaggacuaguaauaaggaaacuguaugaaugucugugggcaggaagugaagagauccuucuguaaagguuuuuggaauuaugucugcugaauaauaaacuuuuuugaaauaauaaaucugguagaaaaaugagaucuaaaaaaaaaaaaaaaaaaaaaaaaaaaaaaaaaaaaaaaaaaaaaaaaaaaaaaaaaaaaaaaaaaaaaaaaaaaaaaaaaaaaaaaaaaaaaaaaaaaa

SEQ ID NO: 41183 - RNA, 1788 nt, Artificial Sequence
  mRNA product Design b-4 (A100) comprising derived and/or modified sequence from LASV(G733-SLE-2010;Clade IV)__AIT17154__GPCmut12 (opt4)
aggagagucccgcagucggcguccagcggcucugcuuguucgugugugugucguugcaggccuuauucaagcuuaccaugggccagaucgugaccuucuuccaggaggugccccacgugaucgaggaggugaugaacaucgugcugaucgcccugagcauccuggccgugcugaagggccuguacaacuucgccaccugcggcaucgugggccuggugagcuuccugcugcugugcggcagaagcugcaccaccagccuguacaagggcguguacgagcugcagacccuggagcugaacauggagacccugaacaugugcaugccccugagcugcaccaagaacaacagccaccacuacaucauggugggcaacgagaccggccuggagcugacccugaccaacaccagcaucaucaaccacaaguucugcaaccugagcgacgcccacaagaagaaccuguacgaccacgcccugaugagcaucaucagcaccuuccaccugagcauccccaacuucaaccaguacgaggccaugagcugcgacuucaacggcggcaagaucagcgugcaguacaaccugagccacagcuacgccggcgacgccgccaaccacugcggcaccaucgccaacggcgugcugcagaccuucaugagaauggccuggggcggcagcuacaucgcccuggacagcggcagagacagaugggacugcaucaugaccagcuaccaguaccugaucauccagaacaccaccugggaggaccacugccaguucagcagacccagccccaucggcuaccugggccugcugagccagagaaccagagacaucuacaucagcagaagacugcugggcaccuucaccuggacccugagcgacagcgagggcaaggacacccccggcggcuacugccugaccagauggaugcugaucgaggccgagcugaagugcuucggcaacaccgccguggccaagugcaacgagaagcacgacgaggaguucugcgacaugcugagacuguucgacuucugcaagcaggccauccagagacugaaggccgaggcccagaugagcauccagcugaucaacaaggccgugaacgcccugaucaacgaccagcugaucaugaagaaccaccugagagacaucaugggcauccccuacugcaacuacagcaaguacugcuaccugaaccacaccaccaccggcaagaccagccugcccaagugcugccuggugagcaacggcagcuaccugaacgagacccacuucagcgacgacaucgagcagcaggccgacaacaugaucaccgagaugcugcagaaggaguacauggagagacagggcaagaccccccugggccugguggaccuguucguguucagcaccagcuucuaccugaucagcaucuuccugcaccuggugaagauccccacccacagacacguggugggcaagagcugccccaagccccacagacugaaccacaugggcaucugcagcugcggccuguacggccagcccggcgugcccgugaaguggaagagaugaggacuaguaauaaggaaacuguaugaaugucugugggcaggaagugaagagauccuucuguaaagguuuuuggaauuaugucugcugaauaauaaacuuuuuugaaauaauaaaucugguagaaaaaugagaucuaaaaaaaaaaaaaaaaaaaaaaaaaaaaaaaaaaaaaaaaaaaaaaaaaaaaaaaaaaaaaaaaaaaaaaaaaaaaaaaaaaaaaaaaaaaaaaaaaaaa

SEQ ID NO: 41184 - RNA, 1788 nt, Artificial Sequence
  mRNA product Design b-4 (A100) comprising derived and/or modified sequence from MOPV/LASV reassortant(IGS-1;Clade IV)__AFY05576__GPCmut12 (opt4)
aggagagucccgcagucggcguccagcggcucugcuuguucgugugugugucguugcaggccuuauucaagcuuaccaugggccagaucgugaccuucuuccaggaggugccccacgugaucgaggaggugaugaacaucgugcugaucgcccugagcgugcuggccgugcugaagggccuguacaacuucgccaccugcggccuggugggccuggugaccuuccugcugcugugcggcagaagcugcaccaccagccuguacaagggcguguacgagcugcagacccuggagcugaacauggagacccugaacaugugcaugccccugagcugcaccaagaacaacagccaccacuacaucauggugggcaacgagaccggccuggagcugacccugaccaacaccagcaucaucaaccacaaguucugcaaccugagcgacgcccacaagaagaaccuguacgaccacgcccugaugagcaucaucagcaccuuccaccugagcauccccaacuucaaccaguacgaggccaugagcugcgacuucaacggcggcaagaucagcgugcaguacaaccugagccacagcuacgccggcgacgccgccaaccacugcggcaccguggccaacggcgugcugcagaccuucaugagaauggccuggggcggcagcuacaucgcccuggacagcggcagaggcaacugggacugcaucaugaccagcuaccaguaccugaucauccagaacaccaccugggaggaccacugccaguucagcagacccagccccaucggcuaccugggccugcugagccagagaaccagagacaucuacaucagcagaagacugcugggcaccuucaccuggacccugagcgacagcgagggcgaggacacccccggcggcuacugccugaccagauggaugcugaucgaggccgagcugaagugcuucggcaacaccgccguggccaagugcaacgagaagcacgacgaggaguucugcgacaugcugagacuguucgacuucugcaagcaggccauccagagacugaaggccgaggcccagaugagcauccagcugaucaacaaggccgugaacgcccugaucaacgaccagcugaucaugaagaaccaccugagagacaucaugggcauccccuacugcaacuacagcaaguacugcuaccugaaccacaccaccaccggcagaaccagccugcccaagugcugccuggugagcaacggcagcuaccugaacgagacccacuucagcgacgacaucgagcagcaggccgacaacaugaucaccgagaugcugcagaaggaguacauggagagacagggcaagaccccccugggccugguggaccuguucguguucagcaccagcuucuaccugaucagcaucuuccugcaccuggugaagauccccacccacagacacaucgugggcaagagcugccccaagccccacagacugaaccacaugggcaucugcagcugcggccuguacaagcagcccggcgugcccgugaaguggaagagaugaggacuaguaauaaggaaacuguaugaaugucugugggcaggaagugaagagauccuucuguaaagguuuuuggaauuaugucugcugaauaauaaacuuuuuugaaauaauaaaucugguagaaaaaugagaucuaaaaaaaaaaaaaaaaaaaaaaaaaaaaaaaaaaaaaaaaaaaaaaaaaaaaaaaaaaaaaaaaaaaaaaaaaaaaaaaaaaaaaaaaaaaaaaaaaaaa

SEQ ID NO: 41185 - RNA, 1788 nt, Artificial Sequence
  mRNA product Design b-4 (A100) comprising derived and/or modified sequence from LASV(LM765-SLE-2012;Clade IV)__AIT17814__GPCmut12 (opt4)
aggagagucccgcagucggcguccagcggcucugcuuguucgugugugugucguugcaggccuuauucaagcuuaccaugggccagaucgugaccuucuuccaggaggugccccacgugaucgaggaggugaugaacaucgugcugaucgcccugagcauccuggccgugcugaagggccuguacaacuucgccaccugcggccuggugggccuggugaccuuccugcugcugugcggcagaagcugcaccaccagccuguacaagggcguguacgagcugcagacccuggagcugaacauggagacccugaacaugugcaugccccugagcugcaccaagaacaacagccaccacuacaucauggugggcaacgagaccggccuggagcugacccugaccaacaccagcaucaucgaccacaaguucugcaaccugagcgacgcccacagaaagaaccuguacgaccacgcccugaugagcaucaucagcaccuuccaccugagcauccccaacuucaaccaguacgaggccaugagcugcgacuucaacggcggcaagaucagcgugcaguacaaccugagccacagcuacgccaaggacgccgccgaccacugcggcaccguggccaacggcgugcugcagaccuucaugagaauggccuggggcggcagcuacaucgcccuggacagcggcagaggcagaugggacugcaucaugaccagcuaccaguaccugaucauccagaacaccaccugggaggaccacugccaguucagcagacccagccccaucggcuaccugggccugcugagccagagaaccagagacaucuacaucagcagaagacugcugggcaccuucaccuggacccugagcgacagcgagggcaaggacacccccggcggcuacugccugaccagauggaugcugaucgaggccgagcugaagugcuucggcaacaccgccguggccaagugcaacgagaagcacgacgaggaguucugcgacaugcugagacuguucgacuucugcaagcaggccauccagagacugaaggccgaggcccagaugagcauccagcugaucaacaaggccgugaacgcccugaucaacgaccagcugaucaugaagaaccaccugagagacaucaugggcauccccuacugcaacuacagcaaguacugcuaccugaaccacaccaccaccggcaagaccagccugcccaagugcugccuggugagcaacggcagcuaccugaacgagacccacuucagcgacgacaucgagcagcaggccgacaacaugaucaccgagaugcugcagaaggaguacauggagagacagggcaagaccccccugggccugguggaccuguucguguucagcaccagcuucuaccugaucagcaucuuccugcaccuggugaagauccccacccacagacacaucgugggcaagcccugccccaagccccacagacugaaccacaugggcaucugcagcugcggccuguacaagcagcccggcgugcccgugaaguggaagagaugaggacuaguaauaaggaaacuguaugaaugucugugggcaggaagugaagagauccuucuguaaagguuuuuggaauuaugucugcugaauaauaaacuuuuuugaaauaauaaaucugguagaaaaaugagaucuaaaaaaaaaaaaaaaaaaaaaaaaaaaaaaaaaaaaaaaaaaaaaaaaaaaaaaaaaaaaaaaaaaaaaaaaaaaaaaaaaaaaaaaaaaaaaaaaaaaa

SEQ ID NO: 41186 - RNA, 1788 nt, Artificial Sequence
  mRNA product Design b-4 (A100) comprising derived and/or modified sequence from LASV(LM776-SLE-2012;Clade IV)__AIT17824__GPCmut12 (opt4)
aggagagucccgcagucggcguccagcggcucugcuuguucgugugugugucguugcaggccuuauucaagcuuaccaugggccagaucgugaccuucuuccaggaggugccccacgugaucgaggaggugaugaacaucgugcugaucgcccugagcauccuggccgugcugaagggccuguacaacuucgccaccugcggccuggugggccuggugaccuuccugcugcugugcggcagaagcugcaccaccagcguguacaagggcguguacgagcugcagacccuggagcugaacauggagacccugaacaugugcaugccccugagcugcaccaagaacaacagccaccacuacaucauggugggcaacgagaccggccuggagcugacccugaccaacaccagcaucaucaaccacaaguucugcaaccugagcgacgcccacaagaagaaccuguacgaccacgcccugaugagcaucaucagcaccuuccaccugagcauccccaacuucaaccaguacgaggccaugagcugcgacuucaacggcggcaagaucagcgugcaguacaaccugagccacagcuacgccggcgacgccgccaaccacugcggcaccguggccaacggcgugcugcagaccuucaugagaauggccuggggcggcagcuacaucgcccuggacagcggccacggcaagugggacugcaucaugaccagcuaccaguaccugaucauccagaacaccaccugggaggaccacugccaguucagcagacccagccccaucggcuaccugggccugcugagccagagaaccagagacaucuacaucagcagaagacugcugggcaccuucaccuggacccugagcgacagcgagggcaaggacacccccggcggcuacugccugaccagauggaugcugaucgaggccgagcugaagugcuucggcaacaccgccguggccaagugcaacgagaagcacgacgaggaguucugcgacaugcugagacuguucgacuucugcaagcaggccauccagagacugaaggccgaggcccagaugagcauccagcugaucaacaaggccgugaacgcccugaucaacgaccagcugaucaugaagaaccaccugagagacaucaugggcauccccuacugcaacuacagcaaguacugcuaccugaaccacaccaccaccggcaagaccagccugcccaagugcugccuggugagcaacggcagcuaccugaacgagacccacuucagcgacgacaucgagcagcaggccgacaacaugaucaccgagaugcugcagaaggaguacauggagagacagggcaagaccccccugggccugguggaccuguucguguucagcaccagcuucuaccugaucagcaucuuccugcaccuggugaagauccccacccacagacacaucgugggcaagagcugccccaagccccacagacugaaccacaugggcaucugcagcugcggccuguacaagcagcccggcgugcccgugagauggaagagaugaggacuaguaauaaggaaacuguaugaaugucugugggcaggaagugaagagauccuucuguaaagguuuuuggaauuaugucugcugaauaauaaacuuuuuugaaauaauaaaucugguagaaaaaugagaucuaaaaaaaaaaaaaaaaaaaaaaaaaaaaaaaaaaaaaaaaaaaaaaaaaaaaaaaaaaaaaaaaaaaaaaaaaaaaaaaaaaaaaaaaaaaaaaaaaaaa

SEQ ID NO: 41187 - RNA, 1788 nt, Artificial Sequence
  mRNA product Design b-4 (A100) comprising derived and/or modified sequence from LASV(Mad39;Clade IV)__ANH09722__GPCmut12 (opt4)
aggagagucccgcagucggcguccagcggcucugcuuguucgugugugugucguugcaggccuuauucaagcuuaccaugggccagaucgugaccuucuuccaggaggugccccacgugaucgaggaggugaugaacaucgugcugaucgcccugagcauccuggccgugcugaagggccuguacaacguggccaccugcggccugaucggccuggugaccuuccugcugcugugcggcagaagcugcaccaccacccuguacaagggcguguacgagcugcaggcccuggagcugaacauggagacccugaacaugugcaugccccugagcugcaccaagaacaacagccaccacuacaucagagugggcaacgagaccggccuggagcugacccugaccaacaccagccugaucaaccacaaguucugcaaccugagcgacgcccacaagaagaaccuguacgaccacgcccugaugagcaucaucagcaccuuccaccugagcauccccaacuucaaccaguacgaggccaugagcugcgacuucaacgacggcaagaucagcgugcaguacaaccugagccacaccuacgccggcgacaccgccaaccacugcggcaccguggccaacggcgugcugcagaccuucaugagaauggccuggggcggcagcuacaucgcccuggacagcggcagaggcggcugggacugcaucaugaccagcuaccaguaccugaucauccagaacaccaccugggaggaccacugccaguucagcagacccagccccaucggcuaccugggccugcugagccagagaaccagagacaucuacaucagcagaagacugcugggcaccuucaccuggacccugagcgacagcgagggcaaggacacccccggcggcuacugccugaccagauggaugcugaucgaggccgagcugaagugcuucggcaacaccgccguggccaagugcaacgagaagcacgacgaggaguucugcgacaugcugagacuguucgacuucugcaagcaggccauccagagacugaaggccgaggcccagaugagcauccagcugaucaacaaggccgugaacgcccugaucaacgaccagcugaucaugaagaaccaccugagagacaucaugggcauccccuacugcaacuacagcaaguacugcuaccugaaccacaccgugaccggcaagaccagccugcccaagugcugccuggugagcaacggcagcuaccugaacgagacccacuucagcgacgacaucgagcagcaggccgacaacaugaucaccgagaugcugcagaaggaguacauggagagacagggcaagaccccccugggccugguggaccuguucguguucagcaccagcuucuaccugaucagcaucuuccugcaccuggugaagauccccacccacagacacguggugggcaagcccugccccaagccccacagacugaaccacaugggcaucugcagcugcggcuucuacaagcagcccggcgugcccgugagauggaagagaugaggacuaguaauaaggaaacuguaugaaugucugugggcaggaagugaagagauccuucuguaaagguuuuuggaauuaugucugcugaauaauaaacuuuuuugaaauaauaaaucugguagaaaaaugagaucuaaaaaaaaaaaaaaaaaaaaaaaaaaaaaaaaaaaaaaaaaaaaaaaaaaaaaaaaaaaaaaaaaaaaaaaaaaaaaaaaaaaaaaaaaaaaaaaaaaaa

SEQ ID NO: 41188 - RNA, 1788 nt, Artificial Sequence
  mRNA product Design b-4 (A100) comprising derived and/or modified sequence from LASV(Z0947-SLE-2011;Clade IV)__AIT17840__GPCmut12 (opt4)
aggagagucccgcagucggcguccagcggcucugcuuguucgugugugugucguugcaggccuuauucaagcuuaccaugggccagaucgugaccuucuuccaggaggugccccacgugaucgaggaggugaugaacaucgugcugaucgcccugagcauccuggccgugcugaagggccuguacaacuucgccaccugcggccuggugggccuggugaccuuccugcugcugugcggcagaagcugcaccaucagccuguacaagggcguguacgagcugcagacccuggagcugaacauggagacccugaacaugugcaugccccugagcugcaccaagaacaacagccaccacuacaucauggugggcaacgagaccggccuggagcugacccugaccaacaccagcaucaucaaccacaaguucugcaaccugagcgacgcccacaagaagaaccuguacgaccacgcccugaugagcaucaucagcaccuuccaccugagcauccccaacuucaaccaguacgaggccaugagcugcgacuucaacggcggcaagaucagcgugcaguacaaccugagccacagcuacgccggcgacgccgccaaccacugcggcaccguggccaacggcgugcugcagaccuucaugagaauggccuggggcggcagcuacaucgcccuggacagcggcagagacagaugggacugcaucaugaccagcuaccaguaccugaucauccagaacaccaccugggaggaccacugccaguucagcagacccagccccaucggcuaccugggccugcugagccagagaaccagagacaucuacaucagcagaagacugcugggcaccuucaccuggacccugagcgacagcgagggcaaggacacccccggcggcuacugccugaccagauggaugcugaucgaggccgagcugaagugcuucggcaacaccgccguggccaagugcaacgagaagcacgacgaggaguucugcgacaugcugagacuguucgacuucugcaagcaggccauccagagacugaaggccgaggcccagaugagcauccagcugaucaacaaggccgugaacgcccugaucaacgaccagcugaucaugaagaaccaccugagagacaucaugggcauccccuacugcaacuacagcaaguacugcuaccugaaccacaccaccaccggcaagaccagccugcccaagugcugccuggugagcaacggcagcuaccugaacgagacccacuucagcgacgacaucgagcagcaggccgacaacaugaucaccgagaugcugcagaaggaguacauggagagacagggcaagaccccccugggccugguggaccuguucguguucagcaccagcuucuaccugaucagcaucuuccugcaccuggugaagauccccacccacagacacaucgugggcaagcccugccccaagccccacagacugaaccacaugggcaucugcagcugcggccuguacaagcagcccggcgugcccgugaaguggaagagaugaggacuaguaauaaggaaacuguaugaaugucugugggcaggaagugaagagauccuucuguaaagguuuuuggaauuaugucugcugaauaauaaacuuuuuugaaauaauaaaucugguagaaaaaugagaucuaaaaaaaaaaaaaaaaaaaaaaaaaaaaaaaaaaaaaaaaaaaaaaaaaaaaaaaaaaaaaaaaaaaaaaaaaaaaaaaaaaaaaaaaaaaaaaaaaaaa

SEQ ID NO: 41189 - RNA, 1788 nt, Artificial Sequence
  mRNA product Design b-4 (A100) comprising derived and/or modified sequence from LASV(Josiah;Clade IV)__NP_694870__GPCmut12 (opt5)
aggagagucccgcagucggcguccagcggcucugcuuguucgugugugugucguugcaggccuuauucaagcuuaccaugggccagaucgugaccuucuuucaagaggucccccacguuauugaagaggugaugaacaucgugcugauugcccucagcguccuggcugugcuuaaggggcuguacaauuucgccacaugcggacucguuggccuggugacguuucuucugcucugugggagauccugcaccacaucucuguauaaaggagucuacgaacugcagacccucgagcugaacauggaaacacuuaauauguguaugccucugagcugcaccaagaacaauucccaucacuauaucauggugggcaacgagacagggcucgagcugacccuuacgaauaccucuauuaucaaccauaaauucuguaaucugagcgacgcgcacaagaaaaaccucuacgaucaugcucugauguccaucauuucuacauuucaccugagcaucccgaauuucaaccaguaugaagccauguccugcgacuuuaauggaggcaagauuagcguucaguacaaccucucucacuccuaugccggcgaugcugccaaucauugugggaccguggcuaacggaguccugcaaacauucaugcggauggccuggggcgggagcuacaucgcgcuugacucuggacgcggcaacugggauugcauuaugaccuccuaccaguaucugaucauucagaauacgacaugggaggaccacugucaguuuagcagacccucuccuaucggguaccucggacugcuuucccaacggacccgcgauaucuauauuagcagacggcugcucggcacauucaccuggacccuguccgacucugaaggcaaggauacacccgggggauacugccugacgcgcuggaugcucaucgaggccgagcugaaauguuuuggcaacaccgcuguggccaagugcaaugaaaaacaugacgaggaguucugcgauaugcuuagacuguuugacuucuguaagcaggcuauucagcggcucaaagccgaagcgcagaugagcauccaacugauuaacaaggccgugaaugcucuuaucaacgaucagcugaucaugaagaaucaccuccgcgacauuauggggaucccuuauugcaacuacuccaaauauuguuaccugaaucacacaaccacaggaagaaccagccugcccaagugcugucucgucucuaacggcuccuaccugaaugaaacgcauuucagcgacgauauugagcagcaagccgacaacaugaucacagagaugcuucagaaagaauauauggagcggcaggggaagaccccucugggacucguugaucuguuuguguucucuaccagcuuuuaccugauuuccaucuuccuucaccucgugaaaaucccgacacaucgccacauugucggcaagucuugccccaaaccucauagacugaaucacaugggcaucuguagcugcgggcuguauaagcagcccggagugccuguuaaguggaaacggugaggacuaguaauaaggaaacuguaugaaugucugugggcaggaagugaagagauccuucuguaaagguuuuuggaauuaugucugcugaauaauaaacuuuuuugaaauaauaaaucugguagaaaaaugagaucuaaaaaaaaaaaaaaaaaaaaaaaaaaaaaaaaaaaaaaaaaaaaaaaaaaaaaaaaaaaaaaaaaaaaaaaaaaaaaaaaaaaaaaaaaaaaaaaaaaaa

SEQ ID NO: 41190 - RNA, 1785 nt, Artificial Sequence
  mRNA product Design b-4 (A100) comprising derived and/or modified sequence from LASV(LP;Clade I)__AAF86701__GPCmut12 (opt5)
aggagagucccgcagucggcguccagcggcucugcuuguucgugugugugucguugcaggccuuauucaagcuuaccaugggccagaucauuaccuucuuucaagaggugccccacgucaucgaagagguuaugaacauugugcugaucgcccucagccugcuugcuauucugaaggggcucuacaauaucgccacaugcggaaucauuggccugguggcguuccuuuuucugugugggaaauccugcucucucacgcugaagggaggcuaugaacugcagacccucgagcugaacauggaaacacuuaauauguguaugccucugagcugcaccaaaaacuccucucaucacuacaucagagucgggaaugagacaggacucgagcugacccuuacaaacaccagcauuaucaaucauaaguucuguaaccuguccgacgcucacaaaaagaaucucuaugaucaugcccugaugucuauuaucagcacguuucaccuguccauuccgaacuucaaucaguacgaagccaugagcugcgacuuuaacggcggcaagaucucugugcaguauaaucucucccacagcuacgcuggggaugccgcugagcauuguggaaccguugccaacggcgugcugcaaacauucaugcggauggcguggggagggcgcuauaucgcccuugacucuggcaaagggaauugggauugcauuaugaccuccuaccaguaccugaucauucagaacacaaccugggaagaccacugucaguuuagcagacccucuccuaucggauaucucggccugcuuucccaacggacgcgcgauauuuacaucagcagacggcugcucggcacauucaccuggacacuguccgacucugaggggaacgagacccccggaggcuauugccugacccgcuggaugcucaucgaagcugagcugaaguguuuugggaauacagccgucgcuaaaugcaacgaaaagcaugaugaggaguucugcgacaugcuuagacuguuugauuucuguaaacaggccauucggcgccucaaggcggaagcccagaugagcauccagcugauuaauaaggcugugaacgcccuuaucaaugaccaacugauuaugaaaaaccaccucagagauaucaugggaaucccuuacugcaauuauuccaaguacuguuaucugaaccacacgagcucuggccggaccucccugcccaaaugcugucucauuagcaaugggucuuaccugaacgagacacaguucagcgacgacaucgaacagcaagcugauaauaugauuaccgagaugcuucagaaggaauacaucgagcgccagggaaaaacaccucugggccucguugacauuuuuaucuucuccaccucuuuuuaucugauuagcaucuuccugcaucuuaucaagauuccgacgcacagacauaucgugggcaaacccugcccuaagccccaccggcucaaccauaugggggucuguuccugcggacuguacaagcacccuggcgugcccacaaaauggaagcgcugaggacuaguaauaaggaaacuguaugaaugucugugggcaggaagugaagagauccuucuguaaagguuuuuggaauuaugucugcugaauaauaaacuuuuuugaaauaauaaaucugguagaaaaaugagaucuaaaaaaaaaaaaaaaaaaaaaaaaaaaaaaaaaaaaaaaaaaaaaaaaaaaaaaaaaaaaaaaaaaaaaaaaaaaaaaaaaaaaaaaaaaaaaaaaaaaa

SEQ ID NO: 41191 - RNA, 1785 nt, Artificial Sequence
  mRNA product Design b-4 (A100) comprising derived and/or modified sequence from LASV(803213;Clade II)__AAF86703__GPCmut12 (opt5)
aggagagucccgcagucggcguccagcggcucugcuuguucgugugugugucguugcaggccuuauucaagcuuaccaugggccagaucauuaccuucuuucaagaggugccccacgucaucgaagagguuaugaacauugugcugaucgcccucagccugcuugcuauucugaaggggaucuacaauguggccacaugcggacucuucggccugaucuccuuucuucugcucugugggagaucuugcagcgucacguauaaaggaguguacgaacugcagacccuggagcucaacauggcgaaucugaacauguguaugccucuuuccugcacaaagaauaacucucaucacuauauuaugguuggcaaugaaaccgggcuggagcucacacugaccaacacaagcaucauuaaucauaaauucuguaaccuuuccgacgcucacaagaaaaaucuguacgaucaugcccucaugucuaucauuagcaccuuucaccuguccaucccgaacuucaaucaguaugaggccaugagcugcgacuuuaacggaggcaagauuucugugcaguacaaucugucccacagcuucgcugucgaugccgcuaaccauuguggcacgaucgccaacggggugcuccaaaccuuuaugcggauggcguggggaggcucuuauaucgcccuggacuccgggaagggaaauugggauugcauuaugacaagcuaccaguaccuuaucauucagaacaccacaugggaagaccacugucaguucucucgccccuccccuaucggcuaucuggggcuccugagccaaagaacccgggauauuuacaucucccgcagacuucugggaacguuuacauggacccucucugacagcgagggcaaugaagcucccggcggguauugccugacacgguggaugcugaucgaggccgagcucaaauguuucggaaacaccgcuguugccaagugcaaugaaaaacaugaugaggaauuuugcgacaugcugcgccuuuucgauuucuguaagcaggcgauuaaaagacugaagaccgaggcccagauguccauccagcucauuaacaaggcugugaaugcccugaucaacgaccaacuuauuaugaaaaaucaucugcgggauaucaugggcaucccuuacugcaacuauagccgcuacuguuaucucaaucacacagucacggggaagaccucucugcccagaugcugucugguguccaacggaagcuaccucaaugaaacacacuuuucugacgacauugagcagcaggcugauaacaugaucaccgagaugcugcaaaaagaauacauggaccggcagggcaagacaccucuugggcugguggaucucuucgucuuuagcaccuccuucuaucugauuucuaucuuucugcaccuuguuaaaauuccgacgcaucgccacaucgugggaaagcccugcccuaaaccccauagacucaaucacaugggcauuuguagcugcggccuguacaagcacccuggggugcccgucaaguggaaacggugaggacuaguaauaaggaaacuguaugaaugucugugggcaggaagugaagagauccuucuguaaagguuuuuggaauuaugucugcugaauaauaaacuuuuuugaaauaauaaaucugguagaaaaaugagaucuaaaaaaaaaaaaaaaaaaaaaaaaaaaaaaaaaaaaaaaaaaaaaaaaaaaaaaaaaaaaaaaaaaaaaaaaaaaaaaaaaaaaaaaaaaaaaaaaaaaa

SEQ ID NO: 41192 - RNA, 1785 nt, Artificial Sequence
  mRNA product Design b-4 (A100) comprising derived and/or modified sequence from LASV(GA391;Clade III)__CAA36645__GPCmut12 (opt5)
aggagagucccgcagucggcguccagcggcucugcuuguucgugugugugucguugcaggccuuauucaagcuuaccaugggccagaucgugaccuucuuucaagaggucccccacguuauugaagaggugaugaacaucgugcugauugcccucagcauccuggcuauucuuaaggggcuguacaaugucgccacaugcggacucaucggccuggugacguuccuucugcucuccgggagaucuuguagccugaucuauaaaggaaccuacgaacugcagacacucgagcugaacauggaaacccuuaauaugugcaugccucuguccuguacaaagaacaauucucaucacuauauucggguuggcaacgagaccgggcucgagcugacacuuaccaauacgagcauccugaaccauaaauuuugcaaucucuccgacgcgcacaagcgcaaccuguacgaucauucucugaugagcauuaucuccaccuuccaccucagcauuccgaauuuuaaccaguaugaagcuaugucuugugacuucaauggaggcaaaaucacagugcaguacaaccugucccacagcuuugccgucgaugccgcuggccauugcgggacccuugccaauggagugcugcaaacauucaugagaauggcuuggggcgggucuuauauugcccucgacuccggacggggcaacugggauuguaucaugaccagcuaccaguaccugaucauucagaacacgacaugggacgaucacugccaguuuucucgccccuccccuaucggguaucuuggacugcucagccaaagaacccgggacauuuacaucucccgcagacugcugggcacauucaccuggacccucucugauagcgagggcaaugaaacacccgggggauauugucugacgcgguggaugcuuauugaggcggagcugaagugcuuuggcaacaccgccguugcuaaguguaaugaaaaacaugacgaggaguucugcgauaugcuccgccuguuugacuucugcaagcaggccaucagacggcuuaaaacagaagcucagauguccauccagcugauuaacaaggccgugaaugcgcucaucaacgaucaacugauuaugaaaaaucaucugcgcgacaucauggggauuccuuacuguaacuauagcagauacugcuaucucaaucacaccucuacaggaaagaccucccugccccgguguugccuuaucagcaacggcucuuaccugaaugaaacgaaguucagcgacgauaucgagcagcaggccgacaacaugauuacagagaugcuccaaaaagaauacaucgaucgccaggggaagaccccucugggacuggucgaccuuuuuguguucuccaccucuuuuuaucucauuagcaucuuccugcaccuggugaaaauuccgacacacagacauaucgucggcaagcccuguccuaaaccccaccggcucaaucauaugggcauuugcuccugugggcuguacaagcagccuggaguucccgugagauggaaacgcugaggacuaguaauaaggaaacuguaugaaugucugugggcaggaagugaagagauccuucuguaaagguuuuuggaauuaugucugcugaauaauaaacuuuuuugaaauaauaaaucugguagaaaaaugagaucuaaaaaaaaaaaaaaaaaaaaaaaaaaaaaaaaaaaaaaaaaaaaaaaaaaaaaaaaaaaaaaaaaaaaaaaaaaaaaaaaaaaaaaaaaaaaaaaaaaaa

SEQ ID NO: 41193 - RNA, 1788 nt, Artificial Sequence
  mRNA product Design b-4 (A100) comprising derived and/or modified sequence from LASV(AV;Clade V)__CCA30314__GPCmut12 (opt5)
aggagagucccgcagucggcguccagcggcucugcuuguucgugugugugucguugcaggccuuauucaagcuuaccaugggccagaucgugaccuucuuucaagaggucccccacguuauugaagaggugaugaacaucgugcugauugcccucagcauccuggcuguccuuaaggggcuguacaauauugccacaugcggacucaucggccugaucacguuccuucugcucugugggagauccugcucuagcaaccuguauaaaggaguguacgaacugcagucccucgaccugaauauggagacccuuaacauguguaugccucugucuugcacaaagaauaacagccaucacuauauucggguuggcaaugauaccgggcucgaacugacacuuaccaacacauccauccugaaucauaaauuuuguaaccucucugacgcgcacaagaaagaucuguacgaccaugcucugaugagcauuaucuccaccuuccaccucagcauuccgaauuuuaaccaguaugaggccaugucuugcgauuucaauggaggcaagaucuccgugcaguacaaccugagccacucuuaugccauugacgcugccaaucauuguggcacggucgcuaacgggauccuucaaaccuuuaugcgcauggccuggggaggcuccuacaucgcgcuggauagcgggagaggaaacugggacugcauuaugacaucuuaccaguaucucaucauucagaauaccacaugggagaaccacugucaguucucccggcccagcccuaucggcuaccuggggcuucugucccaacgcaccagagauauuuauaucucucggcgccuccugggaacguuuacauggacccugagcgacuccgaaggcaaugccacacccggcggguacugccucaccagauggaugcugaucgaggcugaacuuaaguguuucggaaacaccgccguggcuaaaugcaaugagaagcaugaugaggaauuuugcgacaugcugcgccucuucgauuuuuguaaacaggccauuagccggcugaagucugaggcgcagauguccauccagcuuauuaacaaagccguuaaugcucugaucaacgaccaacucauuaugaagaaucaccugagagacaucaugggcaucccuuauugcaacuacagcaaguauuguuaccugaaucacacaauuacggggaaaaccucucuccccaagugcugucuggugagcaacggauccuaccuuaaugaaacacauuucucugaugacaucgagcagcaggccgauaacaugauuaccgaaaugcugcaaaaagaguauauggagcggcagggcaagacaccucucgggcuggucgaccuguucguguuuagcaccuccuucuaccuuaucagcauuuuucuccgccuggugaaaaucccgacgcacagacauauugucggaaagcccugcccuaaaccccaccggcugaaucauaugggcaucuguucuugcggccucuauaagcagccugggguucccgugcgcuggaagagaugaggacuaguaauaaggaaacuguaugaaugucugugggcaggaagugaagagauccuucuguaaagguuuuuggaauuaugucugcugaauaauaaacuuuuuugaaauaauaaaucugguagaaaaaugagaucuaaaaaaaaaaaaaaaaaaaaaaaaaaaaaaaaaaaaaaaaaaaaaaaaaaaaaaaaaaaaaaaaaaaaaaaaaaaaaaaaaaaaaaaaaaaaaaaaaaaa

SEQ ID NO: 41194 - RNA, 1785 nt, Artificial Sequence
  mRNA product Design b-4 (A100) comprising derived and/or modified sequence from LASV(Togo/2016/7082;Clade VI)__AMR44577__GPCmut12 (opt5)
aggagagucccgcagucggcguccagcggcucugcuuguucgugugugugucguugcaggccuuauucaagcuuaccaugggccagaucauuaccuucuuucaagaggugccccacgucaucgaagagguuaugaacauugugcugaucgcccucagccugcuugcuauucugaaggggguguacaaugucgccacaugcggaaucaucggccucgugacguuccuguuucuuugugggagauccugcucucugauuuauaaaggaagcuacgaacuccagacccuggagcugaacauggaaacacucaauauguguaugccucuguccugcaccaagaacucuagccaucacuauauccggguuggcaaugagacagggcuugagcugacccucacaaacaccuccauuaucaaucauaaauucuguaaccugucugacgcgcacaagcgcaaucuuuacgaucaugcucugaugagcauucucuccacguuucaccugagcaucccgaacuucaaucaguaugaagccaugucuugcgacuuuaacggaggcaaaauuuccgugcaguacaaucugagccacgccuaugcugucgaugccgcugagcauuguggcaccguggccaacgggguucuccaaacauucaugagaauggcguggggaggcucuuacaucgcccuggacuccgggcggggaaauugggauugcaucaugaccagcuaccaguaucuuauuauccagaacacaaccugggaagaccacugucaguuuucucgccccuccccuauuggcuaccuggggcuccugagccaaagaacgcgggauaucuauauuucccgcagacuucugggaacauucaccuggacacucucugacagcgagggcaacgagacccccggcggguacugccugacccgguggaugcugaucgaagcugagcucaaguguuuuggaaauacagccguggcuaagugcaacgaaaaacaugaugaggaguucugcgacaugcugcgccuuuuugauuucuguaagcaggccauccagagacugaaauccgaagcgcagaugagcauucaacucaucaauaaggccgucaacgcucugauuaaugaccagcuuaucaugaaaaaccaucugcgggauaugaugggcauuccuuauugcaauuacucuaaguauuguuaccucaaccacacguccagcgggcgcaccucucugcccaagugcugucuggugagcaauggauccuaccucaacgagacacacuucucugacgacaucgaacagcaagccgauaauaugaucaccgagaugcugcagaaagaauauauugacagacagggcaagacaccucuugggcugguggaucucuuugucuucagcaccuccuuuuaccugaucagcauuuuccugcaccuuaucaaaauuccgacgcaucggcacaucguuggaaagcccugcccuaaaccccaucgccucaaccacaugggcauuuguucuugcggccuguauaagcagccuggggugcccacaagauggaaacggugaggacuaguaauaaggaaacuguaugaaugucugugggcaggaagugaagagauccuucuguaaagguuuuuggaauuaugucugcugaauaauaaacuuuuuugaaauaauaaaucugguagaaaaaugagaucuaaaaaaaaaaaaaaaaaaaaaaaaaaaaaaaaaaaaaaaaaaaaaaaaaaaaaaaaaaaaaaaaaaaaaaaaaaaaaaaaaaaaaaaaaaaaaaaaaaaa

SEQ ID NO: 41195 - RNA, 1785 nt, Artificial Sequence
  mRNA product Design b-4 (A100) comprising derived and/or modified sequence from LASV(KAK-428;Clade n.d. (VII))__ANH09740__GPCmut12 (opt5)
aggagagucccgcagucggcguccagcggcucugcuuguucgugugugugucguugcaggccuuauucaagcuuaccaugggccagaucgugaccuucuuucaagaggucccccacguuauugaagaggugaugaacaucgugcugauugcccucagccugcuugcuauccugaaggggcucuacaauuucgccacaugcggagucauuggccugaucacguuucuucugcucugugggagauccugcucugcgaccuauaaaggacaguacgaacugcagacacuggagcucaacauggaaagccugaauauguguaugccucuuuccugcaccaagaacaauucucaucacuauauccgggcuggcaacaauacagggcuggagcucacccugacaaacaccagcauuaucucccauaaauucuguaaucuuucugacgcccacaagaaaaaccuguacgaucauacgcucaugagcauuaucaccacauuucaccuguccauuccgaauuucaaccaguaugaggccaugagcugcgacuuuaauggaggcaagaucucuauucaauacaaccugucccacagcuaugcuggcgaugccgcucagcauugugggaccguggccaauggaguucuccagacauucaugcgcauggcguggggcgggucuuaccuggcccuugacuccggaagacggggcugggauugcaucaucagcucuuaccaguaucugauuauccaaaacaccacgugggacgaucacugucaguuuucccgccccagcccuauuggguaccucggauucgugucccagaagacaagagacaucuauauuucucggcgccugcuuggcaccuuuacauggacccugagcgauuccgaaggccaugacaugcccgggggauacugccucaccagauggaugcugaucgaggcugaucugaaauguuucggcaacacagccgucgcuaagugcaaugaaaaacacgacgaggaguuuugcgauauguggcgccucuucgacuucuguaagcaggccauccaacggcugaaagcggaagcccagaugaacauucagcuuaucaauaaggcugugaacgcccugauuaaugaccaacucaugaugaagaaccaccugagagauaucauggggauuccuuauugcaauuacagcaaauuuuguuaucuuaacaauacgaccacaggacggaccucucugccccgcugcugucucaucuccaacggcagcuaccugaaugagacacauuucucugacgauaucgaacagcaggcugacaacaugauuaccgagaugcugcagaaggaauacauggauagacaagggaaaacgccucucggacugguugaccuuuuuguguucagcacauccuuuuaucugaucaccauuuuccuccaccuggucaagaucccgacccaucggcacauugugggcaaacccugcccuaagccccaucgccugaaucacaugggcaucuguucuugcgggcuuuacaaacagccuggagugcccgucagauggaagcggugaggacuaguaauaaggaaacuguaugaaugucugugggcaggaagugaagagauccuucuguaaagguuuuuggaauuaugucugcugaauaauaaacuuuuuugaaauaauaaaucugguagaaaaaugagaucuaaaaaaaaaaaaaaaaaaaaaaaaaaaaaaaaaaaaaaaaaaaaaaaaaaaaaaaaaaaaaaaaaaaaaaaaaaaaaaaaaaaaaaaaaaaaaaaaaaaa

SEQ ID NO: 41196 - RNA, 1785 nt, Artificial Sequence; identical to SEQ ID NO: 41190
  mRNA product Design b-4 (A100) comprising derived and/or modified sequence from LASV(Pinneo-NIG-1969;Clade I)__AIT17836__GPCmut12 (opt5)

SEQ ID NO: 41197 - RNA, 1785 nt, Artificial Sequence
  mRNA product Design b-4 (A100) comprising derived and/or modified sequence from LASV(ISTH0009-NIG-2011;Clade II)__AIT17404__GPCmut12 (opt5)
aggagagucccgcagucggcguccagcggcucugcuuguucgugugugugucguugcaggccuuauucaagcuuaccaugggccagaucauuaccuucuuucaagaggugccccacgucaucgaagagguuaugaacauugugcugaucgcccucagccugcuugcuauucugaaggggaucuacaauguggccacaugcggacucuucggccuggucuccuuucuucugcucugugggagaucuugcagcacgaccuauaaaggaguguacgaacugcagacacuggagcucgacauggcgucccugaacauguguaugccucuuucuugcaccaagaauaacagccaucacuauaucaugguuggcaaugaaacagggcuggagcucacccugacaaacaccuccauuaucaaucauaaauucuguaaccuuucugaugcucacaagaaaaaucuguacgaccaugcccucaugagcauuaucuccacguuucaccugagcauuccgaacuucaaucaguaugaggccaugucuugcgauuuuaacggaggcaagaucuccgugcaguacaaucugagccacgcuuaugccgucgacgcugccaaccauuguggcaccauugcgaauggggugcuccaaacauucaugcggauggccuggggaggcucuuacaucgcucuggauuccgggaagggaagcugggacugcaucaugaccucuuaccaguaucuuauuauccagaacacaaccugggaagaucacugucaguuuucccgccccagcccuauuggcuaccuggggcuccugucccaaagaacgcgggacaucuauauuucucgcagacuucugggaacauucaccuggacacucagcgauuccgagggcaacgaaacccccggcggguacugccugacccgguggaugcugaucgaggccgagcucaaauguuuuggaaauacagcuguugccaagugcaacgaaaaacaugacgaggaguucugcgauaugcugcgccuuuuugacuucuguaagcaggcgaucagacggcugaaaacggaagcccagaugagcauucagcucaucaauaaggcugugaacgcccugauuaaugaucaacuuaucaugaagaaccaucugcgcgacauuaugggcaucccuuauugcaauuacucuaaauauuguuaccucaaccacaccgucacagggaagaccucccugcccagaugcugucuggugagcaauggaucuuaccucaacgaaacacacuucagcgacgauaucgagcagcaggcugacaauaugauuaccgagcugcuucaaaaagaauauauggaucggcagggcaagacgccucuggggcucguggaccuguuugucuucuccacaucuuuuuaccugaucagcauuuuccuucaccucaucaaaauuccgacccaucgccacaucaccggaaagcccugcccuaaaccccauagacugaaccacaugggcauuuguuccugcggccuguauaagcacccugggguucccgugaaguggaaacggugaggacuaguaauaaggaaacuguaugaaugucugugggcaggaagugaagagauccuucuguaaagguuuuuggaauuaugucugcugaauaauaaacuuuuuugaaauaauaaaucugguagaaaaaugagaucuaaaaaaaaaaaaaaaaaaaaaaaaaaaaaaaaaaaaaaaaaaaaaaaaaaaaaaaaaaaaaaaaaaaaaaaaaaaaaaaaaaaaaaaaaaaaaaaaaaaa

SEQ ID NO: 41198 - RNA, 1785 nt, Artificial Sequence
  mRNA product Design b-4 (A100) comprising derived and/or modified sequence from LASV(ISTH2010-NIG-2012;Clade II)__AIT17482__GPCmut12 (opt5)
aggagagucccgcagucggcguccagcggcucugcuuguucgugugugugucguugcaggccuuauucaagcuuaccaugggccagaucauuaccuucuuucaagaggugccccacgucaucgaagagguuaugaacauugugcugaucgcccucagccugcuugcuauucugaaggggaucuacaauguggccacaugcggacucuucggccuggucuccuuucuucugcucugugggagaucuugcagcacgaccuauaaaggaguguacgaacugcagacacuggagcucgacauggcgucccugaacauguguaugccucuuucuugcaccaagaauaacagccaucacuauaucaugguuggcaaugaaacagggcuggagcucacccugacaaacaccuccauuaucaaucauaaauucuguaaccuuucugaugcucacaagaaaaaucuguacgaccaugcccucaugagcauuaucuccacguuucaccugagcauuccgaacuucaaucaguaugaggccaugucuugcgauuuuaacggaggcaagaucuccgugcaguacaaucugagccacgcuuaugccgucgacgcugccaaccauuguggcaccauugcgaauggggugcuccaaacauucaugcggauggccuggggaggcucuuacaucgcucuggauuccgggaagggaagcugggacugcaucaugaccucuuaccaguaucuuauuauccagaacauuacaugggaagaucacugucaguuuucccgccccagcccuaucggcuaccuggggcuccugucccaaagaacccgggacauuuauaucucucgcagacuucugggaacguucacauggacccucagcgauuccgagggcaacgaaacacccggcggguacugccugacccgguggaugcugaucgaggccgagcucaaauguuuuggaaauaccgcuguugccaagugcaacgaaaaacaugacgaggaguucugcgauaugcugcgccuuuuugacuucuguaagcaggcgauuagacggcugaaaacagaagcccagaugagcauccagcucauuaauaaggcugugaacgcccugaucaaugaucaacuuauuaugaagaaccaucugcgcgacaucaugggcaucccuuauugcaauuacucuaaauauuguuaccucaaccacacggucaccgggaagacaucccugcccagaugcugucuggugagcaauggaucuuaccucaacgaaacccacuucagcgacgauauugagcagcaggcugacaauaugaucacagagcugcuucaaaaagaauauauugaucggcagggcaagaccccucuggggcucguggaccuguuugucuucuccacgucuuuuuaccugaucagcauuuuccuucaccucguuaaaaucccgacacaucgccacguggugggaaagcccugcccuaaaccccauagacugaaccacaugggcauuuguuccugcggccuguauaagcacccugggguccccgugaaguggaaacggugaggacuaguaauaaggaaacuguaugaaugucugugggcaggaagugaagagauccuucuguaaagguuuuuggaauuaugucugcugaauaauaaacuuuuuugaaauaauaaaucugguagaaaaaugagaucuaaaaaaaaaaaaaaaaaaaaaaaaaaaaaaaaaaaaaaaaaaaaaaaaaaaaaaaaaaaaaaaaaaaaaaaaaaaaaaaaaaaaaaaaaaaaaaaaaaaa

SEQ ID NO: 41199 - RNA, 1785 nt, Artificial Sequence
  mRNA product Design b-4 (A100) comprising derived and/or modified sequence from LASV(Lassa virus/H.sapiens-wt/NGA/2015/ISTH_0543;Clade II)__AVO03639__GPCmut12 (opt5)
aggagagucccgcagucggcguccagcggcucugcuuguucgugugugugucguugcaggccuuauucaagcuuaccaugggccagaucauuaccuucuuucaagaggugccccacgucaucgaagagguuaugaacauugugcugaucgcccucagccugcuugcuauucugaaggggaucuacaauguggccacaugcggacucuucggccuggucuccuuucuucugcucugugggagaucuugcagcacgaccuauaaaggaguguacgaacugcagacacuggagcucgacauggcgaaccugaauauguguaugccucuuuccugcaccaagaacaauucucaucacuauaucaugguuggcaacgaaacagggcuggagcucacccugacaaauaccagcauuaucaaccauaaauucuguaaucuuuccgaugcucacaagaaaaaccuguacgaccaugcccucaugucuauuaucagcacguuucaccuguccauuccgaauuucaaccaguaugaggccaugagcugcgauuuuaauggaggcaagaucucugugcaguacaaccugucccacaccuaugcugucgacgccgcuaaucauuguggcacaauugccaacggggugcuccaaaccuucaugcggauggcguggggaggcagcuacaucgcccuggauucugggaagggauccugggacugcaucaugacaagcuaccaguaucuuguuauucagaacaccacgugggaagaucacugucaguuuucucgccccuccccuaucggcuaccuggggcuccugagccaaagaacacgggacauuuauaucucccgcagacuucugggaaccuucacauggacccucucugauagcgagggcaaugaaacccccggcggguacugccugacacgguggaugcugauugaggcugagcucaaauguuuuggaaacacggccguggcuaagugcaaugaaaaacaugacgaggaguucugcgauaugcugcgccuuuuugacuucuguaagcaggccaucagacggcugaaaaccgaagcgcagauguccauccagcucauuaacaaggccgucaaugcucugaucaacgaucaacuuauuaugaagaaucaucugcgcgacaucaugggcauuccuuauugcaacuacagcaaauauuguuaccucaaucacacagugaccgggaagacaucucugcccagaugcugucugguguccaacggaagcuaccucaaugaaacccacuucucugacgauaucgagcagcaggccgacaacaugaucacggagcugcuucaaaaagaauauauugaucggcagggcaagacaccucuggggcucgucgaccuguuuguuuucagcaccuccuuuuaccugaucucuauuuuccuucaccucgugaaaaucccgacccaucgccacauuacaggaaagcccugcccuaaaccccauagacugaaucacaugggcaucuguagcugcggccuguauaagcacccuggggugcccgucaaguggaaacggugaggacuaguaauaaggaaacuguaugaaugucugugggcaggaagugaagagauccuucuguaaagguuuuuggaauuaugucugcugaauaauaaacuuuuuugaaauaauaaaucugguagaaaaaugagaucuaaaaaaaaaaaaaaaaaaaaaaaaaaaaaaaaaaaaaaaaaaaaaaaaaaaaaaaaaaaaaaaaaaaaaaaaaaaaaaaaaaaaaaaaaaaaaaaaaaaa

SEQ ID NO: 41200 - RNA, 1785 nt, Artificial Sequence
  mRNA product Design b-4 (A100) comprising derived and/or modified sequence from LASV(Lassa virus/H.sapiens-wt/NGA/2016/ISTH_0009;Clade II)__AVO03571__GPCmut12 (opt5)
aggagagucccgcagucggcguccagcggcucugcuuguucgugugugugucguugcaggccuuauucaagcuuaccaugggccagaucauuaccuucuuucaagaggugccccacgucaucgaagagguuaugaacauugugcugaucgcccucagccugcuugcuauucugaaggggaucuacaauguggccacaugcggacuccugggccuugucuccuuccugcuccugugugggagaucuugcagcacgaccuauaaaggaguguacgaacugcagacacucgagcuggacauggcgucccuuaacauguguaugccucugucuugcaccaagaauaacagccaucacuauaucaugguuggcaaugaaacagggcucgagcugacccuuacaaacaccuccauuaucaaucauaaauuuuguaaccugucugaugcucacaagaaaaaucucuacgaccaugcccugaugagcauuaucuccacguuccaccugagcauuccgaacuuuaaucaguaugaggccaugucuugcgauuucaacggaggccggaucuccgugcaguacaaucucagccacucuuaugcugucgacgccgcuaaccauuguggcaccauugccaauggggugcugcaaacauuuaugcgcauggcguggggaggcuccuacaucgcccuugauagcgggaagggaucuugggacugcaucaugaccuccuaccaguaucugauuauccagaacacaaccugggaagaucacugucaguucagcagacccuccccuauuggcuaccucgggcugcuuucucaacggacgcgcgacaucuauauuagcagacggcugcucggaacauuuaccuggacacuguccgauagcgagggcaacgaaacccccggcggguacugccugacccgcuggaugcucaucgaggcugagcugaaguguuucggaaauacagccguugcuaaaugcaacgaaaagcaugacgaggaauuuugcgauaugcuuagacuguucgacuuuuguaaacaggccauccggcgccucaagacggaggcgcagaugucuauucagcugaucaauaaagccgugaacgcucuuauuaaugaucaacugaucaugaagaaccaccucagagacauuaugggcaucccuuauugcaauuacuccaaguauuguuaccugaaccacaccgucacagggaaaaccagccugccccggugcugucucgugucuaauggaagcuaccugaacgaaacacauuucuccgacgauaucgagcagcaggccgacaauaugauuaccgagcuucugcaaaaggaauauaucgaucgccagggcaaaacgccucucgggcugguggaccuguucgucuuuucuaccagcuucuaccuuauuuccaucuuucuccaccugguuaagauuccgacacauagacacaucaccggaaaacccugcccuaagccccaucggcugaaccacaugggcauuuguagcugcggccucuauaaucacccuggggugcccgugaaauggaagcgcugaggacuaguaauaaggaaacuguaugaaugucugugggcaggaagugaagagauccuucuguaaagguuuuuggaauuaugucugcugaauaauaaacuuuuuugaaauaauaaaucugguagaaaaaugagaucuaaaaaaaaaaaaaaaaaaaaaaaaaaaaaaaaaaaaaaaaaaaaaaaaaaaaaaaaaaaaaaaaaaaaaaaaaaaaaaaaaaaaaaaaaaaaaaaaaaaa

SEQ ID NO: 41201 - RNA, 1785 nt, Artificial Sequence
  mRNA product Design b-4 (A100) comprising derived and/or modified sequence from LASV(Lassa virus/H.sapiens-wt/NGA/2016/ISTH_0017;Clade II)__AVO03567__GPCmut12 (opt5)
aggagagucccgcagucggcguccagcggcucugcuuguucgugugugugucguugcaggccuuauucaagcuuaccaugggccagaucauuaccuucuuucaagaggugccccacgucaucgaagagguuaugaacauugugcugaucgcccucagccugcuugcuauucugaaggggaucuacaauguggccacaugcggacucuucggccuggucuccuuucuucugcucugugggagaucuugcagcacgaccuauaaaggaguguacgaacugcagacacuggagcucgacauggcgucccugaacauguguaugccucuuucuugcaccaagaauaacagccaucacuauaucaugguuggcaaugaaacagggcuggagcucacccugacaaacaccuccauuaucaaucauaaauucuguaaccuuucugaugcucacaagaaaaaucuguacgaccaugcccucaugagcauuaucuccacguuucaccugagcauuccgaacuucaaucaguaugaggccaugucuugcgauuuuaacggaggcaagaucuccgugcaguacaaucugagccacaccuaugcuauugacgccgcuaaccauuguggcacaaucgccaaugggguccuccaaaccuucaugcggauggcguggggaggcucuuacaucgcccuggauuccgggaagggaagcugggacugcauuaugacaucuuaccaguaucuuaucauucagaacaccacgugggaagaucacugucaguuuucccgccccagcccuaucggcuaccuggggcuccugucccaaagaacacgggacauuuauaucucucgcagacuucugggaaccuucacauggacccucagcgauuccgagggcaacgaaacccccggcggguacugccugacacgguggaugcugaucgaggcugagcucaaauguuuuggaaauacggccguggcuaagugcaacgaaaaacaugacgaggaguucugcgauaugcugcgccuuuuugacuucuguaagcaggccauuagacggcugaaaaccgaagcgcagaugagcauccagcucauuaauaaggccguuaacgcucugaucaaugaucaacuuauuaugaagaaccaucugcgcgacaucaugggcaucccuuauugcaauuacucuaaauauuguuaccucaaccacacagugaccgggaagacaucccugcccagaugcugucuggucagcaauggaucuuaccucaacgaaacccacuucagcgacgauauugagcagcaggccgacaauaugaucacggagcugcuucaaaaagaauauauggaucggcagggcaagacaccucuggggcucguggaccuguuuguguucuccaccucuuuuuaccugauuagcaucuuccuucaccucguccgcauuccgacccauagacacguuaucggaaaacccugcccuaagccccaucggcugaaccacaugggcauuuguuccugcggccuguauaaacacccuggggugcccgugaaguggaagcgcugaggacuaguaauaaggaaacuguaugaaugucugugggcaggaagugaagagauccuucuguaaagguuuuuggaauuaugucugcugaauaauaaacuuuuuugaaauaauaaaucugguagaaaaaugagaucuaaaaaaaaaaaaaaaaaaaaaaaaaaaaaaaaaaaaaaaaaaaaaaaaaaaaaaaaaaaaaaaaaaaaaaaaaaaaaaaaaaaaaaaaaaaaaaaaaaaa

SEQ ID NO: 41202 - RNA, 1785 nt, Artificial Sequence
  mRNA product Design b-4 (A100) comprising derived and/or modified sequence from LASV(Lassa virus/H.sapiens-wt/NGA/2018/ISTH_0959;Clade II)__AVV65099__GPCmut12 (opt5)
aggagagucccgcagucggcguccagcggcucugcuuguucgugugugugucguugcaggccuuauucaagcuuaccaugggccagaucauuaccuucuuucaagaggugccccacgucaucgaagagguuaugaacauugugcugaucgcccucagccugcuugcuauucugaaggggaucuacaauguggucacaugcggacucuucggccugguguccuuucuucugcucugugggagaucuugcagcacgaccuauaaaggaguuuacgaacugcagacacuggagcucgacauggccucccugaacauguguaugccucuuucuugcaccaagaauaacagccaucacuauaucauggugggcaaugaaacagggcuggagcucacccugacaaacaccuccauuaucaaucauaaauucuguaaccuuucugaugcgcacaagaaaaaucuguacgaccaugcucucaugagcauuaucuccacguuucaccugagcauuccgaacuucaaucaguaugaggccaugucuugcgauuuuaacggaggcaagaucuccguccaguacaaucugagccacgccuaugcuauugacgccgcuaaccauuguggcaccaucgccaauggggugcuccaaacauucaugcggauggcguggggaggcucuuacaucgcccuggauuccgggaagggaagcugggacugcauuaugaccucuuaccaguaucuuaucauucagaacacaaccugggaagaucacugucaguuuucccgccccagcccuaucggcuaccuggggcuccugucccaaagaacgcgggacauuuauaucucucgcagacuucugggaacauucaccuggacacucagcgauuccgagggcaacgaaacccccggcggguacugccugacccgguggaugcugaucgaggcugagcucaaauguuuuggaaauacagccguugcuaagugcaacgaaaaacaugacgaggaguucugcgauaugcugcgccuuuuugacuucuguaagcaggccauuagacggcugaaaacggaagcgcagaugagcauccagcucauuaauaaggccgugaacgcucugaucaaugaucaacuuauuaugaagaaccaucugcgcgacaucaugggcaucccuuauugcaauuacucuaaauauuguuaccucaaccacaccgucacagggaagaccucccugcccagaugcugucuggugagcaauggaucuuaccucaacgaaacacacuucagcgacgauauugagcagcaggccgacaauaugaucaccgagcugcuucaaaaagaauauauugaucggcagggcaagacgccucuggggcucguggaccuguuugucuucuccacaucuuuuuaccugaucagcauuuuccuucaccucguuaaaaucccgacccaucgccacgugauuggaaagcccugcccuaaaccccauagacugaaccacaugggcaucuguuccugcggccuguauaagcacccuggggugcccgucaaguggaaacggugaggacuaguaauaaggaaacuguaugaaugucugugggcaggaagugaagagauccuucuguaaagguuuuuggaauuaugucugcugaauaauaaacuuuuuugaaauaauaaaucugguagaaaaaugagaucuaaaaaaaaaaaaaaaaaaaaaaaaaaaaaaaaaaaaaaaaaaaaaaaaaaaaaaaaaaaaaaaaaaaaaaaaaaaaaaaaaaaaaaaaaaaaaaaaaaaa

SEQ ID NO: 41203 - RNA, 1785 nt, Artificial Sequence
  mRNA product Design b-4 (A100) comprising derived and/or modified sequence from LASV(LASV003-NIG-2008;Clade II)__AIT17580__GPCmut12 (opt5)
aggagagucccgcagucggcguccagcggcucugcuuguucgugugugugucguugcaggccuuauucaagcuuaccaugggccagaucauuaccuucuuucaagaggugccccacgucaucgaagagguuaugaacauugugcugaucgcccucagccugcuugcuauucugaaggggaucuacaauguggccacaugcggacucuucggccuggucuccuuucuucugcucugugggagaucuugcagcacgaccuauaaaggaguguacgaacugcagacacuggagcucgacauggcgucccugaacauguguaugccucuuucuugcaccaagaauaacagccaucacuauaucaugguuggcaaugaaacagggcuggagcucacccugacaaacaccuccauuaucaaucauaaauucuguaaccuuucugaugcucacaagaaaaaucuguacgaccaugcccucaugagcauuaucuccacguuucaccugagcauuccgaacuucaaucaguaugaggccaugucuugcgauuuuaacggaggcaagaucuccgugcaguacaaucugagccacaccuaugcugucgacgccgcuaaccauuguggcacaauugccaauggggugcuccaaaccuucaugcggauggcguggggaggcucuuacaucgcccuggauuccgggaagggaagcugggacugcaucaugacaucuuaccaguaucuuauuauccagaacaccacgugggaagaucacugucaguuuucccgccccagcccuauuggcuaccuggggcuccugucccaaagaacacgggacaucuauauuucucgcagacuucugggaaccuucacauggacccucagcgauuccgagagcaacgaaacccccggcggcuacugccugacacgguggaugcugaucgaggcugagcucaaauguuuugggaauacggccguugcuaagugcaacgaaaaacaugacgaggaguucugcgauaugcugcgccuuuuugacuucuguaagcaggccaucagacggcugaaagcggaagcccagaugucuauucagcucaucaauaaggcugugaacgcccugauuaaugaucaacuuaucaugaagaaccaucugcgcgacauuaugggaaucccuuauugcaauuacuccaaauauuguuaccucaaccacaccgucacaggcagaaccagccugccccggugcugucuggugucuaaugggagcuaccucaacgaaacacacuucuccgacgauaucgagcagcaggcugacaauaugauuaccgagcugcuucaaaaggaauauauggaucgccagggaaaaacgccucugggccucguggaccuguuugucuucucuaccagcuuuuaccugaucuccauuuuccuucaccucguuaagaucccgacacauagacacgugauugggaaacccugcccuaagccccaucggcugaaccacaugggaaucuguagcugcggccuguauaaacacccuggcgugcccgucaaguggaagcgcugaggacuaguaauaaggaaacuguaugaaugucugugggcaggaagugaagagauccuucuguaaagguuuuuggaauuaugucugcugaauaauaaacuuuuuugaaauaauaaaucugguagaaaaaugagaucuaaaaaaaaaaaaaaaaaaaaaaaaaaaaaaaaaaaaaaaaaaaaaaaaaaaaaaaaaaaaaaaaaaaaaaaaaaaaaaaaaaaaaaaaaaaaaaaaaaaa

SEQ ID NO: 41204 - RNA, 1785 nt, Artificial Sequence
  mRNA product Design b-4 (A100) comprising derived and/or modified sequence from LASV(LASV035-NIG-2009;Clade II)__AIT17588__GPCmut12 (opt5)
aggagagucccgcagucggcguccagcggcucugcuuguucgugugugugucguugcaggccuuauucaagcuuaccaugggccagaucauuaccuucuuucaagaggugccccacgucaucgaagagguuaugaacauugugcugaucgcccucagccugcuugcuauucugaaggggaucuacaauguggccacaugcggacucuucggccuggucuccuuucuucugcucugugggagaucuugcagcacgaccuauaaaggaguguacgaacugcagacacuggagcucgacauggcgucccugaacauguguaugccucuuucuugcaccaagaauaacagccaucacuauaucaugguuggcaaugaaacagggcuggagcucacccugacaaacaccuccauuaucaaucauaaauucuguaaccuuucugaugcucacaagaaaaaucuguacgaccaugcccucaugagcauuaucuccacguuucaccugagcauuccgaacuucaaucaguaugaggccaugucuugcgauuuuaacggaggcaagaucuccgugcaguacaaucugagccacgcuuaugccgucgacgcugccaaccauuguggcaccauugcgaauggggugcuccaaacauucaugcggauggccuggggaggcucuuacaucgcucuggauuccgggaagggaagcugggacugcaucaugaccucuuaccaguaucuuauuauccagaacacaaccugggaagaucacugucaguuuucccgccccagcccuauuggcuaccuggggcuccugucccaaagaacgcgggacaucuauauuucucgcagacuucugggaacauucaccuggacacucagcgauuccgagggcaacgaaacccccggcggguacugccugacccgguggaugcugaucgaggccgagcucaaauguuuuggaaauacagcuguugccaagugcaacgaaaaacaugacgaggaguucugcgauaugcugcgccuuuuugacuucuguaagcaggcgaucagacggcugaaagccgaagcucagaugagcauucagcucaucaauaaggccgugaacgcucugauuaaugaucaacuuaucaugaagaaccaucugcgcgacauuaugggcaucccuuauugcaauuacucuaaauauuguuaccucaaccacacggucaccgggaagacaucccugcccagaugcugucuggugagcaauggaucuuaccucaacgaaacccacuucagcgacgauaucgagcagcaggccgacaauaugauuacagagcugcuucaaaaagaauauaucgaucggcagggcaagaccccucuggggcucguggaccuguuugucuucuccacgucuuuuuaccugauuagcaucuuccuucaccucguuaaaauuccgacacaucgccacgugaucggaaagcccugcccuaaaccccauagacugaaccacaugggcauuuguuccugcggccuguauaagcacccuggggugcccgucaaguggaaacggugaggacuaguaauaaggaaacuguaugaaugucugugggcaggaagugaagagauccuucuguaaagguuuuuggaauuaugucugcugaauaauaaacuuuuuugaaauaauaaaucugguagaaaaaugagaucuaaaaaaaaaaaaaaaaaaaaaaaaaaaaaaaaaaaaaaaaaaaaaaaaaaaaaaaaaaaaaaaaaaaaaaaaaaaaaaaaaaaaaaaaaaaaaaaaaaaa

SEQ ID NO: 41205 - RNA, 1785 nt, Artificial Sequence
  mRNA product Design b-4 (A100) comprising derived and/or modified sequence from LASV(LASV1000-NIG-2009;Clade II)__AIT17782__GPCmut12 (opt5)
aggagagucccgcagucggcguccagcggcucugcuuguucgugugugugucguugcaggccuuauucaagcuuaccaugggccagaucauuaccuucuuucaagaggugccccacgucaucgaagagguuaugaacauugugcugaucgcccucagccugcuugcuauucugaaggggaucuacaauguggccacaugcggacucuucggccuggucuccuuucuucugcucugugggagaucuugcagcacgaccuauaaaggaguguacgaacugcagacacuggagcucgacauggcgucccugaacauguguaugccucuuucuugcaccaagaauaacagccaucacuauaucaugguuggcaaugaaacagggcuggagcucacccugacaaacaccuccauuaucaaucauaaauucuguaaccuuucugaugcucacaagaaaaaucuguacgaccaugcccucaugagcauuaucuccacguuucaccugagcauuccgaacuucaaucaguaugaggccaugucuugcgauuuuaacggaggcaagaucuccgugcaguacaaucugagccacaccuaugcugucgacgccgcuaaccauuguggcacaauugccaauggggugcuccaaaccuucaugcggauggcguggggaggcucuuacaucgcccuggauuccgggaagggaagcugggacugcaucaugacaucuuaccaguaucuuauuauccagaacaccacgugggaagaucacugucaguuuucccgccccagcccuauuggcuaccuggggcuccugucccaaagaacacgggacaucuauauuucucgcagacuucugggaaccuucacauggacccucagcgauuccgagggcaacgaaacccccggcggguacugccugacacgguggaugcugaucgaggcugagcucaaauguuuuggaaauacggccguugcuaagugcaacgaaaaacaugacgaggaguucugcgauaugcugcgccuuuuugacuucuguaagcaggccaucaaaagacugaagaccgaagcgcagaugagcauucagcucaucaauaaggccgugaacgcucugauuaaugaucaacuuaucaugaaaaaccaucugcgggacauuaugggcaucccuuauugcaauuacucuaaguauuguuaccucaaccacacagucaccgggaaaacaucccugccccgcugcugucuggugagcaauggaucuuaccucaacgaaacccacuucagcgacgauaucgagcagcaggccgacaauaugauuacggagcugcuucaaaaggaauauaucgauagacagggcaaaacaccucuggggcucguggaccuguuugucuucuccaccucuuuuuaccugauuagcaucuuccuucaccucguuaagauuccgacccaucggcacguggugggaaaacccugcccuaagccccaucgccugaaccacaugggcaucuguuccugcggccuguauaagcacccugggguccccgugaaauggaagagaugaggacuaguaauaaggaaacuguaugaaugucugugggcaggaagugaagagauccuucuguaaagguuuuuggaauuaugucugcugaauaauaaacuuuuuugaaauaauaaaucugguagaaaaaugagaucuaaaaaaaaaaaaaaaaaaaaaaaaaaaaaaaaaaaaaaaaaaaaaaaaaaaaaaaaaaaaaaaaaaaaaaaaaaaaaaaaaaaaaaaaaaaaaaaaaaaa

SEQ ID NO: 41206 - RNA, 1785 nt, Artificial Sequence
  mRNA product Design b-4 (A100) comprising derived and/or modified sequence from LASV(LASV221-NIG-2010;Clade II)__AIT17624__GPCmut12 (opt5)
aggagagucccgcagucggcguccagcggcucugcuuguucgugugugugucguugcaggccuuauucaagcuuaccaugggccagaucauuaccuucuuucaagaggugccccacgucaucgaagagguuaugaacauugugcugaucgcccucagccugcuugcuauucugaaggggaucuacaauguggccacaugcggacucuucggccuggucuccuuucuucugcucugugggagaucuugcagcacgaccuauaaaggaguguacgaacugcagacacuggagcucgacauggcgucccugaacauguguaugccucuuucuugcaccaagaauaacagccaucacuauaucaugguuggcaaugaaacagggcuggagcucacccugacaaacaccuccauuaucaaucauaaauucuguaaccuuucugaugcucacaagaaaaaucuguacgaccaugcccucaugagcauuaucuccacguuucaccugagcauuccgaacuucaaucaguaugaggccaugucuugcgauuuuaacggaggcaagaucuccgugcaguacaaucugagccacaccuaugcuauugacgccgcuaaccauuguggcacaaucgccaaugggguccuccaaaccuucaugcggauggcguggggaggcucuuacaucgcccuggauuccgggaagggaagcugggacugcauuaugacaucuuaccaguaucuuaucauucagaacaccacgugggaagaucacugucaguuuucccgccccagcccuaucggcuaccuggggcuccugucccaaagaacacgggacauuuauaucucucgcagacuucugggaaccuucacauggacccucagcgauuccgagggcaacgaaacccccggcggguacugccugacacgguggaugcugaucgaggcugagcucaaauguuuuggaaauacggccguggcuaagugcaacgaaaaacaugacgaggaguucugcgauaugcugcgccuuuuugacuucuguaagcaggccauuagacggcugaaaaccgaagcgcagaugagcauccagcucauuaauaaggccguuaacgcucugaucaaugaucaacuuauuaugaagaaccaucugcgcgacaucaugggcaucccuuauugcaauuacucuaaauauuguuaccucaaccacacagugaccgggaagacaucccugcccagaugcugucuggucagcaauggaucuuaccucaacgaaacccacuucagcgacgauauugagcagcaggccgacaauaugaucacggagaugcugcaaaaagaauauauggaucggcagggcaagacaccucuugggcugguggaccucuuuguguucuccaccucuuuuuaccugauuagcaucuuccugcaccuugucaaaauuccgacccaucgccacguuaucggaaagcccugcccuaaaccccauagacucaaccacaugggcauuuguuccugcggccuguauaagcacccuggggugcccgugaaguggaaacggugaggacuaguaauaaggaaacuguaugaaugucugugggcaggaagugaagagauccuucuguaaagguuuuuggaauuaugucugcugaauaauaaacuuuuuugaaauaauaaaucugguagaaaaaugagaucuaaaaaaaaaaaaaaaaaaaaaaaaaaaaaaaaaaaaaaaaaaaaaaaaaaaaaaaaaaaaaaaaaaaaaaaaaaaaaaaaaaaaaaaaaaaaaaaaaaaa

SEQ ID NO: 41207 - RNA, 1785 nt, Artificial Sequence
  mRNA product Design b-4 (A100) comprising derived and/or modified sequence from LASV(LASV237-NIG-2010;Clade II)__AIT17638__GPCmut12 (opt5)
aggagagucccgcagucggcguccagcggcucugcuuguucgugugugugucguugcaggccuuauucaagcuuaccaugggccagaucauuaccuucuuucaagaggugccccacgucaucgaagagguuaugaacauugugcugaucgcccucagccugcuugcuauucugaaggggaucuacaauguggccacaugcggacucuucggccuggucuccuuucuucugcucugugggagaucuugcagcacgaccuauaaaggaguguacgaacugcagacacuggagcucgacauggcgucccugaacauguguaugccucuuucuugcaccaagaauaacagccaucacuauaucaugguuggcaaugaaacagggcuggagcucacccugacaaacaccuccauuaucaaucauaaauucuguaaccuuucugaugcucacaagaaagaccuguacgaucaugcccucaugagcauuaucuccacguuucaccugagcauuccgaauuucaaccaguaugaggccaugucuugcgacuuuaauggaggcaagaucuccgugcaguacaaccugagccacaccuaugcugucgaugccgcuaaucauuguggcacaauugccaacggggugcuccaaaccuucaugcggauggcguggggaggcucuuacaucgcccuggacuccgggaagggaagcugggauugcaucaugacaucuuaccaguaucuuauuauccagaauaccacgugggaagaccacugucaguuuucccgccccagcccuauuggcuaccuggggcuccugucccaaagaacacgggauaucuauauuucucgcagacuucugggaaccuucacauggacccucagcgacuccgagggcaacgaaacccccggcggguacugccugacacgguggaugcugaucgaggcugagcucaaauguuuuggaaacacggccguugcuaagugcaaugaaaaacaugaugaggaguucugcgacaugcugcgccuuuuugauuucuguaagcaggccaucagacggcugaaaaccgaagcgcagaugagcauucagcucaucaacaaggccgugaaugcucugauuaacgaccaacuuaucaugaagaaucaucugcgcgacauuaugggcaucccuuauugcaacuacucuaaauauuguuaccucaaucacacagucaccgggaagacaucccugcccagaugcugucuggugagcaacggaucuuaccucaaugaaacccacuucagcgaugacaucgagcagcaggccgauaacaugauuacggagcugcuucaaaaagaauauauggaccggcagggcaagacaccucuggggcucguggaucuguuugucuucuccaccucuuuuuaccugaucagcauuuuccuucaccucaucaaaauuccgacccaucgccacaucacaggaaagcccugcccuaaaccccauagacugaaucacaugggcauuuguuccugcggccuguauaagcacccugggguucccgugaaguggaaacggugaggacuaguaauaaggaaacuguaugaaugucugugggcaggaagugaagagauccuucuguaaagguuuuuggaauuaugucugcugaauaauaaacuuuuuugaaauaauaaaucugguagaaaaaugagaucuaaaaaaaaaaaaaaaaaaaaaaaaaaaaaaaaaaaaaaaaaaaaaaaaaaaaaaaaaaaaaaaaaaaaaaaaaaaaaaaaaaaaaaaaaaaaaaaaaaaa

SEQ ID NO: 41208 - RNA, 1785 nt, Artificial Sequence
  mRNA product Design b-4 (A100) comprising derived and/or modified sequence from LASV(LASV253-NIG-2011;Clade II)__AIT17670__GPCmut12 (opt5)
aggagagucccgcagucggcguccagcggcucugcuuguucgugugugugucguugcaggccuuauucaagcuuaccaugggccagaucauuaccuucuuucaagaggugccccacgucaucgaagagguuaugaacauugugcugaucgcccucagccugcuugcuauucugaaggggaucuacaauguggccacaugcggacucuucggccuggucuccuuucuucugcucugugggagaucuugcagcacgaccuauaaaggaguguacgaacugcagacacuggagcucgacauggcgucccugaacauguguaugccucuuucuugcaccaagaauaacagccaucacuauaucaugguuggcaaugaaacagggcuggagcucacccugacaaacaccuccauuaucaaucauaaauucuguaaccuuucugaugcucacaagaaaaaucuguacgaccaugcccucaugagcauuaucuccacguuucaccugagcauuccgaacuucaaucaguaugaggccaugucuugcgauuuuaacggaggcaagaucuccgugcaguacaaucugagccacaccuaugcugucgacgccgcuaaccauuguggcacaauugccaauggggugcuccaaaccuucaugcggauggcguggggaggcucuuacaucgcccuggauuccgggaagggaagcugggacugcaucaugacaucuuaccaguaucuuauuauccagaacaccacgugggaagaucacugucaguuuucccgccccagcccuauuggcuaccuggggcuccugucccaaagaacacgggacaucuauauuucucgcagacuucugggaaccuucacauggacccucagcgauuccgagggcaacgaaacccccggcggguacugccugacacgguggaugcugaucgaggcugagcucaaauguuuuggaaauacggccguugcuaagugcaacgaaaaacaugacgaggaguucugcgauaugcugcgccuuuuugacuucuguaagcaggccaucagacggcugaaagcggaagcccagaugagcauucagcucaucaauaaggcugugaacgcccugauuaaugaucaacuuaucaugaagaaccaucugcgcgacauuaugggcaucccuuauugcaauuacucuaaauauuguuaccucaaccacaccgucacagggagaaccucccugccccggugcugucuggugagcaauggaucuuaccucaacgaaacacacuucagcgacgauaucgagcagcaggcugacaauaugauuaccgagcugcuucaaaaggaauauaucgaucgccagggcaaaacgccucuggggcucguggaccuguuugucuucuccacaucuuuuuaccugauuagcaucuuccuucaccucguuaagauuccgacccauagacacaucauuggaaaacccugcccuaagccccaucggcugaaccacaugggcaucuguuccugcggccuguauaaacacccuggggugcccgugaaguggaagcgcugaggacuaguaauaaggaaacuguaugaaugucugugggcaggaagugaagagauccuucuguaaagguuuuuggaauuaugucugcugaauaauaaacuuuuuugaaauaauaaaucugguagaaaaaugagaucuaaaaaaaaaaaaaaaaaaaaaaaaaaaaaaaaaaaaaaaaaaaaaaaaaaaaaaaaaaaaaaaaaaaaaaaaaaaaaaaaaaaaaaaaaaaaaaaaaaaa

SEQ ID NO: 41209 - RNA, 1785 nt, Artificial Sequence
  mRNA product Design b-4 (A100) comprising derived and/or modified sequence from LASV(LASV254-NIG-2011;Clade II)__AIT17674__GPCmut12 (opt5)
aggagagucccgcagucggcguccagcggcucugcuuguucgugugugugucguugcaggccuuauucaagcuuaccaugggccagaucauuaccuucuuucaagaggugccccacgucaucgaagagguuaugaacauugugcugaucgcccucagccugcuugcuauucugaaggggaucuacaauguggccacaugcggacucuucggccuggucuccuuucuucugcucugugggagaucuugcagcacgaccuauaaaggaguguacgaacugcagacacuggagcucgacaugaccaaccugaauauguguaugccucuuuccugcacaaagaacaauucucaucacuauaucaugguuggcaacgaaaccgggcuggagcucacacugaccaauacgagcauuaucaaccauaaauucuguaaucuuuccgaugcgcacaagaaaaaccuguacaaucaugcucucaugucuauuaucagcaccuuucaccuguccauuccgaacuucaaucaguaugaggccaugagcugcgacuuuaacggaggcaagaucucugugcaguacaaucugucccacagcuaugccgucgaugcugccaaccauuguggcacaauugcuaacggggugcuccaaaccuucaugcggauggccuggggaggcucuuacaucgcgcuggacuccgggaagggaaauugggauugcaucaugacaagcuaccaguaucuuauuauccagaacaccacgugggaagaccacugucaguuuucucgccccuccccuauuggcuaccuggggcuccugagccaaagaacacgggauaucuauauuucccgcagacuucugggaaccuucacauggacccucucugacagcgagggcaaugaaacccccggcggguacugccugacacgguggaugcugaucgaggccgagcucaaauguuuuggaaacacggcuguugccaagugcaaugaaaaacaugaugaggaguucugcgacaugcugcgccuuuuugauuucuguaagcaggcuaucagacggcugaaaaccgaagcccaggcgaacauucagcucaucaauaaggccgugaacgcucugauuaaugaccaacuuaucaugaagaaccaucugcgcgauauuaugggcaucccuuauugcaauuacuccaaauauuguuaccucaaccacacagucaccgggaagacaagccugcccagaugcugucuggugucuaauggauccuaccucaacgaaacccacuucagcgacgacaucgagcagcaggccgauaauaugauuacggagcugcuucaaaaagaauauauggaccggcagggcaagacaccucuggggcucguggaucuguuugucuucucuaccagcuuuuaccugaucuccauuuuccuucaccucguuaaaaucccgacccaucgccacgugauuggaaagcccugcccuaaaccccauagacugaaccacaugggcaucuguucuugcggccuguauaagcacccuggggugcccgucaaguggaaacggugaggacuaguaauaaggaaacuguaugaaugucugugggcaggaagugaagagauccuucuguaaagguuuuuggaauuaugucugcugaauaauaaacuuuuuugaaauaauaaaucugguagaaaaaugagaucuaaaaaaaaaaaaaaaaaaaaaaaaaaaaaaaaaaaaaaaaaaaaaaaaaaaaaaaaaaaaaaaaaaaaaaaaaaaaaaaaaaaaaaaaaaaaaaaaaaaa

SEQ ID NO: 41210 - RNA, 1785 nt, Artificial Sequence
  mRNA product Design b-4 (A100) comprising derived and/or modified sequence from LASV(Nig08-A19;Clade III)__ADU56618__GPCmut12 (opt5)
aggagagucccgcagucggcguccagcggcucugcuuguucgugugugugucguugcaggccuuauucaagcuuaccaugggccagaucgugaccuucuuucaagaggucccccacguuauugaagaggugaugaacaucgugcugauugcccucagcauccuggcuauucuuaaggggcuguacaauaucgccacaugcggacucaucggccuggucacguuccuucugcucuccgggagaucuuguagcaugaccuauaaaggaguguacgaacugcagacacuggagcucaacaugaauacccugaacaugugcaugccucuuuccuguacaaagaauaacucucaucacuauauuaugguuggcaaugaaaccgggcuggagcucacacugaccaacacgagccuucugcaucacaaauuuugcaaucucuccgacgcgcauaagaaaaaccuguacgaucacacccugaugucuaucauuagcacauuccaccucuccaucccgaauuuuaaccaguaugaggcuaugagcugugacuucaauggaggcaagauuaccgugcaguacaaccugucucauuccuaugccaucgaugccgcuaaucacugcggcacagucgccaacggggugcuucaaaccuuuaugcggauggcuuggggaggcagcuacauugcccuggacucugggcgcggaaagugggauuguaucaugacguccuaccaguaucucaucauucagaacacaaccugggaagaccauugccaguucagcagacccucuccuaucggcuaccuggggcuucugucccaacggacacgcgauauuuauaucagcagacggcuccugggaaccuuuaccuggacacuguccgacucugagggcaaugaaacgcccggcggguacugucucacccgcuggaugcugauugaggcggagcuuaaaugcuucggaaacacagccguugcuaaguguaaugaaaaacacgaugaggaauuuugcgacaugcugagacucuucgauuuuugcaagcaggccauccggcgccugaaagcugaggcccagaugagcauccagcuuauuaacaaggcggugaaugcccugaucaacgaccaacucauuaugaagaaucaccugagagauaucaugggcauuccuuauuguaacuacuccaaauauugcuaccugaaucauaccagcacagggcggaccucucucccccgcuguugccuggucuccaacggaagcuaccuuaaugaaacgcacuucucugacgacaucgagcagcaggcugauaacaugaucacagagaugcugcaaaaggaauaucucgacagacagggcaaaaccccucuggggcugguggaucuuuucguguuuagcaccuccuucuaccucauuucuaucuuucugcaucuggucaagauuccgacacaccggcauaucguuggaaaacccuguccuaagccccaccgccucaaucacaugggcauuugcagcuguggccuguauaaacagccuggggugcccgugagauggaagcggugaggacuaguaauaaggaaacuguaugaaugucugugggcaggaagugaagagauccuucuguaaagguuuuuggaauuaugucugcugaauaauaaacuuuuuugaaauaauaaaucugguagaaaaaugagaucuaaaaaaaaaaaaaaaaaaaaaaaaaaaaaaaaaaaaaaaaaaaaaaaaaaaaaaaaaaaaaaaaaaaaaaaaaaaaaaaaaaaaaaaaaaaaaaaaaaaa

SEQ ID NO: 41211 - RNA, 1788 nt, Artificial Sequence
  mRNA product Design b-4 (A100) comprising derived and/or modified sequence from LASV(G1180-SLE-2010;Clade IV)__AIT17168__GPCmut12 (opt5)
aggagagucccgcagucggcguccagcggcucugcuuguucgugugugugucguugcaggccuuauucaagcuuaccaugggccagaucgugaccuucuuucaagaggucccccacguuauugaagaggugaugaacaucgugcugauugcccucagcauccuggcuguccuuaaggggcuguacaauuucgccacaugcggacucgugggccugcuuacguuucugcuccugugugggagauccugcaccgcgucucgguauaaaggaguuuacgaacugcagacacucgagcugaacauggaaacccuuaauauguguaugccucugagcugcacaaagaacaauucccaucacuauauuauggugggcaacgagaccgggcucgagcugacacuuaccaauacgucuaucaucaaccauaaauucuguaaucugagcgacgcucacaagaaaaaccucuacgaucaugcccugauguccauuaucucuaccuuucaccugagcauuccgaauuucaaccaguaugaagccauguccugcgacuuuaauggaggcaagaucagcguccaguacaaccucucucacuccuaugcuggcgaugccgcuaaucauugugggacaguggccaacggaguucugcaaaccuucaugcgcauggcguggggcgggagcuacauugcccuugacucuggacacggcuccugggauugcaucaugacaagcuaccaguaucugauuauccagaacaccacgugggaggaccauugucaguuuucuagacccuccccuaucggguaccucggacugcuuagccaacggacacgcgauauuuauaucuccagacggcugcucggcaccuucacauggacccugucugacagcgaaggcaaggauacccccgggggauacugccugacacgcuggaugcucauugaggcugagcugaaauguuuuggcaauacggccguggcuaagugcaacgaaaaacacgacgaggaguucugcgauaugcuuagacuguuugacuucuguaagcaggccauccagcggcucaaagcggaagcccagauguccauucaacugaucaauaaggcugucaacgcccuuaucaaugaucagcugauuaugaagaaccaccuccgcgacaucauggggauuccuuauugcaauuacagcaaauauuguuaccugaaccauaccacaaccggaaagacaucucugcccaaaugcugucucguguccaauggcagcuaccugaacgaaacccacuucucugacgauaucgagcagcaagcugacaauaugauuacggagaugcuucagaaggaauauauggagagacaggggaaaacaccucugggacucguggaucuguuugucuucagcaccuccuuuuaccugaucucuaucuuccuucaucucguuaagauuccgacccaccggcauaucgugggcaaaagcugccccaagccucaccgccugaaccacaugggcauuuguuccugcgggcuguauaagcagcccggagugccugucaaauggaagagaugaggacuaguaauaaggaaacuguaugaaugucugugggcaggaagugaagagauccuucuguaaagguuuuuggaauuaugucugcugaauaauaaacuuuuuugaaauaauaaaucugguagaaaaaugagaucuaaaaaaaaaaaaaaaaaaaaaaaaaaaaaaaaaaaaaaaaaaaaaaaaaaaaaaaaaaaaaaaaaaaaaaaaaaaaaaaaaaaaaaaaaaaaaaaaaaaa

SEQ ID NO: 41212 - RNA, 1788 nt, Artificial Sequence
  mRNA product Design b-4 (A100) comprising derived and/or modified sequence from LASV(G1442-SLE-2011;Clade IV)__AIT17180__GPCmut12 (opt5)
aggagagucccgcagucggcguccagcggcucugcuuguucgugugugugucguugcaggccuuauucaagcuuaccaugggccagaucgugaccuucuuucaagaggucccccacguuauugaagaggugaugaacaucgugcugauugcccucagcauccuggcuguccuuaaggggcuguacaauguggccacaugcggacucauuggccugguuacguuccuucugcucugugggagauccugcaccacaacccuguauaaaggaguguacgaacugcagacacucgagcugaacauggaaacccuuaauauguguaugccucugucuugcacaaagaacaauagccaucacuauauccgggucggcaacgagaccgggcucgagcugacgcuuaccaauacauccaucauuaaccauaaauuuuguaaucugucugacgcgcacaagaaaaaccucuacgaucaugcucugaugagcaucauuuccaccuuccaccugucuaucccgaauuuuaaccaguaugaagccaugagcugcgacuucaauggaggcaagauuuccgugcaguacaaccucagccacucuuaugccggcgaugcugccaaucauugugggacaguugcuaacggagugcugcaaaccuuuaugcgcauggccuggggcggguccuacaucgcgcuugacagcggaagaggcaacugggauugcauuaugacgucuuaccaguaucugaucauccagaauacaaccugggacgaucacugucaguucucccggcccagcccuauuggguaccucggacugcuuucucaacgcacaagagacgucuauaucucccggcgccugcucggcaccuuuaccuggacacugagcgauuccgagggcaaggacacgcccgggggauacugccugaccagauggaugcucauugaagccgagcugaaauguuucggcaacacagcuguggccaagugcaaugagaaacaugaugaagaguuuugcgacaugcuucggcuguucgauuuuuguaagcaggcuauccagcgccucaaagccgaagcgcagaugucuauucaacugaucaacaaggccgugaaugcucuuaucaacgaccagcugauuaugaagaaucaccucagagacaucauggggauuccuuauugcaacuacagcaaauauuguuaccugaauaacaccgccacaggaaagaccucccugcccaaaugcugucucaucagcaauggcucuuaccugaacgagacgcacuucuccgaugacauugaacaggaggcugauaauaugaucacagagaugcuucaaaaggaauauauggagcggcaggggaaaaccccucugggacucgucgaccuguucguuuuuagcaccucuuucuaccugaucagcauuuuucuucaucucgugaagaucccgacacaccgccauauugugggcaaauccugccccaagccucacagacugaaccauaugggcaucuguucuugcgggcuguauaagcagcccggagucccugugcgguggaaacgcugaggacuaguaauaaggaaacuguaugaaugucugugggcaggaagugaagagauccuucuguaaagguuuuuggaauuaugucugcugaauaauaaacuuuuuugaaauaauaaaucugguagaaaaaugagaucuaaaaaaaaaaaaaaaaaaaaaaaaaaaaaaaaaaaaaaaaaaaaaaaaaaaaaaaaaaaaaaaaaaaaaaaaaaaaaaaaaaaaaaaaaaaaaaaaaaaa

SEQ ID NO: 41213 - RNA, 1788 nt, Artificial Sequence
  mRNA product Design b-4 (A100) comprising derived and/or modified sequence from LASV(G3010-SLE-2013;Clade IV)__AIT17344__GPCmut12 (opt5)
aggagagucccgcagucggcguccagcggcucugcuuguucgugugugugucguugcaggccuuauucaagcuuaccaugggccagaucgugaccuucuuucaagaggucccccacguuauugaagaggugaugaacaucgugcugauugcccucagcauccuggcuguccuuaaggggcuguacaauuucgccacaugcggacucgugggccugguuacguuucuucugcucugugggagauccugcaccacaucucuguauaaaggaguguacgaacugcagacccucgagcugaacauggaaacacuuaauauguguaugccucugagcugcaccaagaacaauucccaucacuauauuauggucggcaacgagacagggcucgagcugacccuuacgaauaccucuaucaucaaccauaaauucuguaaucugagcgacgcgcacaagaaaaaccucuacaaucaugcucugauguccauuaucucuacauuucaccugagcauuccgaacuucaaucaguaugaagccauguccugcgauuuuaacggaggcaagaucagcgugcaguacaaucucucucacuccuaugccggcgacgcugccagccauugugggaccguugcuaacggagugcugcaaacauucaugcggauggccuggggcgggucuuacauugcgcuugauuccggauacggcaagugggacugcaucaugaccagcuaucaguaccugauuauccagaacacgacaugggaggaucacugucaguuuucucgccccuccccuaucggguaucucggacugcuuagccaaagaacccgggacauuuacaucucccgcagacugcucggcacauucaccuggacccugucugauagcgaaggcaaagacacacccgggggauauugccugacgcgguggaugcucauugaggccgagcugaaguguuuuggcaauaccgcugucgccaaaugcaacgaaaagcaugaugaggaguucugcgacaugcuucgccuguuugauuucuguaaacaggcuauccagagacucaagacagaagcccagauguccauucaacugaucaauaaggcggugaacgcccuuaucaaugaccagcugauuaugaaaaaccaccuccgggauaucauggggauuccuuacugcaauuauagcaaguacuguuaccugaaccacaccacaaccggaaaaacgucucugcccaagugcugucucguguccaauggcagcuaucugaacgaaacacauuucucugacgacaucgagcagcaagcugauaauaugauuaccgagaugcuucagaaagaauacauggagcgccaggggaagaccccucugggacucgucgaccuguuuguuuucagcacauccuuuuaucugaucucuaucuuccuucaccucgugaaaauuccgacccauagacacaucgugggcaagagcugccccaagccucaucggcugaaccacaugggcauuuguuccugcgggcuguacaaacagcccggagucccugugcgcuggaagagaugaggacuaguaauaaggaaacuguaugaaugucugugggcaggaagugaagagauccuucuguaaagguuuuuggaauuaugucugcugaauaauaaacuuuuuugaaauaauaaaucugguagaaaaaugagaucuaaaaaaaaaaaaaaaaaaaaaaaaaaaaaaaaaaaaaaaaaaaaaaaaaaaaaaaaaaaaaaaaaaaaaaaaaaaaaaaaaaaaaaaaaaaaaaaaaaaa

SEQ ID NO: 41214 - RNA, 1788 nt, Artificial Sequence
  mRNA product Design b-4 (A100) comprising derived and/or modified sequence from LASV(G502-SLE-2009;Clade IV)__AIT17126__GPCmut12 (opt5)
aggagagucccgcagucggcguccagcggcucugcuuguucgugugugugucguugcaggccuuauucaagcuuaccaugggccagaucgugaccuucuuucaagaggucccccacguuauugaagaggugaugaacaucgugcugauugcccucagcauccuggcuguccuuaaggggcuguacaauuucgccacaugcggacucgugggccugcuuacguuucugcuccugugugggagauccugcaccacaggacuguauaaaggcguuuacgaacuccagacccuggagcuuaacauggaaacacugaauauguguaugccucucucuugcaccaagaacaauagccaucacuauauuaugguggggaacgagacaggacuggagcuuacccugacgaauaccuccaucaucaaccauaaauucuguaaucucucugacgcgcacaagaaaaaccuguacgaucaugcucugaugagcauuaucuccacauuucaccucucuauuccgaauuucaaccaguaugaagccaugagcugcgacuuuaauggcggcaagaucuccguccaguacaaccugagccacucuuaugccggggaugcugccgaccauuguggaaccguggcuaauggcguucuucaaacauucaugcggauggccuggggaggguccuacauugcgcuggauagcggccgcgggagaugggacugcaucaugaccucuuaccaguaucucauuauccagaacacgacaugggaggaucacugucaguuuucccggcccagcccuaucggauaccugggccuucugucucaacgcaccagagacauuuauaucucccggcgccuccugggcacauucaccuggacccugagcgauuccgaagggaaggacacacccggaggcuacugccucacgagauggaugcugauugaggccgagcuuaaauguuuugggaacaccgcuguggccaagugcaaugaaaaacaugaugaggaguucugcgacaugcugcggcucuuugauuucuguaagcaggcuauccagcgccugaaagccgaagcgcagaugucuauucaacuuaucaacaaggccgucaaugcucugaucaacgaccagcucgugaugaagaaucaccugagagacauuaugggaaucccuuauugcaacuacagccgguauuguuaccugaaucacacaaccacaggccgcaccucccuccccaaaugcugucuggugagcaacgggucuuaccuuaaugaaacgcauuucuccgaugacauugagcagcaagccgauaacaugaucacagagaugcugcagaaggaauauauggagagacagggaaaaaccccucucggccuggucgaccuguuuguuuucagcaccucuuuuuaccuuauuagcaucuuccuccaccuggugaagaucccgacacaucggcacauugugggcaaauccugccccaagccucaucgccugaaucacauggggaucuguucuugcggacucuauaaacagcccggcgucccugugaaguggaagagaugaggacuaguaauaaggaaacuguaugaaugucugugggcaggaagugaagagauccuucuguaaagguuuuuggaauuaugucugcugaauaauaaacuuuuuugaaauaauaaaucugguagaaaaaugagaucuaaaaaaaaaaaaaaaaaaaaaaaaaaaaaaaaaaaaaaaaaaaaaaaaaaaaaaaaaaaaaaaaaaaaaaaaaaaaaaaaaaaaaaaaaaaaaaaaaaaa

SEQ ID NO: 41215 - RNA, 1788 nt, Artificial Sequence
  mRNA product Design b-4 (A100) comprising derived and/or modified sequence from LASV(G733-SLE-2010;Clade IV)__AIT17154__GPCmut12 (opt5)
aggagagucccgcagucggcguccagcggcucugcuuguucgugugugugucguugcaggccuuauucaagcuuaccaugggccagaucgugaccuucuuucaagaggucccccacguuauugaagaggugaugaacaucgugcugauugcccucagcauccuggcuguccuuaaggggcuguacaauuucgccacaugcggaauugugggccucguuuccuuucugcuucugugugggagaucuugcacgaccagccucuauaaaggaguguacgaacugcagacacuggagcucaacauggaaacccugaauauguguaugccucuuuccugcacaaagaacaauucucaucacuauaucauggucggcaacgagaccgggcuggagcucacacugaccaauacgagcaucauuaaccauaaauucuguaaucuuuccgacgcgcacaagaaaaaccuguacgaucaugcucucaugucuaucauuagcaccuuucaccuguccaucccgaauuucaaccaguaugaagccaugagcugcgacuuuaauggaggcaagauuucugugcaguacaaccugucccacagcuaugccggcgaugcugccaaucauugugggacaaucgcuaacggaguucuccaaaccuucaugcggauggccuggggcgggucuuacauugcgcuggacuccggacgcgauagaugggacugcaucaugacaagcuaccaguaucuuaucauucagaacaccacgugggaggaucacugucaguuuucucggcccuccccuaucggcuaccuggggcuccugagccaacgcacaagagacauuuauaucucccggcgccuucugggaaccuucacauggacccucucugauagcgaaggcaaggacacccccggcggguacugccugacaagauggaugcugauugaggccgagcucaaauguuuuggaaauacggcuguggccaagugcaacgaaaaacaugaugaggaguucugcgacaugcugcggcuuuuugauuucuguaagcaggcuauccagcgccugaaagccgaagcgcagauguccauccaacucauuaauaaggccgucaacgcucugaucaaugaccagcuuauuaugaagaaccaccugagagacaucaugggcauuccuuauugcaauuacagcaaauauuguuaccucaaccacaccacaaccgggaagacaucucugcccaaaugcugucugguguccaauggaagcuaccucaacgaaacccauuucucugaugacaucgagcagcaagccgauaauaugaucacggagaugcugcagaaggaauauauggagcggcagggcaaaacaccucuugggcugguggaccucuuugucuucagcaccuccuuuuaccugauuucuaucuuccugcaccuuguuaagauuccgacccaucgccacguggugggaaaaagcugccccaagccucauagacucaaccacaugggcaucuguuccugcggccuguaugggcagcccggagucccugugaaguggaaacggugaggacuaguaauaaggaaacuguaugaaugucugugggcaggaagugaagagauccuucuguaaagguuuuuggaauuaugucugcugaauaauaaacuuuuuugaaauaauaaaucugguagaaaaaugagaucuaaaaaaaaaaaaaaaaaaaaaaaaaaaaaaaaaaaaaaaaaaaaaaaaaaaaaaaaaaaaaaaaaaaaaaaaaaaaaaaaaaaaaaaaaaaaaaaaaaaa

SEQ ID NO: 41216 - RNA, 1788 nt, Artificial Sequence
  mRNA product Design b-4 (A100) comprising derived and/or modified sequence from MOPV/LASV reassortant(IGS-1;Clade IV)__AFY05576__GPCmut12 (opt5)
aggagagucccgcagucggcguccagcggcucugcuuguucgugugugugucguugcaggccuuauucaagcuuaccaugggccagaucgugaccuucuuucaagaggucccccacguuauugaagaggugaugaacaucgugcugauugcccucagcguccuggcugugcuuaaggggcuguacaauuucgccacaugcggacucguuggccuggugacguuucuucugcucugugggagauccugcaccacaucucuguauaaaggagucuacgaacugcagacccucgagcugaacauggaaacacuuaauauguguaugccucugagcugcaccaagaacaauucccaucacuauaucauggugggcaacgagacagggcucgagcugacccuuacgaauaccucuauuaucaaccauaaauucuguaaucugagcgacgcgcacaagaaaaaccucuacgaucaugcucugauguccaucauuucuacauuucaccugagcaucccgaauuucaaccaguaugaagccauguccugcgacuuuaauggaggcaagauuagcguucaguacaaccucucucacuccuaugccggcgaugcugccaaucauugugggaccguggcuaacggaguccugcaaacauucaugcggauggccuggggcgggagcuacaucgcgcuugacucuggacgcggcaacugggauugcauuaugaccuccuaccaguaucugaucauucagaauacgacaugggaggaccacugucaguuuagcagacccucuccuaucggguaccucggacugcuuucccaacggacccgcgauaucuauauuagcagacggcugcucggcacauucaccuggacccuguccgacucugaaggcgaggauacacccgggggauacugccugacgcgcuggaugcucaucgaggccgaacugaaguguuuuggcaacaccgcuguggccaaaugcaaugagaagcaugacgaagaguucugcgauaugcuuagacuguuugacuucuguaaacaggcuauucagcggcucaaggccgaagcgcagaugagcauccaacugauuaacaaagccgugaaugcucuuaucaacgaucagcugaucaugaagaaucaccuccgcgacauuauggggaucccuuauugcaacuacuccaaguauuguuaccugaaucacacaaccacaggaagaaccagccugcccaaaugcugucucgucucuaacggcuccuaccugaaugagacgcauuucagcgacgauauugagcagcaagccgacaacaugaucacagaaaugcuucagaaggaguauauggaacggcaggggaaaaccccucugggacucguugaucuguuuguguucucuaccagcuuuuaccugauuuccaucuuccuucaccucgugaagaucccgacacaucgccacauugucggcaaaucuugccccaagccucauagacugaaucacaugggcaucuguagcugcgggcuguauaaacagcccggagugccuguuaaguggaagcggugaggacuaguaauaaggaaacuguaugaaugucugugggcaggaagugaagagauccuucuguaaagguuuuuggaauuaugucugcugaauaauaaacuuuuuugaaauaauaaaucugguagaaaaaugagaucuaaaaaaaaaaaaaaaaaaaaaaaaaaaaaaaaaaaaaaaaaaaaaaaaaaaaaaaaaaaaaaaaaaaaaaaaaaaaaaaaaaaaaaaaaaaaaaaaaaaa

SEQ ID NO: 41217 - RNA, 1788 nt, Artificial Sequence
  mRNA product Design b-4 (A100) comprising derived and/or modified sequence from LASV(LM765-SLE-2012;Clade IV)__AIT17814__GPCmut12 (opt5)
aggagagucccgcagucggcguccagcggcucugcuuguucgugugugugucguugcaggccuuauucaagcuuaccaugggccagaucgugaccuucuuucaagaggucccccacguuauugaagaggugaugaacaucgugcugauugcccucagcauccuggcuguccuuaaggggcuguacaauuucgccacaugcggacucgugggccugguuacguuucuucugcucugugggagauccugcaccacaucucuguauaaaggaguguacgaacugcagacccucgagcugaacauggaaacacuuaauauguguaugccucugagcugcaccaagaacaauucccaucacuauauuauggucggcaacgagacagggcucgagcugacccuuacgaauaccucuaucaucgaccauaaauucuguaaccugagcgaugcgcaccggaagaaucucuacgaccaugcucugauguccauuaucucuacauuucaccugagcauuccgaacuucaaucaguaugaagccauguccugcgauuuuaacggaggcaaaaucagcgugcaguacaaucucucucacuccuaugccaaggacgcugccgaucauuguggcaccguugcuaacggggugcugcaaacauucaugcgcauggccuggggaggcagcuacauugcgcuugacucugggagaggacggugggauugcaucaugaccuccuaccaguaucugauuauccagaauacgacaugggaggaccacugucaguuuagccgccccucuccuaucggcuaccucgggcugcuuucccaaagaacccgggauauuuauaucagccgcagacugcucggaacauucaccuggacccuguccgacucugaaggcaaggauacacccggcggguacugccugacgcgguggaugcucauugaggccgagcugaaauguuuuggaaacaccgcugucgccaagugcaacgaaaaacaugacgaggaguucugcgauaugcuucgccuguuugacuucuguaagcaggcuauccagagacucaaagccgaagcgcagaugagcauucaacugaucaauaaggccgugaacgcucuuaucaaugaccagcugauuaugaagaaccaccuccgggauaucaugggcauuccuuauugcaauuacuccaaauauuguuaccugaaccacacaaccacagggaagaccagccugcccaaaugcugucucgugucuaauggauccuaccugaacgaaacgcauuucagcgacgauaucgagcagcaagccgacaauaugauuacagagaugcuucagaaggaauauauggagcgccagggcaaaaccccucuggggcucgucgaucuguuuguuuucucuaccagcuuuuaccugaucuccaucuuccuucaccucgugaagauuccgacacauagacacaucgugggaaaacccugcccuaagccccaucggcugaaccacaugggcauuuguucuugcggccuguauaagcagccugggguccccgugaaauggaagcgcugaggacuaguaauaaggaaacuguaugaaugucugugggcaggaagugaagagauccuucuguaaagguuuuuggaauuaugucugcugaauaauaaacuuuuuugaaauaauaaaucugguagaaaaaugagaucuaaaaaaaaaaaaaaaaaaaaaaaaaaaaaaaaaaaaaaaaaaaaaaaaaaaaaaaaaaaaaaaaaaaaaaaaaaaaaaaaaaaaaaaaaaaaaaaaaaaa

SEQ ID NO: 41218 - RNA, 1788 nt, Artificial Sequence
  mRNA product Design b-4 (A100) comprising derived and/or modified sequence from LASV(LM776-SLE-2012;Clade IV)__AIT17824__GPCmut12 (opt5)
aggagagucccgcagucggcguccagcggcucugcuuguucgugugugugucguugcaggccuuauucaagcuuaccaugggccagaucgugaccuucuuucaagaggucccccacguuauugaagaggugaugaacaucgugcugauugcccucagcauccuggcuguccuuaaggggcuguacaauuucgccacaugcggacucgugggccugguuacguuucuucugcucugugggagauccugcaccacaucuguguauaaaggagucuacgaacugcagacccuggagcucaacauggaaacacugaauauguguaugccucuuagcugcaccaagaacaauucccaucacuauauuauggugggcaacgagacagggcuggagcucacccugacgaauaccucuaucaucaaccauaaauucuguaaucuuagcgacgcgcacaagaaaaaccuguacgaucaugcucucauguccauuaucucuacauuucaccugagcauuccgaauuucaaccaguaugaagccauguccugcgacuuuaauggaggcaagaucagcguucaguacaaccugucucacuccuaugccggcgaugcugccaaucauugugggaccguggcuaacggaguccuccaaacauucaugcggauggccuggggcgggagcuacauugcgcuggacucuggacacggcaagugggauugcaucaugaccuccuaccaguaucuuauuauccagaacacgacaugggaggaccauugucaguuuagccgccccucuccuaucggguaccugggacuccugucccaaagaacccgggauauuuauaucagccgcagacuucugggcacauucaccuggacccucuccgacucugaaggcaaagauacacccgggggauacugccugacgcgguggaugcugauugaggccgagcucaaguguuuuggcaauaccgcuguggccaaaugcaacgaaaagcacgacgaggaguucugcgauaugcugcgccuuuuugacuucuguaaacaggcuauccagagacugaaggccgaagcgcagaugagcauucaacucaucaauaaggccgugaacgcucugaucaaugaucagcuuauuaugaaaaaccaucugcgggacaucauggggauuccuuauugcaauuacuccaaguauuguuaccucaaccacacaaccacaggaaaaaccagccugcccaagugcugucuggucucuaauggcuccuaccucaacgaaacgcacuucagcgacgauaucgagcagcaagccgacaauaugauuacagagaugcugcagaaagaauauauggagcgccaggggaagaccccucuuggacugguugaucucuuuguguucucuaccagcuuuuaccugaucuccaucuuccugcaucuugugaaaauuccgacacacagacauaucgucggcaagucuugccccaagccucaccggcucaaccacaugggcauuuguagcugcgggcuguauaaacagcccggagugccuguucgcuggaagagaugaggacuaguaauaaggaaacuguaugaaugucugugggcaggaagugaagagauccuucuguaaagguuuuuggaauuaugucugcugaauaauaaacuuuuuugaaauaauaaaucugguagaaaaaugagaucuaaaaaaaaaaaaaaaaaaaaaaaaaaaaaaaaaaaaaaaaaaaaaaaaaaaaaaaaaaaaaaaaaaaaaaaaaaaaaaaaaaaaaaaaaaaaaaaaaaaa

SEQ ID NO: 41219 - RNA, 1788 nt, Artificial Sequence
  mRNA product Design b-4 (A100) comprising derived and/or modified sequence from LASV(Mad39;Clade IV)__ANH09722__GPCmut12 (opt5)
aggagagucccgcagucggcguccagcggcucugcuuguucgugugugugucguugcaggccuuauucaagcuuaccaugggccagaucgugaccuucuuucaagaggucccccacguuauugaagaggugaugaacaucgugcugauugcccucagcauccuggcuguccuuaaggggcuguacaauguggccacaugcggacucauuggccugguuacguuccuucugcucugugggagauccugcaccacaacccuguauaaaggaguguacgaacugcaggcgcucgagcugaacauggaaacacuuaauauguguaugccucugucuugcaccaagaacaauagccaucacuauauccgggucggcaacgagacagggcucgagcugacccuuacgaauaccucccugaucaaccauaaauuuuguaaucucucugacgcucacaagaaaaaccuguacgaucaugcccugaugagcauuaucuccacauuccaccucucuauuccgaauuuuaaccaguaugaagccaugagcugcgacuucaaugauggaaagaucuccgugcaguacaaccugagccacaccuaugcuggcgacacagccaaucauuguggcaccguugcuaacggggugcuucaaacguuuaugcgcauggccuggggaggcucuuacauugcgcuggauuccgggagaggaggcugggacugcaucaugacaagcuaccaguaucucauuauccagaacaccacaugggaggaucacugucaguucucucggcccuccccuaucggguaccugggacuucugagccaacgcaccagagacauuuauaucucucggcgccuccugggcaccuuuacauggacgcuguccgauagcgaaggcaaggacacccccgggggauacugccucacaagauggaugcugauugaggccgagcuuaaauguuucggcaauaccgcugucgccaagugcaacgaaaaacaugaugaggaauuuugcgacaugcugcgccucuucgauuuuuguaagcaggcuauccagcggcugaaagccgaggcgcagauguccauucaacuuaucaauaaggccgugaacgcucugaucaaugaccagcucauuaugaagaaccaccugagagacaucauggggauuccuuauugcaauuacucuaaauauuguuaccugaaccacacagugaccggaaagacgagccuccccaaaugcugucuggucuccaauggcagcuaccuuaacgaaacacauuucucugaugacaucgagcagcaagccgauaauaugauuaccgagaugcugcagaaggaauauauggagcggcaggggaaaaccccucucggacugguugaccuguucguguuuuccaccagcuucuaccuuaucucuaucuuucuccaccuggugaagauuccgacacaucgccacgucgugggcaaacccugcccuaagccccauagacugaaccacaugggcaucuguagcugcggguucuauaagcagccuggaguucccgugcgguggaaacgcugaggacuaguaauaaggaaacuguaugaaugucugugggcaggaagugaagagauccuucuguaaagguuuuuggaauuaugucugcugaauaauaaacuuuuuugaaauaauaaaucugguagaaaaaugagaucuaaaaaaaaaaaaaaaaaaaaaaaaaaaaaaaaaaaaaaaaaaaaaaaaaaaaaaaaaaaaaaaaaaaaaaaaaaaaaaaaaaaaaaaaaaaaaaaaaaaa

SEQ ID NO: 41220 - RNA, 1788 nt, Artificial Sequence
  mRNA product Design b-4 (A100) comprising derived and/or modified sequence from LASV(Z0947-SLE-2011;Clade IV)__AIT17840__GPCmut12 (opt5)
aggagagucccgcagucggcguccagcggcucugcuuguucgugugugugucguugcaggccuuauucaagcuuaccaugggccagaucgugaccuucuuucaagaggucccccacguuauugaagaggugaugaacaucgugcugauugcccucagcauccuggcuguccuuaaggggcuguacaauuucgccacaugcggacucgugggccugguuacguuucuucugcucugugggagauccugcaccauuucucuguauaaaggaguguacgaacugcagacacucgagcugaacauggaaacccuuaauauguguaugccucugagcugcacaaagaacaauucccaucacuauaucauggucggcaacgagaccgggcucgagcugacacuuaccaauacgucuaucauuaaccauaaauucuguaaucugagcgacgcgcacaagaaaaaccucuacgaucaugcucugauguccaucauuucuaccuuucaccugagcaucccgaauuucaaccaguaugaagccauguccugcgacuuuaauggaggcaagauuagcgugcaguacaaccucucucacuccuaugccggcgaugcugccaaucauugugggacaguugcuaacggagugcugcaaaccuucaugcggauggccuggggcgggagcuacaucgcgcuugacucuggacgcgauagaugggacugcauuaugacauccuaccaguaucugaucauccagaacaccacgugggaggaucacugucaguuuagccggcccucuccuauuggcuaccucgggcugcuuucccaacgcacaagagacaucuauauuagccggcgccugcucggaaccuucacauggacccuguccgauucugaaggcaaggacacccccggcggguacugccugacaagauggaugcucaucgaggccgagcugaaauguuuuggaaauacggcugucgccaagugcaacgaaaaacaugaugaggaguucugcgacaugcuucggcuguuugauuucuguaagcaggcuauucagcgccucaaagccgaagcgcagaugagcauccaacugaucaauaaggccgugaacgcucuuauuaaugaccagcugaucaugaagaaccaccucagagacauuaugggcaucccuuauugcaauuacuccaaauauuguuaccugaaccacaccacaaccgggaagacaagccugcccaaaugcugucucgugucuaauggauccuaccugaacgaaacccauuucagcgaugacauugagcagcaagccgauaauaugaucacggagaugcuucagaaggaauauauggagcggcagggcaaaacaccucuggggcucgucgaccuguuuguuuucucuaccagcuuuuaccugaucuccauuuuccuucaccucgugaagaucccgacccaucgccacauugugggaaaacccugcccuaagccccauagacugaaccacaugggcaucuguucuugcggccuguauaagcagccugggguccccgugaaauggaagcggugaggacuaguaauaaggaaacuguaugaaugucugugggcaggaagugaagagauccuucuguaaagguuuuuggaauuaugucugcugaauaauaaacuuuuuugaaauaauaaaucugguagaaaaaugagaucuaaaaaaaaaaaaaaaaaaaaaaaaaaaaaaaaaaaaaaaaaaaaaaaaaaaaaaaaaaaaaaaaaaaaaaaaaaaaaaaaaaaaaaaaaaaaaaaaaaaa

SEQ ID NO: 41221 - RNA, 1658 nt, Artificial Sequence
  mRNA product Design i-3 (hSL-A64-N5) comprising derived and/or modified sequence from LASV(Josiah;Clade IV)__NP_694870__GPCmut12 (opt1)
aggagaaagcuuaccaugggccagaucgugaccuucuuccaggaggucccccacgugaucgaggaggugaugaacaucguccugaucgcccucagcgugcuggccgugcugaaggggcucuacaacuucgcgaccugcggccuggucgggcuggugacguuccuccugcugugcggccgcuccugcaccaccagccucuacaaggggguguacgagcugcagacccuggagcucaacauggagacgcugaacaugugcaugccgcuguccugcaccaagaacaacagccaccacuacaucauggucggcaacgagaccggccucgagcugacgcugaccaacaccuccaucaucaaccacaaguucugcaaccucagcgacgcccacaagaagaaccuguacgaccacgcccugauguccaucaucagcaccuuccaccucuccauccccaacuucaaccaguacgaggccaugagcugcgacuucaacgggggcaagaucuccgugcaguacaaccugagccacuccuacgccggggacgcggccaaccacugcggcacgguggccaacgggguccugcagaccuucaugcggauggccuggggcggcagcuacaucgcgcucgacuccgggcgcggcaacugggacugcaucaugaccagcuaccaguaccugaucauccagaacaccacgugggaggaccacugccaguucucccggcccagccccaucggguaccugggccuccugucccagcgcacccgggacaucuacaucagccgccggcugcucggcaccuucaccuggacgcugagcgacuccgaggggaaggacaccccgggcggguacugccugacccgcuggaugcucaucgaggccgagcugaagugcuucggcaacaccgccguggccaagugcaacgagaagcacgacgaggaguucugcgacaugcugcggcuguucgacuucugcaagcaggccauccagcgccugaaggcggaggcccagaugagcauccagcugaucaacaaggccgugaacgcccucaucaacgaccagcugaucaugaagaaccaccuccgggacaucauggggauccccuacugcaacuacuccaaguacugcuaccucaaccacacgaccaccggccgcaccagccugcccaagugcugccuggucuccaacggcagcuaccucaacgagacgcacuucuccgacgacaucgagcagcaggccgacaacaugaucaccgagaugcugcagaaggaguacauggagcggcaggggaagacgccccugggccucguggaccuguucguguucagcaccuccuucuaccugaucagcaucuuccugcaccucgucaagaucccgacccaccgccacaucguggggaaguccugccccaagccccaccggcugaaccacaugggcaucugcagcugcgggcuguacaagcagcccggcgugccggucaaguggaagcgcugaggacuaguuauaagacugacuagcccgaugggccucccaacgggcccuccuccccuccuugcaccgagauuaaucaaaggcucuuuucagagccaccaaaaaaaaaaaaaaaaaaaaaaaaaaaaaaaaaaaaaaaaaaaaaaaaaaaaaaaaaaaaaaaaagaauu

SEQ ID NO: 41222 - RNA, 1655 nt, Artificial Sequence
  mRNA product Design i-3 (hSL-A64-N5) comprising derived and/or modified sequence from LASV(LP;Clade I)__AAF86701__GPCmut12 (opt1)
aggagaaagcuuaccaugggccagaucaucaccuucuuccaggaggugccccacgucaucgaggaggugaugaacaucgugcugaucgcccucagccugcuggccauccucaaggggcuguacaacaucgcgaccugcggcaucaucgggcuggucgccuuccucuuccugugcggcaaguccugcagccugacgcucaagggcggguacgagcugcagacccuggagcucaacauggagacccugaacaugugcaugccgcuguccugcacgaagaacagcucccaccacuacauccgcgugggcaacgagaccgggcucgagcugacccugaccaacacgagcaucaucaaccacaaguucugcaaccucuccgacgcccacaagaagaaccuguacgaccacgcccugaugagcaucaucuccaccuuccaccucagcauccccaacuucaaccaguacgaggccauguccugcgacuucaacggcgggaagaucagcgugcaguacaaccugucccacagcuacgcgggcgacgccgccgagcacugcgggaccgucgccaacggcgugcugcagaccuucaugcggauggcguggggcgggcgcuacaucgcccucgacuccggcaaggggaacugggacugcaucaugacgagcuaccaguaccugaucauccagaacaccaccugggaggaccacugccaguucucccggcccagccccaucggcuaccugggccuccugucccagcgcacccgggacaucuacaucagccgccggcugcucgggacguucaccuggacccugagcgacuccgagggcaacgagacccccgggggcuacugccugacgcgcuggaugcucaucgaggccgagcugaagugcuucgggaacaccgccguggccaagugcaacgagaagcacgacgaggaguucugcgacaugcugcggcuguucgacuucugcaagcaggcgauccgccggcugaaggccgaggcccagaugagcauccagcugaucaacaaggccgucaacgcccucaucaacgaccagcugaucaugaagaaccaccuccgcgacaucaugggcauccccuacugcaacuacuccaaguacugcuaccucaaccacaccagcuccggccggaccagccugcccaagugcugccugaucuccaacgggagcuaccucaacgagacgcaguucuccgacgacaucgagcagcaggcggacaacaugaucaccgagaugcugcagaaggaguacaucgagcgccagggcaagaccccgcuggggcucguggacaucuucaucuucagcaccuccuucuaccugaucagcaucuuccugcaccugaucaagaucccgacgcaccggcacaucgugggcaagcccugccccaagccccaccgccucaaccacaugggggucugcuccugcggccuguacaagcacccgggcgugcccaccaaguggaagcggugaggacuaguuauaagacugacuagcccgaugggccucccaacgggcccuccuccccuccuugcaccgagauuaaucaaaggcucuuuucagagccaccaaaaaaaaaaaaaaaaaaaaaaaaaaaaaaaaaaaaaaaaaaaaaaaaaaaaaaaaaaaaaaaaagaauu

SEQ ID NO: 41223 - RNA, 1655 nt, Artificial Sequence
  mRNA product Design i-3 (hSL-A64-N5) comprising derived and/or modified sequence from LASV(803213;Clade II)__AAF86703__GPCmut12 (opt1)
aggagaaagcuuaccaugggccagaucaucaccuucuuccaggaggugccccacgucaucgaggaggugaugaacaucgugcugaucgcccucagccugcuggccauccucaaggggaucuacaacgucgcgaccugcggccuguucgggcugaucuccuuccuccugcugugcggccgcagcugcuccgugacguacaaggggguguacgagcuccagacccuggagcugaacauggccaaccucaacaugugcaugccgcugagcugcaccaagaacaacucccaccacuacaucauggucggcaacgagacgggccuggagcucacccugaccaacaccagcaucaucaaccacaaguucugcaaccuguccgacgcccacaagaagaaccucuacgaccacgcccugaugagcaucaucuccacguuccaccugagcauccccaacuucaaccaguacgaggccauguccugcgacuucaacgggggcaagaucagcgugcaguacaaccucucccacagcuucgcgguggacgccgccaaccacugcgggaccaucgccaacggcguccugcagaccuucaugcggauggcguggggcggguccuacaucgcccuggacagcggcaaggggaacugggacugcaucaugaccuccuaccaguaccucaucauccagaacacgaccugggaggaccacugccaguucagccgccccucccccaucggcuaccuggggcugcucagccagcggacccgcgacaucuacaucagccggcgccugcugggcaccuucacguggacccucuccgacagcgagggcaacgaggcccccgggggcuacugccugacccgguggaugcugaucgaggccgagcucaagugcuucgggaacaccgccguggcgaagugcaacgagaagcacgacgaggaguucugcgacaugcugcgccuguucgacuucugcaagcaggccaucaagcggcucaagacggaggcccagauguccauccagcugaucaacaaggccgugaacgcccugaucaacgaccagcucaucaugaagaaccaccuccgcgacaucaugggcauccccuacugcaacuacagccgguacugcuaccugaaccacaccgucaccgggaagaccucccugccccgcugcugccuggugagcaacggcuccuaccugaacgagacgcacuucagcgacgacaucgagcagcaggcggacaacaugaucaccgagaugcuccagaaggaguacauggaccggcagggcaagaccccgcuggggcugguggaccucuucgucuucuccaccagcuucuaccugaucuccaucuuccugcaccuggugaagaucccgacgcaccgccacaucgugggcaagcccugccccaagccccaccggcucaaccacauggggaucugcagcugcggccuguacaagcacccggggguccccgugaaguggaagcgcugaggacuaguuauaagacugacuagcccgaugggccucccaacgggcccuccuccccuccuugcaccgagauuaaucaaaggcucuuuucagagccaccaaaaaaaaaaaaaaaaaaaaaaaaaaaaaaaaaaaaaaaaaaaaaaaaaaaaaaaaaaaaaaaaagaauu

SEQ ID NO: 41224 - RNA, 1655 nt, Artificial Sequence
  mRNA product Design i-3 (hSL-A64-N5) comprising derived and/or modified sequence from LASV(GA391;Clade III)__CAA36645__GPCmut12 (opt1)
aggagaaagcuuaccaugggccagaucgugaccuucuuccaggaggucccccacgugaucgaggaggugaugaacaucguccugaucgcccucagcauccuggccauccugaaggggcucuacaacguggcgaccugcggccugaucgggcuggugacguuccuccugcuguccggccgcagcugcucccucaucuacaaggggaccuacgagcugcagacccuggagcucaacauggagacccugaacaugugcaugccgcugagcugcaccaagaacaacucccaccacuacauccgggucggcaacgagaccggccucgagcugacccugacgaacaccagcauccucaaccacaaguucugcaaccuguccgacgcccacaagcgcaaccuguacgaccacagccucauguccaucaucagcaccuuccaccuguccauccccaacuucaaccaguacgaggccaugagcugcgacuucaacgggggcaagaucaccgugcaguacaaccugucccacagcuucgccguggacgccgcggggcacugcggcacgcucgccaacgggguccugcagaccuucaugcggauggccuggggcggcuccuacaucgcccuggacagcgggcgcggcaacugggacugcaucaugaccuccuaccaguaccucaucauccagaacaccacgugggacgaccacugccaguucagccggcccucccccaucggguaccugggccugcucagccagcgcacccgggacaucuacaucagccgccggcugcugggcaccuucaccuggacgcucuccgacagcgaggggaacgagaccccgggcggguacugccugacccgcuggaugcugaucgaggcggagcucaagugcuucggcaacaccgccguggccaagugcaacgagaagcacgacgaggaguucugcgacaugcugcggcuguucgacuucugcaagcaggccauccgccggcucaagacggaggcccagauguccauccagcugaucaacaaggcggugaacgcccugaucaacgaccagcucaucaugaagaaccaccuccgcgacaucauggggauccccuacugcaacuacagccgguacugcuaccugaaccacaccuccaccggcaagaccagccugccccgcugcugccugaucuccaacggcagcuaccugaacgagacgaaguucuccgacgacaucgagcagcaggccgacaacaugaucaccgagaugcuccagaaggaguacaucgaccggcaggggaagacgccccugggccuggucgaccuguucguguucagcaccuccuucuaccucaucagcaucuuccugcaccuggugaagaucccgacccaccgccacaucgucgggaagcccugccccaagccccaccggcucaaccacaugggcaucugcuccugcgggcuguacaagcagccgggcgugcccgugcgcuggaagcggugaggacuaguuauaagacugacuagcccgaugggccucccaacgggcccuccuccccuccuugcaccgagauuaaucaaaggcucuuuucagagccaccaaaaaaaaaaaaaaaaaaaaaaaaaaaaaaaaaaaaaaaaaaaaaaaaaaaaaaaaaaaaaaaaagaauu

SEQ ID NO: 41225 - RNA, 1658 nt, Artificial Sequence
  mRNA product Design i-3 (hSL-A64-N5) comprising derived and/or modified sequence from LASV(AV;Clade V)__CCA30314__GPCmut12 (opt1)
aggagaaagcuuaccaugggccagaucgugaccuucuuccaggaggucccccacgugaucgaggaggugaugaacaucguccugaucgcccucagcauccuggccgugcugaaggggcucuacaacaucgcgaccugcggccugaucgggcugaucacguuccuccugcugugcggccgcuccugcagcuccaaccucuacaaggggguguacgagcugcagagccuggaccucaacauggagacccugaacaugugcaugccgcuguccugcaccaagaacaacagccaccacuacauccgggucggcaacgacacgggccucgagcugacccugaccaacaccuccauccucaaccacaaguucugcaaccugagcgacgcccacaagaaggaccuguacgaccacgcccucauguccaucaucagcacguuccaccuguccauccccaacuucaaccaguacgaggccaugagcugcgacuucaacgggggcaagaucuccgugcaguacaaccugagccacuccuacgccaucgacgcggccaaccacugcgggaccguggccaacggcauccuccagaccuucaugcgcauggccuggggcgggagcuacaucgcgcuggacuccggccgggggaacugggacugcaucaugaccagcuaccaguaccugaucauccagaacacgaccugggagaaccacugccaguucucccgccccagccccaucggcuaccucgggcugcugagccagcggacccgcgacaucuacaucucccggcgccuccugggcaccuucacguggacccugagcgacuccgagggcaacgccacccccgggggcuacugccucacccgguggaugcugaucgaggccgagcugaagugcuucgggaacacggccgucgccaagugcaacgagaagcacgacgaggaguucugcgacaugcuccgccuguucgacuucugcaagcaggcgaucagccggcugaaguccgaggcccagaugagcauccagcucaucaacaaggccgugaacgcccugaucaacgaccagcugaucaugaagaaccaccuccgcgacaucaugggcauccccuacugcaacuacuccaaguacugcuaccugaaccacaccaucaccgggaagaccagccugcccaagugcugccucguguccaacggcagcuaccugaacgagacgcacuucuccgacgacaucgagcagcaggccgacaacaugaucaccgagaugcugcagaaggaguacauggagcggcagggcaagaccccgcucgggcuggucgaccuguucguguucagcaccuccuucuaccugaucagcaucuuccuccgccuggugaagaucccgacgcaccggcacaucgucggcaagcccugccccaagccccaccgccugaaccacauggggaucugcuccugcggccucuacaagcagccgggggugcccgugcgguggaagcgcugaggacuaguuauaagacugacuagcccgaugggccucccaacgggcccuccuccccuccuugcaccgagauuaaucaaaggcucuuuucagagccaccaaaaaaaaaaaaaaaaaaaaaaaaaaaaaaaaaaaaaaaaaaaaaaaaaaaaaaaaaaaaaaaaagaauu

SEQ ID NO: 41226 - RNA, 1655 nt, Artificial Sequence
  mRNA product Design i-3 (hSL-A64-N5) comprising derived and/or modified sequence from LASV(Togo/2016/7082;Clade VI)__AMR44577__GPCmut12 (opt1)
aggagaaagcuuaccaugggccagaucaucaccuucuuccaggaggugccccacgucaucgaggaggugaugaacaucgugcugaucgcccucagccugcuggccauccucaagggggucuacaacguggcgaccugcggcaucaucgggcuggugacguuccuguuccucugcggccgcuccugcagccugaucuacaagggguccuacgagcugcagacccucgagcugaacauggagacccugaacaugugcaugccgcucagcugcacgaagaacuccagccaccacuacauccgggucggcaacgagaccggccuggagcugacccucaccaacacguccaucaucaaccacaaguucugcaaccugagcgacgcccacaagcgcaaccuguacgaccacgcccucauguccauccugagcaccuuccaccuguccauccccaacuucaaccaguacgaggccaugagcugcgacuucaacgggggcaagaucuccgugcaguacaaccucagccacgccuacgcgguggacgccgccgagcacugcgggaccgucgccaacggcgugcugcagaccuucaugcggauggcguggggcggguccuacaucgcccuggacagcggccgcgggaacugggacugcaucaugacguccuaccaguaccucaucauccagaacaccaccugggaggaccacugccaguucagccggcccucccccaucggcuaccuggggcugcucagccagcgcacccgggacaucuacaucagccgccggcugcugggcacguucaccuggacccucuccgacagcgagggcaacgagacccccgggggcuacugccugacgcgcuggaugcugaucgaggccgagcucaagugcuucgggaacaccgccguggccaagugcaacgagaagcacgacgaggaguucugcgacaugcugcggcuguucgacuucugcaagcaggcgauccagcgccucaaguccgaggcccagaugagcauccagcugaucaacaaggccgucaacgcccugaucaacgaccagcucaucaugaagaaccaccuccgggacaugaugggcauccccuacugcaacuacuccaaguacugcuaccugaaccacaccagcuccgggcgcaccagccugcccaagugcugccugguguccaacggcagcuaccugaacgagacgcacuucuccgacgacaucgagcagcaggccgacaacaugaucaccgagaugcuccagaaggaguacaucgaccggcagggcaagaccccgcuggggcugguggaccucuucgucuucagcaccuccuucuaccugaucagcaucuuccugcaccugaucaagaucccgacgcaccgccacaucgugggcaagcccugccccaagccccaccggcucaaccacauggggaucugcuccugcggccuguacaagcagccgggggugcccacccgcuggaagcggugaggacuaguuauaagacugacuagcccgaugggccucccaacgggcccuccuccccuccuugcaccgagauuaaucaaaggcucuuuucagagccaccaaaaaaaaaaaaaaaaaaaaaaaaaaaaaaaaaaaaaaaaaaaaaaaaaaaaaaaaaaaaaaaaagaauu

SEQ ID NO: 41227 - RNA, 1655 nt, Artificial Sequence
  mRNA product Design i-3 (hSL-A64-N5) comprising derived and/or modified sequence from LASV(KAK-428;Clade n.d. (VII))__ANH09740__GPCmut12 (opt1)
aggagaaagcuuaccaugggccagaucgugaccuucuuccaggaggucccccacgugaucgaggaggugaugaacaucguccugaucgcccucagccugcuggccauccucaaggggcuguacaacuucgcgaccugcggcgugaucgggcugaucacguuccuccugcugugcggccgcuccugcagcgccaccuacaaggggcaguacgagcuccagacccuggagcugaacauggagucccucaacaugugcaugccgcugagcugcacgaagaacaacucccaccacuacauccgggccggcaacaacaccggccuggagcucacccugaccaacacgagcaucaucucccacaaguucugcaaccugagcgacgcccacaagaagaaccucuacgaccacacccugauguccaucaucaccaccuuccaccugagcauccccaacuucaaccaguacgaggccauguccugcgacuucaacgggggcaagaucagcauccaguacaaccucucccacagcuacgcgggggacgccgcccagcacugcggcacgguggccaacgggguccugcagaccuucaugcgcauggcguggggcggcuccuaccuggcccucgacagcgggcggcgcggcugggacugcaucaucuccagcuaccaguaccugaucauccagaacaccaccugggacgaccacugccaguucucccggcccagccccaucggguaccugggcuucgugagccagaagacgcgcgacaucuacaucucccggcgccuccugggcaccuucaccuggacccugagcgacuccgaggggcacgacaugccgggcggguacugccucacgcgguggaugcugaucgaggccgaccugaagugcuucggcaacaccgccguggccaagugcaacgagaagcacgacgaggaguucugcgacauguggcgccucuucgacuucugcaagcaggcgauccagcggcugaaggccgaggcccagaugaacauccagcugaucaacaaggccgucaacgcccucaucaacgaccagcugaugaugaagaaccaccuccgcgacaucauggggauccccuacugcaacuacagcaaguucugcuaccugaacaacaccaccacgggccggaccucccugccccgcugcugccugaucagcaacggcuccuaccucaacgagacccacuucagcgacgacaucgagcagcaggcggacaacaugaucaccgagaugcugcagaaggaguacauggaccggcaggggaagacgccccugggccucguggaccuguucguguucuccaccagcuucuaccugaucaccaucuuccuccaccuggucaagaucccgacccaccgccacaucguggggaagcccugccccaagccccaccggcugaaccacaugggcaucugcuccugcgggcuguacaagcagccgggcgugcccguccgcuggaagcggugaggacuaguuauaagacugacuagcccgaugggccucccaacgggcccuccuccccuccuugcaccgagauuaaucaaaggcucuuuucagagccaccaaaaaaaaaaaaaaaaaaaaaaaaaaaaaaaaaaaaaaaaaaaaaaaaaaaaaaaaaaaaaaaaagaauu

SEQ ID NO: 41228 - RNA, 1655 nt, Artificial Sequence; identical to SEQ ID NO: 41222
  mRNA product Design i-3 (hSL-A64-N5) comprising derived and/or modified sequence from LASV(Pinneo-NIG-1969;Clade I)__AIT17836__GPCmut12 (opt1)

SEQ ID NO: 41229 - RNA, 1655 nt, Artificial Sequence
  mRNA product Design i-3 (hSL-A64-N5) comprising derived and/or modified sequence from LASV(ISTH0009-NIG-2011;Clade II)__AIT17404__GPCmut12 (opt1)
aggagaaagcuuaccaugggccagaucaucaccuucuuccaggaggugccccacgucaucgaggaggugaugaacaucgugcugaucgcccucagccugcuggccauccucaaggggaucuacaacgucgcgaccugcggccuguucgggcugguguccuuccuccugcugugcggccgcagcugcuccacgaccuacaaggggguguacgagcuccagacccuggagcuggacauggccagccucaacaugugcaugccgcuguccugcacgaagaacaacagccaccacuacaucauggucggcaacgagaccggccuggagcucacccugaccaacacguccaucaucaaccacaaguucugcaaccugagcgacgcccacaagaagaaccucuacgaccacgcccugauguccaucaucagcaccuuccaccuguccauccccaacuucaaccaguacgaggccaugagcugcgacuucaacgggggcaagaucuccgugcaguacaaccucagccacgcguacgccguggacgccgccaaccacugcgggaccaucgcgaacggcguccugcagaccuucaugcggauggccuggggcggguccuacaucgcccuggacagcggcaagggguccugggacugcaucaugacgagcuaccaguaccucaucauccagaacaccaccugggaggaccacugccaguucucccgccccagccccaucggcuaccuggggcugcucagccagcggacccgcgacaucuacaucucccggcgccugcugggcacguucaccuggacccucagcgacuccgagggcaacgagacccccgggggcuacugccugacgcgguggaugcugaucgaggccgagcucaagugcuucgggaacaccgccguggcgaagugcaacgagaagcacgacgaggaguucugcgacaugcugcgccuguucgacuucugcaagcaggccauccggcgccucaagaccgaggcccagaugagcauccagcugaucaacaaggccgugaacgcccugaucaacgaccagcucaucaugaagaaccaccuccgggacaucaugggcaucccguacugcaacuacuccaaguacugcuaccugaaccacaccgucacggggaagaccagccugccccgcugcugccugguguccaacggcagcuaccugaacgagacccacuucuccgacgacaucgagcagcaggcggacaacaugaucaccgagcuccugcagaaggaguacauggaccggcagggcaagacgccccuggggcucguggaccuguucgucuucagcaccuccuucuaccugaucagcaucuuccugcaccucaucaagaucccgacccaccgccacaucaccggcaagcccugccccaagccccaccggcugaaccacauggggaucugcuccugcggccuguacaagcacccgggggugcccgugaaguggaagcgcugaggacuaguuauaagacugacuagcccgaugggccucccaacgggcccuccuccccuccuugcaccgagauuaaucaaaggcucuuuucagagccaccaaaaaaaaaaaaaaaaaaaaaaaaaaaaaaaaaaaaaaaaaaaaaaaaaaaaaaaaaaaaaaaaagaauu

SEQ ID NO: 41230 - RNA, 1655 nt, Artificial Sequence
  mRNA product Design i-3 (hSL-A64-N5) comprising derived and/or modified sequence from LASV(ISTH2010-NIG-2012;Clade II)__AIT17482__GPCmut12 (opt1)
aggagaaagcuuaccaugggccagaucaucaccuucuuccaggaggugccccacgucaucgaggaggugaugaacaucgugcugaucgcccucagccugcuggccauccucaaggggaucuacaacgucgcgaccugcggccuguucgggcugguguccuuccuccugcugugcggccgcagcugcuccacgaccuacaaggggguguacgagcuccagacccuggagcuggacauggccagccucaacaugugcaugccgcuguccugcacgaagaacaacagccaccacuacaucauggucggcaacgagaccggccuggagcucacccugaccaacacguccaucaucaaccacaaguucugcaaccugagcgacgcccacaagaagaaccucuacgaccacgcccugauguccaucaucagcaccuuccaccuguccauccccaacuucaaccaguacgaggccaugagcugcgacuucaacgggggcaagaucuccgugcaguacaaccucagccacgcguacgccguggacgccgccaaccacugcgggaccaucgcgaacggcguccugcagaccuucaugcggauggccuggggcggguccuacaucgcccuggacagcggcaagggguccugggacugcaucaugacgagcuaccaguaccucaucauccagaacaucaccugggaggaccacugccaguucucccgccccagccccaucggcuaccuggggcugcucagccagcggacccgcgacaucuacaucucccggcgccugcugggcaccuucacguggacccucagcgacuccgagggcaacgagacccccgggggcuacugccugacccgguggaugcugaucgaggccgagcucaagugcuucgggaacacggccguggcgaagugcaacgagaagcacgacgaggaguucugcgacaugcugcgccuguucgacuucugcaagcaggccauccggcgccucaagaccgaggcccagaugagcauccagcugaucaacaaggccgugaacgcccugaucaacgaccagcucaucaugaagaaccaccuccgggacaucaugggcauccccuacugcaacuacuccaaguacugcuaccugaaccacaccgucaccgggaagacgagccugccccgcugcugccugguguccaacggcagcuaccugaacgagacccacuucuccgacgacaucgagcagcaggcggacaacaugaucaccgagcuccugcagaaggaguacaucgaccggcagggcaagaccccgcuggggcucguggaccuguucgucuucagcacguccuucuaccugaucagcaucuuccugcaccucgugaagaucccgacccaccgccacguggucggcaagcccugccccaagccccaccggcugaaccacauggggaucugcuccugcggccuguacaagcacccgggggugcccgugaaguggaagcgcugaggacuaguuauaagacugacuagcccgaugggccucccaacgggcccuccuccccuccuugcaccgagauuaaucaaaggcucuuuucagagccaccaaaaaaaaaaaaaaaaaaaaaaaaaaaaaaaaaaaaaaaaaaaaaaaaaaaaaaaaaaaaaaaaagaauu

SEQ ID NO: 41231 - RNA, 1655 nt, Artificial Sequence
  mRNA product Design i-3 (hSL-A64-N5) comprising derived and/or modified sequence from LASV(Lassa virus/H.sapiens-wt/NGA/2015/ISTH_0543;Clade II)__AVO03639__GPCmut12 (opt1)
aggagaaagcuuaccaugggccagaucaucaccuucuuccaggaggugccccacgucaucgaggaggugaugaacaucgugcugaucgcccucagccugcuggccauccucaaggggaucuacaacgucgcgaccugcggccuguucgggcugguguccuuccuccugcugugcggccgcagcugcuccacgaccuacaaggggguguacgagcuccagacccuggagcuggacauggccaaccucaacaugugcaugccgcugagcugcacgaagaacaacucccaccacuacaucauggucggcaacgagaccggccuggagcucacccugaccaacacgagcaucaucaaccacaaguucugcaaccuguccgacgcccacaagaagaaccucuacgaccacgcccugaugagcaucaucuccaccuuccaccugagcauccccaacuucaaccaguacgaggccauguccugcgacuucaacgggggcaagaucagcgugcaguacaaccucucccacaccuacgcgguggacgccgccaaccacugcgggaccaucgccaacggcguccugcagacguucaugcggauggcguggggcgggagcuacaucgcccuggacuccggcaaggggagcugggacugcaucaugaccuccuaccaguaccucgugauccagaacaccaccugggaggaccacugccaguucagccgccccucccccaucggcuaccuggggcugcucagccagcggacgcgcgacaucuacaucagccggcgccugcugggcaccuucaccuggacccucuccgacagcgagggcaacgagacgcccgggggcuacugccugacccgguggaugcugaucgaggccgagcucaagugcuucgggaacaccgccguggccaagugcaacgagaagcacgacgaggaguucugcgacaugcugcgccuguucgacuucugcaagcaggcgauccggcgccucaagaccgaggcccagauguccauccagcugaucaacaaggccgucaacgcccugaucaacgaccagcucaucaugaagaaccaccuccgggacaucaugggcauccccuacugcaacuacagcaaguacugcuaccugaaccacacggugaccgggaagaccucccugccccgcugcugccuggugagcaacggcuccuaccugaacgagacccacuucagcgacgacaucgagcagcaggccgacaacaugaucacggagcuccugcagaaggaguacaucgaccggcagggcaagaccccgcuggggcucgucgaccuguucguguucuccaccagcuucuaccugaucuccaucuuccugcaccucgugaagaucccgacccaccgccacaucacgggcaagcccugccccaagccccaccggcugaaccacauggggaucugcagcugcggccuguacaagcacccggggguccccgugaaguggaagcgcugaggacuaguuauaagacugacuagcccgaugggccucccaacgggcccuccuccccuccuugcaccgagauuaaucaaaggcucuuuucagagccaccaaaaaaaaaaaaaaaaaaaaaaaaaaaaaaaaaaaaaaaaaaaaaaaaaaaaaaaaaaaaaaaaagaauu

SEQ ID NO: 41232 - RNA, 1655 nt, Artificial Sequence
  mRNA product Design i-3 (hSL-A64-N5) comprising derived and/or modified sequence from LASV(Lassa virus/H.sapiens-wt/NGA/2016/ISTH_0009;Clade II)__AVO03571__GPCmut12 (opt1)
aggagaaagcuuaccaugggccagaucaucaccuucuuccaggaggugccccacgucaucgaggaggugaugaacaucgugcugaucgcccucagccugcuggccauccucaaggggaucuacaacgucgcgaccugcggccugcuggggcucguguccuuccugcugcucugcggccgcagcugcuccacgaccuacaaggggguguacgagcugcagacccuggagcucgacauggccagccugaacaugugcaugccgcuguccugcacgaagaacaacagccaccacuacaucauggucggcaacgagaccggccucgagcugacccugaccaacacguccaucaucaaccacaaguucugcaaccucagcgacgcccacaagaagaaccuguacgaccacgcccugauguccaucaucagcaccuuccaccucuccauccccaacuucaaccaguacgaggccaugagcugcgacuucaacgggggccggaucuccgugcaguacaaccugagccacuccuacgcgguggacgccgccaaccacugcgggaccaucgccaacggcguccugcagaccuucaugcgcauggcguggggcgggagcuacaucgcccucgacuccggcaaggggagcugggacugcaucaugacguccuaccaguaccugaucauccagaacaccaccugggaggaccacugccaguucagccggcccagccccaucggcuaccuggggcuccugucccagcgcacccgggacaucuacaucagccgccggcugcucggcacguucaccuggacccuguccgacagcgagggcaacgagacccccgggggcuacugccugacgcgcuggaugcucaucgaggccgagcugaagugcuucgggaacaccgccguggccaagugcaacgagaagcacgacgaggaguucugcgacaugcugcggcuguucgacuucugcaagcaggcgauccgccggcugaagaccgaggcccagauguccauccagcugaucaacaaggccgugaacgcccucaucaacgaccagcugaucaugaagaaccaccuccgcgacaucaugggcaucccguacugcaacuacagcaaguacugcuaccucaaccacaccgucacggggaagaccucccugccccggugcugccuggugagcaacggcuccuaccucaacgagacccacuucagcgacgacaucgagcagcaggccgacaacaugaucaccgagcugcugcagaaggaguacaucgaccgccagggcaagacgccccucgggcugguggaccuguucgucuucuccaccagcuucuaccugaucuccaucuuccuccaccuggugaagaucccgacccaccggcacaucaccggcaagcccugccccaagccccaccgccugaaccacauggggaucugcagcugcggccucuacaaccacccgggggugcccgucaaguggaagcggugaggacuaguuauaagacugacuagcccgaugggccucccaacgggcccuccuccccuccuugcaccgagauuaaucaaaggcucuuuucagagccaccaaaaaaaaaaaaaaaaaaaaaaaaaaaaaaaaaaaaaaaaaaaaaaaaaaaaaaaaaaaaaaaaagaauu

SEQ ID NO: 41233 - RNA, 1655 nt, Artificial Sequence
  mRNA product Design i-3 (hSL-A64-N5) comprising derived and/or modified sequence from LASV(Lassa virus/H.sapiens-wt/NGA/2016/ISTH_0017;Clade II)__AVO03567__GPCmut12 (opt1)
aggagaaagcuuaccaugggccagaucaucaccuucuuccaggaggugccccacgucaucgaggaggugaugaacaucgugcugaucgcccucagccugcuggccauccucaaggggaucuacaacgucgcgaccugcggccuguucgggcugguguccuuccuccugcugugcggccgcagcugcuccacgaccuacaaggggguguacgagcuccagacccuggagcuggacauggccagccucaacaugugcaugccgcuguccugcacgaagaacaacagccaccacuacaucauggucggcaacgagaccggccuggagcucacccugaccaacacguccaucaucaaccacaaguucugcaaccugagcgacgcccacaagaagaaccucuacgaccacgcccugauguccaucaucagcaccuuccaccuguccauccccaacuucaaccaguacgaggccaugagcugcgacuucaacgggggcaagaucuccgugcaguacaaccucagccacaccuacgcgaucgacgccgccaaccacugcgggaccaucgccaacggcgugcugcagacguucaugcggauggcguggggcggguccuacaucgcccuggacagcggcaagggguccugggacugcaucaugaccagcuaccaguaccucaucauccagaacaccaccugggaggaccacugccaguucucccgccccagccccaucggcuaccuggggcugcucagccagcggacgcgcgacaucuacaucucccggcgccugcugggcaccuucaccuggacccucagcgacuccgagggcaacgagacgcccgggggcuacugccugacccgguggaugcugaucgaggccgagcucaagugcuucgggaacaccgccgucgccaagugcaacgagaagcacgacgaggaguucugcgacaugcugcgccuguucgacuucugcaagcaggcgauccggcgccucaagaccgaggcccagaugagcauccagcugaucaacaaggccgugaacgcccugaucaacgaccagcucaucaugaagaaccaccuccgggacaucaugggcauccccuacugcaacuacuccaaguacugcuaccugaaccacacggugaccgggaagaccagccugccccgcugcugccuggucuccaacggcagcuaccugaacgagacccacuucuccgacgacaucgagcagcaggccgacaacaugaucacggagcuccugcagaaggaguacauggaccggcagggcaagaccccgcuggggcucguggaccuguucguguucagcaccuccuucuaccugaucagcaucuuccugcaccucguccgcaucccgacccaccggcacgugaucggcaagcccugccccaagccccaccgccugaaccacauggggaucugcuccugcggccuguacaagcacccgggggugcccgucaaguggaagcggugaggacuaguuauaagacugacuagcccgaugggccucccaacgggcccuccuccccuccuugcaccgagauuaaucaaaggcucuuuucagagccaccaaaaaaaaaaaaaaaaaaaaaaaaaaaaaaaaaaaaaaaaaaaaaaaaaaaaaaaaaaaaaaaaagaauu

SEQ ID NO: 41234 - RNA, 1655 nt, Artificial Sequence
  mRNA product Design i-3 (hSL-A64-N5) comprising derived and/or modified sequence from LASV(Lassa virus/H.sapiens-wt/NGA/2018/ISTH_0959;Clade II)__AVV65099__GPCmut12 (opt1)
aggagaaagcuuaccaugggccagaucaucaccuucuuccaggaggugccccacgucaucgaggaggugaugaacaucgugcugaucgcccucagccugcuggccauccucaaggggaucuacaacgucgugaccugcggccuguucgggcugguguccuuccuccugcugugcggccgcagcugcuccacgaccuacaagggggucuacgagcuccagacccuggagcuggacauggcgagccucaacaugugcaugccgcuguccugcacgaagaacaacagccaccacuacaucauggugggcaacgagaccggccuggagcucacccugaccaacacguccaucaucaaccacaaguucugcaaccugagcgacgcccacaagaagaaccucuacgaccacgcccugauguccaucaucagcaccuuccaccuguccauccccaacuucaaccaguacgaggccaugagcugcgacuucaacgggggcaagaucuccgugcaguacaaccucagccacgccuacgcgaucgacgccgccaaccacugcgggaccaucgccaacggcguccugcagaccuucaugcggauggcguggggcggguccuacaucgcccuggacagcggcaagggguccugggacugcaucaugacgagcuaccaguaccucaucauccagaacaccaccugggaggaccacugccaguucucccgccccagccccaucggcuaccuggggcugcucagccagcggacccgcgacaucuacaucucccggcgccugcugggcacguucaccuggacccucagcgacuccgagggcaacgagacccccgggggcuacugccugacgcgguggaugcugaucgaggccgagcucaagugcuucgggaacaccgccguggccaagugcaacgagaagcacgacgaggaguucugcgacaugcugcgccuguucgacuucugcaagcaggcgauccggcgccucaagaccgaggcccagaugagcauccagcugaucaacaaggccgugaacgcccugaucaacgaccagcucaucaugaagaaccaccuccgggacaucaugggcaucccguacugcaacuacuccaaguacugcuaccugaaccacaccgucacggggaagaccagccugccccgcugcugccugguguccaacggcagcuaccugaacgagacccacuucuccgacgacaucgagcagcaggccgacaacaugaucaccgagcuccugcagaaggaguacaucgaccggcagggcaagacgccccuggggcucguggaccuguucgucuucagcaccuccuucuaccugaucagcaucuuccugcaccucgugaagaucccgacccaccgccacgugaucggcaagcccugccccaagccccaccggcugaaccacauggggaucugcuccugcggccuguacaagcacccggggguccccgugaaguggaagcgcugaggacuaguuauaagacugacuagcccgaugggccucccaacgggcccuccuccccuccuugcaccgagauuaaucaaaggcucuuuucagagccaccaaaaaaaaaaaaaaaaaaaaaaaaaaaaaaaaaaaaaaaaaaaaaaaaaaaaaaaaaaaaaaaaagaauu

SEQ ID NO: 41235 - RNA, 1655 nt, Artificial Sequence
  mRNA product Design i-3 (hSL-A64-N5) comprising derived and/or modified sequence from LASV(LASV003-NIG-2008;Clade II)__AIT17580__GPCmut12 (opt1)
aggagaaagcuuaccaugggccagaucaucaccuucuuccaggaggugccccacgucaucgaggaggugaugaacaucgugcugaucgcccucagccugcuggccauccucaaggggaucuacaacgucgcgaccugcggccuguucgggcugguguccuuccuccugcugugcggccgcagcugcuccacgaccuacaaggggguguacgagcuccagacccuggagcuggacauggccagccucaacaugugcaugccgcuguccugcacgaagaacaacagccaccacuacaucauggucggcaacgagaccggccuggagcucacccugaccaacacguccaucaucaaccacaaguucugcaaccugagcgacgcccacaagaagaaccucuacgaccacgcccugauguccaucaucagcaccuuccaccuguccauccccaacuucaaccaguacgaggccaugagcugcgacuucaacgggggcaagaucuccgugcaguacaaccucagccacaccuacgcgguggacgccgccaaccacugcgggaccaucgccaacggcguccugcagacguucaugcggauggcguggggcggguccuacaucgcccuggacagcggcaagggguccugggacugcaucaugaccagcuaccaguaccucaucauccagaacaccaccugggaggaccacugccaguucucccgccccagccccaucggcuaccuggggcugcucagccagcggacgcgcgacaucuacaucucccggcgccugcugggcaccuucaccuggacccucagcgacuccgagagcaacgagacgccgggcggguacugccugacccgguggaugcugaucgaggccgagcucaagugcuucggcaacaccgccguggccaagugcaacgagaagcacgacgaggaguucugcgacaugcugcgccuguucgacuucugcaagcaggcgauccggcgccucaaggccgaggcccagauguccauccagcugaucaacaaggccgugaacgcccugaucaacgaccagcucaucaugaagaaccaccuccgggacaucauggggauccccuacugcaacuacagcaaguacugcuaccugaaccacaccgucacgggccgcaccucccugccccggugcugccuggugagcaacggguccuaccugaacgagacccacuucagcgacgacaucgagcagcaggcggacaacaugaucaccgagcuccugcagaaggaguacauggaccgccagggcaagacgccccugggccucguggaccuguucgucuucuccaccagcuucuaccugaucuccaucuuccugcaccucgugaagaucccgacccaccggcacgugaucgggaagcccugccccaagccccaccgccugaaccacaugggcaucugcagcugcgggcuguacaagcacccgggcguccccgugaaguggaagcggugaggacuaguuauaagacugacuagcccgaugggccucccaacgggcccuccuccccuccuugcaccgagauuaaucaaaggcucuuuucagagccaccaaaaaaaaaaaaaaaaaaaaaaaaaaaaaaaaaaaaaaaaaaaaaaaaaaaaaaaaaaaaaaaaagaauu

SEQ ID NO: 41236 - RNA, 1655 nt, Artificial Sequence
  mRNA product Design i-3 (hSL-A64-N5) comprising derived and/or modified sequence from LASV(LASV035-NIG-2009;Clade II)__AIT17588__GPCmut12 (opt1)
aggagaaagcuuaccaugggccagaucaucaccuucuuccaggaggugccccacgucaucgaggaggugaugaacaucgugcugaucgcccucagccugcuggccauccucaaggggaucuacaacgucgcgaccugcggccuguucgggcugguguccuuccuccugcugugcggccgcagcugcuccacgaccuacaaggggguguacgagcuccagacccuggagcuggacauggccagccucaacaugugcaugccgcuguccugcacgaagaacaacagccaccacuacaucauggucggcaacgagaccggccuggagcucacccugaccaacacguccaucaucaaccacaaguucugcaaccugagcgacgcccacaagaagaaccucuacgaccacgcccugauguccaucaucagcaccuuccaccuguccauccccaacuucaaccaguacgaggccaugagcugcgacuucaacgggggcaagaucuccgugcaguacaaccucagccacgcguacgccguggacgccgccaaccacugcgggaccaucgcgaacggcguccugcagaccuucaugcggauggccuggggcggguccuacaucgcccuggacagcggcaagggguccugggacugcaucaugacgagcuaccaguaccucaucauccagaacaccaccugggaggaccacugccaguucucccgccccagccccaucggcuaccuggggcugcucagccagcggacccgcgacaucuacaucucccggcgccugcugggcacguucaccuggacccucagcgacuccgagggcaacgagacccccgggggcuacugccugacgcgguggaugcugaucgaggccgagcucaagugcuucgggaacaccgccguggcgaagugcaacgagaagcacgacgaggaguucugcgacaugcugcgccuguucgacuucugcaagcaggccauccggcgccucaaggccgaggcccagaugagcauccagcugaucaacaaggccgugaacgcgcugaucaacgaccagcucaucaugaagaaccaccuccgggacaucaugggcauccccuacugcaacuacuccaaguacugcuaccugaaccacaccgucaccgggaagacgagccugccccgcugcugccugguguccaacggcagcuaccugaacgagacccacuucuccgacgacaucgagcagcaggccgacaacaugaucaccgagcuccugcagaaggaguacaucgaccggcagggcaagaccccgcuggggcucguggaccuguucgucuucagcacguccuucuaccugaucagcaucuuccugcaccucgugaagaucccgacccaccgccacgugaucggcaagcccugccccaagccccaccggcugaaccacauggggaucugcuccugcggccuguacaagcacccggggguccccgugaaguggaagcgcugaggacuaguuauaagacugacuagcccgaugggccucccaacgggcccuccuccccuccuugcaccgagauuaaucaaaggcucuuuucagagccaccaaaaaaaaaaaaaaaaaaaaaaaaaaaaaaaaaaaaaaaaaaaaaaaaaaaaaaaaaaaaaaaaagaauu

SEQ ID NO: 41237 - RNA, 1655 nt, Artificial Sequence
  mRNA product Design i-3 (hSL-A64-N5) comprising derived and/or modified sequence from LASV(LASV1000-NIG-2009;Clade II)__AIT17782__GPCmut12 (opt1)
aggagaaagcuuaccaugggccagaucaucaccuucuuccaggaggugccccacgucaucgaggaggugaugaacaucgugcugaucgcccucagccugcuggccauccucaaggggaucuacaacgucgcgaccugcggccuguucgggcugguguccuuccuccugcugugcggccgcagcugcuccacgaccuacaaggggguguacgagcuccagacccuggagcuggacauggccagccucaacaugugcaugccgcuguccugcacgaagaacaacagccaccacuacaucauggucggcaacgagaccggccuggagcucacccugaccaacacguccaucaucaaccacaaguucugcaaccugagcgacgcccacaagaagaaccucuacgaccacgcccugauguccaucaucagcaccuuccaccuguccauccccaacuucaaccaguacgaggccaugagcugcgacuucaacgggggcaagaucuccgugcaguacaaccucagccacaccuacgcgguggacgccgccaaccacugcgggaccaucgccaacggcguccugcagacguucaugcggauggcguggggcggguccuacaucgcccuggacagcggcaagggguccugggacugcaucaugaccagcuaccaguaccucaucauccagaacaccaccugggaggaccacugccaguucucccgccccagccccaucggcuaccuggggcugcucagccagcggacgcgcgacaucuacaucucccggcgccugcugggcaccuucaccuggacccucagcgacuccgagggcaacgagacgcccgggggcuacugccugacccgguggaugcugaucgaggccgagcucaagugcuucgggaacaccgccguggccaagugcaacgagaagcacgacgaggaguucugcgacaugcugcgccuguucgacuucugcaagcaggcgaucaagcggcucaagaccgaggcccagaugagcauccagcugaucaacaaggccgugaacgcccugaucaacgaccagcucaucaugaagaaccaccuccgcgacaucaugggcauccccuacugcaacuacuccaaguacugcuaccugaaccacacggucaccgggaagaccagccugccccggugcugccugguguccaacggcagcuaccugaacgagacccacuucuccgacgacaucgagcagcaggccgacaacaugaucacggagcuccugcagaaggaguacaucgaccgccagggcaagaccccgcuggggcucguggaccuguucgucuucagcaccuccuucuaccugaucagcaucuuccugcaccucgugaagaucccgacccaccggcacguggucggcaagcccugccccaagccccaccgccugaaccacauggggaucugcuccugcggccuguacaagcacccgggggugcccgugaaguggaagcggugaggacuaguuauaagacugacuagcccgaugggccucccaacgggcccuccuccccuccuugcaccgagauuaaucaaaggcucuuuucagagccaccaaaaaaaaaaaaaaaaaaaaaaaaaaaaaaaaaaaaaaaaaaaaaaaaaaaaaaaaaaaaaaaaagaauu

SEQ ID NO: 41238 - RNA, 1655 nt, Artificial Sequence
  mRNA product Design i-3 (hSL-A64-N5) comprising derived and/or modified sequence from LASV(LASV221-NIG-2010;Clade II)__AIT17624__GPCmut12 (opt1)
aggagaaagcuuaccaugggccagaucaucaccuucuuccaggaggugccccacgucaucgaggaggugaugaacaucgugcugaucgcccucagccugcuggccauccucaaggggaucuacaacgucgcgaccugcggccuguucgggcugguguccuuccuccugcugugcggccgcagcugcuccacgaccuacaaggggguguacgagcuccagacccuggagcuggacauggccagccucaacaugugcaugccgcuguccugcacgaagaacaacagccaccacuacaucauggucggcaacgagaccggccuggagcucacccugaccaacacguccaucaucaaccacaaguucugcaaccugagcgacgcccacaagaagaaccucuacgaccacgcccugauguccaucaucagcaccuuccaccuguccauccccaacuucaaccaguacgaggccaugagcugcgacuucaacgggggcaagaucuccgugcaguacaaccucagccacaccuacgcgaucgacgccgccaaccacugcgggaccaucgccaacggcgugcugcagacguucaugcggauggcguggggcggguccuacaucgcccuggacagcggcaagggguccugggacugcaucaugaccagcuaccaguaccucaucauccagaacaccaccugggaggaccacugccaguucucccgccccagccccaucggcuaccuggggcugcucagccagcggacgcgcgacaucuacaucucccggcgccugcugggcaccuucaccuggacccucagcgacuccgagggcaacgagacgcccgggggcuacugccugacccgguggaugcugaucgaggccgagcucaagugcuucgggaacaccgccgucgccaagugcaacgagaagcacgacgaggaguucugcgacaugcugcgccuguucgacuucugcaagcaggcgauccggcgccucaagaccgaggcccagaugagcauccagcugaucaacaaggccgugaacgcccugaucaacgaccagcucaucaugaagaaccaccuccgggacaucaugggcauccccuacugcaacuacuccaaguacugcuaccugaaccacacggugaccgggaagaccagccugccccgcugcugccuggucuccaacggcagcuaccugaacgagacccacuucuccgacgacaucgagcagcaggccgacaacaugaucacggagaugcuccagaaggaguacauggaccggcagggcaagaccccgcuggggcugguggaccucuucguguucagcaccuccuucuaccugaucagcaucuuccugcaccuggucaagaucccgacccaccgccacgugaucggcaagcccugccccaagccccaccggcucaaccacauggggaucugcuccugcggccuguacaagcacccgggggugcccgucaaguggaagcgcugaggacuaguuauaagacugacuagcccgaugggccucccaacgggcccuccuccccuccuugcaccgagauuaaucaaaggcucuuuucagagccaccaaaaaaaaaaaaaaaaaaaaaaaaaaaaaaaaaaaaaaaaaaaaaaaaaaaaaaaaaaaaaaaaagaauu

SEQ ID NO: 41239 - RNA, 1655 nt, Artificial Sequence
  mRNA product Design i-3 (hSL-A64-N5) comprising derived and/or modified sequence from LASV(LASV237-NIG-2010;Clade II)__AIT17638__GPCmut12 (opt1)
aggagaaagcuuaccaugggccagaucaucaccuucuuccaggaggugccccacgucaucgaggaggugaugaacaucgugcugaucgcccucagccugcuggccauccucaaggggaucuacaacgucgcgaccugcggccuguucgggcugguguccuuccuccugcugugcggccgcagcugcuccacgaccuacaaggggguguacgagcuccagacccuggagcuggacauggccagccucaacaugugcaugccgcuguccugcacgaagaacaacagccaccacuacaucauggucggcaacgagaccggccuggagcucacccugaccaacacguccaucaucaaccacaaguucugcaaccugagcgacgcccacaagaaggaccucuacgaccacgcccugauguccaucaucagcaccuuccaccuguccauccccaacuucaaccaguacgaggccaugagcugcgacuucaacgggggcaagaucuccgugcaguacaaccucagccacaccuacgcgguggacgccgccaaccacugcgggaccaucgccaacggcguccugcagacguucaugcggauggcguggggcggguccuacaucgcccuggacagcggcaagggguccugggacugcaucaugaccagcuaccaguaccucaucauccagaacaccaccugggaggaccacugccaguucucccgccccagccccaucggcuaccuggggcugcucagccagcggacgcgcgacaucuacaucucccggcgccugcugggcaccuucaccuggacccucagcgacuccgagggcaacgagacgcccgggggcuacugccugacccgguggaugcugaucgaggccgagcucaagugcuucgggaacaccgccguggccaagugcaacgagaagcacgacgaggaguucugcgacaugcugcgccuguucgacuucugcaagcaggcgauccggcgccucaagaccgaggcccagaugagcauccagcugaucaacaaggccgugaacgcccugaucaacgaccagcucaucaugaagaaccaccuccgggacaucaugggcauccccuacugcaacuacuccaaguacugcuaccugaaccacacggucaccgggaagaccagccugccccgcugcugccugguguccaacggcagcuaccugaacgagacccacuucuccgacgacaucgagcagcaggccgacaacaugaucacggagcuccugcagaaggaguacauggaccggcagggcaagaccccgcuggggcucguggaccuguucgucuucagcaccuccuucuaccugaucagcaucuuccugcaccucaucaagaucccgacccaccgccacaucacgggcaagcccugccccaagccccaccggcugaaccacauggggaucugcuccugcggccuguacaagcacccgggggugcccgugaaguggaagcgcugaggacuaguuauaagacugacuagcccgaugggccucccaacgggcccuccuccccuccuugcaccgagauuaaucaaaggcucuuuucagagccaccaaaaaaaaaaaaaaaaaaaaaaaaaaaaaaaaaaaaaaaaaaaaaaaaaaaaaaaaaaaaaaaaagaauu

SEQ ID NO: 41240 - RNA, 1655 nt, Artificial Sequence
  mRNA product Design i-3 (hSL-A64-N5) comprising derived and/or modified sequence from LASV(LASV253-NIG-2011;Clade II)__AIT17670__GPCmut12 (opt1)
aggagaaagcuuaccaugggccagaucaucaccuucuuccaggaggugccccacgucaucgaggaggugaugaacaucgugcugaucgcccucagccugcuggccauccucaaggggaucuacaacgucgcgaccugcggccuguucgggcugguguccuuccuccugcugugcggccgcagcugcuccacgaccuacaaggggguguacgagcuccagacccuggagcuggacauggccagccucaacaugugcaugccgcuguccugcacgaagaacaacagccaccacuacaucauggucggcaacgagaccggccuggagcucacccugaccaacacguccaucaucaaccacaaguucugcaaccugagcgacgcccacaagaagaaccucuacgaccacgcccugauguccaucaucagcaccuuccaccuguccauccccaacuucaaccaguacgaggccaugagcugcgacuucaacgggggcaagaucuccgugcaguacaaccucagccacaccuacgcgguggacgccgccaaccacugcgggaccaucgccaacggcguccugcagacguucaugcggauggcguggggcggguccuacaucgcccuggacagcggcaagggguccugggacugcaucaugaccagcuaccaguaccucaucauccagaacaccaccugggaggaccacugccaguucucccgccccagccccaucggcuaccuggggcugcucagccagcggacgcgcgacaucuacaucucccggcgccugcugggcaccuucaccuggacccucagcgacuccgagggcaacgagacgcccgggggcuacugccugacccgguggaugcugaucgaggccgagcucaagugcuucgggaacaccgccguggccaagugcaacgagaagcacgacgaggaguucugcgacaugcugcgccuguucgacuucugcaagcaggcgauccggcgccucaaggccgaggcccagaugagcauccagcugaucaacaaggccgugaacgcccugaucaacgaccagcucaucaugaagaaccaccuccgggacaucaugggcaucccguacugcaacuacuccaaguacugcuaccugaaccacaccgucacggggcgcaccagccugccccggugcugccugguguccaacggcagcuaccugaacgagacccacuucuccgacgacaucgagcagcaggcggacaacaugaucaccgagcuccugcagaaggaguacaucgaccgccagggcaagacgccccuggggcucguggaccuguucgucuucagcaccuccuucuaccugaucagcaucuuccugcaccucgugaagaucccgacccaccggcacaucaucggcaagcccugccccaagccccaccgccugaaccacauggggaucugcuccugcggccuguacaagcacccgggggugcccgucaaguggaagcggugaggacuaguuauaagacugacuagcccgaugggccucccaacgggcccuccuccccuccuugcaccgagauuaaucaaaggcucuuuucagagccaccaaaaaaaaaaaaaaaaaaaaaaaaaaaaaaaaaaaaaaaaaaaaaaaaaaaaaaaaaaaaaaaaagaauu

SEQ ID NO: 41241 - RNA, 1655 nt, Artificial Sequence
  mRNA product Design i-3 (hSL-A64-N5) comprising derived and/or modified sequence from LASV(LASV254-NIG-2011;Clade II)__AIT17674__GPCmut12 (opt1)
aggagaaagcuuaccaugggccagaucaucaccuucuuccaggaggugccccacgucaucgaggaggugaugaacaucgugcugaucgcccucagccugcuggccauccucaaggggaucuacaacgucgcgaccugcggccuguucgggcugguguccuuccuccugcugugcggccgcagcugcuccacgaccuacaaggggguguacgagcuccagacccuggagcuggacaugaccaaccucaacaugugcaugccgcugagcugcaccaagaacaacucccaccacuacaucauggucggcaacgagaccggccuggagcucacccugacgaacaccagcaucaucaaccacaaguucugcaaccuguccgacgcccacaagaagaaccucuacaaccacgcccugaugagcaucaucuccaccuuccaccugagcauccccaacuucaaccaguacgaggccauguccugcgacuucaacgggggcaagaucagcgugcaguacaaccucucccacagcuacgccguggacgcggccaaccacugcgggaccaucgccaacggcguccugcagacguucaugcggauggccuggggcggguccuacaucgcgcuggacagcggcaaggggaacugggacugcaucaugaccuccuaccaguaccucaucauccagaacaccaccugggaggaccacugccaguucagccgccccucccccaucggcuaccuggggcugcucagccagcggacgcgcgacaucuacaucagccggcgccugcugggcaccuucaccuggacccucuccgacagcgagggcaacgagacgcccgggggcuacugccugacccgguggaugcugaucgaggccgagcucaagugcuucgggaacaccgccguggccaagugcaacgagaagcacgacgaggaguucugcgacaugcugcgccuguucgacuucugcaagcaggccauccggcgccucaagaccgaggcgcaggccaacauccagcugaucaacaaggccgugaacgcccugaucaacgaccagcucaucaugaagaaccaccuccgggacaucaugggcauccccuacugcaacuacuccaaguacugcuaccugaaccacacggucaccgggaagaccagccugccccgcugcugccugguguccaacggcagcuaccugaacgagacccacuucuccgacgacaucgagcagcaggccgacaacaugaucacggagcuccugcagaaggaguacauggaccggcagggcaagaccccgcuggggcucguggaccuguucgucuucagcaccuccuucuaccugaucagcaucuuccugcaccucgugaagaucccgacccaccgccacgugaucggcaagcccugccccaagccccaccggcugaaccacauggggaucugcuccugcggccuguacaagcacccggggguccccgugaaguggaagcgcugaggacuaguuauaagacugacuagcccgaugggccucccaacgggcccuccuccccuccuugcaccgagauuaaucaaaggcucuuuucagagccaccaaaaaaaaaaaaaaaaaaaaaaaaaaaaaaaaaaaaaaaaaaaaaaaaaaaaaaaaaaaaaaaaagaauu

SEQ ID NO: 41242 - RNA, 1655 nt, Artificial Sequence
  mRNA product Design i-3 (hSL-A64-N5) comprising derived and/or modified sequence from LASV(Nig08-A19;Clade III)__ADU56618__GPCmut12 (opt1)
aggagaaagcuuaccaugggccagaucgugaccuucuuccaggaggucccccacgugaucgaggaggugaugaacaucguccugaucgcccucagcauccuggccauccugaaggggcucuacaacaucgcgaccugcggccugaucgggcuggugacguuccuccugcuguccggccgcagcugcuccaugaccuacaaggggguguacgagcuccagacccuggagcugaacaugaacacccucaacaugugcaugccgcugagcugcaccaagaacaacucccaccacuacaucauggucggcaacgagaccggccuggagcucacccugacgaacaccagccugcuccaccacaaguucugcaaccuguccgacgcccacaagaagaaccuguacgaccacacccucaugagcaucaucuccaccuuccaccugagcauccccaacuucaaccaguacgaggccauguccugcgacuucaacgggggcaagaucacggugcaguacaaccugagccacuccuacgccaucgacgccgcgaaccacugcgggaccguggccaacggcguccuccagaccuucaugcggauggccuggggcgggagcuacaucgcccuggacuccggccgcgggaagugggacugcaucaugaccagcuaccaguaccugaucauccagaacacgaccugggaggaccacugccaguucucccggcccagccccaucggcuaccucgggcugcugucccagcgcacccgggacaucuacaucagccgccggcuccugggcaccuucacguggacccugagcgacuccgagggcaacgagacccccgggggcuacugccucacccgcuggaugcugaucgaggcggagcugaagugcuucgggaacacggccguggccaagugcaacgagaagcacgacgaggaguucugcgacaugcuccggcuguucgacuucugcaagcaggccauccgccggcugaaggccgaggcgcagaugagcauccagcucaucaacaaggccgugaacgcccugaucaacgaccagcugaucaugaagaaccaccuccgcgacaucaugggcauccccuacugcaacuacuccaaguacugcuaccugaaccacaccagcaccgggcggaccucccugccccgcugcugccucgucagcaacggcuccuaccugaacgagacgcacuucagcgacgacaucgagcagcaggccgacaacaugaucaccgagaugcugcagaaggaguaccucgaccggcagggcaagaccccgcuggggcugguggaccuguucguguucuccaccagcuucuaccucaucuccaucuuccugcaccuggucaagaucccgacgcaccgccacaucgugggcaagcccugccccaagccccaccggcucaaccacauggggaucugcagcugcggccuguacaagcagccgggggugcccguccgcuggaagcggugaggacuaguuauaagacugacuagcccgaugggccucccaacgggcccuccuccccuccuugcaccgagauuaaucaaaggcucuuuucagagccaccaaaaaaaaaaaaaaaaaaaaaaaaaaaaaaaaaaaaaaaaaaaaaaaaaaaaaaaaaaaaaaaaagaauu

SEQ ID NO: 41243 - RNA, 1658 nt, Artificial Sequence
  mRNA product Design i-3 (hSL-A64-N5) comprising derived and/or modified sequence from LASV(G1180-SLE-2010;Clade IV)__AIT17168__GPCmut12 (opt1)
aggagaaagcuuaccaugggccagaucgugaccuucuuccaggaggucccccacgugaucgaggaggugaugaacaucguccugaucgcccucagcauccuggccgugcugaaggggcucuacaacuucgcgaccugcggccugguggggcugcucaccuuccugcugcucugcggccgcuccugcaccgccagccgguacaagggggucuacgagcugcagacccuggagcucaacauggagacccugaacaugugcaugccgcuguccugcaccaagaacaacagccaccacuacaucauggugggcaacgagaccggccucgagcugacccugacgaacaccuccaucaucaaccacaaguucugcaaccucagcgacgcccacaagaagaaccuguacgaccacgcccugauguccaucaucagcaccuuccaccucuccauccccaacuucaaccaguacgaggccaugagcugcgacuucaacgggggcaagaucuccgugcaguacaaccugagccacuccuacgcgggggacgccgccaaccacugcggcaccgucgccaacggggugcugcagacguucaugcgcauggcguggggcggcagcuacaucgcccucgacuccgggcacggcagcugggacugcaucaugaccuccuaccaguaccugaucauccagaacaccaccugggaggaccacugccaguucagccggcccucccccaucggguaccugggccuccugagccagcgcacgcgggacaucuacaucagccgccggcugcucggcaccuucaccuggacccuguccgacagcgaggggaaggacacgccgggcggguacugccugacccgcuggaugcucaucgaggccgagcugaagugcuucggcaacaccgccguggccaagugcaacgagaagcacgacgaggaguucugcgacaugcugcggcuguucgacuucugcaagcaggcgauccagcgccugaaggccgaggcccagauguccauccagcugaucaacaaggccgucaacgcccucaucaacgaccagcugaucaugaagaaccaccuccgggacaucauggggauccccuacugcaacuacagcaaguacugcuaccucaaccacaccacgaccggcaagaccucccugcccaagugcugccuggugagcaacggcuccuaccucaacgagacccacuucagcgacgacaucgagcagcaggcggacaacaugaucacggagaugcugcagaaggaguacauggagcgccaggggaagacgccccugggccucguggaccuguucgucuucuccaccagcuucuaccugaucuccaucuuccugcaccucgugaagaucccgacccaccggcacaucgugggcaagagcugccccaagccccaccgccugaaccacauggggaucugcuccugcgggcuguacaagcagcccggcgucccggugaaguggaagcggugaggacuaguuauaagacugacuagcccgaugggccucccaacgggcccuccuccccuccuugcaccgagauuaaucaaaggcucuuuucagagccaccaaaaaaaaaaaaaaaaaaaaaaaaaaaaaaaaaaaaaaaaaaaaaaaaaaaaaaaaaaaaaaaaagaauu

SEQ ID NO: 41244 - RNA, 1658 nt, Artificial Sequence
  mRNA product Design i-3 (hSL-A64-N5) comprising derived and/or modified sequence from LASV(G1442-SLE-2011;Clade IV)__AIT17180__GPCmut12 (opt1)
aggagaaagcuuaccaugggccagaucgugaccuucuuccaggaggucccccacgugaucgaggaggugaugaacaucguccugaucgcccucagcauccuggccgugcugaaggggcucuacaacguggcgaccugcggccugaucgggcuggucacguuccuccugcugugcggccgcuccugcaccaccacccucuacaaggggguguacgagcugcagacgcuggagcucaacauggagacccugaacaugugcaugccgcugagcugcaccaagaacaacucccaccacuacauccgggugggcaacgagacgggccucgagcugacccugaccaacaccagcaucaucaaccacaaguucugcaaccucuccgacgcccacaagaagaaccuguacgaccacgcccugaugagcaucaucuccacguuccaccucagcauccccaacuucaaccaguacgaggccauguccugcgacuucaacgggggcaagaucagcguccaguacaaccugucccacagcuacgccggggacgcggccaaccacugcggcaccguggccaacggggugcugcagaccuucaugcgcauggccuggggcggcuccuacaucgcgcucgacagcgggcggggcaacugggacugcaucaugaccuccuaccaguaccugaucauccagaacacgaccugggacgaccacugccaguucagccgccccucccccaucggguaccugggccuccugagccagcggacccgcgacgucuacaucucccggcgccugcucggcaccuucacguggacccugagcgacagcgaggggaaggacaccccgggcggguacugccugacccgguggaugcucaucgaggccgagcugaagugcuucggcaacacggccguggccaagugcaacgagaagcacgacgaggaguucugcgacaugcugcgccucuucgacuucugcaagcaggccauccagcggcugaaggcggaggcccagauguccauccagcugaucaacaaggccgugaacgcccucaucaacgaccagcugaucaugaagaaccaccuccgcgacaucauggggauccccuacugcaacuacagcaaguacugcuaccugaacaacaccgccaccggcaagaccucccugcccaagugcugccugaucagcaacggcuccuaccucaacgagacgcacuucagcgacgacaucgagcaggaggcggacaacaugaucaccgagaugcugcagaaggaguacauggagcggcaggggaagacgccccugggccucgucgaccuguucguguucuccaccagcuucuaccugaucuccaucuuccugcaccucgugaagaucccgacccaccgccacaucgucggcaagagcugccccaagccccaccggcugaaccacauggggaucugcuccugcgggcuguacaagcagcccggcgugccggugcgcuggaagcggugaggacuaguuauaagacugacuagcccgaugggccucccaacgggcccuccuccccuccuugcaccgagauuaaucaaaggcucuuuucagagccaccaaaaaaaaaaaaaaaaaaaaaaaaaaaaaaaaaaaaaaaaaaaaaaaaaaaaaaaaaaaaaaaaagaauu

SEQ ID NO: 41245 - RNA, 1658 nt, Artificial Sequence
  mRNA product Design i-3 (hSL-A64-N5) comprising derived and/or modified sequence from LASV(G3010-SLE-2013;Clade IV)__AIT17344__GPCmut12 (opt1)
aggagaaagcuuaccaugggccagaucgugaccuucuuccaggaggucccccacgugaucgaggaggugaugaacaucguccugaucgcccucagcauccuggccgugcugaaggggcucuacaacuucgcgaccugcggccugguggggcuggucacguuccuccugcugugcggccgcuccugcaccaccagccucuacaaggggguguacgagcugcagacccuggagcucaacauggagacgcugaacaugugcaugccgcuguccugcaccaagaacaacagccaccacuacaucauggugggcaacgagaccggccucgagcugacgcugaccaacaccuccaucaucaaccacaaguucugcaaccucagcgacgcccacaagaagaaccuguacaaccacgcccugauguccaucaucagcaccuuccaccucuccauccccaacuucaaccaguacgaggccaugagcugcgacuucaacgggggcaagaucuccguccaguacaaccugagccacuccuacgccggggacgcggccagccacugcggcacgguggccaacggggugcugcagaccuucaugcggauggccuggggcggcuccuacaucgcgcucgacagcggguacggcaagugggacugcaucaugaccuccuaccaguaccugaucauccagaacaccacgugggaggaccacugccaguucagccgccccucccccaucggguaccugggccuccugagccagcggacccgcgacaucuacaucagccggcgccugcucggcaccuucaccuggacgcuguccgacagcgaggggaaggacaccccgggcggguacugccugacccgguggaugcucaucgaggccgagcugaagugcuucggcaacaccgccgucgccaagugcaacgagaagcacgacgaggaguucugcgacaugcugcgccucuucgacuucugcaagcaggccauccagcggcugaagacggaggcgcagauguccauccagcugaucaacaaggccgugaacgcccucaucaacgaccagcugaucaugaagaaccaccuccgcgacaucauggggauccccuacugcaacuacagcaaguacugcuaccugaaccacaccaccaccggcaagacgucccugcccaagugcugccuggugagcaacggcuccuaccucaacgagacccacuucagcgacgacaucgagcagcaggccgacaacaugaucaccgagaugcugcagaaggaguacauggagcggcaggggaagacgccccugggccucgucgaccuguucguguucuccaccagcuucuaccugaucuccaucuuccugcaccucgugaagaucccgacccaccgccacaucgucggcaagagcugccccaagccccaccggcugaaccacauggggaucugcuccugcgggcuguacaagcagcccggcgugccggugcgcuggaagcggugaggacuaguuauaagacugacuagcccgaugggccucccaacgggcccuccuccccuccuugcaccgagauuaaucaaaggcucuuuucagagccaccaaaaaaaaaaaaaaaaaaaaaaaaaaaaaaaaaaaaaaaaaaaaaaaaaaaaaaaaaaaaaaaaagaauu

SEQ ID NO: 41246 - RNA, 1658 nt, Artificial Sequence
  mRNA product Design i-3 (hSL-A64-N5) comprising derived and/or modified sequence from LASV(G502-SLE-2009;Clade IV)__AIT17126__GPCmut12 (opt1)
aggagaaagcuuaccaugggccagaucgugaccuucuuccaggaggucccccacgugaucgaggaggugaugaacaucguccugaucgcccucagcauccuggccgugcugaaggggcucuacaacuucgcgaccugcggccugguggggcugcucacguuccugcugcucugcggccgcuccugcaccaccgggcuguacaagggcgucuacgagcugcagacccucgagcugaacauggagacgcugaacaugugcaugccgcucagcugcaccaagaacaacucccaccacuacaucauggugggcaacgagaccgggcuggagcugacgcucaccaacaccagcaucaucaaccacaaguucugcaaccuguccgacgcccacaagaagaaccuguacgaccacgcccucaugagcaucaucuccaccuuccaccugagcauccccaacuucaaccaguacgaggccauguccugcgacuucaacggcgggaagaucagcgugcaguacaaccugucccacagcuacgccggcgacgcggccgaccacugcgggacggucgccaacggcgugcuccagaccuucaugcggauggccuggggcggguccuacaucgcgcuggacagcggccgcgggcggugggacugcaucaugaccuccuaccaguaccugaucauccagaacaccacgugggaggaccacugccaguucagccgccccucccccaucggcuaccucggccugcugagccagcggacccgcgacaucuacaucucccggcgccuccuggggaccuucaccuggacgcugagcgacagcgagggcaaggacacccccgggggcuacugccucacccgguggaugcugaucgaggccgagcugaagugcuucgggaacaccgccguggccaagugcaacgagaagcacgacgaggaguucugcgacaugcuccgccuguucgacuucugcaagcaggccauccagcggcugaaggcggaggcccagauguccauccagcucaucaacaaggccgucaacgcccugaucaacgaccagcuggugaugaagaaccaccuccgcgacaucaugggcauccccuacugcaacuacagccgguacugcuaccugaaccacacgaccaccggccgcaccucccugcccaagugcugccucgugagcaacggguccuaccugaacgagacgcacuucagcgacgacaucgagcagcaggccgacaacaugaucaccgagaugcugcagaaggaguacauggagcggcagggcaagaccccgcucgggcuggucgaccuguucguguucuccaccagcuucuaccugaucuccaucuuccuccaccuggugaagaucccgacgcaccgccacaucgucggcaagagcugccccaagccccaccggcugaaccacauggggaucugcuccugcggccucuacaagcagcccggcgugccggugaaguggaagcgcugaggacuaguuauaagacugacuagcccgaugggccucccaacgggcccuccuccccuccuugcaccgagauuaaucaaaggcucuuuucagagccaccaaaaaaaaaaaaaaaaaaaaaaaaaaaaaaaaaaaaaaaaaaaaaaaaaaaaaaaaaaaaaaaaagaauu

SEQ ID NO: 41247 - RNA, 1658 nt, Artificial Sequence
  mRNA product Design i-3 (hSL-A64-N5) comprising derived and/or modified sequence from LASV(G733-SLE-2010;Clade IV)__AIT17154__GPCmut12 (opt1)
aggagaaagcuuaccaugggccagaucgugaccuucuuccaggaggucccccacgugaucgaggaggugaugaacaucguccugaucgcccucagcauccuggccgugcugaaggggcucuacaacuucgcgaccugcggcaucguggggcuggucuccuuccugcuccugugcggccgcagcugcacgaccucccuguacaaggggguguacgagcuccagacccuggagcugaacauggagacccucaacaugugcaugccgcugagcugcaccaagaacaacucccaccacuacaucauggugggcaacgagaccggccuggagcucacccugacgaacaccagcaucaucaaccacaaguucugcaaccuguccgacgcccacaagaagaaccucuacgaccacgcccugaugagcaucaucuccaccuuccaccugagcauccccaacuucaaccaguacgaggccauguccugcgacuucaacgggggcaagaucagcguccaguacaaccucucccacagcuacgccggggacgcggccaaccacugcggcaccaucgccaacggggugcugcagacguucaugcggauggccuggggcggcuccuacaucgcgcuggacagcgggcgcgaccggugggacugcaucaugaccuccuaccaguaccucaucauccagaacaccaccugggaggaccacugccaguucagccgccccucccccaucggcuaccuggggcugcucagccagcggacgcgcgacaucuacaucagccggcgccugcugggcaccuucaccuggacccucuccgacagcgagggcaaggacacgcccgggggcuacugccugacccgguggaugcugaucgaggccgagcucaagugcuucgggaacaccgccguggccaagugcaacgagaagcacgacgaggaguucugcgacaugcugcgccuguucgacuucugcaagcaggccauccagcggcucaaggcggaggcccagauguccauccagcugaucaacaaggccgucaacgcccugaucaacgaccagcucaucaugaagaaccaccuccgcgacaucaugggcauccccuacugcaacuacagcaaguacugcuaccugaaccacaccacgaccgggaagaccucccugcccaagugcugccuggugagcaacggcuccuaccugaacgagacccacuucagcgacgacaucgagcagcaggccgacaacaugaucacggagaugcuccagaaggaguacauggagcggcagggcaagaccccgcuggggcugguggaccucuucgucuucuccaccagcuucuaccugaucuccaucuuccugcaccuggugaagaucccgacccaccgccacguggucggcaagagcugccccaagccccaccggcucaaccacauggggaucugcuccugcggccuguacgggcagcccggcgugccggugaaguggaagcgcugaggacuaguuauaagacugacuagcccgaugggccucccaacgggcccuccuccccuccuugcaccgagauuaaucaaaggcucuuuucagagccaccaaaaaaaaaaaaaaaaaaaaaaaaaaaaaaaaaaaaaaaaaaaaaaaaaaaaaaaaaaaaaaaaagaauu

SEQ ID NO: 41248 - RNA, 1658 nt, Artificial Sequence
  mRNA product Design i-3 (hSL-A64-N5) comprising derived and/or modified sequence from MOPV/LASV reassortant(IGS-1;Clade IV)__AFY05576__GPCmut12 (opt1)
aggagaaagcuuaccaugggccagaucgugaccuucuuccaggaggucccccacgugaucgaggaggugaugaacaucguccugaucgcccucagcgugcuggccgugcugaaggggcucuacaacuucgcgaccugcggccuggucgggcuggugacguuccuccugcugugcggccgcuccugcaccaccagccucuacaaggggguguacgagcugcagacccuggagcucaacauggagacgcugaacaugugcaugccgcuguccugcaccaagaacaacagccaccacuacaucauggucggcaacgagaccggccucgagcugacgcugaccaacaccuccaucaucaaccacaaguucugcaaccucagcgacgcccacaagaagaaccuguacgaccacgcccugauguccaucaucagcaccuuccaccucuccauccccaacuucaaccaguacgaggccaugagcugcgacuucaacgggggcaagaucuccgugcaguacaaccugagccacuccuacgccggggacgcggccaaccacugcggcacgguggccaacgggguccugcagaccuucaugcggauggccuggggcggcagcuacaucgcgcucgacuccgggcgcggcaacugggacugcaucaugaccagcuaccaguaccugaucauccagaacaccacgugggaggaccacugccaguucucccggcccagccccaucggguaccugggccuccugucccagcgcacccgggacaucuacaucagccgccggcugcucggcaccuucaccuggacgcugagcgacuccgagggggaggacaccccgggcggguacugccugacccgcuggaugcucaucgaggccgagcugaagugcuucggcaacaccgccguggccaagugcaacgagaagcacgacgaggaguucugcgacaugcugcggcuguucgacuucugcaagcaggccauccagcgccugaaggcggaggcccagaugagcauccagcugaucaacaaggccgugaacgcccucaucaacgaccagcugaucaugaagaaccaccuccgggacaucauggggauccccuacugcaacuacuccaaguacugcuaccucaaccacacgaccaccggccgcaccagccugcccaagugcugccuggucuccaacggcagcuaccucaacgagacgcacuucuccgacgacaucgagcagcaggccgacaacaugaucaccgagaugcugcagaaggaguacauggagcggcaggggaagacgccccugggccucguggaccuguucguguucagcaccuccuucuaccugaucagcaucuuccugcaccucgucaagaucccgacccaccgccacaucguggggaaguccugccccaagccccaccggcugaaccacaugggcaucugcagcugcgggcuguacaagcagcccggcgugccggucaaguggaagcgcugaggacuaguuauaagacugacuagcccgaugggccucccaacgggcccuccuccccuccuugcaccgagauuaaucaaaggcucuuuucagagccaccaaaaaaaaaaaaaaaaaaaaaaaaaaaaaaaaaaaaaaaaaaaaaaaaaaaaaaaaaaaaaaaaagaauu

SEQ ID NO: 41249 - RNA, 1658 nt, Artificial Sequence
  mRNA product Design i-3 (hSL-A64-N5) comprising derived and/or modified sequence from LASV(LM765-SLE-2012;Clade IV)__AIT17814__GPCmut12 (opt1)
aggagaaagcuuaccaugggccagaucgugaccuucuuccaggaggucccccacgugaucgaggaggugaugaacaucguccugaucgcccucagcauccuggccgugcugaaggggcucuacaacuucgcgaccugcggccugguggggcuggucacguuccuccugcugugcggccgcuccugcaccaccagccucuacaaggggguguacgagcugcagacccuggagcucaacauggagacgcugaacaugugcaugccgcuguccugcaccaagaacaacagccaccacuacaucauggugggcaacgagaccggccucgagcugacgcugaccaacaccuccaucaucgaccacaaguucugcaaccucagcgacgcccaccggaagaaccuguacgaccacgcccugauguccaucaucagcaccuuccaccucuccauccccaacuucaaccaguacgaggccaugagcugcgacuucaacgggggcaagaucuccguccaguacaaccugagccacuccuacgccaaggacgcggccgaccacugcgggacgguggccaacggcgugcugcagaccuucaugcgcauggccuggggcgggagcuacaucgcgcucgacuccggccgggggcgcugggacugcaucaugaccagcuaccaguaccugaucauccagaacaccacgugggaggaccacugccaguucucccggcccagccccaucggcuaccuggggcuccugucccagcgcacccgggacaucuacaucagccgccggcugcucggcaccuucaccuggacgcugagcgacuccgagggcaaggacacccccgggggcuacugccugacccgcuggaugcucaucgaggccgagcugaagugcuucgggaacaccgccgucgccaagugcaacgagaagcacgacgaggaguucugcgacaugcugcggcuguucgacuucugcaagcaggccauccagcgccugaaggcggaggcccagaugagcauccagcugaucaacaaggccgugaacgcccucaucaacgaccagcugaucaugaagaaccaccuccgggacaucaugggcauccccuacugcaacuacuccaaguacugcuaccucaaccacacgaccaccgggaagaccagccugcccaagugcugccugguguccaacggcagcuaccucaacgagacgcacuucuccgacgacaucgagcagcaggccgacaacaugaucaccgagaugcugcagaaggaguacauggagcgccagggcaagaccccgcuggggcucgucgaccuguucguguucagcaccuccuucuaccugaucagcaucuuccugcaccucgugaagaucccgacgcaccggcacaucgucggcaagcccugccccaagccccaccgccugaaccacauggggaucugcuccugcggccuguacaagcagccgggggugcccgugaaguggaagcggugaggacuaguuauaagacugacuagcccgaugggccucccaacgggcccuccuccccuccuugcaccgagauuaaucaaaggcucuuuucagagccaccaaaaaaaaaaaaaaaaaaaaaaaaaaaaaaaaaaaaaaaaaaaaaaaaaaaaaaaaaaaaaaaaagaauu

SEQ ID NO: 41250 - RNA, 1658 nt, Artificial Sequence
  mRNA product Design i-3 (hSL-A64-N5) comprising derived and/or modified sequence from LASV(LM776-SLE-2012;Clade IV)__AIT17824__GPCmut12 (opt1)
aggagaaagcuuaccaugggccagaucgugaccuucuuccaggaggucccccacgugaucgaggaggugaugaacaucguccugaucgcccucagcauccuggccgugcugaaggggcucuacaacuucgcgaccugcggccugguggggcuggucacguuccuccugcugugcggccgcuccugcaccaccagcguguacaaggggguguacgagcuccagacccuggagcugaacauggagacgcucaacaugugcaugccgcuguccugcaccaagaacaacagccaccacuacaucauggucggcaacgagaccggccuggagcucacgcugaccaacaccuccaucaucaaccacaaguucugcaaccugagcgacgcccacaagaagaaccucuacgaccacgcccugauguccaucaucagcaccuuccaccuguccauccccaacuucaaccaguacgaggccaugagcugcgacuucaacgggggcaagaucuccgugcaguacaaccucagccacuccuacgccggggacgcggccaaccacugcggcacgguggccaacgggguccugcagaccuucaugcggauggccuggggcggcagcuacaucgcgcuggacuccgggcacggcaagugggacugcaucaugaccagcuaccaguaccucaucauccagaacaccacgugggaggaccacugccaguucucccgccccagccccaucggguaccugggccugcucucccagcggacccgcgacaucuacaucagccggcgccugcugggcaccuucaccuggacgcucagcgacuccgaggggaaggacaccccgggcggguacugccugacccgguggaugcugaucgaggccgagcucaagugcuucggcaacaccgccguggccaagugcaacgagaagcacgacgaggaguucugcgacaugcugcgccuguucgacuucugcaagcaggccauccagcggcucaaggcggaggcccagaugagcauccagcugaucaacaaggccgugaacgcccugaucaacgaccagcucaucaugaagaaccaccuccgcgacaucauggggauccccuacugcaacuacuccaaguacugcuaccugaaccacacgaccaccggcaagaccagccugcccaagugcugccuggucuccaacggcagcuaccugaacgagacgcacuucuccgacgacaucgagcagcaggccgacaacaugaucaccgagaugcuccagaaggaguacauggagcggcaggggaagacgccccugggccugguggaccucuucguguucagcaccuccuucuaccugaucagcaucuuccugcaccuggucaagaucccgacccaccgccacaucguggggaaguccugccccaagccccaccggcucaaccacaugggcaucugcagcugcgggcuguacaagcagcccggcgugccgguccgcuggaagcggugaggacuaguuauaagacugacuagcccgaugggccucccaacgggcccuccuccccuccuugcaccgagauuaaucaaaggcucuuuucagagccaccaaaaaaaaaaaaaaaaaaaaaaaaaaaaaaaaaaaaaaaaaaaaaaaaaaaaaaaaaaaaaaaaagaauu

SEQ ID NO: 41251 - RNA, 1658 nt, Artificial Sequence
  mRNA product Design i-3 (hSL-A64-N5) comprising derived and/or modified sequence from LASV(Mad39;Clade IV)__ANH09722__GPCmut12 (opt1)
aggagaaagcuuaccaugggccagaucgugaccuucuuccaggaggucccccacgugaucgaggaggugaugaacaucguccugaucgcccucagcauccuggccgugcugaaggggcucuacaacguggcgaccugcggccugaucgggcuggucacguuccuccugcugugcggccgcuccugcaccaccacccucuacaaggggguguacgagcugcaggcccuggagcucaacauggagacgcugaacaugugcaugccgcugagcugcaccaagaacaacucccaccacuacauccgggugggcaacgagaccggccucgagcugacgcugaccaacaccagccucaucaaccacaaguucugcaaccuguccgacgcccacaagaagaaccuguacgaccacgcccucaugagcaucaucuccaccuuccaccugagcauccccaacuucaaccaguacgaggccauguccugcgacuucaacgacgggaagaucagcguccaguacaaccugucccacacguacgcgggcgacaccgccaaccacugcgggaccguggccaacggcgugcuccagaccuucaugcgcauggccuggggcgggagcuacaucgcgcuggacuccggccgcgggggcugggacugcaucaugacgagcuaccaguaccugaucauccagaacaccaccugggaggaccacugccaguucucccggcccagccccaucggguaccucggccugcugucccagcggacccgcgacaucuacaucagccggcgccuccugggcacguucaccuggacccuguccgacagcgaggggaaggacaccccgggcggguacugccucacgcgguggaugcugaucgaggccgagcugaagugcuucggcaacaccgccgucgccaagugcaacgagaagcacgacgaggaguucugcgacaugcuccgccuguucgacuucugcaagcaggccauccagcggcugaaggcggaggcccagaugagcauccagcucaucaacaaggccgugaacgcccugaucaacgaccagcugaucaugaagaaccaccuccgcgacaucauggggauccccuacugcaacuacuccaaguacugcuaccugaaccacaccgugaccggcaagacgagccugcccaagugcugccucgucuccaacggcagcuaccugaacgagacccacuucuccgacgacaucgagcagcaggccgacaacaugaucaccgagaugcugcagaaggaguacauggagcggcaggggaagacgccccucggccugguggaccuguucguguucagcaccuccuucuaccugaucagcaucuuccuccaccuggucaagaucccgacccaccgccacgugguggggaagcccugccccaagccccaccggcugaaccacaugggcaucugcuccugcggguucuacaagcagccgggcguccccgugcgcuggaagcggugaggacuaguuauaagacugacuagcccgaugggccucccaacgggcccuccuccccuccuugcaccgagauuaaucaaaggcucuuuucagagccaccaaaaaaaaaaaaaaaaaaaaaaaaaaaaaaaaaaaaaaaaaaaaaaaaaaaaaaaaaaaaaaaaagaauu

SEQ ID NO: 41252 - RNA, 1658 nt, Artificial Sequence
  mRNA product Design i-3 (hSL-A64-N5) comprising derived and/or modified sequence from LASV(Z0947-SLE-2011;Clade IV)__AIT17840__GPCmut12 (opt1)
aggagaaagcuuaccaugggccagaucgugaccuucuuccaggaggucccccacgugaucgaggaggugaugaacaucguccugaucgcccucagcauccuggccgugcugaaggggcucuacaacuucgcgaccugcggccugguggggcuggucacguuccuccugcugugcggccgcuccugcaccaucagccucuacaaggggguguacgagcugcagacccuggagcucaacauggagacccugaacaugugcaugccgcuguccugcaccaagaacaacagccaccacuacaucauggugggcaacgagaccggccucgagcugacccugacgaacaccuccaucaucaaccacaaguucugcaaccucagcgacgcccacaagaagaaccuguacgaccacgcccugauguccaucaucagcaccuuccaccucuccauccccaacuucaaccaguacgaggccaugagcugcgacuucaacgggggcaagaucuccguccaguacaaccugagccacuccuacgccggggacgcggccaaccacugcggcaccguggccaacggggugcugcagacguucaugcggauggccuggggcggcagcuacaucgcgcucgacuccgggcgcgaccggugggacugcaucaugaccagcuaccaguaccugaucauccagaacaccaccugggaggaccacugccaguucucccgccccagccccaucggcuaccuggggcuccugucccagcggacgcgcgacaucuacaucagccggcgccugcucggcaccuucaccuggacccugagcgacuccgagggcaaggacacgcccgggggcuacugccugacccgguggaugcucaucgaggccgagcugaagugcuucgggaacaccgccgucgccaagugcaacgagaagcacgacgaggaguucugcgacaugcugcgccucuucgacuucugcaagcaggccauccagcggcugaaggcggaggcccagaugagcauccagcugaucaacaaggccgugaacgcccucaucaacgaccagcugaucaugaagaaccaccuccgcgacaucaugggcauccccuacugcaacuacuccaaguacugcuaccugaaccacaccacgaccgggaagaccagccugcccaagugcugccugguguccaacggcagcuaccucaacgagacccacuucuccgacgacaucgagcagcaggccgacaacaugaucacggagaugcugcagaaggaguacauggagcggcagggcaagaccccgcuggggcucgucgaccuguucguguucagcaccuccuucuaccugaucagcaucuuccugcaccucgugaagaucccgacccaccgccacaucgucggcaagcccugccccaagccccaccggcugaaccacauggggaucugcuccugcggccuguacaagcagccgggggugcccgugaaguggaagcgcugaggacuaguuauaagacugacuagcccgaugggccucccaacgggcccuccuccccuccuugcaccgagauuaaucaaaggcucuuuucagagccaccaaaaaaaaaaaaaaaaaaaaaaaaaaaaaaaaaaaaaaaaaaaaaaaaaaaaaaaaaaaaaaaaagaauu

SEQ ID NO: 41253 - RNA, 1658 nt, Artificial Sequence
  mRNA product Design i-3 (hSL-A64-N5) comprising derived and/or modified sequence from LASV(Josiah;Clade IV)__NP_694870__GPCmut12 (opt1)
aggagaaagcuuaccaugggccagaucgugaccuucuuccaggaggucccccacgugaucgaggaggugaugaacaucguccugaucgcccucagcgugcuggccgugcugaaggggcucuacaacuucgcgaccugcggccuggucgggcuggugaccuuccuccugcugugcggccgcuccugcaccaccagccucuacaaggggguguacgagcugcagacccuggagcucaacauggagacgcugaacaugugcaugccgcuguccugcaccaagaacaacagccaccacuacaucauggucggcaacgagaccggccucgagcugacccugacgaacaccuccaucaucaaccacaaguucugcaaccucagcgacgcccacaagaagaaccuguacgaccacgcccugauguccaucaucagcaccuuccaccucuccauccccaacuucaaccaguacgaggccaugagcugcgacuucaacgggggcaagaucuccgugcaguacaaccugagccacuccuacgccggggacgcggccaaccacugcggcaccguggccaacgggguccugcagacguucaugcggauggccuggggcggcagcuacaucgcgcucgacuccgggcgcggcaacugggacugcaucaugaccagcuaccaguaccugaucauccagaacaccaccugggaggaccacugccaguucucccggcccagccccaucggguaccugggccuccugucccagcgcacgcgggacaucuacaucagccgccggcugcucggcaccuucaccuggacccugagcgacuccgaggggaaggacacgccgggcggguacugccugacccgcuggaugcucaucgaggccgagcugaagugcuucggcaacaccgccguggccaagugcaacgagaagcacgacgaggaguucugcgacaugcugcggcuguucgacuucugcaagcaggccauccagcgccugaaggcggaggcccagaugagcauccagcugaucaacaaggccgugaacgcccucaucaacgaccagcugaucaugaagaaccaccuccgggacaucauggggauccccuacugcaacuacuccaaguacugcuaccucaaccacaccacgaccggccgcaccagccugcccaagugcugccuggucuccaacggcagcuaccucaacgagacccacuucuccgacgacaucgagcagcaggccgacaacaugaucacggagaugcugcagaaggaguacauggagcggcaggggaagacgccccugggccugguggaccucuucguguucagcaccuccuucuaccugaucagcaucuuccugcaccucgucaagaucccgacccaccgccacaucguggggaaguccugccccaagccccaccggcugaaccacaugggcaucugcagcugcgggcuguacaagcagcccggcgugccggucaaguggaagcgcugaggacuaguuauaagacugacuagcccgaugggccucccaacgggcccuccuccccuccuugcaccgagauuaaucaaaggcucuuuucagagccaccaaaaaaaaaaaaaaaaaaaaaaaaaaaaaaaaaaaaaaaaaaaaaaaaaaaaaaaaaaaaaaaaagaauu

SEQ ID NO: 41254 - RNA, 1655 nt, Artificial Sequence
  mRNA product Design i-3 (hSL-A64-N5) comprising derived and/or modified sequence from LASV(LP;Clade I)__AAF86701__GPCmut12 (opt1)
aggagaaagcuuaccaugggccagaucaucaccuucuuccaggaggugccccacgucaucgaggaggugaugaacaucgugcugaucgcccucagccugcuggccauccucaaggggcuguacaacaucgcgaccugcggcaucaucgggcuggucgccuuccucuuccugugcggcaaguccugcagccugacgcucaagggcggguacgagcugcagacccuggagcucaacauggagacccugaacaugugcaugccgcuguccugcaccaagaacagcucccaccacuacauccgcgugggcaacgagacggggcucgagcugacccugaccaacaccagcaucaucaaccacaaguucugcaaccucuccgacgcccacaagaagaaccuguacgaccacgcccugaugagcaucaucuccacguuccaccucagcauccccaacuucaaccaguacgaggccauguccugcgacuucaacggcgggaagaucagcgugcaguacaaccugucccacagcuacgcgggcgacgccgccgagcacugcgggaccgucgccaacggcgugcugcagaccuucaugcggauggcguggggcgggcgcuacaucgcccucgacuccggcaaggggaacugggacugcaucaugaccagcuaccaguaccugaucauccagaacacgaccugggaggaccacugccaguucucccggcccagccccaucggcuaccugggccuccugucccagcgcacccgggacaucuacaucagccgccggcugcucgggaccuucacguggacccugagcgacuccgagggcaacgagacccccgggggcuacugccugacccgcuggaugcucaucgaggccgagcugaagugcuucgggaacacggccguggccaagugcaacgagaagcacgacgaggaguucugcgacaugcugcggcuguucgacuucugcaagcaggcgauccgccggcugaaggccgaggcccagaugagcauccagcugaucaacaaggccgucaacgcccucaucaacgaccagcugaucaugaagaaccaccuccgcgacaucaugggcauccccuacugcaacuacuccaaguacugcuaccucaaccacaccagcuccggccggaccagccugcccaagugcugccugaucuccaacgggagcuaccucaacgagacccaguucuccgacgacaucgagcagcaggcggacaacaugaucacggagaugcugcagaaggaguacaucgagcgccagggcaagaccccgcuggggcugguggacaucuucaucuucagcaccuccuucuaccucaucagcaucuuccugcaccugaucaagaucccgacccaccggcacaucgugggcaagcccugccccaagccccaccgccucaaccacaugggggucugcuccugcggccuguacaagcacccgggcgugcccacgaaguggaagcggugaggacuaguuauaagacugacuagcccgaugggccucccaacgggcccuccuccccuccuugcaccgagauuaaucaaaggcucuuuucagagccaccaaaaaaaaaaaaaaaaaaaaaaaaaaaaaaaaaaaaaaaaaaaaaaaaaaaaaaaaaaaaaaaaagaauu

SEQ ID NO: 41255 - RNA, 1655 nt, Artificial Sequence
  mRNA product Design i-3 (hSL-A64-N5) comprising derived and/or modified sequence from LASV(803213;Clade II)__AAF86703__GPCmut12 (opt1)
aggagaaagcuuaccaugggccagaucaucaccuucuuccaggaggugccccacgucaucgaggaggugaugaacaucgugcugaucgcccucagccugcuggccauccucaaggggaucuacaacgucgcgaccugcggccuguucgggcugaucuccuuccuccugcugugcggccgcagcugcuccgugacguacaaggggguguacgagcuccagacccuggagcugaacauggccaaccucaacaugugcaugccgcugagcugcaccaagaacaacucccaccacuacaucauggucggcaacgagaccggccuggagcucacgcugaccaacaccagcaucaucaaccacaaguucugcaaccuguccgacgcccacaagaagaaccucuacgaccacgcccugaugagcaucaucuccaccuuccaccugagcauccccaacuucaaccaguacgaggccauguccugcgacuucaacgggggcaagaucagcgugcaguacaaccucucccacagcuucgcgguggacgccgccaaccacugcgggacgaucgccaacggcguccugcagaccuucaugcggauggcguggggcggguccuacaucgcccuggacagcggcaaggggaacugggacugcaucaugaccuccuaccaguaccucaucauccagaacaccacgugggaggaccacugccaguucagccgccccucccccaucggcuaccuggggcugcucagccagcggacccgcgacaucuacaucagccggcgccugcugggcaccuucaccuggacgcucuccgacagcgagggcaacgaggcccccgggggcuacugccugacccgguggaugcugaucgaggccgagcucaagugcuucgggaacaccgccguggcgaagugcaacgagaagcacgacgaggaguucugcgacaugcugcgccuguucgacuucugcaagcaggccaucaagcggcucaagaccgaggcccagauguccauccagcugaucaacaaggccgugaacgcccugaucaacgaccagcucaucaugaagaaccaccuccgcgacaucaugggcauccccuacugcaacuacagccgguacugcuaccugaaccacacggucaccgggaagaccucccugccccgcugcugccuggugagcaacggcuccuaccugaacgagacccacuucagcgacgacaucgagcagcaggcggacaacaugaucacggagaugcuccagaaggaguacauggaccggcagggcaagaccccgcuggggcugguggaccuguucgucuucuccaccagcuucuaccucaucuccaucuuccugcaccuggugaagaucccgacccaccgccacaucgugggcaagcccugccccaagccccaccggcucaaccacauggggaucugcagcugcggccuguacaagcacccggggguccccgugaaguggaagcgcugaggacuaguuauaagacugacuagcccgaugggccucccaacgggcccuccuccccuccuugcaccgagauuaaucaaaggcucuuuucagagccaccaaaaaaaaaaaaaaaaaaaaaaaaaaaaaaaaaaaaaaaaaaaaaaaaaaaaaaaaaaaaaaaaagaauu

SEQ ID NO: 41256 - RNA, 1655 nt, Artificial Sequence
  mRNA product Design i-3 (hSL-A64-N5) comprising derived and/or modified sequence from LASV(GA391;Clade III)__CAA36645__GPCmut12 (opt1)
aggagaaagcuuaccaugggccagaucgugaccuucuuccaggaggucccccacgugaucgaggaggugaugaacaucguccugaucgcccucagcauccuggccauccugaaggggcucuacaacguggcgaccugcggccugaucgggcuggugaccuuccuccugcuguccggccgcagcugcucccucaucuacaaggggaccuacgagcugcagacccuggagcucaacauggagacccugaacaugugcaugccgcugagcugcacgaagaacaacucccaccacuacauccgggucggcaacgagaccggccucgagcugacccugaccaacacgagcauccucaaccacaaguucugcaaccuguccgacgcccacaagcgcaaccuguacgaccacagccucauguccaucaucagcaccuuccaccuguccauccccaacuucaaccaguacgaggccaugagcugcgacuucaacgggggcaagaucaccgugcaguacaaccugucccacagcuucgccguggacgccgcggggcacugcggcacccucgccaacgggguccugcagacguucaugcggauggccuggggcggcuccuacaucgcccuggacagcgggcgcggcaacugggacugcaucaugaccuccuaccaguaccucaucauccagaacaccaccugggacgaccacugccaguucagccggcccucccccaucggguaccugggccugcucagccagcgcacgcgggacaucuacaucagccgccggcugcugggcaccuucaccuggacccucuccgacagcgaggggaacgagacgccgggcggguacugccugacccgcuggaugcugaucgaggcggagcucaagugcuucggcaacaccgccguggccaagugcaacgagaagcacgacgaggaguucugcgacaugcugcggcuguucgacuucugcaagcaggccauccgccggcucaagaccgaggcccagauguccauccagcugaucaacaaggcggugaacgcccugaucaacgaccagcucaucaugaagaaccaccuccgcgacaucauggggauccccuacugcaacuacagccgguacugcuaccugaaccacacguccaccggcaagaccagccugccccgcugcugccugaucuccaacggcagcuaccugaacgagaccaaguucuccgacgacaucgagcagcaggccgacaacaugaucacggagaugcugcagaaggaguacaucgaccggcaggggaagacgccccucggccuggucgaccuguucguguucagcaccuccuucuaccucaucagcaucuuccugcaccuggugaagaucccgacccaccgccacaucgucgggaagcccugccccaagccccaccggcucaaccacaugggcaucugcuccugcgggcuguacaagcagccgggcgugcccgugcgcuggaagcggugaggacuaguuauaagacugacuagcccgaugggccucccaacgggcccuccuccccuccuugcaccgagauuaaucaaaggcucuuuucagagccaccaaaaaaaaaaaaaaaaaaaaaaaaaaaaaaaaaaaaaaaaaaaaaaaaaaaaaaaaaaaaaaaaagaauu

SEQ ID NO: 41257 - RNA, 1658 nt, Artificial Sequence
  mRNA product Design i-3 (hSL-A64-N5) comprising derived and/or modified sequence from LASV(AV;Clade V)__CCA30314__GPCmut12 (opt1)
aggagaaagcuuaccaugggccagaucgugaccuucuuccaggaggucccccacgugaucgaggaggugaugaacaucguccugaucgcccucagcauccuggccgugcugaaggggcucuacaacaucgcgaccugcggccugaucgggcugaucacguuccuccugcugugcggccgcuccugcagcuccaaccucuacaaggggguguacgagcugcagagccuggaccucaacauggagacccugaacaugugcaugccgcuguccugcaccaagaacaacagccaccacuacauccgggucggcaacgacaccggccucgagcugacgcugaccaacaccuccauccucaaccacaaguucugcaaccugagcgacgcccacaagaaggaccuguacgaccacgcccucauguccaucaucagcaccuuccaccuguccauccccaacuucaaccaguacgaggccaugagcugcgacuucaacgggggcaagaucuccgugcaguacaaccugagccacuccuacgccaucgacgcggccaaccacugcgggacgguggccaacggcauccuccagaccuucaugcgcauggccuggggcgggagcuacaucgcgcuggacuccggccgggggaacugggacugcaucaugaccagcuaccaguaccugaucauccagaacaccacgugggagaaccacugccaguucucccgccccagccccaucggcuaccucgggcugcugagccagcggacccgcgacaucuacaucucccggcgccuccugggcaccuucaccuggacgcugagcgacuccgagggcaacgccacccccgggggcuacugccucacccgguggaugcugaucgaggccgagcugaagugcuucgggaacaccgccgucgccaagugcaacgagaagcacgacgaggaguucugcgacaugcuccgccuguucgacuucugcaagcaggcgaucagccggcugaaguccgaggcccagaugagcauccagcucaucaacaaggccgugaacgcccugaucaacgaccagcugaucaugaagaaccaccuccgcgacaucaugggcauccccuacugcaacuacuccaaguacugcuaccugaaccacacgaucaccgggaagaccagccugcccaagugcugccucguguccaacggcagcuaccugaacgagacccacuucuccgacgacaucgagcagcaggccgacaacaugaucacggagaugcugcagaaggaguacauggagcggcagggcaagaccccgcuggggcucgucgaccuguucguguucagcaccuccuucuaccugaucagcaucuuccuccgccuggugaagaucccgacccaccggcacaucgucggcaagcccugccccaagccccaccgccugaaccacauggggaucugcuccugcggccucuacaagcagccgggggugcccgugcgguggaagcgcugaggacuaguuauaagacugacuagcccgaugggccucccaacgggcccuccuccccuccuugcaccgagauuaaucaaaggcucuuuucagagccaccaaaaaaaaaaaaaaaaaaaaaaaaaaaaaaaaaaaaaaaaaaaaaaaaaaaaaaaaaaaaaaaaagaauu

SEQ ID NO: 41258 - RNA, 1655 nt, Artificial Sequence
  mRNA product Design i-3 (hSL-A64-N5) comprising derived and/or modified sequence from LASV(Togo/2016/7082;Clade VI)__AMR44577__GPCmut12 (opt1)
aggagaaagcuuaccaugggccagaucaucaccuucuuccaggaggugccccacgucaucgaggaggugaugaacaucgugcugaucgcccucagccugcuggccauccucaagggggucuacaacguggcgaccugcggcaucaucgggcuggugacguuccuguuccucugcggccgcuccugcagccugaucuacaagggguccuacgagcugcagacccucgagcugaacauggagacccugaacaugugcaugccgcucagcugcaccaagaacuccagccaccacuacauccgggucggcaacgagacgggccuggagcugacccucaccaacaccuccaucaucaaccacaaguucugcaaccugagcgacgcccacaagcgcaaccuguacgaccacgcccucauguccauccugagcacguuccaccuguccauccccaacuucaaccaguacgaggccaugagcugcgacuucaacgggggcaagaucuccgugcaguacaaccucagccacgccuacgcgguggacgccgccgagcacugcgggaccgucgccaacggcgugcugcagaccuucaugcggauggcguggggcggguccuacaucgcccuggacagcggccgcgggaacugggacugcaucaugaccuccuaccaguaccucaucauccagaacacgaccugggaggaccacugccaguucagccggcccucccccaucggcuaccuggggcugcucagccagcgcacccgggacaucuacaucagccgccggcugcugggcaccuucacguggacccucuccgacagcgagggcaacgagacccccgggggcuacugccugacccgcuggaugcugaucgaggccgagcucaagugcuucgggaacacggccguggccaagugcaacgagaagcacgacgaggaguucugcgacaugcugcggcuguucgacuucugcaagcaggcgauccagcgccucaaguccgaggcccagaugagcauccagcugaucaacaaggccgucaacgcccugaucaacgaccagcucaucaugaagaaccaccuccgggacaugaugggcauccccuacugcaacuacuccaaguacugcuaccugaaccacaccagcuccgggcgcaccagccugcccaagugcugccugguguccaacggcagcuaccugaacgagacccacuucuccgacgacaucgagcagcaggccgacaacaugaucacggagaugcuccagaaggaguacaucgaccggcagggcaagaccccgcuggggcugguggaccuguucgucuucagcaccuccuucuaccucaucagcaucuuccugcaccugaucaagaucccgacccaccgccacaucgugggcaagcccugccccaagccccaccggcucaaccacauggggaucugcuccugcggccuguacaagcagccgggggugcccacgcgcuggaagcggugaggacuaguuauaagacugacuagcccgaugggccucccaacgggcccuccuccccuccuugcaccgagauuaaucaaaggcucuuuucagagccaccaaaaaaaaaaaaaaaaaaaaaaaaaaaaaaaaaaaaaaaaaaaaaaaaaaaaaaaaaaaaaaaaagaauu

SEQ ID NO: 41259 - RNA, 1655 nt, Artificial Sequence
  mRNA product Design i-3 (hSL-A64-N5) comprising derived and/or modified sequence from LASV(KAK-428;Clade n.d. (VII))__ANH09740__GPCmut12 (opt1)
aggagaaagcuuaccaugggccagaucgugaccuucuuccaggaggucccccacgugaucgaggaggugaugaacaucguccugaucgcccucagccugcuggccauccucaaggggcuguacaacuucgcgaccugcggcgugaucgggcugaucacguuccuccugcugugcggccgcuccugcagcgccaccuacaaggggcaguacgagcuccagacccuggagcugaacauggagucccucaacaugugcaugccgcugagcugcaccaagaacaacucccaccacuacauccgggccggcaacaacacgggccuggagcucacccugaccaacaccagcaucaucucccacaaguucugcaaccugagcgacgcccacaagaagaaccucuacgaccacacgcugauguccaucaucaccaccuuccaccugagcauccccaacuucaaccaguacgaggccauguccugcgacuucaacgggggcaagaucagcauccaguacaaccucucccacagcuacgcgggggacgccgcccagcacugcggcaccguggccaacgggguccugcagacguucaugcgcauggcguggggcggcuccuaccuggcccucgacagcgggcggcgcggcugggacugcaucaucuccagcuaccaguaccugaucauccagaacaccaccugggacgaccacugccaguucucccggcccagccccaucggguaccugggcuucgugagccagaagacccgcgacaucuacaucucccggcgccuccugggcacguucaccuggacccugagcgacuccgaggggcacgacaugccgggcggguacugccucacccgguggaugcugaucgaggccgaccugaagugcuucggcaacacggccguggccaagugcaacgagaagcacgacgaggaguucugcgacauguggcgccucuucgacuucugcaagcaggcgauccagcggcugaaggccgaggcccagaugaacauccagcugaucaacaaggccgucaacgcccucaucaacgaccagcugaugaugaagaaccaccuccgcgacaucauggggauccccuacugcaacuacagcaaguucugcuaccugaacaacaccaccaccggccggacgucccugccccgcugcugccugaucagcaacggcuccuaccucaacgagacccacuucagcgacgacaucgagcagcaggcggacaacaugaucaccgagaugcugcagaaggaguacauggaccggcaggggaagacgccccugggccucguggaccuguucguguucuccaccagcuucuaccugaucaccaucuuccugcaccucgucaagaucccgacccaccgccacaucguggggaagcccugccccaagccccaccggcugaaccacaugggcaucugcuccugcgggcuguacaagcagccgggcgugcccguccgcuggaagcggugaggacuaguuauaagacugacuagcccgaugggccucccaacgggcccuccuccccuccuugcaccgagauuaaucaaaggcucuuuucagagccaccaaaaaaaaaaaaaaaaaaaaaaaaaaaaaaaaaaaaaaaaaaaaaaaaaaaaaaaaaaaaaaaaagaauu

SEQ ID NO: 41260 - RNA, 1655 nt, Artificial Sequence; identical to SEQ ID NO: 41254
  mRNA product Design i-3 (hSL-A64-N5) comprising derived and/or modified sequence from LASV(Pinneo-NIG-1969;Clade I)__AIT17836__GPCmut12 (opt1)

SEQ ID NO: 41261 - RNA, 1655 nt, Artificial Sequence
  mRNA product Design i-3 (hSL-A64-N5) comprising derived and/or modified sequence from LASV(ISTH0009-NIG-2011;Clade II)__AIT17404__GPCmut12 (opt1)
aggagaaagcuuaccaugggccagaucaucaccuucuuccaggaggugccccacgucaucgaggaggugaugaacaucgugcugaucgcccucagccugcuggccauccucaaggggaucuacaacgucgcgaccugcggccuguucgggcugguguccuuccuccugcugugcggccgcagcugcuccacgaccuacaaggggguguacgagcuccagacccuggagcuggacauggccagccucaacaugugcaugccgcuguccugcaccaagaacaacagccaccacuacaucauggucggcaacgagacgggccuggagcucacccugaccaacaccuccaucaucaaccacaaguucugcaaccugagcgacgcccacaagaagaaccucuacgaccacgcccugauguccaucaucagcacguuccaccuguccauccccaacuucaaccaguacgaggccaugagcugcgacuucaacgggggcaagaucuccgugcaguacaaccucagccacgcguacgccguggacgccgccaaccacugcgggaccaucgcgaacggcguccugcagaccuucaugcggauggccuggggcggguccuacaucgcccuggacagcggcaagggguccugggacugcaucaugaccagcuaccaguaccucaucauccagaacacgaccugggaggaccacugccaguucucccgccccagccccaucggcuaccuggggcugcucagccagcggacccgcgacaucuacaucucccggcgccugcugggcaccuucacguggacccucagcgacuccgagggcaacgagacccccgggggcuacugccugacccgguggaugcugaucgaggccgagcucaagugcuucgggaacacggccguggcgaagugcaacgagaagcacgacgaggaguucugcgacaugcugcgccuguucgacuucugcaagcaggccauccggcgccucaagaccgaggcccagaugagcauccagcugaucaacaaggccgugaacgcccugaucaacgaccagcucaucaugaagaaccaccuccgggacaucaugggcauccccuacugcaacuacuccaaguacugcuaccugaaccacaccgucaccgggaagacgagccugccccgcugcugccugguguccaacggcagcuaccugaacgagacccacuucuccgacgacaucgagcagcaggcggacaacaugaucaccgagcuccugcagaaggaguacauggaccggcagggcaagaccccgcuggggcugguggaccucuucgucuucagcacguccuucuaccugaucagcaucuuccugcaccucaucaagaucccgacccaccgccacaucaccggcaagcccugccccaagccccaccggcugaaccacauggggaucugcuccugcggccuguacaagcacccgggggugcccgugaaguggaagcgcugaggacuaguuauaagacugacuagcccgaugggccucccaacgggcccuccuccccuccuugcaccgagauuaaucaaaggcucuuuucagagccaccaaaaaaaaaaaaaaaaaaaaaaaaaaaaaaaaaaaaaaaaaaaaaaaaaaaaaaaaaaaaaaaaagaauu

SEQ ID NO: 41262 - RNA, 1655 nt, Artificial Sequence
  mRNA product Design i-3 (hSL-A64-N5) comprising derived and/or modified sequence from LASV(ISTH2010-NIG-2012;Clade II)__AIT17482__GPCmut12 (opt1)
aggagaaagcuuaccaugggccagaucaucaccuucuuccaggaggugccccacgucaucgaggaggugaugaacaucgugcugaucgcccucagccugcuggccauccucaaggggaucuacaacgucgcgaccugcggccuguucgggcugguguccuuccuccugcugugcggccgcagcugcuccacgaccuacaaggggguguacgagcuccagacccuggagcuggacauggccagccucaacaugugcaugccgcuguccugcaccaagaacaacagccaccacuacaucauggucggcaacgagacgggccuggagcucacccugaccaacaccuccaucaucaaccacaaguucugcaaccugagcgacgcccacaagaagaaccucuacgaccacgcccugauguccaucaucagcacguuccaccuguccauccccaacuucaaccaguacgaggccaugagcugcgacuucaacgggggcaagaucuccgugcaguacaaccucagccacgcguacgccguggacgccgccaaccacugcgggaccaucgcgaacggcguccugcagaccuucaugcggauggccuggggcggguccuacaucgcccuggacagcggcaagggguccugggacugcaucaugaccagcuaccaguaccucaucauccagaacaucacgugggaggaccacugccaguucucccgccccagccccaucggcuaccuggggcugcucagccagcggacccgcgacaucuacaucucccggcgccugcugggcaccuucaccuggacgcucagcgacuccgagggcaacgagacccccgggggcuacugccugacccgguggaugcugaucgaggccgagcucaagugcuucgggaacaccgccguggcgaagugcaacgagaagcacgacgaggaguucugcgacaugcugcgccuguucgacuucugcaagcaggccauccggcgccucaagacggaggcccagaugagcauccagcugaucaacaaggccgugaacgcccugaucaacgaccagcucaucaugaagaaccaccuccgggacaucaugggcauccccuacugcaacuacuccaaguacugcuaccugaaccacaccgucaccgggaagaccagccugccccgcugcugccugguguccaacggcagcuaccugaacgagacgcacuucuccgacgacaucgagcagcaggcggacaacaugaucaccgagcuccugcagaaggaguacaucgaccggcagggcaagaccccgcuggggcugguggaccucuucgucuucagcaccuccuucuaccugaucagcaucuuccugcaccucgugaagaucccgacgcaccgccacguggucggcaagcccugccccaagccccaccggcugaaccacauggggaucugcuccugcggccuguacaagcacccgggggugcccgugaaguggaagcgcugaggacuaguuauaagacugacuagcccgaugggccucccaacgggcccuccuccccuccuugcaccgagauuaaucaaaggcucuuuucagagccaccaaaaaaaaaaaaaaaaaaaaaaaaaaaaaaaaaaaaaaaaaaaaaaaaaaaaaaaaaaaaaaaaagaauu

SEQ ID NO: 41263 - RNA, 1655 nt, Artificial Sequence
  mRNA product Design i-3 (hSL-A64-N5) comprising derived and/or modified sequence from LASV(Lassa virus/H.sapiens-wt/NGA/2015/ISTH_0543;Clade II)__AVO03639__GPCmut12 (opt1)
aggagaaagcuuaccaugggccagaucaucaccuucuuccaggaggugccccacgucaucgaggaggugaugaacaucgugcugaucgcccucagccugcuggccauccucaaggggaucuacaacgucgcgaccugcggccuguucgggcugguguccuuccuccugcugugcggccgcagcugcuccacgaccuacaaggggguguacgagcuccagacccuggagcuggacauggccaaccucaacaugugcaugccgcugagcugcaccaagaacaacucccaccacuacaucauggucggcaacgagacgggccuggagcucacccugaccaacaccagcaucaucaaccacaaguucugcaaccuguccgacgcccacaagaagaaccucuacgaccacgcccugaugagcaucaucuccacguuccaccugagcauccccaacuucaaccaguacgaggccauguccugcgacuucaacgggggcaagaucagcgugcaguacaaccucucccacaccuacgcgguggacgccgccaaccacugcgggaccaucgccaacggcguccugcagaccuucaugcggauggcguggggcgggagcuacaucgcccuggacuccggcaaggggagcugggacugcaucaugacguccuaccaguaccucgugauccagaacaccaccugggaggaccacugccaguucagccgccccucccccaucggcuaccuggggcugcucagccagcggacccgcgacaucuacaucagccggcgccugcugggcacguucaccuggacccucuccgacagcgagggcaacgagacccccgggggcuacugccugacgcgguggaugcugaucgaggccgagcucaagugcuucgggaacaccgccguggccaagugcaacgagaagcacgacgaggaguucugcgacaugcugcgccuguucgacuucugcaagcaggcgauccggcgccucaagaccgaggcccagauguccauccagcugaucaacaaggccgucaacgcccugaucaacgaccagcucaucaugaagaaccaccuccgggacaucaugggcaucccguacugcaacuacagcaaguacugcuaccugaaccacaccgugacggggaagaccucccugccccgcugcugccuggugagcaacggcuccuaccugaacgagacccacuucagcgacgacaucgagcagcaggccgacaacaugaucaccgagcuccugcagaaggaguacaucgaccggcagggcaagacgccccuggggcuggucgaccucuucguguucuccaccagcuucuaccugaucuccaucuuccugcaccucgugaagaucccgacccaccgccacaucaccggcaagcccugccccaagccccaccggcugaaccacauggggaucugcagcugcggccuguacaagcacccggggguccccgugaaguggaagcgcugaggacuaguuauaagacugacuagcccgaugggccucccaacgggcccuccuccccuccuugcaccgagauuaaucaaaggcucuuuucagagccaccaaaaaaaaaaaaaaaaaaaaaaaaaaaaaaaaaaaaaaaaaaaaaaaaaaaaaaaaaaaaaaaaagaauu

SEQ ID NO: 41264 - RNA, 1655 nt, Artificial Sequence
  mRNA product Design i-3 (hSL-A64-N5) comprising derived and/or modified sequence from LASV(Lassa virus/H.sapiens-wt/NGA/2016/ISTH_0009;Clade II)__AVO03571__GPCmut12 (opt1)
aggagaaagcuuaccaugggccagaucaucaccuucuuccaggaggugccccacgucaucgaggaggugaugaacaucgugcugaucgcccucagccugcuggccauccucaaggggaucuacaacgucgcgaccugcggccugcuggggcucguguccuuccugcugcucugcggccgcagcugcuccacgaccuacaaggggguguacgagcugcagacccuggagcucgacauggccagccugaacaugugcaugccgcuguccugcaccaagaacaacagccaccacuacaucauggucggcaacgagacgggccucgagcugacccugaccaacaccuccaucaucaaccacaaguucugcaaccucagcgacgcccacaagaagaaccuguacgaccacgcccugauguccaucaucagcacguuccaccucuccauccccaacuucaaccaguacgaggccaugagcugcgacuucaacgggggccggaucuccgugcaguacaaccugagccacuccuacgcgguggacgccgccaaccacugcgggaccaucgccaacggcguccugcagaccuucaugcgcauggcguggggcgggagcuacaucgcccucgacuccggcaaggggagcugggacugcaucaugaccuccuaccaguaccugaucauccagaacacgaccugggaggaccacugccaguucagccggcccagccccaucggcuaccuggggcuccugucccagcgcacccgggacaucuacaucagccgccggcugcucggcaccuucacguggacccuguccgacagcgagggcaacgagacccccgggggcuacugccugacccgcuggaugcucaucgaggccgagcugaagugcuucgggaacacggccguggccaagugcaacgagaagcacgacgaggaguucugcgacaugcugcggcuguucgacuucugcaagcaggcgauccgccggcugaagaccgaggcccagauguccauccagcugaucaacaaggccgugaacgcccucaucaacgaccagcugaucaugaagaaccaccuccgcgacaucaugggcauccccuacugcaacuacagcaaguacugcuaccucaaccacaccgucaccgggaagacgucccugccccggugcugccuggugagcaacggcuccuaccucaacgagacccacuucagcgacgacaucgagcagcaggccgacaacaugaucaccgagcugcugcagaaggaguacaucgaccgccagggcaagaccccgcuggggcucguggaccuguucgucuucuccacgagcuucuaccugaucuccaucuuccuccaccuggugaagaucccgacccaccggcacaucaccggcaagcccugccccaagccccaccgccugaaccacauggggaucugcagcugcggccucuacaaccacccgggggugcccgucaaguggaagcggugaggacuaguuauaagacugacuagcccgaugggccucccaacgggcccuccuccccuccuugcaccgagauuaaucaaaggcucuuuucagagccaccaaaaaaaaaaaaaaaaaaaaaaaaaaaaaaaaaaaaaaaaaaaaaaaaaaaaaaaaaaaaaaaaagaauu

SEQ ID NO: 41265 - RNA, 1655 nt, Artificial Sequence
  mRNA product Design i-3 (hSL-A64-N5) comprising derived and/or modified sequence from LASV(Lassa virus/H.sapiens-wt/NGA/2016/ISTH_0017;Clade II)__AVO03567__GPCmut12 (opt1)
aggagaaagcuuaccaugggccagaucaucaccuucuuccaggaggugccccacgucaucgaggaggugaugaacaucgugcugaucgcccucagccugcuggccauccucaaggggaucuacaacgucgcgaccugcggccuguucgggcugguguccuuccuccugcugugcggccgcagcugcuccacgaccuacaaggggguguacgagcuccagacccuggagcuggacauggccagccucaacaugugcaugccgcuguccugcaccaagaacaacagccaccacuacaucauggucggcaacgagacgggccuggagcucacccugaccaacaccuccaucaucaaccacaaguucugcaaccugagcgacgcccacaagaagaaccucuacgaccacgcccugauguccaucaucagcacguuccaccuguccauccccaacuucaaccaguacgaggccaugagcugcgacuucaacgggggcaagaucuccgugcaguacaaccucagccacaccuacgcgaucgacgccgccaaccacugcgggaccaucgccaacggcgugcugcagaccuucaugcggauggcguggggcggguccuacaucgcccuggacagcggcaagggguccugggacugcaucaugacgagcuaccaguaccucaucauccagaacaccaccugggaggaccacugccaguucucccgccccagccccaucggcuaccuggggcugcucagccagcggacccgcgacaucuacaucucccggcgccugcugggcacguucaccuggacccucagcgacuccgagggcaacgagacccccgggggcuacugccugacgcgguggaugcugaucgaggccgagcucaagugcuucgggaacaccgccgucgccaagugcaacgagaagcacgacgaggaguucugcgacaugcugcgccuguucgacuucugcaagcaggcgauccggcgccucaagaccgaggcccagaugagcauccagcugaucaacaaggccgugaacgcccugaucaacgaccagcucaucaugaagaaccaccuccgggacaucaugggcaucccguacugcaacuacuccaaguacugcuaccugaaccacaccgugacggggaagaccagccugccccgcugcugccuggucuccaacggcagcuaccugaacgagacccacuucuccgacgacaucgagcagcaggccgacaacaugaucaccgagcuccugcagaaggaguacauggaccggcagggcaagacgccccuggggcugguggaccucuucguguucagcaccuccuucuaccugaucagcaucuuccugcaccucguccgcaucccgacccaccggcacgugaucggcaagcccugccccaagccccaccgccugaaccacauggggaucugcuccugcggccuguacaagcacccgggggugcccgucaaguggaagcggugaggacuaguuauaagacugacuagcccgaugggccucccaacgggcccuccuccccuccuugcaccgagauuaaucaaaggcucuuuucagagccaccaaaaaaaaaaaaaaaaaaaaaaaaaaaaaaaaaaaaaaaaaaaaaaaaaaaaaaaaaaaaaaaaagaauu

SEQ ID NO: 41266 - RNA, 1655 nt, Artificial Sequence
  mRNA product Design i-3 (hSL-A64-N5) comprising derived and/or modified sequence from LASV(Lassa virus/H.sapiens-wt/NGA/2018/ISTH_0959;Clade II)__AVV65099__GPCmut12 (opt1)
aggagaaagcuuaccaugggccagaucaucaccuucuuccaggaggugccccacgucaucgaggaggugaugaacaucgugcugaucgcccucagccugcuggccauccucaaggggaucuacaacgucgugaccugcggccuguucgggcugguguccuuccuccugcugugcggccgcagcugcuccacgaccuacaagggggucuacgagcuccagacccuggagcuggacauggcgagccucaacaugugcaugccgcuguccugcaccaagaacaacagccaccacuacaucauggugggcaacgagacgggccuggagcucacccugaccaacaccuccaucaucaaccacaaguucugcaaccugagcgacgcccacaagaagaaccucuacgaccacgcccugauguccaucaucagcacguuccaccuguccauccccaacuucaaccaguacgaggccaugagcugcgacuucaacgggggcaagaucuccgugcaguacaaccucagccacgccuacgcgaucgacgccgccaaccacugcgggaccaucgccaacggcguccugcagaccuucaugcggauggcguggggcggguccuacaucgcccuggacagcggcaagggguccugggacugcaucaugaccagcuaccaguaccucaucauccagaacacgaccugggaggaccacugccaguucucccgccccagccccaucggcuaccuggggcugcucagccagcggacccgcgacaucuacaucucccggcgccugcugggcaccuucacguggacccucagcgacuccgagggcaacgagacccccgggggcuacugccugacccgguggaugcugaucgaggccgagcucaagugcuucgggaacacggccguggccaagugcaacgagaagcacgacgaggaguucugcgacaugcugcgccuguucgacuucugcaagcaggcgauccggcgccucaagaccgaggcccagaugagcauccagcugaucaacaaggccgugaacgcccugaucaacgaccagcucaucaugaagaaccaccuccgggacaucaugggcauccccuacugcaacuacuccaaguacugcuaccugaaccacaccgucaccgggaagacgagccugccccgcugcugccugguguccaacggcagcuaccugaacgagacccacuucuccgacgacaucgagcagcaggccgacaacaugaucaccgagcuccugcagaaggaguacaucgaccggcagggcaagaccccgcuggggcugguggaccucuucgucuucagcacguccuucuaccugaucagcaucuuccugcaccucgugaagaucccgacccaccgccacgugaucggcaagcccugccccaagccccaccggcugaaccacauggggaucugcuccugcggccuguacaagcacccggggguccccgugaaguggaagcgcugaggacuaguuauaagacugacuagcccgaugggccucccaacgggcccuccuccccuccuugcaccgagauuaaucaaaggcucuuuucagagccaccaaaaaaaaaaaaaaaaaaaaaaaaaaaaaaaaaaaaaaaaaaaaaaaaaaaaaaaaaaaaaaaaagaauu

SEQ ID NO: 41267 - RNA, 1655 nt, Artificial Sequence
  mRNA product Design i-3 (hSL-A64-N5) comprising derived and/or modified sequence from LASV(LASV003-NIG-2008;Clade II)__AIT17580__GPCmut12 (opt1)
aggagaaagcuuaccaugggccagaucaucaccuucuuccaggaggugccccacgucaucgaggaggugaugaacaucgugcugaucgcccucagccugcuggccauccucaaggggaucuacaacgucgcgaccugcggccuguucgggcugguguccuuccuccugcugugcggccgcagcugcuccacgaccuacaaggggguguacgagcuccagacccuggagcuggacauggccagccucaacaugugcaugccgcuguccugcaccaagaacaacagccaccacuacaucauggucggcaacgagacgggccuggagcucacccugaccaacaccuccaucaucaaccacaaguucugcaaccugagcgacgcccacaagaagaaccucuacgaccacgcccugauguccaucaucagcacguuccaccuguccauccccaacuucaaccaguacgaggccaugagcugcgacuucaacgggggcaagaucuccgugcaguacaaccucagccacaccuacgcgguggacgccgccaaccacugcgggaccaucgccaacggcguccugcagaccuucaugcggauggcguggggcggguccuacaucgcccuggacagcggcaagggguccugggacugcaucaugacgagcuaccaguaccucaucauccagaacaccaccugggaggaccacugccaguucucccgccccagccccaucggcuaccuggggcugcucagccagcggacccgcgacaucuacaucucccggcgccugcugggcacguucaccuggacccucagcgacuccgagagcaacgagaccccgggcggguacugccugacgcgguggaugcugaucgaggccgagcucaagugcuucggcaacaccgccguggccaagugcaacgagaagcacgacgaggaguucugcgacaugcugcgccuguucgacuucugcaagcaggcgauccggcgccucaaggccgaggcccagauguccauccagcugaucaacaaggccgugaacgcccugaucaacgaccagcucaucaugaagaaccaccuccgggacaucauggggauccccuacugcaacuacagcaaguacugcuaccugaaccacaccgucaccggccgcacgucccugccccggugcugccuggugagcaacggguccuaccugaacgagacccacuucagcgacgacaucgagcagcaggcggacaacaugaucaccgagcuccugcagaaggaguacauggaccgccagggcaagacgccccugggccugguggaccucuucgucuucuccaccagcuucuaccugaucuccaucuuccugcaccucgugaagaucccgacccaccggcacgugaucgggaagcccugccccaagccccaccgccugaaccacaugggcaucugcagcugcgggcuguacaagcacccgggcguccccgugaaguggaagcggugaggacuaguuauaagacugacuagcccgaugggccucccaacgggcccuccuccccuccuugcaccgagauuaaucaaaggcucuuuucagagccaccaaaaaaaaaaaaaaaaaaaaaaaaaaaaaaaaaaaaaaaaaaaaaaaaaaaaaaaaaaaaaaaaagaauu

SEQ ID NO: 41268 - RNA, 1655 nt, Artificial Sequence
  mRNA product Design i-3 (hSL-A64-N5) comprising derived and/or modified sequence from LASV(LASV035-NIG-2009;Clade II)__AIT17588__GPCmut12 (opt1)
aggagaaagcuuaccaugggccagaucaucaccuucuuccaggaggugccccacgucaucgaggaggugaugaacaucgugcugaucgcccucagccugcuggccauccucaaggggaucuacaacgucgcgaccugcggccuguucgggcugguguccuuccuccugcugugcggccgcagcugcuccacgaccuacaaggggguguacgagcuccagacccuggagcuggacauggccagccucaacaugugcaugccgcuguccugcaccaagaacaacagccaccacuacaucauggucggcaacgagacgggccuggagcucacccugaccaacaccuccaucaucaaccacaaguucugcaaccugagcgacgcccacaagaagaaccucuacgaccacgcccugauguccaucaucagcacguuccaccuguccauccccaacuucaaccaguacgaggccaugagcugcgacuucaacgggggcaagaucuccgugcaguacaaccucagccacgcguacgccguggacgccgccaaccacugcgggaccaucgcgaacggcguccugcagaccuucaugcggauggccuggggcggguccuacaucgcccuggacagcggcaagggguccugggacugcaucaugaccagcuaccaguaccucaucauccagaacacgaccugggaggaccacugccaguucucccgccccagccccaucggcuaccuggggcugcucagccagcggacccgcgacaucuacaucucccggcgccugcugggcaccuucacguggacccucagcgacuccgagggcaacgagacccccgggggcuacugccugacccgguggaugcugaucgaggccgagcucaagugcuucgggaacacggccguggcgaagugcaacgagaagcacgacgaggaguucugcgacaugcugcgccuguucgacuucugcaagcaggccauccggcgccucaaggccgaggcccagaugagcauccagcugaucaacaaggccgugaacgcgcugaucaacgaccagcucaucaugaagaaccaccuccgggacaucaugggcauccccuacugcaacuacuccaaguacugcuaccugaaccacaccgucaccgggaagaccagccugccccgcugcugccugguguccaacggcagcuaccugaacgagacgcacuucuccgacgacaucgagcagcaggccgacaacaugaucaccgagcuccugcagaaggaguacaucgaccggcagggcaagaccccgcuggggcugguggaccucuucgucuucagcaccuccuucuaccugaucagcaucuuccugcaccucgugaagaucccgacgcaccgccacgugaucggcaagcccugccccaagccccaccggcugaaccacauggggaucugcuccugcggccuguacaagcacccggggguccccgugaaguggaagcgcugaggacuaguuauaagacugacuagcccgaugggccucccaacgggcccuccuccccuccuugcaccgagauuaaucaaaggcucuuuucagagccaccaaaaaaaaaaaaaaaaaaaaaaaaaaaaaaaaaaaaaaaaaaaaaaaaaaaaaaaaaaaaaaaaagaauu

SEQ ID NO: 41269 - RNA, 1655 nt, Artificial Sequence
  mRNA product Design i-3 (hSL-A64-N5) comprising derived and/or modified sequence from LASV(LASV1000-NIG-2009;Clade II)__AIT17782__GPCmut12 (opt1)
aggagaaagcuuaccaugggccagaucaucaccuucuuccaggaggugccccacgucaucgaggaggugaugaacaucgugcugaucgcccucagccugcuggccauccucaaggggaucuacaacgucgcgaccugcggccuguucgggcugguguccuuccuccugcugugcggccgcagcugcuccacgaccuacaaggggguguacgagcuccagacccuggagcuggacauggccagccucaacaugugcaugccgcuguccugcaccaagaacaacagccaccacuacaucauggucggcaacgagacgggccuggagcucacccugaccaacaccuccaucaucaaccacaaguucugcaaccugagcgacgcccacaagaagaaccucuacgaccacgcccugauguccaucaucagcacguuccaccuguccauccccaacuucaaccaguacgaggccaugagcugcgacuucaacgggggcaagaucuccgugcaguacaaccucagccacaccuacgcgguggacgccgccaaccacugcgggaccaucgccaacggcguccugcagaccuucaugcggauggcguggggcggguccuacaucgcccuggacagcggcaagggguccugggacugcaucaugacgagcuaccaguaccucaucauccagaacaccaccugggaggaccacugccaguucucccgccccagccccaucggcuaccuggggcugcucagccagcggacccgcgacaucuacaucucccggcgccugcugggcacguucaccuggacccucagcgacuccgagggcaacgagacccccgggggcuacugccugacgcgguggaugcugaucgaggccgagcucaagugcuucgggaacaccgccguggccaagugcaacgagaagcacgacgaggaguucugcgacaugcugcgccuguucgacuucugcaagcaggcgaucaagcggcucaagaccgaggcccagaugagcauccagcugaucaacaaggccgugaacgcccugaucaacgaccagcucaucaugaagaaccaccuccgcgacaucaugggcaucccguacugcaacuacuccaaguacugcuaccugaaccacaccgucacggggaagaccagccugccccggugcugccugguguccaacggcagcuaccugaacgagacccacuucuccgacgacaucgagcagcaggccgacaacaugaucaccgagcuccugcagaaggaguacaucgaccgccagggcaagacgccccuggggcugguggaccucuucgucuucagcaccuccuucuaccugaucagcaucuuccugcaccucgugaagaucccgacccaccggcacguggucggcaagcccugccccaagccccaccgccugaaccacauggggaucugcuccugcggccuguacaagcacccgggggugcccgugaaguggaagcggugaggacuaguuauaagacugacuagcccgaugggccucccaacgggcccuccuccccuccuugcaccgagauuaaucaaaggcucuuuucagagccaccaaaaaaaaaaaaaaaaaaaaaaaaaaaaaaaaaaaaaaaaaaaaaaaaaaaaaaaaaaaaaaaaagaauu

SEQ ID NO: 41270 - RNA, 1655 nt, Artificial Sequence
  mRNA product Design i-3 (hSL-A64-N5) comprising derived and/or modified sequence from LASV(LASV221-NIG-2010;Clade II)__AIT17624__GPCmut12 (opt1)
aggagaaagcuuaccaugggccagaucaucaccuucuuccaggaggugccccacgucaucgaggaggugaugaacaucgugcugaucgcccucagccugcuggccauccucaaggggaucuacaacgucgcgaccugcggccuguucgggcugguguccuuccuccugcugugcggccgcagcugcuccacgaccuacaaggggguguacgagcuccagacccuggagcuggacauggccagccucaacaugugcaugccgcuguccugcaccaagaacaacagccaccacuacaucauggucggcaacgagacgggccuggagcucacccugaccaacaccuccaucaucaaccacaaguucugcaaccugagcgacgcccacaagaagaaccucuacgaccacgcccugauguccaucaucagcacguuccaccuguccauccccaacuucaaccaguacgaggccaugagcugcgacuucaacgggggcaagaucuccgugcaguacaaccucagccacaccuacgcgaucgacgccgccaaccacugcgggaccaucgccaacggcgugcugcagaccuucaugcggauggcguggggcggguccuacaucgcccuggacagcggcaagggguccugggacugcaucaugacgagcuaccaguaccucaucauccagaacaccaccugggaggaccacugccaguucucccgccccagccccaucggcuaccuggggcugcucagccagcggacccgcgacaucuacaucucccggcgccugcugggcacguucaccuggacccucagcgacuccgagggcaacgagacccccgggggcuacugccugacgcgguggaugcugaucgaggccgagcucaagugcuucgggaacaccgccgucgccaagugcaacgagaagcacgacgaggaguucugcgacaugcugcgccuguucgacuucugcaagcaggcgauccggcgccucaagaccgaggcccagaugagcauccagcugaucaacaaggccgugaacgcccugaucaacgaccagcucaucaugaagaaccaccuccgggacaucaugggcaucccguacugcaacuacuccaaguacugcuaccugaaccacaccgugacggggaagaccagccugccccgcugcugccuggucuccaacggcagcuaccugaacgagacccacuucuccgacgacaucgagcagcaggccgacaacaugaucaccgagaugcuccagaaggaguacauggaccggcagggcaagacgccccuggggcugguggaccuguucguguucagcaccuccuucuaccucaucagcaucuuccugcaccuggucaagaucccgacccaccgccacgugaucggcaagcccugccccaagccccaccggcucaaccacauggggaucugcuccugcggccuguacaagcacccgggggugcccgucaaguggaagcgcugaggacuaguuauaagacugacuagcccgaugggccucccaacgggcccuccuccccuccuugcaccgagauuaaucaaaggcucuuuucagagccaccaaaaaaaaaaaaaaaaaaaaaaaaaaaaaaaaaaaaaaaaaaaaaaaaaaaaaaaaaaaaaaaaagaauu

SEQ ID NO: 41271 - RNA, 1655 nt, Artificial Sequence
  mRNA product Design i-3 (hSL-A64-N5) comprising derived and/or modified sequence from LASV(LASV237-NIG-2010;Clade II)__AIT17638__GPCmut12 (opt1)
aggagaaagcuuaccaugggccagaucaucaccuucuuccaggaggugccccacgucaucgaggaggugaugaacaucgugcugaucgcccucagccugcuggccauccucaaggggaucuacaacgucgcgaccugcggccuguucgggcugguguccuuccuccugcugugcggccgcagcugcuccacgaccuacaaggggguguacgagcuccagacccuggagcuggacauggccagccucaacaugugcaugccgcuguccugcaccaagaacaacagccaccacuacaucauggucggcaacgagacgggccuggagcucacccugaccaacaccuccaucaucaaccacaaguucugcaaccugagcgacgcccacaagaaggaccucuacgaccacgcccugauguccaucaucagcacguuccaccuguccauccccaacuucaaccaguacgaggccaugagcugcgacuucaacgggggcaagaucuccgugcaguacaaccucagccacaccuacgcgguggacgccgccaaccacugcgggaccaucgccaacggcguccugcagaccuucaugcggauggcguggggcggguccuacaucgcccuggacagcggcaagggguccugggacugcaucaugacgagcuaccaguaccucaucauccagaacaccaccugggaggaccacugccaguucucccgccccagccccaucggcuaccuggggcugcucagccagcggacccgcgacaucuacaucucccggcgccugcugggcacguucaccuggacccucagcgacuccgagggcaacgagacccccgggggcuacugccugacgcgguggaugcugaucgaggccgagcucaagugcuucgggaacaccgccguggccaagugcaacgagaagcacgacgaggaguucugcgacaugcugcgccuguucgacuucugcaagcaggcgauccggcgccucaagaccgaggcccagaugagcauccagcugaucaacaaggccgugaacgcccugaucaacgaccagcucaucaugaagaaccaccuccgggacaucaugggcaucccguacugcaacuacuccaaguacugcuaccugaaccacaccgucacggggaagaccagccugccccgcugcugccugguguccaacggcagcuaccugaacgagacccacuucuccgacgacaucgagcagcaggccgacaacaugaucaccgagcuccugcagaaggaguacauggaccggcagggcaagacgccccuggggcugguggaccucuucgucuucagcaccuccuucuaccugaucagcaucuuccugcaccucaucaagaucccgacccaccgccacaucaccggcaagcccugccccaagccccaccggcugaaccacauggggaucugcuccugcggccuguacaagcacccgggggugcccgugaaguggaagcgcugaggacuaguuauaagacugacuagcccgaugggccucccaacgggcccuccuccccuccuugcaccgagauuaaucaaaggcucuuuucagagccaccaaaaaaaaaaaaaaaaaaaaaaaaaaaaaaaaaaaaaaaaaaaaaaaaaaaaaaaaaaaaaaaaagaauu

SEQ ID NO: 41272 - RNA, 1655 nt, Artificial Sequence
  mRNA product Design i-3 (hSL-A64-N5) comprising derived and/or modified sequence from LASV(LASV253-NIG-2011;Clade II)__AIT17670__GPCmut12 (opt1)
aggagaaagcuuaccaugggccagaucaucaccuucuuccaggaggugccccacgucaucgaggaggugaugaacaucgugcugaucgcccucagccugcuggccauccucaaggggaucuacaacgucgcgaccugcggccuguucgggcugguguccuuccuccugcugugcggccgcagcugcuccacgaccuacaaggggguguacgagcuccagacccuggagcuggacauggccagccucaacaugugcaugccgcuguccugcaccaagaacaacagccaccacuacaucauggucggcaacgagacgggccuggagcucacccugaccaacaccuccaucaucaaccacaaguucugcaaccugagcgacgcccacaagaagaaccucuacgaccacgcccugauguccaucaucagcacguuccaccuguccauccccaacuucaaccaguacgaggccaugagcugcgacuucaacgggggcaagaucuccgugcaguacaaccucagccacaccuacgcgguggacgccgccaaccacugcgggaccaucgccaacggcguccugcagaccuucaugcggauggcguggggcggguccuacaucgcccuggacagcggcaagggguccugggacugcaucaugacgagcuaccaguaccucaucauccagaacaccaccugggaggaccacugccaguucucccgccccagccccaucggcuaccuggggcugcucagccagcggacccgcgacaucuacaucucccggcgccugcugggcacguucaccuggacccucagcgacuccgagggcaacgagacccccgggggcuacugccugacgcgguggaugcugaucgaggccgagcucaagugcuucgggaacaccgccguggccaagugcaacgagaagcacgacgaggaguucugcgacaugcugcgccuguucgacuucugcaagcaggcgauccggcgccucaaggccgaggcccagaugagcauccagcugaucaacaaggccgugaacgcccugaucaacgaccagcucaucaugaagaaccaccuccgggacaucaugggcauccccuacugcaacuacuccaaguacugcuaccugaaccacaccgucaccgggcgcacgagccugccccggugcugccugguguccaacggcagcuaccugaacgagacccacuucuccgacgacaucgagcagcaggcggacaacaugaucaccgagcuccugcagaaggaguacaucgaccgccagggcaagaccccgcuggggcugguggaccucuucgucuucagcacguccuucuaccugaucagcaucuuccugcaccucgugaagaucccgacccaccggcacaucaucggcaagcccugccccaagccccaccgccugaaccacauggggaucugcuccugcggccuguacaagcacccgggggugcccgucaaguggaagcggugaggacuaguuauaagacugacuagcccgaugggccucccaacgggcccuccuccccuccuugcaccgagauuaaucaaaggcucuuuucagagccaccaaaaaaaaaaaaaaaaaaaaaaaaaaaaaaaaaaaaaaaaaaaaaaaaaaaaaaaaaaaaaaaaagaauu

SEQ ID NO: 41273 - RNA, 1655 nt, Artificial Sequence
  mRNA product Design i-3 (hSL-A64-N5) comprising derived and/or modified sequence from LASV(LASV254-NIG-2011;Clade II)__AIT17674__GPCmut12 (opt1)
aggagaaagcuuaccaugggccagaucaucaccuucuuccaggaggugccccacgucaucgaggaggugaugaacaucgugcugaucgcccucagccugcuggccauccucaaggggaucuacaacgucgcgaccugcggccuguucgggcugguguccuuccuccugcugugcggccgcagcugcuccacgaccuacaaggggguguacgagcuccagacccuggagcuggacaugaccaaccucaacaugugcaugccgcugagcugcacgaagaacaacucccaccacuacaucauggucggcaacgagaccggccuggagcucacccugaccaacacgagcaucaucaaccacaaguucugcaaccuguccgacgcccacaagaagaaccucuacaaccacgcccugaugagcaucaucuccaccuuccaccugagcauccccaacuucaaccaguacgaggccauguccugcgacuucaacgggggcaagaucagcgugcaguacaaccucucccacagcuacgccguggacgcggccaaccacugcgggaccaucgccaacggcguccugcagaccuucaugcggauggccuggggcggguccuacaucgcgcuggacagcggcaaggggaacugggacugcaucaugacguccuaccaguaccucaucauccagaacaccaccugggaggaccacugccaguucagccgccccucccccaucggcuaccuggggcugcucagccagcggacccgcgacaucuacaucagccggcgccugcugggcacguucaccuggacccucuccgacagcgagggcaacgagacccccgggggcuacugccugacgcgguggaugcugaucgaggccgagcucaagugcuucgggaacaccgccguggccaagugcaacgagaagcacgacgaggaguucugcgacaugcugcgccuguucgacuucugcaagcaggccauccggcgccucaagaccgaggcgcaggccaacauccagcugaucaacaaggccgugaacgcccugaucaacgaccagcucaucaugaagaaccaccuccgggacaucaugggcaucccguacugcaacuacuccaaguacugcuaccugaaccacaccgucacggggaagaccagccugccccgcugcugccugguguccaacggcagcuaccugaacgagacccacuucuccgacgacaucgagcagcaggccgacaacaugaucaccgagcuccugcagaaggaguacauggaccggcagggcaagacgccccuggggcugguggaccucuucgucuucagcaccuccuucuaccugaucagcaucuuccugcaccucgugaagaucccgacccaccgccacgugaucggcaagcccugccccaagccccaccggcugaaccacauggggaucugcuccugcggccuguacaagcacccggggguccccgugaaguggaagcgcugaggacuaguuauaagacugacuagcccgaugggccucccaacgggcccuccuccccuccuugcaccgagauuaaucaaaggcucuuuucagagccaccaaaaaaaaaaaaaaaaaaaaaaaaaaaaaaaaaaaaaaaaaaaaaaaaaaaaaaaaaaaaaaaaagaauu

SEQ ID NO: 41274 - RNA, 1655 nt, Artificial Sequence
  mRNA product Design i-3 (hSL-A64-N5) comprising derived and/or modified sequence from LASV(Nig08-A19;Clade III)__ADU56618__GPCmut12 (opt1)
aggagaaagcuuaccaugggccagaucgugaccuucuuccaggaggucccccacgugaucgaggaggugaugaacaucguccugaucgcccucagcauccuggccauccugaaggggcucuacaacaucgcgaccugcggccugaucgggcuggugacguuccuccugcuguccggccgcagcugcuccaugaccuacaaggggguguacgagcuccagacccuggagcugaacaugaacacccucaacaugugcaugccgcugagcugcacgaagaacaacucccaccacuacaucauggucggcaacgagaccggccuggagcucacccugaccaacacgagccugcuccaccacaaguucugcaaccuguccgacgcccacaagaagaaccuguacgaccacacccucaugagcaucaucuccaccuuccaccugagcauccccaacuucaaccaguacgaggccauguccugcgacuucaacgggggcaagaucaccgugcaguacaaccugagccacuccuacgccaucgacgccgcgaaccacugcgggacgguggccaacggcguccuccagaccuucaugcggauggccuggggcgggagcuacaucgcccuggacuccggccgcgggaagugggacugcaucaugaccagcuaccaguaccugaucauccagaacaccacgugggaggaccacugccaguucucccggcccagccccaucggcuaccucgggcugcugucccagcgcacccgggacaucuacaucagccgccggcuccugggcaccuucaccuggacgcugagcgacuccgagggcaacgagacccccgggggcuacugccucacccgcuggaugcugaucgaggcggagcugaagugcuucgggaacaccgccguggccaagugcaacgagaagcacgacgaggaguucugcgacaugcuccggcuguucgacuucugcaagcaggccauccgccggcugaaggccgaggcgcagaugagcauccagcucaucaacaaggccgugaacgcccugaucaacgaccagcugaucaugaagaaccaccuccgcgacaucaugggcauccccuacugcaacuacuccaaguacugcuaccugaaccacacgagcaccgggcggaccucccugccccgcugcugccucgucagcaacggcuccuaccugaacgagacccacuucagcgacgacaucgagcagcaggccgacaacaugaucacggagaugcugcagaaggaguaccuggaccggcagggcaagaccccgcucgggcugguggaccuguucguguucuccaccagcuucuaccucaucuccaucuuccugcaccuggucaagaucccgacccaccgccacaucgugggcaagcccugccccaagccccaccggcucaaccacauggggaucugcagcugcggccuguacaagcagccgggggugcccguccgcuggaagcggugaggacuaguuauaagacugacuagcccgaugggccucccaacgggcccuccuccccuccuugcaccgagauuaaucaaaggcucuuuucagagccaccaaaaaaaaaaaaaaaaaaaaaaaaaaaaaaaaaaaaaaaaaaaaaaaaaaaaaaaaaaaaaaaaagaauu

SEQ ID NO: 41275 - RNA, 1658 nt, Artificial Sequence
  mRNA product Design i-3 (hSL-A64-N5) comprising derived and/or modified sequence from LASV(G1180-SLE-2010;Clade IV)__AIT17168__GPCmut12 (opt1)
aggagaaagcuuaccaugggccagaucgugaccuucuuccaggaggucccccacgugaucgaggaggugaugaacaucguccugaucgcccucagcauccuggccgugcugaaggggcucuacaacuucgcgaccugcggccugguggggcugcucacguuccugcugcucugcggccgcuccugcaccgccagccgguacaagggggucuacgagcugcagacccuggagcucaacauggagacccugaacaugugcaugccgcuguccugcacgaagaacaacagccaccacuacaucauggugggcaacgagaccggccucgagcugacccugaccaacacguccaucaucaaccacaaguucugcaaccucagcgacgcccacaagaagaaccuguacgaccacgcccugauguccaucaucagcaccuuccaccucuccauccccaacuucaaccaguacgaggccaugagcugcgacuucaacgggggcaagaucuccgugcaguacaaccugagccacuccuacgcgggggacgccgccaaccacugcggcaccgucgccaacggggugcugcagaccuucaugcgcauggcguggggcggcagcuacaucgcccucgacuccgggcacggcagcugggacugcaucaugacguccuaccaguaccugaucauccagaacaccaccugggaggaccacugccaguucagccggcccucccccaucggguaccugggccuccugagccagcgcacccgggacaucuacaucagccgccggcugcucggcacguucaccuggacccuguccgacagcgaggggaaggacaccccgggcggguacugccugacgcgcuggaugcucaucgaggccgagcugaagugcuucggcaacaccgccguggccaagugcaacgagaagcacgacgaggaguucugcgacaugcugcggcuguucgacuucugcaagcaggcgauccagcgccugaaggccgaggcccagauguccauccagcugaucaacaaggccgucaacgcccucaucaacgaccagcugaucaugaagaaccaccuccgggacaucauggggauccccuacugcaacuacagcaaguacugcuaccucaaccacaccaccacgggcaagaccucccugcccaagugcugccuggugagcaacggcuccuaccucaacgagacccacuucagcgacgacaucgagcagcaggcggacaacaugaucaccgagaugcugcagaaggaguacauggagcgccaggggaagacgccccugggccugguggaccucuucgucuucuccaccagcuucuaccugaucuccaucuuccugcaccucgugaagaucccgacccaccggcacaucgugggcaagagcugccccaagccccaccgccugaaccacauggggaucugcuccugcgggcuguacaagcagcccggcgucccggugaaguggaagcggugaggacuaguuauaagacugacuagcccgaugggccucccaacgggcccuccuccccuccuugcaccgagauuaaucaaaggcucuuuucagagccaccaaaaaaaaaaaaaaaaaaaaaaaaaaaaaaaaaaaaaaaaaaaaaaaaaaaaaaaaaaaaaaaaagaauu

SEQ ID NO: 41276 - RNA, 1658 nt, Artificial Sequence
  mRNA product Design i-3 (hSL-A64-N5) comprising derived and/or modified sequence from LASV(G1442-SLE-2011;Clade IV)__AIT17180__GPCmut12 (opt1)
aggagaaagcuuaccaugggccagaucgugaccuucuuccaggaggucccccacgugaucgaggaggugaugaacaucguccugaucgcccucagcauccuggccgugcugaaggggcucuacaacguggcgaccugcggccugaucgggcuggucaccuuccuccugcugugcggccgcuccugcaccaccacccucuacaaggggguguacgagcugcagacgcuggagcucaacauggagacccugaacaugugcaugccgcugagcugcaccaagaacaacucccaccacuacauccgggugggcaacgagaccggccucgagcugacgcugaccaacaccagcaucaucaaccacaaguucugcaaccucuccgacgcccacaagaagaaccuguacgaccacgcccugaugagcaucaucuccaccuuccaccucagcauccccaacuucaaccaguacgaggccauguccugcgacuucaacgggggcaagaucagcguccaguacaaccugucccacagcuacgccggggacgcggccaaccacugcggcacgguggccaacggggugcugcagaccuucaugcgcauggccuggggcggcuccuacaucgcgcucgacagcgggcggggcaacugggacugcaucaugaccuccuaccaguaccugaucauccagaacaccacgugggacgaccacugccaguucagccgccccucccccaucggguaccugggccuccugagccagcggacccgcgacgucuacaucucccggcgccugcucggcaccuucaccuggacgcugagcgacagcgaggggaaggacaccccgggcggguacugccugacccgguggaugcucaucgaggccgagcugaagugcuucggcaacaccgccguggccaagugcaacgagaagcacgacgaggaguucugcgacaugcugcgccucuucgacuucugcaagcaggccauccagcggcugaaggcggaggcccagauguccauccagcugaucaacaaggccgugaacgcccucaucaacgaccagcugaucaugaagaaccaccuccgcgacaucauggggauccccuacugcaacuacagcaaguacugcuaccugaacaacacggccaccggcaagaccucccugcccaagugcugccugaucagcaacggcuccuaccucaacgagacccacuucagcgacgacaucgagcaggaggcggacaacaugaucacggagaugcugcagaaggaguacauggagcggcaggggaagacgccccugggccuggucgaccucuucguguucuccaccagcuucuaccugaucuccaucuuccugcaccucgugaagaucccgacccaccgccacaucgucggcaagagcugccccaagccccaccggcugaaccacauggggaucugcuccugcgggcuguacaagcagcccggcgugccggugcgcuggaagcggugaggacuaguuauaagacugacuagcccgaugggccucccaacgggcccuccuccccuccuugcaccgagauuaaucaaaggcucuuuucagagccaccaaaaaaaaaaaaaaaaaaaaaaaaaaaaaaaaaaaaaaaaaaaaaaaaaaaaaaaaaaaaaaaaagaauu

SEQ ID NO: 41277 - RNA, 1658 nt, Artificial Sequence
  mRNA product Design i-3 (hSL-A64-N5) comprising derived and/or modified sequence from LASV(G3010-SLE-2013;Clade IV)__AIT17344__GPCmut12 (opt1)
aggagaaagcuuaccaugggccagaucgugaccuucuuccaggaggucccccacgugaucgaggaggugaugaacaucguccugaucgcccucagcauccuggccgugcugaaggggcucuacaacuucgcgaccugcggccugguggggcuggucacguuccuccugcugugcggccgcuccugcaccaccagccucuacaaggggguguacgagcugcagacccuggagcucaacauggagacgcugaacaugugcaugccgcuguccugcaccaagaacaacagccaccacuacaucauggugggcaacgagaccggccucgagcugacccugacgaacaccuccaucaucaaccacaaguucugcaaccucagcgacgcccacaagaagaaccuguacaaccacgcccugauguccaucaucagcaccuuccaccucuccauccccaacuucaaccaguacgaggccaugagcugcgacuucaacgggggcaagaucuccguccaguacaaccugagccacuccuacgccggggacgcggccagccacugcggcaccguggccaacggggugcugcagacguucaugcggauggccuggggcggcuccuacaucgcgcucgacagcggguacggcaagugggacugcaucaugaccuccuaccaguaccugaucauccagaacaccaccugggaggaccacugccaguucagccgccccucccccaucggguaccugggccuccugagccagcggacgcgcgacaucuacaucagccggcgccugcucggcaccuucaccuggacccuguccgacagcgaggggaaggacacgccgggcggguacugccugacccgguggaugcucaucgaggccgagcugaagugcuucggcaacaccgccgucgccaagugcaacgagaagcacgacgaggaguucugcgacaugcugcgccucuucgacuucugcaagcaggccauccagcggcugaagaccgaggcgcagauguccauccagcugaucaacaaggccgugaacgcccucaucaacgaccagcugaucaugaagaaccaccuccgcgacaucauggggauccccuacugcaacuacagcaaguacugcuaccugaaccacacgaccaccggcaagaccucccugcccaagugcugccuggugagcaacggcuccuaccucaacgagacgcacuucagcgacgacaucgagcagcaggccgacaacaugaucaccgagaugcugcagaaggaguacauggagcggcaggggaagacgccccugggccuggucgaccucuucguguucuccaccagcuucuaccugaucuccaucuuccugcaccucgugaagaucccgacccaccgccacaucgucggcaagagcugccccaagccccaccggcugaaccacauggggaucugcuccugcgggcuguacaagcagcccggcgugccggugcgcuggaagcggugaggacuaguuauaagacugacuagcccgaugggccucccaacgggcccuccuccccuccuugcaccgagauuaaucaaaggcucuuuucagagccaccaaaaaaaaaaaaaaaaaaaaaaaaaaaaaaaaaaaaaaaaaaaaaaaaaaaaaaaaaaaaaaaaagaauu

SEQ ID NO: 41278 - RNA, 1658 nt, Artificial Sequence
  mRNA product Design i-3 (hSL-A64-N5) comprising derived and/or modified sequence from LASV(G502-SLE-2009;Clade IV)__AIT17126__GPCmut12 (opt1)
aggagaaagcuuaccaugggccagaucgugaccuucuuccaggaggucccccacgugaucgaggaggugaugaacaucguccugaucgcccucagcauccuggccgugcugaaggggcucuacaacuucgcgaccugcggccugguggggcugcucacguuccugcugcucugcggccgcuccugcaccaccgggcuguacaagggcgucuacgagcugcagacccucgagcugaacauggagacgcugaacaugugcaugccgcucagcugcaccaagaacaacucccaccacuacaucauggugggcaacgagaccgggcuggagcugacccucacgaacaccagcaucaucaaccacaaguucugcaaccuguccgacgcccacaagaagaaccuguacgaccacgcccucaugagcaucaucuccaccuuccaccugagcauccccaacuucaaccaguacgaggccauguccugcgacuucaacggcgggaagaucagcgugcaguacaaccugucccacagcuacgccggcgacgcggccgaccacugcgggaccgucgccaacggcgugcuccagacguucaugcggauggccuggggcggguccuacaucgcgcuggacagcggccgcgggcggugggacugcaucaugaccuccuaccaguaccugaucauccagaacaccaccugggaggaccacugccaguucagccgccccucccccaucggcuaccucggccugcugagccagcggacgcgcgacaucuacaucucccggcgccuccuggggaccuucaccuggacccugagcgacagcgagggcaaggacacgcccgggggcuacugccucacccgguggaugcugaucgaggccgagcugaagugcuucgggaacaccgccguggccaagugcaacgagaagcacgacgaggaguucugcgacaugcuccgccuguucgacuucugcaagcaggccauccagcggcugaaggcggaggcccagauguccauccagcucaucaacaaggccgucaacgcccugaucaacgaccagcuggugaugaagaaccaccuccgcgacaucaugggcauccccuacugcaacuacagccgguacugcuaccugaaccacaccacgaccggccgcaccucccugcccaagugcugccucgugagcaacggguccuaccugaacgagacccacuucagcgacgacaucgagcagcaggccgacaacaugaucacggagaugcugcagaaggaguacauggagcggcagggcaagaccccgcuggggcucgucgaccuguucguguucuccaccagcuucuaccugaucuccaucuuccuccaccuggugaagaucccgacccaccgccacaucgucggcaagagcugccccaagccccaccggcugaaccacauggggaucugcuccugcggccucuacaagcagcccggcgugccggugaaguggaagcgcugaggacuaguuauaagacugacuagcccgaugggccucccaacgggcccuccuccccuccuugcaccgagauuaaucaaaggcucuuuucagagccaccaaaaaaaaaaaaaaaaaaaaaaaaaaaaaaaaaaaaaaaaaaaaaaaaaaaaaaaaaaaaaaaaagaauu

SEQ ID NO: 41279 - RNA, 1658 nt, Artificial Sequence
  mRNA product Design i-3 (hSL-A64-N5) comprising derived and/or modified sequence from LASV(G733-SLE-2010;Clade IV)__AIT17154__GPCmut12 (opt1)
aggagaaagcuuaccaugggccagaucgugaccuucuuccaggaggucccccacgugaucgaggaggugaugaacaucguccugaucgcccucagcauccuggccgugcugaaggggcucuacaacuucgcgaccugcggcaucguggggcuggucuccuuccugcuccugugcggccgcagcugcacgaccucccuguacaaggggguguacgagcuccagacccuggagcugaacauggagacccucaacaugugcaugccgcugagcugcacgaagaacaacucccaccacuacaucauggugggcaacgagaccggccuggagcucacccugaccaacacgagcaucaucaaccacaaguucugcaaccuguccgacgcccacaagaagaaccucuacgaccacgcccugaugagcaucaucuccaccuuccaccugagcauccccaacuucaaccaguacgaggccauguccugcgacuucaacgggggcaagaucagcguccaguacaaccucucccacagcuacgccggggacgcggccaaccacugcggcaccaucgccaacggggugcugcagaccuucaugcggauggccuggggcggcuccuacaucgcgcuggacagcgggcgcgaccggugggacugcaucaugacguccuaccaguaccucaucauccagaacaccaccugggaggaccacugccaguucagccgccccucccccaucggcuaccuggggcugcucagccagcggacccgcgacaucuacaucagccggcgccugcugggcacguucaccuggacccucuccgacagcgagggcaaggacacccccgggggcuacugccugacgcgguggaugcugaucgaggccgagcucaagugcuucgggaacaccgccguggccaagugcaacgagaagcacgacgaggaguucugcgacaugcugcgccuguucgacuucugcaagcaggccauccagcggcucaaggcggaggcccagauguccauccagcugaucaacaaggccgucaacgcccugaucaacgaccagcucaucaugaagaaccaccuccgcgacaucaugggcaucccguacugcaacuacagcaaguacugcuaccugaaccacaccaccacggggaagaccucccugcccaagugcugccuggugagcaacggcuccuaccugaacgagacccacuucagcgacgacaucgagcagcaggccgacaacaugaucaccgagaugcuccagaaggaguacauggagcggcagggcaagacgccccuggggcugguggaccuguucgucuucuccaccagcuucuaccucaucuccaucuuccugcaccuggugaagaucccgacccaccgccacguggucggcaagagcugccccaagccccaccggcucaaccacauggggaucugcuccugcggccuguacgggcagcccggcgugccggugaaguggaagcgcugaggacuaguuauaagacugacuagcccgaugggccucccaacgggcccuccuccccuccuugcaccgagauuaaucaaaggcucuuuucagagccaccaaaaaaaaaaaaaaaaaaaaaaaaaaaaaaaaaaaaaaaaaaaaaaaaaaaaaaaaaaaaaaaaagaauu

SEQ ID NO: 41280 - RNA, 1658 nt, Artificial Sequence
  mRNA product Design i-3 (hSL-A64-N5) comprising derived and/or modified sequence from MOPV/LASV reassortant(IGS-1;Clade IV)__AFY05576__GPCmut12 (opt1)
aggagaaagcuuaccaugggccagaucgugaccuucuuccaggaggucccccacgugaucgaggaggugaugaacaucguccugaucgcccucagcgugcuggccgugcugaaggggcucuacaacuucgcgaccugcggccuggucgggcuggugaccuuccuccugcugugcggccgcuccugcaccaccagccucuacaaggggguguacgagcugcagacccuggagcucaacauggagacgcugaacaugugcaugccgcuguccugcaccaagaacaacagccaccacuacaucauggucggcaacgagaccggccucgagcugacccugacgaacaccuccaucaucaaccacaaguucugcaaccucagcgacgcccacaagaagaaccuguacgaccacgcccugauguccaucaucagcaccuuccaccucuccauccccaacuucaaccaguacgaggccaugagcugcgacuucaacgggggcaagaucuccgugcaguacaaccugagccacuccuacgccggggacgcggccaaccacugcggcaccguggccaacgggguccugcagacguucaugcggauggccuggggcggcagcuacaucgcgcucgacuccgggcgcggcaacugggacugcaucaugaccagcuaccaguaccugaucauccagaacaccaccugggaggaccacugccaguucucccggcccagccccaucggguaccugggccuccugucccagcgcacgcgggacaucuacaucagccgccggcugcucggcaccuucaccuggacccugagcgacuccgagggggaggacacgccgggcggguacugccugacccgcuggaugcucaucgaggccgagcugaagugcuucggcaacaccgccguggccaagugcaacgagaagcacgacgaggaguucugcgacaugcugcggcuguucgacuucugcaagcaggccauccagcgccugaaggcggaggcccagaugagcauccagcugaucaacaaggccgugaacgcccucaucaacgaccagcugaucaugaagaaccaccuccgggacaucauggggauccccuacugcaacuacuccaaguacugcuaccucaaccacaccacgaccggccgcaccagccugcccaagugcugccuggucuccaacggcagcuaccucaacgagacccacuucuccgacgacaucgagcagcaggccgacaacaugaucacggagaugcugcagaaggaguacauggagcggcaggggaagacgccccugggccugguggaccucuucguguucagcaccuccuucuaccugaucagcaucuuccugcaccucgucaagaucccgacccaccgccacaucguggggaaguccugccccaagccccaccggcugaaccacaugggcaucugcagcugcgggcuguacaagcagcccggcgugccggucaaguggaagcgcugaggacuaguuauaagacugacuagcccgaugggccucccaacgggcccuccuccccuccuugcaccgagauuaaucaaaggcucuuuucagagccaccaaaaaaaaaaaaaaaaaaaaaaaaaaaaaaaaaaaaaaaaaaaaaaaaaaaaaaaaaaaaaaaaagaauu

SEQ ID NO: 41281 - RNA, 1658 nt, Artificial Sequence
  mRNA product Design i-3 (hSL-A64-N5) comprising derived and/or modified sequence from LASV(LM765-SLE-2012;Clade IV)__AIT17814__GPCmut12 (opt1)
aggagaaagcuuaccaugggccagaucgugaccuucuuccaggaggucccccacgugaucgaggaggugaugaacaucguccugaucgcccucagcauccuggccgugcugaaggggcucuacaacuucgcgaccugcggccugguggggcuggucacguuccuccugcugugcggccgcuccugcaccaccagccucuacaaggggguguacgagcugcagacccuggagcucaacauggagacgcugaacaugugcaugccgcuguccugcaccaagaacaacagccaccacuacaucauggugggcaacgagaccggccucgagcugacccugacgaacaccuccaucaucgaccacaaguucugcaaccucagcgacgcccaccggaagaaccuguacgaccacgcccugauguccaucaucagcaccuuccaccucuccauccccaacuucaaccaguacgaggccaugagcugcgacuucaacgggggcaagaucuccguccaguacaaccugagccacuccuacgccaaggacgcggccgaccacugcgggaccguggccaacggcgugcugcagacguucaugcgcauggccuggggcgggagcuacaucgcgcucgacuccggccgggggcgcugggacugcaucaugaccagcuaccaguaccugaucauccagaacaccaccugggaggaccacugccaguucucccggcccagccccaucggcuaccuggggcuccugucccagcgcacgcgggacaucuacaucagccgccggcugcucggcaccuucaccuggacccugagcgacuccgagggcaaggacacgcccgggggcuacugccugacccgcuggaugcucaucgaggccgagcugaagugcuucgggaacaccgccgucgccaagugcaacgagaagcacgacgaggaguucugcgacaugcugcggcuguucgacuucugcaagcaggccauccagcgccugaaggcggaggcccagaugagcauccagcugaucaacaaggccgugaacgcccucaucaacgaccagcugaucaugaagaaccaccuccgggacaucaugggcauccccuacugcaacuacuccaaguacugcuaccucaaccacaccacgaccgggaagaccagccugcccaagugcugccugguguccaacggcagcuaccucaacgagacccacuucuccgacgacaucgagcagcaggccgacaacaugaucacggagaugcugcagaaggaguacauggagcgccagggcaagaccccgcuggggcuggucgaccucuucguguucagcaccuccuucuaccugaucagcaucuuccugcaccucgugaagaucccgacccaccggcacaucgucggcaagcccugccccaagccccaccgccugaaccacauggggaucugcuccugcggccuguacaagcagccgggggugcccgugaaguggaagcggugaggacuaguuauaagacugacuagcccgaugggccucccaacgggcccuccuccccuccuugcaccgagauuaaucaaaggcucuuuucagagccaccaaaaaaaaaaaaaaaaaaaaaaaaaaaaaaaaaaaaaaaaaaaaaaaaaaaaaaaaaaaaaaaaagaauu

SEQ ID NO: 41282 - RNA, 1658 nt, Artificial Sequence
  mRNA product Design i-3 (hSL-A64-N5) comprising derived and/or modified sequence from LASV(LM776-SLE-2012;Clade IV)__AIT17824__GPCmut12 (opt1)
aggagaaagcuuaccaugggccagaucgugaccuucuuccaggaggucccccacgugaucgaggaggugaugaacaucguccugaucgcccucagcauccuggccgugcugaaggggcucuacaacuucgcgaccugcggccugguggggcuggucaccuuccuccugcugugcggccgcuccugcaccaccagcguguacaaggggguguacgagcuccagacccuggagcugaacauggagacgcucaacaugugcaugccgcuguccugcaccaagaacaacagccaccacuacaucauggucggcaacgagaccggccuggagcucacccugacgaacaccuccaucaucaaccacaaguucugcaaccugagcgacgcccacaagaagaaccucuacgaccacgcccugauguccaucaucagcaccuuccaccuguccauccccaacuucaaccaguacgaggccaugagcugcgacuucaacgggggcaagaucuccgugcaguacaaccucagccacuccuacgccggggacgcggccaaccacugcggcaccguggccaacgggguccugcagacguucaugcggauggccuggggcggcagcuacaucgcgcuggacuccgggcacggcaagugggacugcaucaugaccagcuaccaguaccucaucauccagaacaccaccugggaggaccacugccaguucucccgccccagccccaucggguaccugggccugcucucccagcggacgcgcgacaucuacaucagccggcgccugcugggcaccuucaccuggacccucagcgacuccgaggggaaggacacgccgggcggguacugccugacccgguggaugcugaucgaggccgagcucaagugcuucggcaacaccgccguggccaagugcaacgagaagcacgacgaggaguucugcgacaugcugcgccuguucgacuucugcaagcaggccauccagcggcucaaggcggaggcccagaugagcauccagcugaucaacaaggccgugaacgcccugaucaacgaccagcucaucaugaagaaccaccuccgcgacaucauggggauccccuacugcaacuacuccaaguacugcuaccugaaccacaccacgaccggcaagaccagccugcccaagugcugccuggucuccaacggcagcuaccugaacgagacccacuucuccgacgacaucgagcagcaggccgacaacaugaucacggagaugcuccagaaggaguacauggagcggcaggggaagacgccccugggccugguggaccuguucguguucagcaccuccuucuaccucaucagcaucuuccugcaccuggucaagaucccgacccaccgccacaucguggggaaguccugccccaagccccaccggcucaaccacaugggcaucugcagcugcgggcuguacaagcagcccggcgugccgguccgcuggaagcggugaggacuaguuauaagacugacuagcccgaugggccucccaacgggcccuccuccccuccuugcaccgagauuaaucaaaggcucuuuucagagccaccaaaaaaaaaaaaaaaaaaaaaaaaaaaaaaaaaaaaaaaaaaaaaaaaaaaaaaaaaaaaaaaaagaauu

SEQ ID NO: 41283 - RNA, 1658 nt, Artificial Sequence
  mRNA product Design i-3 (hSL-A64-N5) comprising derived and/or modified sequence from LASV(Mad39;Clade IV)__ANH09722__GPCmut12 (opt1)
aggagaaagcuuaccaugggccagaucgugaccuucuuccaggaggucccccacgugaucgaggaggugaugaacaucguccugaucgcccucagcauccuggccgugcugaaggggcucuacaacguggcgaccugcggccugaucgggcuggucacguuccuccugcugugcggccgcuccugcaccaccacccucuacaaggggguguacgagcugcaggcccuggagcucaacauggagacgcugaacaugugcaugccgcugagcugcaccaagaacaacucccaccacuacauccgggugggcaacgagaccggccucgagcugacccugacgaacaccagccucaucaaccacaaguucugcaaccuguccgacgcccacaagaagaaccuguacgaccacgcccucaugagcaucaucuccaccuuccaccugagcauccccaacuucaaccaguacgaggccauguccugcgacuucaacgacgggaagaucagcguccaguacaaccugucccacaccuacgcgggcgacacggccaaccacugcgggaccguggccaacggcgugcuccagaccuucaugcgcauggccuggggcgggagcuacaucgcgcuggacuccggccgcgggggcugggacugcaucaugaccagcuaccaguaccugaucauccagaacacgaccugggaggaccacugccaguucucccggcccagccccaucggguaccucggccugcugucccagcggacccgcgacaucuacaucagccggcgccuccugggcaccuucacguggacccuguccgacagcgaggggaaggacaccccgggcggguacugccucacccgguggaugcugaucgaggccgagcugaagugcuucggcaacacggccgucgccaagugcaacgagaagcacgacgaggaguucugcgacaugcuccgccuguucgacuucugcaagcaggccauccagcggcugaaggcggaggcccagaugagcauccagcucaucaacaaggccgugaacgcccugaucaacgaccagcugaucaugaagaaccaccuccgcgacaucauggggauccccuacugcaacuacuccaaguacugcuaccugaaccacaccgugaccggcaagaccagccugcccaagugcugccucgucuccaacggcagcuaccugaacgagacgcacuucuccgacgacaucgagcagcaggccgacaacaugaucaccgagaugcugcagaaggaguacauggagcggcaggggaagacgccccugggccucguggaccuguucguguucagcaccuccuucuaccugaucagcaucuuccuccaccuggucaagaucccgacccaccgccacgugguggggaagcccugccccaagccccaccggcugaaccacaugggcaucugcuccugcggguucuacaagcagccgggcguccccgugcgcuggaagcggugaggacuaguuauaagacugacuagcccgaugggccucccaacgggcccuccuccccuccuugcaccgagauuaaucaaaggcucuuuucagagccaccaaaaaaaaaaaaaaaaaaaaaaaaaaaaaaaaaaaaaaaaaaaaaaaaaaaaaaaaaaaaaaaaagaauu

SEQ ID NO: 41284 - RNA, 1658 nt, Artificial Sequence
  mRNA product Design i-3 (hSL-A64-N5) comprising derived and/or modified sequence from LASV(Z0947-SLE-2011;Clade IV)__AIT17840__GPCmut12 (opt1)
aggagaaagcuuaccaugggccagaucgugaccuucuuccaggaggucccccacgugaucgaggaggugaugaacaucguccugaucgcccucagcauccuggccgugcugaaggggcucuacaacuucgcgaccugcggccugguggggcuggucacguuccuccugcugugcggccgcuccugcaccaucagccucuacaaggggguguacgagcugcagacccuggagcucaacauggagacccugaacaugugcaugccgcuguccugcacgaagaacaacagccaccacuacaucauggugggcaacgagaccggccucgagcugacccugaccaacacguccaucaucaaccacaaguucugcaaccucagcgacgcccacaagaagaaccuguacgaccacgcccugauguccaucaucagcaccuuccaccucuccauccccaacuucaaccaguacgaggccaugagcugcgacuucaacgggggcaagaucuccguccaguacaaccugagccacuccuacgccggggacgcggccaaccacugcggcaccguggccaacggggugcugcagaccuucaugcggauggccuggggcggcagcuacaucgcgcucgacuccgggcgcgaccggugggacugcaucaugacgagcuaccaguaccugaucauccagaacaccaccugggaggaccacugccaguucucccgccccagccccaucggcuaccuggggcuccugucccagcggacccgcgacaucuacaucagccggcgccugcucggcacguucaccuggacccugagcgacuccgagggcaaggacacccccgggggcuacugccugacgcgguggaugcucaucgaggccgagcugaagugcuucgggaacaccgccgucgccaagugcaacgagaagcacgacgaggaguucugcgacaugcugcgccucuucgacuucugcaagcaggccauccagcggcugaaggcggaggcccagaugagcauccagcugaucaacaaggccgugaacgcccucaucaacgaccagcugaucaugaagaaccaccuccgcgacaucaugggcaucccguacugcaacuacuccaaguacugcuaccugaaccacaccaccacggggaagaccagccugcccaagugcugccugguguccaacggcagcuaccucaacgagacccacuucuccgacgacaucgagcagcaggccgacaacaugaucaccgagaugcugcagaaggaguacauggagcggcagggcaagacgccccuggggcuggucgaccucuucguguucagcaccuccuucuaccugaucagcaucuuccugcaccucgugaagaucccgacccaccgccacaucgucggcaagcccugccccaagccccaccggcugaaccacauggggaucugcuccugcggccuguacaagcagccgggggugcccgugaaguggaagcgcugaggacuaguuauaagacugacuagcccgaugggccucccaacgggcccuccuccccuccuugcaccgagauuaaucaaaggcucuuuucagagccaccaaaaaaaaaaaaaaaaaaaaaaaaaaaaaaaaaaaaaaaaaaaaaaaaaaaaaaaaaaaaaaaaagaauu

SEQ ID NO: 41285 - RNA, 1658 nt, Artificial Sequence
  mRNA product Design i-3 (hSL-A64-N5) comprising derived and/or modified sequence from LASV(Josiah;Clade IV)__NP_694870__GPCmut12 (opt4)
aggagaaagcuuaccaugggccagaucgugaccuucuuccaggaggugccccacgugaucgaggaggugaugaacaucgugcugaucgcccugagcgugcuggccgugcugaagggccuguacaacuucgccaccugcggccuggugggccuggugaccuuccugcugcugugcggcagaagcugcaccaccagccuguacaagggcguguacgagcugcagacccuggagcugaacauggagacccugaacaugugcaugccccugagcugcaccaagaacaacagccaccacuacaucauggugggcaacgagaccggccuggagcugacccugaccaacaccagcaucaucaaccacaaguucugcaaccugagcgacgcccacaagaagaaccuguacgaccacgcccugaugagcaucaucagcaccuuccaccugagcauccccaacuucaaccaguacgaggccaugagcugcgacuucaacggcggcaagaucagcgugcaguacaaccugagccacagcuacgccggcgacgccgccaaccacugcggcaccguggccaacggcgugcugcagaccuucaugagaauggccuggggcggcagcuacaucgcccuggacagcggcagaggcaacugggacugcaucaugaccagcuaccaguaccugaucauccagaacaccaccugggaggaccacugccaguucagcagacccagccccaucggcuaccugggccugcugagccagagaaccagagacaucuacaucagcagaagacugcugggcaccuucaccuggacccugagcgacagcgagggcaaggacacccccggcggcuacugccugaccagauggaugcugaucgaggccgagcugaagugcuucggcaacaccgccguggccaagugcaacgagaagcacgacgaggaguucugcgacaugcugagacuguucgacuucugcaagcaggccauccagagacugaaggccgaggcccagaugagcauccagcugaucaacaaggccgugaacgcccugaucaacgaccagcugaucaugaagaaccaccugagagacaucaugggcauccccuacugcaacuacagcaaguacugcuaccugaaccacaccaccaccggcagaaccagccugcccaagugcugccuggugagcaacggcagcuaccugaacgagacccacuucagcgacgacaucgagcagcaggccgacaacaugaucaccgagaugcugcagaaggaguacauggagagacagggcaagaccccccugggccugguggaccuguucguguucagcaccagcuucuaccugaucagcaucuuccugcaccuggugaagauccccacccacagacacaucgugggcaagagcugccccaagccccacagacugaaccacaugggcaucugcagcugcggccuguacaagcagcccggcgugcccgugaaguggaagagaugaggacuaguuauaagacugacuagcccgaugggccucccaacgggcccuccuccccuccuugcaccgagauuaaucaaaggcucuuuucagagccaccaaaaaaaaaaaaaaaaaaaaaaaaaaaaaaaaaaaaaaaaaaaaaaaaaaaaaaaaaaaaaaaaagaauu

SEQ ID NO: 41286 - RNA, 1655 nt, Artificial Sequence
  mRNA product Design i-3 (hSL-A64-N5) comprising derived and/or modified sequence from LASV(LP;Clade I)__AAF86701__GPCmut12 (opt4)
aggagaaagcuuaccaugggccagaucaucaccuucuuccaggaggugccccacgugaucgaggaggugaugaacaucgugcugaucgcccugagccugcuggccauccugaagggccuguacaacaucgccaccugcggcaucaucggccugguggccuuccuguuccugugcggcaagagcugcagccugacccugaagggcggcuacgagcugcagacccuggagcugaacauggagacccugaacaugugcaugccccugagcugcaccaagaacagcagccaccacuacaucagagugggcaacgagaccggccuggagcugacccugaccaacaccagcaucaucaaccacaaguucugcaaccugagcgacgcccacaagaagaaccuguacgaccacgcccugaugagcaucaucagcaccuuccaccugagcauccccaacuucaaccaguacgaggccaugagcugcgacuucaacggcggcaagaucagcgugcaguacaaccugagccacagcuacgccggcgacgccgccgagcacugcggcaccguggccaacggcgugcugcagaccuucaugagaauggccuggggcggcagauacaucgcccuggacagcggcaagggcaacugggacugcaucaugaccagcuaccaguaccugaucauccagaacaccaccugggaggaccacugccaguucagcagacccagccccaucggcuaccugggccugcugagccagagaaccagagacaucuacaucagcagaagacugcugggcaccuucaccuggacccugagcgacagcgagggcaacgagacccccggcggcuacugccugaccagauggaugcugaucgaggccgagcugaagugcuucggcaacaccgccguggccaagugcaacgagaagcacgacgaggaguucugcgacaugcugagacuguucgacuucugcaagcaggccaucagaagacugaaggccgaggcccagaugagcauccagcugaucaacaaggccgugaacgcccugaucaacgaccagcugaucaugaagaaccaccugagagacaucaugggcauccccuacugcaacuacagcaaguacugcuaccugaaccacaccagcagcggcagaaccagccugcccaagugcugccugaucagcaacggcagcuaccugaacgagacccaguucagcgacgacaucgagcagcaggccgacaacaugaucaccgagaugcugcagaaggaguacaucgagagacagggcaagaccccccugggccugguggacaucuucaucuucagcaccagcuucuaccugaucagcaucuuccugcaccugaucaagauccccacccacagacacaucgugggcaagcccugccccaagccccacagacugaaccacaugggcgugugcagcugcggccuguacaagcaccccggcgugcccaccaaguggaagagaugaggacuaguuauaagacugacuagcccgaugggccucccaacgggcccuccuccccuccuugcaccgagauuaaucaaaggcucuuuucagagccaccaaaaaaaaaaaaaaaaaaaaaaaaaaaaaaaaaaaaaaaaaaaaaaaaaaaaaaaaaaaaaaaaagaauu

SEQ ID NO: 41287 - RNA, 1655 nt, Artificial Sequence
  mRNA product Design i-3 (hSL-A64-N5) comprising derived and/or modified sequence from LASV(803213;Clade II)__AAF86703__GPCmut12 (opt4)
aggagaaagcuuaccaugggccagaucaucaccuucuuccaggaggugccccacgugaucgaggaggugaugaacaucgugcugaucgcccugagccugcuggccauccugaagggcaucuacaacguggccaccugcggccuguucggccugaucagcuuccugcugcugugcggcagaagcugcagcgugaccuacaagggcguguacgagcugcagacccuggagcugaacauggccaaccugaacaugugcaugccccugagcugcaccaagaacaacagccaccacuacaucauggugggcaacgagaccggccuggagcugacccugaccaacaccagcaucaucaaccacaaguucugcaaccugagcgacgcccacaagaagaaccuguacgaccacgcccugaugagcaucaucagcaccuuccaccugagcauccccaacuucaaccaguacgaggccaugagcugcgacuucaacggcggcaagaucagcgugcaguacaaccugagccacagcuucgccguggacgccgccaaccacugcggcaccaucgccaacggcgugcugcagaccuucaugagaauggccuggggcggcagcuacaucgcccuggacagcggcaagggcaacugggacugcaucaugaccagcuaccaguaccugaucauccagaacaccaccugggaggaccacugccaguucagcagacccagccccaucggcuaccugggccugcugagccagagaaccagagacaucuacaucagcagaagacugcugggcaccuucaccuggacccugagcgacagcgagggcaacgaggcccccggcggcuacugccugaccagauggaugcugaucgaggccgagcugaagugcuucggcaacaccgccguggccaagugcaacgagaagcacgacgaggaguucugcgacaugcugagacuguucgacuucugcaagcaggccaucaagagacugaagaccgaggcccagaugagcauccagcugaucaacaaggccgugaacgcccugaucaacgaccagcugaucaugaagaaccaccugagagacaucaugggcauccccuacugcaacuacagcagauacugcuaccugaaccacaccgugaccggcaagaccagccugcccagaugcugccuggugagcaacggcagcuaccugaacgagacccacuucagcgacgacaucgagcagcaggccgacaacaugaucaccgagaugcugcagaaggaguacauggacagacagggcaagaccccccugggccugguggaccuguucguguucagcaccagcuucuaccugaucagcaucuuccugcaccuggugaagauccccacccacagacacaucgugggcaagcccugccccaagccccacagacugaaccacaugggcaucugcagcugcggccuguacaagcaccccggcgugcccgugaaguggaagagaugaggacuaguuauaagacugacuagcccgaugggccucccaacgggcccuccuccccuccuugcaccgagauuaaucaaaggcucuuuucagagccaccaaaaaaaaaaaaaaaaaaaaaaaaaaaaaaaaaaaaaaaaaaaaaaaaaaaaaaaaaaaaaaaaagaauu

SEQ ID NO: 41288 - RNA, 1655 nt, Artificial Sequence
  mRNA product Design i-3 (hSL-A64-N5) comprising derived and/or modified sequence from LASV(GA391;Clade III)__CAA36645__GPCmut12 (opt4)
aggagaaagcuuaccaugggccagaucgugaccuucuuccaggaggugccccacgugaucgaggaggugaugaacaucgugcugaucgcccugagcauccuggccauccugaagggccuguacaacguggccaccugcggccugaucggccuggugaccuuccugcugcugagcggcagaagcugcagccugaucuacaagggcaccuacgagcugcagacccuggagcugaacauggagacccugaacaugugcaugccccugagcugcaccaagaacaacagccaccacuacaucagagugggcaacgagaccggccuggagcugacccugaccaacaccagcauccugaaccacaaguucugcaaccugagcgacgcccacaagagaaaccuguacgaccacagccugaugagcaucaucagcaccuuccaccugagcauccccaacuucaaccaguacgaggccaugagcugcgacuucaacggcggcaagaucaccgugcaguacaaccugagccacagcuucgccguggacgccgccggccacugcggcacccuggccaacggcgugcugcagaccuucaugagaauggccuggggcggcagcuacaucgcccuggacagcggcagaggcaacugggacugcaucaugaccagcuaccaguaccugaucauccagaacaccaccugggacgaccacugccaguucagcagacccagccccaucggcuaccugggccugcugagccagagaaccagagacaucuacaucagcagaagacugcugggcaccuucaccuggacccugagcgacagcgagggcaacgagacccccggcggcuacugccugaccagauggaugcugaucgaggccgagcugaagugcuucggcaacaccgccguggccaagugcaacgagaagcacgacgaggaguucugcgacaugcugagacuguucgacuucugcaagcaggccaucagaagacugaagaccgaggcccagaugagcauccagcugaucaacaaggccgugaacgcccugaucaacgaccagcugaucaugaagaaccaccugagagacaucaugggcauccccuacugcaacuacagcagauacugcuaccugaaccacaccagcaccggcaagaccagccugcccagaugcugccugaucagcaacggcagcuaccugaacgagaccaaguucagcgacgacaucgagcagcaggccgacaacaugaucaccgagaugcugcagaaggaguacaucgacagacagggcaagaccccccugggccugguggaccuguucguguucagcaccagcuucuaccugaucagcaucuuccugcaccuggugaagauccccacccacagacacaucgugggcaagcccugccccaagccccacagacugaaccacaugggcaucugcagcugcggccuguacaagcagcccggcgugcccgugagauggaagagaugaggacuaguuauaagacugacuagcccgaugggccucccaacgggcccuccuccccuccuugcaccgagauuaaucaaaggcucuuuucagagccaccaaaaaaaaaaaaaaaaaaaaaaaaaaaaaaaaaaaaaaaaaaaaaaaaaaaaaaaaaaaaaaaaagaauu

SEQ ID NO: 41289 - RNA, 1658 nt, Artificial Sequence
  mRNA product Design i-3 (hSL-A64-N5) comprising derived and/or modified sequence from LASV(AV;Clade V)__CCA30314__GPCmut12 (opt4)
aggagaaagcuuaccaugggccagaucgugaccuucuuccaggaggugccccacgugaucgaggaggugaugaacaucgugcugaucgcccugagcauccuggccgugcugaagggccuguacaacaucgccaccugcggccugaucggccugaucaccuuccugcugcugugcggcagaagcugcagcagcaaccuguacaagggcguguacgagcugcagagccuggaccugaacauggagacccugaacaugugcaugccccugagcugcaccaagaacaacagccaccacuacaucagagugggcaacgacaccggccuggagcugacccugaccaacaccagcauccugaaccacaaguucugcaaccugagcgacgcccacaagaaggaccuguacgaccacgcccugaugagcaucaucagcaccuuccaccugagcauccccaacuucaaccaguacgaggccaugagcugcgacuucaacggcggcaagaucagcgugcaguacaaccugagccacagcuacgccaucgacgccgccaaccacugcggcaccguggccaacggcauccugcagaccuucaugagaauggccuggggcggcagcuacaucgcccuggacagcggcagaggcaacugggacugcaucaugaccagcuaccaguaccugaucauccagaacaccaccugggagaaccacugccaguucagcagacccagccccaucggcuaccugggccugcugagccagagaaccagagacaucuacaucagcagaagacugcugggcaccuucaccuggacccugagcgacagcgagggcaacgccacccccggcggcuacugccugaccagauggaugcugaucgaggccgagcugaagugcuucggcaacaccgccguggccaagugcaacgagaagcacgacgaggaguucugcgacaugcugagacuguucgacuucugcaagcaggccaucagcagacugaagagcgaggcccagaugagcauccagcugaucaacaaggccgugaacgcccugaucaacgaccagcugaucaugaagaaccaccugagagacaucaugggcauccccuacugcaacuacagcaaguacugcuaccugaaccacaccaucaccggcaagaccagccugcccaagugcugccuggugagcaacggcagcuaccugaacgagacccacuucagcgacgacaucgagcagcaggccgacaacaugaucaccgagaugcugcagaaggaguacauggagagacagggcaagaccccccugggccugguggaccuguucguguucagcaccagcuucuaccugaucagcaucuuccugagacuggugaagauccccacccacagacacaucgugggcaagcccugccccaagccccacagacugaaccacaugggcaucugcagcugcggccuguacaagcagcccggcgugcccgugagauggaagagaugaggacuaguuauaagacugacuagcccgaugggccucccaacgggcccuccuccccuccuugcaccgagauuaaucaaaggcucuuuucagagccaccaaaaaaaaaaaaaaaaaaaaaaaaaaaaaaaaaaaaaaaaaaaaaaaaaaaaaaaaaaaaaaaaagaauu

SEQ ID NO: 41290 - RNA, 1655 nt, Artificial Sequence
  mRNA product Design i-3 (hSL-A64-N5) comprising derived and/or modified sequence from LASV(Togo/2016/7082;Clade VI)__AMR44577__GPCmut12 (opt4)
aggagaaagcuuaccaugggccagaucaucaccuucuuccaggaggugccccacgugaucgaggaggugaugaacaucgugcugaucgcccugagccugcuggccauccugaagggcguguacaacguggccaccugcggcaucaucggccuggugaccuuccuguuccugugcggcagaagcugcagccugaucuacaagggcagcuacgagcugcagacccuggagcugaacauggagacccugaacaugugcaugccccugagcugcaccaagaacagcagccaccacuacaucagagugggcaacgagaccggccuggagcugacccugaccaacaccagcaucaucaaccacaaguucugcaaccugagcgacgcccacaagagaaaccuguacgaccacgcccugaugagcauccugagcaccuuccaccugagcauccccaacuucaaccaguacgaggccaugagcugcgacuucaacggcggcaagaucagcgugcaguacaaccugagccacgccuacgccguggacgccgccgagcacugcggcaccguggccaacggcgugcugcagaccuucaugagaauggccuggggcggcagcuacaucgcccuggacagcggcagaggcaacugggacugcaucaugaccagcuaccaguaccugaucauccagaacaccaccugggaggaccacugccaguucagcagacccagccccaucggcuaccugggccugcugagccagagaaccagagacaucuacaucagcagaagacugcugggcaccuucaccuggacccugagcgacagcgagggcaacgagacccccggcggcuacugccugaccagauggaugcugaucgaggccgagcugaagugcuucggcaacaccgccguggccaagugcaacgagaagcacgacgaggaguucugcgacaugcugagacuguucgacuucugcaagcaggccauccagagacugaagagcgaggcccagaugagcauccagcugaucaacaaggccgugaacgcccugaucaacgaccagcugaucaugaagaaccaccugagagacaugaugggcauccccuacugcaacuacagcaaguacugcuaccugaaccacaccagcagcggcagaaccagccugcccaagugcugccuggugagcaacggcagcuaccugaacgagacccacuucagcgacgacaucgagcagcaggccgacaacaugaucaccgagaugcugcagaaggaguacaucgacagacagggcaagaccccccugggccugguggaccuguucguguucagcaccagcuucuaccugaucagcaucuuccugcaccugaucaagauccccacccacagacacaucgugggcaagcccugccccaagccccacagacugaaccacaugggcaucugcagcugcggccuguacaagcagcccggcgugcccaccagauggaagagaugaggacuaguuauaagacugacuagcccgaugggccucccaacgggcccuccuccccuccuugcaccgagauuaaucaaaggcucuuuucagagccaccaaaaaaaaaaaaaaaaaaaaaaaaaaaaaaaaaaaaaaaaaaaaaaaaaaaaaaaaaaaaaaaaagaauu

SEQ ID NO: 41291 - RNA, 1655 nt, Artificial Sequence
  mRNA product Design i-3 (hSL-A64-N5) comprising derived and/or modified sequence from LASV(KAK-428;Clade n.d. (VII))__ANH09740__GPCmut12 (opt4)
aggagaaagcuuaccaugggccagaucgugaccuucuuccaggaggugccccacgugaucgaggaggugaugaacaucgugcugaucgcccugagccugcuggccauccugaagggccuguacaacuucgccaccugcggcgugaucggccugaucaccuuccugcugcugugcggcagaagcugcagcgccaccuacaagggccaguacgagcugcagacccuggagcugaacauggagagccugaacaugugcaugccccugagcugcaccaagaacaacagccaccacuacaucagagccggcaacaacaccggccuggagcugacccugaccaacaccagcaucaucagccacaaguucugcaaccugagcgacgcccacaagaagaaccuguacgaccacacccugaugagcaucaucaccaccuuccaccugagcauccccaacuucaaccaguacgaggccaugagcugcgacuucaacggcggcaagaucagcauccaguacaaccugagccacagcuacgccggcgacgccgcccagcacugcggcaccguggccaacggcgugcugcagaccuucaugagaauggccuggggcggcagcuaccuggcccuggacagcggcagaagaggcugggacugcaucaucagcagcuaccaguaccugaucauccagaacaccaccugggacgaccacugccaguucagcagacccagccccaucggcuaccugggcuucgugagccagaagaccagagacaucuacaucagcagaagacugcugggcaccuucaccuggacccugagcgacagcgagggccacgacaugcccggcggcuacugccugaccagauggaugcugaucgaggccgaccugaagugcuucggcaacaccgccguggccaagugcaacgagaagcacgacgaggaguucugcgacauguggagacuguucgacuucugcaagcaggccauccagagacugaaggccgaggcccagaugaacauccagcugaucaacaaggccgugaacgcccugaucaacgaccagcugaugaugaagaaccaccugagagacaucaugggcauccccuacugcaacuacagcaaguucugcuaccugaacaacaccaccaccggcagaaccagccugcccagaugcugccugaucagcaacggcagcuaccugaacgagacccacuucagcgacgacaucgagcagcaggccgacaacaugaucaccgagaugcugcagaaggaguacauggacagacagggcaagaccccccugggccugguggaccuguucguguucagcaccagcuucuaccugaucaccaucuuccugcaccuggugaagauccccacccacagacacaucgugggcaagcccugccccaagccccacagacugaaccacaugggcaucugcagcugcggccuguacaagcagcccggcgugcccgugagauggaagagaugaggacuaguuauaagacugacuagcccgaugggccucccaacgggcccuccuccccuccuugcaccgagauuaaucaaaggcucuuuucagagccaccaaaaaaaaaaaaaaaaaaaaaaaaaaaaaaaaaaaaaaaaaaaaaaaaaaaaaaaaaaaaaaaaagaauu

SEQ ID NO: 41292 - RNA, 1655 nt, Artificial Sequence; identical to SEQ ID NO: 41286
  mRNA product Design i-3 (hSL-A64-N5) comprising derived and/or modified sequence from LASV(Pinneo-NIG-1969;Clade I)__AIT17836__GPCmut12 (opt4)

SEQ ID NO: 41293 - RNA, 1655 nt, Artificial Sequence
  mRNA product Design i-3 (hSL-A64-N5) comprising derived and/or modified sequence from LASV(ISTH0009-NIG-2011;Clade II)__AIT17404__GPCmut12 (opt4)
aggagaaagcuuaccaugggccagaucaucaccuucuuccaggaggugccccacgugaucgaggaggugaugaacaucgugcugaucgcccugagccugcuggccauccugaagggcaucuacaacguggccaccugcggccuguucggccuggugagcuuccugcugcugugcggcagaagcugcagcaccaccuacaagggcguguacgagcugcagacccuggagcuggacauggccagccugaacaugugcaugccccugagcugcaccaagaacaacagccaccacuacaucauggugggcaacgagaccggccuggagcugacccugaccaacaccagcaucaucaaccacaaguucugcaaccugagcgacgcccacaagaagaaccuguacgaccacgcccugaugagcaucaucagcaccuuccaccugagcauccccaacuucaaccaguacgaggccaugagcugcgacuucaacggcggcaagaucagcgugcaguacaaccugagccacgccuacgccguggacgccgccaaccacugcggcaccaucgccaacggcgugcugcagaccuucaugagaauggccuggggcggcagcuacaucgcccuggacagcggcaagggcagcugggacugcaucaugaccagcuaccaguaccugaucauccagaacaccaccugggaggaccacugccaguucagcagacccagccccaucggcuaccugggccugcugagccagagaaccagagacaucuacaucagcagaagacugcugggcaccuucaccuggacccugagcgacagcgagggcaacgagacccccggcggcuacugccugaccagauggaugcugaucgaggccgagcugaagugcuucggcaacaccgccguggccaagugcaacgagaagcacgacgaggaguucugcgacaugcugagacuguucgacuucugcaagcaggccaucagaagacugaagaccgaggcccagaugagcauccagcugaucaacaaggccgugaacgcccugaucaacgaccagcugaucaugaagaaccaccugagagacaucaugggcauccccuacugcaacuacagcaaguacugcuaccugaaccacaccgugaccggcaagaccagccugcccagaugcugccuggugagcaacggcagcuaccugaacgagacccacuucagcgacgacaucgagcagcaggccgacaacaugaucaccgagcugcugcagaaggaguacauggacagacagggcaagaccccccugggccugguggaccuguucguguucagcaccagcuucuaccugaucagcaucuuccugcaccugaucaagauccccacccacagacacaucaccggcaagcccugccccaagccccacagacugaaccacaugggcaucugcagcugcggccuguacaagcaccccggcgugcccgugaaguggaagagaugaggacuaguuauaagacugacuagcccgaugggccucccaacgggcccuccuccccuccuugcaccgagauuaaucaaaggcucuuuucagagccaccaaaaaaaaaaaaaaaaaaaaaaaaaaaaaaaaaaaaaaaaaaaaaaaaaaaaaaaaaaaaaaaaagaauu

SEQ ID NO: 41294 - RNA, 1655 nt, Artificial Sequence
  mRNA product Design i-3 (hSL-A64-N5) comprising derived and/or modified sequence from LASV(ISTH2010-NIG-2012;Clade II)__AIT17482__GPCmut12 (opt4)
aggagaaagcuuaccaugggccagaucaucaccuucuuccaggaggugccccacgugaucgaggaggugaugaacaucgugcugaucgcccugagccugcuggccauccugaagggcaucuacaacguggccaccugcggccuguucggccuggugagcuuccugcugcugugcggcagaagcugcagcaccaccuacaagggcguguacgagcugcagacccuggagcuggacauggccagccugaacaugugcaugccccugagcugcaccaagaacaacagccaccacuacaucauggugggcaacgagaccggccuggagcugacccugaccaacaccagcaucaucaaccacaaguucugcaaccugagcgacgcccacaagaagaaccuguacgaccacgcccugaugagcaucaucagcaccuuccaccugagcauccccaacuucaaccaguacgaggccaugagcugcgacuucaacggcggcaagaucagcgugcaguacaaccugagccacgccuacgccguggacgccgccaaccacugcggcaccaucgccaacggcgugcugcagaccuucaugagaauggccuggggcggcagcuacaucgcccuggacagcggcaagggcagcugggacugcaucaugaccagcuaccaguaccugaucauccagaacaucaccugggaggaccacugccaguucagcagacccagccccaucggcuaccugggccugcugagccagagaaccagagacaucuacaucagcagaagacugcugggcaccuucaccuggacccugagcgacagcgagggcaacgagacccccggcggcuacugccugaccagauggaugcugaucgaggccgagcugaagugcuucggcaacaccgccguggccaagugcaacgagaagcacgacgaggaguucugcgacaugcugagacuguucgacuucugcaagcaggccaucagaagacugaagaccgaggcccagaugagcauccagcugaucaacaaggccgugaacgcccugaucaacgaccagcugaucaugaagaaccaccugagagacaucaugggcauccccuacugcaacuacagcaaguacugcuaccugaaccacaccgugaccggcaagaccagccugcccagaugcugccuggugagcaacggcagcuaccugaacgagacccacuucagcgacgacaucgagcagcaggccgacaacaugaucaccgagcugcugcagaaggaguacaucgacagacagggcaagaccccccugggccugguggaccuguucguguucagcaccagcuucuaccugaucagcaucuuccugcaccuggugaagauccccacccacagacacguggugggcaagcccugccccaagccccacagacugaaccacaugggcaucugcagcugcggccuguacaagcaccccggcgugcccgugaaguggaagagaugaggacuaguuauaagacugacuagcccgaugggccucccaacgggcccuccuccccuccuugcaccgagauuaaucaaaggcucuuuucagagccaccaaaaaaaaaaaaaaaaaaaaaaaaaaaaaaaaaaaaaaaaaaaaaaaaaaaaaaaaaaaaaaaaagaauu

SEQ ID NO: 41295 - RNA, 1655 nt, Artificial Sequence
  mRNA product Design i-3 (hSL-A64-N5) comprising derived and/or modified sequence from LASV(Lassa virus/H.sapiens-wt/NGA/2015/ISTH_0543;Clade II)__AVO03639__GPCmut12 (opt4)
aggagaaagcuuaccaugggccagaucaucaccuucuuccaggaggugccccacgugaucgaggaggugaugaacaucgugcugaucgcccugagccugcuggccauccugaagggcaucuacaacguggccaccugcggccuguucggccuggugagcuuccugcugcugugcggcagaagcugcagcaccaccuacaagggcguguacgagcugcagacccuggagcuggacauggccaaccugaacaugugcaugccccugagcugcaccaagaacaacagccaccacuacaucauggugggcaacgagaccggccuggagcugacccugaccaacaccagcaucaucaaccacaaguucugcaaccugagcgacgcccacaagaagaaccuguacgaccacgcccugaugagcaucaucagcaccuuccaccugagcauccccaacuucaaccaguacgaggccaugagcugcgacuucaacggcggcaagaucagcgugcaguacaaccugagccacaccuacgccguggacgccgccaaccacugcggcaccaucgccaacggcgugcugcagaccuucaugagaauggccuggggcggcagcuacaucgcccuggacagcggcaagggcagcugggacugcaucaugaccagcuaccaguaccuggugauccagaacaccaccugggaggaccacugccaguucagcagacccagccccaucggcuaccugggccugcugagccagagaaccagagacaucuacaucagcagaagacugcugggcaccuucaccuggacccugagcgacagcgagggcaacgagacccccggcggcuacugccugaccagauggaugcugaucgaggccgagcugaagugcuucggcaacaccgccguggccaagugcaacgagaagcacgacgaggaguucugcgacaugcugagacuguucgacuucugcaagcaggccaucagaagacugaagaccgaggcccagaugagcauccagcugaucaacaaggccgugaacgcccugaucaacgaccagcugaucaugaagaaccaccugagagacaucaugggcauccccuacugcaacuacagcaaguacugcuaccugaaccacaccgugaccggcaagaccagccugcccagaugcugccuggugagcaacggcagcuaccugaacgagacccacuucagcgacgacaucgagcagcaggccgacaacaugaucaccgagcugcugcagaaggaguacaucgacagacagggcaagaccccccugggccugguggaccuguucguguucagcaccagcuucuaccugaucagcaucuuccugcaccuggugaagauccccacccacagacacaucaccggcaagcccugccccaagccccacagacugaaccacaugggcaucugcagcugcggccuguacaagcaccccggcgugcccgugaaguggaagagaugaggacuaguuauaagacugacuagcccgaugggccucccaacgggcccuccuccccuccuugcaccgagauuaaucaaaggcucuuuucagagccaccaaaaaaaaaaaaaaaaaaaaaaaaaaaaaaaaaaaaaaaaaaaaaaaaaaaaaaaaaaaaaaaaagaauu

SEQ ID NO: 41296 - RNA, 1655 nt, Artificial Sequence
  mRNA product Design i-3 (hSL-A64-N5) comprising derived and/or modified sequence from LASV(Lassa virus/H.sapiens-wt/NGA/2016/ISTH_0009;Clade II)__AVO03571__GPCmut12 (opt4)
aggagaaagcuuaccaugggccagaucaucaccuucuuccaggaggugccccacgugaucgaggaggugaugaacaucgugcugaucgcccugagccugcuggccauccugaagggcaucuacaacguggccaccugcggccugcugggccuggugagcuuccugcugcugugcggcagaagcugcagcaccaccuacaagggcguguacgagcugcagacccuggagcuggacauggccagccugaacaugugcaugccccugagcugcaccaagaacaacagccaccacuacaucauggugggcaacgagaccggccuggagcugacccugaccaacaccagcaucaucaaccacaaguucugcaaccugagcgacgcccacaagaagaaccuguacgaccacgcccugaugagcaucaucagcaccuuccaccugagcauccccaacuucaaccaguacgaggccaugagcugcgacuucaacggcggcagaaucagcgugcaguacaaccugagccacagcuacgccguggacgccgccaaccacugcggcaccaucgccaacggcgugcugcagaccuucaugagaauggccuggggcggcagcuacaucgcccuggacagcggcaagggcagcugggacugcaucaugaccagcuaccaguaccugaucauccagaacaccaccugggaggaccacugccaguucagcagacccagccccaucggcuaccugggccugcugagccagagaaccagagacaucuacaucagcagaagacugcugggcaccuucaccuggacccugagcgacagcgagggcaacgagacccccggcggcuacugccugaccagauggaugcugaucgaggccgagcugaagugcuucggcaacaccgccguggccaagugcaacgagaagcacgacgaggaguucugcgacaugcugagacuguucgacuucugcaagcaggccaucagaagacugaagaccgaggcccagaugagcauccagcugaucaacaaggccgugaacgcccugaucaacgaccagcugaucaugaagaaccaccugagagacaucaugggcauccccuacugcaacuacagcaaguacugcuaccugaaccacaccgugaccggcaagaccagccugcccagaugcugccuggugagcaacggcagcuaccugaacgagacccacuucagcgacgacaucgagcagcaggccgacaacaugaucaccgagcugcugcagaaggaguacaucgacagacagggcaagaccccccugggccugguggaccuguucguguucagcaccagcuucuaccugaucagcaucuuccugcaccuggugaagauccccacccacagacacaucaccggcaagcccugccccaagccccacagacugaaccacaugggcaucugcagcugcggccuguacaaccaccccggcgugcccgugaaguggaagagaugaggacuaguuauaagacugacuagcccgaugggccucccaacgggcccuccuccccuccuugcaccgagauuaaucaaaggcucuuuucagagccaccaaaaaaaaaaaaaaaaaaaaaaaaaaaaaaaaaaaaaaaaaaaaaaaaaaaaaaaaaaaaaaaaagaauu

SEQ ID NO: 41297 - RNA, 1655 nt, Artificial Sequence
  mRNA product Design i-3 (hSL-A64-N5) comprising derived and/or modified sequence from LASV(Lassa virus/H.sapiens-wt/NGA/2016/ISTH_0017;Clade II)__AVO03567__GPCmut12 (opt4)
aggagaaagcuuaccaugggccagaucaucaccuucuuccaggaggugccccacgugaucgaggaggugaugaacaucgugcugaucgcccugagccugcuggccauccugaagggcaucuacaacguggccaccugcggccuguucggccuggugagcuuccugcugcugugcggcagaagcugcagcaccaccuacaagggcguguacgagcugcagacccuggagcuggacauggccagccugaacaugugcaugccccugagcugcaccaagaacaacagccaccacuacaucauggugggcaacgagaccggccuggagcugacccugaccaacaccagcaucaucaaccacaaguucugcaaccugagcgacgcccacaagaagaaccuguacgaccacgcccugaugagcaucaucagcaccuuccaccugagcauccccaacuucaaccaguacgaggccaugagcugcgacuucaacggcggcaagaucagcgugcaguacaaccugagccacaccuacgccaucgacgccgccaaccacugcggcaccaucgccaacggcgugcugcagaccuucaugagaauggccuggggcggcagcuacaucgcccuggacagcggcaagggcagcugggacugcaucaugaccagcuaccaguaccugaucauccagaacaccaccugggaggaccacugccaguucagcagacccagccccaucggcuaccugggccugcugagccagagaaccagagacaucuacaucagcagaagacugcugggcaccuucaccuggacccugagcgacagcgagggcaacgagacccccggcggcuacugccugaccagauggaugcugaucgaggccgagcugaagugcuucggcaacaccgccguggccaagugcaacgagaagcacgacgaggaguucugcgacaugcugagacuguucgacuucugcaagcaggccaucagaagacugaagaccgaggcccagaugagcauccagcugaucaacaaggccgugaacgcccugaucaacgaccagcugaucaugaagaaccaccugagagacaucaugggcauccccuacugcaacuacagcaaguacugcuaccugaaccacaccgugaccggcaagaccagccugcccagaugcugccuggugagcaacggcagcuaccugaacgagacccacuucagcgacgacaucgagcagcaggccgacaacaugaucaccgagcugcugcagaaggaguacauggacagacagggcaagaccccccugggccugguggaccuguucguguucagcaccagcuucuaccugaucagcaucuuccugcaccuggugagaauccccacccacagacacgugaucggcaagcccugccccaagccccacagacugaaccacaugggcaucugcagcugcggccuguacaagcaccccggcgugcccgugaaguggaagagaugaggacuaguuauaagacugacuagcccgaugggccucccaacgggcccuccuccccuccuugcaccgagauuaaucaaaggcucuuuucagagccaccaaaaaaaaaaaaaaaaaaaaaaaaaaaaaaaaaaaaaaaaaaaaaaaaaaaaaaaaaaaaaaaaagaauu

SEQ ID NO: 41298 - RNA, 1655 nt, Artificial Sequence
  mRNA product Design i-3 (hSL-A64-N5) comprising derived and/or modified sequence from LASV(Lassa virus/H.sapiens-wt/NGA/2018/ISTH_0959;Clade II)__AVV65099__GPCmut12 (opt4)
aggagaaagcuuaccaugggccagaucaucaccuucuuccaggaggugccccacgugaucgaggaggugaugaacaucgugcugaucgcccugagccugcuggccauccugaagggcaucuacaacguggugaccugcggccuguucggccuggugagcuuccugcugcugugcggcagaagcugcagcaccaccuacaagggcguguacgagcugcagacccuggagcuggacauggccagccugaacaugugcaugccccugagcugcaccaagaacaacagccaccacuacaucauggugggcaacgagaccggccuggagcugacccugaccaacaccagcaucaucaaccacaaguucugcaaccugagcgacgcccacaagaagaaccuguacgaccacgcccugaugagcaucaucagcaccuuccaccugagcauccccaacuucaaccaguacgaggccaugagcugcgacuucaacggcggcaagaucagcgugcaguacaaccugagccacgccuacgccaucgacgccgccaaccacugcggcaccaucgccaacggcgugcugcagaccuucaugagaauggccuggggcggcagcuacaucgcccuggacagcggcaagggcagcugggacugcaucaugaccagcuaccaguaccugaucauccagaacaccaccugggaggaccacugccaguucagcagacccagccccaucggcuaccugggccugcugagccagagaaccagagacaucuacaucagcagaagacugcugggcaccuucaccuggacccugagcgacagcgagggcaacgagacccccggcggcuacugccugaccagauggaugcugaucgaggccgagcugaagugcuucggcaacaccgccguggccaagugcaacgagaagcacgacgaggaguucugcgacaugcugagacuguucgacuucugcaagcaggccaucagaagacugaagaccgaggcccagaugagcauccagcugaucaacaaggccgugaacgcccugaucaacgaccagcugaucaugaagaaccaccugagagacaucaugggcauccccuacugcaacuacagcaaguacugcuaccugaaccacaccgugaccggcaagaccagccugcccagaugcugccuggugagcaacggcagcuaccugaacgagacccacuucagcgacgacaucgagcagcaggccgacaacaugaucaccgagcugcugcagaaggaguacaucgacagacagggcaagaccccccugggccugguggaccuguucguguucagcaccagcuucuaccugaucagcaucuuccugcaccuggugaagauccccacccacagacacgugaucggcaagcccugccccaagccccacagacugaaccacaugggcaucugcagcugcggccuguacaagcaccccggcgugcccgugaaguggaagagaugaggacuaguuauaagacugacuagcccgaugggccucccaacgggcccuccuccccuccuugcaccgagauuaaucaaaggcucuuuucagagccaccaaaaaaaaaaaaaaaaaaaaaaaaaaaaaaaaaaaaaaaaaaaaaaaaaaaaaaaaaaaaaaaaagaauu

SEQ ID NO: 41299 - RNA, 1655 nt, Artificial Sequence
  mRNA product Design i-3 (hSL-A64-N5) comprising derived and/or modified sequence from LASV(LASV003-NIG-2008;Clade II)__AIT17580__GPCmut12 (opt4)
aggagaaagcuuaccaugggccagaucaucaccuucuuccaggaggugccccacgugaucgaggaggugaugaacaucgugcugaucgcccugagccugcuggccauccugaagggcaucuacaacguggccaccugcggccuguucggccuggugagcuuccugcugcugugcggcagaagcugcagcaccaccuacaagggcguguacgagcugcagacccuggagcuggacauggccagccugaacaugugcaugccccugagcugcaccaagaacaacagccaccacuacaucauggugggcaacgagaccggccuggagcugacccugaccaacaccagcaucaucaaccacaaguucugcaaccugagcgacgcccacaagaagaaccuguacgaccacgcccugaugagcaucaucagcaccuuccaccugagcauccccaacuucaaccaguacgaggccaugagcugcgacuucaacggcggcaagaucagcgugcaguacaaccugagccacaccuacgccguggacgccgccaaccacugcggcaccaucgccaacggcgugcugcagaccuucaugagaauggccuggggcggcagcuacaucgcccuggacagcggcaagggcagcugggacugcaucaugaccagcuaccaguaccugaucauccagaacaccaccugggaggaccacugccaguucagcagacccagccccaucggcuaccugggccugcugagccagagaaccagagacaucuacaucagcagaagacugcugggcaccuucaccuggacccugagcgacagcgagagcaacgagacccccggcggcuacugccugaccagauggaugcugaucgaggccgagcugaagugcuucggcaacaccgccguggccaagugcaacgagaagcacgacgaggaguucugcgacaugcugagacuguucgacuucugcaagcaggccaucagaagacugaaggccgaggcccagaugagcauccagcugaucaacaaggccgugaacgcccugaucaacgaccagcugaucaugaagaaccaccugagagacaucaugggcauccccuacugcaacuacagcaaguacugcuaccugaaccacaccgugaccggcagaaccagccugcccagaugcugccuggugagcaacggcagcuaccugaacgagacccacuucagcgacgacaucgagcagcaggccgacaacaugaucaccgagcugcugcagaaggaguacauggacagacagggcaagaccccccugggccugguggaccuguucguguucagcaccagcuucuaccugaucagcaucuuccugcaccuggugaagauccccacccacagacacgugaucggcaagcccugccccaagccccacagacugaaccacaugggcaucugcagcugcggccuguacaagcaccccggcgugcccgugaaguggaagagaugaggacuaguuauaagacugacuagcccgaugggccucccaacgggcccuccuccccuccuugcaccgagauuaaucaaaggcucuuuucagagccaccaaaaaaaaaaaaaaaaaaaaaaaaaaaaaaaaaaaaaaaaaaaaaaaaaaaaaaaaaaaaaaaaagaauu

SEQ ID NO: 41300 - RNA, 1655 nt, Artificial Sequence
  mRNA product Design i-3 (hSL-A64-N5) comprising derived and/or modified sequence from LASV(LASV035-NIG-2009;Clade II)__AIT17588__GPCmut12 (opt4)
aggagaaagcuuaccaugggccagaucaucaccuucuuccaggaggugccccacgugaucgaggaggugaugaacaucgugcugaucgcccugagccugcuggccauccugaagggcaucuacaacguggccaccugcggccuguucggccuggugagcuuccugcugcugugcggcagaagcugcagcaccaccuacaagggcguguacgagcugcagacccuggagcuggacauggccagccugaacaugugcaugccccugagcugcaccaagaacaacagccaccacuacaucauggugggcaacgagaccggccuggagcugacccugaccaacaccagcaucaucaaccacaaguucugcaaccugagcgacgcccacaagaagaaccuguacgaccacgcccugaugagcaucaucagcaccuuccaccugagcauccccaacuucaaccaguacgaggccaugagcugcgacuucaacggcggcaagaucagcgugcaguacaaccugagccacgccuacgccguggacgccgccaaccacugcggcaccaucgccaacggcgugcugcagaccuucaugagaauggccuggggcggcagcuacaucgcccuggacagcggcaagggcagcugggacugcaucaugaccagcuaccaguaccugaucauccagaacaccaccugggaggaccacugccaguucagcagacccagccccaucggcuaccugggccugcugagccagagaaccagagacaucuacaucagcagaagacugcugggcaccuucaccuggacccugagcgacagcgagggcaacgagacccccggcggcuacugccugaccagauggaugcugaucgaggccgagcugaagugcuucggcaacaccgccguggccaagugcaacgagaagcacgacgaggaguucugcgacaugcugagacuguucgacuucugcaagcaggccaucagaagacugaaggccgaggcccagaugagcauccagcugaucaacaaggccgugaacgcccugaucaacgaccagcugaucaugaagaaccaccugagagacaucaugggcauccccuacugcaacuacagcaaguacugcuaccugaaccacaccgugaccggcaagaccagccugcccagaugcugccuggugagcaacggcagcuaccugaacgagacccacuucagcgacgacaucgagcagcaggccgacaacaugaucaccgagcugcugcagaaggaguacaucgacagacagggcaagaccccccugggccugguggaccuguucguguucagcaccagcuucuaccugaucagcaucuuccugcaccuggugaagauccccacccacagacacgugaucggcaagcccugccccaagccccacagacugaaccacaugggcaucugcagcugcggccuguacaagcaccccggcgugcccgugaaguggaagagaugaggacuaguuauaagacugacuagcccgaugggccucccaacgggcccuccuccccuccuugcaccgagauuaaucaaaggcucuuuucagagccaccaaaaaaaaaaaaaaaaaaaaaaaaaaaaaaaaaaaaaaaaaaaaaaaaaaaaaaaaaaaaaaaaagaauu

SEQ ID NO: 41301 - RNA, 1655 nt, Artificial Sequence
  mRNA product Design i-3 (hSL-A64-N5) comprising derived and/or modified sequence from LASV(LASV1000-NIG-2009;Clade II)__AIT17782__GPCmut12 (opt4)
aggagaaagcuuaccaugggccagaucaucaccuucuuccaggaggugccccacgugaucgaggaggugaugaacaucgugcugaucgcccugagccugcuggccauccugaagggcaucuacaacguggccaccugcggccuguucggccuggugagcuuccugcugcugugcggcagaagcugcagcaccaccuacaagggcguguacgagcugcagacccuggagcuggacauggccagccugaacaugugcaugccccugagcugcaccaagaacaacagccaccacuacaucauggugggcaacgagaccggccuggagcugacccugaccaacaccagcaucaucaaccacaaguucugcaaccugagcgacgcccacaagaagaaccuguacgaccacgcccugaugagcaucaucagcaccuuccaccugagcauccccaacuucaaccaguacgaggccaugagcugcgacuucaacggcggcaagaucagcgugcaguacaaccugagccacaccuacgccguggacgccgccaaccacugcggcaccaucgccaacggcgugcugcagaccuucaugagaauggccuggggcggcagcuacaucgcccuggacagcggcaagggcagcugggacugcaucaugaccagcuaccaguaccugaucauccagaacaccaccugggaggaccacugccaguucagcagacccagccccaucggcuaccugggccugcugagccagagaaccagagacaucuacaucagcagaagacugcugggcaccuucaccuggacccugagcgacagcgagggcaacgagacccccggcggcuacugccugaccagauggaugcugaucgaggccgagcugaagugcuucggcaacaccgccguggccaagugcaacgagaagcacgacgaggaguucugcgacaugcugagacuguucgacuucugcaagcaggccaucaagagacugaagaccgaggcccagaugagcauccagcugaucaacaaggccgugaacgcccugaucaacgaccagcugaucaugaagaaccaccugagagacaucaugggcauccccuacugcaacuacagcaaguacugcuaccugaaccacaccgugaccggcaagaccagccugcccagaugcugccuggugagcaacggcagcuaccugaacgagacccacuucagcgacgacaucgagcagcaggccgacaacaugaucaccgagcugcugcagaaggaguacaucgacagacagggcaagaccccccugggccugguggaccuguucguguucagcaccagcuucuaccugaucagcaucuuccugcaccuggugaagauccccacccacagacacguggugggcaagcccugccccaagccccacagacugaaccacaugggcaucugcagcugcggccuguacaagcaccccggcgugcccgugaaguggaagagaugaggacuaguuauaagacugacuagcccgaugggccucccaacgggcccuccuccccuccuugcaccgagauuaaucaaaggcucuuuucagagccaccaaaaaaaaaaaaaaaaaaaaaaaaaaaaaaaaaaaaaaaaaaaaaaaaaaaaaaaaaaaaaaaaagaauu

SEQ ID NO: 41302 - RNA, 1655 nt, Artificial Sequence
  mRNA product Design i-3 (hSL-A64-N5) comprising derived and/or modified sequence from LASV(LASV221-NIG-2010;Clade II)__AIT17624__GPCmut12 (opt4)
aggagaaagcuuaccaugggccagaucaucaccuucuuccaggaggugccccacgugaucgaggaggugaugaacaucgugcugaucgcccugagccugcuggccauccugaagggcaucuacaacguggccaccugcggccuguucggccuggugagcuuccugcugcugugcggcagaagcugcagcaccaccuacaagggcguguacgagcugcagacccuggagcuggacauggccagccugaacaugugcaugccccugagcugcaccaagaacaacagccaccacuacaucauggugggcaacgagaccggccuggagcugacccugaccaacaccagcaucaucaaccacaaguucugcaaccugagcgacgcccacaagaagaaccuguacgaccacgcccugaugagcaucaucagcaccuuccaccugagcauccccaacuucaaccaguacgaggccaugagcugcgacuucaacggcggcaagaucagcgugcaguacaaccugagccacaccuacgccaucgacgccgccaaccacugcggcaccaucgccaacggcgugcugcagaccuucaugagaauggccuggggcggcagcuacaucgcccuggacagcggcaagggcagcugggacugcaucaugaccagcuaccaguaccugaucauccagaacaccaccugggaggaccacugccaguucagcagacccagccccaucggcuaccugggccugcugagccagagaaccagagacaucuacaucagcagaagacugcugggcaccuucaccuggacccugagcgacagcgagggcaacgagacccccggcggcuacugccugaccagauggaugcugaucgaggccgagcugaagugcuucggcaacaccgccguggccaagugcaacgagaagcacgacgaggaguucugcgacaugcugagacuguucgacuucugcaagcaggccaucagaagacugaagaccgaggcccagaugagcauccagcugaucaacaaggccgugaacgcccugaucaacgaccagcugaucaugaagaaccaccugagagacaucaugggcauccccuacugcaacuacagcaaguacugcuaccugaaccacaccgugaccggcaagaccagccugcccagaugcugccuggugagcaacggcagcuaccugaacgagacccacuucagcgacgacaucgagcagcaggccgacaacaugaucaccgagaugcugcagaaggaguacauggacagacagggcaagaccccccugggccugguggaccuguucguguucagcaccagcuucuaccugaucagcaucuuccugcaccuggugaagauccccacccacagacacgugaucggcaagcccugccccaagccccacagacugaaccacaugggcaucugcagcugcggccuguacaagcaccccggcgugcccgugaaguggaagagaugaggacuaguuauaagacugacuagcccgaugggccucccaacgggcccuccuccccuccuugcaccgagauuaaucaaaggcucuuuucagagccaccaaaaaaaaaaaaaaaaaaaaaaaaaaaaaaaaaaaaaaaaaaaaaaaaaaaaaaaaaaaaaaaaagaauu

SEQ ID NO: 41303 - RNA, 1655 nt, Artificial Sequence
  mRNA product Design i-3 (hSL-A64-N5) comprising derived and/or modified sequence from LASV(LASV237-NIG-2010;Clade II)__AIT17638__GPCmut12 (opt4)
aggagaaagcuuaccaugggccagaucaucaccuucuuccaggaggugccccacgugaucgaggaggugaugaacaucgugcugaucgcccugagccugcuggccauccugaagggcaucuacaacguggccaccugcggccuguucggccuggugagcuuccugcugcugugcggcagaagcugcagcaccaccuacaagggcguguacgagcugcagacccuggagcuggacauggccagccugaacaugugcaugccccugagcugcaccaagaacaacagccaccacuacaucauggugggcaacgagaccggccuggagcugacccugaccaacaccagcaucaucaaccacaaguucugcaaccugagcgacgcccacaagaaggaccuguacgaccacgcccugaugagcaucaucagcaccuuccaccugagcauccccaacuucaaccaguacgaggccaugagcugcgacuucaacggcggcaagaucagcgugcaguacaaccugagccacaccuacgccguggacgccgccaaccacugcggcaccaucgccaacggcgugcugcagaccuucaugagaauggccuggggcggcagcuacaucgcccuggacagcggcaagggcagcugggacugcaucaugaccagcuaccaguaccugaucauccagaacaccaccugggaggaccacugccaguucagcagacccagccccaucggcuaccugggccugcugagccagagaaccagagacaucuacaucagcagaagacugcugggcaccuucaccuggacccugagcgacagcgagggcaacgagacccccggcggcuacugccugaccagauggaugcugaucgaggccgagcugaagugcuucggcaacaccgccguggccaagugcaacgagaagcacgacgaggaguucugcgacaugcugagacuguucgacuucugcaagcaggccaucagaagacugaagaccgaggcccagaugagcauccagcugaucaacaaggccgugaacgcccugaucaacgaccagcugaucaugaagaaccaccugagagacaucaugggcauccccuacugcaacuacagcaaguacugcuaccugaaccacaccgugaccggcaagaccagccugcccagaugcugccuggugagcaacggcagcuaccugaacgagacccacuucagcgacgacaucgagcagcaggccgacaacaugaucaccgagcugcugcagaaggaguacauggacagacagggcaagaccccccugggccugguggaccuguucguguucagcaccagcuucuaccugaucagcaucuuccugcaccugaucaagauccccacccacagacacaucaccggcaagcccugccccaagccccacagacugaaccacaugggcaucugcagcugcggccuguacaagcaccccggcgugcccgugaaguggaagagaugaggacuaguuauaagacugacuagcccgaugggccucccaacgggcccuccuccccuccuugcaccgagauuaaucaaaggcucuuuucagagccaccaaaaaaaaaaaaaaaaaaaaaaaaaaaaaaaaaaaaaaaaaaaaaaaaaaaaaaaaaaaaaaaaagaauu

SEQ ID NO: 41304 - RNA, 1655 nt, Artificial Sequence
  mRNA product Design i-3 (hSL-A64-N5) comprising derived and/or modified sequence from LASV(LASV253-NIG-2011;Clade II)__AIT17670__GPCmut12 (opt4)
aggagaaagcuuaccaugggccagaucaucaccuucuuccaggaggugccccacgugaucgaggaggugaugaacaucgugcugaucgcccugagccugcuggccauccugaagggcaucuacaacguggccaccugcggccuguucggccuggugagcuuccugcugcugugcggcagaagcugcagcaccaccuacaagggcguguacgagcugcagacccuggagcuggacauggccagccugaacaugugcaugccccugagcugcaccaagaacaacagccaccacuacaucauggugggcaacgagaccggccuggagcugacccugaccaacaccagcaucaucaaccacaaguucugcaaccugagcgacgcccacaagaagaaccuguacgaccacgcccugaugagcaucaucagcaccuuccaccugagcauccccaacuucaaccaguacgaggccaugagcugcgacuucaacggcggcaagaucagcgugcaguacaaccugagccacaccuacgccguggacgccgccaaccacugcggcaccaucgccaacggcgugcugcagaccuucaugagaauggccuggggcggcagcuacaucgcccuggacagcggcaagggcagcugggacugcaucaugaccagcuaccaguaccugaucauccagaacaccaccugggaggaccacugccaguucagcagacccagccccaucggcuaccugggccugcugagccagagaaccagagacaucuacaucagcagaagacugcugggcaccuucaccuggacccugagcgacagcgagggcaacgagacccccggcggcuacugccugaccagauggaugcugaucgaggccgagcugaagugcuucggcaacaccgccguggccaagugcaacgagaagcacgacgaggaguucugcgacaugcugagacuguucgacuucugcaagcaggccaucagaagacugaaggccgaggcccagaugagcauccagcugaucaacaaggccgugaacgcccugaucaacgaccagcugaucaugaagaaccaccugagagacaucaugggcauccccuacugcaacuacagcaaguacugcuaccugaaccacaccgugaccggcagaaccagccugcccagaugcugccuggugagcaacggcagcuaccugaacgagacccacuucagcgacgacaucgagcagcaggccgacaacaugaucaccgagcugcugcagaaggaguacaucgacagacagggcaagaccccccugggccugguggaccuguucguguucagcaccagcuucuaccugaucagcaucuuccugcaccuggugaagauccccacccacagacacaucaucggcaagcccugccccaagccccacagacugaaccacaugggcaucugcagcugcggccuguacaagcaccccggcgugcccgugaaguggaagagaugaggacuaguuauaagacugacuagcccgaugggccucccaacgggcccuccuccccuccuugcaccgagauuaaucaaaggcucuuuucagagccaccaaaaaaaaaaaaaaaaaaaaaaaaaaaaaaaaaaaaaaaaaaaaaaaaaaaaaaaaaaaaaaaaagaauu

SEQ ID NO: 41305 - RNA, 1655 nt, Artificial Sequence
  mRNA product Design i-3 (hSL-A64-N5) comprising derived and/or modified sequence from LASV(LASV254-NIG-2011;Clade II)__AIT17674__GPCmut12 (opt4)
aggagaaagcuuaccaugggccagaucaucaccuucuuccaggaggugccccacgugaucgaggaggugaugaacaucgugcugaucgcccugagccugcuggccauccugaagggcaucuacaacguggccaccugcggccuguucggccuggugagcuuccugcugcugugcggcagaagcugcagcaccaccuacaagggcguguacgagcugcagacccuggagcuggacaugaccaaccugaacaugugcaugccccugagcugcaccaagaacaacagccaccacuacaucauggugggcaacgagaccggccuggagcugacccugaccaacaccagcaucaucaaccacaaguucugcaaccugagcgacgcccacaagaagaaccuguacaaccacgcccugaugagcaucaucagcaccuuccaccugagcauccccaacuucaaccaguacgaggccaugagcugcgacuucaacggcggcaagaucagcgugcaguacaaccugagccacagcuacgccguggacgccgccaaccacugcggcaccaucgccaacggcgugcugcagaccuucaugagaauggccuggggcggcagcuacaucgcccuggacagcggcaagggcaacugggacugcaucaugaccagcuaccaguaccugaucauccagaacaccaccugggaggaccacugccaguucagcagacccagccccaucggcuaccugggccugcugagccagagaaccagagacaucuacaucagcagaagacugcugggcaccuucaccuggacccugagcgacagcgagggcaacgagacccccggcggcuacugccugaccagauggaugcugaucgaggccgagcugaagugcuucggcaacaccgccguggccaagugcaacgagaagcacgacgaggaguucugcgacaugcugagacuguucgacuucugcaagcaggccaucagaagacugaagaccgaggcccaggccaacauccagcugaucaacaaggccgugaacgcccugaucaacgaccagcugaucaugaagaaccaccugagagacaucaugggcauccccuacugcaacuacagcaaguacugcuaccugaaccacaccgugaccggcaagaccagccugcccagaugcugccuggugagcaacggcagcuaccugaacgagacccacuucagcgacgacaucgagcagcaggccgacaacaugaucaccgagcugcugcagaaggaguacauggacagacagggcaagaccccccugggccugguggaccuguucguguucagcaccagcuucuaccugaucagcaucuuccugcaccuggugaagauccccacccacagacacgugaucggcaagcccugccccaagccccacagacugaaccacaugggcaucugcagcugcggccuguacaagcaccccggcgugcccgugaaguggaagagaugaggacuaguuauaagacugacuagcccgaugggccucccaacgggcccuccuccccuccuugcaccgagauuaaucaaaggcucuuuucagagccaccaaaaaaaaaaaaaaaaaaaaaaaaaaaaaaaaaaaaaaaaaaaaaaaaaaaaaaaaaaaaaaaaagaauu

SEQ ID NO: 41306 - RNA, 1655 nt, Artificial Sequence
  mRNA product Design i-3 (hSL-A64-N5) comprising derived and/or modified sequence from LASV(Nig08-A19;Clade III)__ADU56618__GPCmut12 (opt4)
aggagaaagcuuaccaugggccagaucgugaccuucuuccaggaggugccccacgugaucgaggaggugaugaacaucgugcugaucgcccugagcauccuggccauccugaagggccuguacaacaucgccaccugcggccugaucggccuggugaccuuccugcugcugagcggcagaagcugcagcaugaccuacaagggcguguacgagcugcagacccuggagcugaacaugaacacccugaacaugugcaugccccugagcugcaccaagaacaacagccaccacuacaucauggugggcaacgagaccggccuggagcugacccugaccaacaccagccugcugcaccacaaguucugcaaccugagcgacgcccacaagaagaaccuguacgaccacacccugaugagcaucaucagcaccuuccaccugagcauccccaacuucaaccaguacgaggccaugagcugcgacuucaacggcggcaagaucaccgugcaguacaaccugagccacagcuacgccaucgacgccgccaaccacugcggcaccguggccaacggcgugcugcagaccuucaugagaauggccuggggcggcagcuacaucgcccuggacagcggcagaggcaagugggacugcaucaugaccagcuaccaguaccugaucauccagaacaccaccugggaggaccacugccaguucagcagacccagccccaucggcuaccugggccugcugagccagagaaccagagacaucuacaucagcagaagacugcugggcaccuucaccuggacccugagcgacagcgagggcaacgagacccccggcggcuacugccugaccagauggaugcugaucgaggccgagcugaagugcuucggcaacaccgccguggccaagugcaacgagaagcacgacgaggaguucugcgacaugcugagacuguucgacuucugcaagcaggccaucagaagacugaaggccgaggcccagaugagcauccagcugaucaacaaggccgugaacgcccugaucaacgaccagcugaucaugaagaaccaccugagagacaucaugggcauccccuacugcaacuacagcaaguacugcuaccugaaccacaccagcaccggcagaaccagccugcccagaugcugccuggugagcaacggcagcuaccugaacgagacccacuucagcgacgacaucgagcagcaggccgacaacaugaucaccgagaugcugcagaaggaguaccuggacagacagggcaagaccccccugggccugguggaccuguucguguucagcaccagcuucuaccugaucagcaucuuccugcaccuggugaagauccccacccacagacacaucgugggcaagcccugccccaagccccacagacugaaccacaugggcaucugcagcugcggccuguacaagcagcccggcgugcccgugagauggaagagaugaggacuaguuauaagacugacuagcccgaugggccucccaacgggcccuccuccccuccuugcaccgagauuaaucaaaggcucuuuucagagccaccaaaaaaaaaaaaaaaaaaaaaaaaaaaaaaaaaaaaaaaaaaaaaaaaaaaaaaaaaaaaaaaaagaauu

SEQ ID NO: 41307 - RNA, 1658 nt, Artificial Sequence
  mRNA product Design i-3 (hSL-A64-N5) comprising derived and/or modified sequence from LASV(G1180-SLE-2010;Clade IV)__AIT17168__GPCmut12 (opt4)
aggagaaagcuuaccaugggccagaucgugaccuucuuccaggaggugccccacgugaucgaggaggugaugaacaucgugcugaucgcccugagcauccuggccgugcugaagggccuguacaacuucgccaccugcggccuggugggccugcugaccuuccugcugcugugcggcagaagcugcaccgccagcagauacaagggcguguacgagcugcagacccuggagcugaacauggagacccugaacaugugcaugccccugagcugcaccaagaacaacagccaccacuacaucauggugggcaacgagaccggccuggagcugacccugaccaacaccagcaucaucaaccacaaguucugcaaccugagcgacgcccacaagaagaaccuguacgaccacgcccugaugagcaucaucagcaccuuccaccugagcauccccaacuucaaccaguacgaggccaugagcugcgacuucaacggcggcaagaucagcgugcaguacaaccugagccacagcuacgccggcgacgccgccaaccacugcggcaccguggccaacggcgugcugcagaccuucaugagaauggccuggggcggcagcuacaucgcccuggacagcggccacggcagcugggacugcaucaugaccagcuaccaguaccugaucauccagaacaccaccugggaggaccacugccaguucagcagacccagccccaucggcuaccugggccugcugagccagagaaccagagacaucuacaucagcagaagacugcugggcaccuucaccuggacccugagcgacagcgagggcaaggacacccccggcggcuacugccugaccagauggaugcugaucgaggccgagcugaagugcuucggcaacaccgccguggccaagugcaacgagaagcacgacgaggaguucugcgacaugcugagacuguucgacuucugcaagcaggccauccagagacugaaggccgaggcccagaugagcauccagcugaucaacaaggccgugaacgcccugaucaacgaccagcugaucaugaagaaccaccugagagacaucaugggcauccccuacugcaacuacagcaaguacugcuaccugaaccacaccaccaccggcaagaccagccugcccaagugcugccuggugagcaacggcagcuaccugaacgagacccacuucagcgacgacaucgagcagcaggccgacaacaugaucaccgagaugcugcagaaggaguacauggagagacagggcaagaccccccugggccugguggaccuguucguguucagcaccagcuucuaccugaucagcaucuuccugcaccuggugaagauccccacccacagacacaucgugggcaagagcugccccaagccccacagacugaaccacaugggcaucugcagcugcggccuguacaagcagcccggcgugcccgugaaguggaagagaugaggacuaguuauaagacugacuagcccgaugggccucccaacgggcccuccuccccuccuugcaccgagauuaaucaaaggcucuuuucagagccaccaaaaaaaaaaaaaaaaaaaaaaaaaaaaaaaaaaaaaaaaaaaaaaaaaaaaaaaaaaaaaaaaagaauu

SEQ ID NO: 41308 - RNA, 1658 nt, Artificial Sequence
  mRNA product Design i-3 (hSL-A64-N5) comprising derived and/or modified sequence from LASV(G1442-SLE-2011;Clade IV)__AIT17180__GPCmut12 (opt4)
aggagaaagcuuaccaugggccagaucgugaccuucuuccaggaggugccccacgugaucgaggaggugaugaacaucgugcugaucgcccugagcauccuggccgugcugaagggccuguacaacguggccaccugcggccugaucggccuggugaccuuccugcugcugugcggcagaagcugcaccaccacccuguacaagggcguguacgagcugcagacccuggagcugaacauggagacccugaacaugugcaugccccugagcugcaccaagaacaacagccaccacuacaucagagugggcaacgagaccggccuggagcugacccugaccaacaccagcaucaucaaccacaaguucugcaaccugagcgacgcccacaagaagaaccuguacgaccacgcccugaugagcaucaucagcaccuuccaccugagcauccccaacuucaaccaguacgaggccaugagcugcgacuucaacggcggcaagaucagcgugcaguacaaccugagccacagcuacgccggcgacgccgccaaccacugcggcaccguggccaacggcgugcugcagaccuucaugagaauggccuggggcggcagcuacaucgcccuggacagcggcagaggcaacugggacugcaucaugaccagcuaccaguaccugaucauccagaacaccaccugggacgaccacugccaguucagcagacccagccccaucggcuaccugggccugcugagccagagaaccagagacguguacaucagcagaagacugcugggcaccuucaccuggacccugagcgacagcgagggcaaggacacccccggcggcuacugccugaccagauggaugcugaucgaggccgagcugaagugcuucggcaacaccgccguggccaagugcaacgagaagcacgacgaggaguucugcgacaugcugagacuguucgacuucugcaagcaggccauccagagacugaaggccgaggcccagaugagcauccagcugaucaacaaggccgugaacgcccugaucaacgaccagcugaucaugaagaaccaccugagagacaucaugggcauccccuacugcaacuacagcaaguacugcuaccugaacaacaccgccaccggcaagaccagccugcccaagugcugccugaucagcaacggcagcuaccugaacgagacccacuucagcgacgacaucgagcaggaggccgacaacaugaucaccgagaugcugcagaaggaguacauggagagacagggcaagaccccccugggccugguggaccuguucguguucagcaccagcuucuaccugaucagcaucuuccugcaccuggugaagauccccacccacagacacaucgugggcaagagcugccccaagccccacagacugaaccacaugggcaucugcagcugcggccuguacaagcagcccggcgugcccgugagauggaagagaugaggacuaguuauaagacugacuagcccgaugggccucccaacgggcccuccuccccuccuugcaccgagauuaaucaaaggcucuuuucagagccaccaaaaaaaaaaaaaaaaaaaaaaaaaaaaaaaaaaaaaaaaaaaaaaaaaaaaaaaaaaaaaaaaagaauu

SEQ ID NO: 41309 - RNA, 1658 nt, Artificial Sequence
  mRNA product Design i-3 (hSL-A64-N5) comprising derived and/or modified sequence from LASV(G3010-SLE-2013;Clade IV)__AIT17344__GPCmut12 (opt4)
aggagaaagcuuaccaugggccagaucgugaccuucuuccaggaggugccccacgugaucgaggaggugaugaacaucgugcugaucgcccugagcauccuggccgugcugaagggccuguacaacuucgccaccugcggccuggugggccuggugaccuuccugcugcugugcggcagaagcugcaccaccagccuguacaagggcguguacgagcugcagacccuggagcugaacauggagacccugaacaugugcaugccccugagcugcaccaagaacaacagccaccacuacaucauggugggcaacgagaccggccuggagcugacccugaccaacaccagcaucaucaaccacaaguucugcaaccugagcgacgcccacaagaagaaccuguacaaccacgcccugaugagcaucaucagcaccuuccaccugagcauccccaacuucaaccaguacgaggccaugagcugcgacuucaacggcggcaagaucagcgugcaguacaaccugagccacagcuacgccggcgacgccgccagccacugcggcaccguggccaacggcgugcugcagaccuucaugagaauggccuggggcggcagcuacaucgcccuggacagcggcuacggcaagugggacugcaucaugaccagcuaccaguaccugaucauccagaacaccaccugggaggaccacugccaguucagcagacccagccccaucggcuaccugggccugcugagccagagaaccagagacaucuacaucagcagaagacugcugggcaccuucaccuggacccugagcgacagcgagggcaaggacacccccggcggcuacugccugaccagauggaugcugaucgaggccgagcugaagugcuucggcaacaccgccguggccaagugcaacgagaagcacgacgaggaguucugcgacaugcugagacuguucgacuucugcaagcaggccauccagagacugaagaccgaggcccagaugagcauccagcugaucaacaaggccgugaacgcccugaucaacgaccagcugaucaugaagaaccaccugagagacaucaugggcauccccuacugcaacuacagcaaguacugcuaccugaaccacaccaccaccggcaagaccagccugcccaagugcugccuggugagcaacggcagcuaccugaacgagacccacuucagcgacgacaucgagcagcaggccgacaacaugaucaccgagaugcugcagaaggaguacauggagagacagggcaagaccccccugggccugguggaccuguucguguucagcaccagcuucuaccugaucagcaucuuccugcaccuggugaagauccccacccacagacacaucgugggcaagagcugccccaagccccacagacugaaccacaugggcaucugcagcugcggccuguacaagcagcccggcgugcccgugagauggaagagaugaggacuaguuauaagacugacuagcccgaugggccucccaacgggcccuccuccccuccuugcaccgagauuaaucaaaggcucuuuucagagccaccaaaaaaaaaaaaaaaaaaaaaaaaaaaaaaaaaaaaaaaaaaaaaaaaaaaaaaaaaaaaaaaaagaauu

SEQ ID NO: 41310 - RNA, 1658 nt, Artificial Sequence
  mRNA product Design i-3 (hSL-A64-N5) comprising derived and/or modified sequence from LASV(G502-SLE-2009;Clade IV)__AIT17126__GPCmut12 (opt4)
aggagaaagcuuaccaugggccagaucgugaccuucuuccaggaggugccccacgugaucgaggaggugaugaacaucgugcugaucgcccugagcauccuggccgugcugaagggccuguacaacuucgccaccugcggccuggugggccugcugaccuuccugcugcugugcggcagaagcugcaccaccggccuguacaagggcguguacgagcugcagacccuggagcugaacauggagacccugaacaugugcaugccccugagcugcaccaagaacaacagccaccacuacaucauggugggcaacgagaccggccuggagcugacccugaccaacaccagcaucaucaaccacaaguucugcaaccugagcgacgcccacaagaagaaccuguacgaccacgcccugaugagcaucaucagcaccuuccaccugagcauccccaacuucaaccaguacgaggccaugagcugcgacuucaacggcggcaagaucagcgugcaguacaaccugagccacagcuacgccggcgacgccgccgaccacugcggcaccguggccaacggcgugcugcagaccuucaugagaauggccuggggcggcagcuacaucgcccuggacagcggcagaggcagaugggacugcaucaugaccagcuaccaguaccugaucauccagaacaccaccugggaggaccacugccaguucagcagacccagccccaucggcuaccugggccugcugagccagagaaccagagacaucuacaucagcagaagacugcugggcaccuucaccuggacccugagcgacagcgagggcaaggacacccccggcggcuacugccugaccagauggaugcugaucgaggccgagcugaagugcuucggcaacaccgccguggccaagugcaacgagaagcacgacgaggaguucugcgacaugcugagacuguucgacuucugcaagcaggccauccagagacugaaggccgaggcccagaugagcauccagcugaucaacaaggccgugaacgcccugaucaacgaccagcuggugaugaagaaccaccugagagacaucaugggcauccccuacugcaacuacagcagauacugcuaccugaaccacaccaccaccggcagaaccagccugcccaagugcugccuggugagcaacggcagcuaccugaacgagacccacuucagcgacgacaucgagcagcaggccgacaacaugaucaccgagaugcugcagaaggaguacauggagagacagggcaagaccccccugggccugguggaccuguucguguucagcaccagcuucuaccugaucagcaucuuccugcaccuggugaagauccccacccacagacacaucgugggcaagagcugccccaagccccacagacugaaccacaugggcaucugcagcugcggccuguacaagcagcccggcgugcccgugaaguggaagagaugaggacuaguuauaagacugacuagcccgaugggccucccaacgggcccuccuccccuccuugcaccgagauuaaucaaaggcucuuuucagagccaccaaaaaaaaaaaaaaaaaaaaaaaaaaaaaaaaaaaaaaaaaaaaaaaaaaaaaaaaaaaaaaaaagaauu

SEQ ID NO: 41311 - RNA, 1658 nt, Artificial Sequence
  mRNA product Design i-3 (hSL-A64-N5) comprising derived and/or modified sequence from LASV(G733-SLE-2010;Clade IV)__AIT17154__GPCmut12 (opt4)
aggagaaagcuuaccaugggccagaucgugaccuucuuccaggaggugccccacgugaucgaggaggugaugaacaucgugcugaucgcccugagcauccuggccgugcugaagggccuguacaacuucgccaccugcggcaucgugggccuggugagcuuccugcugcugugcggcagaagcugcaccaccagccuguacaagggcguguacgagcugcagacccuggagcugaacauggagacccugaacaugugcaugccccugagcugcaccaagaacaacagccaccacuacaucauggugggcaacgagaccggccuggagcugacccugaccaacaccagcaucaucaaccacaaguucugcaaccugagcgacgcccacaagaagaaccuguacgaccacgcccugaugagcaucaucagcaccuuccaccugagcauccccaacuucaaccaguacgaggccaugagcugcgacuucaacggcggcaagaucagcgugcaguacaaccugagccacagcuacgccggcgacgccgccaaccacugcggcaccaucgccaacggcgugcugcagaccuucaugagaauggccuggggcggcagcuacaucgcccuggacagcggcagagacagaugggacugcaucaugaccagcuaccaguaccugaucauccagaacaccaccugggaggaccacugccaguucagcagacccagccccaucggcuaccugggccugcugagccagagaaccagagacaucuacaucagcagaagacugcugggcaccuucaccuggacccugagcgacagcgagggcaaggacacccccggcggcuacugccugaccagauggaugcugaucgaggccgagcugaagugcuucggcaacaccgccguggccaagugcaacgagaagcacgacgaggaguucugcgacaugcugagacuguucgacuucugcaagcaggccauccagagacugaaggccgaggcccagaugagcauccagcugaucaacaaggccgugaacgcccugaucaacgaccagcugaucaugaagaaccaccugagagacaucaugggcauccccuacugcaacuacagcaaguacugcuaccugaaccacaccaccaccggcaagaccagccugcccaagugcugccuggugagcaacggcagcuaccugaacgagacccacuucagcgacgacaucgagcagcaggccgacaacaugaucaccgagaugcugcagaaggaguacauggagagacagggcaagaccccccugggccugguggaccuguucguguucagcaccagcuucuaccugaucagcaucuuccugcaccuggugaagauccccacccacagacacguggugggcaagagcugccccaagccccacagacugaaccacaugggcaucugcagcugcggccuguacggccagcccggcgugcccgugaaguggaagagaugaggacuaguuauaagacugacuagcccgaugggccucccaacgggcccuccuccccuccuugcaccgagauuaaucaaaggcucuuuucagagccaccaaaaaaaaaaaaaaaaaaaaaaaaaaaaaaaaaaaaaaaaaaaaaaaaaaaaaaaaaaaaaaaaagaauu

SEQ ID NO: 41312 - RNA, 1658 nt, Artificial Sequence
  mRNA product Design i-3 (hSL-A64-N5) comprising derived and/or modified sequence from MOPV/LASV reassortant(IGS-1;Clade IV)__AFY05576__GPCmut12 (opt4)
aggagaaagcuuaccaugggccagaucgugaccuucuuccaggaggugccccacgugaucgaggaggugaugaacaucgugcugaucgcccugagcgugcuggccgugcugaagggccuguacaacuucgccaccugcggccuggugggccuggugaccuuccugcugcugugcggcagaagcugcaccaccagccuguacaagggcguguacgagcugcagacccuggagcugaacauggagacccugaacaugugcaugccccugagcugcaccaagaacaacagccaccacuacaucauggugggcaacgagaccggccuggagcugacccugaccaacaccagcaucaucaaccacaaguucugcaaccugagcgacgcccacaagaagaaccuguacgaccacgcccugaugagcaucaucagcaccuuccaccugagcauccccaacuucaaccaguacgaggccaugagcugcgacuucaacggcggcaagaucagcgugcaguacaaccugagccacagcuacgccggcgacgccgccaaccacugcggcaccguggccaacggcgugcugcagaccuucaugagaauggccuggggcggcagcuacaucgcccuggacagcggcagaggcaacugggacugcaucaugaccagcuaccaguaccugaucauccagaacaccaccugggaggaccacugccaguucagcagacccagccccaucggcuaccugggccugcugagccagagaaccagagacaucuacaucagcagaagacugcugggcaccuucaccuggacccugagcgacagcgagggcgaggacacccccggcggcuacugccugaccagauggaugcugaucgaggccgagcugaagugcuucggcaacaccgccguggccaagugcaacgagaagcacgacgaggaguucugcgacaugcugagacuguucgacuucugcaagcaggccauccagagacugaaggccgaggcccagaugagcauccagcugaucaacaaggccgugaacgcccugaucaacgaccagcugaucaugaagaaccaccugagagacaucaugggcauccccuacugcaacuacagcaaguacugcuaccugaaccacaccaccaccggcagaaccagccugcccaagugcugccuggugagcaacggcagcuaccugaacgagacccacuucagcgacgacaucgagcagcaggccgacaacaugaucaccgagaugcugcagaaggaguacauggagagacagggcaagaccccccugggccugguggaccuguucguguucagcaccagcuucuaccugaucagcaucuuccugcaccuggugaagauccccacccacagacacaucgugggcaagagcugccccaagccccacagacugaaccacaugggcaucugcagcugcggccuguacaagcagcccggcgugcccgugaaguggaagagaugaggacuaguuauaagacugacuagcccgaugggccucccaacgggcccuccuccccuccuugcaccgagauuaaucaaaggcucuuuucagagccaccaaaaaaaaaaaaaaaaaaaaaaaaaaaaaaaaaaaaaaaaaaaaaaaaaaaaaaaaaaaaaaaaagaauu

SEQ ID NO: 41313 - RNA, 1658 nt, Artificial Sequence
  mRNA product Design i-3 (hSL-A64-N5) comprising derived and/or modified sequence from LASV(LM765-SLE-2012;Clade IV)__AIT17814__GPCmut12 (opt4)
aggagaaagcuuaccaugggccagaucgugaccuucuuccaggaggugccccacgugaucgaggaggugaugaacaucgugcugaucgcccugagcauccuggccgugcugaagggccuguacaacuucgccaccugcggccuggugggccuggugaccuuccugcugcugugcggcagaagcugcaccaccagccuguacaagggcguguacgagcugcagacccuggagcugaacauggagacccugaacaugugcaugccccugagcugcaccaagaacaacagccaccacuacaucauggugggcaacgagaccggccuggagcugacccugaccaacaccagcaucaucgaccacaaguucugcaaccugagcgacgcccacagaaagaaccuguacgaccacgcccugaugagcaucaucagcaccuuccaccugagcauccccaacuucaaccaguacgaggccaugagcugcgacuucaacggcggcaagaucagcgugcaguacaaccugagccacagcuacgccaaggacgccgccgaccacugcggcaccguggccaacggcgugcugcagaccuucaugagaauggccuggggcggcagcuacaucgcccuggacagcggcagaggcagaugggacugcaucaugaccagcuaccaguaccugaucauccagaacaccaccugggaggaccacugccaguucagcagacccagccccaucggcuaccugggccugcugagccagagaaccagagacaucuacaucagcagaagacugcugggcaccuucaccuggacccugagcgacagcgagggcaaggacacccccggcggcuacugccugaccagauggaugcugaucgaggccgagcugaagugcuucggcaacaccgccguggccaagugcaacgagaagcacgacgaggaguucugcgacaugcugagacuguucgacuucugcaagcaggccauccagagacugaaggccgaggcccagaugagcauccagcugaucaacaaggccgugaacgcccugaucaacgaccagcugaucaugaagaaccaccugagagacaucaugggcauccccuacugcaacuacagcaaguacugcuaccugaaccacaccaccaccggcaagaccagccugcccaagugcugccuggugagcaacggcagcuaccugaacgagacccacuucagcgacgacaucgagcagcaggccgacaacaugaucaccgagaugcugcagaaggaguacauggagagacagggcaagaccccccugggccugguggaccuguucguguucagcaccagcuucuaccugaucagcaucuuccugcaccuggugaagauccccacccacagacacaucgugggcaagcccugccccaagccccacagacugaaccacaugggcaucugcagcugcggccuguacaagcagcccggcgugcccgugaaguggaagagaugaggacuaguuauaagacugacuagcccgaugggccucccaacgggcccuccuccccuccuugcaccgagauuaaucaaaggcucuuuucagagccaccaaaaaaaaaaaaaaaaaaaaaaaaaaaaaaaaaaaaaaaaaaaaaaaaaaaaaaaaaaaaaaaaagaauu

SEQ ID NO: 41314 - RNA, 1658 nt, Artificial Sequence
  mRNA product Design i-3 (hSL-A64-N5) comprising derived and/or modified sequence from LASV(LM776-SLE-2012;Clade IV)__AIT17824__GPCmut12 (opt4)
aggagaaagcuuaccaugggccagaucgugaccuucuuccaggaggugccccacgugaucgaggaggugaugaacaucgugcugaucgcccugagcauccuggccgugcugaagggccuguacaacuucgccaccugcggccuggugggccuggugaccuuccugcugcugugcggcagaagcugcaccaccagcguguacaagggcguguacgagcugcagacccuggagcugaacauggagacccugaacaugugcaugccccugagcugcaccaagaacaacagccaccacuacaucauggugggcaacgagaccggccuggagcugacccugaccaacaccagcaucaucaaccacaaguucugcaaccugagcgacgcccacaagaagaaccuguacgaccacgcccugaugagcaucaucagcaccuuccaccugagcauccccaacuucaaccaguacgaggccaugagcugcgacuucaacggcggcaagaucagcgugcaguacaaccugagccacagcuacgccggcgacgccgccaaccacugcggcaccguggccaacggcgugcugcagaccuucaugagaauggccuggggcggcagcuacaucgcccuggacagcggccacggcaagugggacugcaucaugaccagcuaccaguaccugaucauccagaacaccaccugggaggaccacugccaguucagcagacccagccccaucggcuaccugggccugcugagccagagaaccagagacaucuacaucagcagaagacugcugggcaccuucaccuggacccugagcgacagcgagggcaaggacacccccggcggcuacugccugaccagauggaugcugaucgaggccgagcugaagugcuucggcaacaccgccguggccaagugcaacgagaagcacgacgaggaguucugcgacaugcugagacuguucgacuucugcaagcaggccauccagagacugaaggccgaggcccagaugagcauccagcugaucaacaaggccgugaacgcccugaucaacgaccagcugaucaugaagaaccaccugagagacaucaugggcauccccuacugcaacuacagcaaguacugcuaccugaaccacaccaccaccggcaagaccagccugcccaagugcugccuggugagcaacggcagcuaccugaacgagacccacuucagcgacgacaucgagcagcaggccgacaacaugaucaccgagaugcugcagaaggaguacauggagagacagggcaagaccccccugggccugguggaccuguucguguucagcaccagcuucuaccugaucagcaucuuccugcaccuggugaagauccccacccacagacacaucgugggcaagagcugccccaagccccacagacugaaccacaugggcaucugcagcugcggccuguacaagcagcccggcgugcccgugagauggaagagaugaggacuaguuauaagacugacuagcccgaugggccucccaacgggcccuccuccccuccuugcaccgagauuaaucaaaggcucuuuucagagccaccaaaaaaaaaaaaaaaaaaaaaaaaaaaaaaaaaaaaaaaaaaaaaaaaaaaaaaaaaaaaaaaaagaauu

SEQ ID NO: 41315 - RNA, 1658 nt, Artificial Sequence
  mRNA product Design i-3 (hSL-A64-N5) comprising derived and/or modified sequence from LASV(Mad39;Clade IV)__ANH09722__GPCmut12 (opt4)
aggagaaagcuuaccaugggccagaucgugaccuucuuccaggaggugccccacgugaucgaggaggugaugaacaucgugcugaucgcccugagcauccuggccgugcugaagggccuguacaacguggccaccugcggccugaucggccuggugaccuuccugcugcugugcggcagaagcugcaccaccacccuguacaagggcguguacgagcugcaggcccuggagcugaacauggagacccugaacaugugcaugccccugagcugcaccaagaacaacagccaccacuacaucagagugggcaacgagaccggccuggagcugacccugaccaacaccagccugaucaaccacaaguucugcaaccugagcgacgcccacaagaagaaccuguacgaccacgcccugaugagcaucaucagcaccuuccaccugagcauccccaacuucaaccaguacgaggccaugagcugcgacuucaacgacggcaagaucagcgugcaguacaaccugagccacaccuacgccggcgacaccgccaaccacugcggcaccguggccaacggcgugcugcagaccuucaugagaauggccuggggcggcagcuacaucgcccuggacagcggcagaggcggcugggacugcaucaugaccagcuaccaguaccugaucauccagaacaccaccugggaggaccacugccaguucagcagacccagccccaucggcuaccugggccugcugagccagagaaccagagacaucuacaucagcagaagacugcugggcaccuucaccuggacccugagcgacagcgagggcaaggacacccccggcggcuacugccugaccagauggaugcugaucgaggccgagcugaagugcuucggcaacaccgccguggccaagugcaacgagaagcacgacgaggaguucugcgacaugcugagacuguucgacuucugcaagcaggccauccagagacugaaggccgaggcccagaugagcauccagcugaucaacaaggccgugaacgcccugaucaacgaccagcugaucaugaagaaccaccugagagacaucaugggcauccccuacugcaacuacagcaaguacugcuaccugaaccacaccgugaccggcaagaccagccugcccaagugcugccuggugagcaacggcagcuaccugaacgagacccacuucagcgacgacaucgagcagcaggccgacaacaugaucaccgagaugcugcagaaggaguacauggagagacagggcaagaccccccugggccugguggaccuguucguguucagcaccagcuucuaccugaucagcaucuuccugcaccuggugaagauccccacccacagacacguggugggcaagcccugccccaagccccacagacugaaccacaugggcaucugcagcugcggcuucuacaagcagcccggcgugcccgugagauggaagagaugaggacuaguuauaagacugacuagcccgaugggccucccaacgggcccuccuccccuccuugcaccgagauuaaucaaaggcucuuuucagagccaccaaaaaaaaaaaaaaaaaaaaaaaaaaaaaaaaaaaaaaaaaaaaaaaaaaaaaaaaaaaaaaaaagaauu

SEQ ID NO: 41316 - RNA, 1658 nt, Artificial Sequence
  mRNA product Design i-3 (hSL-A64-N5) comprising derived and/or modified sequence from LASV(Z0947-SLE-2011;Clade IV)__AIT17840__GPCmut12 (opt4)
aggagaaagcuuaccaugggccagaucgugaccuucuuccaggaggugccccacgugaucgaggaggugaugaacaucgugcugaucgcccugagcauccuggccgugcugaagggccuguacaacuucgccaccugcggccuggugggccuggugaccuuccugcugcugugcggcagaagcugcaccaucagccuguacaagggcguguacgagcugcagacccuggagcugaacauggagacccugaacaugugcaugccccugagcugcaccaagaacaacagccaccacuacaucauggugggcaacgagaccggccuggagcugacccugaccaacaccagcaucaucaaccacaaguucugcaaccugagcgacgcccacaagaagaaccuguacgaccacgcccugaugagcaucaucagcaccuuccaccugagcauccccaacuucaaccaguacgaggccaugagcugcgacuucaacggcggcaagaucagcgugcaguacaaccugagccacagcuacgccggcgacgccgccaaccacugcggcaccguggccaacggcgugcugcagaccuucaugagaauggccuggggcggcagcuacaucgcccuggacagcggcagagacagaugggacugcaucaugaccagcuaccaguaccugaucauccagaacaccaccugggaggaccacugccaguucagcagacccagccccaucggcuaccugggccugcugagccagagaaccagagacaucuacaucagcagaagacugcugggcaccuucaccuggacccugagcgacagcgagggcaaggacacccccggcggcuacugccugaccagauggaugcugaucgaggccgagcugaagugcuucggcaacaccgccguggccaagugcaacgagaagcacgacgaggaguucugcgacaugcugagacuguucgacuucugcaagcaggccauccagagacugaaggccgaggcccagaugagcauccagcugaucaacaaggccgugaacgcccugaucaacgaccagcugaucaugaagaaccaccugagagacaucaugggcauccccuacugcaacuacagcaaguacugcuaccugaaccacaccaccaccggcaagaccagccugcccaagugcugccuggugagcaacggcagcuaccugaacgagacccacuucagcgacgacaucgagcagcaggccgacaacaugaucaccgagaugcugcagaaggaguacauggagagacagggcaagaccccccugggccugguggaccuguucguguucagcaccagcuucuaccugaucagcaucuuccugcaccuggugaagauccccacccacagacacaucgugggcaagcccugccccaagccccacagacugaaccacaugggcaucugcagcugcggccuguacaagcagcccggcgugcccgugaaguggaagagaugaggacuaguuauaagacugacuagcccgaugggccucccaacgggcccuccuccccuccuugcaccgagauuaaucaaaggcucuuuucagagccaccaaaaaaaaaaaaaaaaaaaaaaaaaaaaaaaaaaaaaaaaaaaaaaaaaaaaaaaaaaaaaaaaagaauu

SEQ ID NO: 41317 - RNA, 1658 nt, Artificial Sequence
  mRNA product Design i-3 (hSL-A64-N5) comprising derived and/or modified sequence from LASV(Josiah;Clade IV)__NP_694870__GPCmut12 (opt5)
aggagaaagcuuaccaugggccagaucgugaccuucuuucaagaggucccccacguuauugaagaggugaugaacaucgugcugauugcccucagcguccuggcugugcuuaaggggcuguacaauuucgccacaugcggacucguuggccuggugacguuucuucugcucugugggagauccugcaccacaucucuguauaaaggagucuacgaacugcagacccucgagcugaacauggaaacacuuaauauguguaugccucugagcugcaccaagaacaauucccaucacuauaucauggugggcaacgagacagggcucgagcugacccuuacgaauaccucuauuaucaaccauaaauucuguaaucugagcgacgcgcacaagaaaaaccucuacgaucaugcucugauguccaucauuucuacauuucaccugagcaucccgaauuucaaccaguaugaagccauguccugcgacuuuaauggaggcaagauuagcguucaguacaaccucucucacuccuaugccggcgaugcugccaaucauugugggaccguggcuaacggaguccugcaaacauucaugcggauggccuggggcgggagcuacaucgcgcuugacucuggacgcggcaacugggauugcauuaugaccuccuaccaguaucugaucauucagaauacgacaugggaggaccacugucaguuuagcagacccucuccuaucggguaccucggacugcuuucccaacggacccgcgauaucuauauuagcagacggcugcucggcacauucaccuggacccuguccgacucugaaggcaaggauacacccgggggauacugccugacgcgcuggaugcucaucgaggccgagcugaaauguuuuggcaacaccgcuguggccaagugcaaugaaaaacaugacgaggaguucugcgauaugcuuagacuguuugacuucuguaagcaggcuauucagcggcucaaagccgaagcgcagaugagcauccaacugauuaacaaggccgugaaugcucuuaucaacgaucagcugaucaugaagaaucaccuccgcgacauuauggggaucccuuauugcaacuacuccaaauauuguuaccugaaucacacaaccacaggaagaaccagccugcccaagugcugucucgucucuaacggcuccuaccugaaugaaacgcauuucagcgacgauauugagcagcaagccgacaacaugaucacagagaugcuucagaaagaauauauggagcggcaggggaagaccccucugggacucguugaucuguuuguguucucuaccagcuuuuaccugauuuccaucuuccuucaccucgugaaaaucccgacacaucgccacauugucggcaagucuugccccaaaccucauagacugaaucacaugggcaucuguagcugcgggcuguauaagcagcccggagugccuguuaaguggaaacggugaggacuaguuauaagacugacuagcccgaugggccucccaacgggcccuccuccccuccuugcaccgagauuaaucaaaggcucuuuucagagccaccaaaaaaaaaaaaaaaaaaaaaaaaaaaaaaaaaaaaaaaaaaaaaaaaaaaaaaaaaaaaaaaaagaauu

SEQ ID NO: 41318 - RNA, 1655 nt, Artificial Sequence
  mRNA product Design i-3 (hSL-A64-N5) comprising derived and/or modified sequence from LASV(LP;Clade I)__AAF86701__GPCmut12 (opt5)
aggagaaagcuuaccaugggccagaucauuaccuucuuucaagaggugccccacgucaucgaagagguuaugaacauugugcugaucgcccucagccugcuugcuauucugaaggggcucuacaauaucgccacaugcggaaucauuggccugguggcguuccuuuuucugugugggaaauccugcucucucacgcugaagggaggcuaugaacugcagacccucgagcugaacauggaaacacuuaauauguguaugccucugagcugcaccaaaaacuccucucaucacuacaucagagucgggaaugagacaggacucgagcugacccuuacaaacaccagcauuaucaaucauaaguucuguaaccuguccgacgcucacaaaaagaaucucuaugaucaugcccugaugucuauuaucagcacguuucaccuguccauuccgaacuucaaucaguacgaagccaugagcugcgacuuuaacggcggcaagaucucugugcaguauaaucucucccacagcuacgcuggggaugccgcugagcauuguggaaccguugccaacggcgugcugcaaacauucaugcggauggcguggggagggcgcuauaucgcccuugacucuggcaaagggaauugggauugcauuaugaccuccuaccaguaccugaucauucagaacacaaccugggaagaccacugucaguuuagcagacccucuccuaucggauaucucggccugcuuucccaacggacgcgcgauauuuacaucagcagacggcugcucggcacauucaccuggacacuguccgacucugaggggaacgagacccccggaggcuauugccugacccgcuggaugcucaucgaagcugagcugaaguguuuugggaauacagccgucgcuaaaugcaacgaaaagcaugaugaggaguucugcgacaugcuuagacuguuugauuucuguaaacaggccauucggcgccucaaggcggaagcccagaugagcauccagcugauuaauaaggcugugaacgcccuuaucaaugaccaacugauuaugaaaaaccaccucagagauaucaugggaaucccuuacugcaauuauuccaaguacuguuaucugaaccacacgagcucuggccggaccucccugcccaaaugcugucucauuagcaaugggucuuaccugaacgagacacaguucagcgacgacaucgaacagcaagcugauaauaugauuaccgagaugcuucagaaggaauacaucgagcgccagggaaaaacaccucugggccucguugacauuuuuaucuucuccaccucuuuuuaucugauuagcaucuuccugcaucuuaucaagauuccgacgcacagacauaucgugggcaaacccugcccuaagccccaccggcucaaccauaugggggucuguuccugcggacuguacaagcacccuggcgugcccacaaaauggaagcgcugaggacuaguuauaagacugacuagcccgaugggccucccaacgggcccuccuccccuccuugcaccgagauuaaucaaaggcucuuuucagagccaccaaaaaaaaaaaaaaaaaaaaaaaaaaaaaaaaaaaaaaaaaaaaaaaaaaaaaaaaaaaaaaaaagaauu

SEQ ID NO: 41319 - RNA, 1655 nt, Artificial Sequence
  mRNA product Design i-3 (hSL-A64-N5) comprising derived and/or modified sequence from LASV(803213;Clade II)__AAF86703__GPCmut12 (opt5)
aggagaaagcuuaccaugggccagaucauuaccuucuuucaagaggugccccacgucaucgaagagguuaugaacauugugcugaucgcccucagccugcuugcuauucugaaggggaucuacaauguggccacaugcggacucuucggccugaucuccuuucuucugcucugugggagaucuugcagcgucacguauaaaggaguguacgaacugcagacccuggagcucaacauggcgaaucugaacauguguaugccucuuuccugcacaaagaauaacucucaucacuauauuaugguuggcaaugaaaccgggcuggagcucacacugaccaacacaagcaucauuaaucauaaauucuguaaccuuuccgacgcucacaagaaaaaucuguacgaucaugcccucaugucuaucauuagcaccuuucaccuguccaucccgaacuucaaucaguaugaggccaugagcugcgacuuuaacggaggcaagauuucugugcaguacaaucugucccacagcuucgcugucgaugccgcuaaccauuguggcacgaucgccaacggggugcuccaaaccuuuaugcggauggcguggggaggcucuuauaucgcccuggacuccgggaagggaaauugggauugcauuaugacaagcuaccaguaccuuaucauucagaacaccacaugggaagaccacugucaguucucucgccccuccccuaucggcuaucuggggcuccugagccaaagaacccgggauauuuacaucucccgcagacuucugggaacguuuacauggacccucucugacagcgagggcaaugaagcucccggcggguauugccugacacgguggaugcugaucgaggccgagcucaaauguuucggaaacaccgcuguugccaagugcaaugaaaaacaugaugaggaauuuugcgacaugcugcgccuuuucgauuucuguaagcaggcgauuaaaagacugaagaccgaggcccagauguccauccagcucauuaacaaggcugugaaugcccugaucaacgaccaacuuauuaugaaaaaucaucugcgggauaucaugggcaucccuuacugcaacuauagccgcuacuguuaucucaaucacacagucacggggaagaccucucugcccagaugcugucugguguccaacggaagcuaccucaaugaaacacacuuuucugacgacauugagcagcaggcugauaacaugaucaccgagaugcugcaaaaagaauacauggaccggcagggcaagacaccucuugggcugguggaucucuucgucuuuagcaccuccuucuaucugauuucuaucuuucugcaccuuguuaaaauuccgacgcaucgccacaucgugggaaagcccugcccuaaaccccauagacucaaucacaugggcauuuguagcugcggccuguacaagcacccuggggugcccgucaaguggaaacggugaggacuaguuauaagacugacuagcccgaugggccucccaacgggcccuccuccccuccuugcaccgagauuaaucaaaggcucuuuucagagccaccaaaaaaaaaaaaaaaaaaaaaaaaaaaaaaaaaaaaaaaaaaaaaaaaaaaaaaaaaaaaaaaaagaauu

SEQ ID NO: 41320 - RNA, 1655 nt, Artificial Sequence
  mRNA product Design i-3 (hSL-A64-N5) comprising derived and/or modified sequence from LASV(GA391;Clade III)__CAA36645__GPCmut12 (opt5)
aggagaaagcuuaccaugggccagaucgugaccuucuuucaagaggucccccacguuauugaagaggugaugaacaucgugcugauugcccucagcauccuggcuauucuuaaggggcuguacaaugucgccacaugcggacucaucggccuggugacguuccuucugcucuccgggagaucuuguagccugaucuauaaaggaaccuacgaacugcagacacucgagcugaacauggaaacccuuaauaugugcaugccucuguccuguacaaagaacaauucucaucacuauauucggguuggcaacgagaccgggcucgagcugacacuuaccaauacgagcauccugaaccauaaauuuugcaaucucuccgacgcgcacaagcgcaaccuguacgaucauucucugaugagcauuaucuccaccuuccaccucagcauuccgaauuuuaaccaguaugaagcuaugucuugugacuucaauggaggcaaaaucacagugcaguacaaccugucccacagcuuugccgucgaugccgcuggccauugcgggacccuugccaauggagugcugcaaacauucaugagaauggcuuggggcgggucuuauauugcccucgacuccggacggggcaacugggauuguaucaugaccagcuaccaguaccugaucauucagaacacgacaugggacgaucacugccaguuuucucgccccuccccuaucggguaucuuggacugcucagccaaagaacccgggacauuuacaucucccgcagacugcugggcacauucaccuggacccucucugauagcgagggcaaugaaacacccgggggauauugucugacgcgguggaugcuuauugaggcggagcugaagugcuuuggcaacaccgccguugcuaaguguaaugaaaaacaugacgaggaguucugcgauaugcuccgccuguuugacuucugcaagcaggccaucagacggcuuaaaacagaagcucagauguccauccagcugauuaacaaggccgugaaugcgcucaucaacgaucaacugauuaugaaaaaucaucugcgcgacaucauggggauuccuuacuguaacuauagcagauacugcuaucucaaucacaccucuacaggaaagaccucccugccccgguguugccuuaucagcaacggcucuuaccugaaugaaacgaaguucagcgacgauaucgagcagcaggccgacaacaugauuacagagaugcuccaaaaagaauacaucgaucgccaggggaagaccccucugggacuggucgaccuuuuuguguucuccaccucuuuuuaucucauuagcaucuuccugcaccuggugaaaauuccgacacacagacauaucgucggcaagcccuguccuaaaccccaccggcucaaucauaugggcauuugcuccugugggcuguacaagcagccuggaguucccgugagauggaaacgcugaggacuaguuauaagacugacuagcccgaugggccucccaacgggcccuccuccccuccuugcaccgagauuaaucaaaggcucuuuucagagccaccaaaaaaaaaaaaaaaaaaaaaaaaaaaaaaaaaaaaaaaaaaaaaaaaaaaaaaaaaaaaaaaaagaauu

SEQ ID NO: 41321 - RNA, 1658 nt, Artificial Sequence
  mRNA product Design i-3 (hSL-A64-N5) comprising derived and/or modified sequence from LASV(AV;Clade V)__CCA30314__GPCmut12 (opt5)
aggagaaagcuuaccaugggccagaucgugaccuucuuucaagaggucccccacguuauugaagaggugaugaacaucgugcugauugcccucagcauccuggcuguccuuaaggggcuguacaauauugccacaugcggacucaucggccugaucacguuccuucugcucugugggagauccugcucuagcaaccuguauaaaggaguguacgaacugcagucccucgaccugaauauggagacccuuaacauguguaugccucugucuugcacaaagaauaacagccaucacuauauucggguuggcaaugauaccgggcucgaacugacacuuaccaacacauccauccugaaucauaaauuuuguaaccucucugacgcgcacaagaaagaucuguacgaccaugcucugaugagcauuaucuccaccuuccaccucagcauuccgaauuuuaaccaguaugaggccaugucuugcgauuucaauggaggcaagaucuccgugcaguacaaccugagccacucuuaugccauugacgcugccaaucauuguggcacggucgcuaacgggauccuucaaaccuuuaugcgcauggccuggggaggcuccuacaucgcgcuggauagcgggagaggaaacugggacugcauuaugacaucuuaccaguaucucaucauucagaauaccacaugggagaaccacugucaguucucccggcccagcccuaucggcuaccuggggcuucugucccaacgcaccagagauauuuauaucucucggcgccuccugggaacguuuacauggacccugagcgacuccgaaggcaaugccacacccggcggguacugccucaccagauggaugcugaucgaggcugaacuuaaguguuucggaaacaccgccguggcuaaaugcaaugagaagcaugaugaggaauuuugcgacaugcugcgccucuucgauuuuuguaaacaggccauuagccggcugaagucugaggcgcagauguccauccagcuuauuaacaaagccguuaaugcucugaucaacgaccaacucauuaugaagaaucaccugagagacaucaugggcaucccuuauugcaacuacagcaaguauuguuaccugaaucacacaauuacggggaaaaccucucuccccaagugcugucuggugagcaacggauccuaccuuaaugaaacacauuucucugaugacaucgagcagcaggccgauaacaugauuaccgaaaugcugcaaaaagaguauauggagcggcagggcaagacaccucucgggcuggucgaccuguucguguuuagcaccuccuucuaccuuaucagcauuuuucuccgccuggugaaaaucccgacgcacagacauauugucggaaagcccugcccuaaaccccaccggcugaaucauaugggcaucuguucuugcggccucuauaagcagccugggguucccgugcgcuggaagagaugaggacuaguuauaagacugacuagcccgaugggccucccaacgggcccuccuccccuccuugcaccgagauuaaucaaaggcucuuuucagagccaccaaaaaaaaaaaaaaaaaaaaaaaaaaaaaaaaaaaaaaaaaaaaaaaaaaaaaaaaaaaaaaaaagaauu

SEQ ID NO: 41322 - RNA, 1655 nt, Artificial Sequence
  mRNA product Design i-3 (hSL-A64-N5) comprising derived and/or modified sequence from LASV(Togo/2016/7082;Clade VI)__AMR44577__GPCmut12 (opt5)
aggagaaagcuuaccaugggccagaucauuaccuucuuucaagaggugccccacgucaucgaagagguuaugaacauugugcugaucgcccucagccugcuugcuauucugaaggggguguacaaugucgccacaugcggaaucaucggccucgugacguuccuguuucuuugugggagauccugcucucugauuuauaaaggaagcuacgaacuccagacccuggagcugaacauggaaacacucaauauguguaugccucuguccugcaccaagaacucuagccaucacuauauccggguuggcaaugagacagggcuugagcugacccucacaaacaccuccauuaucaaucauaaauucuguaaccugucugacgcgcacaagcgcaaucuuuacgaucaugcucugaugagcauucucuccacguuucaccugagcaucccgaacuucaaucaguaugaagccaugucuugcgacuuuaacggaggcaaaauuuccgugcaguacaaucugagccacgccuaugcugucgaugccgcugagcauuguggcaccguggccaacgggguucuccaaacauucaugagaauggcguggggaggcucuuacaucgcccuggacuccgggcggggaaauugggauugcaucaugaccagcuaccaguaucuuauuauccagaacacaaccugggaagaccacugucaguuuucucgccccuccccuauuggcuaccuggggcuccugagccaaagaacgcgggauaucuauauuucccgcagacuucugggaacauucaccuggacacucucugacagcgagggcaacgagacccccggcggguacugccugacccgguggaugcugaucgaagcugagcucaaguguuuuggaaauacagccguggcuaagugcaacgaaaaacaugaugaggaguucugcgacaugcugcgccuuuuugauuucuguaagcaggccauccagagacugaaauccgaagcgcagaugagcauucaacucaucaauaaggccgucaacgcucugauuaaugaccagcuuaucaugaaaaaccaucugcgggauaugaugggcauuccuuauugcaauuacucuaaguauuguuaccucaaccacacguccagcgggcgcaccucucugcccaagugcugucuggugagcaauggauccuaccucaacgagacacacuucucugacgacaucgaacagcaagccgauaauaugaucaccgagaugcugcagaaagaauauauugacagacagggcaagacaccucuugggcugguggaucucuuugucuucagcaccuccuuuuaccugaucagcauuuuccugcaccuuaucaaaauuccgacgcaucggcacaucguuggaaagcccugcccuaaaccccaucgccucaaccacaugggcauuuguucuugcggccuguauaagcagccuggggugcccacaagauggaaacggugaggacuaguuauaagacugacuagcccgaugggccucccaacgggcccuccuccccuccuugcaccgagauuaaucaaaggcucuuuucagagccaccaaaaaaaaaaaaaaaaaaaaaaaaaaaaaaaaaaaaaaaaaaaaaaaaaaaaaaaaaaaaaaaaagaauu

SEQ ID NO: 41323 - RNA, 1655 nt, Artificial Sequence
  mRNA product Design i-3 (hSL-A64-N5) comprising derived and/or modified sequence from LASV(KAK-428;Clade n.d. (VII))__ANH09740__GPCmut12 (opt5)
aggagaaagcuuaccaugggccagaucgugaccuucuuucaagaggucccccacguuauugaagaggugaugaacaucgugcugauugcccucagccugcuugcuauccugaaggggcucuacaauuucgccacaugcggagucauuggccugaucacguuucuucugcucugugggagauccugcucugcgaccuauaaaggacaguacgaacugcagacacuggagcucaacauggaaagccugaauauguguaugccucuuuccugcaccaagaacaauucucaucacuauauccgggcuggcaacaauacagggcuggagcucacccugacaaacaccagcauuaucucccauaaauucuguaaucuuucugacgcccacaagaaaaaccuguacgaucauacgcucaugagcauuaucaccacauuucaccuguccauuccgaauuucaaccaguaugaggccaugagcugcgacuuuaauggaggcaagaucucuauucaauacaaccugucccacagcuaugcuggcgaugccgcucagcauugugggaccguggccaauggaguucuccagacauucaugcgcauggcguggggcgggucuuaccuggcccuugacuccggaagacggggcugggauugcaucaucagcucuuaccaguaucugauuauccaaaacaccacgugggacgaucacugucaguuuucccgccccagcccuauuggguaccucggauucgugucccagaagacaagagacaucuauauuucucggcgccugcuuggcaccuuuacauggacccugagcgauuccgaaggccaugacaugcccgggggauacugccucaccagauggaugcugaucgaggcugaucugaaauguuucggcaacacagccgucgcuaagugcaaugaaaaacacgacgaggaguuuugcgauauguggcgccucuucgacuucuguaagcaggccauccaacggcugaaagcggaagcccagaugaacauucagcuuaucaauaaggcugugaacgcccugauuaaugaccaacucaugaugaagaaccaccugagagauaucauggggauuccuuauugcaauuacagcaaauuuuguuaucuuaacaauacgaccacaggacggaccucucugccccgcugcugucucaucuccaacggcagcuaccugaaugagacacauuucucugacgauaucgaacagcaggcugacaacaugauuaccgagaugcugcagaaggaauacauggauagacaagggaaaacgccucucggacugguugaccuuuuuguguucagcacauccuuuuaucugaucaccauuuuccuccaccuggucaagaucccgacccaucggcacauugugggcaaacccugcccuaagccccaucgccugaaucacaugggcaucuguucuugcgggcuuuacaaacagccuggagugcccgucagauggaagcggugaggacuaguuauaagacugacuagcccgaugggccucccaacgggcccuccuccccuccuugcaccgagauuaaucaaaggcucuuuucagagccaccaaaaaaaaaaaaaaaaaaaaaaaaaaaaaaaaaaaaaaaaaaaaaaaaaaaaaaaaaaaaaaaaagaauu

SEQ ID NO: 41324 - RNA, 1655 nt, Artificial Sequence; identical to SEQ ID NO: 41318
  mRNA product Design i-3 (hSL-A64-N5) comprising derived and/or modified sequence from LASV(Pinneo-NIG-1969;Clade I)__AIT17836__GPCmut12 (opt5)

SEQ ID NO: 41325 - RNA, 1655 nt, Artificial Sequence
  mRNA product Design i-3 (hSL-A64-N5) comprising derived and/or modified sequence from LASV(ISTH0009-NIG-2011;Clade II)__AIT17404__GPCmut12 (opt5)
aggagaaagcuuaccaugggccagaucauuaccuucuuucaagaggugccccacgucaucgaagagguuaugaacauugugcugaucgcccucagccugcuugcuauucugaaggggaucuacaauguggccacaugcggacucuucggccuggucuccuuucuucugcucugugggagaucuugcagcacgaccuauaaaggaguguacgaacugcagacacuggagcucgacauggcgucccugaacauguguaugccucuuucuugcaccaagaauaacagccaucacuauaucaugguuggcaaugaaacagggcuggagcucacccugacaaacaccuccauuaucaaucauaaauucuguaaccuuucugaugcucacaagaaaaaucuguacgaccaugcccucaugagcauuaucuccacguuucaccugagcauuccgaacuucaaucaguaugaggccaugucuugcgauuuuaacggaggcaagaucuccgugcaguacaaucugagccacgcuuaugccgucgacgcugccaaccauuguggcaccauugcgaauggggugcuccaaacauucaugcggauggccuggggaggcucuuacaucgcucuggauuccgggaagggaagcugggacugcaucaugaccucuuaccaguaucuuauuauccagaacacaaccugggaagaucacugucaguuuucccgccccagcccuauuggcuaccuggggcuccugucccaaagaacgcgggacaucuauauuucucgcagacuucugggaacauucaccuggacacucagcgauuccgagggcaacgaaacccccggcggguacugccugacccgguggaugcugaucgaggccgagcucaaauguuuuggaaauacagcuguugccaagugcaacgaaaaacaugacgaggaguucugcgauaugcugcgccuuuuugacuucuguaagcaggcgaucagacggcugaaaacggaagcccagaugagcauucagcucaucaauaaggcugugaacgcccugauuaaugaucaacuuaucaugaagaaccaucugcgcgacauuaugggcaucccuuauugcaauuacucuaaauauuguuaccucaaccacaccgucacagggaagaccucccugcccagaugcugucuggugagcaauggaucuuaccucaacgaaacacacuucagcgacgauaucgagcagcaggcugacaauaugauuaccgagcugcuucaaaaagaauauauggaucggcagggcaagacgccucuggggcucguggaccuguuugucuucuccacaucuuuuuaccugaucagcauuuuccuucaccucaucaaaauuccgacccaucgccacaucaccggaaagcccugcccuaaaccccauagacugaaccacaugggcauuuguuccugcggccuguauaagcacccugggguucccgugaaguggaaacggugaggacuaguuauaagacugacuagcccgaugggccucccaacgggcccuccuccccuccuugcaccgagauuaaucaaaggcucuuuucagagccaccaaaaaaaaaaaaaaaaaaaaaaaaaaaaaaaaaaaaaaaaaaaaaaaaaaaaaaaaaaaaaaaaagaauu

SEQ ID NO: 41326 - RNA, 1655 nt, Artificial Sequence
  mRNA product Design i-3 (hSL-A64-N5) comprising derived and/or modified sequence from LASV(ISTH2010-NIG-2012;Clade II)__AIT17482__GPCmut12 (opt5)
aggagaaagcuuaccaugggccagaucauuaccuucuuucaagaggugccccacgucaucgaagagguuaugaacauugugcugaucgcccucagccugcuugcuauucugaaggggaucuacaauguggccacaugcggacucuucggccuggucuccuuucuucugcucugugggagaucuugcagcacgaccuauaaaggaguguacgaacugcagacacuggagcucgacauggcgucccugaacauguguaugccucuuucuugcaccaagaauaacagccaucacuauaucaugguuggcaaugaaacagggcuggagcucacccugacaaacaccuccauuaucaaucauaaauucuguaaccuuucugaugcucacaagaaaaaucuguacgaccaugcccucaugagcauuaucuccacguuucaccugagcauuccgaacuucaaucaguaugaggccaugucuugcgauuuuaacggaggcaagaucuccgugcaguacaaucugagccacgcuuaugccgucgacgcugccaaccauuguggcaccauugcgaauggggugcuccaaacauucaugcggauggccuggggaggcucuuacaucgcucuggauuccgggaagggaagcugggacugcaucaugaccucuuaccaguaucuuauuauccagaacauuacaugggaagaucacugucaguuuucccgccccagcccuaucggcuaccuggggcuccugucccaaagaacccgggacauuuauaucucucgcagacuucugggaacguucacauggacccucagcgauuccgagggcaacgaaacacccggcggguacugccugacccgguggaugcugaucgaggccgagcucaaauguuuuggaaauaccgcuguugccaagugcaacgaaaaacaugacgaggaguucugcgauaugcugcgccuuuuugacuucuguaagcaggcgauuagacggcugaaaacagaagcccagaugagcauccagcucauuaauaaggcugugaacgcccugaucaaugaucaacuuauuaugaagaaccaucugcgcgacaucaugggcaucccuuauugcaauuacucuaaauauuguuaccucaaccacacggucaccgggaagacaucccugcccagaugcugucuggugagcaauggaucuuaccucaacgaaacccacuucagcgacgauauugagcagcaggcugacaauaugaucacagagcugcuucaaaaagaauauauugaucggcagggcaagaccccucuggggcucguggaccuguuugucuucuccacgucuuuuuaccugaucagcauuuuccuucaccucguuaaaaucccgacacaucgccacguggugggaaagcccugcccuaaaccccauagacugaaccacaugggcauuuguuccugcggccuguauaagcacccugggguccccgugaaguggaaacggugaggacuaguuauaagacugacuagcccgaugggccucccaacgggcccuccuccccuccuugcaccgagauuaaucaaaggcucuuuucagagccaccaaaaaaaaaaaaaaaaaaaaaaaaaaaaaaaaaaaaaaaaaaaaaaaaaaaaaaaaaaaaaaaaagaauu

SEQ ID NO: 41327 - RNA, 1655 nt, Artificial Sequence
  mRNA product Design i-3 (hSL-A64-N5) comprising derived and/or modified sequence from LASV(Lassa virus/H.sapiens-wt/NGA/2015/ISTH_0543;Clade II)__AVO03639__GPCmut12 (opt5)
aggagaaagcuuaccaugggccagaucauuaccuucuuucaagaggugccccacgucaucgaagagguuaugaacauugugcugaucgcccucagccugcuugcuauucugaaggggaucuacaauguggccacaugcggacucuucggccuggucuccuuucuucugcucugugggagaucuugcagcacgaccuauaaaggaguguacgaacugcagacacuggagcucgacauggcgaaccugaauauguguaugccucuuuccugcaccaagaacaauucucaucacuauaucaugguuggcaacgaaacagggcuggagcucacccugacaaauaccagcauuaucaaccauaaauucuguaaucuuuccgaugcucacaagaaaaaccuguacgaccaugcccucaugucuauuaucagcacguuucaccuguccauuccgaauuucaaccaguaugaggccaugagcugcgauuuuaauggaggcaagaucucugugcaguacaaccugucccacaccuaugcugucgacgccgcuaaucauuguggcacaauugccaacggggugcuccaaaccuucaugcggauggcguggggaggcagcuacaucgcccuggauucugggaagggauccugggacugcaucaugacaagcuaccaguaucuuguuauucagaacaccacgugggaagaucacugucaguuuucucgccccuccccuaucggcuaccuggggcuccugagccaaagaacacgggacauuuauaucucccgcagacuucugggaaccuucacauggacccucucugauagcgagggcaaugaaacccccggcggguacugccugacacgguggaugcugauugaggcugagcucaaauguuuuggaaacacggccguggcuaagugcaaugaaaaacaugacgaggaguucugcgauaugcugcgccuuuuugacuucuguaagcaggccaucagacggcugaaaaccgaagcgcagauguccauccagcucauuaacaaggccgucaaugcucugaucaacgaucaacuuauuaugaagaaucaucugcgcgacaucaugggcauuccuuauugcaacuacagcaaauauuguuaccucaaucacacagugaccgggaagacaucucugcccagaugcugucugguguccaacggaagcuaccucaaugaaacccacuucucugacgauaucgagcagcaggccgacaacaugaucacggagcugcuucaaaaagaauauauugaucggcagggcaagacaccucuggggcucgucgaccuguuuguuuucagcaccuccuuuuaccugaucucuauuuuccuucaccucgugaaaaucccgacccaucgccacauuacaggaaagcccugcccuaaaccccauagacugaaucacaugggcaucuguagcugcggccuguauaagcacccuggggugcccgucaaguggaaacggugaggacuaguuauaagacugacuagcccgaugggccucccaacgggcccuccuccccuccuugcaccgagauuaaucaaaggcucuuuucagagccaccaaaaaaaaaaaaaaaaaaaaaaaaaaaaaaaaaaaaaaaaaaaaaaaaaaaaaaaaaaaaaaaaagaauu

SEQ ID NO: 41328 - RNA, 1655 nt, Artificial Sequence
  mRNA product Design i-3 (hSL-A64-N5) comprising derived and/or modified sequence from LASV(Lassa virus/H.sapiens-wt/NGA/2016/ISTH_0009;Clade II)__AVO03571__GPCmut12 (opt5)
aggagaaagcuuaccaugggccagaucauuaccuucuuucaagaggugccccacgucaucgaagagguuaugaacauugugcugaucgcccucagccugcuugcuauucugaaggggaucuacaauguggccacaugcggacuccugggccuugucuccuuccugcuccugugugggagaucuugcagcacgaccuauaaaggaguguacgaacugcagacacucgagcuggacauggcgucccuuaacauguguaugccucugucuugcaccaagaauaacagccaucacuauaucaugguuggcaaugaaacagggcucgagcugacccuuacaaacaccuccauuaucaaucauaaauuuuguaaccugucugaugcucacaagaaaaaucucuacgaccaugcccugaugagcauuaucuccacguuccaccugagcauuccgaacuuuaaucaguaugaggccaugucuugcgauuucaacggaggccggaucuccgugcaguacaaucucagccacucuuaugcugucgacgccgcuaaccauuguggcaccauugccaauggggugcugcaaacauuuaugcgcauggcguggggaggcuccuacaucgcccuugauagcgggaagggaucuugggacugcaucaugaccuccuaccaguaucugauuauccagaacacaaccugggaagaucacugucaguucagcagacccuccccuauuggcuaccucgggcugcuuucucaacggacgcgcgacaucuauauuagcagacggcugcucggaacauuuaccuggacacuguccgauagcgagggcaacgaaacccccggcggguacugccugacccgcuggaugcucaucgaggcugagcugaaguguuucggaaauacagccguugcuaaaugcaacgaaaagcaugacgaggaauuuugcgauaugcuuagacuguucgacuuuuguaaacaggccauccggcgccucaagacggaggcgcagaugucuauucagcugaucaauaaagccgugaacgcucuuauuaaugaucaacugaucaugaagaaccaccucagagacauuaugggcaucccuuauugcaauuacuccaaguauuguuaccugaaccacaccgucacagggaaaaccagccugccccggugcugucucgugucuaauggaagcuaccugaacgaaacacauuucuccgacgauaucgagcagcaggccgacaauaugauuaccgagcuucugcaaaaggaauauaucgaucgccagggcaaaacgccucucgggcugguggaccuguucgucuuuucuaccagcuucuaccuuauuuccaucuuucuccaccugguuaagauuccgacacauagacacaucaccggaaaacccugcccuaagccccaucggcugaaccacaugggcauuuguagcugcggccucuauaaucacccuggggugcccgugaaauggaagcgcugaggacuaguuauaagacugacuagcccgaugggccucccaacgggcccuccuccccuccuugcaccgagauuaaucaaaggcucuuuucagagccaccaaaaaaaaaaaaaaaaaaaaaaaaaaaaaaaaaaaaaaaaaaaaaaaaaaaaaaaaaaaaaaaaagaauu

SEQ ID NO: 41329 - RNA, 1655 nt, Artificial Sequence
  mRNA product Design i-3 (hSL-A64-N5) comprising derived and/or modified sequence from LASV(Lassa virus/H.sapiens-wt/NGA/2016/ISTH_0017;Clade II)__AVO03567__GPCmut12 (opt5)
aggagaaagcuuaccaugggccagaucauuaccuucuuucaagaggugccccacgucaucgaagagguuaugaacauugugcugaucgcccucagccugcuugcuauucugaaggggaucuacaauguggccacaugcggacucuucggccuggucuccuuucuucugcucugugggagaucuugcagcacgaccuauaaaggaguguacgaacugcagacacuggagcucgacauggcgucccugaacauguguaugccucuuucuugcaccaagaauaacagccaucacuauaucaugguuggcaaugaaacagggcuggagcucacccugacaaacaccuccauuaucaaucauaaauucuguaaccuuucugaugcucacaagaaaaaucuguacgaccaugcccucaugagcauuaucuccacguuucaccugagcauuccgaacuucaaucaguaugaggccaugucuugcgauuuuaacggaggcaagaucuccgugcaguacaaucugagccacaccuaugcuauugacgccgcuaaccauuguggcacaaucgccaaugggguccuccaaaccuucaugcggauggcguggggaggcucuuacaucgcccuggauuccgggaagggaagcugggacugcauuaugacaucuuaccaguaucuuaucauucagaacaccacgugggaagaucacugucaguuuucccgccccagcccuaucggcuaccuggggcuccugucccaaagaacacgggacauuuauaucucucgcagacuucugggaaccuucacauggacccucagcgauuccgagggcaacgaaacccccggcggguacugccugacacgguggaugcugaucgaggcugagcucaaauguuuuggaaauacggccguggcuaagugcaacgaaaaacaugacgaggaguucugcgauaugcugcgccuuuuugacuucuguaagcaggccauuagacggcugaaaaccgaagcgcagaugagcauccagcucauuaauaaggccguuaacgcucugaucaaugaucaacuuauuaugaagaaccaucugcgcgacaucaugggcaucccuuauugcaauuacucuaaauauuguuaccucaaccacacagugaccgggaagacaucccugcccagaugcugucuggucagcaauggaucuuaccucaacgaaacccacuucagcgacgauauugagcagcaggccgacaauaugaucacggagcugcuucaaaaagaauauauggaucggcagggcaagacaccucuggggcucguggaccuguuuguguucuccaccucuuuuuaccugauuagcaucuuccuucaccucguccgcauuccgacccauagacacguuaucggaaaacccugcccuaagccccaucggcugaaccacaugggcauuuguuccugcggccuguauaaacacccuggggugcccgugaaguggaagcgcugaggacuaguuauaagacugacuagcccgaugggccucccaacgggcccuccuccccuccuugcaccgagauuaaucaaaggcucuuuucagagccaccaaaaaaaaaaaaaaaaaaaaaaaaaaaaaaaaaaaaaaaaaaaaaaaaaaaaaaaaaaaaaaaaagaauu

SEQ ID NO: 41330 - RNA, 1655 nt, Artificial Sequence
  mRNA product Design i-3 (hSL-A64-N5) comprising derived and/or modified sequence from LASV(Lassa virus/H.sapiens-wt/NGA/2018/ISTH_0959;Clade II)__AVV65099__GPCmut12 (opt5)
aggagaaagcuuaccaugggccagaucauuaccuucuuucaagaggugccccacgucaucgaagagguuaugaacauugugcugaucgcccucagccugcuugcuauucugaaggggaucuacaauguggucacaugcggacucuucggccugguguccuuucuucugcucugugggagaucuugcagcacgaccuauaaaggaguuuacgaacugcagacacuggagcucgacauggccucccugaacauguguaugccucuuucuugcaccaagaauaacagccaucacuauaucauggugggcaaugaaacagggcuggagcucacccugacaaacaccuccauuaucaaucauaaauucuguaaccuuucugaugcgcacaagaaaaaucuguacgaccaugcucucaugagcauuaucuccacguuucaccugagcauuccgaacuucaaucaguaugaggccaugucuugcgauuuuaacggaggcaagaucuccguccaguacaaucugagccacgccuaugcuauugacgccgcuaaccauuguggcaccaucgccaauggggugcuccaaacauucaugcggauggcguggggaggcucuuacaucgcccuggauuccgggaagggaagcugggacugcauuaugaccucuuaccaguaucuuaucauucagaacacaaccugggaagaucacugucaguuuucccgccccagcccuaucggcuaccuggggcuccugucccaaagaacgcgggacauuuauaucucucgcagacuucugggaacauucaccuggacacucagcgauuccgagggcaacgaaacccccggcggguacugccugacccgguggaugcugaucgaggcugagcucaaauguuuuggaaauacagccguugcuaagugcaacgaaaaacaugacgaggaguucugcgauaugcugcgccuuuuugacuucuguaagcaggccauuagacggcugaaaacggaagcgcagaugagcauccagcucauuaauaaggccgugaacgcucugaucaaugaucaacuuauuaugaagaaccaucugcgcgacaucaugggcaucccuuauugcaauuacucuaaauauuguuaccucaaccacaccgucacagggaagaccucccugcccagaugcugucuggugagcaauggaucuuaccucaacgaaacacacuucagcgacgauauugagcagcaggccgacaauaugaucaccgagcugcuucaaaaagaauauauugaucggcagggcaagacgccucuggggcucguggaccuguuugucuucuccacaucuuuuuaccugaucagcauuuuccuucaccucguuaaaaucccgacccaucgccacgugauuggaaagcccugcccuaaaccccauagacugaaccacaugggcaucuguuccugcggccuguauaagcacccuggggugcccgucaaguggaaacggugaggacuaguuauaagacugacuagcccgaugggccucccaacgggcccuccuccccuccuugcaccgagauuaaucaaaggcucuuuucagagccaccaaaaaaaaaaaaaaaaaaaaaaaaaaaaaaaaaaaaaaaaaaaaaaaaaaaaaaaaaaaaaaaaagaauu

SEQ ID NO: 41331 - RNA, 1655 nt, Artificial Sequence
  mRNA product Design i-3 (hSL-A64-N5) comprising derived and/or modified sequence from LASV(LASV003-NIG-2008;Clade II)__AIT17580__GPCmut12 (opt5)
aggagaaagcuuaccaugggccagaucauuaccuucuuucaagaggugccccacgucaucgaagagguuaugaacauugugcugaucgcccucagccugcuugcuauucugaaggggaucuacaauguggccacaugcggacucuucggccuggucuccuuucuucugcucugugggagaucuugcagcacgaccuauaaaggaguguacgaacugcagacacuggagcucgacauggcgucccugaacauguguaugccucuuucuugcaccaagaauaacagccaucacuauaucaugguuggcaaugaaacagggcuggagcucacccugacaaacaccuccauuaucaaucauaaauucuguaaccuuucugaugcucacaagaaaaaucuguacgaccaugcccucaugagcauuaucuccacguuucaccugagcauuccgaacuucaaucaguaugaggccaugucuugcgauuuuaacggaggcaagaucuccgugcaguacaaucugagccacaccuaugcugucgacgccgcuaaccauuguggcacaauugccaauggggugcuccaaaccuucaugcggauggcguggggaggcucuuacaucgcccuggauuccgggaagggaagcugggacugcaucaugacaucuuaccaguaucuuauuauccagaacaccacgugggaagaucacugucaguuuucccgccccagcccuauuggcuaccuggggcuccugucccaaagaacacgggacaucuauauuucucgcagacuucugggaaccuucacauggacccucagcgauuccgagagcaacgaaacccccggcggcuacugccugacacgguggaugcugaucgaggcugagcucaaauguuuugggaauacggccguugcuaagugcaacgaaaaacaugacgaggaguucugcgauaugcugcgccuuuuugacuucuguaagcaggccaucagacggcugaaagcggaagcccagaugucuauucagcucaucaauaaggcugugaacgcccugauuaaugaucaacuuaucaugaagaaccaucugcgcgacauuaugggaaucccuuauugcaauuacuccaaauauuguuaccucaaccacaccgucacaggcagaaccagccugccccggugcugucuggugucuaaugggagcuaccucaacgaaacacacuucuccgacgauaucgagcagcaggcugacaauaugauuaccgagcugcuucaaaaggaauauauggaucgccagggaaaaacgccucugggccucguggaccuguuugucuucucuaccagcuuuuaccugaucuccauuuuccuucaccucguuaagaucccgacacauagacacgugauugggaaacccugcccuaagccccaucggcugaaccacaugggaaucuguagcugcggccuguauaaacacccuggcgugcccgucaaguggaagcgcugaggacuaguuauaagacugacuagcccgaugggccucccaacgggcccuccuccccuccuugcaccgagauuaaucaaaggcucuuuucagagccaccaaaaaaaaaaaaaaaaaaaaaaaaaaaaaaaaaaaaaaaaaaaaaaaaaaaaaaaaaaaaaaaaagaauu

SEQ ID NO: 41332 - RNA, 1655 nt, Artificial Sequence
  mRNA product Design i-3 (hSL-A64-N5) comprising derived and/or modified sequence from LASV(LASV035-NIG-2009;Clade II)__AIT17588__GPCmut12 (opt5)
aggagaaagcuuaccaugggccagaucauuaccuucuuucaagaggugccccacgucaucgaagagguuaugaacauugugcugaucgcccucagccugcuugcuauucugaaggggaucuacaauguggccacaugcggacucuucggccuggucuccuuucuucugcucugugggagaucuugcagcacgaccuauaaaggaguguacgaacugcagacacuggagcucgacauggcgucccugaacauguguaugccucuuucuugcaccaagaauaacagccaucacuauaucaugguuggcaaugaaacagggcuggagcucacccugacaaacaccuccauuaucaaucauaaauucuguaaccuuucugaugcucacaagaaaaaucuguacgaccaugcccucaugagcauuaucuccacguuucaccugagcauuccgaacuucaaucaguaugaggccaugucuugcgauuuuaacggaggcaagaucuccgugcaguacaaucugagccacgcuuaugccgucgacgcugccaaccauuguggcaccauugcgaauggggugcuccaaacauucaugcggauggccuggggaggcucuuacaucgcucuggauuccgggaagggaagcugggacugcaucaugaccucuuaccaguaucuuauuauccagaacacaaccugggaagaucacugucaguuuucccgccccagcccuauuggcuaccuggggcuccugucccaaagaacgcgggacaucuauauuucucgcagacuucugggaacauucaccuggacacucagcgauuccgagggcaacgaaacccccggcggguacugccugacccgguggaugcugaucgaggccgagcucaaauguuuuggaaauacagcuguugccaagugcaacgaaaaacaugacgaggaguucugcgauaugcugcgccuuuuugacuucuguaagcaggcgaucagacggcugaaagccgaagcucagaugagcauucagcucaucaauaaggccgugaacgcucugauuaaugaucaacuuaucaugaagaaccaucugcgcgacauuaugggcaucccuuauugcaauuacucuaaauauuguuaccucaaccacacggucaccgggaagacaucccugcccagaugcugucuggugagcaauggaucuuaccucaacgaaacccacuucagcgacgauaucgagcagcaggccgacaauaugauuacagagcugcuucaaaaagaauauaucgaucggcagggcaagaccccucuggggcucguggaccuguuugucuucuccacgucuuuuuaccugauuagcaucuuccuucaccucguuaaaauuccgacacaucgccacgugaucggaaagcccugcccuaaaccccauagacugaaccacaugggcauuuguuccugcggccuguauaagcacccuggggugcccgucaaguggaaacggugaggacuaguuauaagacugacuagcccgaugggccucccaacgggcccuccuccccuccuugcaccgagauuaaucaaaggcucuuuucagagccaccaaaaaaaaaaaaaaaaaaaaaaaaaaaaaaaaaaaaaaaaaaaaaaaaaaaaaaaaaaaaaaaaagaauu

SEQ ID NO: 41333 - RNA, 1655 nt, Artificial Sequence
  mRNA product Design i-3 (hSL-A64-N5) comprising derived and/or modified sequence from LASV(LASV1000-NIG-2009;Clade II)__AIT17782__GPCmut12 (opt5)
aggagaaagcuuaccaugggccagaucauuaccuucuuucaagaggugccccacgucaucgaagagguuaugaacauugugcugaucgcccucagccugcuugcuauucugaaggggaucuacaauguggccacaugcggacucuucggccuggucuccuuucuucugcucugugggagaucuugcagcacgaccuauaaaggaguguacgaacugcagacacuggagcucgacauggcgucccugaacauguguaugccucuuucuugcaccaagaauaacagccaucacuauaucaugguuggcaaugaaacagggcuggagcucacccugacaaacaccuccauuaucaaucauaaauucuguaaccuuucugaugcucacaagaaaaaucuguacgaccaugcccucaugagcauuaucuccacguuucaccugagcauuccgaacuucaaucaguaugaggccaugucuugcgauuuuaacggaggcaagaucuccgugcaguacaaucugagccacaccuaugcugucgacgccgcuaaccauuguggcacaauugccaauggggugcuccaaaccuucaugcggauggcguggggaggcucuuacaucgcccuggauuccgggaagggaagcugggacugcaucaugacaucuuaccaguaucuuauuauccagaacaccacgugggaagaucacugucaguuuucccgccccagcccuauuggcuaccuggggcuccugucccaaagaacacgggacaucuauauuucucgcagacuucugggaaccuucacauggacccucagcgauuccgagggcaacgaaacccccggcggguacugccugacacgguggaugcugaucgaggcugagcucaaauguuuuggaaauacggccguugcuaagugcaacgaaaaacaugacgaggaguucugcgauaugcugcgccuuuuugacuucuguaagcaggccaucaaaagacugaagaccgaagcgcagaugagcauucagcucaucaauaaggccgugaacgcucugauuaaugaucaacuuaucaugaaaaaccaucugcgggacauuaugggcaucccuuauugcaauuacucuaaguauuguuaccucaaccacacagucaccgggaaaacaucccugccccgcugcugucuggugagcaauggaucuuaccucaacgaaacccacuucagcgacgauaucgagcagcaggccgacaauaugauuacggagcugcuucaaaaggaauauaucgauagacagggcaaaacaccucuggggcucguggaccuguuugucuucuccaccucuuuuuaccugauuagcaucuuccuucaccucguuaagauuccgacccaucggcacguggugggaaaacccugcccuaagccccaucgccugaaccacaugggcaucuguuccugcggccuguauaagcacccugggguccccgugaaauggaagagaugaggacuaguuauaagacugacuagcccgaugggccucccaacgggcccuccuccccuccuugcaccgagauuaaucaaaggcucuuuucagagccaccaaaaaaaaaaaaaaaaaaaaaaaaaaaaaaaaaaaaaaaaaaaaaaaaaaaaaaaaaaaaaaaaagaauu

SEQ ID NO: 41334 - RNA, 1655 nt, Artificial Sequence
  mRNA product Design i-3 (hSL-A64-N5) comprising derived and/or modified sequence from LASV(LASV221-NIG-2010;Clade II)__AIT17624__GPCmut12 (opt5)
aggagaaagcuuaccaugggccagaucauuaccuucuuucaagaggugccccacgucaucgaagagguuaugaacauugugcugaucgcccucagccugcuugcuauucugaaggggaucuacaauguggccacaugcggacucuucggccuggucuccuuucuucugcucugugggagaucuugcagcacgaccuauaaaggaguguacgaacugcagacacuggagcucgacauggcgucccugaacauguguaugccucuuucuugcaccaagaauaacagccaucacuauaucaugguuggcaaugaaacagggcuggagcucacccugacaaacaccuccauuaucaaucauaaauucuguaaccuuucugaugcucacaagaaaaaucuguacgaccaugcccucaugagcauuaucuccacguuucaccugagcauuccgaacuucaaucaguaugaggccaugucuugcgauuuuaacggaggcaagaucuccgugcaguacaaucugagccacaccuaugcuauugacgccgcuaaccauuguggcacaaucgccaaugggguccuccaaaccuucaugcggauggcguggggaggcucuuacaucgcccuggauuccgggaagggaagcugggacugcauuaugacaucuuaccaguaucuuaucauucagaacaccacgugggaagaucacugucaguuuucccgccccagcccuaucggcuaccuggggcuccugucccaaagaacacgggacauuuauaucucucgcagacuucugggaaccuucacauggacccucagcgauuccgagggcaacgaaacccccggcggguacugccugacacgguggaugcugaucgaggcugagcucaaauguuuuggaaauacggccguggcuaagugcaacgaaaaacaugacgaggaguucugcgauaugcugcgccuuuuugacuucuguaagcaggccauuagacggcugaaaaccgaagcgcagaugagcauccagcucauuaauaaggccguuaacgcucugaucaaugaucaacuuauuaugaagaaccaucugcgcgacaucaugggcaucccuuauugcaauuacucuaaauauuguuaccucaaccacacagugaccgggaagacaucccugcccagaugcugucuggucagcaauggaucuuaccucaacgaaacccacuucagcgacgauauugagcagcaggccgacaauaugaucacggagaugcugcaaaaagaauauauggaucggcagggcaagacaccucuugggcugguggaccucuuuguguucuccaccucuuuuuaccugauuagcaucuuccugcaccuugucaaaauuccgacccaucgccacguuaucggaaagcccugcccuaaaccccauagacucaaccacaugggcauuuguuccugcggccuguauaagcacccuggggugcccgugaaguggaaacggugaggacuaguuauaagacugacuagcccgaugggccucccaacgggcccuccuccccuccuugcaccgagauuaaucaaaggcucuuuucagagccaccaaaaaaaaaaaaaaaaaaaaaaaaaaaaaaaaaaaaaaaaaaaaaaaaaaaaaaaaaaaaaaaaagaauu

SEQ ID NO: 41335 - RNA, 1655 nt, Artificial Sequence
  mRNA product Design i-3 (hSL-A64-N5) comprising derived and/or modified sequence from LASV(LASV237-NIG-2010;Clade II)__AIT17638__GPCmut12 (opt5)
aggagaaagcuuaccaugggccagaucauuaccuucuuucaagaggugccccacgucaucgaagagguuaugaacauugugcugaucgcccucagccugcuugcuauucugaaggggaucuacaauguggccacaugcggacucuucggccuggucuccuuucuucugcucugugggagaucuugcagcacgaccuauaaaggaguguacgaacugcagacacuggagcucgacauggcgucccugaacauguguaugccucuuucuugcaccaagaauaacagccaucacuauaucaugguuggcaaugaaacagggcuggagcucacccugacaaacaccuccauuaucaaucauaaauucuguaaccuuucugaugcucacaagaaagaccuguacgaucaugcccucaugagcauuaucuccacguuucaccugagcauuccgaauuucaaccaguaugaggccaugucuugcgacuuuaauggaggcaagaucuccgugcaguacaaccugagccacaccuaugcugucgaugccgcuaaucauuguggcacaauugccaacggggugcuccaaaccuucaugcggauggcguggggaggcucuuacaucgcccuggacuccgggaagggaagcugggauugcaucaugacaucuuaccaguaucuuauuauccagaauaccacgugggaagaccacugucaguuuucccgccccagcccuauuggcuaccuggggcuccugucccaaagaacacgggauaucuauauuucucgcagacuucugggaaccuucacauggacccucagcgacuccgagggcaacgaaacccccggcggguacugccugacacgguggaugcugaucgaggcugagcucaaauguuuuggaaacacggccguugcuaagugcaaugaaaaacaugaugaggaguucugcgacaugcugcgccuuuuugauuucuguaagcaggccaucagacggcugaaaaccgaagcgcagaugagcauucagcucaucaacaaggccgugaaugcucugauuaacgaccaacuuaucaugaagaaucaucugcgcgacauuaugggcaucccuuauugcaacuacucuaaauauuguuaccucaaucacacagucaccgggaagacaucccugcccagaugcugucuggugagcaacggaucuuaccucaaugaaacccacuucagcgaugacaucgagcagcaggccgauaacaugauuacggagcugcuucaaaaagaauauauggaccggcagggcaagacaccucuggggcucguggaucuguuugucuucuccaccucuuuuuaccugaucagcauuuuccuucaccucaucaaaauuccgacccaucgccacaucacaggaaagcccugcccuaaaccccauagacugaaucacaugggcauuuguuccugcggccuguauaagcacccugggguucccgugaaguggaaacggugaggacuaguuauaagacugacuagcccgaugggccucccaacgggcccuccuccccuccuugcaccgagauuaaucaaaggcucuuuucagagccaccaaaaaaaaaaaaaaaaaaaaaaaaaaaaaaaaaaaaaaaaaaaaaaaaaaaaaaaaaaaaaaaaagaauu

SEQ ID NO: 41336 - RNA, 1655 nt, Artificial Sequence
  mRNA product Design i-3 (hSL-A64-N5) comprising derived and/or modified sequence from LASV(LASV253-NIG-2011;Clade II)__AIT17670__GPCmut12 (opt5)
aggagaaagcuuaccaugggccagaucauuaccuucuuucaagaggugccccacgucaucgaagagguuaugaacauugugcugaucgcccucagccugcuugcuauucugaaggggaucuacaauguggccacaugcggacucuucggccuggucuccuuucuucugcucugugggagaucuugcagcacgaccuauaaaggaguguacgaacugcagacacuggagcucgacauggcgucccugaacauguguaugccucuuucuugcaccaagaauaacagccaucacuauaucaugguuggcaaugaaacagggcuggagcucacccugacaaacaccuccauuaucaaucauaaauucuguaaccuuucugaugcucacaagaaaaaucuguacgaccaugcccucaugagcauuaucuccacguuucaccugagcauuccgaacuucaaucaguaugaggccaugucuugcgauuuuaacggaggcaagaucuccgugcaguacaaucugagccacaccuaugcugucgacgccgcuaaccauuguggcacaauugccaauggggugcuccaaaccuucaugcggauggcguggggaggcucuuacaucgcccuggauuccgggaagggaagcugggacugcaucaugacaucuuaccaguaucuuauuauccagaacaccacgugggaagaucacugucaguuuucccgccccagcccuauuggcuaccuggggcuccugucccaaagaacacgggacaucuauauuucucgcagacuucugggaaccuucacauggacccucagcgauuccgagggcaacgaaacccccggcggguacugccugacacgguggaugcugaucgaggcugagcucaaauguuuuggaaauacggccguugcuaagugcaacgaaaaacaugacgaggaguucugcgauaugcugcgccuuuuugacuucuguaagcaggccaucagacggcugaaagcggaagcccagaugagcauucagcucaucaauaaggcugugaacgcccugauuaaugaucaacuuaucaugaagaaccaucugcgcgacauuaugggcaucccuuauugcaauuacucuaaauauuguuaccucaaccacaccgucacagggagaaccucccugccccggugcugucuggugagcaauggaucuuaccucaacgaaacacacuucagcgacgauaucgagcagcaggcugacaauaugauuaccgagcugcuucaaaaggaauauaucgaucgccagggcaaaacgccucuggggcucguggaccuguuugucuucuccacaucuuuuuaccugauuagcaucuuccuucaccucguuaagauuccgacccauagacacaucauuggaaaacccugcccuaagccccaucggcugaaccacaugggcaucuguuccugcggccuguauaaacacccuggggugcccgugaaguggaagcgcugaggacuaguuauaagacugacuagcccgaugggccucccaacgggcccuccuccccuccuugcaccgagauuaaucaaaggcucuuuucagagccaccaaaaaaaaaaaaaaaaaaaaaaaaaaaaaaaaaaaaaaaaaaaaaaaaaaaaaaaaaaaaaaaaagaauu

SEQ ID NO: 41337 - RNA, 1655 nt, Artificial Sequence
  mRNA product Design i-3 (hSL-A64-N5) comprising derived and/or modified sequence from LASV(LASV254-NIG-2011;Clade II)__AIT17674__GPCmut12 (opt5)
aggagaaagcuuaccaugggccagaucauuaccuucuuucaagaggugccccacgucaucgaagagguuaugaacauugugcugaucgcccucagccugcuugcuauucugaaggggaucuacaauguggccacaugcggacucuucggccuggucuccuuucuucugcucugugggagaucuugcagcacgaccuauaaaggaguguacgaacugcagacacuggagcucgacaugaccaaccugaauauguguaugccucuuuccugcacaaagaacaauucucaucacuauaucaugguuggcaacgaaaccgggcuggagcucacacugaccaauacgagcauuaucaaccauaaauucuguaaucuuuccgaugcgcacaagaaaaaccuguacaaucaugcucucaugucuauuaucagcaccuuucaccuguccauuccgaacuucaaucaguaugaggccaugagcugcgacuuuaacggaggcaagaucucugugcaguacaaucugucccacagcuaugccgucgaugcugccaaccauuguggcacaauugcuaacggggugcuccaaaccuucaugcggauggccuggggaggcucuuacaucgcgcuggacuccgggaagggaaauugggauugcaucaugacaagcuaccaguaucuuauuauccagaacaccacgugggaagaccacugucaguuuucucgccccuccccuauuggcuaccuggggcuccugagccaaagaacacgggauaucuauauuucccgcagacuucugggaaccuucacauggacccucucugacagcgagggcaaugaaacccccggcggguacugccugacacgguggaugcugaucgaggccgagcucaaauguuuuggaaacacggcuguugccaagugcaaugaaaaacaugaugaggaguucugcgacaugcugcgccuuuuugauuucuguaagcaggcuaucagacggcugaaaaccgaagcccaggcgaacauucagcucaucaauaaggccgugaacgcucugauuaaugaccaacuuaucaugaagaaccaucugcgcgauauuaugggcaucccuuauugcaauuacuccaaauauuguuaccucaaccacacagucaccgggaagacaagccugcccagaugcugucuggugucuaauggauccuaccucaacgaaacccacuucagcgacgacaucgagcagcaggccgauaauaugauuacggagcugcuucaaaaagaauauauggaccggcagggcaagacaccucuggggcucguggaucuguuugucuucucuaccagcuuuuaccugaucuccauuuuccuucaccucguuaaaaucccgacccaucgccacgugauuggaaagcccugcccuaaaccccauagacugaaccacaugggcaucuguucuugcggccuguauaagcacccuggggugcccgucaaguggaaacggugaggacuaguuauaagacugacuagcccgaugggccucccaacgggcccuccuccccuccuugcaccgagauuaaucaaaggcucuuuucagagccaccaaaaaaaaaaaaaaaaaaaaaaaaaaaaaaaaaaaaaaaaaaaaaaaaaaaaaaaaaaaaaaaaagaauu

SEQ ID NO: 41338 - RNA, 1655 nt, Artificial Sequence
  mRNA product Design i-3 (hSL-A64-N5) comprising derived and/or modified sequence from LASV(Nig08-A19;Clade III)__ADU56618__GPCmut12 (opt5)
aggagaaagcuuaccaugggccagaucgugaccuucuuucaagaggucccccacguuauugaagaggugaugaacaucgugcugauugcccucagcauccuggcuauucuuaaggggcuguacaauaucgccacaugcggacucaucggccuggucacguuccuucugcucuccgggagaucuuguagcaugaccuauaaaggaguguacgaacugcagacacuggagcucaacaugaauacccugaacaugugcaugccucuuuccuguacaaagaauaacucucaucacuauauuaugguuggcaaugaaaccgggcuggagcucacacugaccaacacgagccuucugcaucacaaauuuugcaaucucuccgacgcgcauaagaaaaaccuguacgaucacacccugaugucuaucauuagcacauuccaccucuccaucccgaauuuuaaccaguaugaggcuaugagcugugacuucaauggaggcaagauuaccgugcaguacaaccugucucauuccuaugccaucgaugccgcuaaucacugcggcacagucgccaacggggugcuucaaaccuuuaugcggauggcuuggggaggcagcuacauugcccuggacucugggcgcggaaagugggauuguaucaugacguccuaccaguaucucaucauucagaacacaaccugggaagaccauugccaguucagcagacccucuccuaucggcuaccuggggcuucugucccaacggacacgcgauauuuauaucagcagacggcuccugggaaccuuuaccuggacacuguccgacucugagggcaaugaaacgcccggcggguacugucucacccgcuggaugcugauugaggcggagcuuaaaugcuucggaaacacagccguugcuaaguguaaugaaaaacacgaugaggaauuuugcgacaugcugagacucuucgauuuuugcaagcaggccauccggcgccugaaagcugaggcccagaugagcauccagcuuauuaacaaggcggugaaugcccugaucaacgaccaacucauuaugaagaaucaccugagagauaucaugggcauuccuuauuguaacuacuccaaauauugcuaccugaaucauaccagcacagggcggaccucucucccccgcuguugccuggucuccaacggaagcuaccuuaaugaaacgcacuucucugacgacaucgagcagcaggcugauaacaugaucacagagaugcugcaaaaggaauaucucgacagacagggcaaaaccccucuggggcugguggaucuuuucguguuuagcaccuccuucuaccucauuucuaucuuucugcaucuggucaagauuccgacacaccggcauaucguuggaaaacccuguccuaagccccaccgccucaaucacaugggcauuugcagcuguggccuguauaaacagccuggggugcccgugagauggaagcggugaggacuaguuauaagacugacuagcccgaugggccucccaacgggcccuccuccccuccuugcaccgagauuaaucaaaggcucuuuucagagccaccaaaaaaaaaaaaaaaaaaaaaaaaaaaaaaaaaaaaaaaaaaaaaaaaaaaaaaaaaaaaaaaaagaauu

SEQ ID NO: 41339 - RNA, 1658 nt, Artificial Sequence
  mRNA product Design i-3 (hSL-A64-N5) comprising derived and/or modified sequence from LASV(G1180-SLE-2010;Clade IV)__AIT17168__GPCmut12 (opt5)
aggagaaagcuuaccaugggccagaucgugaccuucuuucaagaggucccccacguuauugaagaggugaugaacaucgugcugauugcccucagcauccuggcuguccuuaaggggcuguacaauuucgccacaugcggacucgugggccugcuuacguuucugcuccugugugggagauccugcaccgcgucucgguauaaaggaguuuacgaacugcagacacucgagcugaacauggaaacccuuaauauguguaugccucugagcugcacaaagaacaauucccaucacuauauuauggugggcaacgagaccgggcucgagcugacacuuaccaauacgucuaucaucaaccauaaauucuguaaucugagcgacgcucacaagaaaaaccucuacgaucaugcccugauguccauuaucucuaccuuucaccugagcauuccgaauuucaaccaguaugaagccauguccugcgacuuuaauggaggcaagaucagcguccaguacaaccucucucacuccuaugcuggcgaugccgcuaaucauugugggacaguggccaacggaguucugcaaaccuucaugcgcauggcguggggcgggagcuacauugcccuugacucuggacacggcuccugggauugcaucaugacaagcuaccaguaucugauuauccagaacaccacgugggaggaccauugucaguuuucuagacccuccccuaucggguaccucggacugcuuagccaacggacacgcgauauuuauaucuccagacggcugcucggcaccuucacauggacccugucugacagcgaaggcaaggauacccccgggggauacugccugacacgcuggaugcucauugaggcugagcugaaauguuuuggcaauacggccguggcuaagugcaacgaaaaacacgacgaggaguucugcgauaugcuuagacuguuugacuucuguaagcaggccauccagcggcucaaagcggaagcccagauguccauucaacugaucaauaaggcugucaacgcccuuaucaaugaucagcugauuaugaagaaccaccuccgcgacaucauggggauuccuuauugcaauuacagcaaauauuguuaccugaaccauaccacaaccggaaagacaucucugcccaaaugcugucucguguccaauggcagcuaccugaacgaaacccacuucucugacgauaucgagcagcaagcugacaauaugauuacggagaugcuucagaaggaauauauggagagacaggggaaaacaccucugggacucguggaucuguuugucuucagcaccuccuuuuaccugaucucuaucuuccuucaucucguuaagauuccgacccaccggcauaucgugggcaaaagcugccccaagccucaccgccugaaccacaugggcauuuguuccugcgggcuguauaagcagcccggagugccugucaaauggaagagaugaggacuaguuauaagacugacuagcccgaugggccucccaacgggcccuccuccccuccuugcaccgagauuaaucaaaggcucuuuucagagccaccaaaaaaaaaaaaaaaaaaaaaaaaaaaaaaaaaaaaaaaaaaaaaaaaaaaaaaaaaaaaaaaaagaauu

SEQ ID NO: 41340 - RNA, 1658 nt, Artificial Sequence
  mRNA product Design i-3 (hSL-A64-N5) comprising derived and/or modified sequence from LASV(G1442-SLE-2011;Clade IV)__AIT17180__GPCmut12 (opt5)
aggagaaagcuuaccaugggccagaucgugaccuucuuucaagaggucccccacguuauugaagaggugaugaacaucgugcugauugcccucagcauccuggcuguccuuaaggggcuguacaauguggccacaugcggacucauuggccugguuacguuccuucugcucugugggagauccugcaccacaacccuguauaaaggaguguacgaacugcagacacucgagcugaacauggaaacccuuaauauguguaugccucugucuugcacaaagaacaauagccaucacuauauccgggucggcaacgagaccgggcucgagcugacgcuuaccaauacauccaucauuaaccauaaauuuuguaaucugucugacgcgcacaagaaaaaccucuacgaucaugcucugaugagcaucauuuccaccuuccaccugucuaucccgaauuuuaaccaguaugaagccaugagcugcgacuucaauggaggcaagauuuccgugcaguacaaccucagccacucuuaugccggcgaugcugccaaucauugugggacaguugcuaacggagugcugcaaaccuuuaugcgcauggccuggggcggguccuacaucgcgcuugacagcggaagaggcaacugggauugcauuaugacgucuuaccaguaucugaucauccagaauacaaccugggacgaucacugucaguucucccggcccagcccuauuggguaccucggacugcuuucucaacgcacaagagacgucuauaucucccggcgccugcucggcaccuuuaccuggacacugagcgauuccgagggcaaggacacgcccgggggauacugccugaccagauggaugcucauugaagccgagcugaaauguuucggcaacacagcuguggccaagugcaaugagaaacaugaugaagaguuuugcgacaugcuucggcuguucgauuuuuguaagcaggcuauccagcgccucaaagccgaagcgcagaugucuauucaacugaucaacaaggccgugaaugcucuuaucaacgaccagcugauuaugaagaaucaccucagagacaucauggggauuccuuauugcaacuacagcaaauauuguuaccugaauaacaccgccacaggaaagaccucccugcccaaaugcugucucaucagcaauggcucuuaccugaacgagacgcacuucuccgaugacauugaacaggaggcugauaauaugaucacagagaugcuucaaaaggaauauauggagcggcaggggaaaaccccucugggacucgucgaccuguucguuuuuagcaccucuuucuaccugaucagcauuuuucuucaucucgugaagaucccgacacaccgccauauugugggcaaauccugccccaagccucacagacugaaccauaugggcaucuguucuugcgggcuguauaagcagcccggagucccugugcgguggaaacgcugaggacuaguuauaagacugacuagcccgaugggccucccaacgggcccuccuccccuccuugcaccgagauuaaucaaaggcucuuuucagagccaccaaaaaaaaaaaaaaaaaaaaaaaaaaaaaaaaaaaaaaaaaaaaaaaaaaaaaaaaaaaaaaaaagaauu

SEQ ID NO: 41341 - RNA, 1658 nt, Artificial Sequence
  mRNA product Design i-3 (hSL-A64-N5) comprising derived and/or modified sequence from LASV(G3010-SLE-2013;Clade IV)__AIT17344__GPCmut12 (opt5)
aggagaaagcuuaccaugggccagaucgugaccuucuuucaagaggucccccacguuauugaagaggugaugaacaucgugcugauugcccucagcauccuggcuguccuuaaggggcuguacaauuucgccacaugcggacucgugggccugguuacguuucuucugcucugugggagauccugcaccacaucucuguauaaaggaguguacgaacugcagacccucgagcugaacauggaaacacuuaauauguguaugccucugagcugcaccaagaacaauucccaucacuauauuauggucggcaacgagacagggcucgagcugacccuuacgaauaccucuaucaucaaccauaaauucuguaaucugagcgacgcgcacaagaaaaaccucuacaaucaugcucugauguccauuaucucuacauuucaccugagcauuccgaacuucaaucaguaugaagccauguccugcgauuuuaacggaggcaagaucagcgugcaguacaaucucucucacuccuaugccggcgacgcugccagccauugugggaccguugcuaacggagugcugcaaacauucaugcggauggccuggggcgggucuuacauugcgcuugauuccggauacggcaagugggacugcaucaugaccagcuaucaguaccugauuauccagaacacgacaugggaggaucacugucaguuuucucgccccuccccuaucggguaucucggacugcuuagccaaagaacccgggacauuuacaucucccgcagacugcucggcacauucaccuggacccugucugauagcgaaggcaaagacacacccgggggauauugccugacgcgguggaugcucauugaggccgagcugaaguguuuuggcaauaccgcugucgccaaaugcaacgaaaagcaugaugaggaguucugcgacaugcuucgccuguuugauuucuguaaacaggcuauccagagacucaagacagaagcccagauguccauucaacugaucaauaaggcggugaacgcccuuaucaaugaccagcugauuaugaaaaaccaccuccgggauaucauggggauuccuuacugcaauuauagcaaguacuguuaccugaaccacaccacaaccggaaaaacgucucugcccaagugcugucucguguccaauggcagcuaucugaacgaaacacauuucucugacgacaucgagcagcaagcugauaauaugauuaccgagaugcuucagaaagaauacauggagcgccaggggaagaccccucugggacucgucgaccuguuuguuuucagcacauccuuuuaucugaucucuaucuuccuucaccucgugaaaauuccgacccauagacacaucgugggcaagagcugccccaagccucaucggcugaaccacaugggcauuuguuccugcgggcuguacaaacagcccggagucccugugcgcuggaagagaugaggacuaguuauaagacugacuagcccgaugggccucccaacgggcccuccuccccuccuugcaccgagauuaaucaaaggcucuuuucagagccaccaaaaaaaaaaaaaaaaaaaaaaaaaaaaaaaaaaaaaaaaaaaaaaaaaaaaaaaaaaaaaaaaagaauu

SEQ ID NO: 41342 - RNA, 1658 nt, Artificial Sequence
  mRNA product Design i-3 (hSL-A64-N5) comprising derived and/or modified sequence from LASV(G502-SLE-2009;Clade IV)__AIT17126__GPCmut12 (opt5)
aggagaaagcuuaccaugggccagaucgugaccuucuuucaagaggucccccacguuauugaagaggugaugaacaucgugcugauugcccucagcauccuggcuguccuuaaggggcuguacaauuucgccacaugcggacucgugggccugcuuacguuucugcuccugugugggagauccugcaccacaggacuguauaaaggcguuuacgaacuccagacccuggagcuuaacauggaaacacugaauauguguaugccucucucuugcaccaagaacaauagccaucacuauauuaugguggggaacgagacaggacuggagcuuacccugacgaauaccuccaucaucaaccauaaauucuguaaucucucugacgcgcacaagaaaaaccuguacgaucaugcucugaugagcauuaucuccacauuucaccucucuauuccgaauuucaaccaguaugaagccaugagcugcgacuuuaauggcggcaagaucuccguccaguacaaccugagccacucuuaugccggggaugcugccgaccauuguggaaccguggcuaauggcguucuucaaacauucaugcggauggccuggggaggguccuacauugcgcuggauagcggccgcgggagaugggacugcaucaugaccucuuaccaguaucucauuauccagaacacgacaugggaggaucacugucaguuuucccggcccagcccuaucggauaccugggccuucugucucaacgcaccagagacauuuauaucucccggcgccuccugggcacauucaccuggacccugagcgauuccgaagggaaggacacacccggaggcuacugccucacgagauggaugcugauugaggccgagcuuaaauguuuugggaacaccgcuguggccaagugcaaugaaaaacaugaugaggaguucugcgacaugcugcggcucuuugauuucuguaagcaggcuauccagcgccugaaagccgaagcgcagaugucuauucaacuuaucaacaaggccgucaaugcucugaucaacgaccagcucgugaugaagaaucaccugagagacauuaugggaaucccuuauugcaacuacagccgguauuguuaccugaaucacacaaccacaggccgcaccucccuccccaaaugcugucuggugagcaacgggucuuaccuuaaugaaacgcauuucuccgaugacauugagcagcaagccgauaacaugaucacagagaugcugcagaaggaauauauggagagacagggaaaaaccccucucggccuggucgaccuguuuguuuucagcaccucuuuuuaccuuauuagcaucuuccuccaccuggugaagaucccgacacaucggcacauugugggcaaauccugccccaagccucaucgccugaaucacauggggaucuguucuugcggacucuauaaacagcccggcgucccugugaaguggaagagaugaggacuaguuauaagacugacuagcccgaugggccucccaacgggcccuccuccccuccuugcaccgagauuaaucaaaggcucuuuucagagccaccaaaaaaaaaaaaaaaaaaaaaaaaaaaaaaaaaaaaaaaaaaaaaaaaaaaaaaaaaaaaaaaaagaauu

SEQ ID NO: 41343 - RNA, 1658 nt, Artificial Sequence
  mRNA product Design i-3 (hSL-A64-N5) comprising derived and/or modified sequence from LASV(G733-SLE-2010;Clade IV)__AIT17154__GPCmut12 (opt5)
aggagaaagcuuaccaugggccagaucgugaccuucuuucaagaggucccccacguuauugaagaggugaugaacaucgugcugauugcccucagcauccuggcuguccuuaaggggcuguacaauuucgccacaugcggaauugugggccucguuuccuuucugcuucugugugggagaucuugcacgaccagccucuauaaaggaguguacgaacugcagacacuggagcucaacauggaaacccugaauauguguaugccucuuuccugcacaaagaacaauucucaucacuauaucauggucggcaacgagaccgggcuggagcucacacugaccaauacgagcaucauuaaccauaaauucuguaaucuuuccgacgcgcacaagaaaaaccuguacgaucaugcucucaugucuaucauuagcaccuuucaccuguccaucccgaauuucaaccaguaugaagccaugagcugcgacuuuaauggaggcaagauuucugugcaguacaaccugucccacagcuaugccggcgaugcugccaaucauugugggacaaucgcuaacggaguucuccaaaccuucaugcggauggccuggggcgggucuuacauugcgcuggacuccggacgcgauagaugggacugcaucaugacaagcuaccaguaucuuaucauucagaacaccacgugggaggaucacugucaguuuucucggcccuccccuaucggcuaccuggggcuccugagccaacgcacaagagacauuuauaucucccggcgccuucugggaaccuucacauggacccucucugauagcgaaggcaaggacacccccggcggguacugccugacaagauggaugcugauugaggccgagcucaaauguuuuggaaauacggcuguggccaagugcaacgaaaaacaugaugaggaguucugcgacaugcugcggcuuuuugauuucuguaagcaggcuauccagcgccugaaagccgaagcgcagauguccauccaacucauuaauaaggccgucaacgcucugaucaaugaccagcuuauuaugaagaaccaccugagagacaucaugggcauuccuuauugcaauuacagcaaauauuguuaccucaaccacaccacaaccgggaagacaucucugcccaaaugcugucugguguccaauggaagcuaccucaacgaaacccauuucucugaugacaucgagcagcaagccgauaauaugaucacggagaugcugcagaaggaauauauggagcggcagggcaaaacaccucuugggcugguggaccucuuugucuucagcaccuccuuuuaccugauuucuaucuuccugcaccuuguuaagauuccgacccaucgccacguggugggaaaaagcugccccaagccucauagacucaaccacaugggcaucuguuccugcggccuguaugggcagcccggagucccugugaaguggaaacggugaggacuaguuauaagacugacuagcccgaugggccucccaacgggcccuccuccccuccuugcaccgagauuaaucaaaggcucuuuucagagccaccaaaaaaaaaaaaaaaaaaaaaaaaaaaaaaaaaaaaaaaaaaaaaaaaaaaaaaaaaaaaaaaaagaauu

SEQ ID NO: 41344 - RNA, 1658 nt, Artificial Sequence
  mRNA product Design i-3 (hSL-A64-N5) comprising derived and/or modified sequence from MOPV/LASV reassortant(IGS-1;Clade IV)__AFY05576__GPCmut12 (opt5)
aggagaaagcuuaccaugggccagaucgugaccuucuuucaagaggucccccacguuauugaagaggugaugaacaucgugcugauugcccucagcguccuggcugugcuuaaggggcuguacaauuucgccacaugcggacucguuggccuggugacguuucuucugcucugugggagauccugcaccacaucucuguauaaaggagucuacgaacugcagacccucgagcugaacauggaaacacuuaauauguguaugccucugagcugcaccaagaacaauucccaucacuauaucauggugggcaacgagacagggcucgagcugacccuuacgaauaccucuauuaucaaccauaaauucuguaaucugagcgacgcgcacaagaaaaaccucuacgaucaugcucugauguccaucauuucuacauuucaccugagcaucccgaauuucaaccaguaugaagccauguccugcgacuuuaauggaggcaagauuagcguucaguacaaccucucucacuccuaugccggcgaugcugccaaucauugugggaccguggcuaacggaguccugcaaacauucaugcggauggccuggggcgggagcuacaucgcgcuugacucuggacgcggcaacugggauugcauuaugaccuccuaccaguaucugaucauucagaauacgacaugggaggaccacugucaguuuagcagacccucuccuaucggguaccucggacugcuuucccaacggacccgcgauaucuauauuagcagacggcugcucggcacauucaccuggacccuguccgacucugaaggcgaggauacacccgggggauacugccugacgcgcuggaugcucaucgaggccgaacugaaguguuuuggcaacaccgcuguggccaaaugcaaugagaagcaugacgaagaguucugcgauaugcuuagacuguuugacuucuguaaacaggcuauucagcggcucaaggccgaagcgcagaugagcauccaacugauuaacaaagccgugaaugcucuuaucaacgaucagcugaucaugaagaaucaccuccgcgacauuauggggaucccuuauugcaacuacuccaaguauuguuaccugaaucacacaaccacaggaagaaccagccugcccaaaugcugucucgucucuaacggcuccuaccugaaugagacgcauuucagcgacgauauugagcagcaagccgacaacaugaucacagaaaugcuucagaaggaguauauggaacggcaggggaaaaccccucugggacucguugaucuguuuguguucucuaccagcuuuuaccugauuuccaucuuccuucaccucgugaagaucccgacacaucgccacauugucggcaaaucuugccccaagccucauagacugaaucacaugggcaucuguagcugcgggcuguauaaacagcccggagugccuguuaaguggaagcggugaggacuaguuauaagacugacuagcccgaugggccucccaacgggcccuccuccccuccuugcaccgagauuaaucaaaggcucuuuucagagccaccaaaaaaaaaaaaaaaaaaaaaaaaaaaaaaaaaaaaaaaaaaaaaaaaaaaaaaaaaaaaaaaaagaauu

SEQ ID NO: 41345 - RNA, 1658 nt, Artificial Sequence
  mRNA product Design i-3 (hSL-A64-N5) comprising derived and/or modified sequence from LASV(LM765-SLE-2012;Clade IV)__AIT17814__GPCmut12 (opt5)
aggagaaagcuuaccaugggccagaucgugaccuucuuucaagaggucccccacguuauugaagaggugaugaacaucgugcugauugcccucagcauccuggcuguccuuaaggggcuguacaauuucgccacaugcggacucgugggccugguuacguuucuucugcucugugggagauccugcaccacaucucuguauaaaggaguguacgaacugcagacccucgagcugaacauggaaacacuuaauauguguaugccucugagcugcaccaagaacaauucccaucacuauauuauggucggcaacgagacagggcucgagcugacccuuacgaauaccucuaucaucgaccauaaauucuguaaccugagcgaugcgcaccggaagaaucucuacgaccaugcucugauguccauuaucucuacauuucaccugagcauuccgaacuucaaucaguaugaagccauguccugcgauuuuaacggaggcaaaaucagcgugcaguacaaucucucucacuccuaugccaaggacgcugccgaucauuguggcaccguugcuaacggggugcugcaaacauucaugcgcauggccuggggaggcagcuacauugcgcuugacucugggagaggacggugggauugcaucaugaccuccuaccaguaucugauuauccagaauacgacaugggaggaccacugucaguuuagccgccccucuccuaucggcuaccucgggcugcuuucccaaagaacccgggauauuuauaucagccgcagacugcucggaacauucaccuggacccuguccgacucugaaggcaaggauacacccggcggguacugccugacgcgguggaugcucauugaggccgagcugaaauguuuuggaaacaccgcugucgccaagugcaacgaaaaacaugacgaggaguucugcgauaugcuucgccuguuugacuucuguaagcaggcuauccagagacucaaagccgaagcgcagaugagcauucaacugaucaauaaggccgugaacgcucuuaucaaugaccagcugauuaugaagaaccaccuccgggauaucaugggcauuccuuauugcaauuacuccaaauauuguuaccugaaccacacaaccacagggaagaccagccugcccaaaugcugucucgugucuaauggauccuaccugaacgaaacgcauuucagcgacgauaucgagcagcaagccgacaauaugauuacagagaugcuucagaaggaauauauggagcgccagggcaaaaccccucuggggcucgucgaucuguuuguuuucucuaccagcuuuuaccugaucuccaucuuccuucaccucgugaagauuccgacacauagacacaucgugggaaaacccugcccuaagccccaucggcugaaccacaugggcauuuguucuugcggccuguauaagcagccugggguccccgugaaauggaagcgcugaggacuaguuauaagacugacuagcccgaugggccucccaacgggcccuccuccccuccuugcaccgagauuaaucaaaggcucuuuucagagccaccaaaaaaaaaaaaaaaaaaaaaaaaaaaaaaaaaaaaaaaaaaaaaaaaaaaaaaaaaaaaaaaaagaauu

SEQ ID NO: 41346 - RNA, 1658 nt, Artificial Sequence
  mRNA product Design i-3 (hSL-A64-N5) comprising derived and/or modified sequence from LASV(LM776-SLE-2012;Clade IV)__AIT17824__GPCmut12 (opt5)
aggagaaagcuuaccaugggccagaucgugaccuucuuucaagaggucccccacguuauugaagaggugaugaacaucgugcugauugcccucagcauccuggcuguccuuaaggggcuguacaauuucgccacaugcggacucgugggccugguuacguuucuucugcucugugggagauccugcaccacaucuguguauaaaggagucuacgaacugcagacccuggagcucaacauggaaacacugaauauguguaugccucuuagcugcaccaagaacaauucccaucacuauauuauggugggcaacgagacagggcuggagcucacccugacgaauaccucuaucaucaaccauaaauucuguaaucuuagcgacgcgcacaagaaaaaccuguacgaucaugcucucauguccauuaucucuacauuucaccugagcauuccgaauuucaaccaguaugaagccauguccugcgacuuuaauggaggcaagaucagcguucaguacaaccugucucacuccuaugccggcgaugcugccaaucauugugggaccguggcuaacggaguccuccaaacauucaugcggauggccuggggcgggagcuacauugcgcuggacucuggacacggcaagugggauugcaucaugaccuccuaccaguaucuuauuauccagaacacgacaugggaggaccauugucaguuuagccgccccucuccuaucggguaccugggacuccugucccaaagaacccgggauauuuauaucagccgcagacuucugggcacauucaccuggacccucuccgacucugaaggcaaagauacacccgggggauacugccugacgcgguggaugcugauugaggccgagcucaaguguuuuggcaauaccgcuguggccaaaugcaacgaaaagcacgacgaggaguucugcgauaugcugcgccuuuuugacuucuguaaacaggcuauccagagacugaaggccgaagcgcagaugagcauucaacucaucaauaaggccgugaacgcucugaucaaugaucagcuuauuaugaaaaaccaucugcgggacaucauggggauuccuuauugcaauuacuccaaguauuguuaccucaaccacacaaccacaggaaaaaccagccugcccaagugcugucuggucucuaauggcuccuaccucaacgaaacgcacuucagcgacgauaucgagcagcaagccgacaauaugauuacagagaugcugcagaaagaauauauggagcgccaggggaagaccccucuuggacugguugaucucuuuguguucucuaccagcuuuuaccugaucuccaucuuccugcaucuugugaaaauuccgacacacagacauaucgucggcaagucuugccccaagccucaccggcucaaccacaugggcauuuguagcugcgggcuguauaaacagcccggagugccuguucgcuggaagagaugaggacuaguuauaagacugacuagcccgaugggccucccaacgggcccuccuccccuccuugcaccgagauuaaucaaaggcucuuuucagagccaccaaaaaaaaaaaaaaaaaaaaaaaaaaaaaaaaaaaaaaaaaaaaaaaaaaaaaaaaaaaaaaaaagaauu

SEQ ID NO: 41347 - RNA, 1658 nt, Artificial Sequence
  mRNA product Design i-3 (hSL-A64-N5) comprising derived and/or modified sequence from LASV(Mad39;Clade IV)__ANH09722__GPCmut12 (opt5)
aggagaaagcuuaccaugggccagaucgugaccuucuuucaagaggucccccacguuauugaagaggugaugaacaucgugcugauugcccucagcauccuggcuguccuuaaggggcuguacaauguggccacaugcggacucauuggccugguuacguuccuucugcucugugggagauccugcaccacaacccuguauaaaggaguguacgaacugcaggcgcucgagcugaacauggaaacacuuaauauguguaugccucugucuugcaccaagaacaauagccaucacuauauccgggucggcaacgagacagggcucgagcugacccuuacgaauaccucccugaucaaccauaaauuuuguaaucucucugacgcucacaagaaaaaccuguacgaucaugcccugaugagcauuaucuccacauuccaccucucuauuccgaauuuuaaccaguaugaagccaugagcugcgacuucaaugauggaaagaucuccgugcaguacaaccugagccacaccuaugcuggcgacacagccaaucauuguggcaccguugcuaacggggugcuucaaacguuuaugcgcauggccuggggaggcucuuacauugcgcuggauuccgggagaggaggcugggacugcaucaugacaagcuaccaguaucucauuauccagaacaccacaugggaggaucacugucaguucucucggcccuccccuaucggguaccugggacuucugagccaacgcaccagagacauuuauaucucucggcgccuccugggcaccuuuacauggacgcuguccgauagcgaaggcaaggacacccccgggggauacugccucacaagauggaugcugauugaggccgagcuuaaauguuucggcaauaccgcugucgccaagugcaacgaaaaacaugaugaggaauuuugcgacaugcugcgccucuucgauuuuuguaagcaggcuauccagcggcugaaagccgaggcgcagauguccauucaacuuaucaauaaggccgugaacgcucugaucaaugaccagcucauuaugaagaaccaccugagagacaucauggggauuccuuauugcaauuacucuaaauauuguuaccugaaccacacagugaccggaaagacgagccuccccaaaugcugucuggucuccaauggcagcuaccuuaacgaaacacauuucucugaugacaucgagcagcaagccgauaauaugauuaccgagaugcugcagaaggaauauauggagcggcaggggaaaaccccucucggacugguugaccuguucguguuuuccaccagcuucuaccuuaucucuaucuuucuccaccuggugaagauuccgacacaucgccacgucgugggcaaacccugcccuaagccccauagacugaaccacaugggcaucuguagcugcggguucuauaagcagccuggaguucccgugcgguggaaacgcugaggacuaguuauaagacugacuagcccgaugggccucccaacgggcccuccuccccuccuugcaccgagauuaaucaaaggcucuuuucagagccaccaaaaaaaaaaaaaaaaaaaaaaaaaaaaaaaaaaaaaaaaaaaaaaaaaaaaaaaaaaaaaaaaagaauu

SEQ ID NO: 41348 - RNA, 1658 nt, Artificial Sequence
  mRNA product Design i-3 (hSL-A64-N5) comprising derived and/or modified sequence from LASV(Z0947-SLE-2011;Clade IV)__AIT17840__GPCmut12 (opt5)
aggagaaagcuuaccaugggccagaucgugaccuucuuucaagaggucccccacguuauugaagaggugaugaacaucgugcugauugcccucagcauccuggcuguccuuaaggggcuguacaauuucgccacaugcggacucgugggccugguuacguuucuucugcucugugggagauccugcaccauuucucuguauaaaggaguguacgaacugcagacacucgagcugaacauggaaacccuuaauauguguaugccucugagcugcacaaagaacaauucccaucacuauaucauggucggcaacgagaccgggcucgagcugacacuuaccaauacgucuaucauuaaccauaaauucuguaaucugagcgacgcgcacaagaaaaaccucuacgaucaugcucugauguccaucauuucuaccuuucaccugagcaucccgaauuucaaccaguaugaagccauguccugcgacuuuaauggaggcaagauuagcgugcaguacaaccucucucacuccuaugccggcgaugcugccaaucauugugggacaguugcuaacggagugcugcaaaccuucaugcggauggccuggggcgggagcuacaucgcgcuugacucuggacgcgauagaugggacugcauuaugacauccuaccaguaucugaucauccagaacaccacgugggaggaucacugucaguuuagccggcccucuccuauuggcuaccucgggcugcuuucccaacgcacaagagacaucuauauuagccggcgccugcucggaaccuucacauggacccuguccgauucugaaggcaaggacacccccggcggguacugccugacaagauggaugcucaucgaggccgagcugaaauguuuuggaaauacggcugucgccaagugcaacgaaaaacaugaugaggaguucugcgacaugcuucggcuguuugauuucuguaagcaggcuauucagcgccucaaagccgaagcgcagaugagcauccaacugaucaauaaggccgugaacgcucuuauuaaugaccagcugaucaugaagaaccaccucagagacauuaugggcaucccuuauugcaauuacuccaaauauuguuaccugaaccacaccacaaccgggaagacaagccugcccaaaugcugucucgugucuaauggauccuaccugaacgaaacccauuucagcgaugacauugagcagcaagccgauaauaugaucacggagaugcuucagaaggaauauauggagcggcagggcaaaacaccucuggggcucgucgaccuguuuguuuucucuaccagcuuuuaccugaucuccauuuuccuucaccucgugaagaucccgacccaucgccacauugugggaaaacccugcccuaagccccauagacugaaccacaugggcaucuguucuugcggccuguauaagcagccugggguccccgugaaauggaagcggugaggacuaguuauaagacugacuagcccgaugggccucccaacgggcccuccuccccuccuugcaccgagauuaaucaaaggcucuuuucagagccaccaaaaaaaaaaaaaaaaaaaaaaaaaaaaaaaaaaaaaaaaaaaaaaaaaaaaaaaaaaaaaaaaagaauu

SEQ ID NO: 41349 - RNA, 1689 nt, Artificial Sequence
  mRNA product Design i-3 (hSL-A100) comprising derived and/or modified sequence from LASV(Josiah;Clade IV)__NP_694870__GPCmut12 (opt1)
aggagaaagcuuaccaugggccagaucgugaccuucuuccaggaggucccccacgugaucgaggaggugaugaacaucguccugaucgcccucagcgugcuggccgugcugaaggggcucuacaacuucgcgaccugcggccuggucgggcuggugacguuccuccugcugugcggccgcuccugcaccaccagccucuacaaggggguguacgagcugcagacccuggagcucaacauggagacgcugaacaugugcaugccgcuguccugcaccaagaacaacagccaccacuacaucauggucggcaacgagaccggccucgagcugacgcugaccaacaccuccaucaucaaccacaaguucugcaaccucagcgacgcccacaagaagaaccuguacgaccacgcccugauguccaucaucagcaccuuccaccucuccauccccaacuucaaccaguacgaggccaugagcugcgacuucaacgggggcaagaucuccgugcaguacaaccugagccacuccuacgccggggacgcggccaaccacugcggcacgguggccaacgggguccugcagaccuucaugcggauggccuggggcggcagcuacaucgcgcucgacuccgggcgcggcaacugggacugcaucaugaccagcuaccaguaccugaucauccagaacaccacgugggaggaccacugccaguucucccggcccagccccaucggguaccugggccuccugucccagcgcacccgggacaucuacaucagccgccggcugcucggcaccuucaccuggacgcugagcgacuccgaggggaaggacaccccgggcggguacugccugacccgcuggaugcucaucgaggccgagcugaagugcuucggcaacaccgccguggccaagugcaacgagaagcacgacgaggaguucugcgacaugcugcggcuguucgacuucugcaagcaggccauccagcgccugaaggcggaggcccagaugagcauccagcugaucaacaaggccgugaacgcccucaucaacgaccagcugaucaugaagaaccaccuccgggacaucauggggauccccuacugcaacuacuccaaguacugcuaccucaaccacacgaccaccggccgcaccagccugcccaagugcugccuggucuccaacggcagcuaccucaacgagacgcacuucuccgacgacaucgagcagcaggccgacaacaugaucaccgagaugcugcagaaggaguacauggagcggcaggggaagacgccccugggccucguggaccuguucguguucagcaccuccuucuaccugaucagcaucuuccugcaccucgucaagaucccgacccaccgccacaucguggggaaguccugccccaagccccaccggcugaaccacaugggcaucugcagcugcgggcuguacaagcagcccggcgugccggucaaguggaagcgcugaggacuaguuauaagacugacuagcccgaugggccucccaacgggcccuccuccccuccuugcaccgagauuaaucaaaggcucuuuucagagccaccaaaaaaaaaaaaaaaaaaaaaaaaaaaaaaaaaaaaaaaaaaaaaaaaaaaaaaaaaaaaaaaaaaaaaaaaaaaaaaaaaaaaaaaaaaaaaaaaaaaaa

SEQ ID NO: 41350 - RNA, 1686 nt, Artificial Sequence
  mRNA product Design i-3 (hSL-A100) comprising derived and/or modified sequence from LASV(LP;Clade I)__AAF86701__GPCmut12 (opt1)
aggagaaagcuuaccaugggccagaucaucaccuucuuccaggaggugccccacgucaucgaggaggugaugaacaucgugcugaucgcccucagccugcuggccauccucaaggggcuguacaacaucgcgaccugcggcaucaucgggcuggucgccuuccucuuccugugcggcaaguccugcagccugacgcucaagggcggguacgagcugcagacccuggagcucaacauggagacccugaacaugugcaugccgcuguccugcacgaagaacagcucccaccacuacauccgcgugggcaacgagaccgggcucgagcugacccugaccaacacgagcaucaucaaccacaaguucugcaaccucuccgacgcccacaagaagaaccuguacgaccacgcccugaugagcaucaucuccaccuuccaccucagcauccccaacuucaaccaguacgaggccauguccugcgacuucaacggcgggaagaucagcgugcaguacaaccugucccacagcuacgcgggcgacgccgccgagcacugcgggaccgucgccaacggcgugcugcagaccuucaugcggauggcguggggcgggcgcuacaucgcccucgacuccggcaaggggaacugggacugcaucaugacgagcuaccaguaccugaucauccagaacaccaccugggaggaccacugccaguucucccggcccagccccaucggcuaccugggccuccugucccagcgcacccgggacaucuacaucagccgccggcugcucgggacguucaccuggacccugagcgacuccgagggcaacgagacccccgggggcuacugccugacgcgcuggaugcucaucgaggccgagcugaagugcuucgggaacaccgccguggccaagugcaacgagaagcacgacgaggaguucugcgacaugcugcggcuguucgacuucugcaagcaggcgauccgccggcugaaggccgaggcccagaugagcauccagcugaucaacaaggccgucaacgcccucaucaacgaccagcugaucaugaagaaccaccuccgcgacaucaugggcauccccuacugcaacuacuccaaguacugcuaccucaaccacaccagcuccggccggaccagccugcccaagugcugccugaucuccaacgggagcuaccucaacgagacgcaguucuccgacgacaucgagcagcaggcggacaacaugaucaccgagaugcugcagaaggaguacaucgagcgccagggcaagaccccgcuggggcucguggacaucuucaucuucagcaccuccuucuaccugaucagcaucuuccugcaccugaucaagaucccgacgcaccggcacaucgugggcaagcccugccccaagccccaccgccucaaccacaugggggucugcuccugcggccuguacaagcacccgggcgugcccaccaaguggaagcggugaggacuaguuauaagacugacuagcccgaugggccucccaacgggcccuccuccccuccuugcaccgagauuaaucaaaggcucuuuucagagccaccaaaaaaaaaaaaaaaaaaaaaaaaaaaaaaaaaaaaaaaaaaaaaaaaaaaaaaaaaaaaaaaaaaaaaaaaaaaaaaaaaaaaaaaaaaaaaaaaaaaaa

SEQ ID NO: 41351 - RNA, 1686 nt, Artificial Sequence
  mRNA product Design i-3 (hSL-A100) comprising derived and/or modified sequence from LASV(803213;Clade II)__AAF86703__GPCmut12 (opt1)
aggagaaagcuuaccaugggccagaucaucaccuucuuccaggaggugccccacgucaucgaggaggugaugaacaucgugcugaucgcccucagccugcuggccauccucaaggggaucuacaacgucgcgaccugcggccuguucgggcugaucuccuuccuccugcugugcggccgcagcugcuccgugacguacaaggggguguacgagcuccagacccuggagcugaacauggccaaccucaacaugugcaugccgcugagcugcaccaagaacaacucccaccacuacaucauggucggcaacgagacgggccuggagcucacccugaccaacaccagcaucaucaaccacaaguucugcaaccuguccgacgcccacaagaagaaccucuacgaccacgcccugaugagcaucaucuccacguuccaccugagcauccccaacuucaaccaguacgaggccauguccugcgacuucaacgggggcaagaucagcgugcaguacaaccucucccacagcuucgcgguggacgccgccaaccacugcgggaccaucgccaacggcguccugcagaccuucaugcggauggcguggggcggguccuacaucgcccuggacagcggcaaggggaacugggacugcaucaugaccuccuaccaguaccucaucauccagaacacgaccugggaggaccacugccaguucagccgccccucccccaucggcuaccuggggcugcucagccagcggacccgcgacaucuacaucagccggcgccugcugggcaccuucacguggacccucuccgacagcgagggcaacgaggcccccgggggcuacugccugacccgguggaugcugaucgaggccgagcucaagugcuucgggaacaccgccguggcgaagugcaacgagaagcacgacgaggaguucugcgacaugcugcgccuguucgacuucugcaagcaggccaucaagcggcucaagacggaggcccagauguccauccagcugaucaacaaggccgugaacgcccugaucaacgaccagcucaucaugaagaaccaccuccgcgacaucaugggcauccccuacugcaacuacagccgguacugcuaccugaaccacaccgucaccgggaagaccucccugccccgcugcugccuggugagcaacggcuccuaccugaacgagacgcacuucagcgacgacaucgagcagcaggcggacaacaugaucaccgagaugcuccagaaggaguacauggaccggcagggcaagaccccgcuggggcugguggaccucuucgucuucuccaccagcuucuaccugaucuccaucuuccugcaccuggugaagaucccgacgcaccgccacaucgugggcaagcccugccccaagccccaccggcucaaccacauggggaucugcagcugcggccuguacaagcacccggggguccccgugaaguggaagcgcugaggacuaguuauaagacugacuagcccgaugggccucccaacgggcccuccuccccuccuugcaccgagauuaaucaaaggcucuuuucagagccaccaaaaaaaaaaaaaaaaaaaaaaaaaaaaaaaaaaaaaaaaaaaaaaaaaaaaaaaaaaaaaaaaaaaaaaaaaaaaaaaaaaaaaaaaaaaaaaaaaaaaa

SEQ ID NO: 41352 - RNA, 1686 nt, Artificial Sequence
  mRNA product Design i-3 (hSL-A100) comprising derived and/or modified sequence from LASV(GA391;Clade III)__CAA36645__GPCmut12 (opt1)
aggagaaagcuuaccaugggccagaucgugaccuucuuccaggaggucccccacgugaucgaggaggugaugaacaucguccugaucgcccucagcauccuggccauccugaaggggcucuacaacguggcgaccugcggccugaucgggcuggugacguuccuccugcuguccggccgcagcugcucccucaucuacaaggggaccuacgagcugcagacccuggagcucaacauggagacccugaacaugugcaugccgcugagcugcaccaagaacaacucccaccacuacauccgggucggcaacgagaccggccucgagcugacccugacgaacaccagcauccucaaccacaaguucugcaaccuguccgacgcccacaagcgcaaccuguacgaccacagccucauguccaucaucagcaccuuccaccuguccauccccaacuucaaccaguacgaggccaugagcugcgacuucaacgggggcaagaucaccgugcaguacaaccugucccacagcuucgccguggacgccgcggggcacugcggcacgcucgccaacgggguccugcagaccuucaugcggauggccuggggcggcuccuacaucgcccuggacagcgggcgcggcaacugggacugcaucaugaccuccuaccaguaccucaucauccagaacaccacgugggacgaccacugccaguucagccggcccucccccaucggguaccugggccugcucagccagcgcacccgggacaucuacaucagccgccggcugcugggcaccuucaccuggacgcucuccgacagcgaggggaacgagaccccgggcggguacugccugacccgcuggaugcugaucgaggcggagcucaagugcuucggcaacaccgccguggccaagugcaacgagaagcacgacgaggaguucugcgacaugcugcggcuguucgacuucugcaagcaggccauccgccggcucaagacggaggcccagauguccauccagcugaucaacaaggcggugaacgcccugaucaacgaccagcucaucaugaagaaccaccuccgcgacaucauggggauccccuacugcaacuacagccgguacugcuaccugaaccacaccuccaccggcaagaccagccugccccgcugcugccugaucuccaacggcagcuaccugaacgagacgaaguucuccgacgacaucgagcagcaggccgacaacaugaucaccgagaugcuccagaaggaguacaucgaccggcaggggaagacgccccugggccuggucgaccuguucguguucagcaccuccuucuaccucaucagcaucuuccugcaccuggugaagaucccgacccaccgccacaucgucgggaagcccugccccaagccccaccggcucaaccacaugggcaucugcuccugcgggcuguacaagcagccgggcgugcccgugcgcuggaagcggugaggacuaguuauaagacugacuagcccgaugggccucccaacgggcccuccuccccuccuugcaccgagauuaaucaaaggcucuuuucagagccaccaaaaaaaaaaaaaaaaaaaaaaaaaaaaaaaaaaaaaaaaaaaaaaaaaaaaaaaaaaaaaaaaaaaaaaaaaaaaaaaaaaaaaaaaaaaaaaaaaaaaa

SEQ ID NO: 41353 - RNA, 1689 nt, Artificial Sequence
  mRNA product Design i-3 (hSL-A100) comprising derived and/or modified sequence from LASV(AV;Clade V)__CCA30314__GPCmut12 (opt1)
aggagaaagcuuaccaugggccagaucgugaccuucuuccaggaggucccccacgugaucgaggaggugaugaacaucguccugaucgcccucagcauccuggccgugcugaaggggcucuacaacaucgcgaccugcggccugaucgggcugaucacguuccuccugcugugcggccgcuccugcagcuccaaccucuacaaggggguguacgagcugcagagccuggaccucaacauggagacccugaacaugugcaugccgcuguccugcaccaagaacaacagccaccacuacauccgggucggcaacgacacgggccucgagcugacccugaccaacaccuccauccucaaccacaaguucugcaaccugagcgacgcccacaagaaggaccuguacgaccacgcccucauguccaucaucagcacguuccaccuguccauccccaacuucaaccaguacgaggccaugagcugcgacuucaacgggggcaagaucuccgugcaguacaaccugagccacuccuacgccaucgacgcggccaaccacugcgggaccguggccaacggcauccuccagaccuucaugcgcauggccuggggcgggagcuacaucgcgcuggacuccggccgggggaacugggacugcaucaugaccagcuaccaguaccugaucauccagaacacgaccugggagaaccacugccaguucucccgccccagccccaucggcuaccucgggcugcugagccagcggacccgcgacaucuacaucucccggcgccuccugggcaccuucacguggacccugagcgacuccgagggcaacgccacccccgggggcuacugccucacccgguggaugcugaucgaggccgagcugaagugcuucgggaacacggccgucgccaagugcaacgagaagcacgacgaggaguucugcgacaugcuccgccuguucgacuucugcaagcaggcgaucagccggcugaaguccgaggcccagaugagcauccagcucaucaacaaggccgugaacgcccugaucaacgaccagcugaucaugaagaaccaccuccgcgacaucaugggcauccccuacugcaacuacuccaaguacugcuaccugaaccacaccaucaccgggaagaccagccugcccaagugcugccucguguccaacggcagcuaccugaacgagacgcacuucuccgacgacaucgagcagcaggccgacaacaugaucaccgagaugcugcagaaggaguacauggagcggcagggcaagaccccgcucgggcuggucgaccuguucguguucagcaccuccuucuaccugaucagcaucuuccuccgccuggugaagaucccgacgcaccggcacaucgucggcaagcccugccccaagccccaccgccugaaccacauggggaucugcuccugcggccucuacaagcagccgggggugcccgugcgguggaagcgcugaggacuaguuauaagacugacuagcccgaugggccucccaacgggcccuccuccccuccuugcaccgagauuaaucaaaggcucuuuucagagccaccaaaaaaaaaaaaaaaaaaaaaaaaaaaaaaaaaaaaaaaaaaaaaaaaaaaaaaaaaaaaaaaaaaaaaaaaaaaaaaaaaaaaaaaaaaaaaaaaaaaaa

SEQ ID NO: 41354 - RNA, 1686 nt, Artificial Sequence
  mRNA product Design i-3 (hSL-A100) comprising derived and/or modified sequence from LASV(Togo/2016/7082;Clade VI)__AMR44577__GPCmut12 (opt1)
aggagaaagcuuaccaugggccagaucaucaccuucuuccaggaggugccccacgucaucgaggaggugaugaacaucgugcugaucgcccucagccugcuggccauccucaagggggucuacaacguggcgaccugcggcaucaucgggcuggugacguuccuguuccucugcggccgcuccugcagccugaucuacaagggguccuacgagcugcagacccucgagcugaacauggagacccugaacaugugcaugccgcucagcugcacgaagaacuccagccaccacuacauccgggucggcaacgagaccggccuggagcugacccucaccaacacguccaucaucaaccacaaguucugcaaccugagcgacgcccacaagcgcaaccuguacgaccacgcccucauguccauccugagcaccuuccaccuguccauccccaacuucaaccaguacgaggccaugagcugcgacuucaacgggggcaagaucuccgugcaguacaaccucagccacgccuacgcgguggacgccgccgagcacugcgggaccgucgccaacggcgugcugcagaccuucaugcggauggcguggggcggguccuacaucgcccuggacagcggccgcgggaacugggacugcaucaugacguccuaccaguaccucaucauccagaacaccaccugggaggaccacugccaguucagccggcccucccccaucggcuaccuggggcugcucagccagcgcacccgggacaucuacaucagccgccggcugcugggcacguucaccuggacccucuccgacagcgagggcaacgagacccccgggggcuacugccugacgcgcuggaugcugaucgaggccgagcucaagugcuucgggaacaccgccguggccaagugcaacgagaagcacgacgaggaguucugcgacaugcugcggcuguucgacuucugcaagcaggcgauccagcgccucaaguccgaggcccagaugagcauccagcugaucaacaaggccgucaacgcccugaucaacgaccagcucaucaugaagaaccaccuccgggacaugaugggcauccccuacugcaacuacuccaaguacugcuaccugaaccacaccagcuccgggcgcaccagccugcccaagugcugccugguguccaacggcagcuaccugaacgagacgcacuucuccgacgacaucgagcagcaggccgacaacaugaucaccgagaugcuccagaaggaguacaucgaccggcagggcaagaccccgcuggggcugguggaccucuucgucuucagcaccuccuucuaccugaucagcaucuuccugcaccugaucaagaucccgacgcaccgccacaucgugggcaagcccugccccaagccccaccggcucaaccacauggggaucugcuccugcggccuguacaagcagccgggggugcccacccgcuggaagcggugaggacuaguuauaagacugacuagcccgaugggccucccaacgggcccuccuccccuccuugcaccgagauuaaucaaaggcucuuuucagagccaccaaaaaaaaaaaaaaaaaaaaaaaaaaaaaaaaaaaaaaaaaaaaaaaaaaaaaaaaaaaaaaaaaaaaaaaaaaaaaaaaaaaaaaaaaaaaaaaaaaaaa

SEQ ID NO: 41355 - RNA, 1686 nt, Artificial Sequence
  mRNA product Design i-3 (hSL-A100) comprising derived and/or modified sequence from LASV(KAK-428;Clade n.d. (VII))__ANH09740__GPCmut12 (opt1)
aggagaaagcuuaccaugggccagaucgugaccuucuuccaggaggucccccacgugaucgaggaggugaugaacaucguccugaucgcccucagccugcuggccauccucaaggggcuguacaacuucgcgaccugcggcgugaucgggcugaucacguuccuccugcugugcggccgcuccugcagcgccaccuacaaggggcaguacgagcuccagacccuggagcugaacauggagucccucaacaugugcaugccgcugagcugcacgaagaacaacucccaccacuacauccgggccggcaacaacaccggccuggagcucacccugaccaacacgagcaucaucucccacaaguucugcaaccugagcgacgcccacaagaagaaccucuacgaccacacccugauguccaucaucaccaccuuccaccugagcauccccaacuucaaccaguacgaggccauguccugcgacuucaacgggggcaagaucagcauccaguacaaccucucccacagcuacgcgggggacgccgcccagcacugcggcacgguggccaacgggguccugcagaccuucaugcgcauggcguggggcggcuccuaccuggcccucgacagcgggcggcgcggcugggacugcaucaucuccagcuaccaguaccugaucauccagaacaccaccugggacgaccacugccaguucucccggcccagccccaucggguaccugggcuucgugagccagaagacgcgcgacaucuacaucucccggcgccuccugggcaccuucaccuggacccugagcgacuccgaggggcacgacaugccgggcggguacugccucacgcgguggaugcugaucgaggccgaccugaagugcuucggcaacaccgccguggccaagugcaacgagaagcacgacgaggaguucugcgacauguggcgccucuucgacuucugcaagcaggcgauccagcggcugaaggccgaggcccagaugaacauccagcugaucaacaaggccgucaacgcccucaucaacgaccagcugaugaugaagaaccaccuccgcgacaucauggggauccccuacugcaacuacagcaaguucugcuaccugaacaacaccaccacgggccggaccucccugccccgcugcugccugaucagcaacggcuccuaccucaacgagacccacuucagcgacgacaucgagcagcaggcggacaacaugaucaccgagaugcugcagaaggaguacauggaccggcaggggaagacgccccugggccucguggaccuguucguguucuccaccagcuucuaccugaucaccaucuuccuccaccuggucaagaucccgacccaccgccacaucguggggaagcccugccccaagccccaccggcugaaccacaugggcaucugcuccugcgggcuguacaagcagccgggcgugcccguccgcuggaagcggugaggacuaguuauaagacugacuagcccgaugggccucccaacgggcccuccuccccuccuugcaccgagauuaaucaaaggcucuuuucagagccaccaaaaaaaaaaaaaaaaaaaaaaaaaaaaaaaaaaaaaaaaaaaaaaaaaaaaaaaaaaaaaaaaaaaaaaaaaaaaaaaaaaaaaaaaaaaaaaaaaaaaa

SEQ ID NO: 41356 - RNA, 1686 nt, Artificial Sequence; identical to SEQ ID NO: 41350
  mRNA product Design i-3 (hSL-A100) comprising derived and/or modified sequence from LASV(Pinneo-NIG-1969;Clade I)__AIT17836__GPCmut12 (opt1)

SEQ ID NO: 41357 - RNA, 1686 nt, Artificial Sequence
  mRNA product Design i-3 (hSL-A100) comprising derived and/or modified sequence from LASV(ISTH0009-NIG-2011;Clade II)__AIT17404__GPCmut12 (opt1)
aggagaaagcuuaccaugggccagaucaucaccuucuuccaggaggugccccacgucaucgaggaggugaugaacaucgugcugaucgcccucagccugcuggccauccucaaggggaucuacaacgucgcgaccugcggccuguucgggcugguguccuuccuccugcugugcggccgcagcugcuccacgaccuacaaggggguguacgagcuccagacccuggagcuggacauggccagccucaacaugugcaugccgcuguccugcacgaagaacaacagccaccacuacaucauggucggcaacgagaccggccuggagcucacccugaccaacacguccaucaucaaccacaaguucugcaaccugagcgacgcccacaagaagaaccucuacgaccacgcccugauguccaucaucagcaccuuccaccuguccauccccaacuucaaccaguacgaggccaugagcugcgacuucaacgggggcaagaucuccgugcaguacaaccucagccacgcguacgccguggacgccgccaaccacugcgggaccaucgcgaacggcguccugcagaccuucaugcggauggccuggggcggguccuacaucgcccuggacagcggcaagggguccugggacugcaucaugacgagcuaccaguaccucaucauccagaacaccaccugggaggaccacugccaguucucccgccccagccccaucggcuaccuggggcugcucagccagcggacccgcgacaucuacaucucccggcgccugcugggcacguucaccuggacccucagcgacuccgagggcaacgagacccccgggggcuacugccugacgcgguggaugcugaucgaggccgagcucaagugcuucgggaacaccgccguggcgaagugcaacgagaagcacgacgaggaguucugcgacaugcugcgccuguucgacuucugcaagcaggccauccggcgccucaagaccgaggcccagaugagcauccagcugaucaacaaggccgugaacgcccugaucaacgaccagcucaucaugaagaaccaccuccgggacaucaugggcaucccguacugcaacuacuccaaguacugcuaccugaaccacaccgucacggggaagaccagccugccccgcugcugccugguguccaacggcagcuaccugaacgagacccacuucuccgacgacaucgagcagcaggcggacaacaugaucaccgagcuccugcagaaggaguacauggaccggcagggcaagacgccccuggggcucguggaccuguucgucuucagcaccuccuucuaccugaucagcaucuuccugcaccucaucaagaucccgacccaccgccacaucaccggcaagcccugccccaagccccaccggcugaaccacauggggaucugcuccugcggccuguacaagcacccgggggugcccgugaaguggaagcgcugaggacuaguuauaagacugacuagcccgaugggccucccaacgggcccuccuccccuccuugcaccgagauuaaucaaaggcucuuuucagagccaccaaaaaaaaaaaaaaaaaaaaaaaaaaaaaaaaaaaaaaaaaaaaaaaaaaaaaaaaaaaaaaaaaaaaaaaaaaaaaaaaaaaaaaaaaaaaaaaaaaaaa

SEQ ID NO: 41358 - RNA, 1686 nt, Artificial Sequence
  mRNA product Design i-3 (hSL-A100) comprising derived and/or modified sequence from LASV(ISTH2010-NIG-2012;Clade II)__AIT17482__GPCmut12 (opt1)
aggagaaagcuuaccaugggccagaucaucaccuucuuccaggaggugccccacgucaucgaggaggugaugaacaucgugcugaucgcccucagccugcuggccauccucaaggggaucuacaacgucgcgaccugcggccuguucgggcugguguccuuccuccugcugugcggccgcagcugcuccacgaccuacaaggggguguacgagcuccagacccuggagcuggacauggccagccucaacaugugcaugccgcuguccugcacgaagaacaacagccaccacuacaucauggucggcaacgagaccggccuggagcucacccugaccaacacguccaucaucaaccacaaguucugcaaccugagcgacgcccacaagaagaaccucuacgaccacgcccugauguccaucaucagcaccuuccaccuguccauccccaacuucaaccaguacgaggccaugagcugcgacuucaacgggggcaagaucuccgugcaguacaaccucagccacgcguacgccguggacgccgccaaccacugcgggaccaucgcgaacggcguccugcagaccuucaugcggauggccuggggcggguccuacaucgcccuggacagcggcaagggguccugggacugcaucaugacgagcuaccaguaccucaucauccagaacaucaccugggaggaccacugccaguucucccgccccagccccaucggcuaccuggggcugcucagccagcggacccgcgacaucuacaucucccggcgccugcugggcaccuucacguggacccucagcgacuccgagggcaacgagacccccgggggcuacugccugacccgguggaugcugaucgaggccgagcucaagugcuucgggaacacggccguggcgaagugcaacgagaagcacgacgaggaguucugcgacaugcugcgccuguucgacuucugcaagcaggccauccggcgccucaagaccgaggcccagaugagcauccagcugaucaacaaggccgugaacgcccugaucaacgaccagcucaucaugaagaaccaccuccgggacaucaugggcauccccuacugcaacuacuccaaguacugcuaccugaaccacaccgucaccgggaagacgagccugccccgcugcugccugguguccaacggcagcuaccugaacgagacccacuucuccgacgacaucgagcagcaggcggacaacaugaucaccgagcuccugcagaaggaguacaucgaccggcagggcaagaccccgcuggggcucguggaccuguucgucuucagcacguccuucuaccugaucagcaucuuccugcaccucgugaagaucccgacccaccgccacguggucggcaagcccugccccaagccccaccggcugaaccacauggggaucugcuccugcggccuguacaagcacccgggggugcccgugaaguggaagcgcugaggacuaguuauaagacugacuagcccgaugggccucccaacgggcccuccuccccuccuugcaccgagauuaaucaaaggcucuuuucagagccaccaaaaaaaaaaaaaaaaaaaaaaaaaaaaaaaaaaaaaaaaaaaaaaaaaaaaaaaaaaaaaaaaaaaaaaaaaaaaaaaaaaaaaaaaaaaaaaaaaaaaa

SEQ ID NO: 41359 - RNA, 1686 nt, Artificial Sequence
  mRNA product Design i-3 (hSL-A100) comprising derived and/or modified sequence from LASV(Lassa virus/H.sapiens-wt/NGA/2015/ISTH_0543;Clade II)__AVO03639__GPCmut12 (opt1)
aggagaaagcuuaccaugggccagaucaucaccuucuuccaggaggugccccacgucaucgaggaggugaugaacaucgugcugaucgcccucagccugcuggccauccucaaggggaucuacaacgucgcgaccugcggccuguucgggcugguguccuuccuccugcugugcggccgcagcugcuccacgaccuacaaggggguguacgagcuccagacccuggagcuggacauggccaaccucaacaugugcaugccgcugagcugcacgaagaacaacucccaccacuacaucauggucggcaacgagaccggccuggagcucacccugaccaacacgagcaucaucaaccacaaguucugcaaccuguccgacgcccacaagaagaaccucuacgaccacgcccugaugagcaucaucuccaccuuccaccugagcauccccaacuucaaccaguacgaggccauguccugcgacuucaacgggggcaagaucagcgugcaguacaaccucucccacaccuacgcgguggacgccgccaaccacugcgggaccaucgccaacggcguccugcagacguucaugcggauggcguggggcgggagcuacaucgcccuggacuccggcaaggggagcugggacugcaucaugaccuccuaccaguaccucgugauccagaacaccaccugggaggaccacugccaguucagccgccccucccccaucggcuaccuggggcugcucagccagcggacgcgcgacaucuacaucagccggcgccugcugggcaccuucaccuggacccucuccgacagcgagggcaacgagacgcccgggggcuacugccugacccgguggaugcugaucgaggccgagcucaagugcuucgggaacaccgccguggccaagugcaacgagaagcacgacgaggaguucugcgacaugcugcgccuguucgacuucugcaagcaggcgauccggcgccucaagaccgaggcccagauguccauccagcugaucaacaaggccgucaacgcccugaucaacgaccagcucaucaugaagaaccaccuccgggacaucaugggcauccccuacugcaacuacagcaaguacugcuaccugaaccacacggugaccgggaagaccucccugccccgcugcugccuggugagcaacggcuccuaccugaacgagacccacuucagcgacgacaucgagcagcaggccgacaacaugaucacggagcuccugcagaaggaguacaucgaccggcagggcaagaccccgcuggggcucgucgaccuguucguguucuccaccagcuucuaccugaucuccaucuuccugcaccucgugaagaucccgacccaccgccacaucacgggcaagcccugccccaagccccaccggcugaaccacauggggaucugcagcugcggccuguacaagcacccggggguccccgugaaguggaagcgcugaggacuaguuauaagacugacuagcccgaugggccucccaacgggcccuccuccccuccuugcaccgagauuaaucaaaggcucuuuucagagccaccaaaaaaaaaaaaaaaaaaaaaaaaaaaaaaaaaaaaaaaaaaaaaaaaaaaaaaaaaaaaaaaaaaaaaaaaaaaaaaaaaaaaaaaaaaaaaaaaaaaaa

SEQ ID NO: 41360 - RNA, 1686 nt, Artificial Sequence
  mRNA product Design i-3 (hSL-A100) comprising derived and/or modified sequence from LASV(Lassa virus/H.sapiens-wt/NGA/2016/ISTH_0009;Clade II)__AVO03571__GPCmut12 (opt1)
aggagaaagcuuaccaugggccagaucaucaccuucuuccaggaggugccccacgucaucgaggaggugaugaacaucgugcugaucgcccucagccugcuggccauccucaaggggaucuacaacgucgcgaccugcggccugcuggggcucguguccuuccugcugcucugcggccgcagcugcuccacgaccuacaaggggguguacgagcugcagacccuggagcucgacauggccagccugaacaugugcaugccgcuguccugcacgaagaacaacagccaccacuacaucauggucggcaacgagaccggccucgagcugacccugaccaacacguccaucaucaaccacaaguucugcaaccucagcgacgcccacaagaagaaccuguacgaccacgcccugauguccaucaucagcaccuuccaccucuccauccccaacuucaaccaguacgaggccaugagcugcgacuucaacgggggccggaucuccgugcaguacaaccugagccacuccuacgcgguggacgccgccaaccacugcgggaccaucgccaacggcguccugcagaccuucaugcgcauggcguggggcgggagcuacaucgcccucgacuccggcaaggggagcugggacugcaucaugacguccuaccaguaccugaucauccagaacaccaccugggaggaccacugccaguucagccggcccagccccaucggcuaccuggggcuccugucccagcgcacccgggacaucuacaucagccgccggcugcucggcacguucaccuggacccuguccgacagcgagggcaacgagacccccgggggcuacugccugacgcgcuggaugcucaucgaggccgagcugaagugcuucgggaacaccgccguggccaagugcaacgagaagcacgacgaggaguucugcgacaugcugcggcuguucgacuucugcaagcaggcgauccgccggcugaagaccgaggcccagauguccauccagcugaucaacaaggccgugaacgcccucaucaacgaccagcugaucaugaagaaccaccuccgcgacaucaugggcaucccguacugcaacuacagcaaguacugcuaccucaaccacaccgucacggggaagaccucccugccccggugcugccuggugagcaacggcuccuaccucaacgagacccacuucagcgacgacaucgagcagcaggccgacaacaugaucaccgagcugcugcagaaggaguacaucgaccgccagggcaagacgccccucgggcugguggaccuguucgucuucuccaccagcuucuaccugaucuccaucuuccuccaccuggugaagaucccgacccaccggcacaucaccggcaagcccugccccaagccccaccgccugaaccacauggggaucugcagcugcggccucuacaaccacccgggggugcccgucaaguggaagcggugaggacuaguuauaagacugacuagcccgaugggccucccaacgggcccuccuccccuccuugcaccgagauuaaucaaaggcucuuuucagagccaccaaaaaaaaaaaaaaaaaaaaaaaaaaaaaaaaaaaaaaaaaaaaaaaaaaaaaaaaaaaaaaaaaaaaaaaaaaaaaaaaaaaaaaaaaaaaaaaaaaaaa

SEQ ID NO: 41361 - RNA, 1686 nt, Artificial Sequence
  mRNA product Design i-3 (hSL-A100) comprising derived and/or modified sequence from LASV(Lassa virus/H.sapiens-wt/NGA/2016/ISTH_0017;Clade II)__AVO03567__GPCmut12 (opt1)
aggagaaagcuuaccaugggccagaucaucaccuucuuccaggaggugccccacgucaucgaggaggugaugaacaucgugcugaucgcccucagccugcuggccauccucaaggggaucuacaacgucgcgaccugcggccuguucgggcugguguccuuccuccugcugugcggccgcagcugcuccacgaccuacaaggggguguacgagcuccagacccuggagcuggacauggccagccucaacaugugcaugccgcuguccugcacgaagaacaacagccaccacuacaucauggucggcaacgagaccggccuggagcucacccugaccaacacguccaucaucaaccacaaguucugcaaccugagcgacgcccacaagaagaaccucuacgaccacgcccugauguccaucaucagcaccuuccaccuguccauccccaacuucaaccaguacgaggccaugagcugcgacuucaacgggggcaagaucuccgugcaguacaaccucagccacaccuacgcgaucgacgccgccaaccacugcgggaccaucgccaacggcgugcugcagacguucaugcggauggcguggggcggguccuacaucgcccuggacagcggcaagggguccugggacugcaucaugaccagcuaccaguaccucaucauccagaacaccaccugggaggaccacugccaguucucccgccccagccccaucggcuaccuggggcugcucagccagcggacgcgcgacaucuacaucucccggcgccugcugggcaccuucaccuggacccucagcgacuccgagggcaacgagacgcccgggggcuacugccugacccgguggaugcugaucgaggccgagcucaagugcuucgggaacaccgccgucgccaagugcaacgagaagcacgacgaggaguucugcgacaugcugcgccuguucgacuucugcaagcaggcgauccggcgccucaagaccgaggcccagaugagcauccagcugaucaacaaggccgugaacgcccugaucaacgaccagcucaucaugaagaaccaccuccgggacaucaugggcauccccuacugcaacuacuccaaguacugcuaccugaaccacacggugaccgggaagaccagccugccccgcugcugccuggucuccaacggcagcuaccugaacgagacccacuucuccgacgacaucgagcagcaggccgacaacaugaucacggagcuccugcagaaggaguacauggaccggcagggcaagaccccgcuggggcucguggaccuguucguguucagcaccuccuucuaccugaucagcaucuuccugcaccucguccgcaucccgacccaccggcacgugaucggcaagcccugccccaagccccaccgccugaaccacauggggaucugcuccugcggccuguacaagcacccgggggugcccgucaaguggaagcggugaggacuaguuauaagacugacuagcccgaugggccucccaacgggcccuccuccccuccuugcaccgagauuaaucaaaggcucuuuucagagccaccaaaaaaaaaaaaaaaaaaaaaaaaaaaaaaaaaaaaaaaaaaaaaaaaaaaaaaaaaaaaaaaaaaaaaaaaaaaaaaaaaaaaaaaaaaaaaaaaaaaaa

SEQ ID NO: 41362 - RNA, 1686 nt, Artificial Sequence
  mRNA product Design i-3 (hSL-A100) comprising derived and/or modified sequence from LASV(Lassa virus/H.sapiens-wt/NGA/2018/ISTH_0959;Clade II)__AVV65099__GPCmut12 (opt1)
aggagaaagcuuaccaugggccagaucaucaccuucuuccaggaggugccccacgucaucgaggaggugaugaacaucgugcugaucgcccucagccugcuggccauccucaaggggaucuacaacgucgugaccugcggccuguucgggcugguguccuuccuccugcugugcggccgcagcugcuccacgaccuacaagggggucuacgagcuccagacccuggagcuggacauggcgagccucaacaugugcaugccgcuguccugcacgaagaacaacagccaccacuacaucauggugggcaacgagaccggccuggagcucacccugaccaacacguccaucaucaaccacaaguucugcaaccugagcgacgcccacaagaagaaccucuacgaccacgcccugauguccaucaucagcaccuuccaccuguccauccccaacuucaaccaguacgaggccaugagcugcgacuucaacgggggcaagaucuccgugcaguacaaccucagccacgccuacgcgaucgacgccgccaaccacugcgggaccaucgccaacggcguccugcagaccuucaugcggauggcguggggcggguccuacaucgcccuggacagcggcaagggguccugggacugcaucaugacgagcuaccaguaccucaucauccagaacaccaccugggaggaccacugccaguucucccgccccagccccaucggcuaccuggggcugcucagccagcggacccgcgacaucuacaucucccggcgccugcugggcacguucaccuggacccucagcgacuccgagggcaacgagacccccgggggcuacugccugacgcgguggaugcugaucgaggccgagcucaagugcuucgggaacaccgccguggccaagugcaacgagaagcacgacgaggaguucugcgacaugcugcgccuguucgacuucugcaagcaggcgauccggcgccucaagaccgaggcccagaugagcauccagcugaucaacaaggccgugaacgcccugaucaacgaccagcucaucaugaagaaccaccuccgggacaucaugggcaucccguacugcaacuacuccaaguacugcuaccugaaccacaccgucacggggaagaccagccugccccgcugcugccugguguccaacggcagcuaccugaacgagacccacuucuccgacgacaucgagcagcaggccgacaacaugaucaccgagcuccugcagaaggaguacaucgaccggcagggcaagacgccccuggggcucguggaccuguucgucuucagcaccuccuucuaccugaucagcaucuuccugcaccucgugaagaucccgacccaccgccacgugaucggcaagcccugccccaagccccaccggcugaaccacauggggaucugcuccugcggccuguacaagcacccggggguccccgugaaguggaagcgcugaggacuaguuauaagacugacuagcccgaugggccucccaacgggcccuccuccccuccuugcaccgagauuaaucaaaggcucuuuucagagccaccaaaaaaaaaaaaaaaaaaaaaaaaaaaaaaaaaaaaaaaaaaaaaaaaaaaaaaaaaaaaaaaaaaaaaaaaaaaaaaaaaaaaaaaaaaaaaaaaaaaaa

SEQ ID NO: 41363 - RNA, 1686 nt, Artificial Sequence
  mRNA product Design i-3 (hSL-A100) comprising derived and/or modified sequence from LASV(LASV003-NIG-2008;Clade II)__AIT17580__GPCmut12 (opt1)
aggagaaagcuuaccaugggccagaucaucaccuucuuccaggaggugccccacgucaucgaggaggugaugaacaucgugcugaucgcccucagccugcuggccauccucaaggggaucuacaacgucgcgaccugcggccuguucgggcugguguccuuccuccugcugugcggccgcagcugcuccacgaccuacaaggggguguacgagcuccagacccuggagcuggacauggccagccucaacaugugcaugccgcuguccugcacgaagaacaacagccaccacuacaucauggucggcaacgagaccggccuggagcucacccugaccaacacguccaucaucaaccacaaguucugcaaccugagcgacgcccacaagaagaaccucuacgaccacgcccugauguccaucaucagcaccuuccaccuguccauccccaacuucaaccaguacgaggccaugagcugcgacuucaacgggggcaagaucuccgugcaguacaaccucagccacaccuacgcgguggacgccgccaaccacugcgggaccaucgccaacggcguccugcagacguucaugcggauggcguggggcggguccuacaucgcccuggacagcggcaagggguccugggacugcaucaugaccagcuaccaguaccucaucauccagaacaccaccugggaggaccacugccaguucucccgccccagccccaucggcuaccuggggcugcucagccagcggacgcgcgacaucuacaucucccggcgccugcugggcaccuucaccuggacccucagcgacuccgagagcaacgagacgccgggcggguacugccugacccgguggaugcugaucgaggccgagcucaagugcuucggcaacaccgccguggccaagugcaacgagaagcacgacgaggaguucugcgacaugcugcgccuguucgacuucugcaagcaggcgauccggcgccucaaggccgaggcccagauguccauccagcugaucaacaaggccgugaacgcccugaucaacgaccagcucaucaugaagaaccaccuccgggacaucauggggauccccuacugcaacuacagcaaguacugcuaccugaaccacaccgucacgggccgcaccucccugccccggugcugccuggugagcaacggguccuaccugaacgagacccacuucagcgacgacaucgagcagcaggcggacaacaugaucaccgagcuccugcagaaggaguacauggaccgccagggcaagacgccccugggccucguggaccuguucgucuucuccaccagcuucuaccugaucuccaucuuccugcaccucgugaagaucccgacccaccggcacgugaucgggaagcccugccccaagccccaccgccugaaccacaugggcaucugcagcugcgggcuguacaagcacccgggcguccccgugaaguggaagcggugaggacuaguuauaagacugacuagcccgaugggccucccaacgggcccuccuccccuccuugcaccgagauuaaucaaaggcucuuuucagagccaccaaaaaaaaaaaaaaaaaaaaaaaaaaaaaaaaaaaaaaaaaaaaaaaaaaaaaaaaaaaaaaaaaaaaaaaaaaaaaaaaaaaaaaaaaaaaaaaaaaaaa

SEQ ID NO: 41364 - RNA, 1686 nt, Artificial Sequence
  mRNA product Design i-3 (hSL-A100) comprising derived and/or modified sequence from LASV(LASV035-NIG-2009;Clade II)__AIT17588__GPCmut12 (opt1)
aggagaaagcuuaccaugggccagaucaucaccuucuuccaggaggugccccacgucaucgaggaggugaugaacaucgugcugaucgcccucagccugcuggccauccucaaggggaucuacaacgucgcgaccugcggccuguucgggcugguguccuuccuccugcugugcggccgcagcugcuccacgaccuacaaggggguguacgagcuccagacccuggagcuggacauggccagccucaacaugugcaugccgcuguccugcacgaagaacaacagccaccacuacaucauggucggcaacgagaccggccuggagcucacccugaccaacacguccaucaucaaccacaaguucugcaaccugagcgacgcccacaagaagaaccucuacgaccacgcccugauguccaucaucagcaccuuccaccuguccauccccaacuucaaccaguacgaggccaugagcugcgacuucaacgggggcaagaucuccgugcaguacaaccucagccacgcguacgccguggacgccgccaaccacugcgggaccaucgcgaacggcguccugcagaccuucaugcggauggccuggggcggguccuacaucgcccuggacagcggcaagggguccugggacugcaucaugacgagcuaccaguaccucaucauccagaacaccaccugggaggaccacugccaguucucccgccccagccccaucggcuaccuggggcugcucagccagcggacccgcgacaucuacaucucccggcgccugcugggcacguucaccuggacccucagcgacuccgagggcaacgagacccccgggggcuacugccugacgcgguggaugcugaucgaggccgagcucaagugcuucgggaacaccgccguggcgaagugcaacgagaagcacgacgaggaguucugcgacaugcugcgccuguucgacuucugcaagcaggccauccggcgccucaaggccgaggcccagaugagcauccagcugaucaacaaggccgugaacgcgcugaucaacgaccagcucaucaugaagaaccaccuccgggacaucaugggcauccccuacugcaacuacuccaaguacugcuaccugaaccacaccgucaccgggaagacgagccugccccgcugcugccugguguccaacggcagcuaccugaacgagacccacuucuccgacgacaucgagcagcaggccgacaacaugaucaccgagcuccugcagaaggaguacaucgaccggcagggcaagaccccgcuggggcucguggaccuguucgucuucagcacguccuucuaccugaucagcaucuuccugcaccucgugaagaucccgacccaccgccacgugaucggcaagcccugccccaagccccaccggcugaaccacauggggaucugcuccugcggccuguacaagcacccggggguccccgugaaguggaagcgcugaggacuaguuauaagacugacuagcccgaugggccucccaacgggcccuccuccccuccuugcaccgagauuaaucaaaggcucuuuucagagccaccaaaaaaaaaaaaaaaaaaaaaaaaaaaaaaaaaaaaaaaaaaaaaaaaaaaaaaaaaaaaaaaaaaaaaaaaaaaaaaaaaaaaaaaaaaaaaaaaaaaaa

SEQ ID NO: 41365 - RNA, 1686 nt, Artificial Sequence
  mRNA product Design i-3 (hSL-A100) comprising derived and/or modified sequence from LASV(LASV1000-NIG-2009;Clade II)__AIT17782__GPCmut12 (opt1)
aggagaaagcuuaccaugggccagaucaucaccuucuuccaggaggugccccacgucaucgaggaggugaugaacaucgugcugaucgcccucagccugcuggccauccucaaggggaucuacaacgucgcgaccugcggccuguucgggcugguguccuuccuccugcugugcggccgcagcugcuccacgaccuacaaggggguguacgagcuccagacccuggagcuggacauggccagccucaacaugugcaugccgcuguccugcacgaagaacaacagccaccacuacaucauggucggcaacgagaccggccuggagcucacccugaccaacacguccaucaucaaccacaaguucugcaaccugagcgacgcccacaagaagaaccucuacgaccacgcccugauguccaucaucagcaccuuccaccuguccauccccaacuucaaccaguacgaggccaugagcugcgacuucaacgggggcaagaucuccgugcaguacaaccucagccacaccuacgcgguggacgccgccaaccacugcgggaccaucgccaacggcguccugcagacguucaugcggauggcguggggcggguccuacaucgcccuggacagcggcaagggguccugggacugcaucaugaccagcuaccaguaccucaucauccagaacaccaccugggaggaccacugccaguucucccgccccagccccaucggcuaccuggggcugcucagccagcggacgcgcgacaucuacaucucccggcgccugcugggcaccuucaccuggacccucagcgacuccgagggcaacgagacgcccgggggcuacugccugacccgguggaugcugaucgaggccgagcucaagugcuucgggaacaccgccguggccaagugcaacgagaagcacgacgaggaguucugcgacaugcugcgccuguucgacuucugcaagcaggcgaucaagcggcucaagaccgaggcccagaugagcauccagcugaucaacaaggccgugaacgcccugaucaacgaccagcucaucaugaagaaccaccuccgcgacaucaugggcauccccuacugcaacuacuccaaguacugcuaccugaaccacacggucaccgggaagaccagccugccccggugcugccugguguccaacggcagcuaccugaacgagacccacuucuccgacgacaucgagcagcaggccgacaacaugaucacggagcuccugcagaaggaguacaucgaccgccagggcaagaccccgcuggggcucguggaccuguucgucuucagcaccuccuucuaccugaucagcaucuuccugcaccucgugaagaucccgacccaccggcacguggucggcaagcccugccccaagccccaccgccugaaccacauggggaucugcuccugcggccuguacaagcacccgggggugcccgugaaguggaagcggugaggacuaguuauaagacugacuagcccgaugggccucccaacgggcccuccuccccuccuugcaccgagauuaaucaaaggcucuuuucagagccaccaaaaaaaaaaaaaaaaaaaaaaaaaaaaaaaaaaaaaaaaaaaaaaaaaaaaaaaaaaaaaaaaaaaaaaaaaaaaaaaaaaaaaaaaaaaaaaaaaaaaa

SEQ ID NO: 41366 - RNA, 1686 nt, Artificial Sequence
  mRNA product Design i-3 (hSL-A100) comprising derived and/or modified sequence from LASV(LASV221-NIG-2010;Clade II)__AIT17624__GPCmut12 (opt1)
aggagaaagcuuaccaugggccagaucaucaccuucuuccaggaggugccccacgucaucgaggaggugaugaacaucgugcugaucgcccucagccugcuggccauccucaaggggaucuacaacgucgcgaccugcggccuguucgggcugguguccuuccuccugcugugcggccgcagcugcuccacgaccuacaaggggguguacgagcuccagacccuggagcuggacauggccagccucaacaugugcaugccgcuguccugcacgaagaacaacagccaccacuacaucauggucggcaacgagaccggccuggagcucacccugaccaacacguccaucaucaaccacaaguucugcaaccugagcgacgcccacaagaagaaccucuacgaccacgcccugauguccaucaucagcaccuuccaccuguccauccccaacuucaaccaguacgaggccaugagcugcgacuucaacgggggcaagaucuccgugcaguacaaccucagccacaccuacgcgaucgacgccgccaaccacugcgggaccaucgccaacggcgugcugcagacguucaugcggauggcguggggcggguccuacaucgcccuggacagcggcaagggguccugggacugcaucaugaccagcuaccaguaccucaucauccagaacaccaccugggaggaccacugccaguucucccgccccagccccaucggcuaccuggggcugcucagccagcggacgcgcgacaucuacaucucccggcgccugcugggcaccuucaccuggacccucagcgacuccgagggcaacgagacgcccgggggcuacugccugacccgguggaugcugaucgaggccgagcucaagugcuucgggaacaccgccgucgccaagugcaacgagaagcacgacgaggaguucugcgacaugcugcgccuguucgacuucugcaagcaggcgauccggcgccucaagaccgaggcccagaugagcauccagcugaucaacaaggccgugaacgcccugaucaacgaccagcucaucaugaagaaccaccuccgggacaucaugggcauccccuacugcaacuacuccaaguacugcuaccugaaccacacggugaccgggaagaccagccugccccgcugcugccuggucuccaacggcagcuaccugaacgagacccacuucuccgacgacaucgagcagcaggccgacaacaugaucacggagaugcuccagaaggaguacauggaccggcagggcaagaccccgcuggggcugguggaccucuucguguucagcaccuccuucuaccugaucagcaucuuccugcaccuggucaagaucccgacccaccgccacgugaucggcaagcccugccccaagccccaccggcucaaccacauggggaucugcuccugcggccuguacaagcacccgggggugcccgucaaguggaagcgcugaggacuaguuauaagacugacuagcccgaugggccucccaacgggcccuccuccccuccuugcaccgagauuaaucaaaggcucuuuucagagccaccaaaaaaaaaaaaaaaaaaaaaaaaaaaaaaaaaaaaaaaaaaaaaaaaaaaaaaaaaaaaaaaaaaaaaaaaaaaaaaaaaaaaaaaaaaaaaaaaaaaaa

SEQ ID NO: 41367 - RNA, 1686 nt, Artificial Sequence
  mRNA product Design i-3 (hSL-A100) comprising derived and/or modified sequence from LASV(LASV237-NIG-2010;Clade II)__AIT17638__GPCmut12 (opt1)
aggagaaagcuuaccaugggccagaucaucaccuucuuccaggaggugccccacgucaucgaggaggugaugaacaucgugcugaucgcccucagccugcuggccauccucaaggggaucuacaacgucgcgaccugcggccuguucgggcugguguccuuccuccugcugugcggccgcagcugcuccacgaccuacaaggggguguacgagcuccagacccuggagcuggacauggccagccucaacaugugcaugccgcuguccugcacgaagaacaacagccaccacuacaucauggucggcaacgagaccggccuggagcucacccugaccaacacguccaucaucaaccacaaguucugcaaccugagcgacgcccacaagaaggaccucuacgaccacgcccugauguccaucaucagcaccuuccaccuguccauccccaacuucaaccaguacgaggccaugagcugcgacuucaacgggggcaagaucuccgugcaguacaaccucagccacaccuacgcgguggacgccgccaaccacugcgggaccaucgccaacggcguccugcagacguucaugcggauggcguggggcggguccuacaucgcccuggacagcggcaagggguccugggacugcaucaugaccagcuaccaguaccucaucauccagaacaccaccugggaggaccacugccaguucucccgccccagccccaucggcuaccuggggcugcucagccagcggacgcgcgacaucuacaucucccggcgccugcugggcaccuucaccuggacccucagcgacuccgagggcaacgagacgcccgggggcuacugccugacccgguggaugcugaucgaggccgagcucaagugcuucgggaacaccgccguggccaagugcaacgagaagcacgacgaggaguucugcgacaugcugcgccuguucgacuucugcaagcaggcgauccggcgccucaagaccgaggcccagaugagcauccagcugaucaacaaggccgugaacgcccugaucaacgaccagcucaucaugaagaaccaccuccgggacaucaugggcauccccuacugcaacuacuccaaguacugcuaccugaaccacacggucaccgggaagaccagccugccccgcugcugccugguguccaacggcagcuaccugaacgagacccacuucuccgacgacaucgagcagcaggccgacaacaugaucacggagcuccugcagaaggaguacauggaccggcagggcaagaccccgcuggggcucguggaccuguucgucuucagcaccuccuucuaccugaucagcaucuuccugcaccucaucaagaucccgacccaccgccacaucacgggcaagcccugccccaagccccaccggcugaaccacauggggaucugcuccugcggccuguacaagcacccgggggugcccgugaaguggaagcgcugaggacuaguuauaagacugacuagcccgaugggccucccaacgggcccuccuccccuccuugcaccgagauuaaucaaaggcucuuuucagagccaccaaaaaaaaaaaaaaaaaaaaaaaaaaaaaaaaaaaaaaaaaaaaaaaaaaaaaaaaaaaaaaaaaaaaaaaaaaaaaaaaaaaaaaaaaaaaaaaaaaaaa

SEQ ID NO: 41368 - RNA, 1686 nt, Artificial Sequence
  mRNA product Design i-3 (hSL-A100) comprising derived and/or modified sequence from LASV(LASV253-NIG-2011;Clade II)__AIT17670__GPCmut12 (opt1)
aggagaaagcuuaccaugggccagaucaucaccuucuuccaggaggugccccacgucaucgaggaggugaugaacaucgugcugaucgcccucagccugcuggccauccucaaggggaucuacaacgucgcgaccugcggccuguucgggcugguguccuuccuccugcugugcggccgcagcugcuccacgaccuacaaggggguguacgagcuccagacccuggagcuggacauggccagccucaacaugugcaugccgcuguccugcacgaagaacaacagccaccacuacaucauggucggcaacgagaccggccuggagcucacccugaccaacacguccaucaucaaccacaaguucugcaaccugagcgacgcccacaagaagaaccucuacgaccacgcccugauguccaucaucagcaccuuccaccuguccauccccaacuucaaccaguacgaggccaugagcugcgacuucaacgggggcaagaucuccgugcaguacaaccucagccacaccuacgcgguggacgccgccaaccacugcgggaccaucgccaacggcguccugcagacguucaugcggauggcguggggcggguccuacaucgcccuggacagcggcaagggguccugggacugcaucaugaccagcuaccaguaccucaucauccagaacaccaccugggaggaccacugccaguucucccgccccagccccaucggcuaccuggggcugcucagccagcggacgcgcgacaucuacaucucccggcgccugcugggcaccuucaccuggacccucagcgacuccgagggcaacgagacgcccgggggcuacugccugacccgguggaugcugaucgaggccgagcucaagugcuucgggaacaccgccguggccaagugcaacgagaagcacgacgaggaguucugcgacaugcugcgccuguucgacuucugcaagcaggcgauccggcgccucaaggccgaggcccagaugagcauccagcugaucaacaaggccgugaacgcccugaucaacgaccagcucaucaugaagaaccaccuccgggacaucaugggcaucccguacugcaacuacuccaaguacugcuaccugaaccacaccgucacggggcgcaccagccugccccggugcugccugguguccaacggcagcuaccugaacgagacccacuucuccgacgacaucgagcagcaggcggacaacaugaucaccgagcuccugcagaaggaguacaucgaccgccagggcaagacgccccuggggcucguggaccuguucgucuucagcaccuccuucuaccugaucagcaucuuccugcaccucgugaagaucccgacccaccggcacaucaucggcaagcccugccccaagccccaccgccugaaccacauggggaucugcuccugcggccuguacaagcacccgggggugcccgucaaguggaagcggugaggacuaguuauaagacugacuagcccgaugggccucccaacgggcccuccuccccuccuugcaccgagauuaaucaaaggcucuuuucagagccaccaaaaaaaaaaaaaaaaaaaaaaaaaaaaaaaaaaaaaaaaaaaaaaaaaaaaaaaaaaaaaaaaaaaaaaaaaaaaaaaaaaaaaaaaaaaaaaaaaaaaa

SEQ ID NO: 41369 - RNA, 1686 nt, Artificial Sequence
  mRNA product Design i-3 (hSL-A100) comprising derived and/or modified sequence from LASV(LASV254-NIG-2011;Clade II)__AIT17674__GPCmut12 (opt1)
aggagaaagcuuaccaugggccagaucaucaccuucuuccaggaggugccccacgucaucgaggaggugaugaacaucgugcugaucgcccucagccugcuggccauccucaaggggaucuacaacgucgcgaccugcggccuguucgggcugguguccuuccuccugcugugcggccgcagcugcuccacgaccuacaaggggguguacgagcuccagacccuggagcuggacaugaccaaccucaacaugugcaugccgcugagcugcaccaagaacaacucccaccacuacaucauggucggcaacgagaccggccuggagcucacccugacgaacaccagcaucaucaaccacaaguucugcaaccuguccgacgcccacaagaagaaccucuacaaccacgcccugaugagcaucaucuccaccuuccaccugagcauccccaacuucaaccaguacgaggccauguccugcgacuucaacgggggcaagaucagcgugcaguacaaccucucccacagcuacgccguggacgcggccaaccacugcgggaccaucgccaacggcguccugcagacguucaugcggauggccuggggcggguccuacaucgcgcuggacagcggcaaggggaacugggacugcaucaugaccuccuaccaguaccucaucauccagaacaccaccugggaggaccacugccaguucagccgccccucccccaucggcuaccuggggcugcucagccagcggacgcgcgacaucuacaucagccggcgccugcugggcaccuucaccuggacccucuccgacagcgagggcaacgagacgcccgggggcuacugccugacccgguggaugcugaucgaggccgagcucaagugcuucgggaacaccgccguggccaagugcaacgagaagcacgacgaggaguucugcgacaugcugcgccuguucgacuucugcaagcaggccauccggcgccucaagaccgaggcgcaggccaacauccagcugaucaacaaggccgugaacgcccugaucaacgaccagcucaucaugaagaaccaccuccgggacaucaugggcauccccuacugcaacuacuccaaguacugcuaccugaaccacacggucaccgggaagaccagccugccccgcugcugccugguguccaacggcagcuaccugaacgagacccacuucuccgacgacaucgagcagcaggccgacaacaugaucacggagcuccugcagaaggaguacauggaccggcagggcaagaccccgcuggggcucguggaccuguucgucuucagcaccuccuucuaccugaucagcaucuuccugcaccucgugaagaucccgacccaccgccacgugaucggcaagcccugccccaagccccaccggcugaaccacauggggaucugcuccugcggccuguacaagcacccggggguccccgugaaguggaagcgcugaggacuaguuauaagacugacuagcccgaugggccucccaacgggcccuccuccccuccuugcaccgagauuaaucaaaggcucuuuucagagccaccaaaaaaaaaaaaaaaaaaaaaaaaaaaaaaaaaaaaaaaaaaaaaaaaaaaaaaaaaaaaaaaaaaaaaaaaaaaaaaaaaaaaaaaaaaaaaaaaaaaaa

SEQ ID NO: 41370 - RNA, 1686 nt, Artificial Sequence
  mRNA product Design i-3 (hSL-A100) comprising derived and/or modified sequence from LASV(Nig08-A19;Clade III)__ADU56618__GPCmut12 (opt1)
aggagaaagcuuaccaugggccagaucgugaccuucuuccaggaggucccccacgugaucgaggaggugaugaacaucguccugaucgcccucagcauccuggccauccugaaggggcucuacaacaucgcgaccugcggccugaucgggcuggugacguuccuccugcuguccggccgcagcugcuccaugaccuacaaggggguguacgagcuccagacccuggagcugaacaugaacacccucaacaugugcaugccgcugagcugcaccaagaacaacucccaccacuacaucauggucggcaacgagaccggccuggagcucacccugacgaacaccagccugcuccaccacaaguucugcaaccuguccgacgcccacaagaagaaccuguacgaccacacccucaugagcaucaucuccaccuuccaccugagcauccccaacuucaaccaguacgaggccauguccugcgacuucaacgggggcaagaucacggugcaguacaaccugagccacuccuacgccaucgacgccgcgaaccacugcgggaccguggccaacggcguccuccagaccuucaugcggauggccuggggcgggagcuacaucgcccuggacuccggccgcgggaagugggacugcaucaugaccagcuaccaguaccugaucauccagaacacgaccugggaggaccacugccaguucucccggcccagccccaucggcuaccucgggcugcugucccagcgcacccgggacaucuacaucagccgccggcuccugggcaccuucacguggacccugagcgacuccgagggcaacgagacccccgggggcuacugccucacccgcuggaugcugaucgaggcggagcugaagugcuucgggaacacggccguggccaagugcaacgagaagcacgacgaggaguucugcgacaugcuccggcuguucgacuucugcaagcaggccauccgccggcugaaggccgaggcgcagaugagcauccagcucaucaacaaggccgugaacgcccugaucaacgaccagcugaucaugaagaaccaccuccgcgacaucaugggcauccccuacugcaacuacuccaaguacugcuaccugaaccacaccagcaccgggcggaccucccugccccgcugcugccucgucagcaacggcuccuaccugaacgagacgcacuucagcgacgacaucgagcagcaggccgacaacaugaucaccgagaugcugcagaaggaguaccucgaccggcagggcaagaccccgcuggggcugguggaccuguucguguucuccaccagcuucuaccucaucuccaucuuccugcaccuggucaagaucccgacgcaccgccacaucgugggcaagcccugccccaagccccaccggcucaaccacauggggaucugcagcugcggccuguacaagcagccgggggugcccguccgcuggaagcggugaggacuaguuauaagacugacuagcccgaugggccucccaacgggcccuccuccccuccuugcaccgagauuaaucaaaggcucuuuucagagccaccaaaaaaaaaaaaaaaaaaaaaaaaaaaaaaaaaaaaaaaaaaaaaaaaaaaaaaaaaaaaaaaaaaaaaaaaaaaaaaaaaaaaaaaaaaaaaaaaaaaaa

SEQ ID NO: 41371 - RNA, 1689 nt, Artificial Sequence
  mRNA product Design i-3 (hSL-A100) comprising derived and/or modified sequence from LASV(G1180-SLE-2010;Clade IV)__AIT17168__GPCmut12 (opt1)
aggagaaagcuuaccaugggccagaucgugaccuucuuccaggaggucccccacgugaucgaggaggugaugaacaucguccugaucgcccucagcauccuggccgugcugaaggggcucuacaacuucgcgaccugcggccugguggggcugcucaccuuccugcugcucugcggccgcuccugcaccgccagccgguacaagggggucuacgagcugcagacccuggagcucaacauggagacccugaacaugugcaugccgcuguccugcaccaagaacaacagccaccacuacaucauggugggcaacgagaccggccucgagcugacccugacgaacaccuccaucaucaaccacaaguucugcaaccucagcgacgcccacaagaagaaccuguacgaccacgcccugauguccaucaucagcaccuuccaccucuccauccccaacuucaaccaguacgaggccaugagcugcgacuucaacgggggcaagaucuccgugcaguacaaccugagccacuccuacgcgggggacgccgccaaccacugcggcaccgucgccaacggggugcugcagacguucaugcgcauggcguggggcggcagcuacaucgcccucgacuccgggcacggcagcugggacugcaucaugaccuccuaccaguaccugaucauccagaacaccaccugggaggaccacugccaguucagccggcccucccccaucggguaccugggccuccugagccagcgcacgcgggacaucuacaucagccgccggcugcucggcaccuucaccuggacccuguccgacagcgaggggaaggacacgccgggcggguacugccugacccgcuggaugcucaucgaggccgagcugaagugcuucggcaacaccgccguggccaagugcaacgagaagcacgacgaggaguucugcgacaugcugcggcuguucgacuucugcaagcaggcgauccagcgccugaaggccgaggcccagauguccauccagcugaucaacaaggccgucaacgcccucaucaacgaccagcugaucaugaagaaccaccuccgggacaucauggggauccccuacugcaacuacagcaaguacugcuaccucaaccacaccacgaccggcaagaccucccugcccaagugcugccuggugagcaacggcuccuaccucaacgagacccacuucagcgacgacaucgagcagcaggcggacaacaugaucacggagaugcugcagaaggaguacauggagcgccaggggaagacgccccugggccucguggaccuguucgucuucuccaccagcuucuaccugaucuccaucuuccugcaccucgugaagaucccgacccaccggcacaucgugggcaagagcugccccaagccccaccgccugaaccacauggggaucugcuccugcgggcuguacaagcagcccggcgucccggugaaguggaagcggugaggacuaguuauaagacugacuagcccgaugggccucccaacgggcccuccuccccuccuugcaccgagauuaaucaaaggcucuuuucagagccaccaaaaaaaaaaaaaaaaaaaaaaaaaaaaaaaaaaaaaaaaaaaaaaaaaaaaaaaaaaaaaaaaaaaaaaaaaaaaaaaaaaaaaaaaaaaaaaaaaaaaa

SEQ ID NO: 41372 - RNA, 1689 nt, Artificial Sequence
  mRNA product Design i-3 (hSL-A100) comprising derived and/or modified sequence from LASV(G1442-SLE-2011;Clade IV)__AIT17180__GPCmut12 (opt1)
aggagaaagcuuaccaugggccagaucgugaccuucuuccaggaggucccccacgugaucgaggaggugaugaacaucguccugaucgcccucagcauccuggccgugcugaaggggcucuacaacguggcgaccugcggccugaucgggcuggucacguuccuccugcugugcggccgcuccugcaccaccacccucuacaaggggguguacgagcugcagacgcuggagcucaacauggagacccugaacaugugcaugccgcugagcugcaccaagaacaacucccaccacuacauccgggugggcaacgagacgggccucgagcugacccugaccaacaccagcaucaucaaccacaaguucugcaaccucuccgacgcccacaagaagaaccuguacgaccacgcccugaugagcaucaucuccacguuccaccucagcauccccaacuucaaccaguacgaggccauguccugcgacuucaacgggggcaagaucagcguccaguacaaccugucccacagcuacgccggggacgcggccaaccacugcggcaccguggccaacggggugcugcagaccuucaugcgcauggccuggggcggcuccuacaucgcgcucgacagcgggcggggcaacugggacugcaucaugaccuccuaccaguaccugaucauccagaacacgaccugggacgaccacugccaguucagccgccccucccccaucggguaccugggccuccugagccagcggacccgcgacgucuacaucucccggcgccugcucggcaccuucacguggacccugagcgacagcgaggggaaggacaccccgggcggguacugccugacccgguggaugcucaucgaggccgagcugaagugcuucggcaacacggccguggccaagugcaacgagaagcacgacgaggaguucugcgacaugcugcgccucuucgacuucugcaagcaggccauccagcggcugaaggcggaggcccagauguccauccagcugaucaacaaggccgugaacgcccucaucaacgaccagcugaucaugaagaaccaccuccgcgacaucauggggauccccuacugcaacuacagcaaguacugcuaccugaacaacaccgccaccggcaagaccucccugcccaagugcugccugaucagcaacggcuccuaccucaacgagacgcacuucagcgacgacaucgagcaggaggcggacaacaugaucaccgagaugcugcagaaggaguacauggagcggcaggggaagacgccccugggccucgucgaccuguucguguucuccaccagcuucuaccugaucuccaucuuccugcaccucgugaagaucccgacccaccgccacaucgucggcaagagcugccccaagccccaccggcugaaccacauggggaucugcuccugcgggcuguacaagcagcccggcgugccggugcgcuggaagcggugaggacuaguuauaagacugacuagcccgaugggccucccaacgggcccuccuccccuccuugcaccgagauuaaucaaaggcucuuuucagagccaccaaaaaaaaaaaaaaaaaaaaaaaaaaaaaaaaaaaaaaaaaaaaaaaaaaaaaaaaaaaaaaaaaaaaaaaaaaaaaaaaaaaaaaaaaaaaaaaaaaaaa

SEQ ID NO: 41373 - RNA, 1689 nt, Artificial Sequence
  mRNA product Design i-3 (hSL-A100) comprising derived and/or modified sequence from LASV(G3010-SLE-2013;Clade IV)__AIT17344__GPCmut12 (opt1)
aggagaaagcuuaccaugggccagaucgugaccuucuuccaggaggucccccacgugaucgaggaggugaugaacaucguccugaucgcccucagcauccuggccgugcugaaggggcucuacaacuucgcgaccugcggccugguggggcuggucacguuccuccugcugugcggccgcuccugcaccaccagccucuacaaggggguguacgagcugcagacccuggagcucaacauggagacgcugaacaugugcaugccgcuguccugcaccaagaacaacagccaccacuacaucauggugggcaacgagaccggccucgagcugacgcugaccaacaccuccaucaucaaccacaaguucugcaaccucagcgacgcccacaagaagaaccuguacaaccacgcccugauguccaucaucagcaccuuccaccucuccauccccaacuucaaccaguacgaggccaugagcugcgacuucaacgggggcaagaucuccguccaguacaaccugagccacuccuacgccggggacgcggccagccacugcggcacgguggccaacggggugcugcagaccuucaugcggauggccuggggcggcuccuacaucgcgcucgacagcggguacggcaagugggacugcaucaugaccuccuaccaguaccugaucauccagaacaccacgugggaggaccacugccaguucagccgccccucccccaucggguaccugggccuccugagccagcggacccgcgacaucuacaucagccggcgccugcucggcaccuucaccuggacgcuguccgacagcgaggggaaggacaccccgggcggguacugccugacccgguggaugcucaucgaggccgagcugaagugcuucggcaacaccgccgucgccaagugcaacgagaagcacgacgaggaguucugcgacaugcugcgccucuucgacuucugcaagcaggccauccagcggcugaagacggaggcgcagauguccauccagcugaucaacaaggccgugaacgcccucaucaacgaccagcugaucaugaagaaccaccuccgcgacaucauggggauccccuacugcaacuacagcaaguacugcuaccugaaccacaccaccaccggcaagacgucccugcccaagugcugccuggugagcaacggcuccuaccucaacgagacccacuucagcgacgacaucgagcagcaggccgacaacaugaucaccgagaugcugcagaaggaguacauggagcggcaggggaagacgccccugggccucgucgaccuguucguguucuccaccagcuucuaccugaucuccaucuuccugcaccucgugaagaucccgacccaccgccacaucgucggcaagagcugccccaagccccaccggcugaaccacauggggaucugcuccugcgggcuguacaagcagcccggcgugccggugcgcuggaagcggugaggacuaguuauaagacugacuagcccgaugggccucccaacgggcccuccuccccuccuugcaccgagauuaaucaaaggcucuuuucagagccaccaaaaaaaaaaaaaaaaaaaaaaaaaaaaaaaaaaaaaaaaaaaaaaaaaaaaaaaaaaaaaaaaaaaaaaaaaaaaaaaaaaaaaaaaaaaaaaaaaaaaa

SEQ ID NO: 41374 - RNA, 1689 nt, Artificial Sequence
  mRNA product Design i-3 (hSL-A100) comprising derived and/or modified sequence from LASV(G502-SLE-2009;Clade IV)__AIT17126__GPCmut12 (opt1)
aggagaaagcuuaccaugggccagaucgugaccuucuuccaggaggucccccacgugaucgaggaggugaugaacaucguccugaucgcccucagcauccuggccgugcugaaggggcucuacaacuucgcgaccugcggccugguggggcugcucacguuccugcugcucugcggccgcuccugcaccaccgggcuguacaagggcgucuacgagcugcagacccucgagcugaacauggagacgcugaacaugugcaugccgcucagcugcaccaagaacaacucccaccacuacaucauggugggcaacgagaccgggcuggagcugacgcucaccaacaccagcaucaucaaccacaaguucugcaaccuguccgacgcccacaagaagaaccuguacgaccacgcccucaugagcaucaucuccaccuuccaccugagcauccccaacuucaaccaguacgaggccauguccugcgacuucaacggcgggaagaucagcgugcaguacaaccugucccacagcuacgccggcgacgcggccgaccacugcgggacggucgccaacggcgugcuccagaccuucaugcggauggccuggggcggguccuacaucgcgcuggacagcggccgcgggcggugggacugcaucaugaccuccuaccaguaccugaucauccagaacaccacgugggaggaccacugccaguucagccgccccucccccaucggcuaccucggccugcugagccagcggacccgcgacaucuacaucucccggcgccuccuggggaccuucaccuggacgcugagcgacagcgagggcaaggacacccccgggggcuacugccucacccgguggaugcugaucgaggccgagcugaagugcuucgggaacaccgccguggccaagugcaacgagaagcacgacgaggaguucugcgacaugcuccgccuguucgacuucugcaagcaggccauccagcggcugaaggcggaggcccagauguccauccagcucaucaacaaggccgucaacgcccugaucaacgaccagcuggugaugaagaaccaccuccgcgacaucaugggcauccccuacugcaacuacagccgguacugcuaccugaaccacacgaccaccggccgcaccucccugcccaagugcugccucgugagcaacggguccuaccugaacgagacgcacuucagcgacgacaucgagcagcaggccgacaacaugaucaccgagaugcugcagaaggaguacauggagcggcagggcaagaccccgcucgggcuggucgaccuguucguguucuccaccagcuucuaccugaucuccaucuuccuccaccuggugaagaucccgacgcaccgccacaucgucggcaagagcugccccaagccccaccggcugaaccacauggggaucugcuccugcggccucuacaagcagcccggcgugccggugaaguggaagcgcugaggacuaguuauaagacugacuagcccgaugggccucccaacgggcccuccuccccuccuugcaccgagauuaaucaaaggcucuuuucagagccaccaaaaaaaaaaaaaaaaaaaaaaaaaaaaaaaaaaaaaaaaaaaaaaaaaaaaaaaaaaaaaaaaaaaaaaaaaaaaaaaaaaaaaaaaaaaaaaaaaaaaa

SEQ ID NO: 41375 - RNA, 1689 nt, Artificial Sequence
  mRNA product Design i-3 (hSL-A100) comprising derived and/or modified sequence from LASV(G733-SLE-2010;Clade IV)__AIT17154__GPCmut12 (opt1)
aggagaaagcuuaccaugggccagaucgugaccuucuuccaggaggucccccacgugaucgaggaggugaugaacaucguccugaucgcccucagcauccuggccgugcugaaggggcucuacaacuucgcgaccugcggcaucguggggcuggucuccuuccugcuccugugcggccgcagcugcacgaccucccuguacaaggggguguacgagcuccagacccuggagcugaacauggagacccucaacaugugcaugccgcugagcugcaccaagaacaacucccaccacuacaucauggugggcaacgagaccggccuggagcucacccugacgaacaccagcaucaucaaccacaaguucugcaaccuguccgacgcccacaagaagaaccucuacgaccacgcccugaugagcaucaucuccaccuuccaccugagcauccccaacuucaaccaguacgaggccauguccugcgacuucaacgggggcaagaucagcguccaguacaaccucucccacagcuacgccggggacgcggccaaccacugcggcaccaucgccaacggggugcugcagacguucaugcggauggccuggggcggcuccuacaucgcgcuggacagcgggcgcgaccggugggacugcaucaugaccuccuaccaguaccucaucauccagaacaccaccugggaggaccacugccaguucagccgccccucccccaucggcuaccuggggcugcucagccagcggacgcgcgacaucuacaucagccggcgccugcugggcaccuucaccuggacccucuccgacagcgagggcaaggacacgcccgggggcuacugccugacccgguggaugcugaucgaggccgagcucaagugcuucgggaacaccgccguggccaagugcaacgagaagcacgacgaggaguucugcgacaugcugcgccuguucgacuucugcaagcaggccauccagcggcucaaggcggaggcccagauguccauccagcugaucaacaaggccgucaacgcccugaucaacgaccagcucaucaugaagaaccaccuccgcgacaucaugggcauccccuacugcaacuacagcaaguacugcuaccugaaccacaccacgaccgggaagaccucccugcccaagugcugccuggugagcaacggcuccuaccugaacgagacccacuucagcgacgacaucgagcagcaggccgacaacaugaucacggagaugcuccagaaggaguacauggagcggcagggcaagaccccgcuggggcugguggaccucuucgucuucuccaccagcuucuaccugaucuccaucuuccugcaccuggugaagaucccgacccaccgccacguggucggcaagagcugccccaagccccaccggcucaaccacauggggaucugcuccugcggccuguacgggcagcccggcgugccggugaaguggaagcgcugaggacuaguuauaagacugacuagcccgaugggccucccaacgggcccuccuccccuccuugcaccgagauuaaucaaaggcucuuuucagagccaccaaaaaaaaaaaaaaaaaaaaaaaaaaaaaaaaaaaaaaaaaaaaaaaaaaaaaaaaaaaaaaaaaaaaaaaaaaaaaaaaaaaaaaaaaaaaaaaaaaaaa

SEQ ID NO: 41376 - RNA, 1689 nt, Artificial Sequence
  mRNA product Design i-3 (hSL-A100) comprising derived and/or modified sequence from MOPV/LASV reassortant(IGS-1;Clade IV)__AFY05576__GPCmut12 (opt1)
aggagaaagcuuaccaugggccagaucgugaccuucuuccaggaggucccccacgugaucgaggaggugaugaacaucguccugaucgcccucagcgugcuggccgugcugaaggggcucuacaacuucgcgaccugcggccuggucgggcuggugacguuccuccugcugugcggccgcuccugcaccaccagccucuacaaggggguguacgagcugcagacccuggagcucaacauggagacgcugaacaugugcaugccgcuguccugcaccaagaacaacagccaccacuacaucauggucggcaacgagaccggccucgagcugacgcugaccaacaccuccaucaucaaccacaaguucugcaaccucagcgacgcccacaagaagaaccuguacgaccacgcccugauguccaucaucagcaccuuccaccucuccauccccaacuucaaccaguacgaggccaugagcugcgacuucaacgggggcaagaucuccgugcaguacaaccugagccacuccuacgccggggacgcggccaaccacugcggcacgguggccaacgggguccugcagaccuucaugcggauggccuggggcggcagcuacaucgcgcucgacuccgggcgcggcaacugggacugcaucaugaccagcuaccaguaccugaucauccagaacaccacgugggaggaccacugccaguucucccggcccagccccaucggguaccugggccuccugucccagcgcacccgggacaucuacaucagccgccggcugcucggcaccuucaccuggacgcugagcgacuccgagggggaggacaccccgggcggguacugccugacccgcuggaugcucaucgaggccgagcugaagugcuucggcaacaccgccguggccaagugcaacgagaagcacgacgaggaguucugcgacaugcugcggcuguucgacuucugcaagcaggccauccagcgccugaaggcggaggcccagaugagcauccagcugaucaacaaggccgugaacgcccucaucaacgaccagcugaucaugaagaaccaccuccgggacaucauggggauccccuacugcaacuacuccaaguacugcuaccucaaccacacgaccaccggccgcaccagccugcccaagugcugccuggucuccaacggcagcuaccucaacgagacgcacuucuccgacgacaucgagcagcaggccgacaacaugaucaccgagaugcugcagaaggaguacauggagcggcaggggaagacgccccugggccucguggaccuguucguguucagcaccuccuucuaccugaucagcaucuuccugcaccucgucaagaucccgacccaccgccacaucguggggaaguccugccccaagccccaccggcugaaccacaugggcaucugcagcugcgggcuguacaagcagcccggcgugccggucaaguggaagcgcugaggacuaguuauaagacugacuagcccgaugggccucccaacgggcccuccuccccuccuugcaccgagauuaaucaaaggcucuuuucagagccaccaaaaaaaaaaaaaaaaaaaaaaaaaaaaaaaaaaaaaaaaaaaaaaaaaaaaaaaaaaaaaaaaaaaaaaaaaaaaaaaaaaaaaaaaaaaaaaaaaaaaa

SEQ ID NO: 41377 - RNA, 1689 nt, Artificial Sequence
  mRNA product Design i-3 (hSL-A100) comprising derived and/or modified sequence from LASV(LM765-SLE-2012;Clade IV)__AIT17814__GPCmut12 (opt1)
aggagaaagcuuaccaugggccagaucgugaccuucuuccaggaggucccccacgugaucgaggaggugaugaacaucguccugaucgcccucagcauccuggccgugcugaaggggcucuacaacuucgcgaccugcggccugguggggcuggucacguuccuccugcugugcggccgcuccugcaccaccagccucuacaaggggguguacgagcugcagacccuggagcucaacauggagacgcugaacaugugcaugccgcuguccugcaccaagaacaacagccaccacuacaucauggugggcaacgagaccggccucgagcugacgcugaccaacaccuccaucaucgaccacaaguucugcaaccucagcgacgcccaccggaagaaccuguacgaccacgcccugauguccaucaucagcaccuuccaccucuccauccccaacuucaaccaguacgaggccaugagcugcgacuucaacgggggcaagaucuccguccaguacaaccugagccacuccuacgccaaggacgcggccgaccacugcgggacgguggccaacggcgugcugcagaccuucaugcgcauggccuggggcgggagcuacaucgcgcucgacuccggccgggggcgcugggacugcaucaugaccagcuaccaguaccugaucauccagaacaccacgugggaggaccacugccaguucucccggcccagccccaucggcuaccuggggcuccugucccagcgcacccgggacaucuacaucagccgccggcugcucggcaccuucaccuggacgcugagcgacuccgagggcaaggacacccccgggggcuacugccugacccgcuggaugcucaucgaggccgagcugaagugcuucgggaacaccgccgucgccaagugcaacgagaagcacgacgaggaguucugcgacaugcugcggcuguucgacuucugcaagcaggccauccagcgccugaaggcggaggcccagaugagcauccagcugaucaacaaggccgugaacgcccucaucaacgaccagcugaucaugaagaaccaccuccgggacaucaugggcauccccuacugcaacuacuccaaguacugcuaccucaaccacacgaccaccgggaagaccagccugcccaagugcugccugguguccaacggcagcuaccucaacgagacgcacuucuccgacgacaucgagcagcaggccgacaacaugaucaccgagaugcugcagaaggaguacauggagcgccagggcaagaccccgcuggggcucgucgaccuguucguguucagcaccuccuucuaccugaucagcaucuuccugcaccucgugaagaucccgacgcaccggcacaucgucggcaagcccugccccaagccccaccgccugaaccacauggggaucugcuccugcggccuguacaagcagccgggggugcccgugaaguggaagcggugaggacuaguuauaagacugacuagcccgaugggccucccaacgggcccuccuccccuccuugcaccgagauuaaucaaaggcucuuuucagagccaccaaaaaaaaaaaaaaaaaaaaaaaaaaaaaaaaaaaaaaaaaaaaaaaaaaaaaaaaaaaaaaaaaaaaaaaaaaaaaaaaaaaaaaaaaaaaaaaaaaaaa

SEQ ID NO: 41378 - RNA, 1689 nt, Artificial Sequence
  mRNA product Design i-3 (hSL-A100) comprising derived and/or modified sequence from LASV(LM776-SLE-2012;Clade IV)__AIT17824__GPCmut12 (opt1)
aggagaaagcuuaccaugggccagaucgugaccuucuuccaggaggucccccacgugaucgaggaggugaugaacaucguccugaucgcccucagcauccuggccgugcugaaggggcucuacaacuucgcgaccugcggccugguggggcuggucacguuccuccugcugugcggccgcuccugcaccaccagcguguacaaggggguguacgagcuccagacccuggagcugaacauggagacgcucaacaugugcaugccgcuguccugcaccaagaacaacagccaccacuacaucauggucggcaacgagaccggccuggagcucacgcugaccaacaccuccaucaucaaccacaaguucugcaaccugagcgacgcccacaagaagaaccucuacgaccacgcccugauguccaucaucagcaccuuccaccuguccauccccaacuucaaccaguacgaggccaugagcugcgacuucaacgggggcaagaucuccgugcaguacaaccucagccacuccuacgccggggacgcggccaaccacugcggcacgguggccaacgggguccugcagaccuucaugcggauggccuggggcggcagcuacaucgcgcuggacuccgggcacggcaagugggacugcaucaugaccagcuaccaguaccucaucauccagaacaccacgugggaggaccacugccaguucucccgccccagccccaucggguaccugggccugcucucccagcggacccgcgacaucuacaucagccggcgccugcugggcaccuucaccuggacgcucagcgacuccgaggggaaggacaccccgggcggguacugccugacccgguggaugcugaucgaggccgagcucaagugcuucggcaacaccgccguggccaagugcaacgagaagcacgacgaggaguucugcgacaugcugcgccuguucgacuucugcaagcaggccauccagcggcucaaggcggaggcccagaugagcauccagcugaucaacaaggccgugaacgcccugaucaacgaccagcucaucaugaagaaccaccuccgcgacaucauggggauccccuacugcaacuacuccaaguacugcuaccugaaccacacgaccaccggcaagaccagccugcccaagugcugccuggucuccaacggcagcuaccugaacgagacgcacuucuccgacgacaucgagcagcaggccgacaacaugaucaccgagaugcuccagaaggaguacauggagcggcaggggaagacgccccugggccugguggaccucuucguguucagcaccuccuucuaccugaucagcaucuuccugcaccuggucaagaucccgacccaccgccacaucguggggaaguccugccccaagccccaccggcucaaccacaugggcaucugcagcugcgggcuguacaagcagcccggcgugccgguccgcuggaagcggugaggacuaguuauaagacugacuagcccgaugggccucccaacgggcccuccuccccuccuugcaccgagauuaaucaaaggcucuuuucagagccaccaaaaaaaaaaaaaaaaaaaaaaaaaaaaaaaaaaaaaaaaaaaaaaaaaaaaaaaaaaaaaaaaaaaaaaaaaaaaaaaaaaaaaaaaaaaaaaaaaaaaa

SEQ ID NO: 41379 - RNA, 1689 nt, Artificial Sequence
  mRNA product Design i-3 (hSL-A100) comprising derived and/or modified sequence from LASV(Mad39;Clade IV)__ANH09722__GPCmut12 (opt1)
aggagaaagcuuaccaugggccagaucgugaccuucuuccaggaggucccccacgugaucgaggaggugaugaacaucguccugaucgcccucagcauccuggccgugcugaaggggcucuacaacguggcgaccugcggccugaucgggcuggucacguuccuccugcugugcggccgcuccugcaccaccacccucuacaaggggguguacgagcugcaggcccuggagcucaacauggagacgcugaacaugugcaugccgcugagcugcaccaagaacaacucccaccacuacauccgggugggcaacgagaccggccucgagcugacgcugaccaacaccagccucaucaaccacaaguucugcaaccuguccgacgcccacaagaagaaccuguacgaccacgcccucaugagcaucaucuccaccuuccaccugagcauccccaacuucaaccaguacgaggccauguccugcgacuucaacgacgggaagaucagcguccaguacaaccugucccacacguacgcgggcgacaccgccaaccacugcgggaccguggccaacggcgugcuccagaccuucaugcgcauggccuggggcgggagcuacaucgcgcuggacuccggccgcgggggcugggacugcaucaugacgagcuaccaguaccugaucauccagaacaccaccugggaggaccacugccaguucucccggcccagccccaucggguaccucggccugcugucccagcggacccgcgacaucuacaucagccggcgccuccugggcacguucaccuggacccuguccgacagcgaggggaaggacaccccgggcggguacugccucacgcgguggaugcugaucgaggccgagcugaagugcuucggcaacaccgccgucgccaagugcaacgagaagcacgacgaggaguucugcgacaugcuccgccuguucgacuucugcaagcaggccauccagcggcugaaggcggaggcccagaugagcauccagcucaucaacaaggccgugaacgcccugaucaacgaccagcugaucaugaagaaccaccuccgcgacaucauggggauccccuacugcaacuacuccaaguacugcuaccugaaccacaccgugaccggcaagacgagccugcccaagugcugccucgucuccaacggcagcuaccugaacgagacccacuucuccgacgacaucgagcagcaggccgacaacaugaucaccgagaugcugcagaaggaguacauggagcggcaggggaagacgccccucggccugguggaccuguucguguucagcaccuccuucuaccugaucagcaucuuccuccaccuggucaagaucccgacccaccgccacgugguggggaagcccugccccaagccccaccggcugaaccacaugggcaucugcuccugcggguucuacaagcagccgggcguccccgugcgcuggaagcggugaggacuaguuauaagacugacuagcccgaugggccucccaacgggcccuccuccccuccuugcaccgagauuaaucaaaggcucuuuucagagccaccaaaaaaaaaaaaaaaaaaaaaaaaaaaaaaaaaaaaaaaaaaaaaaaaaaaaaaaaaaaaaaaaaaaaaaaaaaaaaaaaaaaaaaaaaaaaaaaaaaaaa

SEQ ID NO: 41380 - RNA, 1689 nt, Artificial Sequence
  mRNA product Design i-3 (hSL-A100) comprising derived and/or modified sequence from LASV(Z0947-SLE-2011;Clade IV)__AIT17840__GPCmut12 (opt1)
aggagaaagcuuaccaugggccagaucgugaccuucuuccaggaggucccccacgugaucgaggaggugaugaacaucguccugaucgcccucagcauccuggccgugcugaaggggcucuacaacuucgcgaccugcggccugguggggcuggucacguuccuccugcugugcggccgcuccugcaccaucagccucuacaaggggguguacgagcugcagacccuggagcucaacauggagacccugaacaugugcaugccgcuguccugcaccaagaacaacagccaccacuacaucauggugggcaacgagaccggccucgagcugacccugacgaacaccuccaucaucaaccacaaguucugcaaccucagcgacgcccacaagaagaaccuguacgaccacgcccugauguccaucaucagcaccuuccaccucuccauccccaacuucaaccaguacgaggccaugagcugcgacuucaacgggggcaagaucuccguccaguacaaccugagccacuccuacgccggggacgcggccaaccacugcggcaccguggccaacggggugcugcagacguucaugcggauggccuggggcggcagcuacaucgcgcucgacuccgggcgcgaccggugggacugcaucaugaccagcuaccaguaccugaucauccagaacaccaccugggaggaccacugccaguucucccgccccagccccaucggcuaccuggggcuccugucccagcggacgcgcgacaucuacaucagccggcgccugcucggcaccuucaccuggacccugagcgacuccgagggcaaggacacgcccgggggcuacugccugacccgguggaugcucaucgaggccgagcugaagugcuucgggaacaccgccgucgccaagugcaacgagaagcacgacgaggaguucugcgacaugcugcgccucuucgacuucugcaagcaggccauccagcggcugaaggcggaggcccagaugagcauccagcugaucaacaaggccgugaacgcccucaucaacgaccagcugaucaugaagaaccaccuccgcgacaucaugggcauccccuacugcaacuacuccaaguacugcuaccugaaccacaccacgaccgggaagaccagccugcccaagugcugccugguguccaacggcagcuaccucaacgagacccacuucuccgacgacaucgagcagcaggccgacaacaugaucacggagaugcugcagaaggaguacauggagcggcagggcaagaccccgcuggggcucgucgaccuguucguguucagcaccuccuucuaccugaucagcaucuuccugcaccucgugaagaucccgacccaccgccacaucgucggcaagcccugccccaagccccaccggcugaaccacauggggaucugcuccugcggccuguacaagcagccgggggugcccgugaaguggaagcgcugaggacuaguuauaagacugacuagcccgaugggccucccaacgggcccuccuccccuccuugcaccgagauuaaucaaaggcucuuuucagagccaccaaaaaaaaaaaaaaaaaaaaaaaaaaaaaaaaaaaaaaaaaaaaaaaaaaaaaaaaaaaaaaaaaaaaaaaaaaaaaaaaaaaaaaaaaaaaaaaaaaaaa

SEQ ID NO: 41381 - RNA, 1689 nt, Artificial Sequence
  mRNA product Design i-3 (hSL-A100) comprising derived and/or modified sequence from LASV(Josiah;Clade IV)__NP_694870__GPCmut12 (opt1)
aggagaaagcuuaccaugggccagaucgugaccuucuuccaggaggucccccacgugaucgaggaggugaugaacaucguccugaucgcccucagcgugcuggccgugcugaaggggcucuacaacuucgcgaccugcggccuggucgggcuggugaccuuccuccugcugugcggccgcuccugcaccaccagccucuacaaggggguguacgagcugcagacccuggagcucaacauggagacgcugaacaugugcaugccgcuguccugcaccaagaacaacagccaccacuacaucauggucggcaacgagaccggccucgagcugacccugacgaacaccuccaucaucaaccacaaguucugcaaccucagcgacgcccacaagaagaaccuguacgaccacgcccugauguccaucaucagcaccuuccaccucuccauccccaacuucaaccaguacgaggccaugagcugcgacuucaacgggggcaagaucuccgugcaguacaaccugagccacuccuacgccggggacgcggccaaccacugcggcaccguggccaacgggguccugcagacguucaugcggauggccuggggcggcagcuacaucgcgcucgacuccgggcgcggcaacugggacugcaucaugaccagcuaccaguaccugaucauccagaacaccaccugggaggaccacugccaguucucccggcccagccccaucggguaccugggccuccugucccagcgcacgcgggacaucuacaucagccgccggcugcucggcaccuucaccuggacccugagcgacuccgaggggaaggacacgccgggcggguacugccugacccgcuggaugcucaucgaggccgagcugaagugcuucggcaacaccgccguggccaagugcaacgagaagcacgacgaggaguucugcgacaugcugcggcuguucgacuucugcaagcaggccauccagcgccugaaggcggaggcccagaugagcauccagcugaucaacaaggccgugaacgcccucaucaacgaccagcugaucaugaagaaccaccuccgggacaucauggggauccccuacugcaacuacuccaaguacugcuaccucaaccacaccacgaccggccgcaccagccugcccaagugcugccuggucuccaacggcagcuaccucaacgagacccacuucuccgacgacaucgagcagcaggccgacaacaugaucacggagaugcugcagaaggaguacauggagcggcaggggaagacgccccugggccugguggaccucuucguguucagcaccuccuucuaccugaucagcaucuuccugcaccucgucaagaucccgacccaccgccacaucguggggaaguccugccccaagccccaccggcugaaccacaugggcaucugcagcugcgggcuguacaagcagcccggcgugccggucaaguggaagcgcugaggacuaguuauaagacugacuagcccgaugggccucccaacgggcccuccuccccuccuugcaccgagauuaaucaaaggcucuuuucagagccaccaaaaaaaaaaaaaaaaaaaaaaaaaaaaaaaaaaaaaaaaaaaaaaaaaaaaaaaaaaaaaaaaaaaaaaaaaaaaaaaaaaaaaaaaaaaaaaaaaaaaa

SEQ ID NO: 41382 - RNA, 1686 nt, Artificial Sequence
  mRNA product Design i-3 (hSL-A100) comprising derived and/or modified sequence from LASV(LP;Clade I)__AAF86701__GPCmut12 (opt1)
aggagaaagcuuaccaugggccagaucaucaccuucuuccaggaggugccccacgucaucgaggaggugaugaacaucgugcugaucgcccucagccugcuggccauccucaaggggcuguacaacaucgcgaccugcggcaucaucgggcuggucgccuuccucuuccugugcggcaaguccugcagccugacgcucaagggcggguacgagcugcagacccuggagcucaacauggagacccugaacaugugcaugccgcuguccugcaccaagaacagcucccaccacuacauccgcgugggcaacgagacggggcucgagcugacccugaccaacaccagcaucaucaaccacaaguucugcaaccucuccgacgcccacaagaagaaccuguacgaccacgcccugaugagcaucaucuccacguuccaccucagcauccccaacuucaaccaguacgaggccauguccugcgacuucaacggcgggaagaucagcgugcaguacaaccugucccacagcuacgcgggcgacgccgccgagcacugcgggaccgucgccaacggcgugcugcagaccuucaugcggauggcguggggcgggcgcuacaucgcccucgacuccggcaaggggaacugggacugcaucaugaccagcuaccaguaccugaucauccagaacacgaccugggaggaccacugccaguucucccggcccagccccaucggcuaccugggccuccugucccagcgcacccgggacaucuacaucagccgccggcugcucgggaccuucacguggacccugagcgacuccgagggcaacgagacccccgggggcuacugccugacccgcuggaugcucaucgaggccgagcugaagugcuucgggaacacggccguggccaagugcaacgagaagcacgacgaggaguucugcgacaugcugcggcuguucgacuucugcaagcaggcgauccgccggcugaaggccgaggcccagaugagcauccagcugaucaacaaggccgucaacgcccucaucaacgaccagcugaucaugaagaaccaccuccgcgacaucaugggcauccccuacugcaacuacuccaaguacugcuaccucaaccacaccagcuccggccggaccagccugcccaagugcugccugaucuccaacgggagcuaccucaacgagacccaguucuccgacgacaucgagcagcaggcggacaacaugaucacggagaugcugcagaaggaguacaucgagcgccagggcaagaccccgcuggggcugguggacaucuucaucuucagcaccuccuucuaccucaucagcaucuuccugcaccugaucaagaucccgacccaccggcacaucgugggcaagcccugccccaagccccaccgccucaaccacaugggggucugcuccugcggccuguacaagcacccgggcgugcccacgaaguggaagcggugaggacuaguuauaagacugacuagcccgaugggccucccaacgggcccuccuccccuccuugcaccgagauuaaucaaaggcucuuuucagagccaccaaaaaaaaaaaaaaaaaaaaaaaaaaaaaaaaaaaaaaaaaaaaaaaaaaaaaaaaaaaaaaaaaaaaaaaaaaaaaaaaaaaaaaaaaaaaaaaaaaaaa

SEQ ID NO: 41383 - RNA, 1686 nt, Artificial Sequence
  mRNA product Design i-3 (hSL-A100) comprising derived and/or modified sequence from LASV(803213;Clade II)__AAF86703__GPCmut12 (opt1)
aggagaaagcuuaccaugggccagaucaucaccuucuuccaggaggugccccacgucaucgaggaggugaugaacaucgugcugaucgcccucagccugcuggccauccucaaggggaucuacaacgucgcgaccugcggccuguucgggcugaucuccuuccuccugcugugcggccgcagcugcuccgugacguacaaggggguguacgagcuccagacccuggagcugaacauggccaaccucaacaugugcaugccgcugagcugcaccaagaacaacucccaccacuacaucauggucggcaacgagaccggccuggagcucacgcugaccaacaccagcaucaucaaccacaaguucugcaaccuguccgacgcccacaagaagaaccucuacgaccacgcccugaugagcaucaucuccaccuuccaccugagcauccccaacuucaaccaguacgaggccauguccugcgacuucaacgggggcaagaucagcgugcaguacaaccucucccacagcuucgcgguggacgccgccaaccacugcgggacgaucgccaacggcguccugcagaccuucaugcggauggcguggggcggguccuacaucgcccuggacagcggcaaggggaacugggacugcaucaugaccuccuaccaguaccucaucauccagaacaccacgugggaggaccacugccaguucagccgccccucccccaucggcuaccuggggcugcucagccagcggacccgcgacaucuacaucagccggcgccugcugggcaccuucaccuggacgcucuccgacagcgagggcaacgaggcccccgggggcuacugccugacccgguggaugcugaucgaggccgagcucaagugcuucgggaacaccgccguggcgaagugcaacgagaagcacgacgaggaguucugcgacaugcugcgccuguucgacuucugcaagcaggccaucaagcggcucaagaccgaggcccagauguccauccagcugaucaacaaggccgugaacgcccugaucaacgaccagcucaucaugaagaaccaccuccgcgacaucaugggcauccccuacugcaacuacagccgguacugcuaccugaaccacacggucaccgggaagaccucccugccccgcugcugccuggugagcaacggcuccuaccugaacgagacccacuucagcgacgacaucgagcagcaggcggacaacaugaucacggagaugcuccagaaggaguacauggaccggcagggcaagaccccgcuggggcugguggaccuguucgucuucuccaccagcuucuaccucaucuccaucuuccugcaccuggugaagaucccgacccaccgccacaucgugggcaagcccugccccaagccccaccggcucaaccacauggggaucugcagcugcggccuguacaagcacccggggguccccgugaaguggaagcgcugaggacuaguuauaagacugacuagcccgaugggccucccaacgggcccuccuccccuccuugcaccgagauuaaucaaaggcucuuuucagagccaccaaaaaaaaaaaaaaaaaaaaaaaaaaaaaaaaaaaaaaaaaaaaaaaaaaaaaaaaaaaaaaaaaaaaaaaaaaaaaaaaaaaaaaaaaaaaaaaaaaaaa

SEQ ID NO: 41384 - RNA, 1686 nt, Artificial Sequence
  mRNA product Design i-3 (hSL-A100) comprising derived and/or modified sequence from LASV(GA391;Clade III)__CAA36645__GPCmut12 (opt1)
aggagaaagcuuaccaugggccagaucgugaccuucuuccaggaggucccccacgugaucgaggaggugaugaacaucguccugaucgcccucagcauccuggccauccugaaggggcucuacaacguggcgaccugcggccugaucgggcuggugaccuuccuccugcuguccggccgcagcugcucccucaucuacaaggggaccuacgagcugcagacccuggagcucaacauggagacccugaacaugugcaugccgcugagcugcacgaagaacaacucccaccacuacauccgggucggcaacgagaccggccucgagcugacccugaccaacacgagcauccucaaccacaaguucugcaaccuguccgacgcccacaagcgcaaccuguacgaccacagccucauguccaucaucagcaccuuccaccuguccauccccaacuucaaccaguacgaggccaugagcugcgacuucaacgggggcaagaucaccgugcaguacaaccugucccacagcuucgccguggacgccgcggggcacugcggcacccucgccaacgggguccugcagacguucaugcggauggccuggggcggcuccuacaucgcccuggacagcgggcgcggcaacugggacugcaucaugaccuccuaccaguaccucaucauccagaacaccaccugggacgaccacugccaguucagccggcccucccccaucggguaccugggccugcucagccagcgcacgcgggacaucuacaucagccgccggcugcugggcaccuucaccuggacccucuccgacagcgaggggaacgagacgccgggcggguacugccugacccgcuggaugcugaucgaggcggagcucaagugcuucggcaacaccgccguggccaagugcaacgagaagcacgacgaggaguucugcgacaugcugcggcuguucgacuucugcaagcaggccauccgccggcucaagaccgaggcccagauguccauccagcugaucaacaaggcggugaacgcccugaucaacgaccagcucaucaugaagaaccaccuccgcgacaucauggggauccccuacugcaacuacagccgguacugcuaccugaaccacacguccaccggcaagaccagccugccccgcugcugccugaucuccaacggcagcuaccugaacgagaccaaguucuccgacgacaucgagcagcaggccgacaacaugaucacggagaugcugcagaaggaguacaucgaccggcaggggaagacgccccucggccuggucgaccuguucguguucagcaccuccuucuaccucaucagcaucuuccugcaccuggugaagaucccgacccaccgccacaucgucgggaagcccugccccaagccccaccggcucaaccacaugggcaucugcuccugcgggcuguacaagcagccgggcgugcccgugcgcuggaagcggugaggacuaguuauaagacugacuagcccgaugggccucccaacgggcccuccuccccuccuugcaccgagauuaaucaaaggcucuuuucagagccaccaaaaaaaaaaaaaaaaaaaaaaaaaaaaaaaaaaaaaaaaaaaaaaaaaaaaaaaaaaaaaaaaaaaaaaaaaaaaaaaaaaaaaaaaaaaaaaaaaaaaa

SEQ ID NO: 41385 - RNA, 1689 nt, Artificial Sequence
  mRNA product Design i-3 (hSL-A100) comprising derived and/or modified sequence from LASV(AV;Clade V)__CCA30314__GPCmut12 (opt1)
aggagaaagcuuaccaugggccagaucgugaccuucuuccaggaggucccccacgugaucgaggaggugaugaacaucguccugaucgcccucagcauccuggccgugcugaaggggcucuacaacaucgcgaccugcggccugaucgggcugaucacguuccuccugcugugcggccgcuccugcagcuccaaccucuacaaggggguguacgagcugcagagccuggaccucaacauggagacccugaacaugugcaugccgcuguccugcaccaagaacaacagccaccacuacauccgggucggcaacgacaccggccucgagcugacgcugaccaacaccuccauccucaaccacaaguucugcaaccugagcgacgcccacaagaaggaccuguacgaccacgcccucauguccaucaucagcaccuuccaccuguccauccccaacuucaaccaguacgaggccaugagcugcgacuucaacgggggcaagaucuccgugcaguacaaccugagccacuccuacgccaucgacgcggccaaccacugcgggacgguggccaacggcauccuccagaccuucaugcgcauggccuggggcgggagcuacaucgcgcuggacuccggccgggggaacugggacugcaucaugaccagcuaccaguaccugaucauccagaacaccacgugggagaaccacugccaguucucccgccccagccccaucggcuaccucgggcugcugagccagcggacccgcgacaucuacaucucccggcgccuccugggcaccuucaccuggacgcugagcgacuccgagggcaacgccacccccgggggcuacugccucacccgguggaugcugaucgaggccgagcugaagugcuucgggaacaccgccgucgccaagugcaacgagaagcacgacgaggaguucugcgacaugcuccgccuguucgacuucugcaagcaggcgaucagccggcugaaguccgaggcccagaugagcauccagcucaucaacaaggccgugaacgcccugaucaacgaccagcugaucaugaagaaccaccuccgcgacaucaugggcauccccuacugcaacuacuccaaguacugcuaccugaaccacacgaucaccgggaagaccagccugcccaagugcugccucguguccaacggcagcuaccugaacgagacccacuucuccgacgacaucgagcagcaggccgacaacaugaucacggagaugcugcagaaggaguacauggagcggcagggcaagaccccgcuggggcucgucgaccuguucguguucagcaccuccuucuaccugaucagcaucuuccuccgccuggugaagaucccgacccaccggcacaucgucggcaagcccugccccaagccccaccgccugaaccacauggggaucugcuccugcggccucuacaagcagccgggggugcccgugcgguggaagcgcugaggacuaguuauaagacugacuagcccgaugggccucccaacgggcccuccuccccuccuugcaccgagauuaaucaaaggcucuuuucagagccaccaaaaaaaaaaaaaaaaaaaaaaaaaaaaaaaaaaaaaaaaaaaaaaaaaaaaaaaaaaaaaaaaaaaaaaaaaaaaaaaaaaaaaaaaaaaaaaaaaaaaa

SEQ ID NO: 41386 - RNA, 1686 nt, Artificial Sequence
  mRNA product Design i-3 (hSL-A100) comprising derived and/or modified sequence from LASV(Togo/2016/7082;Clade VI)__AMR44577__GPCmut12 (opt1)
aggagaaagcuuaccaugggccagaucaucaccuucuuccaggaggugccccacgucaucgaggaggugaugaacaucgugcugaucgcccucagccugcuggccauccucaagggggucuacaacguggcgaccugcggcaucaucgggcuggugacguuccuguuccucugcggccgcuccugcagccugaucuacaagggguccuacgagcugcagacccucgagcugaacauggagacccugaacaugugcaugccgcucagcugcaccaagaacuccagccaccacuacauccgggucggcaacgagacgggccuggagcugacccucaccaacaccuccaucaucaaccacaaguucugcaaccugagcgacgcccacaagcgcaaccuguacgaccacgcccucauguccauccugagcacguuccaccuguccauccccaacuucaaccaguacgaggccaugagcugcgacuucaacgggggcaagaucuccgugcaguacaaccucagccacgccuacgcgguggacgccgccgagcacugcgggaccgucgccaacggcgugcugcagaccuucaugcggauggcguggggcggguccuacaucgcccuggacagcggccgcgggaacugggacugcaucaugaccuccuaccaguaccucaucauccagaacacgaccugggaggaccacugccaguucagccggcccucccccaucggcuaccuggggcugcucagccagcgcacccgggacaucuacaucagccgccggcugcugggcaccuucacguggacccucuccgacagcgagggcaacgagacccccgggggcuacugccugacccgcuggaugcugaucgaggccgagcucaagugcuucgggaacacggccguggccaagugcaacgagaagcacgacgaggaguucugcgacaugcugcggcuguucgacuucugcaagcaggcgauccagcgccucaaguccgaggcccagaugagcauccagcugaucaacaaggccgucaacgcccugaucaacgaccagcucaucaugaagaaccaccuccgggacaugaugggcauccccuacugcaacuacuccaaguacugcuaccugaaccacaccagcuccgggcgcaccagccugcccaagugcugccugguguccaacggcagcuaccugaacgagacccacuucuccgacgacaucgagcagcaggccgacaacaugaucacggagaugcuccagaaggaguacaucgaccggcagggcaagaccccgcuggggcugguggaccuguucgucuucagcaccuccuucuaccucaucagcaucuuccugcaccugaucaagaucccgacccaccgccacaucgugggcaagcccugccccaagccccaccggcucaaccacauggggaucugcuccugcggccuguacaagcagccgggggugcccacgcgcuggaagcggugaggacuaguuauaagacugacuagcccgaugggccucccaacgggcccuccuccccuccuugcaccgagauuaaucaaaggcucuuuucagagccaccaaaaaaaaaaaaaaaaaaaaaaaaaaaaaaaaaaaaaaaaaaaaaaaaaaaaaaaaaaaaaaaaaaaaaaaaaaaaaaaaaaaaaaaaaaaaaaaaaaaaa

SEQ ID NO: 41387 - RNA, 1686 nt, Artificial Sequence
  mRNA product Design i-3 (hSL-A100) comprising derived and/or modified sequence from LASV(KAK-428;Clade n.d. (VII))__ANH09740__GPCmut12 (opt1)
aggagaaagcuuaccaugggccagaucgugaccuucuuccaggaggucccccacgugaucgaggaggugaugaacaucguccugaucgcccucagccugcuggccauccucaaggggcuguacaacuucgcgaccugcggcgugaucgggcugaucacguuccuccugcugugcggccgcuccugcagcgccaccuacaaggggcaguacgagcuccagacccuggagcugaacauggagucccucaacaugugcaugccgcugagcugcaccaagaacaacucccaccacuacauccgggccggcaacaacacgggccuggagcucacccugaccaacaccagcaucaucucccacaaguucugcaaccugagcgacgcccacaagaagaaccucuacgaccacacgcugauguccaucaucaccaccuuccaccugagcauccccaacuucaaccaguacgaggccauguccugcgacuucaacgggggcaagaucagcauccaguacaaccucucccacagcuacgcgggggacgccgcccagcacugcggcaccguggccaacgggguccugcagacguucaugcgcauggcguggggcggcuccuaccuggcccucgacagcgggcggcgcggcugggacugcaucaucuccagcuaccaguaccugaucauccagaacaccaccugggacgaccacugccaguucucccggcccagccccaucggguaccugggcuucgugagccagaagacccgcgacaucuacaucucccggcgccuccugggcacguucaccuggacccugagcgacuccgaggggcacgacaugccgggcggguacugccucacccgguggaugcugaucgaggccgaccugaagugcuucggcaacacggccguggccaagugcaacgagaagcacgacgaggaguucugcgacauguggcgccucuucgacuucugcaagcaggcgauccagcggcugaaggccgaggcccagaugaacauccagcugaucaacaaggccgucaacgcccucaucaacgaccagcugaugaugaagaaccaccuccgcgacaucauggggauccccuacugcaacuacagcaaguucugcuaccugaacaacaccaccaccggccggacgucccugccccgcugcugccugaucagcaacggcuccuaccucaacgagacccacuucagcgacgacaucgagcagcaggcggacaacaugaucaccgagaugcugcagaaggaguacauggaccggcaggggaagacgccccugggccucguggaccuguucguguucuccaccagcuucuaccugaucaccaucuuccugcaccucgucaagaucccgacccaccgccacaucguggggaagcccugccccaagccccaccggcugaaccacaugggcaucugcuccugcgggcuguacaagcagccgggcgugcccguccgcuggaagcggugaggacuaguuauaagacugacuagcccgaugggccucccaacgggcccuccuccccuccuugcaccgagauuaaucaaaggcucuuuucagagccaccaaaaaaaaaaaaaaaaaaaaaaaaaaaaaaaaaaaaaaaaaaaaaaaaaaaaaaaaaaaaaaaaaaaaaaaaaaaaaaaaaaaaaaaaaaaaaaaaaaaaa

SEQ ID NO: 41388 - RNA, 1686 nt, Artificial Sequence; identical to SEQ ID NO: 41382
  mRNA product Design i-3 (hSL-A100) comprising derived and/or modified sequence from LASV(Pinneo-NIG-1969;Clade I)__AIT17836__GPCmut12 (opt1)

SEQ ID NO: 41389 - RNA, 1686 nt, Artificial Sequence
  mRNA product Design i-3 (hSL-A100) comprising derived and/or modified sequence from LASV(ISTH0009-NIG-2011;Clade II)__AIT17404__GPCmut12 (opt1)
aggagaaagcuuaccaugggccagaucaucaccuucuuccaggaggugccccacgucaucgaggaggugaugaacaucgugcugaucgcccucagccugcuggccauccucaaggggaucuacaacgucgcgaccugcggccuguucgggcugguguccuuccuccugcugugcggccgcagcugcuccacgaccuacaaggggguguacgagcuccagacccuggagcuggacauggccagccucaacaugugcaugccgcuguccugcaccaagaacaacagccaccacuacaucauggucggcaacgagacgggccuggagcucacccugaccaacaccuccaucaucaaccacaaguucugcaaccugagcgacgcccacaagaagaaccucuacgaccacgcccugauguccaucaucagcacguuccaccuguccauccccaacuucaaccaguacgaggccaugagcugcgacuucaacgggggcaagaucuccgugcaguacaaccucagccacgcguacgccguggacgccgccaaccacugcgggaccaucgcgaacggcguccugcagaccuucaugcggauggccuggggcggguccuacaucgcccuggacagcggcaagggguccugggacugcaucaugaccagcuaccaguaccucaucauccagaacacgaccugggaggaccacugccaguucucccgccccagccccaucggcuaccuggggcugcucagccagcggacccgcgacaucuacaucucccggcgccugcugggcaccuucacguggacccucagcgacuccgagggcaacgagacccccgggggcuacugccugacccgguggaugcugaucgaggccgagcucaagugcuucgggaacacggccguggcgaagugcaacgagaagcacgacgaggaguucugcgacaugcugcgccuguucgacuucugcaagcaggccauccggcgccucaagaccgaggcccagaugagcauccagcugaucaacaaggccgugaacgcccugaucaacgaccagcucaucaugaagaaccaccuccgggacaucaugggcauccccuacugcaacuacuccaaguacugcuaccugaaccacaccgucaccgggaagacgagccugccccgcugcugccugguguccaacggcagcuaccugaacgagacccacuucuccgacgacaucgagcagcaggcggacaacaugaucaccgagcuccugcagaaggaguacauggaccggcagggcaagaccccgcuggggcugguggaccucuucgucuucagcacguccuucuaccugaucagcaucuuccugcaccucaucaagaucccgacccaccgccacaucaccggcaagcccugccccaagccccaccggcugaaccacauggggaucugcuccugcggccuguacaagcacccgggggugcccgugaaguggaagcgcugaggacuaguuauaagacugacuagcccgaugggccucccaacgggcccuccuccccuccuugcaccgagauuaaucaaaggcucuuuucagagccaccaaaaaaaaaaaaaaaaaaaaaaaaaaaaaaaaaaaaaaaaaaaaaaaaaaaaaaaaaaaaaaaaaaaaaaaaaaaaaaaaaaaaaaaaaaaaaaaaaaaaa

SEQ ID NO: 41390 - RNA, 1686 nt, Artificial Sequence
  mRNA product Design i-3 (hSL-A100) comprising derived and/or modified sequence from LASV(ISTH2010-NIG-2012;Clade II)__AIT17482__GPCmut12 (opt1)
aggagaaagcuuaccaugggccagaucaucaccuucuuccaggaggugccccacgucaucgaggaggugaugaacaucgugcugaucgcccucagccugcuggccauccucaaggggaucuacaacgucgcgaccugcggccuguucgggcugguguccuuccuccugcugugcggccgcagcugcuccacgaccuacaaggggguguacgagcuccagacccuggagcuggacauggccagccucaacaugugcaugccgcuguccugcaccaagaacaacagccaccacuacaucauggucggcaacgagacgggccuggagcucacccugaccaacaccuccaucaucaaccacaaguucugcaaccugagcgacgcccacaagaagaaccucuacgaccacgcccugauguccaucaucagcacguuccaccuguccauccccaacuucaaccaguacgaggccaugagcugcgacuucaacgggggcaagaucuccgugcaguacaaccucagccacgcguacgccguggacgccgccaaccacugcgggaccaucgcgaacggcguccugcagaccuucaugcggauggccuggggcggguccuacaucgcccuggacagcggcaagggguccugggacugcaucaugaccagcuaccaguaccucaucauccagaacaucacgugggaggaccacugccaguucucccgccccagccccaucggcuaccuggggcugcucagccagcggacccgcgacaucuacaucucccggcgccugcugggcaccuucaccuggacgcucagcgacuccgagggcaacgagacccccgggggcuacugccugacccgguggaugcugaucgaggccgagcucaagugcuucgggaacaccgccguggcgaagugcaacgagaagcacgacgaggaguucugcgacaugcugcgccuguucgacuucugcaagcaggccauccggcgccucaagacggaggcccagaugagcauccagcugaucaacaaggccgugaacgcccugaucaacgaccagcucaucaugaagaaccaccuccgggacaucaugggcauccccuacugcaacuacuccaaguacugcuaccugaaccacaccgucaccgggaagaccagccugccccgcugcugccugguguccaacggcagcuaccugaacgagacgcacuucuccgacgacaucgagcagcaggcggacaacaugaucaccgagcuccugcagaaggaguacaucgaccggcagggcaagaccccgcuggggcugguggaccucuucgucuucagcaccuccuucuaccugaucagcaucuuccugcaccucgugaagaucccgacgcaccgccacguggucggcaagcccugccccaagccccaccggcugaaccacauggggaucugcuccugcggccuguacaagcacccgggggugcccgugaaguggaagcgcugaggacuaguuauaagacugacuagcccgaugggccucccaacgggcccuccuccccuccuugcaccgagauuaaucaaaggcucuuuucagagccaccaaaaaaaaaaaaaaaaaaaaaaaaaaaaaaaaaaaaaaaaaaaaaaaaaaaaaaaaaaaaaaaaaaaaaaaaaaaaaaaaaaaaaaaaaaaaaaaaaaaaa

SEQ ID NO: 41391 - RNA, 1686 nt, Artificial Sequence
  mRNA product Design i-3 (hSL-A100) comprising derived and/or modified sequence from LASV(Lassa virus/H.sapiens-wt/NGA/2015/ISTH_0543;Clade II)__AVO03639__GPCmut12 (opt1)
aggagaaagcuuaccaugggccagaucaucaccuucuuccaggaggugccccacgucaucgaggaggugaugaacaucgugcugaucgcccucagccugcuggccauccucaaggggaucuacaacgucgcgaccugcggccuguucgggcugguguccuuccuccugcugugcggccgcagcugcuccacgaccuacaaggggguguacgagcuccagacccuggagcuggacauggccaaccucaacaugugcaugccgcugagcugcaccaagaacaacucccaccacuacaucauggucggcaacgagacgggccuggagcucacccugaccaacaccagcaucaucaaccacaaguucugcaaccuguccgacgcccacaagaagaaccucuacgaccacgcccugaugagcaucaucuccacguuccaccugagcauccccaacuucaaccaguacgaggccauguccugcgacuucaacgggggcaagaucagcgugcaguacaaccucucccacaccuacgcgguggacgccgccaaccacugcgggaccaucgccaacggcguccugcagaccuucaugcggauggcguggggcgggagcuacaucgcccuggacuccggcaaggggagcugggacugcaucaugacguccuaccaguaccucgugauccagaacaccaccugggaggaccacugccaguucagccgccccucccccaucggcuaccuggggcugcucagccagcggacccgcgacaucuacaucagccggcgccugcugggcacguucaccuggacccucuccgacagcgagggcaacgagacccccgggggcuacugccugacgcgguggaugcugaucgaggccgagcucaagugcuucgggaacaccgccguggccaagugcaacgagaagcacgacgaggaguucugcgacaugcugcgccuguucgacuucugcaagcaggcgauccggcgccucaagaccgaggcccagauguccauccagcugaucaacaaggccgucaacgcccugaucaacgaccagcucaucaugaagaaccaccuccgggacaucaugggcaucccguacugcaacuacagcaaguacugcuaccugaaccacaccgugacggggaagaccucccugccccgcugcugccuggugagcaacggcuccuaccugaacgagacccacuucagcgacgacaucgagcagcaggccgacaacaugaucaccgagcuccugcagaaggaguacaucgaccggcagggcaagacgccccuggggcuggucgaccucuucguguucuccaccagcuucuaccugaucuccaucuuccugcaccucgugaagaucccgacccaccgccacaucaccggcaagcccugccccaagccccaccggcugaaccacauggggaucugcagcugcggccuguacaagcacccggggguccccgugaaguggaagcgcugaggacuaguuauaagacugacuagcccgaugggccucccaacgggcccuccuccccuccuugcaccgagauuaaucaaaggcucuuuucagagccaccaaaaaaaaaaaaaaaaaaaaaaaaaaaaaaaaaaaaaaaaaaaaaaaaaaaaaaaaaaaaaaaaaaaaaaaaaaaaaaaaaaaaaaaaaaaaaaaaaaaaa

SEQ ID NO: 41392 - RNA, 1686 nt, Artificial Sequence
  mRNA product Design i-3 (hSL-A100) comprising derived and/or modified sequence from LASV(Lassa virus/H.sapiens-wt/NGA/2016/ISTH_0009;Clade II)__AVO03571__GPCmut12 (opt1)
aggagaaagcuuaccaugggccagaucaucaccuucuuccaggaggugccccacgucaucgaggaggugaugaacaucgugcugaucgcccucagccugcuggccauccucaaggggaucuacaacgucgcgaccugcggccugcuggggcucguguccuuccugcugcucugcggccgcagcugcuccacgaccuacaaggggguguacgagcugcagacccuggagcucgacauggccagccugaacaugugcaugccgcuguccugcaccaagaacaacagccaccacuacaucauggucggcaacgagacgggccucgagcugacccugaccaacaccuccaucaucaaccacaaguucugcaaccucagcgacgcccacaagaagaaccuguacgaccacgcccugauguccaucaucagcacguuccaccucuccauccccaacuucaaccaguacgaggccaugagcugcgacuucaacgggggccggaucuccgugcaguacaaccugagccacuccuacgcgguggacgccgccaaccacugcgggaccaucgccaacggcguccugcagaccuucaugcgcauggcguggggcgggagcuacaucgcccucgacuccggcaaggggagcugggacugcaucaugaccuccuaccaguaccugaucauccagaacacgaccugggaggaccacugccaguucagccggcccagccccaucggcuaccuggggcuccugucccagcgcacccgggacaucuacaucagccgccggcugcucggcaccuucacguggacccuguccgacagcgagggcaacgagacccccgggggcuacugccugacccgcuggaugcucaucgaggccgagcugaagugcuucgggaacacggccguggccaagugcaacgagaagcacgacgaggaguucugcgacaugcugcggcuguucgacuucugcaagcaggcgauccgccggcugaagaccgaggcccagauguccauccagcugaucaacaaggccgugaacgcccucaucaacgaccagcugaucaugaagaaccaccuccgcgacaucaugggcauccccuacugcaacuacagcaaguacugcuaccucaaccacaccgucaccgggaagacgucccugccccggugcugccuggugagcaacggcuccuaccucaacgagacccacuucagcgacgacaucgagcagcaggccgacaacaugaucaccgagcugcugcagaaggaguacaucgaccgccagggcaagaccccgcuggggcucguggaccuguucgucuucuccacgagcuucuaccugaucuccaucuuccuccaccuggugaagaucccgacccaccggcacaucaccggcaagcccugccccaagccccaccgccugaaccacauggggaucugcagcugcggccucuacaaccacccgggggugcccgucaaguggaagcggugaggacuaguuauaagacugacuagcccgaugggccucccaacgggcccuccuccccuccuugcaccgagauuaaucaaaggcucuuuucagagccaccaaaaaaaaaaaaaaaaaaaaaaaaaaaaaaaaaaaaaaaaaaaaaaaaaaaaaaaaaaaaaaaaaaaaaaaaaaaaaaaaaaaaaaaaaaaaaaaaaaaaa

SEQ ID NO: 41393 - RNA, 1686 nt, Artificial Sequence
  mRNA product Design i-3 (hSL-A100) comprising derived and/or modified sequence from LASV(Lassa virus/H.sapiens-wt/NGA/2016/ISTH_0017;Clade II)__AVO03567__GPCmut12 (opt1)
aggagaaagcuuaccaugggccagaucaucaccuucuuccaggaggugccccacgucaucgaggaggugaugaacaucgugcugaucgcccucagccugcuggccauccucaaggggaucuacaacgucgcgaccugcggccuguucgggcugguguccuuccuccugcugugcggccgcagcugcuccacgaccuacaaggggguguacgagcuccagacccuggagcuggacauggccagccucaacaugugcaugccgcuguccugcaccaagaacaacagccaccacuacaucauggucggcaacgagacgggccuggagcucacccugaccaacaccuccaucaucaaccacaaguucugcaaccugagcgacgcccacaagaagaaccucuacgaccacgcccugauguccaucaucagcacguuccaccuguccauccccaacuucaaccaguacgaggccaugagcugcgacuucaacgggggcaagaucuccgugcaguacaaccucagccacaccuacgcgaucgacgccgccaaccacugcgggaccaucgccaacggcgugcugcagaccuucaugcggauggcguggggcggguccuacaucgcccuggacagcggcaagggguccugggacugcaucaugacgagcuaccaguaccucaucauccagaacaccaccugggaggaccacugccaguucucccgccccagccccaucggcuaccuggggcugcucagccagcggacccgcgacaucuacaucucccggcgccugcugggcacguucaccuggacccucagcgacuccgagggcaacgagacccccgggggcuacugccugacgcgguggaugcugaucgaggccgagcucaagugcuucgggaacaccgccgucgccaagugcaacgagaagcacgacgaggaguucugcgacaugcugcgccuguucgacuucugcaagcaggcgauccggcgccucaagaccgaggcccagaugagcauccagcugaucaacaaggccgugaacgcccugaucaacgaccagcucaucaugaagaaccaccuccgggacaucaugggcaucccguacugcaacuacuccaaguacugcuaccugaaccacaccgugacggggaagaccagccugccccgcugcugccuggucuccaacggcagcuaccugaacgagacccacuucuccgacgacaucgagcagcaggccgacaacaugaucaccgagcuccugcagaaggaguacauggaccggcagggcaagacgccccuggggcugguggaccucuucguguucagcaccuccuucuaccugaucagcaucuuccugcaccucguccgcaucccgacccaccggcacgugaucggcaagcccugccccaagccccaccgccugaaccacauggggaucugcuccugcggccuguacaagcacccgggggugcccgucaaguggaagcggugaggacuaguuauaagacugacuagcccgaugggccucccaacgggcccuccuccccuccuugcaccgagauuaaucaaaggcucuuuucagagccaccaaaaaaaaaaaaaaaaaaaaaaaaaaaaaaaaaaaaaaaaaaaaaaaaaaaaaaaaaaaaaaaaaaaaaaaaaaaaaaaaaaaaaaaaaaaaaaaaaaaaa

SEQ ID NO: 41394 - RNA, 1686 nt, Artificial Sequence
  mRNA product Design i-3 (hSL-A100) comprising derived and/or modified sequence from LASV(Lassa virus/H.sapiens-wt/NGA/2018/ISTH_0959;Clade II)__AVV65099__GPCmut12 (opt1)
aggagaaagcuuaccaugggccagaucaucaccuucuuccaggaggugccccacgucaucgaggaggugaugaacaucgugcugaucgcccucagccugcuggccauccucaaggggaucuacaacgucgugaccugcggccuguucgggcugguguccuuccuccugcugugcggccgcagcugcuccacgaccuacaagggggucuacgagcuccagacccuggagcuggacauggcgagccucaacaugugcaugccgcuguccugcaccaagaacaacagccaccacuacaucauggugggcaacgagacgggccuggagcucacccugaccaacaccuccaucaucaaccacaaguucugcaaccugagcgacgcccacaagaagaaccucuacgaccacgcccugauguccaucaucagcacguuccaccuguccauccccaacuucaaccaguacgaggccaugagcugcgacuucaacgggggcaagaucuccgugcaguacaaccucagccacgccuacgcgaucgacgccgccaaccacugcgggaccaucgccaacggcguccugcagaccuucaugcggauggcguggggcggguccuacaucgcccuggacagcggcaagggguccugggacugcaucaugaccagcuaccaguaccucaucauccagaacacgaccugggaggaccacugccaguucucccgccccagccccaucggcuaccuggggcugcucagccagcggacccgcgacaucuacaucucccggcgccugcugggcaccuucacguggacccucagcgacuccgagggcaacgagacccccgggggcuacugccugacccgguggaugcugaucgaggccgagcucaagugcuucgggaacacggccguggccaagugcaacgagaagcacgacgaggaguucugcgacaugcugcgccuguucgacuucugcaagcaggcgauccggcgccucaagaccgaggcccagaugagcauccagcugaucaacaaggccgugaacgcccugaucaacgaccagcucaucaugaagaaccaccuccgggacaucaugggcauccccuacugcaacuacuccaaguacugcuaccugaaccacaccgucaccgggaagacgagccugccccgcugcugccugguguccaacggcagcuaccugaacgagacccacuucuccgacgacaucgagcagcaggccgacaacaugaucaccgagcuccugcagaaggaguacaucgaccggcagggcaagaccccgcuggggcugguggaccucuucgucuucagcacguccuucuaccugaucagcaucuuccugcaccucgugaagaucccgacccaccgccacgugaucggcaagcccugccccaagccccaccggcugaaccacauggggaucugcuccugcggccuguacaagcacccggggguccccgugaaguggaagcgcugaggacuaguuauaagacugacuagcccgaugggccucccaacgggcccuccuccccuccuugcaccgagauuaaucaaaggcucuuuucagagccaccaaaaaaaaaaaaaaaaaaaaaaaaaaaaaaaaaaaaaaaaaaaaaaaaaaaaaaaaaaaaaaaaaaaaaaaaaaaaaaaaaaaaaaaaaaaaaaaaaaaaa

SEQ ID NO: 41395 - RNA, 1686 nt, Artificial Sequence
  mRNA product Design i-3 (hSL-A100) comprising derived and/or modified sequence from LASV(LASV003-NIG-2008;Clade II)__AIT17580__GPCmut12 (opt1)
aggagaaagcuuaccaugggccagaucaucaccuucuuccaggaggugccccacgucaucgaggaggugaugaacaucgugcugaucgcccucagccugcuggccauccucaaggggaucuacaacgucgcgaccugcggccuguucgggcugguguccuuccuccugcugugcggccgcagcugcuccacgaccuacaaggggguguacgagcuccagacccuggagcuggacauggccagccucaacaugugcaugccgcuguccugcaccaagaacaacagccaccacuacaucauggucggcaacgagacgggccuggagcucacccugaccaacaccuccaucaucaaccacaaguucugcaaccugagcgacgcccacaagaagaaccucuacgaccacgcccugauguccaucaucagcacguuccaccuguccauccccaacuucaaccaguacgaggccaugagcugcgacuucaacgggggcaagaucuccgugcaguacaaccucagccacaccuacgcgguggacgccgccaaccacugcgggaccaucgccaacggcguccugcagaccuucaugcggauggcguggggcggguccuacaucgcccuggacagcggcaagggguccugggacugcaucaugacgagcuaccaguaccucaucauccagaacaccaccugggaggaccacugccaguucucccgccccagccccaucggcuaccuggggcugcucagccagcggacccgcgacaucuacaucucccggcgccugcugggcacguucaccuggacccucagcgacuccgagagcaacgagaccccgggcggguacugccugacgcgguggaugcugaucgaggccgagcucaagugcuucggcaacaccgccguggccaagugcaacgagaagcacgacgaggaguucugcgacaugcugcgccuguucgacuucugcaagcaggcgauccggcgccucaaggccgaggcccagauguccauccagcugaucaacaaggccgugaacgcccugaucaacgaccagcucaucaugaagaaccaccuccgggacaucauggggauccccuacugcaacuacagcaaguacugcuaccugaaccacaccgucaccggccgcacgucccugccccggugcugccuggugagcaacggguccuaccugaacgagacccacuucagcgacgacaucgagcagcaggcggacaacaugaucaccgagcuccugcagaaggaguacauggaccgccagggcaagacgccccugggccugguggaccucuucgucuucuccaccagcuucuaccugaucuccaucuuccugcaccucgugaagaucccgacccaccggcacgugaucgggaagcccugccccaagccccaccgccugaaccacaugggcaucugcagcugcgggcuguacaagcacccgggcguccccgugaaguggaagcggugaggacuaguuauaagacugacuagcccgaugggccucccaacgggcccuccuccccuccuugcaccgagauuaaucaaaggcucuuuucagagccaccaaaaaaaaaaaaaaaaaaaaaaaaaaaaaaaaaaaaaaaaaaaaaaaaaaaaaaaaaaaaaaaaaaaaaaaaaaaaaaaaaaaaaaaaaaaaaaaaaaaaa

SEQ ID NO: 41396 - RNA, 1686 nt, Artificial Sequence
  mRNA product Design i-3 (hSL-A100) comprising derived and/or modified sequence from LASV(LASV035-NIG-2009;Clade II)__AIT17588__GPCmut12 (opt1)
aggagaaagcuuaccaugggccagaucaucaccuucuuccaggaggugccccacgucaucgaggaggugaugaacaucgugcugaucgcccucagccugcuggccauccucaaggggaucuacaacgucgcgaccugcggccuguucgggcugguguccuuccuccugcugugcggccgcagcugcuccacgaccuacaaggggguguacgagcuccagacccuggagcuggacauggccagccucaacaugugcaugccgcuguccugcaccaagaacaacagccaccacuacaucauggucggcaacgagacgggccuggagcucacccugaccaacaccuccaucaucaaccacaaguucugcaaccugagcgacgcccacaagaagaaccucuacgaccacgcccugauguccaucaucagcacguuccaccuguccauccccaacuucaaccaguacgaggccaugagcugcgacuucaacgggggcaagaucuccgugcaguacaaccucagccacgcguacgccguggacgccgccaaccacugcgggaccaucgcgaacggcguccugcagaccuucaugcggauggccuggggcggguccuacaucgcccuggacagcggcaagggguccugggacugcaucaugaccagcuaccaguaccucaucauccagaacacgaccugggaggaccacugccaguucucccgccccagccccaucggcuaccuggggcugcucagccagcggacccgcgacaucuacaucucccggcgccugcugggcaccuucacguggacccucagcgacuccgagggcaacgagacccccgggggcuacugccugacccgguggaugcugaucgaggccgagcucaagugcuucgggaacacggccguggcgaagugcaacgagaagcacgacgaggaguucugcgacaugcugcgccuguucgacuucugcaagcaggccauccggcgccucaaggccgaggcccagaugagcauccagcugaucaacaaggccgugaacgcgcugaucaacgaccagcucaucaugaagaaccaccuccgggacaucaugggcauccccuacugcaacuacuccaaguacugcuaccugaaccacaccgucaccgggaagaccagccugccccgcugcugccugguguccaacggcagcuaccugaacgagacgcacuucuccgacgacaucgagcagcaggccgacaacaugaucaccgagcuccugcagaaggaguacaucgaccggcagggcaagaccccgcuggggcugguggaccucuucgucuucagcaccuccuucuaccugaucagcaucuuccugcaccucgugaagaucccgacgcaccgccacgugaucggcaagcccugccccaagccccaccggcugaaccacauggggaucugcuccugcggccuguacaagcacccggggguccccgugaaguggaagcgcugaggacuaguuauaagacugacuagcccgaugggccucccaacgggcccuccuccccuccuugcaccgagauuaaucaaaggcucuuuucagagccaccaaaaaaaaaaaaaaaaaaaaaaaaaaaaaaaaaaaaaaaaaaaaaaaaaaaaaaaaaaaaaaaaaaaaaaaaaaaaaaaaaaaaaaaaaaaaaaaaaaaaa

SEQ ID NO: 41397 - RNA, 1686 nt, Artificial Sequence
  mRNA product Design i-3 (hSL-A100) comprising derived and/or modified sequence from LASV(LASV1000-NIG-2009;Clade II)__AIT17782__GPCmut12 (opt1)
aggagaaagcuuaccaugggccagaucaucaccuucuuccaggaggugccccacgucaucgaggaggugaugaacaucgugcugaucgcccucagccugcuggccauccucaaggggaucuacaacgucgcgaccugcggccuguucgggcugguguccuuccuccugcugugcggccgcagcugcuccacgaccuacaaggggguguacgagcuccagacccuggagcuggacauggccagccucaacaugugcaugccgcuguccugcaccaagaacaacagccaccacuacaucauggucggcaacgagacgggccuggagcucacccugaccaacaccuccaucaucaaccacaaguucugcaaccugagcgacgcccacaagaagaaccucuacgaccacgcccugauguccaucaucagcacguuccaccuguccauccccaacuucaaccaguacgaggccaugagcugcgacuucaacgggggcaagaucuccgugcaguacaaccucagccacaccuacgcgguggacgccgccaaccacugcgggaccaucgccaacggcguccugcagaccuucaugcggauggcguggggcggguccuacaucgcccuggacagcggcaagggguccugggacugcaucaugacgagcuaccaguaccucaucauccagaacaccaccugggaggaccacugccaguucucccgccccagccccaucggcuaccuggggcugcucagccagcggacccgcgacaucuacaucucccggcgccugcugggcacguucaccuggacccucagcgacuccgagggcaacgagacccccgggggcuacugccugacgcgguggaugcugaucgaggccgagcucaagugcuucgggaacaccgccguggccaagugcaacgagaagcacgacgaggaguucugcgacaugcugcgccuguucgacuucugcaagcaggcgaucaagcggcucaagaccgaggcccagaugagcauccagcugaucaacaaggccgugaacgcccugaucaacgaccagcucaucaugaagaaccaccuccgcgacaucaugggcaucccguacugcaacuacuccaaguacugcuaccugaaccacaccgucacggggaagaccagccugccccggugcugccugguguccaacggcagcuaccugaacgagacccacuucuccgacgacaucgagcagcaggccgacaacaugaucaccgagcuccugcagaaggaguacaucgaccgccagggcaagacgccccuggggcugguggaccucuucgucuucagcaccuccuucuaccugaucagcaucuuccugcaccucgugaagaucccgacccaccggcacguggucggcaagcccugccccaagccccaccgccugaaccacauggggaucugcuccugcggccuguacaagcacccgggggugcccgugaaguggaagcggugaggacuaguuauaagacugacuagcccgaugggccucccaacgggcccuccuccccuccuugcaccgagauuaaucaaaggcucuuuucagagccaccaaaaaaaaaaaaaaaaaaaaaaaaaaaaaaaaaaaaaaaaaaaaaaaaaaaaaaaaaaaaaaaaaaaaaaaaaaaaaaaaaaaaaaaaaaaaaaaaaaaaa

SEQ ID NO: 41398 - RNA, 1686 nt, Artificial Sequence
  mRNA product Design i-3 (hSL-A100) comprising derived and/or modified sequence from LASV(LASV221-NIG-2010;Clade II)__AIT17624__GPCmut12 (opt1)
aggagaaagcuuaccaugggccagaucaucaccuucuuccaggaggugccccacgucaucgaggaggugaugaacaucgugcugaucgcccucagccugcuggccauccucaaggggaucuacaacgucgcgaccugcggccuguucgggcugguguccuuccuccugcugugcggccgcagcugcuccacgaccuacaaggggguguacgagcuccagacccuggagcuggacauggccagccucaacaugugcaugccgcuguccugcaccaagaacaacagccaccacuacaucauggucggcaacgagacgggccuggagcucacccugaccaacaccuccaucaucaaccacaaguucugcaaccugagcgacgcccacaagaagaaccucuacgaccacgcccugauguccaucaucagcacguuccaccuguccauccccaacuucaaccaguacgaggccaugagcugcgacuucaacgggggcaagaucuccgugcaguacaaccucagccacaccuacgcgaucgacgccgccaaccacugcgggaccaucgccaacggcgugcugcagaccuucaugcggauggcguggggcggguccuacaucgcccuggacagcggcaagggguccugggacugcaucaugacgagcuaccaguaccucaucauccagaacaccaccugggaggaccacugccaguucucccgccccagccccaucggcuaccuggggcugcucagccagcggacccgcgacaucuacaucucccggcgccugcugggcacguucaccuggacccucagcgacuccgagggcaacgagacccccgggggcuacugccugacgcgguggaugcugaucgaggccgagcucaagugcuucgggaacaccgccgucgccaagugcaacgagaagcacgacgaggaguucugcgacaugcugcgccuguucgacuucugcaagcaggcgauccggcgccucaagaccgaggcccagaugagcauccagcugaucaacaaggccgugaacgcccugaucaacgaccagcucaucaugaagaaccaccuccgggacaucaugggcaucccguacugcaacuacuccaaguacugcuaccugaaccacaccgugacggggaagaccagccugccccgcugcugccuggucuccaacggcagcuaccugaacgagacccacuucuccgacgacaucgagcagcaggccgacaacaugaucaccgagaugcuccagaaggaguacauggaccggcagggcaagacgccccuggggcugguggaccuguucguguucagcaccuccuucuaccucaucagcaucuuccugcaccuggucaagaucccgacccaccgccacgugaucggcaagcccugccccaagccccaccggcucaaccacauggggaucugcuccugcggccuguacaagcacccgggggugcccgucaaguggaagcgcugaggacuaguuauaagacugacuagcccgaugggccucccaacgggcccuccuccccuccuugcaccgagauuaaucaaaggcucuuuucagagccaccaaaaaaaaaaaaaaaaaaaaaaaaaaaaaaaaaaaaaaaaaaaaaaaaaaaaaaaaaaaaaaaaaaaaaaaaaaaaaaaaaaaaaaaaaaaaaaaaaaaaa

SEQ ID NO: 41399 - RNA, 1686 nt, Artificial Sequence
  mRNA product Design i-3 (hSL-A100) comprising derived and/or modified sequence from LASV(LASV237-NIG-2010;Clade II)__AIT17638__GPCmut12 (opt1)
aggagaaagcuuaccaugggccagaucaucaccuucuuccaggaggugccccacgucaucgaggaggugaugaacaucgugcugaucgcccucagccugcuggccauccucaaggggaucuacaacgucgcgaccugcggccuguucgggcugguguccuuccuccugcugugcggccgcagcugcuccacgaccuacaaggggguguacgagcuccagacccuggagcuggacauggccagccucaacaugugcaugccgcuguccugcaccaagaacaacagccaccacuacaucauggucggcaacgagacgggccuggagcucacccugaccaacaccuccaucaucaaccacaaguucugcaaccugagcgacgcccacaagaaggaccucuacgaccacgcccugauguccaucaucagcacguuccaccuguccauccccaacuucaaccaguacgaggccaugagcugcgacuucaacgggggcaagaucuccgugcaguacaaccucagccacaccuacgcgguggacgccgccaaccacugcgggaccaucgccaacggcguccugcagaccuucaugcggauggcguggggcggguccuacaucgcccuggacagcggcaagggguccugggacugcaucaugacgagcuaccaguaccucaucauccagaacaccaccugggaggaccacugccaguucucccgccccagccccaucggcuaccuggggcugcucagccagcggacccgcgacaucuacaucucccggcgccugcugggcacguucaccuggacccucagcgacuccgagggcaacgagacccccgggggcuacugccugacgcgguggaugcugaucgaggccgagcucaagugcuucgggaacaccgccguggccaagugcaacgagaagcacgacgaggaguucugcgacaugcugcgccuguucgacuucugcaagcaggcgauccggcgccucaagaccgaggcccagaugagcauccagcugaucaacaaggccgugaacgcccugaucaacgaccagcucaucaugaagaaccaccuccgggacaucaugggcaucccguacugcaacuacuccaaguacugcuaccugaaccacaccgucacggggaagaccagccugccccgcugcugccugguguccaacggcagcuaccugaacgagacccacuucuccgacgacaucgagcagcaggccgacaacaugaucaccgagcuccugcagaaggaguacauggaccggcagggcaagacgccccuggggcugguggaccucuucgucuucagcaccuccuucuaccugaucagcaucuuccugcaccucaucaagaucccgacccaccgccacaucaccggcaagcccugccccaagccccaccggcugaaccacauggggaucugcuccugcggccuguacaagcacccgggggugcccgugaaguggaagcgcugaggacuaguuauaagacugacuagcccgaugggccucccaacgggcccuccuccccuccuugcaccgagauuaaucaaaggcucuuuucagagccaccaaaaaaaaaaaaaaaaaaaaaaaaaaaaaaaaaaaaaaaaaaaaaaaaaaaaaaaaaaaaaaaaaaaaaaaaaaaaaaaaaaaaaaaaaaaaaaaaaaaaa

SEQ ID NO: 41400 - RNA, 1686 nt, Artificial Sequence
  mRNA product Design i-3 (hSL-A100) comprising derived and/or modified sequence from LASV(LASV253-NIG-2011;Clade II)__AIT17670__GPCmut12 (opt1)
aggagaaagcuuaccaugggccagaucaucaccuucuuccaggaggugccccacgucaucgaggaggugaugaacaucgugcugaucgcccucagccugcuggccauccucaaggggaucuacaacgucgcgaccugcggccuguucgggcugguguccuuccuccugcugugcggccgcagcugcuccacgaccuacaaggggguguacgagcuccagacccuggagcuggacauggccagccucaacaugugcaugccgcuguccugcaccaagaacaacagccaccacuacaucauggucggcaacgagacgggccuggagcucacccugaccaacaccuccaucaucaaccacaaguucugcaaccugagcgacgcccacaagaagaaccucuacgaccacgcccugauguccaucaucagcacguuccaccuguccauccccaacuucaaccaguacgaggccaugagcugcgacuucaacgggggcaagaucuccgugcaguacaaccucagccacaccuacgcgguggacgccgccaaccacugcgggaccaucgccaacggcguccugcagaccuucaugcggauggcguggggcggguccuacaucgcccuggacagcggcaagggguccugggacugcaucaugacgagcuaccaguaccucaucauccagaacaccaccugggaggaccacugccaguucucccgccccagccccaucggcuaccuggggcugcucagccagcggacccgcgacaucuacaucucccggcgccugcugggcacguucaccuggacccucagcgacuccgagggcaacgagacccccgggggcuacugccugacgcgguggaugcugaucgaggccgagcucaagugcuucgggaacaccgccguggccaagugcaacgagaagcacgacgaggaguucugcgacaugcugcgccuguucgacuucugcaagcaggcgauccggcgccucaaggccgaggcccagaugagcauccagcugaucaacaaggccgugaacgcccugaucaacgaccagcucaucaugaagaaccaccuccgggacaucaugggcauccccuacugcaacuacuccaaguacugcuaccugaaccacaccgucaccgggcgcacgagccugccccggugcugccugguguccaacggcagcuaccugaacgagacccacuucuccgacgacaucgagcagcaggcggacaacaugaucaccgagcuccugcagaaggaguacaucgaccgccagggcaagaccccgcuggggcugguggaccucuucgucuucagcacguccuucuaccugaucagcaucuuccugcaccucgugaagaucccgacccaccggcacaucaucggcaagcccugccccaagccccaccgccugaaccacauggggaucugcuccugcggccuguacaagcacccgggggugcccgucaaguggaagcggugaggacuaguuauaagacugacuagcccgaugggccucccaacgggcccuccuccccuccuugcaccgagauuaaucaaaggcucuuuucagagccaccaaaaaaaaaaaaaaaaaaaaaaaaaaaaaaaaaaaaaaaaaaaaaaaaaaaaaaaaaaaaaaaaaaaaaaaaaaaaaaaaaaaaaaaaaaaaaaaaaaaaa

SEQ ID NO: 41401 - RNA, 1686 nt, Artificial Sequence
  mRNA product Design i-3 (hSL-A100) comprising derived and/or modified sequence from LASV(LASV254-NIG-2011;Clade II)__AIT17674__GPCmut12 (opt1)
aggagaaagcuuaccaugggccagaucaucaccuucuuccaggaggugccccacgucaucgaggaggugaugaacaucgugcugaucgcccucagccugcuggccauccucaaggggaucuacaacgucgcgaccugcggccuguucgggcugguguccuuccuccugcugugcggccgcagcugcuccacgaccuacaaggggguguacgagcuccagacccuggagcuggacaugaccaaccucaacaugugcaugccgcugagcugcacgaagaacaacucccaccacuacaucauggucggcaacgagaccggccuggagcucacccugaccaacacgagcaucaucaaccacaaguucugcaaccuguccgacgcccacaagaagaaccucuacaaccacgcccugaugagcaucaucuccaccuuccaccugagcauccccaacuucaaccaguacgaggccauguccugcgacuucaacgggggcaagaucagcgugcaguacaaccucucccacagcuacgccguggacgcggccaaccacugcgggaccaucgccaacggcguccugcagaccuucaugcggauggccuggggcggguccuacaucgcgcuggacagcggcaaggggaacugggacugcaucaugacguccuaccaguaccucaucauccagaacaccaccugggaggaccacugccaguucagccgccccucccccaucggcuaccuggggcugcucagccagcggacccgcgacaucuacaucagccggcgccugcugggcacguucaccuggacccucuccgacagcgagggcaacgagacccccgggggcuacugccugacgcgguggaugcugaucgaggccgagcucaagugcuucgggaacaccgccguggccaagugcaacgagaagcacgacgaggaguucugcgacaugcugcgccuguucgacuucugcaagcaggccauccggcgccucaagaccgaggcgcaggccaacauccagcugaucaacaaggccgugaacgcccugaucaacgaccagcucaucaugaagaaccaccuccgggacaucaugggcaucccguacugcaacuacuccaaguacugcuaccugaaccacaccgucacggggaagaccagccugccccgcugcugccugguguccaacggcagcuaccugaacgagacccacuucuccgacgacaucgagcagcaggccgacaacaugaucaccgagcuccugcagaaggaguacauggaccggcagggcaagacgccccuggggcugguggaccucuucgucuucagcaccuccuucuaccugaucagcaucuuccugcaccucgugaagaucccgacccaccgccacgugaucggcaagcccugccccaagccccaccggcugaaccacauggggaucugcuccugcggccuguacaagcacccggggguccccgugaaguggaagcgcugaggacuaguuauaagacugacuagcccgaugggccucccaacgggcccuccuccccuccuugcaccgagauuaaucaaaggcucuuuucagagccaccaaaaaaaaaaaaaaaaaaaaaaaaaaaaaaaaaaaaaaaaaaaaaaaaaaaaaaaaaaaaaaaaaaaaaaaaaaaaaaaaaaaaaaaaaaaaaaaaaaaaa

SEQ ID NO: 41402 - RNA, 1686 nt, Artificial Sequence
  mRNA product Design i-3 (hSL-A100) comprising derived and/or modified sequence from LASV(Nig08-A19;Clade III)__ADU56618__GPCmut12 (opt1)
aggagaaagcuuaccaugggccagaucgugaccuucuuccaggaggucccccacgugaucgaggaggugaugaacaucguccugaucgcccucagcauccuggccauccugaaggggcucuacaacaucgcgaccugcggccugaucgggcuggugacguuccuccugcuguccggccgcagcugcuccaugaccuacaaggggguguacgagcuccagacccuggagcugaacaugaacacccucaacaugugcaugccgcugagcugcacgaagaacaacucccaccacuacaucauggucggcaacgagaccggccuggagcucacccugaccaacacgagccugcuccaccacaaguucugcaaccuguccgacgcccacaagaagaaccuguacgaccacacccucaugagcaucaucuccaccuuccaccugagcauccccaacuucaaccaguacgaggccauguccugcgacuucaacgggggcaagaucaccgugcaguacaaccugagccacuccuacgccaucgacgccgcgaaccacugcgggacgguggccaacggcguccuccagaccuucaugcggauggccuggggcgggagcuacaucgcccuggacuccggccgcgggaagugggacugcaucaugaccagcuaccaguaccugaucauccagaacaccacgugggaggaccacugccaguucucccggcccagccccaucggcuaccucgggcugcugucccagcgcacccgggacaucuacaucagccgccggcuccugggcaccuucaccuggacgcugagcgacuccgagggcaacgagacccccgggggcuacugccucacccgcuggaugcugaucgaggcggagcugaagugcuucgggaacaccgccguggccaagugcaacgagaagcacgacgaggaguucugcgacaugcuccggcuguucgacuucugcaagcaggccauccgccggcugaaggccgaggcgcagaugagcauccagcucaucaacaaggccgugaacgcccugaucaacgaccagcugaucaugaagaaccaccuccgcgacaucaugggcauccccuacugcaacuacuccaaguacugcuaccugaaccacacgagcaccgggcggaccucccugccccgcugcugccucgucagcaacggcuccuaccugaacgagacccacuucagcgacgacaucgagcagcaggccgacaacaugaucacggagaugcugcagaaggaguaccuggaccggcagggcaagaccccgcucgggcugguggaccuguucguguucuccaccagcuucuaccucaucuccaucuuccugcaccuggucaagaucccgacccaccgccacaucgugggcaagcccugccccaagccccaccggcucaaccacauggggaucugcagcugcggccuguacaagcagccgggggugcccguccgcuggaagcggugaggacuaguuauaagacugacuagcccgaugggccucccaacgggcccuccuccccuccuugcaccgagauuaaucaaaggcucuuuucagagccaccaaaaaaaaaaaaaaaaaaaaaaaaaaaaaaaaaaaaaaaaaaaaaaaaaaaaaaaaaaaaaaaaaaaaaaaaaaaaaaaaaaaaaaaaaaaaaaaaaaaaa

SEQ ID NO: 41403 - RNA, 1689 nt, Artificial Sequence
  mRNA product Design i-3 (hSL-A100) comprising derived and/or modified sequence from LASV(G1180-SLE-2010;Clade IV)__AIT17168__GPCmut12 (opt1)
aggagaaagcuuaccaugggccagaucgugaccuucuuccaggaggucccccacgugaucgaggaggugaugaacaucguccugaucgcccucagcauccuggccgugcugaaggggcucuacaacuucgcgaccugcggccugguggggcugcucacguuccugcugcucugcggccgcuccugcaccgccagccgguacaagggggucuacgagcugcagacccuggagcucaacauggagacccugaacaugugcaugccgcuguccugcacgaagaacaacagccaccacuacaucauggugggcaacgagaccggccucgagcugacccugaccaacacguccaucaucaaccacaaguucugcaaccucagcgacgcccacaagaagaaccuguacgaccacgcccugauguccaucaucagcaccuuccaccucuccauccccaacuucaaccaguacgaggccaugagcugcgacuucaacgggggcaagaucuccgugcaguacaaccugagccacuccuacgcgggggacgccgccaaccacugcggcaccgucgccaacggggugcugcagaccuucaugcgcauggcguggggcggcagcuacaucgcccucgacuccgggcacggcagcugggacugcaucaugacguccuaccaguaccugaucauccagaacaccaccugggaggaccacugccaguucagccggcccucccccaucggguaccugggccuccugagccagcgcacccgggacaucuacaucagccgccggcugcucggcacguucaccuggacccuguccgacagcgaggggaaggacaccccgggcggguacugccugacgcgcuggaugcucaucgaggccgagcugaagugcuucggcaacaccgccguggccaagugcaacgagaagcacgacgaggaguucugcgacaugcugcggcuguucgacuucugcaagcaggcgauccagcgccugaaggccgaggcccagauguccauccagcugaucaacaaggccgucaacgcccucaucaacgaccagcugaucaugaagaaccaccuccgggacaucauggggauccccuacugcaacuacagcaaguacugcuaccucaaccacaccaccacgggcaagaccucccugcccaagugcugccuggugagcaacggcuccuaccucaacgagacccacuucagcgacgacaucgagcagcaggcggacaacaugaucaccgagaugcugcagaaggaguacauggagcgccaggggaagacgccccugggccugguggaccucuucgucuucuccaccagcuucuaccugaucuccaucuuccugcaccucgugaagaucccgacccaccggcacaucgugggcaagagcugccccaagccccaccgccugaaccacauggggaucugcuccugcgggcuguacaagcagcccggcgucccggugaaguggaagcggugaggacuaguuauaagacugacuagcccgaugggccucccaacgggcccuccuccccuccuugcaccgagauuaaucaaaggcucuuuucagagccaccaaaaaaaaaaaaaaaaaaaaaaaaaaaaaaaaaaaaaaaaaaaaaaaaaaaaaaaaaaaaaaaaaaaaaaaaaaaaaaaaaaaaaaaaaaaaaaaaaaaaa

SEQ ID NO: 41404 - RNA, 1689 nt, Artificial Sequence
  mRNA product Design i-3 (hSL-A100) comprising derived and/or modified sequence from LASV(G1442-SLE-2011;Clade IV)__AIT17180__GPCmut12 (opt1)
aggagaaagcuuaccaugggccagaucgugaccuucuuccaggaggucccccacgugaucgaggaggugaugaacaucguccugaucgcccucagcauccuggccgugcugaaggggcucuacaacguggcgaccugcggccugaucgggcuggucaccuuccuccugcugugcggccgcuccugcaccaccacccucuacaaggggguguacgagcugcagacgcuggagcucaacauggagacccugaacaugugcaugccgcugagcugcaccaagaacaacucccaccacuacauccgggugggcaacgagaccggccucgagcugacgcugaccaacaccagcaucaucaaccacaaguucugcaaccucuccgacgcccacaagaagaaccuguacgaccacgcccugaugagcaucaucuccaccuuccaccucagcauccccaacuucaaccaguacgaggccauguccugcgacuucaacgggggcaagaucagcguccaguacaaccugucccacagcuacgccggggacgcggccaaccacugcggcacgguggccaacggggugcugcagaccuucaugcgcauggccuggggcggcuccuacaucgcgcucgacagcgggcggggcaacugggacugcaucaugaccuccuaccaguaccugaucauccagaacaccacgugggacgaccacugccaguucagccgccccucccccaucggguaccugggccuccugagccagcggacccgcgacgucuacaucucccggcgccugcucggcaccuucaccuggacgcugagcgacagcgaggggaaggacaccccgggcggguacugccugacccgguggaugcucaucgaggccgagcugaagugcuucggcaacaccgccguggccaagugcaacgagaagcacgacgaggaguucugcgacaugcugcgccucuucgacuucugcaagcaggccauccagcggcugaaggcggaggcccagauguccauccagcugaucaacaaggccgugaacgcccucaucaacgaccagcugaucaugaagaaccaccuccgcgacaucauggggauccccuacugcaacuacagcaaguacugcuaccugaacaacacggccaccggcaagaccucccugcccaagugcugccugaucagcaacggcuccuaccucaacgagacccacuucagcgacgacaucgagcaggaggcggacaacaugaucacggagaugcugcagaaggaguacauggagcggcaggggaagacgccccugggccuggucgaccucuucguguucuccaccagcuucuaccugaucuccaucuuccugcaccucgugaagaucccgacccaccgccacaucgucggcaagagcugccccaagccccaccggcugaaccacauggggaucugcuccugcgggcuguacaagcagcccggcgugccggugcgcuggaagcggugaggacuaguuauaagacugacuagcccgaugggccucccaacgggcccuccuccccuccuugcaccgagauuaaucaaaggcucuuuucagagccaccaaaaaaaaaaaaaaaaaaaaaaaaaaaaaaaaaaaaaaaaaaaaaaaaaaaaaaaaaaaaaaaaaaaaaaaaaaaaaaaaaaaaaaaaaaaaaaaaaaaaa

SEQ ID NO: 41405 - RNA, 1689 nt, Artificial Sequence
  mRNA product Design i-3 (hSL-A100) comprising derived and/or modified sequence from LASV(G3010-SLE-2013;Clade IV)__AIT17344__GPCmut12 (opt1)
aggagaaagcuuaccaugggccagaucgugaccuucuuccaggaggucccccacgugaucgaggaggugaugaacaucguccugaucgcccucagcauccuggccgugcugaaggggcucuacaacuucgcgaccugcggccugguggggcuggucacguuccuccugcugugcggccgcuccugcaccaccagccucuacaaggggguguacgagcugcagacccuggagcucaacauggagacgcugaacaugugcaugccgcuguccugcaccaagaacaacagccaccacuacaucauggugggcaacgagaccggccucgagcugacccugacgaacaccuccaucaucaaccacaaguucugcaaccucagcgacgcccacaagaagaaccuguacaaccacgcccugauguccaucaucagcaccuuccaccucuccauccccaacuucaaccaguacgaggccaugagcugcgacuucaacgggggcaagaucuccguccaguacaaccugagccacuccuacgccggggacgcggccagccacugcggcaccguggccaacggggugcugcagacguucaugcggauggccuggggcggcuccuacaucgcgcucgacagcggguacggcaagugggacugcaucaugaccuccuaccaguaccugaucauccagaacaccaccugggaggaccacugccaguucagccgccccucccccaucggguaccugggccuccugagccagcggacgcgcgacaucuacaucagccggcgccugcucggcaccuucaccuggacccuguccgacagcgaggggaaggacacgccgggcggguacugccugacccgguggaugcucaucgaggccgagcugaagugcuucggcaacaccgccgucgccaagugcaacgagaagcacgacgaggaguucugcgacaugcugcgccucuucgacuucugcaagcaggccauccagcggcugaagaccgaggcgcagauguccauccagcugaucaacaaggccgugaacgcccucaucaacgaccagcugaucaugaagaaccaccuccgcgacaucauggggauccccuacugcaacuacagcaaguacugcuaccugaaccacacgaccaccggcaagaccucccugcccaagugcugccuggugagcaacggcuccuaccucaacgagacgcacuucagcgacgacaucgagcagcaggccgacaacaugaucaccgagaugcugcagaaggaguacauggagcggcaggggaagacgccccugggccuggucgaccucuucguguucuccaccagcuucuaccugaucuccaucuuccugcaccucgugaagaucccgacccaccgccacaucgucggcaagagcugccccaagccccaccggcugaaccacauggggaucugcuccugcgggcuguacaagcagcccggcgugccggugcgcuggaagcggugaggacuaguuauaagacugacuagcccgaugggccucccaacgggcccuccuccccuccuugcaccgagauuaaucaaaggcucuuuucagagccaccaaaaaaaaaaaaaaaaaaaaaaaaaaaaaaaaaaaaaaaaaaaaaaaaaaaaaaaaaaaaaaaaaaaaaaaaaaaaaaaaaaaaaaaaaaaaaaaaaaaaa

SEQ ID NO: 41406 - RNA, 1689 nt, Artificial Sequence
  mRNA product Design i-3 (hSL-A100) comprising derived and/or modified sequence from LASV(G502-SLE-2009;Clade IV)__AIT17126__GPCmut12 (opt1)
aggagaaagcuuaccaugggccagaucgugaccuucuuccaggaggucccccacgugaucgaggaggugaugaacaucguccugaucgcccucagcauccuggccgugcugaaggggcucuacaacuucgcgaccugcggccugguggggcugcucacguuccugcugcucugcggccgcuccugcaccaccgggcuguacaagggcgucuacgagcugcagacccucgagcugaacauggagacgcugaacaugugcaugccgcucagcugcaccaagaacaacucccaccacuacaucauggugggcaacgagaccgggcuggagcugacccucacgaacaccagcaucaucaaccacaaguucugcaaccuguccgacgcccacaagaagaaccuguacgaccacgcccucaugagcaucaucuccaccuuccaccugagcauccccaacuucaaccaguacgaggccauguccugcgacuucaacggcgggaagaucagcgugcaguacaaccugucccacagcuacgccggcgacgcggccgaccacugcgggaccgucgccaacggcgugcuccagacguucaugcggauggccuggggcggguccuacaucgcgcuggacagcggccgcgggcggugggacugcaucaugaccuccuaccaguaccugaucauccagaacaccaccugggaggaccacugccaguucagccgccccucccccaucggcuaccucggccugcugagccagcggacgcgcgacaucuacaucucccggcgccuccuggggaccuucaccuggacccugagcgacagcgagggcaaggacacgcccgggggcuacugccucacccgguggaugcugaucgaggccgagcugaagugcuucgggaacaccgccguggccaagugcaacgagaagcacgacgaggaguucugcgacaugcuccgccuguucgacuucugcaagcaggccauccagcggcugaaggcggaggcccagauguccauccagcucaucaacaaggccgucaacgcccugaucaacgaccagcuggugaugaagaaccaccuccgcgacaucaugggcauccccuacugcaacuacagccgguacugcuaccugaaccacaccacgaccggccgcaccucccugcccaagugcugccucgugagcaacggguccuaccugaacgagacccacuucagcgacgacaucgagcagcaggccgacaacaugaucacggagaugcugcagaaggaguacauggagcggcagggcaagaccccgcuggggcucgucgaccuguucguguucuccaccagcuucuaccugaucuccaucuuccuccaccuggugaagaucccgacccaccgccacaucgucggcaagagcugccccaagccccaccggcugaaccacauggggaucugcuccugcggccucuacaagcagcccggcgugccggugaaguggaagcgcugaggacuaguuauaagacugacuagcccgaugggccucccaacgggcccuccuccccuccuugcaccgagauuaaucaaaggcucuuuucagagccaccaaaaaaaaaaaaaaaaaaaaaaaaaaaaaaaaaaaaaaaaaaaaaaaaaaaaaaaaaaaaaaaaaaaaaaaaaaaaaaaaaaaaaaaaaaaaaaaaaaaaa

SEQ ID NO: 41407 - RNA, 1689 nt, Artificial Sequence
  mRNA product Design i-3 (hSL-A100) comprising derived and/or modified sequence from LASV(G733-SLE-2010;Clade IV)__AIT17154__GPCmut12 (opt1)
aggagaaagcuuaccaugggccagaucgugaccuucuuccaggaggucccccacgugaucgaggaggugaugaacaucguccugaucgcccucagcauccuggccgugcugaaggggcucuacaacuucgcgaccugcggcaucguggggcuggucuccuuccugcuccugugcggccgcagcugcacgaccucccuguacaaggggguguacgagcuccagacccuggagcugaacauggagacccucaacaugugcaugccgcugagcugcacgaagaacaacucccaccacuacaucauggugggcaacgagaccggccuggagcucacccugaccaacacgagcaucaucaaccacaaguucugcaaccuguccgacgcccacaagaagaaccucuacgaccacgcccugaugagcaucaucuccaccuuccaccugagcauccccaacuucaaccaguacgaggccauguccugcgacuucaacgggggcaagaucagcguccaguacaaccucucccacagcuacgccggggacgcggccaaccacugcggcaccaucgccaacggggugcugcagaccuucaugcggauggccuggggcggcuccuacaucgcgcuggacagcgggcgcgaccggugggacugcaucaugacguccuaccaguaccucaucauccagaacaccaccugggaggaccacugccaguucagccgccccucccccaucggcuaccuggggcugcucagccagcggacccgcgacaucuacaucagccggcgccugcugggcacguucaccuggacccucuccgacagcgagggcaaggacacccccgggggcuacugccugacgcgguggaugcugaucgaggccgagcucaagugcuucgggaacaccgccguggccaagugcaacgagaagcacgacgaggaguucugcgacaugcugcgccuguucgacuucugcaagcaggccauccagcggcucaaggcggaggcccagauguccauccagcugaucaacaaggccgucaacgcccugaucaacgaccagcucaucaugaagaaccaccuccgcgacaucaugggcaucccguacugcaacuacagcaaguacugcuaccugaaccacaccaccacggggaagaccucccugcccaagugcugccuggugagcaacggcuccuaccugaacgagacccacuucagcgacgacaucgagcagcaggccgacaacaugaucaccgagaugcuccagaaggaguacauggagcggcagggcaagacgccccuggggcugguggaccuguucgucuucuccaccagcuucuaccucaucuccaucuuccugcaccuggugaagaucccgacccaccgccacguggucggcaagagcugccccaagccccaccggcucaaccacauggggaucugcuccugcggccuguacgggcagcccggcgugccggugaaguggaagcgcugaggacuaguuauaagacugacuagcccgaugggccucccaacgggcccuccuccccuccuugcaccgagauuaaucaaaggcucuuuucagagccaccaaaaaaaaaaaaaaaaaaaaaaaaaaaaaaaaaaaaaaaaaaaaaaaaaaaaaaaaaaaaaaaaaaaaaaaaaaaaaaaaaaaaaaaaaaaaaaaaaaaaa

SEQ ID NO: 41408 - RNA, 1689 nt, Artificial Sequence
  mRNA product Design i-3 (hSL-A100) comprising derived and/or modified sequence from MOPV/LASV reassortant(IGS-1;Clade IV)__AFY05576__GPCmut12 (opt1)
aggagaaagcuuaccaugggccagaucgugaccuucuuccaggaggucccccacgugaucgaggaggugaugaacaucguccugaucgcccucagcgugcuggccgugcugaaggggcucuacaacuucgcgaccugcggccuggucgggcuggugaccuuccuccugcugugcggccgcuccugcaccaccagccucuacaaggggguguacgagcugcagacccuggagcucaacauggagacgcugaacaugugcaugccgcuguccugcaccaagaacaacagccaccacuacaucauggucggcaacgagaccggccucgagcugacccugacgaacaccuccaucaucaaccacaaguucugcaaccucagcgacgcccacaagaagaaccuguacgaccacgcccugauguccaucaucagcaccuuccaccucuccauccccaacuucaaccaguacgaggccaugagcugcgacuucaacgggggcaagaucuccgugcaguacaaccugagccacuccuacgccggggacgcggccaaccacugcggcaccguggccaacgggguccugcagacguucaugcggauggccuggggcggcagcuacaucgcgcucgacuccgggcgcggcaacugggacugcaucaugaccagcuaccaguaccugaucauccagaacaccaccugggaggaccacugccaguucucccggcccagccccaucggguaccugggccuccugucccagcgcacgcgggacaucuacaucagccgccggcugcucggcaccuucaccuggacccugagcgacuccgagggggaggacacgccgggcggguacugccugacccgcuggaugcucaucgaggccgagcugaagugcuucggcaacaccgccguggccaagugcaacgagaagcacgacgaggaguucugcgacaugcugcggcuguucgacuucugcaagcaggccauccagcgccugaaggcggaggcccagaugagcauccagcugaucaacaaggccgugaacgcccucaucaacgaccagcugaucaugaagaaccaccuccgggacaucauggggauccccuacugcaacuacuccaaguacugcuaccucaaccacaccacgaccggccgcaccagccugcccaagugcugccuggucuccaacggcagcuaccucaacgagacccacuucuccgacgacaucgagcagcaggccgacaacaugaucacggagaugcugcagaaggaguacauggagcggcaggggaagacgccccugggccugguggaccucuucguguucagcaccuccuucuaccugaucagcaucuuccugcaccucgucaagaucccgacccaccgccacaucguggggaaguccugccccaagccccaccggcugaaccacaugggcaucugcagcugcgggcuguacaagcagcccggcgugccggucaaguggaagcgcugaggacuaguuauaagacugacuagcccgaugggccucccaacgggcccuccuccccuccuugcaccgagauuaaucaaaggcucuuuucagagccaccaaaaaaaaaaaaaaaaaaaaaaaaaaaaaaaaaaaaaaaaaaaaaaaaaaaaaaaaaaaaaaaaaaaaaaaaaaaaaaaaaaaaaaaaaaaaaaaaaaaaa

SEQ ID NO: 41409 - RNA, 1689 nt, Artificial Sequence
  mRNA product Design i-3 (hSL-A100) comprising derived and/or modified sequence from LASV(LM765-SLE-2012;Clade IV)__AIT17814__GPCmut12 (opt1)
aggagaaagcuuaccaugggccagaucgugaccuucuuccaggaggucccccacgugaucgaggaggugaugaacaucguccugaucgcccucagcauccuggccgugcugaaggggcucuacaacuucgcgaccugcggccugguggggcuggucacguuccuccugcugugcggccgcuccugcaccaccagccucuacaaggggguguacgagcugcagacccuggagcucaacauggagacgcugaacaugugcaugccgcuguccugcaccaagaacaacagccaccacuacaucauggugggcaacgagaccggccucgagcugacccugacgaacaccuccaucaucgaccacaaguucugcaaccucagcgacgcccaccggaagaaccuguacgaccacgcccugauguccaucaucagcaccuuccaccucuccauccccaacuucaaccaguacgaggccaugagcugcgacuucaacgggggcaagaucuccguccaguacaaccugagccacuccuacgccaaggacgcggccgaccacugcgggaccguggccaacggcgugcugcagacguucaugcgcauggccuggggcgggagcuacaucgcgcucgacuccggccgggggcgcugggacugcaucaugaccagcuaccaguaccugaucauccagaacaccaccugggaggaccacugccaguucucccggcccagccccaucggcuaccuggggcuccugucccagcgcacgcgggacaucuacaucagccgccggcugcucggcaccuucaccuggacccugagcgacuccgagggcaaggacacgcccgggggcuacugccugacccgcuggaugcucaucgaggccgagcugaagugcuucgggaacaccgccgucgccaagugcaacgagaagcacgacgaggaguucugcgacaugcugcggcuguucgacuucugcaagcaggccauccagcgccugaaggcggaggcccagaugagcauccagcugaucaacaaggccgugaacgcccucaucaacgaccagcugaucaugaagaaccaccuccgggacaucaugggcauccccuacugcaacuacuccaaguacugcuaccucaaccacaccacgaccgggaagaccagccugcccaagugcugccugguguccaacggcagcuaccucaacgagacccacuucuccgacgacaucgagcagcaggccgacaacaugaucacggagaugcugcagaaggaguacauggagcgccagggcaagaccccgcuggggcuggucgaccucuucguguucagcaccuccuucuaccugaucagcaucuuccugcaccucgugaagaucccgacccaccggcacaucgucggcaagcccugccccaagccccaccgccugaaccacauggggaucugcuccugcggccuguacaagcagccgggggugcccgugaaguggaagcggugaggacuaguuauaagacugacuagcccgaugggccucccaacgggcccuccuccccuccuugcaccgagauuaaucaaaggcucuuuucagagccaccaaaaaaaaaaaaaaaaaaaaaaaaaaaaaaaaaaaaaaaaaaaaaaaaaaaaaaaaaaaaaaaaaaaaaaaaaaaaaaaaaaaaaaaaaaaaaaaaaaaaa

SEQ ID NO: 41410 - RNA, 1689 nt, Artificial Sequence
  mRNA product Design i-3 (hSL-A100) comprising derived and/or modified sequence from LASV(LM776-SLE-2012;Clade IV)__AIT17824__GPCmut12 (opt1)
aggagaaagcuuaccaugggccagaucgugaccuucuuccaggaggucccccacgugaucgaggaggugaugaacaucguccugaucgcccucagcauccuggccgugcugaaggggcucuacaacuucgcgaccugcggccugguggggcuggucaccuuccuccugcugugcggccgcuccugcaccaccagcguguacaaggggguguacgagcuccagacccuggagcugaacauggagacgcucaacaugugcaugccgcuguccugcaccaagaacaacagccaccacuacaucauggucggcaacgagaccggccuggagcucacccugacgaacaccuccaucaucaaccacaaguucugcaaccugagcgacgcccacaagaagaaccucuacgaccacgcccugauguccaucaucagcaccuuccaccuguccauccccaacuucaaccaguacgaggccaugagcugcgacuucaacgggggcaagaucuccgugcaguacaaccucagccacuccuacgccggggacgcggccaaccacugcggcaccguggccaacgggguccugcagacguucaugcggauggccuggggcggcagcuacaucgcgcuggacuccgggcacggcaagugggacugcaucaugaccagcuaccaguaccucaucauccagaacaccaccugggaggaccacugccaguucucccgccccagccccaucggguaccugggccugcucucccagcggacgcgcgacaucuacaucagccggcgccugcugggcaccuucaccuggacccucagcgacuccgaggggaaggacacgccgggcggguacugccugacccgguggaugcugaucgaggccgagcucaagugcuucggcaacaccgccguggccaagugcaacgagaagcacgacgaggaguucugcgacaugcugcgccuguucgacuucugcaagcaggccauccagcggcucaaggcggaggcccagaugagcauccagcugaucaacaaggccgugaacgcccugaucaacgaccagcucaucaugaagaaccaccuccgcgacaucauggggauccccuacugcaacuacuccaaguacugcuaccugaaccacaccacgaccggcaagaccagccugcccaagugcugccuggucuccaacggcagcuaccugaacgagacccacuucuccgacgacaucgagcagcaggccgacaacaugaucacggagaugcuccagaaggaguacauggagcggcaggggaagacgccccugggccugguggaccuguucguguucagcaccuccuucuaccucaucagcaucuuccugcaccuggucaagaucccgacccaccgccacaucguggggaaguccugccccaagccccaccggcucaaccacaugggcaucugcagcugcgggcuguacaagcagcccggcgugccgguccgcuggaagcggugaggacuaguuauaagacugacuagcccgaugggccucccaacgggcccuccuccccuccuugcaccgagauuaaucaaaggcucuuuucagagccaccaaaaaaaaaaaaaaaaaaaaaaaaaaaaaaaaaaaaaaaaaaaaaaaaaaaaaaaaaaaaaaaaaaaaaaaaaaaaaaaaaaaaaaaaaaaaaaaaaaaaa

SEQ ID NO: 41411 - RNA, 1689 nt, Artificial Sequence
  mRNA product Design i-3 (hSL-A100) comprising derived and/or modified sequence from LASV(Mad39;Clade IV)__ANH09722__GPCmut12 (opt1)
aggagaaagcuuaccaugggccagaucgugaccuucuuccaggaggucccccacgugaucgaggaggugaugaacaucguccugaucgcccucagcauccuggccgugcugaaggggcucuacaacguggcgaccugcggccugaucgggcuggucacguuccuccugcugugcggccgcuccugcaccaccacccucuacaaggggguguacgagcugcaggcccuggagcucaacauggagacgcugaacaugugcaugccgcugagcugcaccaagaacaacucccaccacuacauccgggugggcaacgagaccggccucgagcugacccugacgaacaccagccucaucaaccacaaguucugcaaccuguccgacgcccacaagaagaaccuguacgaccacgcccucaugagcaucaucuccaccuuccaccugagcauccccaacuucaaccaguacgaggccauguccugcgacuucaacgacgggaagaucagcguccaguacaaccugucccacaccuacgcgggcgacacggccaaccacugcgggaccguggccaacggcgugcuccagaccuucaugcgcauggccuggggcgggagcuacaucgcgcuggacuccggccgcgggggcugggacugcaucaugaccagcuaccaguaccugaucauccagaacacgaccugggaggaccacugccaguucucccggcccagccccaucggguaccucggccugcugucccagcggacccgcgacaucuacaucagccggcgccuccugggcaccuucacguggacccuguccgacagcgaggggaaggacaccccgggcggguacugccucacccgguggaugcugaucgaggccgagcugaagugcuucggcaacacggccgucgccaagugcaacgagaagcacgacgaggaguucugcgacaugcuccgccuguucgacuucugcaagcaggccauccagcggcugaaggcggaggcccagaugagcauccagcucaucaacaaggccgugaacgcccugaucaacgaccagcugaucaugaagaaccaccuccgcgacaucauggggauccccuacugcaacuacuccaaguacugcuaccugaaccacaccgugaccggcaagaccagccugcccaagugcugccucgucuccaacggcagcuaccugaacgagacgcacuucuccgacgacaucgagcagcaggccgacaacaugaucaccgagaugcugcagaaggaguacauggagcggcaggggaagacgccccugggccucguggaccuguucguguucagcaccuccuucuaccugaucagcaucuuccuccaccuggucaagaucccgacccaccgccacgugguggggaagcccugccccaagccccaccggcugaaccacaugggcaucugcuccugcggguucuacaagcagccgggcguccccgugcgcuggaagcggugaggacuaguuauaagacugacuagcccgaugggccucccaacgggcccuccuccccuccuugcaccgagauuaaucaaaggcucuuuucagagccaccaaaaaaaaaaaaaaaaaaaaaaaaaaaaaaaaaaaaaaaaaaaaaaaaaaaaaaaaaaaaaaaaaaaaaaaaaaaaaaaaaaaaaaaaaaaaaaaaaaaaa

SEQ ID NO: 41412 - RNA, 1689 nt, Artificial Sequence
  mRNA product Design i-3 (hSL-A100) comprising derived and/or modified sequence from LASV(Z0947-SLE-2011;Clade IV)__AIT17840__GPCmut12 (opt1)
aggagaaagcuuaccaugggccagaucgugaccuucuuccaggaggucccccacgugaucgaggaggugaugaacaucguccugaucgcccucagcauccuggccgugcugaaggggcucuacaacuucgcgaccugcggccugguggggcuggucacguuccuccugcugugcggccgcuccugcaccaucagccucuacaaggggguguacgagcugcagacccuggagcucaacauggagacccugaacaugugcaugccgcuguccugcacgaagaacaacagccaccacuacaucauggugggcaacgagaccggccucgagcugacccugaccaacacguccaucaucaaccacaaguucugcaaccucagcgacgcccacaagaagaaccuguacgaccacgcccugauguccaucaucagcaccuuccaccucuccauccccaacuucaaccaguacgaggccaugagcugcgacuucaacgggggcaagaucuccguccaguacaaccugagccacuccuacgccggggacgcggccaaccacugcggcaccguggccaacggggugcugcagaccuucaugcggauggccuggggcggcagcuacaucgcgcucgacuccgggcgcgaccggugggacugcaucaugacgagcuaccaguaccugaucauccagaacaccaccugggaggaccacugccaguucucccgccccagccccaucggcuaccuggggcuccugucccagcggacccgcgacaucuacaucagccggcgccugcucggcacguucaccuggacccugagcgacuccgagggcaaggacacccccgggggcuacugccugacgcgguggaugcucaucgaggccgagcugaagugcuucgggaacaccgccgucgccaagugcaacgagaagcacgacgaggaguucugcgacaugcugcgccucuucgacuucugcaagcaggccauccagcggcugaaggcggaggcccagaugagcauccagcugaucaacaaggccgugaacgcccucaucaacgaccagcugaucaugaagaaccaccuccgcgacaucaugggcaucccguacugcaacuacuccaaguacugcuaccugaaccacaccaccacggggaagaccagccugcccaagugcugccugguguccaacggcagcuaccucaacgagacccacuucuccgacgacaucgagcagcaggccgacaacaugaucaccgagaugcugcagaaggaguacauggagcggcagggcaagacgccccuggggcuggucgaccucuucguguucagcaccuccuucuaccugaucagcaucuuccugcaccucgugaagaucccgacccaccgccacaucgucggcaagcccugccccaagccccaccggcugaaccacauggggaucugcuccugcggccuguacaagcagccgggggugcccgugaaguggaagcgcugaggacuaguuauaagacugacuagcccgaugggccucccaacgggcccuccuccccuccuugcaccgagauuaaucaaaggcucuuuucagagccaccaaaaaaaaaaaaaaaaaaaaaaaaaaaaaaaaaaaaaaaaaaaaaaaaaaaaaaaaaaaaaaaaaaaaaaaaaaaaaaaaaaaaaaaaaaaaaaaaaaaaa

SEQ ID NO: 41413 - RNA, 1689 nt, Artificial Sequence
  mRNA product Design i-3 (hSL-A100) comprising derived and/or modified sequence from LASV(Josiah;Clade IV)__NP_694870__GPCmut12 (opt4)
aggagaaagcuuaccaugggccagaucgugaccuucuuccaggaggugccccacgugaucgaggaggugaugaacaucgugcugaucgcccugagcgugcuggccgugcugaagggccuguacaacuucgccaccugcggccuggugggccuggugaccuuccugcugcugugcggcagaagcugcaccaccagccuguacaagggcguguacgagcugcagacccuggagcugaacauggagacccugaacaugugcaugccccugagcugcaccaagaacaacagccaccacuacaucauggugggcaacgagaccggccuggagcugacccugaccaacaccagcaucaucaaccacaaguucugcaaccugagcgacgcccacaagaagaaccuguacgaccacgcccugaugagcaucaucagcaccuuccaccugagcauccccaacuucaaccaguacgaggccaugagcugcgacuucaacggcggcaagaucagcgugcaguacaaccugagccacagcuacgccggcgacgccgccaaccacugcggcaccguggccaacggcgugcugcagaccuucaugagaauggccuggggcggcagcuacaucgcccuggacagcggcagaggcaacugggacugcaucaugaccagcuaccaguaccugaucauccagaacaccaccugggaggaccacugccaguucagcagacccagccccaucggcuaccugggccugcugagccagagaaccagagacaucuacaucagcagaagacugcugggcaccuucaccuggacccugagcgacagcgagggcaaggacacccccggcggcuacugccugaccagauggaugcugaucgaggccgagcugaagugcuucggcaacaccgccguggccaagugcaacgagaagcacgacgaggaguucugcgacaugcugagacuguucgacuucugcaagcaggccauccagagacugaaggccgaggcccagaugagcauccagcugaucaacaaggccgugaacgcccugaucaacgaccagcugaucaugaagaaccaccugagagacaucaugggcauccccuacugcaacuacagcaaguacugcuaccugaaccacaccaccaccggcagaaccagccugcccaagugcugccuggugagcaacggcagcuaccugaacgagacccacuucagcgacgacaucgagcagcaggccgacaacaugaucaccgagaugcugcagaaggaguacauggagagacagggcaagaccccccugggccugguggaccuguucguguucagcaccagcuucuaccugaucagcaucuuccugcaccuggugaagauccccacccacagacacaucgugggcaagagcugccccaagccccacagacugaaccacaugggcaucugcagcugcggccuguacaagcagcccggcgugcccgugaaguggaagagaugaggacuaguuauaagacugacuagcccgaugggccucccaacgggcccuccuccccuccuugcaccgagauuaaucaaaggcucuuuucagagccaccaaaaaaaaaaaaaaaaaaaaaaaaaaaaaaaaaaaaaaaaaaaaaaaaaaaaaaaaaaaaaaaaaaaaaaaaaaaaaaaaaaaaaaaaaaaaaaaaaaaaa

SEQ ID NO: 41414 - RNA, 1686 nt, Artificial Sequence
  mRNA product Design i-3 (hSL-A100) comprising derived and/or modified sequence from LASV(LP;Clade I)__AAF86701__GPCmut12 (opt4)
aggagaaagcuuaccaugggccagaucaucaccuucuuccaggaggugccccacgugaucgaggaggugaugaacaucgugcugaucgcccugagccugcuggccauccugaagggccuguacaacaucgccaccugcggcaucaucggccugguggccuuccuguuccugugcggcaagagcugcagccugacccugaagggcggcuacgagcugcagacccuggagcugaacauggagacccugaacaugugcaugccccugagcugcaccaagaacagcagccaccacuacaucagagugggcaacgagaccggccuggagcugacccugaccaacaccagcaucaucaaccacaaguucugcaaccugagcgacgcccacaagaagaaccuguacgaccacgcccugaugagcaucaucagcaccuuccaccugagcauccccaacuucaaccaguacgaggccaugagcugcgacuucaacggcggcaagaucagcgugcaguacaaccugagccacagcuacgccggcgacgccgccgagcacugcggcaccguggccaacggcgugcugcagaccuucaugagaauggccuggggcggcagauacaucgcccuggacagcggcaagggcaacugggacugcaucaugaccagcuaccaguaccugaucauccagaacaccaccugggaggaccacugccaguucagcagacccagccccaucggcuaccugggccugcugagccagagaaccagagacaucuacaucagcagaagacugcugggcaccuucaccuggacccugagcgacagcgagggcaacgagacccccggcggcuacugccugaccagauggaugcugaucgaggccgagcugaagugcuucggcaacaccgccguggccaagugcaacgagaagcacgacgaggaguucugcgacaugcugagacuguucgacuucugcaagcaggccaucagaagacugaaggccgaggcccagaugagcauccagcugaucaacaaggccgugaacgcccugaucaacgaccagcugaucaugaagaaccaccugagagacaucaugggcauccccuacugcaacuacagcaaguacugcuaccugaaccacaccagcagcggcagaaccagccugcccaagugcugccugaucagcaacggcagcuaccugaacgagacccaguucagcgacgacaucgagcagcaggccgacaacaugaucaccgagaugcugcagaaggaguacaucgagagacagggcaagaccccccugggccugguggacaucuucaucuucagcaccagcuucuaccugaucagcaucuuccugcaccugaucaagauccccacccacagacacaucgugggcaagcccugccccaagccccacagacugaaccacaugggcgugugcagcugcggccuguacaagcaccccggcgugcccaccaaguggaagagaugaggacuaguuauaagacugacuagcccgaugggccucccaacgggcccuccuccccuccuugcaccgagauuaaucaaaggcucuuuucagagccaccaaaaaaaaaaaaaaaaaaaaaaaaaaaaaaaaaaaaaaaaaaaaaaaaaaaaaaaaaaaaaaaaaaaaaaaaaaaaaaaaaaaaaaaaaaaaaaaaaaaaa

SEQ ID NO: 41415 - RNA, 1686 nt, Artificial Sequence
  mRNA product Design i-3 (hSL-A100) comprising derived and/or modified sequence from LASV(803213;Clade II)__AAF86703__GPCmut12 (opt4)
aggagaaagcuuaccaugggccagaucaucaccuucuuccaggaggugccccacgugaucgaggaggugaugaacaucgugcugaucgcccugagccugcuggccauccugaagggcaucuacaacguggccaccugcggccuguucggccugaucagcuuccugcugcugugcggcagaagcugcagcgugaccuacaagggcguguacgagcugcagacccuggagcugaacauggccaaccugaacaugugcaugccccugagcugcaccaagaacaacagccaccacuacaucauggugggcaacgagaccggccuggagcugacccugaccaacaccagcaucaucaaccacaaguucugcaaccugagcgacgcccacaagaagaaccuguacgaccacgcccugaugagcaucaucagcaccuuccaccugagcauccccaacuucaaccaguacgaggccaugagcugcgacuucaacggcggcaagaucagcgugcaguacaaccugagccacagcuucgccguggacgccgccaaccacugcggcaccaucgccaacggcgugcugcagaccuucaugagaauggccuggggcggcagcuacaucgcccuggacagcggcaagggcaacugggacugcaucaugaccagcuaccaguaccugaucauccagaacaccaccugggaggaccacugccaguucagcagacccagccccaucggcuaccugggccugcugagccagagaaccagagacaucuacaucagcagaagacugcugggcaccuucaccuggacccugagcgacagcgagggcaacgaggcccccggcggcuacugccugaccagauggaugcugaucgaggccgagcugaagugcuucggcaacaccgccguggccaagugcaacgagaagcacgacgaggaguucugcgacaugcugagacuguucgacuucugcaagcaggccaucaagagacugaagaccgaggcccagaugagcauccagcugaucaacaaggccgugaacgcccugaucaacgaccagcugaucaugaagaaccaccugagagacaucaugggcauccccuacugcaacuacagcagauacugcuaccugaaccacaccgugaccggcaagaccagccugcccagaugcugccuggugagcaacggcagcuaccugaacgagacccacuucagcgacgacaucgagcagcaggccgacaacaugaucaccgagaugcugcagaaggaguacauggacagacagggcaagaccccccugggccugguggaccuguucguguucagcaccagcuucuaccugaucagcaucuuccugcaccuggugaagauccccacccacagacacaucgugggcaagcccugccccaagccccacagacugaaccacaugggcaucugcagcugcggccuguacaagcaccccggcgugcccgugaaguggaagagaugaggacuaguuauaagacugacuagcccgaugggccucccaacgggcccuccuccccuccuugcaccgagauuaaucaaaggcucuuuucagagccaccaaaaaaaaaaaaaaaaaaaaaaaaaaaaaaaaaaaaaaaaaaaaaaaaaaaaaaaaaaaaaaaaaaaaaaaaaaaaaaaaaaaaaaaaaaaaaaaaaaaaa

SEQ ID NO: 41416 - RNA, 1686 nt, Artificial Sequence
  mRNA product Design i-3 (hSL-A100) comprising derived and/or modified sequence from LASV(GA391;Clade III)__CAA36645__GPCmut12 (opt4)
aggagaaagcuuaccaugggccagaucgugaccuucuuccaggaggugccccacgugaucgaggaggugaugaacaucgugcugaucgcccugagcauccuggccauccugaagggccuguacaacguggccaccugcggccugaucggccuggugaccuuccugcugcugagcggcagaagcugcagccugaucuacaagggcaccuacgagcugcagacccuggagcugaacauggagacccugaacaugugcaugccccugagcugcaccaagaacaacagccaccacuacaucagagugggcaacgagaccggccuggagcugacccugaccaacaccagcauccugaaccacaaguucugcaaccugagcgacgcccacaagagaaaccuguacgaccacagccugaugagcaucaucagcaccuuccaccugagcauccccaacuucaaccaguacgaggccaugagcugcgacuucaacggcggcaagaucaccgugcaguacaaccugagccacagcuucgccguggacgccgccggccacugcggcacccuggccaacggcgugcugcagaccuucaugagaauggccuggggcggcagcuacaucgcccuggacagcggcagaggcaacugggacugcaucaugaccagcuaccaguaccugaucauccagaacaccaccugggacgaccacugccaguucagcagacccagccccaucggcuaccugggccugcugagccagagaaccagagacaucuacaucagcagaagacugcugggcaccuucaccuggacccugagcgacagcgagggcaacgagacccccggcggcuacugccugaccagauggaugcugaucgaggccgagcugaagugcuucggcaacaccgccguggccaagugcaacgagaagcacgacgaggaguucugcgacaugcugagacuguucgacuucugcaagcaggccaucagaagacugaagaccgaggcccagaugagcauccagcugaucaacaaggccgugaacgcccugaucaacgaccagcugaucaugaagaaccaccugagagacaucaugggcauccccuacugcaacuacagcagauacugcuaccugaaccacaccagcaccggcaagaccagccugcccagaugcugccugaucagcaacggcagcuaccugaacgagaccaaguucagcgacgacaucgagcagcaggccgacaacaugaucaccgagaugcugcagaaggaguacaucgacagacagggcaagaccccccugggccugguggaccuguucguguucagcaccagcuucuaccugaucagcaucuuccugcaccuggugaagauccccacccacagacacaucgugggcaagcccugccccaagccccacagacugaaccacaugggcaucugcagcugcggccuguacaagcagcccggcgugcccgugagauggaagagaugaggacuaguuauaagacugacuagcccgaugggccucccaacgggcccuccuccccuccuugcaccgagauuaaucaaaggcucuuuucagagccaccaaaaaaaaaaaaaaaaaaaaaaaaaaaaaaaaaaaaaaaaaaaaaaaaaaaaaaaaaaaaaaaaaaaaaaaaaaaaaaaaaaaaaaaaaaaaaaaaaaaaa

SEQ ID NO: 41417 - RNA, 1689 nt, Artificial Sequence
  mRNA product Design i-3 (hSL-A100) comprising derived and/or modified sequence from LASV(AV;Clade V)__CCA30314__GPCmut12 (opt4)
aggagaaagcuuaccaugggccagaucgugaccuucuuccaggaggugccccacgugaucgaggaggugaugaacaucgugcugaucgcccugagcauccuggccgugcugaagggccuguacaacaucgccaccugcggccugaucggccugaucaccuuccugcugcugugcggcagaagcugcagcagcaaccuguacaagggcguguacgagcugcagagccuggaccugaacauggagacccugaacaugugcaugccccugagcugcaccaagaacaacagccaccacuacaucagagugggcaacgacaccggccuggagcugacccugaccaacaccagcauccugaaccacaaguucugcaaccugagcgacgcccacaagaaggaccuguacgaccacgcccugaugagcaucaucagcaccuuccaccugagcauccccaacuucaaccaguacgaggccaugagcugcgacuucaacggcggcaagaucagcgugcaguacaaccugagccacagcuacgccaucgacgccgccaaccacugcggcaccguggccaacggcauccugcagaccuucaugagaauggccuggggcggcagcuacaucgcccuggacagcggcagaggcaacugggacugcaucaugaccagcuaccaguaccugaucauccagaacaccaccugggagaaccacugccaguucagcagacccagccccaucggcuaccugggccugcugagccagagaaccagagacaucuacaucagcagaagacugcugggcaccuucaccuggacccugagcgacagcgagggcaacgccacccccggcggcuacugccugaccagauggaugcugaucgaggccgagcugaagugcuucggcaacaccgccguggccaagugcaacgagaagcacgacgaggaguucugcgacaugcugagacuguucgacuucugcaagcaggccaucagcagacugaagagcgaggcccagaugagcauccagcugaucaacaaggccgugaacgcccugaucaacgaccagcugaucaugaagaaccaccugagagacaucaugggcauccccuacugcaacuacagcaaguacugcuaccugaaccacaccaucaccggcaagaccagccugcccaagugcugccuggugagcaacggcagcuaccugaacgagacccacuucagcgacgacaucgagcagcaggccgacaacaugaucaccgagaugcugcagaaggaguacauggagagacagggcaagaccccccugggccugguggaccuguucguguucagcaccagcuucuaccugaucagcaucuuccugagacuggugaagauccccacccacagacacaucgugggcaagcccugccccaagccccacagacugaaccacaugggcaucugcagcugcggccuguacaagcagcccggcgugcccgugagauggaagagaugaggacuaguuauaagacugacuagcccgaugggccucccaacgggcccuccuccccuccuugcaccgagauuaaucaaaggcucuuuucagagccaccaaaaaaaaaaaaaaaaaaaaaaaaaaaaaaaaaaaaaaaaaaaaaaaaaaaaaaaaaaaaaaaaaaaaaaaaaaaaaaaaaaaaaaaaaaaaaaaaaaaaa

SEQ ID NO: 41418 - RNA, 1686 nt, Artificial Sequence
  mRNA product Design i-3 (hSL-A100) comprising derived and/or modified sequence from LASV(Togo/2016/7082;Clade VI)__AMR44577__GPCmut12 (opt4)
aggagaaagcuuaccaugggccagaucaucaccuucuuccaggaggugccccacgugaucgaggaggugaugaacaucgugcugaucgcccugagccugcuggccauccugaagggcguguacaacguggccaccugcggcaucaucggccuggugaccuuccuguuccugugcggcagaagcugcagccugaucuacaagggcagcuacgagcugcagacccuggagcugaacauggagacccugaacaugugcaugccccugagcugcaccaagaacagcagccaccacuacaucagagugggcaacgagaccggccuggagcugacccugaccaacaccagcaucaucaaccacaaguucugcaaccugagcgacgcccacaagagaaaccuguacgaccacgcccugaugagcauccugagcaccuuccaccugagcauccccaacuucaaccaguacgaggccaugagcugcgacuucaacggcggcaagaucagcgugcaguacaaccugagccacgccuacgccguggacgccgccgagcacugcggcaccguggccaacggcgugcugcagaccuucaugagaauggccuggggcggcagcuacaucgcccuggacagcggcagaggcaacugggacugcaucaugaccagcuaccaguaccugaucauccagaacaccaccugggaggaccacugccaguucagcagacccagccccaucggcuaccugggccugcugagccagagaaccagagacaucuacaucagcagaagacugcugggcaccuucaccuggacccugagcgacagcgagggcaacgagacccccggcggcuacugccugaccagauggaugcugaucgaggccgagcugaagugcuucggcaacaccgccguggccaagugcaacgagaagcacgacgaggaguucugcgacaugcugagacuguucgacuucugcaagcaggccauccagagacugaagagcgaggcccagaugagcauccagcugaucaacaaggccgugaacgcccugaucaacgaccagcugaucaugaagaaccaccugagagacaugaugggcauccccuacugcaacuacagcaaguacugcuaccugaaccacaccagcagcggcagaaccagccugcccaagugcugccuggugagcaacggcagcuaccugaacgagacccacuucagcgacgacaucgagcagcaggccgacaacaugaucaccgagaugcugcagaaggaguacaucgacagacagggcaagaccccccugggccugguggaccuguucguguucagcaccagcuucuaccugaucagcaucuuccugcaccugaucaagauccccacccacagacacaucgugggcaagcccugccccaagccccacagacugaaccacaugggcaucugcagcugcggccuguacaagcagcccggcgugcccaccagauggaagagaugaggacuaguuauaagacugacuagcccgaugggccucccaacgggcccuccuccccuccuugcaccgagauuaaucaaaggcucuuuucagagccaccaaaaaaaaaaaaaaaaaaaaaaaaaaaaaaaaaaaaaaaaaaaaaaaaaaaaaaaaaaaaaaaaaaaaaaaaaaaaaaaaaaaaaaaaaaaaaaaaaaaaa

SEQ ID NO: 41419 - RNA, 1686 nt, Artificial Sequence
  mRNA product Design i-3 (hSL-A100) comprising derived and/or modified sequence from LASV(KAK-428;Clade n.d. (VII))__ANH09740__GPCmut12 (opt4)
aggagaaagcuuaccaugggccagaucgugaccuucuuccaggaggugccccacgugaucgaggaggugaugaacaucgugcugaucgcccugagccugcuggccauccugaagggccuguacaacuucgccaccugcggcgugaucggccugaucaccuuccugcugcugugcggcagaagcugcagcgccaccuacaagggccaguacgagcugcagacccuggagcugaacauggagagccugaacaugugcaugccccugagcugcaccaagaacaacagccaccacuacaucagagccggcaacaacaccggccuggagcugacccugaccaacaccagcaucaucagccacaaguucugcaaccugagcgacgcccacaagaagaaccuguacgaccacacccugaugagcaucaucaccaccuuccaccugagcauccccaacuucaaccaguacgaggccaugagcugcgacuucaacggcggcaagaucagcauccaguacaaccugagccacagcuacgccggcgacgccgcccagcacugcggcaccguggccaacggcgugcugcagaccuucaugagaauggccuggggcggcagcuaccuggcccuggacagcggcagaagaggcugggacugcaucaucagcagcuaccaguaccugaucauccagaacaccaccugggacgaccacugccaguucagcagacccagccccaucggcuaccugggcuucgugagccagaagaccagagacaucuacaucagcagaagacugcugggcaccuucaccuggacccugagcgacagcgagggccacgacaugcccggcggcuacugccugaccagauggaugcugaucgaggccgaccugaagugcuucggcaacaccgccguggccaagugcaacgagaagcacgacgaggaguucugcgacauguggagacuguucgacuucugcaagcaggccauccagagacugaaggccgaggcccagaugaacauccagcugaucaacaaggccgugaacgcccugaucaacgaccagcugaugaugaagaaccaccugagagacaucaugggcauccccuacugcaacuacagcaaguucugcuaccugaacaacaccaccaccggcagaaccagccugcccagaugcugccugaucagcaacggcagcuaccugaacgagacccacuucagcgacgacaucgagcagcaggccgacaacaugaucaccgagaugcugcagaaggaguacauggacagacagggcaagaccccccugggccugguggaccuguucguguucagcaccagcuucuaccugaucaccaucuuccugcaccuggugaagauccccacccacagacacaucgugggcaagcccugccccaagccccacagacugaaccacaugggcaucugcagcugcggccuguacaagcagcccggcgugcccgugagauggaagagaugaggacuaguuauaagacugacuagcccgaugggccucccaacgggcccuccuccccuccuugcaccgagauuaaucaaaggcucuuuucagagccaccaaaaaaaaaaaaaaaaaaaaaaaaaaaaaaaaaaaaaaaaaaaaaaaaaaaaaaaaaaaaaaaaaaaaaaaaaaaaaaaaaaaaaaaaaaaaaaaaaaaaa

SEQ ID NO: 41420 - RNA, 1686 nt, Artificial Sequence; identical to SEQ ID NO: 41414
  mRNA product Design i-3 (hSL-A100) comprising derived and/or modified sequence from LASV(Pinneo-NIG-1969;Clade I)__AIT17836__GPCmut12 (opt4)

SEQ ID NO: 41421 - RNA, 1686 nt, Artificial Sequence
  mRNA product Design i-3 (hSL-A100) comprising derived and/or modified sequence from LASV(ISTH0009-NIG-2011;Clade II)__AIT17404__GPCmut12 (opt4)
aggagaaagcuuaccaugggccagaucaucaccuucuuccaggaggugccccacgugaucgaggaggugaugaacaucgugcugaucgcccugagccugcuggccauccugaagggcaucuacaacguggccaccugcggccuguucggccuggugagcuuccugcugcugugcggcagaagcugcagcaccaccuacaagggcguguacgagcugcagacccuggagcuggacauggccagccugaacaugugcaugccccugagcugcaccaagaacaacagccaccacuacaucauggugggcaacgagaccggccuggagcugacccugaccaacaccagcaucaucaaccacaaguucugcaaccugagcgacgcccacaagaagaaccuguacgaccacgcccugaugagcaucaucagcaccuuccaccugagcauccccaacuucaaccaguacgaggccaugagcugcgacuucaacggcggcaagaucagcgugcaguacaaccugagccacgccuacgccguggacgccgccaaccacugcggcaccaucgccaacggcgugcugcagaccuucaugagaauggccuggggcggcagcuacaucgcccuggacagcggcaagggcagcugggacugcaucaugaccagcuaccaguaccugaucauccagaacaccaccugggaggaccacugccaguucagcagacccagccccaucggcuaccugggccugcugagccagagaaccagagacaucuacaucagcagaagacugcugggcaccuucaccuggacccugagcgacagcgagggcaacgagacccccggcggcuacugccugaccagauggaugcugaucgaggccgagcugaagugcuucggcaacaccgccguggccaagugcaacgagaagcacgacgaggaguucugcgacaugcugagacuguucgacuucugcaagcaggccaucagaagacugaagaccgaggcccagaugagcauccagcugaucaacaaggccgugaacgcccugaucaacgaccagcugaucaugaagaaccaccugagagacaucaugggcauccccuacugcaacuacagcaaguacugcuaccugaaccacaccgugaccggcaagaccagccugcccagaugcugccuggugagcaacggcagcuaccugaacgagacccacuucagcgacgacaucgagcagcaggccgacaacaugaucaccgagcugcugcagaaggaguacauggacagacagggcaagaccccccugggccugguggaccuguucguguucagcaccagcuucuaccugaucagcaucuuccugcaccugaucaagauccccacccacagacacaucaccggcaagcccugccccaagccccacagacugaaccacaugggcaucugcagcugcggccuguacaagcaccccggcgugcccgugaaguggaagagaugaggacuaguuauaagacugacuagcccgaugggccucccaacgggcccuccuccccuccuugcaccgagauuaaucaaaggcucuuuucagagccaccaaaaaaaaaaaaaaaaaaaaaaaaaaaaaaaaaaaaaaaaaaaaaaaaaaaaaaaaaaaaaaaaaaaaaaaaaaaaaaaaaaaaaaaaaaaaaaaaaaaaa

SEQ ID NO: 41422 - RNA, 1686 nt, Artificial Sequence
  mRNA product Design i-3 (hSL-A100) comprising derived and/or modified sequence from LASV(ISTH2010-NIG-2012;Clade II)__AIT17482__GPCmut12 (opt4)
aggagaaagcuuaccaugggccagaucaucaccuucuuccaggaggugccccacgugaucgaggaggugaugaacaucgugcugaucgcccugagccugcuggccauccugaagggcaucuacaacguggccaccugcggccuguucggccuggugagcuuccugcugcugugcggcagaagcugcagcaccaccuacaagggcguguacgagcugcagacccuggagcuggacauggccagccugaacaugugcaugccccugagcugcaccaagaacaacagccaccacuacaucauggugggcaacgagaccggccuggagcugacccugaccaacaccagcaucaucaaccacaaguucugcaaccugagcgacgcccacaagaagaaccuguacgaccacgcccugaugagcaucaucagcaccuuccaccugagcauccccaacuucaaccaguacgaggccaugagcugcgacuucaacggcggcaagaucagcgugcaguacaaccugagccacgccuacgccguggacgccgccaaccacugcggcaccaucgccaacggcgugcugcagaccuucaugagaauggccuggggcggcagcuacaucgcccuggacagcggcaagggcagcugggacugcaucaugaccagcuaccaguaccugaucauccagaacaucaccugggaggaccacugccaguucagcagacccagccccaucggcuaccugggccugcugagccagagaaccagagacaucuacaucagcagaagacugcugggcaccuucaccuggacccugagcgacagcgagggcaacgagacccccggcggcuacugccugaccagauggaugcugaucgaggccgagcugaagugcuucggcaacaccgccguggccaagugcaacgagaagcacgacgaggaguucugcgacaugcugagacuguucgacuucugcaagcaggccaucagaagacugaagaccgaggcccagaugagcauccagcugaucaacaaggccgugaacgcccugaucaacgaccagcugaucaugaagaaccaccugagagacaucaugggcauccccuacugcaacuacagcaaguacugcuaccugaaccacaccgugaccggcaagaccagccugcccagaugcugccuggugagcaacggcagcuaccugaacgagacccacuucagcgacgacaucgagcagcaggccgacaacaugaucaccgagcugcugcagaaggaguacaucgacagacagggcaagaccccccugggccugguggaccuguucguguucagcaccagcuucuaccugaucagcaucuuccugcaccuggugaagauccccacccacagacacguggugggcaagcccugccccaagccccacagacugaaccacaugggcaucugcagcugcggccuguacaagcaccccggcgugcccgugaaguggaagagaugaggacuaguuauaagacugacuagcccgaugggccucccaacgggcccuccuccccuccuugcaccgagauuaaucaaaggcucuuuucagagccaccaaaaaaaaaaaaaaaaaaaaaaaaaaaaaaaaaaaaaaaaaaaaaaaaaaaaaaaaaaaaaaaaaaaaaaaaaaaaaaaaaaaaaaaaaaaaaaaaaaaaa

SEQ ID NO: 41423 - RNA, 1686 nt, Artificial Sequence
  mRNA product Design i-3 (hSL-A100) comprising derived and/or modified sequence from LASV(Lassa virus/H.sapiens-wt/NGA/2015/ISTH_0543;Clade II)__AVO03639__GPCmut12 (opt4)
aggagaaagcuuaccaugggccagaucaucaccuucuuccaggaggugccccacgugaucgaggaggugaugaacaucgugcugaucgcccugagccugcuggccauccugaagggcaucuacaacguggccaccugcggccuguucggccuggugagcuuccugcugcugugcggcagaagcugcagcaccaccuacaagggcguguacgagcugcagacccuggagcuggacauggccaaccugaacaugugcaugccccugagcugcaccaagaacaacagccaccacuacaucauggugggcaacgagaccggccuggagcugacccugaccaacaccagcaucaucaaccacaaguucugcaaccugagcgacgcccacaagaagaaccuguacgaccacgcccugaugagcaucaucagcaccuuccaccugagcauccccaacuucaaccaguacgaggccaugagcugcgacuucaacggcggcaagaucagcgugcaguacaaccugagccacaccuacgccguggacgccgccaaccacugcggcaccaucgccaacggcgugcugcagaccuucaugagaauggccuggggcggcagcuacaucgcccuggacagcggcaagggcagcugggacugcaucaugaccagcuaccaguaccuggugauccagaacaccaccugggaggaccacugccaguucagcagacccagccccaucggcuaccugggccugcugagccagagaaccagagacaucuacaucagcagaagacugcugggcaccuucaccuggacccugagcgacagcgagggcaacgagacccccggcggcuacugccugaccagauggaugcugaucgaggccgagcugaagugcuucggcaacaccgccguggccaagugcaacgagaagcacgacgaggaguucugcgacaugcugagacuguucgacuucugcaagcaggccaucagaagacugaagaccgaggcccagaugagcauccagcugaucaacaaggccgugaacgcccugaucaacgaccagcugaucaugaagaaccaccugagagacaucaugggcauccccuacugcaacuacagcaaguacugcuaccugaaccacaccgugaccggcaagaccagccugcccagaugcugccuggugagcaacggcagcuaccugaacgagacccacuucagcgacgacaucgagcagcaggccgacaacaugaucaccgagcugcugcagaaggaguacaucgacagacagggcaagaccccccugggccugguggaccuguucguguucagcaccagcuucuaccugaucagcaucuuccugcaccuggugaagauccccacccacagacacaucaccggcaagcccugccccaagccccacagacugaaccacaugggcaucugcagcugcggccuguacaagcaccccggcgugcccgugaaguggaagagaugaggacuaguuauaagacugacuagcccgaugggccucccaacgggcccuccuccccuccuugcaccgagauuaaucaaaggcucuuuucagagccaccaaaaaaaaaaaaaaaaaaaaaaaaaaaaaaaaaaaaaaaaaaaaaaaaaaaaaaaaaaaaaaaaaaaaaaaaaaaaaaaaaaaaaaaaaaaaaaaaaaaaa

SEQ ID NO: 41424 - RNA, 1686 nt, Artificial Sequence
  mRNA product Design i-3 (hSL-A100) comprising derived and/or modified sequence from LASV(Lassa virus/H.sapiens-wt/NGA/2016/ISTH_0009;Clade II)__AVO03571__GPCmut12 (opt4)
aggagaaagcuuaccaugggccagaucaucaccuucuuccaggaggugccccacgugaucgaggaggugaugaacaucgugcugaucgcccugagccugcuggccauccugaagggcaucuacaacguggccaccugcggccugcugggccuggugagcuuccugcugcugugcggcagaagcugcagcaccaccuacaagggcguguacgagcugcagacccuggagcuggacauggccagccugaacaugugcaugccccugagcugcaccaagaacaacagccaccacuacaucauggugggcaacgagaccggccuggagcugacccugaccaacaccagcaucaucaaccacaaguucugcaaccugagcgacgcccacaagaagaaccuguacgaccacgcccugaugagcaucaucagcaccuuccaccugagcauccccaacuucaaccaguacgaggccaugagcugcgacuucaacggcggcagaaucagcgugcaguacaaccugagccacagcuacgccguggacgccgccaaccacugcggcaccaucgccaacggcgugcugcagaccuucaugagaauggccuggggcggcagcuacaucgcccuggacagcggcaagggcagcugggacugcaucaugaccagcuaccaguaccugaucauccagaacaccaccugggaggaccacugccaguucagcagacccagccccaucggcuaccugggccugcugagccagagaaccagagacaucuacaucagcagaagacugcugggcaccuucaccuggacccugagcgacagcgagggcaacgagacccccggcggcuacugccugaccagauggaugcugaucgaggccgagcugaagugcuucggcaacaccgccguggccaagugcaacgagaagcacgacgaggaguucugcgacaugcugagacuguucgacuucugcaagcaggccaucagaagacugaagaccgaggcccagaugagcauccagcugaucaacaaggccgugaacgcccugaucaacgaccagcugaucaugaagaaccaccugagagacaucaugggcauccccuacugcaacuacagcaaguacugcuaccugaaccacaccgugaccggcaagaccagccugcccagaugcugccuggugagcaacggcagcuaccugaacgagacccacuucagcgacgacaucgagcagcaggccgacaacaugaucaccgagcugcugcagaaggaguacaucgacagacagggcaagaccccccugggccugguggaccuguucguguucagcaccagcuucuaccugaucagcaucuuccugcaccuggugaagauccccacccacagacacaucaccggcaagcccugccccaagccccacagacugaaccacaugggcaucugcagcugcggccuguacaaccaccccggcgugcccgugaaguggaagagaugaggacuaguuauaagacugacuagcccgaugggccucccaacgggcccuccuccccuccuugcaccgagauuaaucaaaggcucuuuucagagccaccaaaaaaaaaaaaaaaaaaaaaaaaaaaaaaaaaaaaaaaaaaaaaaaaaaaaaaaaaaaaaaaaaaaaaaaaaaaaaaaaaaaaaaaaaaaaaaaaaaaaa

SEQ ID NO: 41425 - RNA, 1686 nt, Artificial Sequence
  mRNA product Design i-3 (hSL-A100) comprising derived and/or modified sequence from LASV(Lassa virus/H.sapiens-wt/NGA/2016/ISTH_0017;Clade II)__AVO03567__GPCmut12 (opt4)
aggagaaagcuuaccaugggccagaucaucaccuucuuccaggaggugccccacgugaucgaggaggugaugaacaucgugcugaucgcccugagccugcuggccauccugaagggcaucuacaacguggccaccugcggccuguucggccuggugagcuuccugcugcugugcggcagaagcugcagcaccaccuacaagggcguguacgagcugcagacccuggagcuggacauggccagccugaacaugugcaugccccugagcugcaccaagaacaacagccaccacuacaucauggugggcaacgagaccggccuggagcugacccugaccaacaccagcaucaucaaccacaaguucugcaaccugagcgacgcccacaagaagaaccuguacgaccacgcccugaugagcaucaucagcaccuuccaccugagcauccccaacuucaaccaguacgaggccaugagcugcgacuucaacggcggcaagaucagcgugcaguacaaccugagccacaccuacgccaucgacgccgccaaccacugcggcaccaucgccaacggcgugcugcagaccuucaugagaauggccuggggcggcagcuacaucgcccuggacagcggcaagggcagcugggacugcaucaugaccagcuaccaguaccugaucauccagaacaccaccugggaggaccacugccaguucagcagacccagccccaucggcuaccugggccugcugagccagagaaccagagacaucuacaucagcagaagacugcugggcaccuucaccuggacccugagcgacagcgagggcaacgagacccccggcggcuacugccugaccagauggaugcugaucgaggccgagcugaagugcuucggcaacaccgccguggccaagugcaacgagaagcacgacgaggaguucugcgacaugcugagacuguucgacuucugcaagcaggccaucagaagacugaagaccgaggcccagaugagcauccagcugaucaacaaggccgugaacgcccugaucaacgaccagcugaucaugaagaaccaccugagagacaucaugggcauccccuacugcaacuacagcaaguacugcuaccugaaccacaccgugaccggcaagaccagccugcccagaugcugccuggugagcaacggcagcuaccugaacgagacccacuucagcgacgacaucgagcagcaggccgacaacaugaucaccgagcugcugcagaaggaguacauggacagacagggcaagaccccccugggccugguggaccuguucguguucagcaccagcuucuaccugaucagcaucuuccugcaccuggugagaauccccacccacagacacgugaucggcaagcccugccccaagccccacagacugaaccacaugggcaucugcagcugcggccuguacaagcaccccggcgugcccgugaaguggaagagaugaggacuaguuauaagacugacuagcccgaugggccucccaacgggcccuccuccccuccuugcaccgagauuaaucaaaggcucuuuucagagccaccaaaaaaaaaaaaaaaaaaaaaaaaaaaaaaaaaaaaaaaaaaaaaaaaaaaaaaaaaaaaaaaaaaaaaaaaaaaaaaaaaaaaaaaaaaaaaaaaaaaaa

SEQ ID NO: 41426 - RNA, 1686 nt, Artificial Sequence
  mRNA product Design i-3 (hSL-A100) comprising derived and/or modified sequence from LASV(Lassa virus/H.sapiens-wt/NGA/2018/ISTH_0959;Clade II)__AVV65099__GPCmut12 (opt4)
aggagaaagcuuaccaugggccagaucaucaccuucuuccaggaggugccccacgugaucgaggaggugaugaacaucgugcugaucgcccugagccugcuggccauccugaagggcaucuacaacguggugaccugcggccuguucggccuggugagcuuccugcugcugugcggcagaagcugcagcaccaccuacaagggcguguacgagcugcagacccuggagcuggacauggccagccugaacaugugcaugccccugagcugcaccaagaacaacagccaccacuacaucauggugggcaacgagaccggccuggagcugacccugaccaacaccagcaucaucaaccacaaguucugcaaccugagcgacgcccacaagaagaaccuguacgaccacgcccugaugagcaucaucagcaccuuccaccugagcauccccaacuucaaccaguacgaggccaugagcugcgacuucaacggcggcaagaucagcgugcaguacaaccugagccacgccuacgccaucgacgccgccaaccacugcggcaccaucgccaacggcgugcugcagaccuucaugagaauggccuggggcggcagcuacaucgcccuggacagcggcaagggcagcugggacugcaucaugaccagcuaccaguaccugaucauccagaacaccaccugggaggaccacugccaguucagcagacccagccccaucggcuaccugggccugcugagccagagaaccagagacaucuacaucagcagaagacugcugggcaccuucaccuggacccugagcgacagcgagggcaacgagacccccggcggcuacugccugaccagauggaugcugaucgaggccgagcugaagugcuucggcaacaccgccguggccaagugcaacgagaagcacgacgaggaguucugcgacaugcugagacuguucgacuucugcaagcaggccaucagaagacugaagaccgaggcccagaugagcauccagcugaucaacaaggccgugaacgcccugaucaacgaccagcugaucaugaagaaccaccugagagacaucaugggcauccccuacugcaacuacagcaaguacugcuaccugaaccacaccgugaccggcaagaccagccugcccagaugcugccuggugagcaacggcagcuaccugaacgagacccacuucagcgacgacaucgagcagcaggccgacaacaugaucaccgagcugcugcagaaggaguacaucgacagacagggcaagaccccccugggccugguggaccuguucguguucagcaccagcuucuaccugaucagcaucuuccugcaccuggugaagauccccacccacagacacgugaucggcaagcccugccccaagccccacagacugaaccacaugggcaucugcagcugcggccuguacaagcaccccggcgugcccgugaaguggaagagaugaggacuaguuauaagacugacuagcccgaugggccucccaacgggcccuccuccccuccuugcaccgagauuaaucaaaggcucuuuucagagccaccaaaaaaaaaaaaaaaaaaaaaaaaaaaaaaaaaaaaaaaaaaaaaaaaaaaaaaaaaaaaaaaaaaaaaaaaaaaaaaaaaaaaaaaaaaaaaaaaaaaaa

SEQ ID NO: 41427 - RNA, 1686 nt, Artificial Sequence
  mRNA product Design i-3 (hSL-A100) comprising derived and/or modified sequence from LASV(LASV003-NIG-2008;Clade II)__AIT17580__GPCmut12 (opt4)
aggagaaagcuuaccaugggccagaucaucaccuucuuccaggaggugccccacgugaucgaggaggugaugaacaucgugcugaucgcccugagccugcuggccauccugaagggcaucuacaacguggccaccugcggccuguucggccuggugagcuuccugcugcugugcggcagaagcugcagcaccaccuacaagggcguguacgagcugcagacccuggagcuggacauggccagccugaacaugugcaugccccugagcugcaccaagaacaacagccaccacuacaucauggugggcaacgagaccggccuggagcugacccugaccaacaccagcaucaucaaccacaaguucugcaaccugagcgacgcccacaagaagaaccuguacgaccacgcccugaugagcaucaucagcaccuuccaccugagcauccccaacuucaaccaguacgaggccaugagcugcgacuucaacggcggcaagaucagcgugcaguacaaccugagccacaccuacgccguggacgccgccaaccacugcggcaccaucgccaacggcgugcugcagaccuucaugagaauggccuggggcggcagcuacaucgcccuggacagcggcaagggcagcugggacugcaucaugaccagcuaccaguaccugaucauccagaacaccaccugggaggaccacugccaguucagcagacccagccccaucggcuaccugggccugcugagccagagaaccagagacaucuacaucagcagaagacugcugggcaccuucaccuggacccugagcgacagcgagagcaacgagacccccggcggcuacugccugaccagauggaugcugaucgaggccgagcugaagugcuucggcaacaccgccguggccaagugcaacgagaagcacgacgaggaguucugcgacaugcugagacuguucgacuucugcaagcaggccaucagaagacugaaggccgaggcccagaugagcauccagcugaucaacaaggccgugaacgcccugaucaacgaccagcugaucaugaagaaccaccugagagacaucaugggcauccccuacugcaacuacagcaaguacugcuaccugaaccacaccgugaccggcagaaccagccugcccagaugcugccuggugagcaacggcagcuaccugaacgagacccacuucagcgacgacaucgagcagcaggccgacaacaugaucaccgagcugcugcagaaggaguacauggacagacagggcaagaccccccugggccugguggaccuguucguguucagcaccagcuucuaccugaucagcaucuuccugcaccuggugaagauccccacccacagacacgugaucggcaagcccugccccaagccccacagacugaaccacaugggcaucugcagcugcggccuguacaagcaccccggcgugcccgugaaguggaagagaugaggacuaguuauaagacugacuagcccgaugggccucccaacgggcccuccuccccuccuugcaccgagauuaaucaaaggcucuuuucagagccaccaaaaaaaaaaaaaaaaaaaaaaaaaaaaaaaaaaaaaaaaaaaaaaaaaaaaaaaaaaaaaaaaaaaaaaaaaaaaaaaaaaaaaaaaaaaaaaaaaaaaa

SEQ ID NO: 41428 - RNA, 1686 nt, Artificial Sequence
  mRNA product Design i-3 (hSL-A100) comprising derived and/or modified sequence from LASV(LASV035-NIG-2009;Clade II)__AIT17588__GPCmut12 (opt4)
aggagaaagcuuaccaugggccagaucaucaccuucuuccaggaggugccccacgugaucgaggaggugaugaacaucgugcugaucgcccugagccugcuggccauccugaagggcaucuacaacguggccaccugcggccuguucggccuggugagcuuccugcugcugugcggcagaagcugcagcaccaccuacaagggcguguacgagcugcagacccuggagcuggacauggccagccugaacaugugcaugccccugagcugcaccaagaacaacagccaccacuacaucauggugggcaacgagaccggccuggagcugacccugaccaacaccagcaucaucaaccacaaguucugcaaccugagcgacgcccacaagaagaaccuguacgaccacgcccugaugagcaucaucagcaccuuccaccugagcauccccaacuucaaccaguacgaggccaugagcugcgacuucaacggcggcaagaucagcgugcaguacaaccugagccacgccuacgccguggacgccgccaaccacugcggcaccaucgccaacggcgugcugcagaccuucaugagaauggccuggggcggcagcuacaucgcccuggacagcggcaagggcagcugggacugcaucaugaccagcuaccaguaccugaucauccagaacaccaccugggaggaccacugccaguucagcagacccagccccaucggcuaccugggccugcugagccagagaaccagagacaucuacaucagcagaagacugcugggcaccuucaccuggacccugagcgacagcgagggcaacgagacccccggcggcuacugccugaccagauggaugcugaucgaggccgagcugaagugcuucggcaacaccgccguggccaagugcaacgagaagcacgacgaggaguucugcgacaugcugagacuguucgacuucugcaagcaggccaucagaagacugaaggccgaggcccagaugagcauccagcugaucaacaaggccgugaacgcccugaucaacgaccagcugaucaugaagaaccaccugagagacaucaugggcauccccuacugcaacuacagcaaguacugcuaccugaaccacaccgugaccggcaagaccagccugcccagaugcugccuggugagcaacggcagcuaccugaacgagacccacuucagcgacgacaucgagcagcaggccgacaacaugaucaccgagcugcugcagaaggaguacaucgacagacagggcaagaccccccugggccugguggaccuguucguguucagcaccagcuucuaccugaucagcaucuuccugcaccuggugaagauccccacccacagacacgugaucggcaagcccugccccaagccccacagacugaaccacaugggcaucugcagcugcggccuguacaagcaccccggcgugcccgugaaguggaagagaugaggacuaguuauaagacugacuagcccgaugggccucccaacgggcccuccuccccuccuugcaccgagauuaaucaaaggcucuuuucagagccaccaaaaaaaaaaaaaaaaaaaaaaaaaaaaaaaaaaaaaaaaaaaaaaaaaaaaaaaaaaaaaaaaaaaaaaaaaaaaaaaaaaaaaaaaaaaaaaaaaaaaa

SEQ ID NO: 41429 - RNA, 1686 nt, Artificial Sequence
  mRNA product Design i-3 (hSL-A100) comprising derived and/or modified sequence from LASV(LASV1000-NIG-2009;Clade II)__AIT17782__GPCmut12 (opt4)
aggagaaagcuuaccaugggccagaucaucaccuucuuccaggaggugccccacgugaucgaggaggugaugaacaucgugcugaucgcccugagccugcuggccauccugaagggcaucuacaacguggccaccugcggccuguucggccuggugagcuuccugcugcugugcggcagaagcugcagcaccaccuacaagggcguguacgagcugcagacccuggagcuggacauggccagccugaacaugugcaugccccugagcugcaccaagaacaacagccaccacuacaucauggugggcaacgagaccggccuggagcugacccugaccaacaccagcaucaucaaccacaaguucugcaaccugagcgacgcccacaagaagaaccuguacgaccacgcccugaugagcaucaucagcaccuuccaccugagcauccccaacuucaaccaguacgaggccaugagcugcgacuucaacggcggcaagaucagcgugcaguacaaccugagccacaccuacgccguggacgccgccaaccacugcggcaccaucgccaacggcgugcugcagaccuucaugagaauggccuggggcggcagcuacaucgcccuggacagcggcaagggcagcugggacugcaucaugaccagcuaccaguaccugaucauccagaacaccaccugggaggaccacugccaguucagcagacccagccccaucggcuaccugggccugcugagccagagaaccagagacaucuacaucagcagaagacugcugggcaccuucaccuggacccugagcgacagcgagggcaacgagacccccggcggcuacugccugaccagauggaugcugaucgaggccgagcugaagugcuucggcaacaccgccguggccaagugcaacgagaagcacgacgaggaguucugcgacaugcugagacuguucgacuucugcaagcaggccaucaagagacugaagaccgaggcccagaugagcauccagcugaucaacaaggccgugaacgcccugaucaacgaccagcugaucaugaagaaccaccugagagacaucaugggcauccccuacugcaacuacagcaaguacugcuaccugaaccacaccgugaccggcaagaccagccugcccagaugcugccuggugagcaacggcagcuaccugaacgagacccacuucagcgacgacaucgagcagcaggccgacaacaugaucaccgagcugcugcagaaggaguacaucgacagacagggcaagaccccccugggccugguggaccuguucguguucagcaccagcuucuaccugaucagcaucuuccugcaccuggugaagauccccacccacagacacguggugggcaagcccugccccaagccccacagacugaaccacaugggcaucugcagcugcggccuguacaagcaccccggcgugcccgugaaguggaagagaugaggacuaguuauaagacugacuagcccgaugggccucccaacgggcccuccuccccuccuugcaccgagauuaaucaaaggcucuuuucagagccaccaaaaaaaaaaaaaaaaaaaaaaaaaaaaaaaaaaaaaaaaaaaaaaaaaaaaaaaaaaaaaaaaaaaaaaaaaaaaaaaaaaaaaaaaaaaaaaaaaaaaa

SEQ ID NO: 41430 - RNA, 1686 nt, Artificial Sequence
  mRNA product Design i-3 (hSL-A100) comprising derived and/or modified sequence from LASV(LASV221-NIG-2010;Clade II)__AIT17624__GPCmut12 (opt4)
aggagaaagcuuaccaugggccagaucaucaccuucuuccaggaggugccccacgugaucgaggaggugaugaacaucgugcugaucgcccugagccugcuggccauccugaagggcaucuacaacguggccaccugcggccuguucggccuggugagcuuccugcugcugugcggcagaagcugcagcaccaccuacaagggcguguacgagcugcagacccuggagcuggacauggccagccugaacaugugcaugccccugagcugcaccaagaacaacagccaccacuacaucauggugggcaacgagaccggccuggagcugacccugaccaacaccagcaucaucaaccacaaguucugcaaccugagcgacgcccacaagaagaaccuguacgaccacgcccugaugagcaucaucagcaccuuccaccugagcauccccaacuucaaccaguacgaggccaugagcugcgacuucaacggcggcaagaucagcgugcaguacaaccugagccacaccuacgccaucgacgccgccaaccacugcggcaccaucgccaacggcgugcugcagaccuucaugagaauggccuggggcggcagcuacaucgcccuggacagcggcaagggcagcugggacugcaucaugaccagcuaccaguaccugaucauccagaacaccaccugggaggaccacugccaguucagcagacccagccccaucggcuaccugggccugcugagccagagaaccagagacaucuacaucagcagaagacugcugggcaccuucaccuggacccugagcgacagcgagggcaacgagacccccggcggcuacugccugaccagauggaugcugaucgaggccgagcugaagugcuucggcaacaccgccguggccaagugcaacgagaagcacgacgaggaguucugcgacaugcugagacuguucgacuucugcaagcaggccaucagaagacugaagaccgaggcccagaugagcauccagcugaucaacaaggccgugaacgcccugaucaacgaccagcugaucaugaagaaccaccugagagacaucaugggcauccccuacugcaacuacagcaaguacugcuaccugaaccacaccgugaccggcaagaccagccugcccagaugcugccuggugagcaacggcagcuaccugaacgagacccacuucagcgacgacaucgagcagcaggccgacaacaugaucaccgagaugcugcagaaggaguacauggacagacagggcaagaccccccugggccugguggaccuguucguguucagcaccagcuucuaccugaucagcaucuuccugcaccuggugaagauccccacccacagacacgugaucggcaagcccugccccaagccccacagacugaaccacaugggcaucugcagcugcggccuguacaagcaccccggcgugcccgugaaguggaagagaugaggacuaguuauaagacugacuagcccgaugggccucccaacgggcccuccuccccuccuugcaccgagauuaaucaaaggcucuuuucagagccaccaaaaaaaaaaaaaaaaaaaaaaaaaaaaaaaaaaaaaaaaaaaaaaaaaaaaaaaaaaaaaaaaaaaaaaaaaaaaaaaaaaaaaaaaaaaaaaaaaaaaa

SEQ ID NO: 41431 - RNA, 1686 nt, Artificial Sequence
  mRNA product Design i-3 (hSL-A100) comprising derived and/or modified sequence from LASV(LASV237-NIG-2010;Clade II)__AIT17638__GPCmut12 (opt4)
aggagaaagcuuaccaugggccagaucaucaccuucuuccaggaggugccccacgugaucgaggaggugaugaacaucgugcugaucgcccugagccugcuggccauccugaagggcaucuacaacguggccaccugcggccuguucggccuggugagcuuccugcugcugugcggcagaagcugcagcaccaccuacaagggcguguacgagcugcagacccuggagcuggacauggccagccugaacaugugcaugccccugagcugcaccaagaacaacagccaccacuacaucauggugggcaacgagaccggccuggagcugacccugaccaacaccagcaucaucaaccacaaguucugcaaccugagcgacgcccacaagaaggaccuguacgaccacgcccugaugagcaucaucagcaccuuccaccugagcauccccaacuucaaccaguacgaggccaugagcugcgacuucaacggcggcaagaucagcgugcaguacaaccugagccacaccuacgccguggacgccgccaaccacugcggcaccaucgccaacggcgugcugcagaccuucaugagaauggccuggggcggcagcuacaucgcccuggacagcggcaagggcagcugggacugcaucaugaccagcuaccaguaccugaucauccagaacaccaccugggaggaccacugccaguucagcagacccagccccaucggcuaccugggccugcugagccagagaaccagagacaucuacaucagcagaagacugcugggcaccuucaccuggacccugagcgacagcgagggcaacgagacccccggcggcuacugccugaccagauggaugcugaucgaggccgagcugaagugcuucggcaacaccgccguggccaagugcaacgagaagcacgacgaggaguucugcgacaugcugagacuguucgacuucugcaagcaggccaucagaagacugaagaccgaggcccagaugagcauccagcugaucaacaaggccgugaacgcccugaucaacgaccagcugaucaugaagaaccaccugagagacaucaugggcauccccuacugcaacuacagcaaguacugcuaccugaaccacaccgugaccggcaagaccagccugcccagaugcugccuggugagcaacggcagcuaccugaacgagacccacuucagcgacgacaucgagcagcaggccgacaacaugaucaccgagcugcugcagaaggaguacauggacagacagggcaagaccccccugggccugguggaccuguucguguucagcaccagcuucuaccugaucagcaucuuccugcaccugaucaagauccccacccacagacacaucaccggcaagcccugccccaagccccacagacugaaccacaugggcaucugcagcugcggccuguacaagcaccccggcgugcccgugaaguggaagagaugaggacuaguuauaagacugacuagcccgaugggccucccaacgggcccuccuccccuccuugcaccgagauuaaucaaaggcucuuuucagagccaccaaaaaaaaaaaaaaaaaaaaaaaaaaaaaaaaaaaaaaaaaaaaaaaaaaaaaaaaaaaaaaaaaaaaaaaaaaaaaaaaaaaaaaaaaaaaaaaaaaaaa

SEQ ID NO: 41432 - RNA, 1686 nt, Artificial Sequence
  mRNA product Design i-3 (hSL-A100) comprising derived and/or modified sequence from LASV(LASV253-NIG-2011;Clade II)__AIT17670__GPCmut12 (opt4)
aggagaaagcuuaccaugggccagaucaucaccuucuuccaggaggugccccacgugaucgaggaggugaugaacaucgugcugaucgcccugagccugcuggccauccugaagggcaucuacaacguggccaccugcggccuguucggccuggugagcuuccugcugcugugcggcagaagcugcagcaccaccuacaagggcguguacgagcugcagacccuggagcuggacauggccagccugaacaugugcaugccccugagcugcaccaagaacaacagccaccacuacaucauggugggcaacgagaccggccuggagcugacccugaccaacaccagcaucaucaaccacaaguucugcaaccugagcgacgcccacaagaagaaccuguacgaccacgcccugaugagcaucaucagcaccuuccaccugagcauccccaacuucaaccaguacgaggccaugagcugcgacuucaacggcggcaagaucagcgugcaguacaaccugagccacaccuacgccguggacgccgccaaccacugcggcaccaucgccaacggcgugcugcagaccuucaugagaauggccuggggcggcagcuacaucgcccuggacagcggcaagggcagcugggacugcaucaugaccagcuaccaguaccugaucauccagaacaccaccugggaggaccacugccaguucagcagacccagccccaucggcuaccugggccugcugagccagagaaccagagacaucuacaucagcagaagacugcugggcaccuucaccuggacccugagcgacagcgagggcaacgagacccccggcggcuacugccugaccagauggaugcugaucgaggccgagcugaagugcuucggcaacaccgccguggccaagugcaacgagaagcacgacgaggaguucugcgacaugcugagacuguucgacuucugcaagcaggccaucagaagacugaaggccgaggcccagaugagcauccagcugaucaacaaggccgugaacgcccugaucaacgaccagcugaucaugaagaaccaccugagagacaucaugggcauccccuacugcaacuacagcaaguacugcuaccugaaccacaccgugaccggcagaaccagccugcccagaugcugccuggugagcaacggcagcuaccugaacgagacccacuucagcgacgacaucgagcagcaggccgacaacaugaucaccgagcugcugcagaaggaguacaucgacagacagggcaagaccccccugggccugguggaccuguucguguucagcaccagcuucuaccugaucagcaucuuccugcaccuggugaagauccccacccacagacacaucaucggcaagcccugccccaagccccacagacugaaccacaugggcaucugcagcugcggccuguacaagcaccccggcgugcccgugaaguggaagagaugaggacuaguuauaagacugacuagcccgaugggccucccaacgggcccuccuccccuccuugcaccgagauuaaucaaaggcucuuuucagagccaccaaaaaaaaaaaaaaaaaaaaaaaaaaaaaaaaaaaaaaaaaaaaaaaaaaaaaaaaaaaaaaaaaaaaaaaaaaaaaaaaaaaaaaaaaaaaaaaaaaaaa

SEQ ID NO: 41433 - RNA, 1686 nt, Artificial Sequence
  mRNA product Design i-3 (hSL-A100) comprising derived and/or modified sequence from LASV(LASV254-NIG-2011;Clade II)__AIT17674__GPCmut12 (opt4)
aggagaaagcuuaccaugggccagaucaucaccuucuuccaggaggugccccacgugaucgaggaggugaugaacaucgugcugaucgcccugagccugcuggccauccugaagggcaucuacaacguggccaccugcggccuguucggccuggugagcuuccugcugcugugcggcagaagcugcagcaccaccuacaagggcguguacgagcugcagacccuggagcuggacaugaccaaccugaacaugugcaugccccugagcugcaccaagaacaacagccaccacuacaucauggugggcaacgagaccggccuggagcugacccugaccaacaccagcaucaucaaccacaaguucugcaaccugagcgacgcccacaagaagaaccuguacaaccacgcccugaugagcaucaucagcaccuuccaccugagcauccccaacuucaaccaguacgaggccaugagcugcgacuucaacggcggcaagaucagcgugcaguacaaccugagccacagcuacgccguggacgccgccaaccacugcggcaccaucgccaacggcgugcugcagaccuucaugagaauggccuggggcggcagcuacaucgcccuggacagcggcaagggcaacugggacugcaucaugaccagcuaccaguaccugaucauccagaacaccaccugggaggaccacugccaguucagcagacccagccccaucggcuaccugggccugcugagccagagaaccagagacaucuacaucagcagaagacugcugggcaccuucaccuggacccugagcgacagcgagggcaacgagacccccggcggcuacugccugaccagauggaugcugaucgaggccgagcugaagugcuucggcaacaccgccguggccaagugcaacgagaagcacgacgaggaguucugcgacaugcugagacuguucgacuucugcaagcaggccaucagaagacugaagaccgaggcccaggccaacauccagcugaucaacaaggccgugaacgcccugaucaacgaccagcugaucaugaagaaccaccugagagacaucaugggcauccccuacugcaacuacagcaaguacugcuaccugaaccacaccgugaccggcaagaccagccugcccagaugcugccuggugagcaacggcagcuaccugaacgagacccacuucagcgacgacaucgagcagcaggccgacaacaugaucaccgagcugcugcagaaggaguacauggacagacagggcaagaccccccugggccugguggaccuguucguguucagcaccagcuucuaccugaucagcaucuuccugcaccuggugaagauccccacccacagacacgugaucggcaagcccugccccaagccccacagacugaaccacaugggcaucugcagcugcggccuguacaagcaccccggcgugcccgugaaguggaagagaugaggacuaguuauaagacugacuagcccgaugggccucccaacgggcccuccuccccuccuugcaccgagauuaaucaaaggcucuuuucagagccaccaaaaaaaaaaaaaaaaaaaaaaaaaaaaaaaaaaaaaaaaaaaaaaaaaaaaaaaaaaaaaaaaaaaaaaaaaaaaaaaaaaaaaaaaaaaaaaaaaaaaa

SEQ ID NO: 41434 - RNA, 1686 nt, Artificial Sequence
  mRNA product Design i-3 (hSL-A100) comprising derived and/or modified sequence from LASV(Nig08-A19;Clade III)__ADU56618__GPCmut12 (opt4)
aggagaaagcuuaccaugggccagaucgugaccuucuuccaggaggugccccacgugaucgaggaggugaugaacaucgugcugaucgcccugagcauccuggccauccugaagggccuguacaacaucgccaccugcggccugaucggccuggugaccuuccugcugcugagcggcagaagcugcagcaugaccuacaagggcguguacgagcugcagacccuggagcugaacaugaacacccugaacaugugcaugccccugagcugcaccaagaacaacagccaccacuacaucauggugggcaacgagaccggccuggagcugacccugaccaacaccagccugcugcaccacaaguucugcaaccugagcgacgcccacaagaagaaccuguacgaccacacccugaugagcaucaucagcaccuuccaccugagcauccccaacuucaaccaguacgaggccaugagcugcgacuucaacggcggcaagaucaccgugcaguacaaccugagccacagcuacgccaucgacgccgccaaccacugcggcaccguggccaacggcgugcugcagaccuucaugagaauggccuggggcggcagcuacaucgcccuggacagcggcagaggcaagugggacugcaucaugaccagcuaccaguaccugaucauccagaacaccaccugggaggaccacugccaguucagcagacccagccccaucggcuaccugggccugcugagccagagaaccagagacaucuacaucagcagaagacugcugggcaccuucaccuggacccugagcgacagcgagggcaacgagacccccggcggcuacugccugaccagauggaugcugaucgaggccgagcugaagugcuucggcaacaccgccguggccaagugcaacgagaagcacgacgaggaguucugcgacaugcugagacuguucgacuucugcaagcaggccaucagaagacugaaggccgaggcccagaugagcauccagcugaucaacaaggccgugaacgcccugaucaacgaccagcugaucaugaagaaccaccugagagacaucaugggcauccccuacugcaacuacagcaaguacugcuaccugaaccacaccagcaccggcagaaccagccugcccagaugcugccuggugagcaacggcagcuaccugaacgagacccacuucagcgacgacaucgagcagcaggccgacaacaugaucaccgagaugcugcagaaggaguaccuggacagacagggcaagaccccccugggccugguggaccuguucguguucagcaccagcuucuaccugaucagcaucuuccugcaccuggugaagauccccacccacagacacaucgugggcaagcccugccccaagccccacagacugaaccacaugggcaucugcagcugcggccuguacaagcagcccggcgugcccgugagauggaagagaugaggacuaguuauaagacugacuagcccgaugggccucccaacgggcccuccuccccuccuugcaccgagauuaaucaaaggcucuuuucagagccaccaaaaaaaaaaaaaaaaaaaaaaaaaaaaaaaaaaaaaaaaaaaaaaaaaaaaaaaaaaaaaaaaaaaaaaaaaaaaaaaaaaaaaaaaaaaaaaaaaaaaa

SEQ ID NO: 41435 - RNA, 1689 nt, Artificial Sequence
  mRNA product Design i-3 (hSL-A100) comprising derived and/or modified sequence from LASV(G1180-SLE-2010;Clade IV)__AIT17168__GPCmut12 (opt4)
aggagaaagcuuaccaugggccagaucgugaccuucuuccaggaggugccccacgugaucgaggaggugaugaacaucgugcugaucgcccugagcauccuggccgugcugaagggccuguacaacuucgccaccugcggccuggugggccugcugaccuuccugcugcugugcggcagaagcugcaccgccagcagauacaagggcguguacgagcugcagacccuggagcugaacauggagacccugaacaugugcaugccccugagcugcaccaagaacaacagccaccacuacaucauggugggcaacgagaccggccuggagcugacccugaccaacaccagcaucaucaaccacaaguucugcaaccugagcgacgcccacaagaagaaccuguacgaccacgcccugaugagcaucaucagcaccuuccaccugagcauccccaacuucaaccaguacgaggccaugagcugcgacuucaacggcggcaagaucagcgugcaguacaaccugagccacagcuacgccggcgacgccgccaaccacugcggcaccguggccaacggcgugcugcagaccuucaugagaauggccuggggcggcagcuacaucgcccuggacagcggccacggcagcugggacugcaucaugaccagcuaccaguaccugaucauccagaacaccaccugggaggaccacugccaguucagcagacccagccccaucggcuaccugggccugcugagccagagaaccagagacaucuacaucagcagaagacugcugggcaccuucaccuggacccugagcgacagcgagggcaaggacacccccggcggcuacugccugaccagauggaugcugaucgaggccgagcugaagugcuucggcaacaccgccguggccaagugcaacgagaagcacgacgaggaguucugcgacaugcugagacuguucgacuucugcaagcaggccauccagagacugaaggccgaggcccagaugagcauccagcugaucaacaaggccgugaacgcccugaucaacgaccagcugaucaugaagaaccaccugagagacaucaugggcauccccuacugcaacuacagcaaguacugcuaccugaaccacaccaccaccggcaagaccagccugcccaagugcugccuggugagcaacggcagcuaccugaacgagacccacuucagcgacgacaucgagcagcaggccgacaacaugaucaccgagaugcugcagaaggaguacauggagagacagggcaagaccccccugggccugguggaccuguucguguucagcaccagcuucuaccugaucagcaucuuccugcaccuggugaagauccccacccacagacacaucgugggcaagagcugccccaagccccacagacugaaccacaugggcaucugcagcugcggccuguacaagcagcccggcgugcccgugaaguggaagagaugaggacuaguuauaagacugacuagcccgaugggccucccaacgggcccuccuccccuccuugcaccgagauuaaucaaaggcucuuuucagagccaccaaaaaaaaaaaaaaaaaaaaaaaaaaaaaaaaaaaaaaaaaaaaaaaaaaaaaaaaaaaaaaaaaaaaaaaaaaaaaaaaaaaaaaaaaaaaaaaaaaaaa

SEQ ID NO: 41436 - RNA, 1689 nt, Artificial Sequence
  mRNA product Design i-3 (hSL-A100) comprising derived and/or modified sequence from LASV(G1442-SLE-2011;Clade IV)__AIT17180__GPCmut12 (opt4)
aggagaaagcuuaccaugggccagaucgugaccuucuuccaggaggugccccacgugaucgaggaggugaugaacaucgugcugaucgcccugagcauccuggccgugcugaagggccuguacaacguggccaccugcggccugaucggccuggugaccuuccugcugcugugcggcagaagcugcaccaccacccuguacaagggcguguacgagcugcagacccuggagcugaacauggagacccugaacaugugcaugccccugagcugcaccaagaacaacagccaccacuacaucagagugggcaacgagaccggccuggagcugacccugaccaacaccagcaucaucaaccacaaguucugcaaccugagcgacgcccacaagaagaaccuguacgaccacgcccugaugagcaucaucagcaccuuccaccugagcauccccaacuucaaccaguacgaggccaugagcugcgacuucaacggcggcaagaucagcgugcaguacaaccugagccacagcuacgccggcgacgccgccaaccacugcggcaccguggccaacggcgugcugcagaccuucaugagaauggccuggggcggcagcuacaucgcccuggacagcggcagaggcaacugggacugcaucaugaccagcuaccaguaccugaucauccagaacaccaccugggacgaccacugccaguucagcagacccagccccaucggcuaccugggccugcugagccagagaaccagagacguguacaucagcagaagacugcugggcaccuucaccuggacccugagcgacagcgagggcaaggacacccccggcggcuacugccugaccagauggaugcugaucgaggccgagcugaagugcuucggcaacaccgccguggccaagugcaacgagaagcacgacgaggaguucugcgacaugcugagacuguucgacuucugcaagcaggccauccagagacugaaggccgaggcccagaugagcauccagcugaucaacaaggccgugaacgcccugaucaacgaccagcugaucaugaagaaccaccugagagacaucaugggcauccccuacugcaacuacagcaaguacugcuaccugaacaacaccgccaccggcaagaccagccugcccaagugcugccugaucagcaacggcagcuaccugaacgagacccacuucagcgacgacaucgagcaggaggccgacaacaugaucaccgagaugcugcagaaggaguacauggagagacagggcaagaccccccugggccugguggaccuguucguguucagcaccagcuucuaccugaucagcaucuuccugcaccuggugaagauccccacccacagacacaucgugggcaagagcugccccaagccccacagacugaaccacaugggcaucugcagcugcggccuguacaagcagcccggcgugcccgugagauggaagagaugaggacuaguuauaagacugacuagcccgaugggccucccaacgggcccuccuccccuccuugcaccgagauuaaucaaaggcucuuuucagagccaccaaaaaaaaaaaaaaaaaaaaaaaaaaaaaaaaaaaaaaaaaaaaaaaaaaaaaaaaaaaaaaaaaaaaaaaaaaaaaaaaaaaaaaaaaaaaaaaaaaaaa

SEQ ID NO: 41437 - RNA, 1689 nt, Artificial Sequence
  mRNA product Design i-3 (hSL-A100) comprising derived and/or modified sequence from LASV(G3010-SLE-2013;Clade IV)__AIT17344__GPCmut12 (opt4)
aggagaaagcuuaccaugggccagaucgugaccuucuuccaggaggugccccacgugaucgaggaggugaugaacaucgugcugaucgcccugagcauccuggccgugcugaagggccuguacaacuucgccaccugcggccuggugggccuggugaccuuccugcugcugugcggcagaagcugcaccaccagccuguacaagggcguguacgagcugcagacccuggagcugaacauggagacccugaacaugugcaugccccugagcugcaccaagaacaacagccaccacuacaucauggugggcaacgagaccggccuggagcugacccugaccaacaccagcaucaucaaccacaaguucugcaaccugagcgacgcccacaagaagaaccuguacaaccacgcccugaugagcaucaucagcaccuuccaccugagcauccccaacuucaaccaguacgaggccaugagcugcgacuucaacggcggcaagaucagcgugcaguacaaccugagccacagcuacgccggcgacgccgccagccacugcggcaccguggccaacggcgugcugcagaccuucaugagaauggccuggggcggcagcuacaucgcccuggacagcggcuacggcaagugggacugcaucaugaccagcuaccaguaccugaucauccagaacaccaccugggaggaccacugccaguucagcagacccagccccaucggcuaccugggccugcugagccagagaaccagagacaucuacaucagcagaagacugcugggcaccuucaccuggacccugagcgacagcgagggcaaggacacccccggcggcuacugccugaccagauggaugcugaucgaggccgagcugaagugcuucggcaacaccgccguggccaagugcaacgagaagcacgacgaggaguucugcgacaugcugagacuguucgacuucugcaagcaggccauccagagacugaagaccgaggcccagaugagcauccagcugaucaacaaggccgugaacgcccugaucaacgaccagcugaucaugaagaaccaccugagagacaucaugggcauccccuacugcaacuacagcaaguacugcuaccugaaccacaccaccaccggcaagaccagccugcccaagugcugccuggugagcaacggcagcuaccugaacgagacccacuucagcgacgacaucgagcagcaggccgacaacaugaucaccgagaugcugcagaaggaguacauggagagacagggcaagaccccccugggccugguggaccuguucguguucagcaccagcuucuaccugaucagcaucuuccugcaccuggugaagauccccacccacagacacaucgugggcaagagcugccccaagccccacagacugaaccacaugggcaucugcagcugcggccuguacaagcagcccggcgugcccgugagauggaagagaugaggacuaguuauaagacugacuagcccgaugggccucccaacgggcccuccuccccuccuugcaccgagauuaaucaaaggcucuuuucagagccaccaaaaaaaaaaaaaaaaaaaaaaaaaaaaaaaaaaaaaaaaaaaaaaaaaaaaaaaaaaaaaaaaaaaaaaaaaaaaaaaaaaaaaaaaaaaaaaaaaaaaa

SEQ ID NO: 41438 - RNA, 1689 nt, Artificial Sequence
  mRNA product Design i-3 (hSL-A100) comprising derived and/or modified sequence from LASV(G502-SLE-2009;Clade IV)__AIT17126__GPCmut12 (opt4)
aggagaaagcuuaccaugggccagaucgugaccuucuuccaggaggugccccacgugaucgaggaggugaugaacaucgugcugaucgcccugagcauccuggccgugcugaagggccuguacaacuucgccaccugcggccuggugggccugcugaccuuccugcugcugugcggcagaagcugcaccaccggccuguacaagggcguguacgagcugcagacccuggagcugaacauggagacccugaacaugugcaugccccugagcugcaccaagaacaacagccaccacuacaucauggugggcaacgagaccggccuggagcugacccugaccaacaccagcaucaucaaccacaaguucugcaaccugagcgacgcccacaagaagaaccuguacgaccacgcccugaugagcaucaucagcaccuuccaccugagcauccccaacuucaaccaguacgaggccaugagcugcgacuucaacggcggcaagaucagcgugcaguacaaccugagccacagcuacgccggcgacgccgccgaccacugcggcaccguggccaacggcgugcugcagaccuucaugagaauggccuggggcggcagcuacaucgcccuggacagcggcagaggcagaugggacugcaucaugaccagcuaccaguaccugaucauccagaacaccaccugggaggaccacugccaguucagcagacccagccccaucggcuaccugggccugcugagccagagaaccagagacaucuacaucagcagaagacugcugggcaccuucaccuggacccugagcgacagcgagggcaaggacacccccggcggcuacugccugaccagauggaugcugaucgaggccgagcugaagugcuucggcaacaccgccguggccaagugcaacgagaagcacgacgaggaguucugcgacaugcugagacuguucgacuucugcaagcaggccauccagagacugaaggccgaggcccagaugagcauccagcugaucaacaaggccgugaacgcccugaucaacgaccagcuggugaugaagaaccaccugagagacaucaugggcauccccuacugcaacuacagcagauacugcuaccugaaccacaccaccaccggcagaaccagccugcccaagugcugccuggugagcaacggcagcuaccugaacgagacccacuucagcgacgacaucgagcagcaggccgacaacaugaucaccgagaugcugcagaaggaguacauggagagacagggcaagaccccccugggccugguggaccuguucguguucagcaccagcuucuaccugaucagcaucuuccugcaccuggugaagauccccacccacagacacaucgugggcaagagcugccccaagccccacagacugaaccacaugggcaucugcagcugcggccuguacaagcagcccggcgugcccgugaaguggaagagaugaggacuaguuauaagacugacuagcccgaugggccucccaacgggcccuccuccccuccuugcaccgagauuaaucaaaggcucuuuucagagccaccaaaaaaaaaaaaaaaaaaaaaaaaaaaaaaaaaaaaaaaaaaaaaaaaaaaaaaaaaaaaaaaaaaaaaaaaaaaaaaaaaaaaaaaaaaaaaaaaaaaaa

SEQ ID NO: 41439 - RNA, 1689 nt, Artificial Sequence
  mRNA product Design i-3 (hSL-A100) comprising derived and/or modified sequence from LASV(G733-SLE-2010;Clade IV)__AIT17154__GPCmut12 (opt4)
aggagaaagcuuaccaugggccagaucgugaccuucuuccaggaggugccccacgugaucgaggaggugaugaacaucgugcugaucgcccugagcauccuggccgugcugaagggccuguacaacuucgccaccugcggcaucgugggccuggugagcuuccugcugcugugcggcagaagcugcaccaccagccuguacaagggcguguacgagcugcagacccuggagcugaacauggagacccugaacaugugcaugccccugagcugcaccaagaacaacagccaccacuacaucauggugggcaacgagaccggccuggagcugacccugaccaacaccagcaucaucaaccacaaguucugcaaccugagcgacgcccacaagaagaaccuguacgaccacgcccugaugagcaucaucagcaccuuccaccugagcauccccaacuucaaccaguacgaggccaugagcugcgacuucaacggcggcaagaucagcgugcaguacaaccugagccacagcuacgccggcgacgccgccaaccacugcggcaccaucgccaacggcgugcugcagaccuucaugagaauggccuggggcggcagcuacaucgcccuggacagcggcagagacagaugggacugcaucaugaccagcuaccaguaccugaucauccagaacaccaccugggaggaccacugccaguucagcagacccagccccaucggcuaccugggccugcugagccagagaaccagagacaucuacaucagcagaagacugcugggcaccuucaccuggacccugagcgacagcgagggcaaggacacccccggcggcuacugccugaccagauggaugcugaucgaggccgagcugaagugcuucggcaacaccgccguggccaagugcaacgagaagcacgacgaggaguucugcgacaugcugagacuguucgacuucugcaagcaggccauccagagacugaaggccgaggcccagaugagcauccagcugaucaacaaggccgugaacgcccugaucaacgaccagcugaucaugaagaaccaccugagagacaucaugggcauccccuacugcaacuacagcaaguacugcuaccugaaccacaccaccaccggcaagaccagccugcccaagugcugccuggugagcaacggcagcuaccugaacgagacccacuucagcgacgacaucgagcagcaggccgacaacaugaucaccgagaugcugcagaaggaguacauggagagacagggcaagaccccccugggccugguggaccuguucguguucagcaccagcuucuaccugaucagcaucuuccugcaccuggugaagauccccacccacagacacguggugggcaagagcugccccaagccccacagacugaaccacaugggcaucugcagcugcggccuguacggccagcccggcgugcccgugaaguggaagagaugaggacuaguuauaagacugacuagcccgaugggccucccaacgggcccuccuccccuccuugcaccgagauuaaucaaaggcucuuuucagagccaccaaaaaaaaaaaaaaaaaaaaaaaaaaaaaaaaaaaaaaaaaaaaaaaaaaaaaaaaaaaaaaaaaaaaaaaaaaaaaaaaaaaaaaaaaaaaaaaaaaaaa

SEQ ID NO: 41440 - RNA, 1689 nt, Artificial Sequence
  mRNA product Design i-3 (hSL-A100) comprising derived and/or modified sequence from MOPV/LASV reassortant(IGS-1;Clade IV)__AFY05576__GPCmut12 (opt4)
aggagaaagcuuaccaugggccagaucgugaccuucuuccaggaggugccccacgugaucgaggaggugaugaacaucgugcugaucgcccugagcgugcuggccgugcugaagggccuguacaacuucgccaccugcggccuggugggccuggugaccuuccugcugcugugcggcagaagcugcaccaccagccuguacaagggcguguacgagcugcagacccuggagcugaacauggagacccugaacaugugcaugccccugagcugcaccaagaacaacagccaccacuacaucauggugggcaacgagaccggccuggagcugacccugaccaacaccagcaucaucaaccacaaguucugcaaccugagcgacgcccacaagaagaaccuguacgaccacgcccugaugagcaucaucagcaccuuccaccugagcauccccaacuucaaccaguacgaggccaugagcugcgacuucaacggcggcaagaucagcgugcaguacaaccugagccacagcuacgccggcgacgccgccaaccacugcggcaccguggccaacggcgugcugcagaccuucaugagaauggccuggggcggcagcuacaucgcccuggacagcggcagaggcaacugggacugcaucaugaccagcuaccaguaccugaucauccagaacaccaccugggaggaccacugccaguucagcagacccagccccaucggcuaccugggccugcugagccagagaaccagagacaucuacaucagcagaagacugcugggcaccuucaccuggacccugagcgacagcgagggcgaggacacccccggcggcuacugccugaccagauggaugcugaucgaggccgagcugaagugcuucggcaacaccgccguggccaagugcaacgagaagcacgacgaggaguucugcgacaugcugagacuguucgacuucugcaagcaggccauccagagacugaaggccgaggcccagaugagcauccagcugaucaacaaggccgugaacgcccugaucaacgaccagcugaucaugaagaaccaccugagagacaucaugggcauccccuacugcaacuacagcaaguacugcuaccugaaccacaccaccaccggcagaaccagccugcccaagugcugccuggugagcaacggcagcuaccugaacgagacccacuucagcgacgacaucgagcagcaggccgacaacaugaucaccgagaugcugcagaaggaguacauggagagacagggcaagaccccccugggccugguggaccuguucguguucagcaccagcuucuaccugaucagcaucuuccugcaccuggugaagauccccacccacagacacaucgugggcaagagcugccccaagccccacagacugaaccacaugggcaucugcagcugcggccuguacaagcagcccggcgugcccgugaaguggaagagaugaggacuaguuauaagacugacuagcccgaugggccucccaacgggcccuccuccccuccuugcaccgagauuaaucaaaggcucuuuucagagccaccaaaaaaaaaaaaaaaaaaaaaaaaaaaaaaaaaaaaaaaaaaaaaaaaaaaaaaaaaaaaaaaaaaaaaaaaaaaaaaaaaaaaaaaaaaaaaaaaaaaaa

SEQ ID NO: 41441 - RNA, 1689 nt, Artificial Sequence
  mRNA product Design i-3 (hSL-A100) comprising derived and/or modified sequence from LASV(LM765-SLE-2012;Clade IV)__AIT17814__GPCmut12 (opt4)
aggagaaagcuuaccaugggccagaucgugaccuucuuccaggaggugccccacgugaucgaggaggugaugaacaucgugcugaucgcccugagcauccuggccgugcugaagggccuguacaacuucgccaccugcggccuggugggccuggugaccuuccugcugcugugcggcagaagcugcaccaccagccuguacaagggcguguacgagcugcagacccuggagcugaacauggagacccugaacaugugcaugccccugagcugcaccaagaacaacagccaccacuacaucauggugggcaacgagaccggccuggagcugacccugaccaacaccagcaucaucgaccacaaguucugcaaccugagcgacgcccacagaaagaaccuguacgaccacgcccugaugagcaucaucagcaccuuccaccugagcauccccaacuucaaccaguacgaggccaugagcugcgacuucaacggcggcaagaucagcgugcaguacaaccugagccacagcuacgccaaggacgccgccgaccacugcggcaccguggccaacggcgugcugcagaccuucaugagaauggccuggggcggcagcuacaucgcccuggacagcggcagaggcagaugggacugcaucaugaccagcuaccaguaccugaucauccagaacaccaccugggaggaccacugccaguucagcagacccagccccaucggcuaccugggccugcugagccagagaaccagagacaucuacaucagcagaagacugcugggcaccuucaccuggacccugagcgacagcgagggcaaggacacccccggcggcuacugccugaccagauggaugcugaucgaggccgagcugaagugcuucggcaacaccgccguggccaagugcaacgagaagcacgacgaggaguucugcgacaugcugagacuguucgacuucugcaagcaggccauccagagacugaaggccgaggcccagaugagcauccagcugaucaacaaggccgugaacgcccugaucaacgaccagcugaucaugaagaaccaccugagagacaucaugggcauccccuacugcaacuacagcaaguacugcuaccugaaccacaccaccaccggcaagaccagccugcccaagugcugccuggugagcaacggcagcuaccugaacgagacccacuucagcgacgacaucgagcagcaggccgacaacaugaucaccgagaugcugcagaaggaguacauggagagacagggcaagaccccccugggccugguggaccuguucguguucagcaccagcuucuaccugaucagcaucuuccugcaccuggugaagauccccacccacagacacaucgugggcaagcccugccccaagccccacagacugaaccacaugggcaucugcagcugcggccuguacaagcagcccggcgugcccgugaaguggaagagaugaggacuaguuauaagacugacuagcccgaugggccucccaacgggcccuccuccccuccuugcaccgagauuaaucaaaggcucuuuucagagccaccaaaaaaaaaaaaaaaaaaaaaaaaaaaaaaaaaaaaaaaaaaaaaaaaaaaaaaaaaaaaaaaaaaaaaaaaaaaaaaaaaaaaaaaaaaaaaaaaaaaaa

SEQ ID NO: 41442 - RNA, 1689 nt, Artificial Sequence
  mRNA product Design i-3 (hSL-A100) comprising derived and/or modified sequence from LASV(LM776-SLE-2012;Clade IV)__AIT17824__GPCmut12 (opt4)
aggagaaagcuuaccaugggccagaucgugaccuucuuccaggaggugccccacgugaucgaggaggugaugaacaucgugcugaucgcccugagcauccuggccgugcugaagggccuguacaacuucgccaccugcggccuggugggccuggugaccuuccugcugcugugcggcagaagcugcaccaccagcguguacaagggcguguacgagcugcagacccuggagcugaacauggagacccugaacaugugcaugccccugagcugcaccaagaacaacagccaccacuacaucauggugggcaacgagaccggccuggagcugacccugaccaacaccagcaucaucaaccacaaguucugcaaccugagcgacgcccacaagaagaaccuguacgaccacgcccugaugagcaucaucagcaccuuccaccugagcauccccaacuucaaccaguacgaggccaugagcugcgacuucaacggcggcaagaucagcgugcaguacaaccugagccacagcuacgccggcgacgccgccaaccacugcggcaccguggccaacggcgugcugcagaccuucaugagaauggccuggggcggcagcuacaucgcccuggacagcggccacggcaagugggacugcaucaugaccagcuaccaguaccugaucauccagaacaccaccugggaggaccacugccaguucagcagacccagccccaucggcuaccugggccugcugagccagagaaccagagacaucuacaucagcagaagacugcugggcaccuucaccuggacccugagcgacagcgagggcaaggacacccccggcggcuacugccugaccagauggaugcugaucgaggccgagcugaagugcuucggcaacaccgccguggccaagugcaacgagaagcacgacgaggaguucugcgacaugcugagacuguucgacuucugcaagcaggccauccagagacugaaggccgaggcccagaugagcauccagcugaucaacaaggccgugaacgcccugaucaacgaccagcugaucaugaagaaccaccugagagacaucaugggcauccccuacugcaacuacagcaaguacugcuaccugaaccacaccaccaccggcaagaccagccugcccaagugcugccuggugagcaacggcagcuaccugaacgagacccacuucagcgacgacaucgagcagcaggccgacaacaugaucaccgagaugcugcagaaggaguacauggagagacagggcaagaccccccugggccugguggaccuguucguguucagcaccagcuucuaccugaucagcaucuuccugcaccuggugaagauccccacccacagacacaucgugggcaagagcugccccaagccccacagacugaaccacaugggcaucugcagcugcggccuguacaagcagcccggcgugcccgugagauggaagagaugaggacuaguuauaagacugacuagcccgaugggccucccaacgggcccuccuccccuccuugcaccgagauuaaucaaaggcucuuuucagagccaccaaaaaaaaaaaaaaaaaaaaaaaaaaaaaaaaaaaaaaaaaaaaaaaaaaaaaaaaaaaaaaaaaaaaaaaaaaaaaaaaaaaaaaaaaaaaaaaaaaaaa

SEQ ID NO: 41443 - RNA, 1689 nt, Artificial Sequence
  mRNA product Design i-3 (hSL-A100) comprising derived and/or modified sequence from LASV(Mad39;Clade IV)__ANH09722__GPCmut12 (opt4)
aggagaaagcuuaccaugggccagaucgugaccuucuuccaggaggugccccacgugaucgaggaggugaugaacaucgugcugaucgcccugagcauccuggccgugcugaagggccuguacaacguggccaccugcggccugaucggccuggugaccuuccugcugcugugcggcagaagcugcaccaccacccuguacaagggcguguacgagcugcaggcccuggagcugaacauggagacccugaacaugugcaugccccugagcugcaccaagaacaacagccaccacuacaucagagugggcaacgagaccggccuggagcugacccugaccaacaccagccugaucaaccacaaguucugcaaccugagcgacgcccacaagaagaaccuguacgaccacgcccugaugagcaucaucagcaccuuccaccugagcauccccaacuucaaccaguacgaggccaugagcugcgacuucaacgacggcaagaucagcgugcaguacaaccugagccacaccuacgccggcgacaccgccaaccacugcggcaccguggccaacggcgugcugcagaccuucaugagaauggccuggggcggcagcuacaucgcccuggacagcggcagaggcggcugggacugcaucaugaccagcuaccaguaccugaucauccagaacaccaccugggaggaccacugccaguucagcagacccagccccaucggcuaccugggccugcugagccagagaaccagagacaucuacaucagcagaagacugcugggcaccuucaccuggacccugagcgacagcgagggcaaggacacccccggcggcuacugccugaccagauggaugcugaucgaggccgagcugaagugcuucggcaacaccgccguggccaagugcaacgagaagcacgacgaggaguucugcgacaugcugagacuguucgacuucugcaagcaggccauccagagacugaaggccgaggcccagaugagcauccagcugaucaacaaggccgugaacgcccugaucaacgaccagcugaucaugaagaaccaccugagagacaucaugggcauccccuacugcaacuacagcaaguacugcuaccugaaccacaccgugaccggcaagaccagccugcccaagugcugccuggugagcaacggcagcuaccugaacgagacccacuucagcgacgacaucgagcagcaggccgacaacaugaucaccgagaugcugcagaaggaguacauggagagacagggcaagaccccccugggccugguggaccuguucguguucagcaccagcuucuaccugaucagcaucuuccugcaccuggugaagauccccacccacagacacguggugggcaagcccugccccaagccccacagacugaaccacaugggcaucugcagcugcggcuucuacaagcagcccggcgugcccgugagauggaagagaugaggacuaguuauaagacugacuagcccgaugggccucccaacgggcccuccuccccuccuugcaccgagauuaaucaaaggcucuuuucagagccaccaaaaaaaaaaaaaaaaaaaaaaaaaaaaaaaaaaaaaaaaaaaaaaaaaaaaaaaaaaaaaaaaaaaaaaaaaaaaaaaaaaaaaaaaaaaaaaaaaaaaa

SEQ ID NO: 41444 - RNA, 1689 nt, Artificial Sequence
  mRNA product Design i-3 (hSL-A100) comprising derived and/or modified sequence from LASV(Z0947-SLE-2011;Clade IV)__AIT17840__GPCmut12 (opt4)
aggagaaagcuuaccaugggccagaucgugaccuucuuccaggaggugccccacgugaucgaggaggugaugaacaucgugcugaucgcccugagcauccuggccgugcugaagggccuguacaacuucgccaccugcggccuggugggccuggugaccuuccugcugcugugcggcagaagcugcaccaucagccuguacaagggcguguacgagcugcagacccuggagcugaacauggagacccugaacaugugcaugccccugagcugcaccaagaacaacagccaccacuacaucauggugggcaacgagaccggccuggagcugacccugaccaacaccagcaucaucaaccacaaguucugcaaccugagcgacgcccacaagaagaaccuguacgaccacgcccugaugagcaucaucagcaccuuccaccugagcauccccaacuucaaccaguacgaggccaugagcugcgacuucaacggcggcaagaucagcgugcaguacaaccugagccacagcuacgccggcgacgccgccaaccacugcggcaccguggccaacggcgugcugcagaccuucaugagaauggccuggggcggcagcuacaucgcccuggacagcggcagagacagaugggacugcaucaugaccagcuaccaguaccugaucauccagaacaccaccugggaggaccacugccaguucagcagacccagccccaucggcuaccugggccugcugagccagagaaccagagacaucuacaucagcagaagacugcugggcaccuucaccuggacccugagcgacagcgagggcaaggacacccccggcggcuacugccugaccagauggaugcugaucgaggccgagcugaagugcuucggcaacaccgccguggccaagugcaacgagaagcacgacgaggaguucugcgacaugcugagacuguucgacuucugcaagcaggccauccagagacugaaggccgaggcccagaugagcauccagcugaucaacaaggccgugaacgcccugaucaacgaccagcugaucaugaagaaccaccugagagacaucaugggcauccccuacugcaacuacagcaaguacugcuaccugaaccacaccaccaccggcaagaccagccugcccaagugcugccuggugagcaacggcagcuaccugaacgagacccacuucagcgacgacaucgagcagcaggccgacaacaugaucaccgagaugcugcagaaggaguacauggagagacagggcaagaccccccugggccugguggaccuguucguguucagcaccagcuucuaccugaucagcaucuuccugcaccuggugaagauccccacccacagacacaucgugggcaagcccugccccaagccccacagacugaaccacaugggcaucugcagcugcggccuguacaagcagcccggcgugcccgugaaguggaagagaugaggacuaguuauaagacugacuagcccgaugggccucccaacgggcccuccuccccuccuugcaccgagauuaaucaaaggcucuuuucagagccaccaaaaaaaaaaaaaaaaaaaaaaaaaaaaaaaaaaaaaaaaaaaaaaaaaaaaaaaaaaaaaaaaaaaaaaaaaaaaaaaaaaaaaaaaaaaaaaaaaaaaa

SEQ ID NO: 41445 - RNA, 1689 nt, Artificial Sequence
  mRNA product Design i-3 (hSL-A100) comprising derived and/or modified sequence from LASV(Josiah;Clade IV)__NP_694870__GPCmut12 (opt5)
aggagaaagcuuaccaugggccagaucgugaccuucuuucaagaggucccccacguuauugaagaggugaugaacaucgugcugauugcccucagcguccuggcugugcuuaaggggcuguacaauuucgccacaugcggacucguuggccuggugacguuucuucugcucugugggagauccugcaccacaucucuguauaaaggagucuacgaacugcagacccucgagcugaacauggaaacacuuaauauguguaugccucugagcugcaccaagaacaauucccaucacuauaucauggugggcaacgagacagggcucgagcugacccuuacgaauaccucuauuaucaaccauaaauucuguaaucugagcgacgcgcacaagaaaaaccucuacgaucaugcucugauguccaucauuucuacauuucaccugagcaucccgaauuucaaccaguaugaagccauguccugcgacuuuaauggaggcaagauuagcguucaguacaaccucucucacuccuaugccggcgaugcugccaaucauugugggaccguggcuaacggaguccugcaaacauucaugcggauggccuggggcgggagcuacaucgcgcuugacucuggacgcggcaacugggauugcauuaugaccuccuaccaguaucugaucauucagaauacgacaugggaggaccacugucaguuuagcagacccucuccuaucggguaccucggacugcuuucccaacggacccgcgauaucuauauuagcagacggcugcucggcacauucaccuggacccuguccgacucugaaggcaaggauacacccgggggauacugccugacgcgcuggaugcucaucgaggccgagcugaaauguuuuggcaacaccgcuguggccaagugcaaugaaaaacaugacgaggaguucugcgauaugcuuagacuguuugacuucuguaagcaggcuauucagcggcucaaagccgaagcgcagaugagcauccaacugauuaacaaggccgugaaugcucuuaucaacgaucagcugaucaugaagaaucaccuccgcgacauuauggggaucccuuauugcaacuacuccaaauauuguuaccugaaucacacaaccacaggaagaaccagccugcccaagugcugucucgucucuaacggcuccuaccugaaugaaacgcauuucagcgacgauauugagcagcaagccgacaacaugaucacagagaugcuucagaaagaauauauggagcggcaggggaagaccccucugggacucguugaucuguuuguguucucuaccagcuuuuaccugauuuccaucuuccuucaccucgugaaaaucccgacacaucgccacauugucggcaagucuugccccaaaccucauagacugaaucacaugggcaucuguagcugcgggcuguauaagcagcccggagugccuguuaaguggaaacggugaggacuaguuauaagacugacuagcccgaugggccucccaacgggcccuccuccccuccuugcaccgagauuaaucaaaggcucuuuucagagccaccaaaaaaaaaaaaaaaaaaaaaaaaaaaaaaaaaaaaaaaaaaaaaaaaaaaaaaaaaaaaaaaaaaaaaaaaaaaaaaaaaaaaaaaaaaaaaaaaaaaaa

SEQ ID NO: 41446 - RNA, 1686 nt, Artificial Sequence
  mRNA product Design i-3 (hSL-A100) comprising derived and/or modified sequence from LASV(LP;Clade I)__AAF86701__GPCmut12 (opt5)
aggagaaagcuuaccaugggccagaucauuaccuucuuucaagaggugccccacgucaucgaagagguuaugaacauugugcugaucgcccucagccugcuugcuauucugaaggggcucuacaauaucgccacaugcggaaucauuggccugguggcguuccuuuuucugugugggaaauccugcucucucacgcugaagggaggcuaugaacugcagacccucgagcugaacauggaaacacuuaauauguguaugccucugagcugcaccaaaaacuccucucaucacuacaucagagucgggaaugagacaggacucgagcugacccuuacaaacaccagcauuaucaaucauaaguucuguaaccuguccgacgcucacaaaaagaaucucuaugaucaugcccugaugucuauuaucagcacguuucaccuguccauuccgaacuucaaucaguacgaagccaugagcugcgacuuuaacggcggcaagaucucugugcaguauaaucucucccacagcuacgcuggggaugccgcugagcauuguggaaccguugccaacggcgugcugcaaacauucaugcggauggcguggggagggcgcuauaucgcccuugacucuggcaaagggaauugggauugcauuaugaccuccuaccaguaccugaucauucagaacacaaccugggaagaccacugucaguuuagcagacccucuccuaucggauaucucggccugcuuucccaacggacgcgcgauauuuacaucagcagacggcugcucggcacauucaccuggacacuguccgacucugaggggaacgagacccccggaggcuauugccugacccgcuggaugcucaucgaagcugagcugaaguguuuugggaauacagccgucgcuaaaugcaacgaaaagcaugaugaggaguucugcgacaugcuuagacuguuugauuucuguaaacaggccauucggcgccucaaggcggaagcccagaugagcauccagcugauuaauaaggcugugaacgcccuuaucaaugaccaacugauuaugaaaaaccaccucagagauaucaugggaaucccuuacugcaauuauuccaaguacuguuaucugaaccacacgagcucuggccggaccucccugcccaaaugcugucucauuagcaaugggucuuaccugaacgagacacaguucagcgacgacaucgaacagcaagcugauaauaugauuaccgagaugcuucagaaggaauacaucgagcgccagggaaaaacaccucugggccucguugacauuuuuaucuucuccaccucuuuuuaucugauuagcaucuuccugcaucuuaucaagauuccgacgcacagacauaucgugggcaaacccugcccuaagccccaccggcucaaccauaugggggucuguuccugcggacuguacaagcacccuggcgugcccacaaaauggaagcgcugaggacuaguuauaagacugacuagcccgaugggccucccaacgggcccuccuccccuccuugcaccgagauuaaucaaaggcucuuuucagagccaccaaaaaaaaaaaaaaaaaaaaaaaaaaaaaaaaaaaaaaaaaaaaaaaaaaaaaaaaaaaaaaaaaaaaaaaaaaaaaaaaaaaaaaaaaaaaaaaaaaaaa

SEQ ID NO: 41447 - RNA, 1686 nt, Artificial Sequence
  mRNA product Design i-3 (hSL-A100) comprising derived and/or modified sequence from LASV(803213;Clade II)__AAF86703__GPCmut12 (opt5)
aggagaaagcuuaccaugggccagaucauuaccuucuuucaagaggugccccacgucaucgaagagguuaugaacauugugcugaucgcccucagccugcuugcuauucugaaggggaucuacaauguggccacaugcggacucuucggccugaucuccuuucuucugcucugugggagaucuugcagcgucacguauaaaggaguguacgaacugcagacccuggagcucaacauggcgaaucugaacauguguaugccucuuuccugcacaaagaauaacucucaucacuauauuaugguuggcaaugaaaccgggcuggagcucacacugaccaacacaagcaucauuaaucauaaauucuguaaccuuuccgacgcucacaagaaaaaucuguacgaucaugcccucaugucuaucauuagcaccuuucaccuguccaucccgaacuucaaucaguaugaggccaugagcugcgacuuuaacggaggcaagauuucugugcaguacaaucugucccacagcuucgcugucgaugccgcuaaccauuguggcacgaucgccaacggggugcuccaaaccuuuaugcggauggcguggggaggcucuuauaucgcccuggacuccgggaagggaaauugggauugcauuaugacaagcuaccaguaccuuaucauucagaacaccacaugggaagaccacugucaguucucucgccccuccccuaucggcuaucuggggcuccugagccaaagaacccgggauauuuacaucucccgcagacuucugggaacguuuacauggacccucucugacagcgagggcaaugaagcucccggcggguauugccugacacgguggaugcugaucgaggccgagcucaaauguuucggaaacaccgcuguugccaagugcaaugaaaaacaugaugaggaauuuugcgacaugcugcgccuuuucgauuucuguaagcaggcgauuaaaagacugaagaccgaggcccagauguccauccagcucauuaacaaggcugugaaugcccugaucaacgaccaacuuauuaugaaaaaucaucugcgggauaucaugggcaucccuuacugcaacuauagccgcuacuguuaucucaaucacacagucacggggaagaccucucugcccagaugcugucugguguccaacggaagcuaccucaaugaaacacacuuuucugacgacauugagcagcaggcugauaacaugaucaccgagaugcugcaaaaagaauacauggaccggcagggcaagacaccucuugggcugguggaucucuucgucuuuagcaccuccuucuaucugauuucuaucuuucugcaccuuguuaaaauuccgacgcaucgccacaucgugggaaagcccugcccuaaaccccauagacucaaucacaugggcauuuguagcugcggccuguacaagcacccuggggugcccgucaaguggaaacggugaggacuaguuauaagacugacuagcccgaugggccucccaacgggcccuccuccccuccuugcaccgagauuaaucaaaggcucuuuucagagccaccaaaaaaaaaaaaaaaaaaaaaaaaaaaaaaaaaaaaaaaaaaaaaaaaaaaaaaaaaaaaaaaaaaaaaaaaaaaaaaaaaaaaaaaaaaaaaaaaaaaaa

SEQ ID NO: 41448 - RNA, 1686 nt, Artificial Sequence
  mRNA product Design i-3 (hSL-A100) comprising derived and/or modified sequence from LASV(GA391;Clade III)__CAA36645__GPCmut12 (opt5)
aggagaaagcuuaccaugggccagaucgugaccuucuuucaagaggucccccacguuauugaagaggugaugaacaucgugcugauugcccucagcauccuggcuauucuuaaggggcuguacaaugucgccacaugcggacucaucggccuggugacguuccuucugcucuccgggagaucuuguagccugaucuauaaaggaaccuacgaacugcagacacucgagcugaacauggaaacccuuaauaugugcaugccucuguccuguacaaagaacaauucucaucacuauauucggguuggcaacgagaccgggcucgagcugacacuuaccaauacgagcauccugaaccauaaauuuugcaaucucuccgacgcgcacaagcgcaaccuguacgaucauucucugaugagcauuaucuccaccuuccaccucagcauuccgaauuuuaaccaguaugaagcuaugucuugugacuucaauggaggcaaaaucacagugcaguacaaccugucccacagcuuugccgucgaugccgcuggccauugcgggacccuugccaauggagugcugcaaacauucaugagaauggcuuggggcgggucuuauauugcccucgacuccggacggggcaacugggauuguaucaugaccagcuaccaguaccugaucauucagaacacgacaugggacgaucacugccaguuuucucgccccuccccuaucggguaucuuggacugcucagccaaagaacccgggacauuuacaucucccgcagacugcugggcacauucaccuggacccucucugauagcgagggcaaugaaacacccgggggauauugucugacgcgguggaugcuuauugaggcggagcugaagugcuuuggcaacaccgccguugcuaaguguaaugaaaaacaugacgaggaguucugcgauaugcuccgccuguuugacuucugcaagcaggccaucagacggcuuaaaacagaagcucagauguccauccagcugauuaacaaggccgugaaugcgcucaucaacgaucaacugauuaugaaaaaucaucugcgcgacaucauggggauuccuuacuguaacuauagcagauacugcuaucucaaucacaccucuacaggaaagaccucccugccccgguguugccuuaucagcaacggcucuuaccugaaugaaacgaaguucagcgacgauaucgagcagcaggccgacaacaugauuacagagaugcuccaaaaagaauacaucgaucgccaggggaagaccccucugggacuggucgaccuuuuuguguucuccaccucuuuuuaucucauuagcaucuuccugcaccuggugaaaauuccgacacacagacauaucgucggcaagcccuguccuaaaccccaccggcucaaucauaugggcauuugcuccugugggcuguacaagcagccuggaguucccgugagauggaaacgcugaggacuaguuauaagacugacuagcccgaugggccucccaacgggcccuccuccccuccuugcaccgagauuaaucaaaggcucuuuucagagccaccaaaaaaaaaaaaaaaaaaaaaaaaaaaaaaaaaaaaaaaaaaaaaaaaaaaaaaaaaaaaaaaaaaaaaaaaaaaaaaaaaaaaaaaaaaaaaaaaaaaaa

SEQ ID NO: 41449 - RNA, 1689 nt, Artificial Sequence
  mRNA product Design i-3 (hSL-A100) comprising derived and/or modified sequence from LASV(AV;Clade V)__CCA30314__GPCmut12 (opt5)
aggagaaagcuuaccaugggccagaucgugaccuucuuucaagaggucccccacguuauugaagaggugaugaacaucgugcugauugcccucagcauccuggcuguccuuaaggggcuguacaauauugccacaugcggacucaucggccugaucacguuccuucugcucugugggagauccugcucuagcaaccuguauaaaggaguguacgaacugcagucccucgaccugaauauggagacccuuaacauguguaugccucugucuugcacaaagaauaacagccaucacuauauucggguuggcaaugauaccgggcucgaacugacacuuaccaacacauccauccugaaucauaaauuuuguaaccucucugacgcgcacaagaaagaucuguacgaccaugcucugaugagcauuaucuccaccuuccaccucagcauuccgaauuuuaaccaguaugaggccaugucuugcgauuucaauggaggcaagaucuccgugcaguacaaccugagccacucuuaugccauugacgcugccaaucauuguggcacggucgcuaacgggauccuucaaaccuuuaugcgcauggccuggggaggcuccuacaucgcgcuggauagcgggagaggaaacugggacugcauuaugacaucuuaccaguaucucaucauucagaauaccacaugggagaaccacugucaguucucccggcccagcccuaucggcuaccuggggcuucugucccaacgcaccagagauauuuauaucucucggcgccuccugggaacguuuacauggacccugagcgacuccgaaggcaaugccacacccggcggguacugccucaccagauggaugcugaucgaggcugaacuuaaguguuucggaaacaccgccguggcuaaaugcaaugagaagcaugaugaggaauuuugcgacaugcugcgccucuucgauuuuuguaaacaggccauuagccggcugaagucugaggcgcagauguccauccagcuuauuaacaaagccguuaaugcucugaucaacgaccaacucauuaugaagaaucaccugagagacaucaugggcaucccuuauugcaacuacagcaaguauuguuaccugaaucacacaauuacggggaaaaccucucuccccaagugcugucuggugagcaacggauccuaccuuaaugaaacacauuucucugaugacaucgagcagcaggccgauaacaugauuaccgaaaugcugcaaaaagaguauauggagcggcagggcaagacaccucucgggcuggucgaccuguucguguuuagcaccuccuucuaccuuaucagcauuuuucuccgccuggugaaaaucccgacgcacagacauauugucggaaagcccugcccuaaaccccaccggcugaaucauaugggcaucuguucuugcggccucuauaagcagccugggguucccgugcgcuggaagagaugaggacuaguuauaagacugacuagcccgaugggccucccaacgggcccuccuccccuccuugcaccgagauuaaucaaaggcucuuuucagagccaccaaaaaaaaaaaaaaaaaaaaaaaaaaaaaaaaaaaaaaaaaaaaaaaaaaaaaaaaaaaaaaaaaaaaaaaaaaaaaaaaaaaaaaaaaaaaaaaaaaaaa

SEQ ID NO: 41450 - RNA, 1686 nt, Artificial Sequence
  mRNA product Design i-3 (hSL-A100) comprising derived and/or modified sequence from LASV(Togo/2016/7082;Clade VI)__AMR44577__GPCmut12 (opt5)
aggagaaagcuuaccaugggccagaucauuaccuucuuucaagaggugccccacgucaucgaagagguuaugaacauugugcugaucgcccucagccugcuugcuauucugaaggggguguacaaugucgccacaugcggaaucaucggccucgugacguuccuguuucuuugugggagauccugcucucugauuuauaaaggaagcuacgaacuccagacccuggagcugaacauggaaacacucaauauguguaugccucuguccugcaccaagaacucuagccaucacuauauccggguuggcaaugagacagggcuugagcugacccucacaaacaccuccauuaucaaucauaaauucuguaaccugucugacgcgcacaagcgcaaucuuuacgaucaugcucugaugagcauucucuccacguuucaccugagcaucccgaacuucaaucaguaugaagccaugucuugcgacuuuaacggaggcaaaauuuccgugcaguacaaucugagccacgccuaugcugucgaugccgcugagcauuguggcaccguggccaacgggguucuccaaacauucaugagaauggcguggggaggcucuuacaucgcccuggacuccgggcggggaaauugggauugcaucaugaccagcuaccaguaucuuauuauccagaacacaaccugggaagaccacugucaguuuucucgccccuccccuauuggcuaccuggggcuccugagccaaagaacgcgggauaucuauauuucccgcagacuucugggaacauucaccuggacacucucugacagcgagggcaacgagacccccggcggguacugccugacccgguggaugcugaucgaagcugagcucaaguguuuuggaaauacagccguggcuaagugcaacgaaaaacaugaugaggaguucugcgacaugcugcgccuuuuugauuucuguaagcaggccauccagagacugaaauccgaagcgcagaugagcauucaacucaucaauaaggccgucaacgcucugauuaaugaccagcuuaucaugaaaaaccaucugcgggauaugaugggcauuccuuauugcaauuacucuaaguauuguuaccucaaccacacguccagcgggcgcaccucucugcccaagugcugucuggugagcaauggauccuaccucaacgagacacacuucucugacgacaucgaacagcaagccgauaauaugaucaccgagaugcugcagaaagaauauauugacagacagggcaagacaccucuugggcugguggaucucuuugucuucagcaccuccuuuuaccugaucagcauuuuccugcaccuuaucaaaauuccgacgcaucggcacaucguuggaaagcccugcccuaaaccccaucgccucaaccacaugggcauuuguucuugcggccuguauaagcagccuggggugcccacaagauggaaacggugaggacuaguuauaagacugacuagcccgaugggccucccaacgggcccuccuccccuccuugcaccgagauuaaucaaaggcucuuuucagagccaccaaaaaaaaaaaaaaaaaaaaaaaaaaaaaaaaaaaaaaaaaaaaaaaaaaaaaaaaaaaaaaaaaaaaaaaaaaaaaaaaaaaaaaaaaaaaaaaaaaaaa

SEQ ID NO: 41451 - RNA, 1686 nt, Artificial Sequence
  mRNA product Design i-3 (hSL-A100) comprising derived and/or modified sequence from LASV(KAK-428;Clade n.d. (VII))__ANH09740__GPCmut12 (opt5)
aggagaaagcuuaccaugggccagaucgugaccuucuuucaagaggucccccacguuauugaagaggugaugaacaucgugcugauugcccucagccugcuugcuauccugaaggggcucuacaauuucgccacaugcggagucauuggccugaucacguuucuucugcucugugggagauccugcucugcgaccuauaaaggacaguacgaacugcagacacuggagcucaacauggaaagccugaauauguguaugccucuuuccugcaccaagaacaauucucaucacuauauccgggcuggcaacaauacagggcuggagcucacccugacaaacaccagcauuaucucccauaaauucuguaaucuuucugacgcccacaagaaaaaccuguacgaucauacgcucaugagcauuaucaccacauuucaccuguccauuccgaauuucaaccaguaugaggccaugagcugcgacuuuaauggaggcaagaucucuauucaauacaaccugucccacagcuaugcuggcgaugccgcucagcauugugggaccguggccaauggaguucuccagacauucaugcgcauggcguggggcgggucuuaccuggcccuugacuccggaagacggggcugggauugcaucaucagcucuuaccaguaucugauuauccaaaacaccacgugggacgaucacugucaguuuucccgccccagcccuauuggguaccucggauucgugucccagaagacaagagacaucuauauuucucggcgccugcuuggcaccuuuacauggacccugagcgauuccgaaggccaugacaugcccgggggauacugccucaccagauggaugcugaucgaggcugaucugaaauguuucggcaacacagccgucgcuaagugcaaugaaaaacacgacgaggaguuuugcgauauguggcgccucuucgacuucuguaagcaggccauccaacggcugaaagcggaagcccagaugaacauucagcuuaucaauaaggcugugaacgcccugauuaaugaccaacucaugaugaagaaccaccugagagauaucauggggauuccuuauugcaauuacagcaaauuuuguuaucuuaacaauacgaccacaggacggaccucucugccccgcugcugucucaucuccaacggcagcuaccugaaugagacacauuucucugacgauaucgaacagcaggcugacaacaugauuaccgagaugcugcagaaggaauacauggauagacaagggaaaacgccucucggacugguugaccuuuuuguguucagcacauccuuuuaucugaucaccauuuuccuccaccuggucaagaucccgacccaucggcacauugugggcaaacccugcccuaagccccaucgccugaaucacaugggcaucuguucuugcgggcuuuacaaacagccuggagugcccgucagauggaagcggugaggacuaguuauaagacugacuagcccgaugggccucccaacgggcccuccuccccuccuugcaccgagauuaaucaaaggcucuuuucagagccaccaaaaaaaaaaaaaaaaaaaaaaaaaaaaaaaaaaaaaaaaaaaaaaaaaaaaaaaaaaaaaaaaaaaaaaaaaaaaaaaaaaaaaaaaaaaaaaaaaaaaa

SEQ ID NO: 41452 - RNA, 1686 nt, Artificial Sequence; identical to SEQ ID NO: 41446
  mRNA product Design i-3 (hSL-A100) comprising derived and/or modified sequence from LASV(Pinneo-NIG-1969;Clade I)__AIT17836__GPCmut12 (opt5)

SEQ ID NO: 41453 - RNA, 1686 nt, Artificial Sequence
  mRNA product Design i-3 (hSL-A100) comprising derived and/or modified sequence from LASV(ISTH0009-NIG-2011;Clade II)__AIT17404__GPCmut12 (opt5)
aggagaaagcuuaccaugggccagaucauuaccuucuuucaagaggugccccacgucaucgaagagguuaugaacauugugcugaucgcccucagccugcuugcuauucugaaggggaucuacaauguggccacaugcggacucuucggccuggucuccuuucuucugcucugugggagaucuugcagcacgaccuauaaaggaguguacgaacugcagacacuggagcucgacauggcgucccugaacauguguaugccucuuucuugcaccaagaauaacagccaucacuauaucaugguuggcaaugaaacagggcuggagcucacccugacaaacaccuccauuaucaaucauaaauucuguaaccuuucugaugcucacaagaaaaaucuguacgaccaugcccucaugagcauuaucuccacguuucaccugagcauuccgaacuucaaucaguaugaggccaugucuugcgauuuuaacggaggcaagaucuccgugcaguacaaucugagccacgcuuaugccgucgacgcugccaaccauuguggcaccauugcgaauggggugcuccaaacauucaugcggauggccuggggaggcucuuacaucgcucuggauuccgggaagggaagcugggacugcaucaugaccucuuaccaguaucuuauuauccagaacacaaccugggaagaucacugucaguuuucccgccccagcccuauuggcuaccuggggcuccugucccaaagaacgcgggacaucuauauuucucgcagacuucugggaacauucaccuggacacucagcgauuccgagggcaacgaaacccccggcggguacugccugacccgguggaugcugaucgaggccgagcucaaauguuuuggaaauacagcuguugccaagugcaacgaaaaacaugacgaggaguucugcgauaugcugcgccuuuuugacuucuguaagcaggcgaucagacggcugaaaacggaagcccagaugagcauucagcucaucaauaaggcugugaacgcccugauuaaugaucaacuuaucaugaagaaccaucugcgcgacauuaugggcaucccuuauugcaauuacucuaaauauuguuaccucaaccacaccgucacagggaagaccucccugcccagaugcugucuggugagcaauggaucuuaccucaacgaaacacacuucagcgacgauaucgagcagcaggcugacaauaugauuaccgagcugcuucaaaaagaauauauggaucggcagggcaagacgccucuggggcucguggaccuguuugucuucuccacaucuuuuuaccugaucagcauuuuccuucaccucaucaaaauuccgacccaucgccacaucaccggaaagcccugcccuaaaccccauagacugaaccacaugggcauuuguuccugcggccuguauaagcacccugggguucccgugaaguggaaacggugaggacuaguuauaagacugacuagcccgaugggccucccaacgggcccuccuccccuccuugcaccgagauuaaucaaaggcucuuuucagagccaccaaaaaaaaaaaaaaaaaaaaaaaaaaaaaaaaaaaaaaaaaaaaaaaaaaaaaaaaaaaaaaaaaaaaaaaaaaaaaaaaaaaaaaaaaaaaaaaaaaaaa

SEQ ID NO: 41454 - RNA, 1686 nt, Artificial Sequence
  mRNA product Design i-3 (hSL-A100) comprising derived and/or modified sequence from LASV(ISTH2010-NIG-2012;Clade II)__AIT17482__GPCmut12 (opt5)
aggagaaagcuuaccaugggccagaucauuaccuucuuucaagaggugccccacgucaucgaagagguuaugaacauugugcugaucgcccucagccugcuugcuauucugaaggggaucuacaauguggccacaugcggacucuucggccuggucuccuuucuucugcucugugggagaucuugcagcacgaccuauaaaggaguguacgaacugcagacacuggagcucgacauggcgucccugaacauguguaugccucuuucuugcaccaagaauaacagccaucacuauaucaugguuggcaaugaaacagggcuggagcucacccugacaaacaccuccauuaucaaucauaaauucuguaaccuuucugaugcucacaagaaaaaucuguacgaccaugcccucaugagcauuaucuccacguuucaccugagcauuccgaacuucaaucaguaugaggccaugucuugcgauuuuaacggaggcaagaucuccgugcaguacaaucugagccacgcuuaugccgucgacgcugccaaccauuguggcaccauugcgaauggggugcuccaaacauucaugcggauggccuggggaggcucuuacaucgcucuggauuccgggaagggaagcugggacugcaucaugaccucuuaccaguaucuuauuauccagaacauuacaugggaagaucacugucaguuuucccgccccagcccuaucggcuaccuggggcuccugucccaaagaacccgggacauuuauaucucucgcagacuucugggaacguucacauggacccucagcgauuccgagggcaacgaaacacccggcggguacugccugacccgguggaugcugaucgaggccgagcucaaauguuuuggaaauaccgcuguugccaagugcaacgaaaaacaugacgaggaguucugcgauaugcugcgccuuuuugacuucuguaagcaggcgauuagacggcugaaaacagaagcccagaugagcauccagcucauuaauaaggcugugaacgcccugaucaaugaucaacuuauuaugaagaaccaucugcgcgacaucaugggcaucccuuauugcaauuacucuaaauauuguuaccucaaccacacggucaccgggaagacaucccugcccagaugcugucuggugagcaauggaucuuaccucaacgaaacccacuucagcgacgauauugagcagcaggcugacaauaugaucacagagcugcuucaaaaagaauauauugaucggcagggcaagaccccucuggggcucguggaccuguuugucuucuccacgucuuuuuaccugaucagcauuuuccuucaccucguuaaaaucccgacacaucgccacguggugggaaagcccugcccuaaaccccauagacugaaccacaugggcauuuguuccugcggccuguauaagcacccugggguccccgugaaguggaaacggugaggacuaguuauaagacugacuagcccgaugggccucccaacgggcccuccuccccuccuugcaccgagauuaaucaaaggcucuuuucagagccaccaaaaaaaaaaaaaaaaaaaaaaaaaaaaaaaaaaaaaaaaaaaaaaaaaaaaaaaaaaaaaaaaaaaaaaaaaaaaaaaaaaaaaaaaaaaaaaaaaaaaa

SEQ ID NO: 41455 - RNA, 1686 nt, Artificial Sequence
  mRNA product Design i-3 (hSL-A100) comprising derived and/or modified sequence from LASV(Lassa virus/H.sapiens-wt/NGA/2015/ISTH_0543;Clade II)__AVO03639__GPCmut12 (opt5)
aggagaaagcuuaccaugggccagaucauuaccuucuuucaagaggugccccacgucaucgaagagguuaugaacauugugcugaucgcccucagccugcuugcuauucugaaggggaucuacaauguggccacaugcggacucuucggccuggucuccuuucuucugcucugugggagaucuugcagcacgaccuauaaaggaguguacgaacugcagacacuggagcucgacauggcgaaccugaauauguguaugccucuuuccugcaccaagaacaauucucaucacuauaucaugguuggcaacgaaacagggcuggagcucacccugacaaauaccagcauuaucaaccauaaauucuguaaucuuuccgaugcucacaagaaaaaccuguacgaccaugcccucaugucuauuaucagcacguuucaccuguccauuccgaauuucaaccaguaugaggccaugagcugcgauuuuaauggaggcaagaucucugugcaguacaaccugucccacaccuaugcugucgacgccgcuaaucauuguggcacaauugccaacggggugcuccaaaccuucaugcggauggcguggggaggcagcuacaucgcccuggauucugggaagggauccugggacugcaucaugacaagcuaccaguaucuuguuauucagaacaccacgugggaagaucacugucaguuuucucgccccuccccuaucggcuaccuggggcuccugagccaaagaacacgggacauuuauaucucccgcagacuucugggaaccuucacauggacccucucugauagcgagggcaaugaaacccccggcggguacugccugacacgguggaugcugauugaggcugagcucaaauguuuuggaaacacggccguggcuaagugcaaugaaaaacaugacgaggaguucugcgauaugcugcgccuuuuugacuucuguaagcaggccaucagacggcugaaaaccgaagcgcagauguccauccagcucauuaacaaggccgucaaugcucugaucaacgaucaacuuauuaugaagaaucaucugcgcgacaucaugggcauuccuuauugcaacuacagcaaauauuguuaccucaaucacacagugaccgggaagacaucucugcccagaugcugucugguguccaacggaagcuaccucaaugaaacccacuucucugacgauaucgagcagcaggccgacaacaugaucacggagcugcuucaaaaagaauauauugaucggcagggcaagacaccucuggggcucgucgaccuguuuguuuucagcaccuccuuuuaccugaucucuauuuuccuucaccucgugaaaaucccgacccaucgccacauuacaggaaagcccugcccuaaaccccauagacugaaucacaugggcaucuguagcugcggccuguauaagcacccuggggugcccgucaaguggaaacggugaggacuaguuauaagacugacuagcccgaugggccucccaacgggcccuccuccccuccuugcaccgagauuaaucaaaggcucuuuucagagccaccaaaaaaaaaaaaaaaaaaaaaaaaaaaaaaaaaaaaaaaaaaaaaaaaaaaaaaaaaaaaaaaaaaaaaaaaaaaaaaaaaaaaaaaaaaaaaaaaaaaaa

SEQ ID NO: 41456 - RNA, 1686 nt, Artificial Sequence
  mRNA product Design i-3 (hSL-A100) comprising derived and/or modified sequence from LASV(Lassa virus/H.sapiens-wt/NGA/2016/ISTH_0009;Clade II)__AVO03571__GPCmut12 (opt5)
aggagaaagcuuaccaugggccagaucauuaccuucuuucaagaggugccccacgucaucgaagagguuaugaacauugugcugaucgcccucagccugcuugcuauucugaaggggaucuacaauguggccacaugcggacuccugggccuugucuccuuccugcuccugugugggagaucuugcagcacgaccuauaaaggaguguacgaacugcagacacucgagcuggacauggcgucccuuaacauguguaugccucugucuugcaccaagaauaacagccaucacuauaucaugguuggcaaugaaacagggcucgagcugacccuuacaaacaccuccauuaucaaucauaaauuuuguaaccugucugaugcucacaagaaaaaucucuacgaccaugcccugaugagcauuaucuccacguuccaccugagcauuccgaacuuuaaucaguaugaggccaugucuugcgauuucaacggaggccggaucuccgugcaguacaaucucagccacucuuaugcugucgacgccgcuaaccauuguggcaccauugccaauggggugcugcaaacauuuaugcgcauggcguggggaggcuccuacaucgcccuugauagcgggaagggaucuugggacugcaucaugaccuccuaccaguaucugauuauccagaacacaaccugggaagaucacugucaguucagcagacccuccccuauuggcuaccucgggcugcuuucucaacggacgcgcgacaucuauauuagcagacggcugcucggaacauuuaccuggacacuguccgauagcgagggcaacgaaacccccggcggguacugccugacccgcuggaugcucaucgaggcugagcugaaguguuucggaaauacagccguugcuaaaugcaacgaaaagcaugacgaggaauuuugcgauaugcuuagacuguucgacuuuuguaaacaggccauccggcgccucaagacggaggcgcagaugucuauucagcugaucaauaaagccgugaacgcucuuauuaaugaucaacugaucaugaagaaccaccucagagacauuaugggcaucccuuauugcaauuacuccaaguauuguuaccugaaccacaccgucacagggaaaaccagccugccccggugcugucucgugucuaauggaagcuaccugaacgaaacacauuucuccgacgauaucgagcagcaggccgacaauaugauuaccgagcuucugcaaaaggaauauaucgaucgccagggcaaaacgccucucgggcugguggaccuguucgucuuuucuaccagcuucuaccuuauuuccaucuuucuccaccugguuaagauuccgacacauagacacaucaccggaaaacccugcccuaagccccaucggcugaaccacaugggcauuuguagcugcggccucuauaaucacccuggggugcccgugaaauggaagcgcugaggacuaguuauaagacugacuagcccgaugggccucccaacgggcccuccuccccuccuugcaccgagauuaaucaaaggcucuuuucagagccaccaaaaaaaaaaaaaaaaaaaaaaaaaaaaaaaaaaaaaaaaaaaaaaaaaaaaaaaaaaaaaaaaaaaaaaaaaaaaaaaaaaaaaaaaaaaaaaaaaaaaa

SEQ ID NO: 41457 - RNA, 1686 nt, Artificial Sequence
  mRNA product Design i-3 (hSL-A100) comprising derived and/or modified sequence from LASV(Lassa virus/H.sapiens-wt/NGA/2016/ISTH_0017;Clade II)__AVO03567__GPCmut12 (opt5)
aggagaaagcuuaccaugggccagaucauuaccuucuuucaagaggugccccacgucaucgaagagguuaugaacauugugcugaucgcccucagccugcuugcuauucugaaggggaucuacaauguggccacaugcggacucuucggccuggucuccuuucuucugcucugugggagaucuugcagcacgaccuauaaaggaguguacgaacugcagacacuggagcucgacauggcgucccugaacauguguaugccucuuucuugcaccaagaauaacagccaucacuauaucaugguuggcaaugaaacagggcuggagcucacccugacaaacaccuccauuaucaaucauaaauucuguaaccuuucugaugcucacaagaaaaaucuguacgaccaugcccucaugagcauuaucuccacguuucaccugagcauuccgaacuucaaucaguaugaggccaugucuugcgauuuuaacggaggcaagaucuccgugcaguacaaucugagccacaccuaugcuauugacgccgcuaaccauuguggcacaaucgccaaugggguccuccaaaccuucaugcggauggcguggggaggcucuuacaucgcccuggauuccgggaagggaagcugggacugcauuaugacaucuuaccaguaucuuaucauucagaacaccacgugggaagaucacugucaguuuucccgccccagcccuaucggcuaccuggggcuccugucccaaagaacacgggacauuuauaucucucgcagacuucugggaaccuucacauggacccucagcgauuccgagggcaacgaaacccccggcggguacugccugacacgguggaugcugaucgaggcugagcucaaauguuuuggaaauacggccguggcuaagugcaacgaaaaacaugacgaggaguucugcgauaugcugcgccuuuuugacuucuguaagcaggccauuagacggcugaaaaccgaagcgcagaugagcauccagcucauuaauaaggccguuaacgcucugaucaaugaucaacuuauuaugaagaaccaucugcgcgacaucaugggcaucccuuauugcaauuacucuaaauauuguuaccucaaccacacagugaccgggaagacaucccugcccagaugcugucuggucagcaauggaucuuaccucaacgaaacccacuucagcgacgauauugagcagcaggccgacaauaugaucacggagcugcuucaaaaagaauauauggaucggcagggcaagacaccucuggggcucguggaccuguuuguguucuccaccucuuuuuaccugauuagcaucuuccuucaccucguccgcauuccgacccauagacacguuaucggaaaacccugcccuaagccccaucggcugaaccacaugggcauuuguuccugcggccuguauaaacacccuggggugcccgugaaguggaagcgcugaggacuaguuauaagacugacuagcccgaugggccucccaacgggcccuccuccccuccuugcaccgagauuaaucaaaggcucuuuucagagccaccaaaaaaaaaaaaaaaaaaaaaaaaaaaaaaaaaaaaaaaaaaaaaaaaaaaaaaaaaaaaaaaaaaaaaaaaaaaaaaaaaaaaaaaaaaaaaaaaaaaaa

SEQ ID NO: 41458 - RNA, 1686 nt, Artificial Sequence
  mRNA product Design i-3 (hSL-A100) comprising derived and/or modified sequence from LASV(Lassa virus/H.sapiens-wt/NGA/2018/ISTH_0959;Clade II)__AVV65099__GPCmut12 (opt5)
aggagaaagcuuaccaugggccagaucauuaccuucuuucaagaggugccccacgucaucgaagagguuaugaacauugugcugaucgcccucagccugcuugcuauucugaaggggaucuacaauguggucacaugcggacucuucggccugguguccuuucuucugcucugugggagaucuugcagcacgaccuauaaaggaguuuacgaacugcagacacuggagcucgacauggccucccugaacauguguaugccucuuucuugcaccaagaauaacagccaucacuauaucauggugggcaaugaaacagggcuggagcucacccugacaaacaccuccauuaucaaucauaaauucuguaaccuuucugaugcgcacaagaaaaaucuguacgaccaugcucucaugagcauuaucuccacguuucaccugagcauuccgaacuucaaucaguaugaggccaugucuugcgauuuuaacggaggcaagaucuccguccaguacaaucugagccacgccuaugcuauugacgccgcuaaccauuguggcaccaucgccaauggggugcuccaaacauucaugcggauggcguggggaggcucuuacaucgcccuggauuccgggaagggaagcugggacugcauuaugaccucuuaccaguaucuuaucauucagaacacaaccugggaagaucacugucaguuuucccgccccagcccuaucggcuaccuggggcuccugucccaaagaacgcgggacauuuauaucucucgcagacuucugggaacauucaccuggacacucagcgauuccgagggcaacgaaacccccggcggguacugccugacccgguggaugcugaucgaggcugagcucaaauguuuuggaaauacagccguugcuaagugcaacgaaaaacaugacgaggaguucugcgauaugcugcgccuuuuugacuucuguaagcaggccauuagacggcugaaaacggaagcgcagaugagcauccagcucauuaauaaggccgugaacgcucugaucaaugaucaacuuauuaugaagaaccaucugcgcgacaucaugggcaucccuuauugcaauuacucuaaauauuguuaccucaaccacaccgucacagggaagaccucccugcccagaugcugucuggugagcaauggaucuuaccucaacgaaacacacuucagcgacgauauugagcagcaggccgacaauaugaucaccgagcugcuucaaaaagaauauauugaucggcagggcaagacgccucuggggcucguggaccuguuugucuucuccacaucuuuuuaccugaucagcauuuuccuucaccucguuaaaaucccgacccaucgccacgugauuggaaagcccugcccuaaaccccauagacugaaccacaugggcaucuguuccugcggccuguauaagcacccuggggugcccgucaaguggaaacggugaggacuaguuauaagacugacuagcccgaugggccucccaacgggcccuccuccccuccuugcaccgagauuaaucaaaggcucuuuucagagccaccaaaaaaaaaaaaaaaaaaaaaaaaaaaaaaaaaaaaaaaaaaaaaaaaaaaaaaaaaaaaaaaaaaaaaaaaaaaaaaaaaaaaaaaaaaaaaaaaaaaaa

SEQ ID NO: 41459 - RNA, 1686 nt, Artificial Sequence
  mRNA product Design i-3 (hSL-A100) comprising derived and/or modified sequence from LASV(LASV003-NIG-2008;Clade II)__AIT17580__GPCmut12 (opt5)
aggagaaagcuuaccaugggccagaucauuaccuucuuucaagaggugccccacgucaucgaagagguuaugaacauugugcugaucgcccucagccugcuugcuauucugaaggggaucuacaauguggccacaugcggacucuucggccuggucuccuuucuucugcucugugggagaucuugcagcacgaccuauaaaggaguguacgaacugcagacacuggagcucgacauggcgucccugaacauguguaugccucuuucuugcaccaagaauaacagccaucacuauaucaugguuggcaaugaaacagggcuggagcucacccugacaaacaccuccauuaucaaucauaaauucuguaaccuuucugaugcucacaagaaaaaucuguacgaccaugcccucaugagcauuaucuccacguuucaccugagcauuccgaacuucaaucaguaugaggccaugucuugcgauuuuaacggaggcaagaucuccgugcaguacaaucugagccacaccuaugcugucgacgccgcuaaccauuguggcacaauugccaauggggugcuccaaaccuucaugcggauggcguggggaggcucuuacaucgcccuggauuccgggaagggaagcugggacugcaucaugacaucuuaccaguaucuuauuauccagaacaccacgugggaagaucacugucaguuuucccgccccagcccuauuggcuaccuggggcuccugucccaaagaacacgggacaucuauauuucucgcagacuucugggaaccuucacauggacccucagcgauuccgagagcaacgaaacccccggcggcuacugccugacacgguggaugcugaucgaggcugagcucaaauguuuugggaauacggccguugcuaagugcaacgaaaaacaugacgaggaguucugcgauaugcugcgccuuuuugacuucuguaagcaggccaucagacggcugaaagcggaagcccagaugucuauucagcucaucaauaaggcugugaacgcccugauuaaugaucaacuuaucaugaagaaccaucugcgcgacauuaugggaaucccuuauugcaauuacuccaaauauuguuaccucaaccacaccgucacaggcagaaccagccugccccggugcugucuggugucuaaugggagcuaccucaacgaaacacacuucuccgacgauaucgagcagcaggcugacaauaugauuaccgagcugcuucaaaaggaauauauggaucgccagggaaaaacgccucugggccucguggaccuguuugucuucucuaccagcuuuuaccugaucuccauuuuccuucaccucguuaagaucccgacacauagacacgugauugggaaacccugcccuaagccccaucggcugaaccacaugggaaucuguagcugcggccuguauaaacacccuggcgugcccgucaaguggaagcgcugaggacuaguuauaagacugacuagcccgaugggccucccaacgggcccuccuccccuccuugcaccgagauuaaucaaaggcucuuuucagagccaccaaaaaaaaaaaaaaaaaaaaaaaaaaaaaaaaaaaaaaaaaaaaaaaaaaaaaaaaaaaaaaaaaaaaaaaaaaaaaaaaaaaaaaaaaaaaaaaaaaaaa

SEQ ID NO: 41460 - RNA, 1686 nt, Artificial Sequence
  mRNA product Design i-3 (hSL-A100) comprising derived and/or modified sequence from LASV(LASV035-NIG-2009;Clade II)__AIT17588__GPCmut12 (opt5)
aggagaaagcuuaccaugggccagaucauuaccuucuuucaagaggugccccacgucaucgaagagguuaugaacauugugcugaucgcccucagccugcuugcuauucugaaggggaucuacaauguggccacaugcggacucuucggccuggucuccuuucuucugcucugugggagaucuugcagcacgaccuauaaaggaguguacgaacugcagacacuggagcucgacauggcgucccugaacauguguaugccucuuucuugcaccaagaauaacagccaucacuauaucaugguuggcaaugaaacagggcuggagcucacccugacaaacaccuccauuaucaaucauaaauucuguaaccuuucugaugcucacaagaaaaaucuguacgaccaugcccucaugagcauuaucuccacguuucaccugagcauuccgaacuucaaucaguaugaggccaugucuugcgauuuuaacggaggcaagaucuccgugcaguacaaucugagccacgcuuaugccgucgacgcugccaaccauuguggcaccauugcgaauggggugcuccaaacauucaugcggauggccuggggaggcucuuacaucgcucuggauuccgggaagggaagcugggacugcaucaugaccucuuaccaguaucuuauuauccagaacacaaccugggaagaucacugucaguuuucccgccccagcccuauuggcuaccuggggcuccugucccaaagaacgcgggacaucuauauuucucgcagacuucugggaacauucaccuggacacucagcgauuccgagggcaacgaaacccccggcggguacugccugacccgguggaugcugaucgaggccgagcucaaauguuuuggaaauacagcuguugccaagugcaacgaaaaacaugacgaggaguucugcgauaugcugcgccuuuuugacuucuguaagcaggcgaucagacggcugaaagccgaagcucagaugagcauucagcucaucaauaaggccgugaacgcucugauuaaugaucaacuuaucaugaagaaccaucugcgcgacauuaugggcaucccuuauugcaauuacucuaaauauuguuaccucaaccacacggucaccgggaagacaucccugcccagaugcugucuggugagcaauggaucuuaccucaacgaaacccacuucagcgacgauaucgagcagcaggccgacaauaugauuacagagcugcuucaaaaagaauauaucgaucggcagggcaagaccccucuggggcucguggaccuguuugucuucuccacgucuuuuuaccugauuagcaucuuccuucaccucguuaaaauuccgacacaucgccacgugaucggaaagcccugcccuaaaccccauagacugaaccacaugggcauuuguuccugcggccuguauaagcacccuggggugcccgucaaguggaaacggugaggacuaguuauaagacugacuagcccgaugggccucccaacgggcccuccuccccuccuugcaccgagauuaaucaaaggcucuuuucagagccaccaaaaaaaaaaaaaaaaaaaaaaaaaaaaaaaaaaaaaaaaaaaaaaaaaaaaaaaaaaaaaaaaaaaaaaaaaaaaaaaaaaaaaaaaaaaaaaaaaaaaa

SEQ ID NO: 41461 - RNA, 1686 nt, Artificial Sequence
  mRNA product Design i-3 (hSL-A100) comprising derived and/or modified sequence from LASV(LASV1000-NIG-2009;Clade II)__AIT17782__GPCmut12 (opt5)
aggagaaagcuuaccaugggccagaucauuaccuucuuucaagaggugccccacgucaucgaagagguuaugaacauugugcugaucgcccucagccugcuugcuauucugaaggggaucuacaauguggccacaugcggacucuucggccuggucuccuuucuucugcucugugggagaucuugcagcacgaccuauaaaggaguguacgaacugcagacacuggagcucgacauggcgucccugaacauguguaugccucuuucuugcaccaagaauaacagccaucacuauaucaugguuggcaaugaaacagggcuggagcucacccugacaaacaccuccauuaucaaucauaaauucuguaaccuuucugaugcucacaagaaaaaucuguacgaccaugcccucaugagcauuaucuccacguuucaccugagcauuccgaacuucaaucaguaugaggccaugucuugcgauuuuaacggaggcaagaucuccgugcaguacaaucugagccacaccuaugcugucgacgccgcuaaccauuguggcacaauugccaauggggugcuccaaaccuucaugcggauggcguggggaggcucuuacaucgcccuggauuccgggaagggaagcugggacugcaucaugacaucuuaccaguaucuuauuauccagaacaccacgugggaagaucacugucaguuuucccgccccagcccuauuggcuaccuggggcuccugucccaaagaacacgggacaucuauauuucucgcagacuucugggaaccuucacauggacccucagcgauuccgagggcaacgaaacccccggcggguacugccugacacgguggaugcugaucgaggcugagcucaaauguuuuggaaauacggccguugcuaagugcaacgaaaaacaugacgaggaguucugcgauaugcugcgccuuuuugacuucuguaagcaggccaucaaaagacugaagaccgaagcgcagaugagcauucagcucaucaauaaggccgugaacgcucugauuaaugaucaacuuaucaugaaaaaccaucugcgggacauuaugggcaucccuuauugcaauuacucuaaguauuguuaccucaaccacacagucaccgggaaaacaucccugccccgcugcugucuggugagcaauggaucuuaccucaacgaaacccacuucagcgacgauaucgagcagcaggccgacaauaugauuacggagcugcuucaaaaggaauauaucgauagacagggcaaaacaccucuggggcucguggaccuguuugucuucuccaccucuuuuuaccugauuagcaucuuccuucaccucguuaagauuccgacccaucggcacguggugggaaaacccugcccuaagccccaucgccugaaccacaugggcaucuguuccugcggccuguauaagcacccugggguccccgugaaauggaagagaugaggacuaguuauaagacugacuagcccgaugggccucccaacgggcccuccuccccuccuugcaccgagauuaaucaaaggcucuuuucagagccaccaaaaaaaaaaaaaaaaaaaaaaaaaaaaaaaaaaaaaaaaaaaaaaaaaaaaaaaaaaaaaaaaaaaaaaaaaaaaaaaaaaaaaaaaaaaaaaaaaaaaa

SEQ ID NO: 41462 - RNA, 1686 nt, Artificial Sequence
  mRNA product Design i-3 (hSL-A100) comprising derived and/or modified sequence from LASV(LASV221-NIG-2010;Clade II)__AIT17624__GPCmut12 (opt5)
aggagaaagcuuaccaugggccagaucauuaccuucuuucaagaggugccccacgucaucgaagagguuaugaacauugugcugaucgcccucagccugcuugcuauucugaaggggaucuacaauguggccacaugcggacucuucggccuggucuccuuucuucugcucugugggagaucuugcagcacgaccuauaaaggaguguacgaacugcagacacuggagcucgacauggcgucccugaacauguguaugccucuuucuugcaccaagaauaacagccaucacuauaucaugguuggcaaugaaacagggcuggagcucacccugacaaacaccuccauuaucaaucauaaauucuguaaccuuucugaugcucacaagaaaaaucuguacgaccaugcccucaugagcauuaucuccacguuucaccugagcauuccgaacuucaaucaguaugaggccaugucuugcgauuuuaacggaggcaagaucuccgugcaguacaaucugagccacaccuaugcuauugacgccgcuaaccauuguggcacaaucgccaaugggguccuccaaaccuucaugcggauggcguggggaggcucuuacaucgcccuggauuccgggaagggaagcugggacugcauuaugacaucuuaccaguaucuuaucauucagaacaccacgugggaagaucacugucaguuuucccgccccagcccuaucggcuaccuggggcuccugucccaaagaacacgggacauuuauaucucucgcagacuucugggaaccuucacauggacccucagcgauuccgagggcaacgaaacccccggcggguacugccugacacgguggaugcugaucgaggcugagcucaaauguuuuggaaauacggccguggcuaagugcaacgaaaaacaugacgaggaguucugcgauaugcugcgccuuuuugacuucuguaagcaggccauuagacggcugaaaaccgaagcgcagaugagcauccagcucauuaauaaggccguuaacgcucugaucaaugaucaacuuauuaugaagaaccaucugcgcgacaucaugggcaucccuuauugcaauuacucuaaauauuguuaccucaaccacacagugaccgggaagacaucccugcccagaugcugucuggucagcaauggaucuuaccucaacgaaacccacuucagcgacgauauugagcagcaggccgacaauaugaucacggagaugcugcaaaaagaauauauggaucggcagggcaagacaccucuugggcugguggaccucuuuguguucuccaccucuuuuuaccugauuagcaucuuccugcaccuugucaaaauuccgacccaucgccacguuaucggaaagcccugcccuaaaccccauagacucaaccacaugggcauuuguuccugcggccuguauaagcacccuggggugcccgugaaguggaaacggugaggacuaguuauaagacugacuagcccgaugggccucccaacgggcccuccuccccuccuugcaccgagauuaaucaaaggcucuuuucagagccaccaaaaaaaaaaaaaaaaaaaaaaaaaaaaaaaaaaaaaaaaaaaaaaaaaaaaaaaaaaaaaaaaaaaaaaaaaaaaaaaaaaaaaaaaaaaaaaaaaaaaa

SEQ ID NO: 41463 - RNA, 1686 nt, Artificial Sequence
  mRNA product Design i-3 (hSL-A100) comprising derived and/or modified sequence from LASV(LASV237-NIG-2010;Clade II)__AIT17638__GPCmut12 (opt5)
aggagaaagcuuaccaugggccagaucauuaccuucuuucaagaggugccccacgucaucgaagagguuaugaacauugugcugaucgcccucagccugcuugcuauucugaaggggaucuacaauguggccacaugcggacucuucggccuggucuccuuucuucugcucugugggagaucuugcagcacgaccuauaaaggaguguacgaacugcagacacuggagcucgacauggcgucccugaacauguguaugccucuuucuugcaccaagaauaacagccaucacuauaucaugguuggcaaugaaacagggcuggagcucacccugacaaacaccuccauuaucaaucauaaauucuguaaccuuucugaugcucacaagaaagaccuguacgaucaugcccucaugagcauuaucuccacguuucaccugagcauuccgaauuucaaccaguaugaggccaugucuugcgacuuuaauggaggcaagaucuccgugcaguacaaccugagccacaccuaugcugucgaugccgcuaaucauuguggcacaauugccaacggggugcuccaaaccuucaugcggauggcguggggaggcucuuacaucgcccuggacuccgggaagggaagcugggauugcaucaugacaucuuaccaguaucuuauuauccagaauaccacgugggaagaccacugucaguuuucccgccccagcccuauuggcuaccuggggcuccugucccaaagaacacgggauaucuauauuucucgcagacuucugggaaccuucacauggacccucagcgacuccgagggcaacgaaacccccggcggguacugccugacacgguggaugcugaucgaggcugagcucaaauguuuuggaaacacggccguugcuaagugcaaugaaaaacaugaugaggaguucugcgacaugcugcgccuuuuugauuucuguaagcaggccaucagacggcugaaaaccgaagcgcagaugagcauucagcucaucaacaaggccgugaaugcucugauuaacgaccaacuuaucaugaagaaucaucugcgcgacauuaugggcaucccuuauugcaacuacucuaaauauuguuaccucaaucacacagucaccgggaagacaucccugcccagaugcugucuggugagcaacggaucuuaccucaaugaaacccacuucagcgaugacaucgagcagcaggccgauaacaugauuacggagcugcuucaaaaagaauauauggaccggcagggcaagacaccucuggggcucguggaucuguuugucuucuccaccucuuuuuaccugaucagcauuuuccuucaccucaucaaaauuccgacccaucgccacaucacaggaaagcccugcccuaaaccccauagacugaaucacaugggcauuuguuccugcggccuguauaagcacccugggguucccgugaaguggaaacggugaggacuaguuauaagacugacuagcccgaugggccucccaacgggcccuccuccccuccuugcaccgagauuaaucaaaggcucuuuucagagccaccaaaaaaaaaaaaaaaaaaaaaaaaaaaaaaaaaaaaaaaaaaaaaaaaaaaaaaaaaaaaaaaaaaaaaaaaaaaaaaaaaaaaaaaaaaaaaaaaaaaaa

SEQ ID NO: 41464 - RNA, 1686 nt, Artificial Sequence
  mRNA product Design i-3 (hSL-A100) comprising derived and/or modified sequence from LASV(LASV253-NIG-2011;Clade II)__AIT17670__GPCmut12 (opt5)
aggagaaagcuuaccaugggccagaucauuaccuucuuucaagaggugccccacgucaucgaagagguuaugaacauugugcugaucgcccucagccugcuugcuauucugaaggggaucuacaauguggccacaugcggacucuucggccuggucuccuuucuucugcucugugggagaucuugcagcacgaccuauaaaggaguguacgaacugcagacacuggagcucgacauggcgucccugaacauguguaugccucuuucuugcaccaagaauaacagccaucacuauaucaugguuggcaaugaaacagggcuggagcucacccugacaaacaccuccauuaucaaucauaaauucuguaaccuuucugaugcucacaagaaaaaucuguacgaccaugcccucaugagcauuaucuccacguuucaccugagcauuccgaacuucaaucaguaugaggccaugucuugcgauuuuaacggaggcaagaucuccgugcaguacaaucugagccacaccuaugcugucgacgccgcuaaccauuguggcacaauugccaauggggugcuccaaaccuucaugcggauggcguggggaggcucuuacaucgcccuggauuccgggaagggaagcugggacugcaucaugacaucuuaccaguaucuuauuauccagaacaccacgugggaagaucacugucaguuuucccgccccagcccuauuggcuaccuggggcuccugucccaaagaacacgggacaucuauauuucucgcagacuucugggaaccuucacauggacccucagcgauuccgagggcaacgaaacccccggcggguacugccugacacgguggaugcugaucgaggcugagcucaaauguuuuggaaauacggccguugcuaagugcaacgaaaaacaugacgaggaguucugcgauaugcugcgccuuuuugacuucuguaagcaggccaucagacggcugaaagcggaagcccagaugagcauucagcucaucaauaaggcugugaacgcccugauuaaugaucaacuuaucaugaagaaccaucugcgcgacauuaugggcaucccuuauugcaauuacucuaaauauuguuaccucaaccacaccgucacagggagaaccucccugccccggugcugucuggugagcaauggaucuuaccucaacgaaacacacuucagcgacgauaucgagcagcaggcugacaauaugauuaccgagcugcuucaaaaggaauauaucgaucgccagggcaaaacgccucuggggcucguggaccuguuugucuucuccacaucuuuuuaccugauuagcaucuuccuucaccucguuaagauuccgacccauagacacaucauuggaaaacccugcccuaagccccaucggcugaaccacaugggcaucuguuccugcggccuguauaaacacccuggggugcccgugaaguggaagcgcugaggacuaguuauaagacugacuagcccgaugggccucccaacgggcccuccuccccuccuugcaccgagauuaaucaaaggcucuuuucagagccaccaaaaaaaaaaaaaaaaaaaaaaaaaaaaaaaaaaaaaaaaaaaaaaaaaaaaaaaaaaaaaaaaaaaaaaaaaaaaaaaaaaaaaaaaaaaaaaaaaaaaa

SEQ ID NO: 41465 - RNA, 1686 nt, Artificial Sequence
  mRNA product Design i-3 (hSL-A100) comprising derived and/or modified sequence from LASV(LASV254-NIG-2011;Clade II)__AIT17674__GPCmut12 (opt5)
aggagaaagcuuaccaugggccagaucauuaccuucuuucaagaggugccccacgucaucgaagagguuaugaacauugugcugaucgcccucagccugcuugcuauucugaaggggaucuacaauguggccacaugcggacucuucggccuggucuccuuucuucugcucugugggagaucuugcagcacgaccuauaaaggaguguacgaacugcagacacuggagcucgacaugaccaaccugaauauguguaugccucuuuccugcacaaagaacaauucucaucacuauaucaugguuggcaacgaaaccgggcuggagcucacacugaccaauacgagcauuaucaaccauaaauucuguaaucuuuccgaugcgcacaagaaaaaccuguacaaucaugcucucaugucuauuaucagcaccuuucaccuguccauuccgaacuucaaucaguaugaggccaugagcugcgacuuuaacggaggcaagaucucugugcaguacaaucugucccacagcuaugccgucgaugcugccaaccauuguggcacaauugcuaacggggugcuccaaaccuucaugcggauggccuggggaggcucuuacaucgcgcuggacuccgggaagggaaauugggauugcaucaugacaagcuaccaguaucuuauuauccagaacaccacgugggaagaccacugucaguuuucucgccccuccccuauuggcuaccuggggcuccugagccaaagaacacgggauaucuauauuucccgcagacuucugggaaccuucacauggacccucucugacagcgagggcaaugaaacccccggcggguacugccugacacgguggaugcugaucgaggccgagcucaaauguuuuggaaacacggcuguugccaagugcaaugaaaaacaugaugaggaguucugcgacaugcugcgccuuuuugauuucuguaagcaggcuaucagacggcugaaaaccgaagcccaggcgaacauucagcucaucaauaaggccgugaacgcucugauuaaugaccaacuuaucaugaagaaccaucugcgcgauauuaugggcaucccuuauugcaauuacuccaaauauuguuaccucaaccacacagucaccgggaagacaagccugcccagaugcugucuggugucuaauggauccuaccucaacgaaacccacuucagcgacgacaucgagcagcaggccgauaauaugauuacggagcugcuucaaaaagaauauauggaccggcagggcaagacaccucuggggcucguggaucuguuugucuucucuaccagcuuuuaccugaucuccauuuuccuucaccucguuaaaaucccgacccaucgccacgugauuggaaagcccugcccuaaaccccauagacugaaccacaugggcaucuguucuugcggccuguauaagcacccuggggugcccgucaaguggaaacggugaggacuaguuauaagacugacuagcccgaugggccucccaacgggcccuccuccccuccuugcaccgagauuaaucaaaggcucuuuucagagccaccaaaaaaaaaaaaaaaaaaaaaaaaaaaaaaaaaaaaaaaaaaaaaaaaaaaaaaaaaaaaaaaaaaaaaaaaaaaaaaaaaaaaaaaaaaaaaaaaaaaaa

SEQ ID NO: 41466 - RNA, 1686 nt, Artificial Sequence
  mRNA product Design i-3 (hSL-A100) comprising derived and/or modified sequence from LASV(Nig08-A19;Clade III)__ADU56618__GPCmut12 (opt5)
aggagaaagcuuaccaugggccagaucgugaccuucuuucaagaggucccccacguuauugaagaggugaugaacaucgugcugauugcccucagcauccuggcuauucuuaaggggcuguacaauaucgccacaugcggacucaucggccuggucacguuccuucugcucuccgggagaucuuguagcaugaccuauaaaggaguguacgaacugcagacacuggagcucaacaugaauacccugaacaugugcaugccucuuuccuguacaaagaauaacucucaucacuauauuaugguuggcaaugaaaccgggcuggagcucacacugaccaacacgagccuucugcaucacaaauuuugcaaucucuccgacgcgcauaagaaaaaccuguacgaucacacccugaugucuaucauuagcacauuccaccucuccaucccgaauuuuaaccaguaugaggcuaugagcugugacuucaauggaggcaagauuaccgugcaguacaaccugucucauuccuaugccaucgaugccgcuaaucacugcggcacagucgccaacggggugcuucaaaccuuuaugcggauggcuuggggaggcagcuacauugcccuggacucugggcgcggaaagugggauuguaucaugacguccuaccaguaucucaucauucagaacacaaccugggaagaccauugccaguucagcagacccucuccuaucggcuaccuggggcuucugucccaacggacacgcgauauuuauaucagcagacggcuccugggaaccuuuaccuggacacuguccgacucugagggcaaugaaacgcccggcggguacugucucacccgcuggaugcugauugaggcggagcuuaaaugcuucggaaacacagccguugcuaaguguaaugaaaaacacgaugaggaauuuugcgacaugcugagacucuucgauuuuugcaagcaggccauccggcgccugaaagcugaggcccagaugagcauccagcuuauuaacaaggcggugaaugcccugaucaacgaccaacucauuaugaagaaucaccugagagauaucaugggcauuccuuauuguaacuacuccaaauauugcuaccugaaucauaccagcacagggcggaccucucucccccgcuguugccuggucuccaacggaagcuaccuuaaugaaacgcacuucucugacgacaucgagcagcaggcugauaacaugaucacagagaugcugcaaaaggaauaucucgacagacagggcaaaaccccucuggggcugguggaucuuuucguguuuagcaccuccuucuaccucauuucuaucuuucugcaucuggucaagauuccgacacaccggcauaucguuggaaaacccuguccuaagccccaccgccucaaucacaugggcauuugcagcuguggccuguauaaacagccuggggugcccgugagauggaagcggugaggacuaguuauaagacugacuagcccgaugggccucccaacgggcccuccuccccuccuugcaccgagauuaaucaaaggcucuuuucagagccaccaaaaaaaaaaaaaaaaaaaaaaaaaaaaaaaaaaaaaaaaaaaaaaaaaaaaaaaaaaaaaaaaaaaaaaaaaaaaaaaaaaaaaaaaaaaaaaaaaaaaa

SEQ ID NO: 41467 - RNA, 1689 nt, Artificial Sequence
  mRNA product Design i-3 (hSL-A100) comprising derived and/or modified sequence from LASV(G1180-SLE-2010;Clade IV)__AIT17168__GPCmut12 (opt5)
aggagaaagcuuaccaugggccagaucgugaccuucuuucaagaggucccccacguuauugaagaggugaugaacaucgugcugauugcccucagcauccuggcuguccuuaaggggcuguacaauuucgccacaugcggacucgugggccugcuuacguuucugcuccugugugggagauccugcaccgcgucucgguauaaaggaguuuacgaacugcagacacucgagcugaacauggaaacccuuaauauguguaugccucugagcugcacaaagaacaauucccaucacuauauuauggugggcaacgagaccgggcucgagcugacacuuaccaauacgucuaucaucaaccauaaauucuguaaucugagcgacgcucacaagaaaaaccucuacgaucaugcccugauguccauuaucucuaccuuucaccugagcauuccgaauuucaaccaguaugaagccauguccugcgacuuuaauggaggcaagaucagcguccaguacaaccucucucacuccuaugcuggcgaugccgcuaaucauugugggacaguggccaacggaguucugcaaaccuucaugcgcauggcguggggcgggagcuacauugcccuugacucuggacacggcuccugggauugcaucaugacaagcuaccaguaucugauuauccagaacaccacgugggaggaccauugucaguuuucuagacccuccccuaucggguaccucggacugcuuagccaacggacacgcgauauuuauaucuccagacggcugcucggcaccuucacauggacccugucugacagcgaaggcaaggauacccccgggggauacugccugacacgcuggaugcucauugaggcugagcugaaauguuuuggcaauacggccguggcuaagugcaacgaaaaacacgacgaggaguucugcgauaugcuuagacuguuugacuucuguaagcaggccauccagcggcucaaagcggaagcccagauguccauucaacugaucaauaaggcugucaacgcccuuaucaaugaucagcugauuaugaagaaccaccuccgcgacaucauggggauuccuuauugcaauuacagcaaauauuguuaccugaaccauaccacaaccggaaagacaucucugcccaaaugcugucucguguccaauggcagcuaccugaacgaaacccacuucucugacgauaucgagcagcaagcugacaauaugauuacggagaugcuucagaaggaauauauggagagacaggggaaaacaccucugggacucguggaucuguuugucuucagcaccuccuuuuaccugaucucuaucuuccuucaucucguuaagauuccgacccaccggcauaucgugggcaaaagcugccccaagccucaccgccugaaccacaugggcauuuguuccugcgggcuguauaagcagcccggagugccugucaaauggaagagaugaggacuaguuauaagacugacuagcccgaugggccucccaacgggcccuccuccccuccuugcaccgagauuaaucaaaggcucuuuucagagccaccaaaaaaaaaaaaaaaaaaaaaaaaaaaaaaaaaaaaaaaaaaaaaaaaaaaaaaaaaaaaaaaaaaaaaaaaaaaaaaaaaaaaaaaaaaaaaaaaaaaaa

SEQ ID NO: 41468 - RNA, 1689 nt, Artificial Sequence
  mRNA product Design i-3 (hSL-A100) comprising derived and/or modified sequence from LASV(G1442-SLE-2011;Clade IV)__AIT17180__GPCmut12 (opt5)
aggagaaagcuuaccaugggccagaucgugaccuucuuucaagaggucccccacguuauugaagaggugaugaacaucgugcugauugcccucagcauccuggcuguccuuaaggggcuguacaauguggccacaugcggacucauuggccugguuacguuccuucugcucugugggagauccugcaccacaacccuguauaaaggaguguacgaacugcagacacucgagcugaacauggaaacccuuaauauguguaugccucugucuugcacaaagaacaauagccaucacuauauccgggucggcaacgagaccgggcucgagcugacgcuuaccaauacauccaucauuaaccauaaauuuuguaaucugucugacgcgcacaagaaaaaccucuacgaucaugcucugaugagcaucauuuccaccuuccaccugucuaucccgaauuuuaaccaguaugaagccaugagcugcgacuucaauggaggcaagauuuccgugcaguacaaccucagccacucuuaugccggcgaugcugccaaucauugugggacaguugcuaacggagugcugcaaaccuuuaugcgcauggccuggggcggguccuacaucgcgcuugacagcggaagaggcaacugggauugcauuaugacgucuuaccaguaucugaucauccagaauacaaccugggacgaucacugucaguucucccggcccagcccuauuggguaccucggacugcuuucucaacgcacaagagacgucuauaucucccggcgccugcucggcaccuuuaccuggacacugagcgauuccgagggcaaggacacgcccgggggauacugccugaccagauggaugcucauugaagccgagcugaaauguuucggcaacacagcuguggccaagugcaaugagaaacaugaugaagaguuuugcgacaugcuucggcuguucgauuuuuguaagcaggcuauccagcgccucaaagccgaagcgcagaugucuauucaacugaucaacaaggccgugaaugcucuuaucaacgaccagcugauuaugaagaaucaccucagagacaucauggggauuccuuauugcaacuacagcaaauauuguuaccugaauaacaccgccacaggaaagaccucccugcccaaaugcugucucaucagcaauggcucuuaccugaacgagacgcacuucuccgaugacauugaacaggaggcugauaauaugaucacagagaugcuucaaaaggaauauauggagcggcaggggaaaaccccucugggacucgucgaccuguucguuuuuagcaccucuuucuaccugaucagcauuuuucuucaucucgugaagaucccgacacaccgccauauugugggcaaauccugccccaagccucacagacugaaccauaugggcaucuguucuugcgggcuguauaagcagcccggagucccugugcgguggaaacgcugaggacuaguuauaagacugacuagcccgaugggccucccaacgggcccuccuccccuccuugcaccgagauuaaucaaaggcucuuuucagagccaccaaaaaaaaaaaaaaaaaaaaaaaaaaaaaaaaaaaaaaaaaaaaaaaaaaaaaaaaaaaaaaaaaaaaaaaaaaaaaaaaaaaaaaaaaaaaaaaaaaaaa

SEQ ID NO: 41469 - RNA, 1689 nt, Artificial Sequence
  mRNA product Design i-3 (hSL-A100) comprising derived and/or modified sequence from LASV(G3010-SLE-2013;Clade IV)__AIT17344__GPCmut12 (opt5)
aggagaaagcuuaccaugggccagaucgugaccuucuuucaagaggucccccacguuauugaagaggugaugaacaucgugcugauugcccucagcauccuggcuguccuuaaggggcuguacaauuucgccacaugcggacucgugggccugguuacguuucuucugcucugugggagauccugcaccacaucucuguauaaaggaguguacgaacugcagacccucgagcugaacauggaaacacuuaauauguguaugccucugagcugcaccaagaacaauucccaucacuauauuauggucggcaacgagacagggcucgagcugacccuuacgaauaccucuaucaucaaccauaaauucuguaaucugagcgacgcgcacaagaaaaaccucuacaaucaugcucugauguccauuaucucuacauuucaccugagcauuccgaacuucaaucaguaugaagccauguccugcgauuuuaacggaggcaagaucagcgugcaguacaaucucucucacuccuaugccggcgacgcugccagccauugugggaccguugcuaacggagugcugcaaacauucaugcggauggccuggggcgggucuuacauugcgcuugauuccggauacggcaagugggacugcaucaugaccagcuaucaguaccugauuauccagaacacgacaugggaggaucacugucaguuuucucgccccuccccuaucggguaucucggacugcuuagccaaagaacccgggacauuuacaucucccgcagacugcucggcacauucaccuggacccugucugauagcgaaggcaaagacacacccgggggauauugccugacgcgguggaugcucauugaggccgagcugaaguguuuuggcaauaccgcugucgccaaaugcaacgaaaagcaugaugaggaguucugcgacaugcuucgccuguuugauuucuguaaacaggcuauccagagacucaagacagaagcccagauguccauucaacugaucaauaaggcggugaacgcccuuaucaaugaccagcugauuaugaaaaaccaccuccgggauaucauggggauuccuuacugcaauuauagcaaguacuguuaccugaaccacaccacaaccggaaaaacgucucugcccaagugcugucucguguccaauggcagcuaucugaacgaaacacauuucucugacgacaucgagcagcaagcugauaauaugauuaccgagaugcuucagaaagaauacauggagcgccaggggaagaccccucugggacucgucgaccuguuuguuuucagcacauccuuuuaucugaucucuaucuuccuucaccucgugaaaauuccgacccauagacacaucgugggcaagagcugccccaagccucaucggcugaaccacaugggcauuuguuccugcgggcuguacaaacagcccggagucccugugcgcuggaagagaugaggacuaguuauaagacugacuagcccgaugggccucccaacgggcccuccuccccuccuugcaccgagauuaaucaaaggcucuuuucagagccaccaaaaaaaaaaaaaaaaaaaaaaaaaaaaaaaaaaaaaaaaaaaaaaaaaaaaaaaaaaaaaaaaaaaaaaaaaaaaaaaaaaaaaaaaaaaaaaaaaaaaa

SEQ ID NO: 41470 - RNA, 1689 nt, Artificial Sequence
  mRNA product Design i-3 (hSL-A100) comprising derived and/or modified sequence from LASV(G502-SLE-2009;Clade IV)__AIT17126__GPCmut12 (opt5)
aggagaaagcuuaccaugggccagaucgugaccuucuuucaagaggucccccacguuauugaagaggugaugaacaucgugcugauugcccucagcauccuggcuguccuuaaggggcuguacaauuucgccacaugcggacucgugggccugcuuacguuucugcuccugugugggagauccugcaccacaggacuguauaaaggcguuuacgaacuccagacccuggagcuuaacauggaaacacugaauauguguaugccucucucuugcaccaagaacaauagccaucacuauauuaugguggggaacgagacaggacuggagcuuacccugacgaauaccuccaucaucaaccauaaauucuguaaucucucugacgcgcacaagaaaaaccuguacgaucaugcucugaugagcauuaucuccacauuucaccucucuauuccgaauuucaaccaguaugaagccaugagcugcgacuuuaauggcggcaagaucuccguccaguacaaccugagccacucuuaugccggggaugcugccgaccauuguggaaccguggcuaauggcguucuucaaacauucaugcggauggccuggggaggguccuacauugcgcuggauagcggccgcgggagaugggacugcaucaugaccucuuaccaguaucucauuauccagaacacgacaugggaggaucacugucaguuuucccggcccagcccuaucggauaccugggccuucugucucaacgcaccagagacauuuauaucucccggcgccuccugggcacauucaccuggacccugagcgauuccgaagggaaggacacacccggaggcuacugccucacgagauggaugcugauugaggccgagcuuaaauguuuugggaacaccgcuguggccaagugcaaugaaaaacaugaugaggaguucugcgacaugcugcggcucuuugauuucuguaagcaggcuauccagcgccugaaagccgaagcgcagaugucuauucaacuuaucaacaaggccgucaaugcucugaucaacgaccagcucgugaugaagaaucaccugagagacauuaugggaaucccuuauugcaacuacagccgguauuguuaccugaaucacacaaccacaggccgcaccucccuccccaaaugcugucuggugagcaacgggucuuaccuuaaugaaacgcauuucuccgaugacauugagcagcaagccgauaacaugaucacagagaugcugcagaaggaauauauggagagacagggaaaaaccccucucggccuggucgaccuguuuguuuucagcaccucuuuuuaccuuauuagcaucuuccuccaccuggugaagaucccgacacaucggcacauugugggcaaauccugccccaagccucaucgccugaaucacauggggaucuguucuugcggacucuauaaacagcccggcgucccugugaaguggaagagaugaggacuaguuauaagacugacuagcccgaugggccucccaacgggcccuccuccccuccuugcaccgagauuaaucaaaggcucuuuucagagccaccaaaaaaaaaaaaaaaaaaaaaaaaaaaaaaaaaaaaaaaaaaaaaaaaaaaaaaaaaaaaaaaaaaaaaaaaaaaaaaaaaaaaaaaaaaaaaaaaaaaaa

SEQ ID NO: 41471 - RNA, 1689 nt, Artificial Sequence
  mRNA product Design i-3 (hSL-A100) comprising derived and/or modified sequence from LASV(G733-SLE-2010;Clade IV)__AIT17154__GPCmut12 (opt5)
aggagaaagcuuaccaugggccagaucgugaccuucuuucaagaggucccccacguuauugaagaggugaugaacaucgugcugauugcccucagcauccuggcuguccuuaaggggcuguacaauuucgccacaugcggaauugugggccucguuuccuuucugcuucugugugggagaucuugcacgaccagccucuauaaaggaguguacgaacugcagacacuggagcucaacauggaaacccugaauauguguaugccucuuuccugcacaaagaacaauucucaucacuauaucauggucggcaacgagaccgggcuggagcucacacugaccaauacgagcaucauuaaccauaaauucuguaaucuuuccgacgcgcacaagaaaaaccuguacgaucaugcucucaugucuaucauuagcaccuuucaccuguccaucccgaauuucaaccaguaugaagccaugagcugcgacuuuaauggaggcaagauuucugugcaguacaaccugucccacagcuaugccggcgaugcugccaaucauugugggacaaucgcuaacggaguucuccaaaccuucaugcggauggccuggggcgggucuuacauugcgcuggacuccggacgcgauagaugggacugcaucaugacaagcuaccaguaucuuaucauucagaacaccacgugggaggaucacugucaguuuucucggcccuccccuaucggcuaccuggggcuccugagccaacgcacaagagacauuuauaucucccggcgccuucugggaaccuucacauggacccucucugauagcgaaggcaaggacacccccggcggguacugccugacaagauggaugcugauugaggccgagcucaaauguuuuggaaauacggcuguggccaagugcaacgaaaaacaugaugaggaguucugcgacaugcugcggcuuuuugauuucuguaagcaggcuauccagcgccugaaagccgaagcgcagauguccauccaacucauuaauaaggccgucaacgcucugaucaaugaccagcuuauuaugaagaaccaccugagagacaucaugggcauuccuuauugcaauuacagcaaauauuguuaccucaaccacaccacaaccgggaagacaucucugcccaaaugcugucugguguccaauggaagcuaccucaacgaaacccauuucucugaugacaucgagcagcaagccgauaauaugaucacggagaugcugcagaaggaauauauggagcggcagggcaaaacaccucuugggcugguggaccucuuugucuucagcaccuccuuuuaccugauuucuaucuuccugcaccuuguuaagauuccgacccaucgccacguggugggaaaaagcugccccaagccucauagacucaaccacaugggcaucuguuccugcggccuguaugggcagcccggagucccugugaaguggaaacggugaggacuaguuauaagacugacuagcccgaugggccucccaacgggcccuccuccccuccuugcaccgagauuaaucaaaggcucuuuucagagccaccaaaaaaaaaaaaaaaaaaaaaaaaaaaaaaaaaaaaaaaaaaaaaaaaaaaaaaaaaaaaaaaaaaaaaaaaaaaaaaaaaaaaaaaaaaaaaaaaaaaaa

SEQ ID NO: 41472 - RNA, 1689 nt, Artificial Sequence
  mRNA product Design i-3 (hSL-A100) comprising derived and/or modified sequence from MOPV/LASV reassortant(IGS-1;Clade IV)__AFY05576__GPCmut12 (opt5)
aggagaaagcuuaccaugggccagaucgugaccuucuuucaagaggucccccacguuauugaagaggugaugaacaucgugcugauugcccucagcguccuggcugugcuuaaggggcuguacaauuucgccacaugcggacucguuggccuggugacguuucuucugcucugugggagauccugcaccacaucucuguauaaaggagucuacgaacugcagacccucgagcugaacauggaaacacuuaauauguguaugccucugagcugcaccaagaacaauucccaucacuauaucauggugggcaacgagacagggcucgagcugacccuuacgaauaccucuauuaucaaccauaaauucuguaaucugagcgacgcgcacaagaaaaaccucuacgaucaugcucugauguccaucauuucuacauuucaccugagcaucccgaauuucaaccaguaugaagccauguccugcgacuuuaauggaggcaagauuagcguucaguacaaccucucucacuccuaugccggcgaugcugccaaucauugugggaccguggcuaacggaguccugcaaacauucaugcggauggccuggggcgggagcuacaucgcgcuugacucuggacgcggcaacugggauugcauuaugaccuccuaccaguaucugaucauucagaauacgacaugggaggaccacugucaguuuagcagacccucuccuaucggguaccucggacugcuuucccaacggacccgcgauaucuauauuagcagacggcugcucggcacauucaccuggacccuguccgacucugaaggcgaggauacacccgggggauacugccugacgcgcuggaugcucaucgaggccgaacugaaguguuuuggcaacaccgcuguggccaaaugcaaugagaagcaugacgaagaguucugcgauaugcuuagacuguuugacuucuguaaacaggcuauucagcggcucaaggccgaagcgcagaugagcauccaacugauuaacaaagccgugaaugcucuuaucaacgaucagcugaucaugaagaaucaccuccgcgacauuauggggaucccuuauugcaacuacuccaaguauuguuaccugaaucacacaaccacaggaagaaccagccugcccaaaugcugucucgucucuaacggcuccuaccugaaugagacgcauuucagcgacgauauugagcagcaagccgacaacaugaucacagaaaugcuucagaaggaguauauggaacggcaggggaaaaccccucugggacucguugaucuguuuguguucucuaccagcuuuuaccugauuuccaucuuccuucaccucgugaagaucccgacacaucgccacauugucggcaaaucuugccccaagccucauagacugaaucacaugggcaucuguagcugcgggcuguauaaacagcccggagugccuguuaaguggaagcggugaggacuaguuauaagacugacuagcccgaugggccucccaacgggcccuccuccccuccuugcaccgagauuaaucaaaggcucuuuucagagccaccaaaaaaaaaaaaaaaaaaaaaaaaaaaaaaaaaaaaaaaaaaaaaaaaaaaaaaaaaaaaaaaaaaaaaaaaaaaaaaaaaaaaaaaaaaaaaaaaaaaaa

SEQ ID NO: 41473 - RNA, 1689 nt, Artificial Sequence
  mRNA product Design i-3 (hSL-A100) comprising derived and/or modified sequence from LASV(LM765-SLE-2012;Clade IV)__AIT17814__GPCmut12 (opt5)
aggagaaagcuuaccaugggccagaucgugaccuucuuucaagaggucccccacguuauugaagaggugaugaacaucgugcugauugcccucagcauccuggcuguccuuaaggggcuguacaauuucgccacaugcggacucgugggccugguuacguuucuucugcucugugggagauccugcaccacaucucuguauaaaggaguguacgaacugcagacccucgagcugaacauggaaacacuuaauauguguaugccucugagcugcaccaagaacaauucccaucacuauauuauggucggcaacgagacagggcucgagcugacccuuacgaauaccucuaucaucgaccauaaauucuguaaccugagcgaugcgcaccggaagaaucucuacgaccaugcucugauguccauuaucucuacauuucaccugagcauuccgaacuucaaucaguaugaagccauguccugcgauuuuaacggaggcaaaaucagcgugcaguacaaucucucucacuccuaugccaaggacgcugccgaucauuguggcaccguugcuaacggggugcugcaaacauucaugcgcauggccuggggaggcagcuacauugcgcuugacucugggagaggacggugggauugcaucaugaccuccuaccaguaucugauuauccagaauacgacaugggaggaccacugucaguuuagccgccccucuccuaucggcuaccucgggcugcuuucccaaagaacccgggauauuuauaucagccgcagacugcucggaacauucaccuggacccuguccgacucugaaggcaaggauacacccggcggguacugccugacgcgguggaugcucauugaggccgagcugaaauguuuuggaaacaccgcugucgccaagugcaacgaaaaacaugacgaggaguucugcgauaugcuucgccuguuugacuucuguaagcaggcuauccagagacucaaagccgaagcgcagaugagcauucaacugaucaauaaggccgugaacgcucuuaucaaugaccagcugauuaugaagaaccaccuccgggauaucaugggcauuccuuauugcaauuacuccaaauauuguuaccugaaccacacaaccacagggaagaccagccugcccaaaugcugucucgugucuaauggauccuaccugaacgaaacgcauuucagcgacgauaucgagcagcaagccgacaauaugauuacagagaugcuucagaaggaauauauggagcgccagggcaaaaccccucuggggcucgucgaucuguuuguuuucucuaccagcuuuuaccugaucuccaucuuccuucaccucgugaagauuccgacacauagacacaucgugggaaaacccugcccuaagccccaucggcugaaccacaugggcauuuguucuugcggccuguauaagcagccugggguccccgugaaauggaagcgcugaggacuaguuauaagacugacuagcccgaugggccucccaacgggcccuccuccccuccuugcaccgagauuaaucaaaggcucuuuucagagccaccaaaaaaaaaaaaaaaaaaaaaaaaaaaaaaaaaaaaaaaaaaaaaaaaaaaaaaaaaaaaaaaaaaaaaaaaaaaaaaaaaaaaaaaaaaaaaaaaaaaaa

SEQ ID NO: 41474 - RNA, 1689 nt, Artificial Sequence
  mRNA product Design i-3 (hSL-A100) comprising derived and/or modified sequence from LASV(LM776-SLE-2012;Clade IV)__AIT17824__GPCmut12 (opt5)
aggagaaagcuuaccaugggccagaucgugaccuucuuucaagaggucccccacguuauugaagaggugaugaacaucgugcugauugcccucagcauccuggcuguccuuaaggggcuguacaauuucgccacaugcggacucgugggccugguuacguuucuucugcucugugggagauccugcaccacaucuguguauaaaggagucuacgaacugcagacccuggagcucaacauggaaacacugaauauguguaugccucuuagcugcaccaagaacaauucccaucacuauauuauggugggcaacgagacagggcuggagcucacccugacgaauaccucuaucaucaaccauaaauucuguaaucuuagcgacgcgcacaagaaaaaccuguacgaucaugcucucauguccauuaucucuacauuucaccugagcauuccgaauuucaaccaguaugaagccauguccugcgacuuuaauggaggcaagaucagcguucaguacaaccugucucacuccuaugccggcgaugcugccaaucauugugggaccguggcuaacggaguccuccaaacauucaugcggauggccuggggcgggagcuacauugcgcuggacucuggacacggcaagugggauugcaucaugaccuccuaccaguaucuuauuauccagaacacgacaugggaggaccauugucaguuuagccgccccucuccuaucggguaccugggacuccugucccaaagaacccgggauauuuauaucagccgcagacuucugggcacauucaccuggacccucuccgacucugaaggcaaagauacacccgggggauacugccugacgcgguggaugcugauugaggccgagcucaaguguuuuggcaauaccgcuguggccaaaugcaacgaaaagcacgacgaggaguucugcgauaugcugcgccuuuuugacuucuguaaacaggcuauccagagacugaaggccgaagcgcagaugagcauucaacucaucaauaaggccgugaacgcucugaucaaugaucagcuuauuaugaaaaaccaucugcgggacaucauggggauuccuuauugcaauuacuccaaguauuguuaccucaaccacacaaccacaggaaaaaccagccugcccaagugcugucuggucucuaauggcuccuaccucaacgaaacgcacuucagcgacgauaucgagcagcaagccgacaauaugauuacagagaugcugcagaaagaauauauggagcgccaggggaagaccccucuuggacugguugaucucuuuguguucucuaccagcuuuuaccugaucuccaucuuccugcaucuugugaaaauuccgacacacagacauaucgucggcaagucuugccccaagccucaccggcucaaccacaugggcauuuguagcugcgggcuguauaaacagcccggagugccuguucgcuggaagagaugaggacuaguuauaagacugacuagcccgaugggccucccaacgggcccuccuccccuccuugcaccgagauuaaucaaaggcucuuuucagagccaccaaaaaaaaaaaaaaaaaaaaaaaaaaaaaaaaaaaaaaaaaaaaaaaaaaaaaaaaaaaaaaaaaaaaaaaaaaaaaaaaaaaaaaaaaaaaaaaaaaaaa

SEQ ID NO: 41475 - RNA, 1689 nt, Artificial Sequence
  mRNA product Design i-3 (hSL-A100) comprising derived and/or modified sequence from LASV(Mad39;Clade IV)__ANH09722__GPCmut12 (opt5)
aggagaaagcuuaccaugggccagaucgugaccuucuuucaagaggucccccacguuauugaagaggugaugaacaucgugcugauugcccucagcauccuggcuguccuuaaggggcuguacaauguggccacaugcggacucauuggccugguuacguuccuucugcucugugggagauccugcaccacaacccuguauaaaggaguguacgaacugcaggcgcucgagcugaacauggaaacacuuaauauguguaugccucugucuugcaccaagaacaauagccaucacuauauccgggucggcaacgagacagggcucgagcugacccuuacgaauaccucccugaucaaccauaaauuuuguaaucucucugacgcucacaagaaaaaccuguacgaucaugcccugaugagcauuaucuccacauuccaccucucuauuccgaauuuuaaccaguaugaagccaugagcugcgacuucaaugauggaaagaucuccgugcaguacaaccugagccacaccuaugcuggcgacacagccaaucauuguggcaccguugcuaacggggugcuucaaacguuuaugcgcauggccuggggaggcucuuacauugcgcuggauuccgggagaggaggcugggacugcaucaugacaagcuaccaguaucucauuauccagaacaccacaugggaggaucacugucaguucucucggcccuccccuaucggguaccugggacuucugagccaacgcaccagagacauuuauaucucucggcgccuccugggcaccuuuacauggacgcuguccgauagcgaaggcaaggacacccccgggggauacugccucacaagauggaugcugauugaggccgagcuuaaauguuucggcaauaccgcugucgccaagugcaacgaaaaacaugaugaggaauuuugcgacaugcugcgccucuucgauuuuuguaagcaggcuauccagcggcugaaagccgaggcgcagauguccauucaacuuaucaauaaggccgugaacgcucugaucaaugaccagcucauuaugaagaaccaccugagagacaucauggggauuccuuauugcaauuacucuaaauauuguuaccugaaccacacagugaccggaaagacgagccuccccaaaugcugucuggucuccaauggcagcuaccuuaacgaaacacauuucucugaugacaucgagcagcaagccgauaauaugauuaccgagaugcugcagaaggaauauauggagcggcaggggaaaaccccucucggacugguugaccuguucguguuuuccaccagcuucuaccuuaucucuaucuuucuccaccuggugaagauuccgacacaucgccacgucgugggcaaacccugcccuaagccccauagacugaaccacaugggcaucuguagcugcggguucuauaagcagccuggaguucccgugcgguggaaacgcugaggacuaguuauaagacugacuagcccgaugggccucccaacgggcccuccuccccuccuugcaccgagauuaaucaaaggcucuuuucagagccaccaaaaaaaaaaaaaaaaaaaaaaaaaaaaaaaaaaaaaaaaaaaaaaaaaaaaaaaaaaaaaaaaaaaaaaaaaaaaaaaaaaaaaaaaaaaaaaaaaaaaa

SEQ ID NO: 41476 - RNA, 1689 nt, Artificial Sequence
  mRNA product Design i-3 (hSL-A100) comprising derived and/or modified sequence from LASV(Z0947-SLE-2011;Clade IV)__AIT17840__GPCmut12 (opt5)
aggagaaagcuuaccaugggccagaucgugaccuucuuucaagaggucccccacguuauugaagaggugaugaacaucgugcugauugcccucagcauccuggcuguccuuaaggggcuguacaauuucgccacaugcggacucgugggccugguuacguuucuucugcucugugggagauccugcaccauuucucuguauaaaggaguguacgaacugcagacacucgagcugaacauggaaacccuuaauauguguaugccucugagcugcacaaagaacaauucccaucacuauaucauggucggcaacgagaccgggcucgagcugacacuuaccaauacgucuaucauuaaccauaaauucuguaaucugagcgacgcgcacaagaaaaaccucuacgaucaugcucugauguccaucauuucuaccuuucaccugagcaucccgaauuucaaccaguaugaagccauguccugcgacuuuaauggaggcaagauuagcgugcaguacaaccucucucacuccuaugccggcgaugcugccaaucauugugggacaguugcuaacggagugcugcaaaccuucaugcggauggccuggggcgggagcuacaucgcgcuugacucuggacgcgauagaugggacugcauuaugacauccuaccaguaucugaucauccagaacaccacgugggaggaucacugucaguuuagccggcccucuccuauuggcuaccucgggcugcuuucccaacgcacaagagacaucuauauuagccggcgccugcucggaaccuucacauggacccuguccgauucugaaggcaaggacacccccggcggguacugccugacaagauggaugcucaucgaggccgagcugaaauguuuuggaaauacggcugucgccaagugcaacgaaaaacaugaugaggaguucugcgacaugcuucggcuguuugauuucuguaagcaggcuauucagcgccucaaagccgaagcgcagaugagcauccaacugaucaauaaggccgugaacgcucuuauuaaugaccagcugaucaugaagaaccaccucagagacauuaugggcaucccuuauugcaauuacuccaaauauuguuaccugaaccacaccacaaccgggaagacaagccugcccaaaugcugucucgugucuaauggauccuaccugaacgaaacccauuucagcgaugacauugagcagcaagccgauaauaugaucacggagaugcuucagaaggaauauauggagcggcagggcaaaacaccucuggggcucgucgaccuguuuguuuucucuaccagcuuuuaccugaucuccauuuuccuucaccucgugaagaucccgacccaucgccacauugugggaaaacccugcccuaagccccauagacugaaccacaugggcaucuguucuugcggccuguauaagcagccugggguccccgugaaauggaagcggugaggacuaguuauaagacugacuagcccgaugggccucccaacgggcccuccuccccuccuugcaccgagauuaaucaaaggcucuuuucagagccaccaaaaaaaaaaaaaaaaaaaaaaaaaaaaaaaaaaaaaaaaaaaaaaaaaaaaaaaaaaaaaaaaaaaaaaaaaaaaaaaaaaaaaaaaaaaaaaaaaaaaa

SEQ ID NO: 41477 - RNA, 1665 nt, Artificial Sequence
  mRNA product Design i-3 (A100) comprising derived and/or modified sequence from LASV(Josiah;Clade IV)__NP_694870__GPCmut12 (opt1)
aggagaaagcuuaccaugggccagaucgugaccuucuuccaggaggucccccacgugaucgaggaggugaugaacaucguccugaucgcccucagcgugcuggccgugcugaaggggcucuacaacuucgcgaccugcggccuggucgggcuggugacguuccuccugcugugcggccgcuccugcaccaccagccucuacaaggggguguacgagcugcagacccuggagcucaacauggagacgcugaacaugugcaugccgcuguccugcaccaagaacaacagccaccacuacaucauggucggcaacgagaccggccucgagcugacgcugaccaacaccuccaucaucaaccacaaguucugcaaccucagcgacgcccacaagaagaaccuguacgaccacgcccugauguccaucaucagcaccuuccaccucuccauccccaacuucaaccaguacgaggccaugagcugcgacuucaacgggggcaagaucuccgugcaguacaaccugagccacuccuacgccggggacgcggccaaccacugcggcacgguggccaacgggguccugcagaccuucaugcggauggccuggggcggcagcuacaucgcgcucgacuccgggcgcggcaacugggacugcaucaugaccagcuaccaguaccugaucauccagaacaccacgugggaggaccacugccaguucucccggcccagccccaucggguaccugggccuccugucccagcgcacccgggacaucuacaucagccgccggcugcucggcaccuucaccuggacgcugagcgacuccgaggggaaggacaccccgggcggguacugccugacccgcuggaugcucaucgaggccgagcugaagugcuucggcaacaccgccguggccaagugcaacgagaagcacgacgaggaguucugcgacaugcugcggcuguucgacuucugcaagcaggccauccagcgccugaaggcggaggcccagaugagcauccagcugaucaacaaggccgugaacgcccucaucaacgaccagcugaucaugaagaaccaccuccgggacaucauggggauccccuacugcaacuacuccaaguacugcuaccucaaccacacgaccaccggccgcaccagccugcccaagugcugccuggucuccaacggcagcuaccucaacgagacgcacuucuccgacgacaucgagcagcaggccgacaacaugaucaccgagaugcugcagaaggaguacauggagcggcaggggaagacgccccugggccucguggaccuguucguguucagcaccuccuucuaccugaucagcaucuuccugcaccucgucaagaucccgacccaccgccacaucguggggaaguccugccccaagccccaccggcugaaccacaugggcaucugcagcugcgggcuguacaagcagcccggcgugccggucaaguggaagcgcugaggacuaguuauaagacugacuagcccgaugggccucccaacgggcccuccuccccuccuugcaccgagauuaauaaaaaaaaaaaaaaaaaaaaaaaaaaaaaaaaaaaaaaaaaaaaaaaaaaaaaaaaaaaaaaaaaaaaaaaaaaaaaaaaaaaaaaaaaaaaaaaaaaaa

SEQ ID NO: 41478 - RNA, 1662 nt, Artificial Sequence
  mRNA product Design i-3 (A100) comprising derived and/or modified sequence from LASV(LP;Clade I)__AAF86701__GPCmut12 (opt1)
aggagaaagcuuaccaugggccagaucaucaccuucuuccaggaggugccccacgucaucgaggaggugaugaacaucgugcugaucgcccucagccugcuggccauccucaaggggcuguacaacaucgcgaccugcggcaucaucgggcuggucgccuuccucuuccugugcggcaaguccugcagccugacgcucaagggcggguacgagcugcagacccuggagcucaacauggagacccugaacaugugcaugccgcuguccugcacgaagaacagcucccaccacuacauccgcgugggcaacgagaccgggcucgagcugacccugaccaacacgagcaucaucaaccacaaguucugcaaccucuccgacgcccacaagaagaaccuguacgaccacgcccugaugagcaucaucuccaccuuccaccucagcauccccaacuucaaccaguacgaggccauguccugcgacuucaacggcgggaagaucagcgugcaguacaaccugucccacagcuacgcgggcgacgccgccgagcacugcgggaccgucgccaacggcgugcugcagaccuucaugcggauggcguggggcgggcgcuacaucgcccucgacuccggcaaggggaacugggacugcaucaugacgagcuaccaguaccugaucauccagaacaccaccugggaggaccacugccaguucucccggcccagccccaucggcuaccugggccuccugucccagcgcacccgggacaucuacaucagccgccggcugcucgggacguucaccuggacccugagcgacuccgagggcaacgagacccccgggggcuacugccugacgcgcuggaugcucaucgaggccgagcugaagugcuucgggaacaccgccguggccaagugcaacgagaagcacgacgaggaguucugcgacaugcugcggcuguucgacuucugcaagcaggcgauccgccggcugaaggccgaggcccagaugagcauccagcugaucaacaaggccgucaacgcccucaucaacgaccagcugaucaugaagaaccaccuccgcgacaucaugggcauccccuacugcaacuacuccaaguacugcuaccucaaccacaccagcuccggccggaccagccugcccaagugcugccugaucuccaacgggagcuaccucaacgagacgcaguucuccgacgacaucgagcagcaggcggacaacaugaucaccgagaugcugcagaaggaguacaucgagcgccagggcaagaccccgcuggggcucguggacaucuucaucuucagcaccuccuucuaccugaucagcaucuuccugcaccugaucaagaucccgacgcaccggcacaucgugggcaagcccugccccaagccccaccgccucaaccacaugggggucugcuccugcggccuguacaagcacccgggcgugcccaccaaguggaagcggugaggacuaguuauaagacugacuagcccgaugggccucccaacgggcccuccuccccuccuugcaccgagauuaauaaaaaaaaaaaaaaaaaaaaaaaaaaaaaaaaaaaaaaaaaaaaaaaaaaaaaaaaaaaaaaaaaaaaaaaaaaaaaaaaaaaaaaaaaaaaaaaaaaaa

SEQ ID NO: 41479 - RNA, 1662 nt, Artificial Sequence
  mRNA product Design i-3 (A100) comprising derived and/or modified sequence from LASV(803213;Clade II)__AAF86703__GPCmut12 (opt1)
aggagaaagcuuaccaugggccagaucaucaccuucuuccaggaggugccccacgucaucgaggaggugaugaacaucgugcugaucgcccucagccugcuggccauccucaaggggaucuacaacgucgcgaccugcggccuguucgggcugaucuccuuccuccugcugugcggccgcagcugcuccgugacguacaaggggguguacgagcuccagacccuggagcugaacauggccaaccucaacaugugcaugccgcugagcugcaccaagaacaacucccaccacuacaucauggucggcaacgagacgggccuggagcucacccugaccaacaccagcaucaucaaccacaaguucugcaaccuguccgacgcccacaagaagaaccucuacgaccacgcccugaugagcaucaucuccacguuccaccugagcauccccaacuucaaccaguacgaggccauguccugcgacuucaacgggggcaagaucagcgugcaguacaaccucucccacagcuucgcgguggacgccgccaaccacugcgggaccaucgccaacggcguccugcagaccuucaugcggauggcguggggcggguccuacaucgcccuggacagcggcaaggggaacugggacugcaucaugaccuccuaccaguaccucaucauccagaacacgaccugggaggaccacugccaguucagccgccccucccccaucggcuaccuggggcugcucagccagcggacccgcgacaucuacaucagccggcgccugcugggcaccuucacguggacccucuccgacagcgagggcaacgaggcccccgggggcuacugccugacccgguggaugcugaucgaggccgagcucaagugcuucgggaacaccgccguggcgaagugcaacgagaagcacgacgaggaguucugcgacaugcugcgccuguucgacuucugcaagcaggccaucaagcggcucaagacggaggcccagauguccauccagcugaucaacaaggccgugaacgcccugaucaacgaccagcucaucaugaagaaccaccuccgcgacaucaugggcauccccuacugcaacuacagccgguacugcuaccugaaccacaccgucaccgggaagaccucccugccccgcugcugccuggugagcaacggcuccuaccugaacgagacgcacuucagcgacgacaucgagcagcaggcggacaacaugaucaccgagaugcuccagaaggaguacauggaccggcagggcaagaccccgcuggggcugguggaccucuucgucuucuccaccagcuucuaccugaucuccaucuuccugcaccuggugaagaucccgacgcaccgccacaucgugggcaagcccugccccaagccccaccggcucaaccacauggggaucugcagcugcggccuguacaagcacccggggguccccgugaaguggaagcgcugaggacuaguuauaagacugacuagcccgaugggccucccaacgggcccuccuccccuccuugcaccgagauuaauaaaaaaaaaaaaaaaaaaaaaaaaaaaaaaaaaaaaaaaaaaaaaaaaaaaaaaaaaaaaaaaaaaaaaaaaaaaaaaaaaaaaaaaaaaaaaaaaaaaa

SEQ ID NO: 41480 - RNA, 1662 nt, Artificial Sequence
  mRNA product Design i-3 (A100) comprising derived and/or modified sequence from LASV(GA391;Clade III)__CAA36645__GPCmut12 (opt1)
aggagaaagcuuaccaugggccagaucgugaccuucuuccaggaggucccccacgugaucgaggaggugaugaacaucguccugaucgcccucagcauccuggccauccugaaggggcucuacaacguggcgaccugcggccugaucgggcuggugacguuccuccugcuguccggccgcagcugcucccucaucuacaaggggaccuacgagcugcagacccuggagcucaacauggagacccugaacaugugcaugccgcugagcugcaccaagaacaacucccaccacuacauccgggucggcaacgagaccggccucgagcugacccugacgaacaccagcauccucaaccacaaguucugcaaccuguccgacgcccacaagcgcaaccuguacgaccacagccucauguccaucaucagcaccuuccaccuguccauccccaacuucaaccaguacgaggccaugagcugcgacuucaacgggggcaagaucaccgugcaguacaaccugucccacagcuucgccguggacgccgcggggcacugcggcacgcucgccaacgggguccugcagaccuucaugcggauggccuggggcggcuccuacaucgcccuggacagcgggcgcggcaacugggacugcaucaugaccuccuaccaguaccucaucauccagaacaccacgugggacgaccacugccaguucagccggcccucccccaucggguaccugggccugcucagccagcgcacccgggacaucuacaucagccgccggcugcugggcaccuucaccuggacgcucuccgacagcgaggggaacgagaccccgggcggguacugccugacccgcuggaugcugaucgaggcggagcucaagugcuucggcaacaccgccguggccaagugcaacgagaagcacgacgaggaguucugcgacaugcugcggcuguucgacuucugcaagcaggccauccgccggcucaagacggaggcccagauguccauccagcugaucaacaaggcggugaacgcccugaucaacgaccagcucaucaugaagaaccaccuccgcgacaucauggggauccccuacugcaacuacagccgguacugcuaccugaaccacaccuccaccggcaagaccagccugccccgcugcugccugaucuccaacggcagcuaccugaacgagacgaaguucuccgacgacaucgagcagcaggccgacaacaugaucaccgagaugcuccagaaggaguacaucgaccggcaggggaagacgccccugggccuggucgaccuguucguguucagcaccuccuucuaccucaucagcaucuuccugcaccuggugaagaucccgacccaccgccacaucgucgggaagcccugccccaagccccaccggcucaaccacaugggcaucugcuccugcgggcuguacaagcagccgggcgugcccgugcgcuggaagcggugaggacuaguuauaagacugacuagcccgaugggccucccaacgggcccuccuccccuccuugcaccgagauuaauaaaaaaaaaaaaaaaaaaaaaaaaaaaaaaaaaaaaaaaaaaaaaaaaaaaaaaaaaaaaaaaaaaaaaaaaaaaaaaaaaaaaaaaaaaaaaaaaaaaa

SEQ ID NO: 41481 - RNA, 1665 nt, Artificial Sequence
  mRNA product Design i-3 (A100) comprising derived and/or modified sequence from LASV(AV;Clade V)__CCA30314__GPCmut12 (opt1)
aggagaaagcuuaccaugggccagaucgugaccuucuuccaggaggucccccacgugaucgaggaggugaugaacaucguccugaucgcccucagcauccuggccgugcugaaggggcucuacaacaucgcgaccugcggccugaucgggcugaucacguuccuccugcugugcggccgcuccugcagcuccaaccucuacaaggggguguacgagcugcagagccuggaccucaacauggagacccugaacaugugcaugccgcuguccugcaccaagaacaacagccaccacuacauccgggucggcaacgacacgggccucgagcugacccugaccaacaccuccauccucaaccacaaguucugcaaccugagcgacgcccacaagaaggaccuguacgaccacgcccucauguccaucaucagcacguuccaccuguccauccccaacuucaaccaguacgaggccaugagcugcgacuucaacgggggcaagaucuccgugcaguacaaccugagccacuccuacgccaucgacgcggccaaccacugcgggaccguggccaacggcauccuccagaccuucaugcgcauggccuggggcgggagcuacaucgcgcuggacuccggccgggggaacugggacugcaucaugaccagcuaccaguaccugaucauccagaacacgaccugggagaaccacugccaguucucccgccccagccccaucggcuaccucgggcugcugagccagcggacccgcgacaucuacaucucccggcgccuccugggcaccuucacguggacccugagcgacuccgagggcaacgccacccccgggggcuacugccucacccgguggaugcugaucgaggccgagcugaagugcuucgggaacacggccgucgccaagugcaacgagaagcacgacgaggaguucugcgacaugcuccgccuguucgacuucugcaagcaggcgaucagccggcugaaguccgaggcccagaugagcauccagcucaucaacaaggccgugaacgcccugaucaacgaccagcugaucaugaagaaccaccuccgcgacaucaugggcauccccuacugcaacuacuccaaguacugcuaccugaaccacaccaucaccgggaagaccagccugcccaagugcugccucguguccaacggcagcuaccugaacgagacgcacuucuccgacgacaucgagcagcaggccgacaacaugaucaccgagaugcugcagaaggaguacauggagcggcagggcaagaccccgcucgggcuggucgaccuguucguguucagcaccuccuucuaccugaucagcaucuuccuccgccuggugaagaucccgacgcaccggcacaucgucggcaagcccugccccaagccccaccgccugaaccacauggggaucugcuccugcggccucuacaagcagccgggggugcccgugcgguggaagcgcugaggacuaguuauaagacugacuagcccgaugggccucccaacgggcccuccuccccuccuugcaccgagauuaauaaaaaaaaaaaaaaaaaaaaaaaaaaaaaaaaaaaaaaaaaaaaaaaaaaaaaaaaaaaaaaaaaaaaaaaaaaaaaaaaaaaaaaaaaaaaaaaaaaaa

SEQ ID NO: 41482 - RNA, 1662 nt, Artificial Sequence
  mRNA product Design i-3 (A100) comprising derived and/or modified sequence from LASV(Togo/2016/7082;Clade VI)__AMR44577__GPCmut12 (opt1)
aggagaaagcuuaccaugggccagaucaucaccuucuuccaggaggugccccacgucaucgaggaggugaugaacaucgugcugaucgcccucagccugcuggccauccucaagggggucuacaacguggcgaccugcggcaucaucgggcuggugacguuccuguuccucugcggccgcuccugcagccugaucuacaagggguccuacgagcugcagacccucgagcugaacauggagacccugaacaugugcaugccgcucagcugcacgaagaacuccagccaccacuacauccgggucggcaacgagaccggccuggagcugacccucaccaacacguccaucaucaaccacaaguucugcaaccugagcgacgcccacaagcgcaaccuguacgaccacgcccucauguccauccugagcaccuuccaccuguccauccccaacuucaaccaguacgaggccaugagcugcgacuucaacgggggcaagaucuccgugcaguacaaccucagccacgccuacgcgguggacgccgccgagcacugcgggaccgucgccaacggcgugcugcagaccuucaugcggauggcguggggcggguccuacaucgcccuggacagcggccgcgggaacugggacugcaucaugacguccuaccaguaccucaucauccagaacaccaccugggaggaccacugccaguucagccggcccucccccaucggcuaccuggggcugcucagccagcgcacccgggacaucuacaucagccgccggcugcugggcacguucaccuggacccucuccgacagcgagggcaacgagacccccgggggcuacugccugacgcgcuggaugcugaucgaggccgagcucaagugcuucgggaacaccgccguggccaagugcaacgagaagcacgacgaggaguucugcgacaugcugcggcuguucgacuucugcaagcaggcgauccagcgccucaaguccgaggcccagaugagcauccagcugaucaacaaggccgucaacgcccugaucaacgaccagcucaucaugaagaaccaccuccgggacaugaugggcauccccuacugcaacuacuccaaguacugcuaccugaaccacaccagcuccgggcgcaccagccugcccaagugcugccugguguccaacggcagcuaccugaacgagacgcacuucuccgacgacaucgagcagcaggccgacaacaugaucaccgagaugcuccagaaggaguacaucgaccggcagggcaagaccccgcuggggcugguggaccucuucgucuucagcaccuccuucuaccugaucagcaucuuccugcaccugaucaagaucccgacgcaccgccacaucgugggcaagcccugccccaagccccaccggcucaaccacauggggaucugcuccugcggccuguacaagcagccgggggugcccacccgcuggaagcggugaggacuaguuauaagacugacuagcccgaugggccucccaacgggcccuccuccccuccuugcaccgagauuaauaaaaaaaaaaaaaaaaaaaaaaaaaaaaaaaaaaaaaaaaaaaaaaaaaaaaaaaaaaaaaaaaaaaaaaaaaaaaaaaaaaaaaaaaaaaaaaaaaaaa

SEQ ID NO: 41483 - RNA, 1662 nt, Artificial Sequence
  mRNA product Design i-3 (A100) comprising derived and/or modified sequence from LASV(KAK-428;Clade n.d. (VII))__ANH09740__GPCmut12 (opt1)
aggagaaagcuuaccaugggccagaucgugaccuucuuccaggaggucccccacgugaucgaggaggugaugaacaucguccugaucgcccucagccugcuggccauccucaaggggcuguacaacuucgcgaccugcggcgugaucgggcugaucacguuccuccugcugugcggccgcuccugcagcgccaccuacaaggggcaguacgagcuccagacccuggagcugaacauggagucccucaacaugugcaugccgcugagcugcacgaagaacaacucccaccacuacauccgggccggcaacaacaccggccuggagcucacccugaccaacacgagcaucaucucccacaaguucugcaaccugagcgacgcccacaagaagaaccucuacgaccacacccugauguccaucaucaccaccuuccaccugagcauccccaacuucaaccaguacgaggccauguccugcgacuucaacgggggcaagaucagcauccaguacaaccucucccacagcuacgcgggggacgccgcccagcacugcggcacgguggccaacgggguccugcagaccuucaugcgcauggcguggggcggcuccuaccuggcccucgacagcgggcggcgcggcugggacugcaucaucuccagcuaccaguaccugaucauccagaacaccaccugggacgaccacugccaguucucccggcccagccccaucggguaccugggcuucgugagccagaagacgcgcgacaucuacaucucccggcgccuccugggcaccuucaccuggacccugagcgacuccgaggggcacgacaugccgggcggguacugccucacgcgguggaugcugaucgaggccgaccugaagugcuucggcaacaccgccguggccaagugcaacgagaagcacgacgaggaguucugcgacauguggcgccucuucgacuucugcaagcaggcgauccagcggcugaaggccgaggcccagaugaacauccagcugaucaacaaggccgucaacgcccucaucaacgaccagcugaugaugaagaaccaccuccgcgacaucauggggauccccuacugcaacuacagcaaguucugcuaccugaacaacaccaccacgggccggaccucccugccccgcugcugccugaucagcaacggcuccuaccucaacgagacccacuucagcgacgacaucgagcagcaggcggacaacaugaucaccgagaugcugcagaaggaguacauggaccggcaggggaagacgccccugggccucguggaccuguucguguucuccaccagcuucuaccugaucaccaucuuccuccaccuggucaagaucccgacccaccgccacaucguggggaagcccugccccaagccccaccggcugaaccacaugggcaucugcuccugcgggcuguacaagcagccgggcgugcccguccgcuggaagcggugaggacuaguuauaagacugacuagcccgaugggccucccaacgggcccuccuccccuccuugcaccgagauuaauaaaaaaaaaaaaaaaaaaaaaaaaaaaaaaaaaaaaaaaaaaaaaaaaaaaaaaaaaaaaaaaaaaaaaaaaaaaaaaaaaaaaaaaaaaaaaaaaaaaa

SEQ ID NO: 41484 - RNA, 1662 nt, Artificial Sequence; identical to SEQ ID NO: 41478
  mRNA product Design i-3 (A100) comprising derived and/or modified sequence from LASV(Pinneo-NIG-1969;Clade I)__AIT17836__GPCmut12 (opt1)

SEQ ID NO: 41485 - RNA, 1662 nt, Artificial Sequence
  mRNA product Design i-3 (A100) comprising derived and/or modified sequence from LASV(ISTH0009-NIG-2011;Clade II)__AIT17404__GPCmut12 (opt1)
aggagaaagcuuaccaugggccagaucaucaccuucuuccaggaggugccccacgucaucgaggaggugaugaacaucgugcugaucgcccucagccugcuggccauccucaaggggaucuacaacgucgcgaccugcggccuguucgggcugguguccuuccuccugcugugcggccgcagcugcuccacgaccuacaaggggguguacgagcuccagacccuggagcuggacauggccagccucaacaugugcaugccgcuguccugcacgaagaacaacagccaccacuacaucauggucggcaacgagaccggccuggagcucacccugaccaacacguccaucaucaaccacaaguucugcaaccugagcgacgcccacaagaagaaccucuacgaccacgcccugauguccaucaucagcaccuuccaccuguccauccccaacuucaaccaguacgaggccaugagcugcgacuucaacgggggcaagaucuccgugcaguacaaccucagccacgcguacgccguggacgccgccaaccacugcgggaccaucgcgaacggcguccugcagaccuucaugcggauggccuggggcggguccuacaucgcccuggacagcggcaagggguccugggacugcaucaugacgagcuaccaguaccucaucauccagaacaccaccugggaggaccacugccaguucucccgccccagccccaucggcuaccuggggcugcucagccagcggacccgcgacaucuacaucucccggcgccugcugggcacguucaccuggacccucagcgacuccgagggcaacgagacccccgggggcuacugccugacgcgguggaugcugaucgaggccgagcucaagugcuucgggaacaccgccguggcgaagugcaacgagaagcacgacgaggaguucugcgacaugcugcgccuguucgacuucugcaagcaggccauccggcgccucaagaccgaggcccagaugagcauccagcugaucaacaaggccgugaacgcccugaucaacgaccagcucaucaugaagaaccaccuccgggacaucaugggcaucccguacugcaacuacuccaaguacugcuaccugaaccacaccgucacggggaagaccagccugccccgcugcugccugguguccaacggcagcuaccugaacgagacccacuucuccgacgacaucgagcagcaggcggacaacaugaucaccgagcuccugcagaaggaguacauggaccggcagggcaagacgccccuggggcucguggaccuguucgucuucagcaccuccuucuaccugaucagcaucuuccugcaccucaucaagaucccgacccaccgccacaucaccggcaagcccugccccaagccccaccggcugaaccacauggggaucugcuccugcggccuguacaagcacccgggggugcccgugaaguggaagcgcugaggacuaguuauaagacugacuagcccgaugggccucccaacgggcccuccuccccuccuugcaccgagauuaauaaaaaaaaaaaaaaaaaaaaaaaaaaaaaaaaaaaaaaaaaaaaaaaaaaaaaaaaaaaaaaaaaaaaaaaaaaaaaaaaaaaaaaaaaaaaaaaaaaaa

SEQ ID NO: 41486 - RNA, 1662 nt, Artificial Sequence
  mRNA product Design i-3 (A100) comprising derived and/or modified sequence from LASV(ISTH2010-NIG-2012;Clade II)__AIT17482__GPCmut12 (opt1)
aggagaaagcuuaccaugggccagaucaucaccuucuuccaggaggugccccacgucaucgaggaggugaugaacaucgugcugaucgcccucagccugcuggccauccucaaggggaucuacaacgucgcgaccugcggccuguucgggcugguguccuuccuccugcugugcggccgcagcugcuccacgaccuacaaggggguguacgagcuccagacccuggagcuggacauggccagccucaacaugugcaugccgcuguccugcacgaagaacaacagccaccacuacaucauggucggcaacgagaccggccuggagcucacccugaccaacacguccaucaucaaccacaaguucugcaaccugagcgacgcccacaagaagaaccucuacgaccacgcccugauguccaucaucagcaccuuccaccuguccauccccaacuucaaccaguacgaggccaugagcugcgacuucaacgggggcaagaucuccgugcaguacaaccucagccacgcguacgccguggacgccgccaaccacugcgggaccaucgcgaacggcguccugcagaccuucaugcggauggccuggggcggguccuacaucgcccuggacagcggcaagggguccugggacugcaucaugacgagcuaccaguaccucaucauccagaacaucaccugggaggaccacugccaguucucccgccccagccccaucggcuaccuggggcugcucagccagcggacccgcgacaucuacaucucccggcgccugcugggcaccuucacguggacccucagcgacuccgagggcaacgagacccccgggggcuacugccugacccgguggaugcugaucgaggccgagcucaagugcuucgggaacacggccguggcgaagugcaacgagaagcacgacgaggaguucugcgacaugcugcgccuguucgacuucugcaagcaggccauccggcgccucaagaccgaggcccagaugagcauccagcugaucaacaaggccgugaacgcccugaucaacgaccagcucaucaugaagaaccaccuccgggacaucaugggcauccccuacugcaacuacuccaaguacugcuaccugaaccacaccgucaccgggaagacgagccugccccgcugcugccugguguccaacggcagcuaccugaacgagacccacuucuccgacgacaucgagcagcaggcggacaacaugaucaccgagcuccugcagaaggaguacaucgaccggcagggcaagaccccgcuggggcucguggaccuguucgucuucagcacguccuucuaccugaucagcaucuuccugcaccucgugaagaucccgacccaccgccacguggucggcaagcccugccccaagccccaccggcugaaccacauggggaucugcuccugcggccuguacaagcacccgggggugcccgugaaguggaagcgcugaggacuaguuauaagacugacuagcccgaugggccucccaacgggcccuccuccccuccuugcaccgagauuaauaaaaaaaaaaaaaaaaaaaaaaaaaaaaaaaaaaaaaaaaaaaaaaaaaaaaaaaaaaaaaaaaaaaaaaaaaaaaaaaaaaaaaaaaaaaaaaaaaaaa

SEQ ID NO: 41487 - RNA, 1662 nt, Artificial Sequence
  mRNA product Design i-3 (A100) comprising derived and/or modified sequence from LASV(Lassa virus/H.sapiens-wt/NGA/2015/ISTH_0543;Clade II)__AVO03639__GPCmut12 (opt1)
aggagaaagcuuaccaugggccagaucaucaccuucuuccaggaggugccccacgucaucgaggaggugaugaacaucgugcugaucgcccucagccugcuggccauccucaaggggaucuacaacgucgcgaccugcggccuguucgggcugguguccuuccuccugcugugcggccgcagcugcuccacgaccuacaaggggguguacgagcuccagacccuggagcuggacauggccaaccucaacaugugcaugccgcugagcugcacgaagaacaacucccaccacuacaucauggucggcaacgagaccggccuggagcucacccugaccaacacgagcaucaucaaccacaaguucugcaaccuguccgacgcccacaagaagaaccucuacgaccacgcccugaugagcaucaucuccaccuuccaccugagcauccccaacuucaaccaguacgaggccauguccugcgacuucaacgggggcaagaucagcgugcaguacaaccucucccacaccuacgcgguggacgccgccaaccacugcgggaccaucgccaacggcguccugcagacguucaugcggauggcguggggcgggagcuacaucgcccuggacuccggcaaggggagcugggacugcaucaugaccuccuaccaguaccucgugauccagaacaccaccugggaggaccacugccaguucagccgccccucccccaucggcuaccuggggcugcucagccagcggacgcgcgacaucuacaucagccggcgccugcugggcaccuucaccuggacccucuccgacagcgagggcaacgagacgcccgggggcuacugccugacccgguggaugcugaucgaggccgagcucaagugcuucgggaacaccgccguggccaagugcaacgagaagcacgacgaggaguucugcgacaugcugcgccuguucgacuucugcaagcaggcgauccggcgccucaagaccgaggcccagauguccauccagcugaucaacaaggccgucaacgcccugaucaacgaccagcucaucaugaagaaccaccuccgggacaucaugggcauccccuacugcaacuacagcaaguacugcuaccugaaccacacggugaccgggaagaccucccugccccgcugcugccuggugagcaacggcuccuaccugaacgagacccacuucagcgacgacaucgagcagcaggccgacaacaugaucacggagcuccugcagaaggaguacaucgaccggcagggcaagaccccgcuggggcucgucgaccuguucguguucuccaccagcuucuaccugaucuccaucuuccugcaccucgugaagaucccgacccaccgccacaucacgggcaagcccugccccaagccccaccggcugaaccacauggggaucugcagcugcggccuguacaagcacccggggguccccgugaaguggaagcgcugaggacuaguuauaagacugacuagcccgaugggccucccaacgggcccuccuccccuccuugcaccgagauuaauaaaaaaaaaaaaaaaaaaaaaaaaaaaaaaaaaaaaaaaaaaaaaaaaaaaaaaaaaaaaaaaaaaaaaaaaaaaaaaaaaaaaaaaaaaaaaaaaaaaa

SEQ ID NO: 41488 - RNA, 1662 nt, Artificial Sequence
  mRNA product Design i-3 (A100) comprising derived and/or modified sequence from LASV(Lassa virus/H.sapiens-wt/NGA/2016/ISTH_0009;Clade II)__AVO03571__GPCmut12 (opt1)
aggagaaagcuuaccaugggccagaucaucaccuucuuccaggaggugccccacgucaucgaggaggugaugaacaucgugcugaucgcccucagccugcuggccauccucaaggggaucuacaacgucgcgaccugcggccugcuggggcucguguccuuccugcugcucugcggccgcagcugcuccacgaccuacaaggggguguacgagcugcagacccuggagcucgacauggccagccugaacaugugcaugccgcuguccugcacgaagaacaacagccaccacuacaucauggucggcaacgagaccggccucgagcugacccugaccaacacguccaucaucaaccacaaguucugcaaccucagcgacgcccacaagaagaaccuguacgaccacgcccugauguccaucaucagcaccuuccaccucuccauccccaacuucaaccaguacgaggccaugagcugcgacuucaacgggggccggaucuccgugcaguacaaccugagccacuccuacgcgguggacgccgccaaccacugcgggaccaucgccaacggcguccugcagaccuucaugcgcauggcguggggcgggagcuacaucgcccucgacuccggcaaggggagcugggacugcaucaugacguccuaccaguaccugaucauccagaacaccaccugggaggaccacugccaguucagccggcccagccccaucggcuaccuggggcuccugucccagcgcacccgggacaucuacaucagccgccggcugcucggcacguucaccuggacccuguccgacagcgagggcaacgagacccccgggggcuacugccugacgcgcuggaugcucaucgaggccgagcugaagugcuucgggaacaccgccguggccaagugcaacgagaagcacgacgaggaguucugcgacaugcugcggcuguucgacuucugcaagcaggcgauccgccggcugaagaccgaggcccagauguccauccagcugaucaacaaggccgugaacgcccucaucaacgaccagcugaucaugaagaaccaccuccgcgacaucaugggcaucccguacugcaacuacagcaaguacugcuaccucaaccacaccgucacggggaagaccucccugccccggugcugccuggugagcaacggcuccuaccucaacgagacccacuucagcgacgacaucgagcagcaggccgacaacaugaucaccgagcugcugcagaaggaguacaucgaccgccagggcaagacgccccucgggcugguggaccuguucgucuucuccaccagcuucuaccugaucuccaucuuccuccaccuggugaagaucccgacccaccggcacaucaccggcaagcccugccccaagccccaccgccugaaccacauggggaucugcagcugcggccucuacaaccacccgggggugcccgucaaguggaagcggugaggacuaguuauaagacugacuagcccgaugggccucccaacgggcccuccuccccuccuugcaccgagauuaauaaaaaaaaaaaaaaaaaaaaaaaaaaaaaaaaaaaaaaaaaaaaaaaaaaaaaaaaaaaaaaaaaaaaaaaaaaaaaaaaaaaaaaaaaaaaaaaaaaaa

SEQ ID NO: 41489 - RNA, 1662 nt, Artificial Sequence
  mRNA product Design i-3 (A100) comprising derived and/or modified sequence from LASV(Lassa virus/H.sapiens-wt/NGA/2016/ISTH_0017;Clade II)__AVO03567__GPCmut12 (opt1)
aggagaaagcuuaccaugggccagaucaucaccuucuuccaggaggugccccacgucaucgaggaggugaugaacaucgugcugaucgcccucagccugcuggccauccucaaggggaucuacaacgucgcgaccugcggccuguucgggcugguguccuuccuccugcugugcggccgcagcugcuccacgaccuacaaggggguguacgagcuccagacccuggagcuggacauggccagccucaacaugugcaugccgcuguccugcacgaagaacaacagccaccacuacaucauggucggcaacgagaccggccuggagcucacccugaccaacacguccaucaucaaccacaaguucugcaaccugagcgacgcccacaagaagaaccucuacgaccacgcccugauguccaucaucagcaccuuccaccuguccauccccaacuucaaccaguacgaggccaugagcugcgacuucaacgggggcaagaucuccgugcaguacaaccucagccacaccuacgcgaucgacgccgccaaccacugcgggaccaucgccaacggcgugcugcagacguucaugcggauggcguggggcggguccuacaucgcccuggacagcggcaagggguccugggacugcaucaugaccagcuaccaguaccucaucauccagaacaccaccugggaggaccacugccaguucucccgccccagccccaucggcuaccuggggcugcucagccagcggacgcgcgacaucuacaucucccggcgccugcugggcaccuucaccuggacccucagcgacuccgagggcaacgagacgcccgggggcuacugccugacccgguggaugcugaucgaggccgagcucaagugcuucgggaacaccgccgucgccaagugcaacgagaagcacgacgaggaguucugcgacaugcugcgccuguucgacuucugcaagcaggcgauccggcgccucaagaccgaggcccagaugagcauccagcugaucaacaaggccgugaacgcccugaucaacgaccagcucaucaugaagaaccaccuccgggacaucaugggcauccccuacugcaacuacuccaaguacugcuaccugaaccacacggugaccgggaagaccagccugccccgcugcugccuggucuccaacggcagcuaccugaacgagacccacuucuccgacgacaucgagcagcaggccgacaacaugaucacggagcuccugcagaaggaguacauggaccggcagggcaagaccccgcuggggcucguggaccuguucguguucagcaccuccuucuaccugaucagcaucuuccugcaccucguccgcaucccgacccaccggcacgugaucggcaagcccugccccaagccccaccgccugaaccacauggggaucugcuccugcggccuguacaagcacccgggggugcccgucaaguggaagcggugaggacuaguuauaagacugacuagcccgaugggccucccaacgggcccuccuccccuccuugcaccgagauuaauaaaaaaaaaaaaaaaaaaaaaaaaaaaaaaaaaaaaaaaaaaaaaaaaaaaaaaaaaaaaaaaaaaaaaaaaaaaaaaaaaaaaaaaaaaaaaaaaaaaa

SEQ ID NO: 41490 - RNA, 1662 nt, Artificial Sequence
  mRNA product Design i-3 (A100) comprising derived and/or modified sequence from LASV(Lassa virus/H.sapiens-wt/NGA/2018/ISTH_0959;Clade II)__AVV65099__GPCmut12 (opt1)
aggagaaagcuuaccaugggccagaucaucaccuucuuccaggaggugccccacgucaucgaggaggugaugaacaucgugcugaucgcccucagccugcuggccauccucaaggggaucuacaacgucgugaccugcggccuguucgggcugguguccuuccuccugcugugcggccgcagcugcuccacgaccuacaagggggucuacgagcuccagacccuggagcuggacauggcgagccucaacaugugcaugccgcuguccugcacgaagaacaacagccaccacuacaucauggugggcaacgagaccggccuggagcucacccugaccaacacguccaucaucaaccacaaguucugcaaccugagcgacgcccacaagaagaaccucuacgaccacgcccugauguccaucaucagcaccuuccaccuguccauccccaacuucaaccaguacgaggccaugagcugcgacuucaacgggggcaagaucuccgugcaguacaaccucagccacgccuacgcgaucgacgccgccaaccacugcgggaccaucgccaacggcguccugcagaccuucaugcggauggcguggggcggguccuacaucgcccuggacagcggcaagggguccugggacugcaucaugacgagcuaccaguaccucaucauccagaacaccaccugggaggaccacugccaguucucccgccccagccccaucggcuaccuggggcugcucagccagcggacccgcgacaucuacaucucccggcgccugcugggcacguucaccuggacccucagcgacuccgagggcaacgagacccccgggggcuacugccugacgcgguggaugcugaucgaggccgagcucaagugcuucgggaacaccgccguggccaagugcaacgagaagcacgacgaggaguucugcgacaugcugcgccuguucgacuucugcaagcaggcgauccggcgccucaagaccgaggcccagaugagcauccagcugaucaacaaggccgugaacgcccugaucaacgaccagcucaucaugaagaaccaccuccgggacaucaugggcaucccguacugcaacuacuccaaguacugcuaccugaaccacaccgucacggggaagaccagccugccccgcugcugccugguguccaacggcagcuaccugaacgagacccacuucuccgacgacaucgagcagcaggccgacaacaugaucaccgagcuccugcagaaggaguacaucgaccggcagggcaagacgccccuggggcucguggaccuguucgucuucagcaccuccuucuaccugaucagcaucuuccugcaccucgugaagaucccgacccaccgccacgugaucggcaagcccugccccaagccccaccggcugaaccacauggggaucugcuccugcggccuguacaagcacccggggguccccgugaaguggaagcgcugaggacuaguuauaagacugacuagcccgaugggccucccaacgggcccuccuccccuccuugcaccgagauuaauaaaaaaaaaaaaaaaaaaaaaaaaaaaaaaaaaaaaaaaaaaaaaaaaaaaaaaaaaaaaaaaaaaaaaaaaaaaaaaaaaaaaaaaaaaaaaaaaaaaa

SEQ ID NO: 41491 - RNA, 1662 nt, Artificial Sequence
  mRNA product Design i-3 (A100) comprising derived and/or modified sequence from LASV(LASV003-NIG-2008;Clade II)__AIT17580__GPCmut12 (opt1)
aggagaaagcuuaccaugggccagaucaucaccuucuuccaggaggugccccacgucaucgaggaggugaugaacaucgugcugaucgcccucagccugcuggccauccucaaggggaucuacaacgucgcgaccugcggccuguucgggcugguguccuuccuccugcugugcggccgcagcugcuccacgaccuacaaggggguguacgagcuccagacccuggagcuggacauggccagccucaacaugugcaugccgcuguccugcacgaagaacaacagccaccacuacaucauggucggcaacgagaccggccuggagcucacccugaccaacacguccaucaucaaccacaaguucugcaaccugagcgacgcccacaagaagaaccucuacgaccacgcccugauguccaucaucagcaccuuccaccuguccauccccaacuucaaccaguacgaggccaugagcugcgacuucaacgggggcaagaucuccgugcaguacaaccucagccacaccuacgcgguggacgccgccaaccacugcgggaccaucgccaacggcguccugcagacguucaugcggauggcguggggcggguccuacaucgcccuggacagcggcaagggguccugggacugcaucaugaccagcuaccaguaccucaucauccagaacaccaccugggaggaccacugccaguucucccgccccagccccaucggcuaccuggggcugcucagccagcggacgcgcgacaucuacaucucccggcgccugcugggcaccuucaccuggacccucagcgacuccgagagcaacgagacgccgggcggguacugccugacccgguggaugcugaucgaggccgagcucaagugcuucggcaacaccgccguggccaagugcaacgagaagcacgacgaggaguucugcgacaugcugcgccuguucgacuucugcaagcaggcgauccggcgccucaaggccgaggcccagauguccauccagcugaucaacaaggccgugaacgcccugaucaacgaccagcucaucaugaagaaccaccuccgggacaucauggggauccccuacugcaacuacagcaaguacugcuaccugaaccacaccgucacgggccgcaccucccugccccggugcugccuggugagcaacggguccuaccugaacgagacccacuucagcgacgacaucgagcagcaggcggacaacaugaucaccgagcuccugcagaaggaguacauggaccgccagggcaagacgccccugggccucguggaccuguucgucuucuccaccagcuucuaccugaucuccaucuuccugcaccucgugaagaucccgacccaccggcacgugaucgggaagcccugccccaagccccaccgccugaaccacaugggcaucugcagcugcgggcuguacaagcacccgggcguccccgugaaguggaagcggugaggacuaguuauaagacugacuagcccgaugggccucccaacgggcccuccuccccuccuugcaccgagauuaauaaaaaaaaaaaaaaaaaaaaaaaaaaaaaaaaaaaaaaaaaaaaaaaaaaaaaaaaaaaaaaaaaaaaaaaaaaaaaaaaaaaaaaaaaaaaaaaaaaaa

SEQ ID NO: 41492 - RNA, 1662 nt, Artificial Sequence
  mRNA product Design i-3 (A100) comprising derived and/or modified sequence from LASV(LASV035-NIG-2009;Clade II)__AIT17588__GPCmut12 (opt1)
aggagaaagcuuaccaugggccagaucaucaccuucuuccaggaggugccccacgucaucgaggaggugaugaacaucgugcugaucgcccucagccugcuggccauccucaaggggaucuacaacgucgcgaccugcggccuguucgggcugguguccuuccuccugcugugcggccgcagcugcuccacgaccuacaaggggguguacgagcuccagacccuggagcuggacauggccagccucaacaugugcaugccgcuguccugcacgaagaacaacagccaccacuacaucauggucggcaacgagaccggccuggagcucacccugaccaacacguccaucaucaaccacaaguucugcaaccugagcgacgcccacaagaagaaccucuacgaccacgcccugauguccaucaucagcaccuuccaccuguccauccccaacuucaaccaguacgaggccaugagcugcgacuucaacgggggcaagaucuccgugcaguacaaccucagccacgcguacgccguggacgccgccaaccacugcgggaccaucgcgaacggcguccugcagaccuucaugcggauggccuggggcggguccuacaucgcccuggacagcggcaagggguccugggacugcaucaugacgagcuaccaguaccucaucauccagaacaccaccugggaggaccacugccaguucucccgccccagccccaucggcuaccuggggcugcucagccagcggacccgcgacaucuacaucucccggcgccugcugggcacguucaccuggacccucagcgacuccgagggcaacgagacccccgggggcuacugccugacgcgguggaugcugaucgaggccgagcucaagugcuucgggaacaccgccguggcgaagugcaacgagaagcacgacgaggaguucugcgacaugcugcgccuguucgacuucugcaagcaggccauccggcgccucaaggccgaggcccagaugagcauccagcugaucaacaaggccgugaacgcgcugaucaacgaccagcucaucaugaagaaccaccuccgggacaucaugggcauccccuacugcaacuacuccaaguacugcuaccugaaccacaccgucaccgggaagacgagccugccccgcugcugccugguguccaacggcagcuaccugaacgagacccacuucuccgacgacaucgagcagcaggccgacaacaugaucaccgagcuccugcagaaggaguacaucgaccggcagggcaagaccccgcuggggcucguggaccuguucgucuucagcacguccuucuaccugaucagcaucuuccugcaccucgugaagaucccgacccaccgccacgugaucggcaagcccugccccaagccccaccggcugaaccacauggggaucugcuccugcggccuguacaagcacccggggguccccgugaaguggaagcgcugaggacuaguuauaagacugacuagcccgaugggccucccaacgggcccuccuccccuccuugcaccgagauuaauaaaaaaaaaaaaaaaaaaaaaaaaaaaaaaaaaaaaaaaaaaaaaaaaaaaaaaaaaaaaaaaaaaaaaaaaaaaaaaaaaaaaaaaaaaaaaaaaaaaa

SEQ ID NO: 41493 - RNA, 1662 nt, Artificial Sequence
  mRNA product Design i-3 (A100) comprising derived and/or modified sequence from LASV(LASV1000-NIG-2009;Clade II)__AIT17782__GPCmut12 (opt1)
aggagaaagcuuaccaugggccagaucaucaccuucuuccaggaggugccccacgucaucgaggaggugaugaacaucgugcugaucgcccucagccugcuggccauccucaaggggaucuacaacgucgcgaccugcggccuguucgggcugguguccuuccuccugcugugcggccgcagcugcuccacgaccuacaaggggguguacgagcuccagacccuggagcuggacauggccagccucaacaugugcaugccgcuguccugcacgaagaacaacagccaccacuacaucauggucggcaacgagaccggccuggagcucacccugaccaacacguccaucaucaaccacaaguucugcaaccugagcgacgcccacaagaagaaccucuacgaccacgcccugauguccaucaucagcaccuuccaccuguccauccccaacuucaaccaguacgaggccaugagcugcgacuucaacgggggcaagaucuccgugcaguacaaccucagccacaccuacgcgguggacgccgccaaccacugcgggaccaucgccaacggcguccugcagacguucaugcggauggcguggggcggguccuacaucgcccuggacagcggcaagggguccugggacugcaucaugaccagcuaccaguaccucaucauccagaacaccaccugggaggaccacugccaguucucccgccccagccccaucggcuaccuggggcugcucagccagcggacgcgcgacaucuacaucucccggcgccugcugggcaccuucaccuggacccucagcgacuccgagggcaacgagacgcccgggggcuacugccugacccgguggaugcugaucgaggccgagcucaagugcuucgggaacaccgccguggccaagugcaacgagaagcacgacgaggaguucugcgacaugcugcgccuguucgacuucugcaagcaggcgaucaagcggcucaagaccgaggcccagaugagcauccagcugaucaacaaggccgugaacgcccugaucaacgaccagcucaucaugaagaaccaccuccgcgacaucaugggcauccccuacugcaacuacuccaaguacugcuaccugaaccacacggucaccgggaagaccagccugccccggugcugccugguguccaacggcagcuaccugaacgagacccacuucuccgacgacaucgagcagcaggccgacaacaugaucacggagcuccugcagaaggaguacaucgaccgccagggcaagaccccgcuggggcucguggaccuguucgucuucagcaccuccuucuaccugaucagcaucuuccugcaccucgugaagaucccgacccaccggcacguggucggcaagcccugccccaagccccaccgccugaaccacauggggaucugcuccugcggccuguacaagcacccgggggugcccgugaaguggaagcggugaggacuaguuauaagacugacuagcccgaugggccucccaacgggcccuccuccccuccuugcaccgagauuaauaaaaaaaaaaaaaaaaaaaaaaaaaaaaaaaaaaaaaaaaaaaaaaaaaaaaaaaaaaaaaaaaaaaaaaaaaaaaaaaaaaaaaaaaaaaaaaaaaaaa

SEQ ID NO: 41494 - RNA, 1662 nt, Artificial Sequence
  mRNA product Design i-3 (A100) comprising derived and/or modified sequence from LASV(LASV221-NIG-2010;Clade II)__AIT17624__GPCmut12 (opt1)
aggagaaagcuuaccaugggccagaucaucaccuucuuccaggaggugccccacgucaucgaggaggugaugaacaucgugcugaucgcccucagccugcuggccauccucaaggggaucuacaacgucgcgaccugcggccuguucgggcugguguccuuccuccugcugugcggccgcagcugcuccacgaccuacaaggggguguacgagcuccagacccuggagcuggacauggccagccucaacaugugcaugccgcuguccugcacgaagaacaacagccaccacuacaucauggucggcaacgagaccggccuggagcucacccugaccaacacguccaucaucaaccacaaguucugcaaccugagcgacgcccacaagaagaaccucuacgaccacgcccugauguccaucaucagcaccuuccaccuguccauccccaacuucaaccaguacgaggccaugagcugcgacuucaacgggggcaagaucuccgugcaguacaaccucagccacaccuacgcgaucgacgccgccaaccacugcgggaccaucgccaacggcgugcugcagacguucaugcggauggcguggggcggguccuacaucgcccuggacagcggcaagggguccugggacugcaucaugaccagcuaccaguaccucaucauccagaacaccaccugggaggaccacugccaguucucccgccccagccccaucggcuaccuggggcugcucagccagcggacgcgcgacaucuacaucucccggcgccugcugggcaccuucaccuggacccucagcgacuccgagggcaacgagacgcccgggggcuacugccugacccgguggaugcugaucgaggccgagcucaagugcuucgggaacaccgccgucgccaagugcaacgagaagcacgacgaggaguucugcgacaugcugcgccuguucgacuucugcaagcaggcgauccggcgccucaagaccgaggcccagaugagcauccagcugaucaacaaggccgugaacgcccugaucaacgaccagcucaucaugaagaaccaccuccgggacaucaugggcauccccuacugcaacuacuccaaguacugcuaccugaaccacacggugaccgggaagaccagccugccccgcugcugccuggucuccaacggcagcuaccugaacgagacccacuucuccgacgacaucgagcagcaggccgacaacaugaucacggagaugcuccagaaggaguacauggaccggcagggcaagaccccgcuggggcugguggaccucuucguguucagcaccuccuucuaccugaucagcaucuuccugcaccuggucaagaucccgacccaccgccacgugaucggcaagcccugccccaagccccaccggcucaaccacauggggaucugcuccugcggccuguacaagcacccgggggugcccgucaaguggaagcgcugaggacuaguuauaagacugacuagcccgaugggccucccaacgggcccuccuccccuccuugcaccgagauuaauaaaaaaaaaaaaaaaaaaaaaaaaaaaaaaaaaaaaaaaaaaaaaaaaaaaaaaaaaaaaaaaaaaaaaaaaaaaaaaaaaaaaaaaaaaaaaaaaaaaa

SEQ ID NO: 41495 - RNA, 1662 nt, Artificial Sequence
  mRNA product Design i-3 (A100) comprising derived and/or modified sequence from LASV(LASV237-NIG-2010;Clade II)__AIT17638__GPCmut12 (opt1)
aggagaaagcuuaccaugggccagaucaucaccuucuuccaggaggugccccacgucaucgaggaggugaugaacaucgugcugaucgcccucagccugcuggccauccucaaggggaucuacaacgucgcgaccugcggccuguucgggcugguguccuuccuccugcugugcggccgcagcugcuccacgaccuacaaggggguguacgagcuccagacccuggagcuggacauggccagccucaacaugugcaugccgcuguccugcacgaagaacaacagccaccacuacaucauggucggcaacgagaccggccuggagcucacccugaccaacacguccaucaucaaccacaaguucugcaaccugagcgacgcccacaagaaggaccucuacgaccacgcccugauguccaucaucagcaccuuccaccuguccauccccaacuucaaccaguacgaggccaugagcugcgacuucaacgggggcaagaucuccgugcaguacaaccucagccacaccuacgcgguggacgccgccaaccacugcgggaccaucgccaacggcguccugcagacguucaugcggauggcguggggcggguccuacaucgcccuggacagcggcaagggguccugggacugcaucaugaccagcuaccaguaccucaucauccagaacaccaccugggaggaccacugccaguucucccgccccagccccaucggcuaccuggggcugcucagccagcggacgcgcgacaucuacaucucccggcgccugcugggcaccuucaccuggacccucagcgacuccgagggcaacgagacgcccgggggcuacugccugacccgguggaugcugaucgaggccgagcucaagugcuucgggaacaccgccguggccaagugcaacgagaagcacgacgaggaguucugcgacaugcugcgccuguucgacuucugcaagcaggcgauccggcgccucaagaccgaggcccagaugagcauccagcugaucaacaaggccgugaacgcccugaucaacgaccagcucaucaugaagaaccaccuccgggacaucaugggcauccccuacugcaacuacuccaaguacugcuaccugaaccacacggucaccgggaagaccagccugccccgcugcugccugguguccaacggcagcuaccugaacgagacccacuucuccgacgacaucgagcagcaggccgacaacaugaucacggagcuccugcagaaggaguacauggaccggcagggcaagaccccgcuggggcucguggaccuguucgucuucagcaccuccuucuaccugaucagcaucuuccugcaccucaucaagaucccgacccaccgccacaucacgggcaagcccugccccaagccccaccggcugaaccacauggggaucugcuccugcggccuguacaagcacccgggggugcccgugaaguggaagcgcugaggacuaguuauaagacugacuagcccgaugggccucccaacgggcccuccuccccuccuugcaccgagauuaauaaaaaaaaaaaaaaaaaaaaaaaaaaaaaaaaaaaaaaaaaaaaaaaaaaaaaaaaaaaaaaaaaaaaaaaaaaaaaaaaaaaaaaaaaaaaaaaaaaaa

SEQ ID NO: 41496 - RNA, 1662 nt, Artificial Sequence
  mRNA product Design i-3 (A100) comprising derived and/or modified sequence from LASV(LASV253-NIG-2011;Clade II)__AIT17670__GPCmut12 (opt1)
aggagaaagcuuaccaugggccagaucaucaccuucuuccaggaggugccccacgucaucgaggaggugaugaacaucgugcugaucgcccucagccugcuggccauccucaaggggaucuacaacgucgcgaccugcggccuguucgggcugguguccuuccuccugcugugcggccgcagcugcuccacgaccuacaaggggguguacgagcuccagacccuggagcuggacauggccagccucaacaugugcaugccgcuguccugcacgaagaacaacagccaccacuacaucauggucggcaacgagaccggccuggagcucacccugaccaacacguccaucaucaaccacaaguucugcaaccugagcgacgcccacaagaagaaccucuacgaccacgcccugauguccaucaucagcaccuuccaccuguccauccccaacuucaaccaguacgaggccaugagcugcgacuucaacgggggcaagaucuccgugcaguacaaccucagccacaccuacgcgguggacgccgccaaccacugcgggaccaucgccaacggcguccugcagacguucaugcggauggcguggggcggguccuacaucgcccuggacagcggcaagggguccugggacugcaucaugaccagcuaccaguaccucaucauccagaacaccaccugggaggaccacugccaguucucccgccccagccccaucggcuaccuggggcugcucagccagcggacgcgcgacaucuacaucucccggcgccugcugggcaccuucaccuggacccucagcgacuccgagggcaacgagacgcccgggggcuacugccugacccgguggaugcugaucgaggccgagcucaagugcuucgggaacaccgccguggccaagugcaacgagaagcacgacgaggaguucugcgacaugcugcgccuguucgacuucugcaagcaggcgauccggcgccucaaggccgaggcccagaugagcauccagcugaucaacaaggccgugaacgcccugaucaacgaccagcucaucaugaagaaccaccuccgggacaucaugggcaucccguacugcaacuacuccaaguacugcuaccugaaccacaccgucacggggcgcaccagccugccccggugcugccugguguccaacggcagcuaccugaacgagacccacuucuccgacgacaucgagcagcaggcggacaacaugaucaccgagcuccugcagaaggaguacaucgaccgccagggcaagacgccccuggggcucguggaccuguucgucuucagcaccuccuucuaccugaucagcaucuuccugcaccucgugaagaucccgacccaccggcacaucaucggcaagcccugccccaagccccaccgccugaaccacauggggaucugcuccugcggccuguacaagcacccgggggugcccgucaaguggaagcggugaggacuaguuauaagacugacuagcccgaugggccucccaacgggcccuccuccccuccuugcaccgagauuaauaaaaaaaaaaaaaaaaaaaaaaaaaaaaaaaaaaaaaaaaaaaaaaaaaaaaaaaaaaaaaaaaaaaaaaaaaaaaaaaaaaaaaaaaaaaaaaaaaaaa

SEQ ID NO: 41497 - RNA, 1662 nt, Artificial Sequence
  mRNA product Design i-3 (A100) comprising derived and/or modified sequence from LASV(LASV254-NIG-2011;Clade II)__AIT17674__GPCmut12 (opt1)
aggagaaagcuuaccaugggccagaucaucaccuucuuccaggaggugccccacgucaucgaggaggugaugaacaucgugcugaucgcccucagccugcuggccauccucaaggggaucuacaacgucgcgaccugcggccuguucgggcugguguccuuccuccugcugugcggccgcagcugcuccacgaccuacaaggggguguacgagcuccagacccuggagcuggacaugaccaaccucaacaugugcaugccgcugagcugcaccaagaacaacucccaccacuacaucauggucggcaacgagaccggccuggagcucacccugacgaacaccagcaucaucaaccacaaguucugcaaccuguccgacgcccacaagaagaaccucuacaaccacgcccugaugagcaucaucuccaccuuccaccugagcauccccaacuucaaccaguacgaggccauguccugcgacuucaacgggggcaagaucagcgugcaguacaaccucucccacagcuacgccguggacgcggccaaccacugcgggaccaucgccaacggcguccugcagacguucaugcggauggccuggggcggguccuacaucgcgcuggacagcggcaaggggaacugggacugcaucaugaccuccuaccaguaccucaucauccagaacaccaccugggaggaccacugccaguucagccgccccucccccaucggcuaccuggggcugcucagccagcggacgcgcgacaucuacaucagccggcgccugcugggcaccuucaccuggacccucuccgacagcgagggcaacgagacgcccgggggcuacugccugacccgguggaugcugaucgaggccgagcucaagugcuucgggaacaccgccguggccaagugcaacgagaagcacgacgaggaguucugcgacaugcugcgccuguucgacuucugcaagcaggccauccggcgccucaagaccgaggcgcaggccaacauccagcugaucaacaaggccgugaacgcccugaucaacgaccagcucaucaugaagaaccaccuccgggacaucaugggcauccccuacugcaacuacuccaaguacugcuaccugaaccacacggucaccgggaagaccagccugccccgcugcugccugguguccaacggcagcuaccugaacgagacccacuucuccgacgacaucgagcagcaggccgacaacaugaucacggagcuccugcagaaggaguacauggaccggcagggcaagaccccgcuggggcucguggaccuguucgucuucagcaccuccuucuaccugaucagcaucuuccugcaccucgugaagaucccgacccaccgccacgugaucggcaagcccugccccaagccccaccggcugaaccacauggggaucugcuccugcggccuguacaagcacccggggguccccgugaaguggaagcgcugaggacuaguuauaagacugacuagcccgaugggccucccaacgggcccuccuccccuccuugcaccgagauuaauaaaaaaaaaaaaaaaaaaaaaaaaaaaaaaaaaaaaaaaaaaaaaaaaaaaaaaaaaaaaaaaaaaaaaaaaaaaaaaaaaaaaaaaaaaaaaaaaaaaa

SEQ ID NO: 41498 - RNA, 1662 nt, Artificial Sequence
  mRNA product Design i-3 (A100) comprising derived and/or modified sequence from LASV(Nig08-A19;Clade III)__ADU56618__GPCmut12 (opt1)
aggagaaagcuuaccaugggccagaucgugaccuucuuccaggaggucccccacgugaucgaggaggugaugaacaucguccugaucgcccucagcauccuggccauccugaaggggcucuacaacaucgcgaccugcggccugaucgggcuggugacguuccuccugcuguccggccgcagcugcuccaugaccuacaaggggguguacgagcuccagacccuggagcugaacaugaacacccucaacaugugcaugccgcugagcugcaccaagaacaacucccaccacuacaucauggucggcaacgagaccggccuggagcucacccugacgaacaccagccugcuccaccacaaguucugcaaccuguccgacgcccacaagaagaaccuguacgaccacacccucaugagcaucaucuccaccuuccaccugagcauccccaacuucaaccaguacgaggccauguccugcgacuucaacgggggcaagaucacggugcaguacaaccugagccacuccuacgccaucgacgccgcgaaccacugcgggaccguggccaacggcguccuccagaccuucaugcggauggccuggggcgggagcuacaucgcccuggacuccggccgcgggaagugggacugcaucaugaccagcuaccaguaccugaucauccagaacacgaccugggaggaccacugccaguucucccggcccagccccaucggcuaccucgggcugcugucccagcgcacccgggacaucuacaucagccgccggcuccugggcaccuucacguggacccugagcgacuccgagggcaacgagacccccgggggcuacugccucacccgcuggaugcugaucgaggcggagcugaagugcuucgggaacacggccguggccaagugcaacgagaagcacgacgaggaguucugcgacaugcuccggcuguucgacuucugcaagcaggccauccgccggcugaaggccgaggcgcagaugagcauccagcucaucaacaaggccgugaacgcccugaucaacgaccagcugaucaugaagaaccaccuccgcgacaucaugggcauccccuacugcaacuacuccaaguacugcuaccugaaccacaccagcaccgggcggaccucccugccccgcugcugccucgucagcaacggcuccuaccugaacgagacgcacuucagcgacgacaucgagcagcaggccgacaacaugaucaccgagaugcugcagaaggaguaccucgaccggcagggcaagaccccgcuggggcugguggaccuguucguguucuccaccagcuucuaccucaucuccaucuuccugcaccuggucaagaucccgacgcaccgccacaucgugggcaagcccugccccaagccccaccggcucaaccacauggggaucugcagcugcggccuguacaagcagccgggggugcccguccgcuggaagcggugaggacuaguuauaagacugacuagcccgaugggccucccaacgggcccuccuccccuccuugcaccgagauuaauaaaaaaaaaaaaaaaaaaaaaaaaaaaaaaaaaaaaaaaaaaaaaaaaaaaaaaaaaaaaaaaaaaaaaaaaaaaaaaaaaaaaaaaaaaaaaaaaaaaa

SEQ ID NO: 41499 - RNA, 1665 nt, Artificial Sequence
  mRNA product Design i-3 (A100) comprising derived and/or modified sequence from LASV(G1180-SLE-2010;Clade IV)__AIT17168__GPCmut12 (opt1)
aggagaaagcuuaccaugggccagaucgugaccuucuuccaggaggucccccacgugaucgaggaggugaugaacaucguccugaucgcccucagcauccuggccgugcugaaggggcucuacaacuucgcgaccugcggccugguggggcugcucaccuuccugcugcucugcggccgcuccugcaccgccagccgguacaagggggucuacgagcugcagacccuggagcucaacauggagacccugaacaugugcaugccgcuguccugcaccaagaacaacagccaccacuacaucauggugggcaacgagaccggccucgagcugacccugacgaacaccuccaucaucaaccacaaguucugcaaccucagcgacgcccacaagaagaaccuguacgaccacgcccugauguccaucaucagcaccuuccaccucuccauccccaacuucaaccaguacgaggccaugagcugcgacuucaacgggggcaagaucuccgugcaguacaaccugagccacuccuacgcgggggacgccgccaaccacugcggcaccgucgccaacggggugcugcagacguucaugcgcauggcguggggcggcagcuacaucgcccucgacuccgggcacggcagcugggacugcaucaugaccuccuaccaguaccugaucauccagaacaccaccugggaggaccacugccaguucagccggcccucccccaucggguaccugggccuccugagccagcgcacgcgggacaucuacaucagccgccggcugcucggcaccuucaccuggacccuguccgacagcgaggggaaggacacgccgggcggguacugccugacccgcuggaugcucaucgaggccgagcugaagugcuucggcaacaccgccguggccaagugcaacgagaagcacgacgaggaguucugcgacaugcugcggcuguucgacuucugcaagcaggcgauccagcgccugaaggccgaggcccagauguccauccagcugaucaacaaggccgucaacgcccucaucaacgaccagcugaucaugaagaaccaccuccgggacaucauggggauccccuacugcaacuacagcaaguacugcuaccucaaccacaccacgaccggcaagaccucccugcccaagugcugccuggugagcaacggcuccuaccucaacgagacccacuucagcgacgacaucgagcagcaggcggacaacaugaucacggagaugcugcagaaggaguacauggagcgccaggggaagacgccccugggccucguggaccuguucgucuucuccaccagcuucuaccugaucuccaucuuccugcaccucgugaagaucccgacccaccggcacaucgugggcaagagcugccccaagccccaccgccugaaccacauggggaucugcuccugcgggcuguacaagcagcccggcgucccggugaaguggaagcggugaggacuaguuauaagacugacuagcccgaugggccucccaacgggcccuccuccccuccuugcaccgagauuaauaaaaaaaaaaaaaaaaaaaaaaaaaaaaaaaaaaaaaaaaaaaaaaaaaaaaaaaaaaaaaaaaaaaaaaaaaaaaaaaaaaaaaaaaaaaaaaaaaaaa

SEQ ID NO: 41500 - RNA, 1665 nt, Artificial Sequence
  mRNA product Design i-3 (A100) comprising derived and/or modified sequence from LASV(G1442-SLE-2011;Clade IV)__AIT17180__GPCmut12 (opt1)
aggagaaagcuuaccaugggccagaucgugaccuucuuccaggaggucccccacgugaucgaggaggugaugaacaucguccugaucgcccucagcauccuggccgugcugaaggggcucuacaacguggcgaccugcggccugaucgggcuggucacguuccuccugcugugcggccgcuccugcaccaccacccucuacaaggggguguacgagcugcagacgcuggagcucaacauggagacccugaacaugugcaugccgcugagcugcaccaagaacaacucccaccacuacauccgggugggcaacgagacgggccucgagcugacccugaccaacaccagcaucaucaaccacaaguucugcaaccucuccgacgcccacaagaagaaccuguacgaccacgcccugaugagcaucaucuccacguuccaccucagcauccccaacuucaaccaguacgaggccauguccugcgacuucaacgggggcaagaucagcguccaguacaaccugucccacagcuacgccggggacgcggccaaccacugcggcaccguggccaacggggugcugcagaccuucaugcgcauggccuggggcggcuccuacaucgcgcucgacagcgggcggggcaacugggacugcaucaugaccuccuaccaguaccugaucauccagaacacgaccugggacgaccacugccaguucagccgccccucccccaucggguaccugggccuccugagccagcggacccgcgacgucuacaucucccggcgccugcucggcaccuucacguggacccugagcgacagcgaggggaaggacaccccgggcggguacugccugacccgguggaugcucaucgaggccgagcugaagugcuucggcaacacggccguggccaagugcaacgagaagcacgacgaggaguucugcgacaugcugcgccucuucgacuucugcaagcaggccauccagcggcugaaggcggaggcccagauguccauccagcugaucaacaaggccgugaacgcccucaucaacgaccagcugaucaugaagaaccaccuccgcgacaucauggggauccccuacugcaacuacagcaaguacugcuaccugaacaacaccgccaccggcaagaccucccugcccaagugcugccugaucagcaacggcuccuaccucaacgagacgcacuucagcgacgacaucgagcaggaggcggacaacaugaucaccgagaugcugcagaaggaguacauggagcggcaggggaagacgccccugggccucgucgaccuguucguguucuccaccagcuucuaccugaucuccaucuuccugcaccucgugaagaucccgacccaccgccacaucgucggcaagagcugccccaagccccaccggcugaaccacauggggaucugcuccugcgggcuguacaagcagcccggcgugccggugcgcuggaagcggugaggacuaguuauaagacugacuagcccgaugggccucccaacgggcccuccuccccuccuugcaccgagauuaauaaaaaaaaaaaaaaaaaaaaaaaaaaaaaaaaaaaaaaaaaaaaaaaaaaaaaaaaaaaaaaaaaaaaaaaaaaaaaaaaaaaaaaaaaaaaaaaaaaaa

SEQ ID NO: 41501 - RNA, 1665 nt, Artificial Sequence
  mRNA product Design i-3 (A100) comprising derived and/or modified sequence from LASV(G3010-SLE-2013;Clade IV)__AIT17344__GPCmut12 (opt1)
aggagaaagcuuaccaugggccagaucgugaccuucuuccaggaggucccccacgugaucgaggaggugaugaacaucguccugaucgcccucagcauccuggccgugcugaaggggcucuacaacuucgcgaccugcggccugguggggcuggucacguuccuccugcugugcggccgcuccugcaccaccagccucuacaaggggguguacgagcugcagacccuggagcucaacauggagacgcugaacaugugcaugccgcuguccugcaccaagaacaacagccaccacuacaucauggugggcaacgagaccggccucgagcugacgcugaccaacaccuccaucaucaaccacaaguucugcaaccucagcgacgcccacaagaagaaccuguacaaccacgcccugauguccaucaucagcaccuuccaccucuccauccccaacuucaaccaguacgaggccaugagcugcgacuucaacgggggcaagaucuccguccaguacaaccugagccacuccuacgccggggacgcggccagccacugcggcacgguggccaacggggugcugcagaccuucaugcggauggccuggggcggcuccuacaucgcgcucgacagcggguacggcaagugggacugcaucaugaccuccuaccaguaccugaucauccagaacaccacgugggaggaccacugccaguucagccgccccucccccaucggguaccugggccuccugagccagcggacccgcgacaucuacaucagccggcgccugcucggcaccuucaccuggacgcuguccgacagcgaggggaaggacaccccgggcggguacugccugacccgguggaugcucaucgaggccgagcugaagugcuucggcaacaccgccgucgccaagugcaacgagaagcacgacgaggaguucugcgacaugcugcgccucuucgacuucugcaagcaggccauccagcggcugaagacggaggcgcagauguccauccagcugaucaacaaggccgugaacgcccucaucaacgaccagcugaucaugaagaaccaccuccgcgacaucauggggauccccuacugcaacuacagcaaguacugcuaccugaaccacaccaccaccggcaagacgucccugcccaagugcugccuggugagcaacggcuccuaccucaacgagacccacuucagcgacgacaucgagcagcaggccgacaacaugaucaccgagaugcugcagaaggaguacauggagcggcaggggaagacgccccugggccucgucgaccuguucguguucuccaccagcuucuaccugaucuccaucuuccugcaccucgugaagaucccgacccaccgccacaucgucggcaagagcugccccaagccccaccggcugaaccacauggggaucugcuccugcgggcuguacaagcagcccggcgugccggugcgcuggaagcggugaggacuaguuauaagacugacuagcccgaugggccucccaacgggcccuccuccccuccuugcaccgagauuaauaaaaaaaaaaaaaaaaaaaaaaaaaaaaaaaaaaaaaaaaaaaaaaaaaaaaaaaaaaaaaaaaaaaaaaaaaaaaaaaaaaaaaaaaaaaaaaaaaaaa

SEQ ID NO: 41502 - RNA, 1665 nt, Artificial Sequence
  mRNA product Design i-3 (A100) comprising derived and/or modified sequence from LASV(G502-SLE-2009;Clade IV)__AIT17126__GPCmut12 (opt1)
aggagaaagcuuaccaugggccagaucgugaccuucuuccaggaggucccccacgugaucgaggaggugaugaacaucguccugaucgcccucagcauccuggccgugcugaaggggcucuacaacuucgcgaccugcggccugguggggcugcucacguuccugcugcucugcggccgcuccugcaccaccgggcuguacaagggcgucuacgagcugcagacccucgagcugaacauggagacgcugaacaugugcaugccgcucagcugcaccaagaacaacucccaccacuacaucauggugggcaacgagaccgggcuggagcugacgcucaccaacaccagcaucaucaaccacaaguucugcaaccuguccgacgcccacaagaagaaccuguacgaccacgcccucaugagcaucaucuccaccuuccaccugagcauccccaacuucaaccaguacgaggccauguccugcgacuucaacggcgggaagaucagcgugcaguacaaccugucccacagcuacgccggcgacgcggccgaccacugcgggacggucgccaacggcgugcuccagaccuucaugcggauggccuggggcggguccuacaucgcgcuggacagcggccgcgggcggugggacugcaucaugaccuccuaccaguaccugaucauccagaacaccacgugggaggaccacugccaguucagccgccccucccccaucggcuaccucggccugcugagccagcggacccgcgacaucuacaucucccggcgccuccuggggaccuucaccuggacgcugagcgacagcgagggcaaggacacccccgggggcuacugccucacccgguggaugcugaucgaggccgagcugaagugcuucgggaacaccgccguggccaagugcaacgagaagcacgacgaggaguucugcgacaugcuccgccuguucgacuucugcaagcaggccauccagcggcugaaggcggaggcccagauguccauccagcucaucaacaaggccgucaacgcccugaucaacgaccagcuggugaugaagaaccaccuccgcgacaucaugggcauccccuacugcaacuacagccgguacugcuaccugaaccacacgaccaccggccgcaccucccugcccaagugcugccucgugagcaacggguccuaccugaacgagacgcacuucagcgacgacaucgagcagcaggccgacaacaugaucaccgagaugcugcagaaggaguacauggagcggcagggcaagaccccgcucgggcuggucgaccuguucguguucuccaccagcuucuaccugaucuccaucuuccuccaccuggugaagaucccgacgcaccgccacaucgucggcaagagcugccccaagccccaccggcugaaccacauggggaucugcuccugcggccucuacaagcagcccggcgugccggugaaguggaagcgcugaggacuaguuauaagacugacuagcccgaugggccucccaacgggcccuccuccccuccuugcaccgagauuaauaaaaaaaaaaaaaaaaaaaaaaaaaaaaaaaaaaaaaaaaaaaaaaaaaaaaaaaaaaaaaaaaaaaaaaaaaaaaaaaaaaaaaaaaaaaaaaaaaaaa

SEQ ID NO: 41503 - RNA, 1665 nt, Artificial Sequence
  mRNA product Design i-3 (A100) comprising derived and/or modified sequence from LASV(G733-SLE-2010;Clade IV)__AIT17154__GPCmut12 (opt1)
aggagaaagcuuaccaugggccagaucgugaccuucuuccaggaggucccccacgugaucgaggaggugaugaacaucguccugaucgcccucagcauccuggccgugcugaaggggcucuacaacuucgcgaccugcggcaucguggggcuggucuccuuccugcuccugugcggccgcagcugcacgaccucccuguacaaggggguguacgagcuccagacccuggagcugaacauggagacccucaacaugugcaugccgcugagcugcaccaagaacaacucccaccacuacaucauggugggcaacgagaccggccuggagcucacccugacgaacaccagcaucaucaaccacaaguucugcaaccuguccgacgcccacaagaagaaccucuacgaccacgcccugaugagcaucaucuccaccuuccaccugagcauccccaacuucaaccaguacgaggccauguccugcgacuucaacgggggcaagaucagcguccaguacaaccucucccacagcuacgccggggacgcggccaaccacugcggcaccaucgccaacggggugcugcagacguucaugcggauggccuggggcggcuccuacaucgcgcuggacagcgggcgcgaccggugggacugcaucaugaccuccuaccaguaccucaucauccagaacaccaccugggaggaccacugccaguucagccgccccucccccaucggcuaccuggggcugcucagccagcggacgcgcgacaucuacaucagccggcgccugcugggcaccuucaccuggacccucuccgacagcgagggcaaggacacgcccgggggcuacugccugacccgguggaugcugaucgaggccgagcucaagugcuucgggaacaccgccguggccaagugcaacgagaagcacgacgaggaguucugcgacaugcugcgccuguucgacuucugcaagcaggccauccagcggcucaaggcggaggcccagauguccauccagcugaucaacaaggccgucaacgcccugaucaacgaccagcucaucaugaagaaccaccuccgcgacaucaugggcauccccuacugcaacuacagcaaguacugcuaccugaaccacaccacgaccgggaagaccucccugcccaagugcugccuggugagcaacggcuccuaccugaacgagacccacuucagcgacgacaucgagcagcaggccgacaacaugaucacggagaugcuccagaaggaguacauggagcggcagggcaagaccccgcuggggcugguggaccucuucgucuucuccaccagcuucuaccugaucuccaucuuccugcaccuggugaagaucccgacccaccgccacguggucggcaagagcugccccaagccccaccggcucaaccacauggggaucugcuccugcggccuguacgggcagcccggcgugccggugaaguggaagcgcugaggacuaguuauaagacugacuagcccgaugggccucccaacgggcccuccuccccuccuugcaccgagauuaauaaaaaaaaaaaaaaaaaaaaaaaaaaaaaaaaaaaaaaaaaaaaaaaaaaaaaaaaaaaaaaaaaaaaaaaaaaaaaaaaaaaaaaaaaaaaaaaaaaaa

SEQ ID NO: 41504 - RNA, 1665 nt, Artificial Sequence
  mRNA product Design i-3 (A100) comprising derived and/or modified sequence from MOPV/LASV reassortant(IGS-1;Clade IV)__AFY05576__GPCmut12 (opt1)
aggagaaagcuuaccaugggccagaucgugaccuucuuccaggaggucccccacgugaucgaggaggugaugaacaucguccugaucgcccucagcgugcuggccgugcugaaggggcucuacaacuucgcgaccugcggccuggucgggcuggugacguuccuccugcugugcggccgcuccugcaccaccagccucuacaaggggguguacgagcugcagacccuggagcucaacauggagacgcugaacaugugcaugccgcuguccugcaccaagaacaacagccaccacuacaucauggucggcaacgagaccggccucgagcugacgcugaccaacaccuccaucaucaaccacaaguucugcaaccucagcgacgcccacaagaagaaccuguacgaccacgcccugauguccaucaucagcaccuuccaccucuccauccccaacuucaaccaguacgaggccaugagcugcgacuucaacgggggcaagaucuccgugcaguacaaccugagccacuccuacgccggggacgcggccaaccacugcggcacgguggccaacgggguccugcagaccuucaugcggauggccuggggcggcagcuacaucgcgcucgacuccgggcgcggcaacugggacugcaucaugaccagcuaccaguaccugaucauccagaacaccacgugggaggaccacugccaguucucccggcccagccccaucggguaccugggccuccugucccagcgcacccgggacaucuacaucagccgccggcugcucggcaccuucaccuggacgcugagcgacuccgagggggaggacaccccgggcggguacugccugacccgcuggaugcucaucgaggccgagcugaagugcuucggcaacaccgccguggccaagugcaacgagaagcacgacgaggaguucugcgacaugcugcggcuguucgacuucugcaagcaggccauccagcgccugaaggcggaggcccagaugagcauccagcugaucaacaaggccgugaacgcccucaucaacgaccagcugaucaugaagaaccaccuccgggacaucauggggauccccuacugcaacuacuccaaguacugcuaccucaaccacacgaccaccggccgcaccagccugcccaagugcugccuggucuccaacggcagcuaccucaacgagacgcacuucuccgacgacaucgagcagcaggccgacaacaugaucaccgagaugcugcagaaggaguacauggagcggcaggggaagacgccccugggccucguggaccuguucguguucagcaccuccuucuaccugaucagcaucuuccugcaccucgucaagaucccgacccaccgccacaucguggggaaguccugccccaagccccaccggcugaaccacaugggcaucugcagcugcgggcuguacaagcagcccggcgugccggucaaguggaagcgcugaggacuaguuauaagacugacuagcccgaugggccucccaacgggcccuccuccccuccuugcaccgagauuaauaaaaaaaaaaaaaaaaaaaaaaaaaaaaaaaaaaaaaaaaaaaaaaaaaaaaaaaaaaaaaaaaaaaaaaaaaaaaaaaaaaaaaaaaaaaaaaaaaaaa

SEQ ID NO: 41505 - RNA, 1665 nt, Artificial Sequence
  mRNA product Design i-3 (A100) comprising derived and/or modified sequence from LASV(LM765-SLE-2012;Clade IV)__AIT17814__GPCmut12 (opt1)
aggagaaagcuuaccaugggccagaucgugaccuucuuccaggaggucccccacgugaucgaggaggugaugaacaucguccugaucgcccucagcauccuggccgugcugaaggggcucuacaacuucgcgaccugcggccugguggggcuggucacguuccuccugcugugcggccgcuccugcaccaccagccucuacaaggggguguacgagcugcagacccuggagcucaacauggagacgcugaacaugugcaugccgcuguccugcaccaagaacaacagccaccacuacaucauggugggcaacgagaccggccucgagcugacgcugaccaacaccuccaucaucgaccacaaguucugcaaccucagcgacgcccaccggaagaaccuguacgaccacgcccugauguccaucaucagcaccuuccaccucuccauccccaacuucaaccaguacgaggccaugagcugcgacuucaacgggggcaagaucuccguccaguacaaccugagccacuccuacgccaaggacgcggccgaccacugcgggacgguggccaacggcgugcugcagaccuucaugcgcauggccuggggcgggagcuacaucgcgcucgacuccggccgggggcgcugggacugcaucaugaccagcuaccaguaccugaucauccagaacaccacgugggaggaccacugccaguucucccggcccagccccaucggcuaccuggggcuccugucccagcgcacccgggacaucuacaucagccgccggcugcucggcaccuucaccuggacgcugagcgacuccgagggcaaggacacccccgggggcuacugccugacccgcuggaugcucaucgaggccgagcugaagugcuucgggaacaccgccgucgccaagugcaacgagaagcacgacgaggaguucugcgacaugcugcggcuguucgacuucugcaagcaggccauccagcgccugaaggcggaggcccagaugagcauccagcugaucaacaaggccgugaacgcccucaucaacgaccagcugaucaugaagaaccaccuccgggacaucaugggcauccccuacugcaacuacuccaaguacugcuaccucaaccacacgaccaccgggaagaccagccugcccaagugcugccugguguccaacggcagcuaccucaacgagacgcacuucuccgacgacaucgagcagcaggccgacaacaugaucaccgagaugcugcagaaggaguacauggagcgccagggcaagaccccgcuggggcucgucgaccuguucguguucagcaccuccuucuaccugaucagcaucuuccugcaccucgugaagaucccgacgcaccggcacaucgucggcaagcccugccccaagccccaccgccugaaccacauggggaucugcuccugcggccuguacaagcagccgggggugcccgugaaguggaagcggugaggacuaguuauaagacugacuagcccgaugggccucccaacgggcccuccuccccuccuugcaccgagauuaauaaaaaaaaaaaaaaaaaaaaaaaaaaaaaaaaaaaaaaaaaaaaaaaaaaaaaaaaaaaaaaaaaaaaaaaaaaaaaaaaaaaaaaaaaaaaaaaaaaaa

SEQ ID NO: 41506 - RNA, 1665 nt, Artificial Sequence
  mRNA product Design i-3 (A100) comprising derived and/or modified sequence from LASV(LM776-SLE-2012;Clade IV)__AIT17824__GPCmut12 (opt1)
aggagaaagcuuaccaugggccagaucgugaccuucuuccaggaggucccccacgugaucgaggaggugaugaacaucguccugaucgcccucagcauccuggccgugcugaaggggcucuacaacuucgcgaccugcggccugguggggcuggucacguuccuccugcugugcggccgcuccugcaccaccagcguguacaaggggguguacgagcuccagacccuggagcugaacauggagacgcucaacaugugcaugccgcuguccugcaccaagaacaacagccaccacuacaucauggucggcaacgagaccggccuggagcucacgcugaccaacaccuccaucaucaaccacaaguucugcaaccugagcgacgcccacaagaagaaccucuacgaccacgcccugauguccaucaucagcaccuuccaccuguccauccccaacuucaaccaguacgaggccaugagcugcgacuucaacgggggcaagaucuccgugcaguacaaccucagccacuccuacgccggggacgcggccaaccacugcggcacgguggccaacgggguccugcagaccuucaugcggauggccuggggcggcagcuacaucgcgcuggacuccgggcacggcaagugggacugcaucaugaccagcuaccaguaccucaucauccagaacaccacgugggaggaccacugccaguucucccgccccagccccaucggguaccugggccugcucucccagcggacccgcgacaucuacaucagccggcgccugcugggcaccuucaccuggacgcucagcgacuccgaggggaaggacaccccgggcggguacugccugacccgguggaugcugaucgaggccgagcucaagugcuucggcaacaccgccguggccaagugcaacgagaagcacgacgaggaguucugcgacaugcugcgccuguucgacuucugcaagcaggccauccagcggcucaaggcggaggcccagaugagcauccagcugaucaacaaggccgugaacgcccugaucaacgaccagcucaucaugaagaaccaccuccgcgacaucauggggauccccuacugcaacuacuccaaguacugcuaccugaaccacacgaccaccggcaagaccagccugcccaagugcugccuggucuccaacggcagcuaccugaacgagacgcacuucuccgacgacaucgagcagcaggccgacaacaugaucaccgagaugcuccagaaggaguacauggagcggcaggggaagacgccccugggccugguggaccucuucguguucagcaccuccuucuaccugaucagcaucuuccugcaccuggucaagaucccgacccaccgccacaucguggggaaguccugccccaagccccaccggcucaaccacaugggcaucugcagcugcgggcuguacaagcagcccggcgugccgguccgcuggaagcggugaggacuaguuauaagacugacuagcccgaugggccucccaacgggcccuccuccccuccuugcaccgagauuaauaaaaaaaaaaaaaaaaaaaaaaaaaaaaaaaaaaaaaaaaaaaaaaaaaaaaaaaaaaaaaaaaaaaaaaaaaaaaaaaaaaaaaaaaaaaaaaaaaaaa

SEQ ID NO: 41507 - RNA, 1665 nt, Artificial Sequence
  mRNA product Design i-3 (A100) comprising derived and/or modified sequence from LASV(Mad39;Clade IV)__ANH09722__GPCmut12 (opt1)
aggagaaagcuuaccaugggccagaucgugaccuucuuccaggaggucccccacgugaucgaggaggugaugaacaucguccugaucgcccucagcauccuggccgugcugaaggggcucuacaacguggcgaccugcggccugaucgggcuggucacguuccuccugcugugcggccgcuccugcaccaccacccucuacaaggggguguacgagcugcaggcccuggagcucaacauggagacgcugaacaugugcaugccgcugagcugcaccaagaacaacucccaccacuacauccgggugggcaacgagaccggccucgagcugacgcugaccaacaccagccucaucaaccacaaguucugcaaccuguccgacgcccacaagaagaaccuguacgaccacgcccucaugagcaucaucuccaccuuccaccugagcauccccaacuucaaccaguacgaggccauguccugcgacuucaacgacgggaagaucagcguccaguacaaccugucccacacguacgcgggcgacaccgccaaccacugcgggaccguggccaacggcgugcuccagaccuucaugcgcauggccuggggcgggagcuacaucgcgcuggacuccggccgcgggggcugggacugcaucaugacgagcuaccaguaccugaucauccagaacaccaccugggaggaccacugccaguucucccggcccagccccaucggguaccucggccugcugucccagcggacccgcgacaucuacaucagccggcgccuccugggcacguucaccuggacccuguccgacagcgaggggaaggacaccccgggcggguacugccucacgcgguggaugcugaucgaggccgagcugaagugcuucggcaacaccgccgucgccaagugcaacgagaagcacgacgaggaguucugcgacaugcuccgccuguucgacuucugcaagcaggccauccagcggcugaaggcggaggcccagaugagcauccagcucaucaacaaggccgugaacgcccugaucaacgaccagcugaucaugaagaaccaccuccgcgacaucauggggauccccuacugcaacuacuccaaguacugcuaccugaaccacaccgugaccggcaagacgagccugcccaagugcugccucgucuccaacggcagcuaccugaacgagacccacuucuccgacgacaucgagcagcaggccgacaacaugaucaccgagaugcugcagaaggaguacauggagcggcaggggaagacgccccucggccugguggaccuguucguguucagcaccuccuucuaccugaucagcaucuuccuccaccuggucaagaucccgacccaccgccacgugguggggaagcccugccccaagccccaccggcugaaccacaugggcaucugcuccugcggguucuacaagcagccgggcguccccgugcgcuggaagcggugaggacuaguuauaagacugacuagcccgaugggccucccaacgggcccuccuccccuccuugcaccgagauuaauaaaaaaaaaaaaaaaaaaaaaaaaaaaaaaaaaaaaaaaaaaaaaaaaaaaaaaaaaaaaaaaaaaaaaaaaaaaaaaaaaaaaaaaaaaaaaaaaaaaa

SEQ ID NO: 41508 - RNA, 1665 nt, Artificial Sequence
  mRNA product Design i-3 (A100) comprising derived and/or modified sequence from LASV(Z0947-SLE-2011;Clade IV)__AIT17840__GPCmut12 (opt1)
aggagaaagcuuaccaugggccagaucgugaccuucuuccaggaggucccccacgugaucgaggaggugaugaacaucguccugaucgcccucagcauccuggccgugcugaaggggcucuacaacuucgcgaccugcggccugguggggcuggucacguuccuccugcugugcggccgcuccugcaccaucagccucuacaaggggguguacgagcugcagacccuggagcucaacauggagacccugaacaugugcaugccgcuguccugcaccaagaacaacagccaccacuacaucauggugggcaacgagaccggccucgagcugacccugacgaacaccuccaucaucaaccacaaguucugcaaccucagcgacgcccacaagaagaaccuguacgaccacgcccugauguccaucaucagcaccuuccaccucuccauccccaacuucaaccaguacgaggccaugagcugcgacuucaacgggggcaagaucuccguccaguacaaccugagccacuccuacgccggggacgcggccaaccacugcggcaccguggccaacggggugcugcagacguucaugcggauggccuggggcggcagcuacaucgcgcucgacuccgggcgcgaccggugggacugcaucaugaccagcuaccaguaccugaucauccagaacaccaccugggaggaccacugccaguucucccgccccagccccaucggcuaccuggggcuccugucccagcggacgcgcgacaucuacaucagccggcgccugcucggcaccuucaccuggacccugagcgacuccgagggcaaggacacgcccgggggcuacugccugacccgguggaugcucaucgaggccgagcugaagugcuucgggaacaccgccgucgccaagugcaacgagaagcacgacgaggaguucugcgacaugcugcgccucuucgacuucugcaagcaggccauccagcggcugaaggcggaggcccagaugagcauccagcugaucaacaaggccgugaacgcccucaucaacgaccagcugaucaugaagaaccaccuccgcgacaucaugggcauccccuacugcaacuacuccaaguacugcuaccugaaccacaccacgaccgggaagaccagccugcccaagugcugccugguguccaacggcagcuaccucaacgagacccacuucuccgacgacaucgagcagcaggccgacaacaugaucacggagaugcugcagaaggaguacauggagcggcagggcaagaccccgcuggggcucgucgaccuguucguguucagcaccuccuucuaccugaucagcaucuuccugcaccucgugaagaucccgacccaccgccacaucgucggcaagcccugccccaagccccaccggcugaaccacauggggaucugcuccugcggccuguacaagcagccgggggugcccgugaaguggaagcgcugaggacuaguuauaagacugacuagcccgaugggccucccaacgggcccuccuccccuccuugcaccgagauuaauaaaaaaaaaaaaaaaaaaaaaaaaaaaaaaaaaaaaaaaaaaaaaaaaaaaaaaaaaaaaaaaaaaaaaaaaaaaaaaaaaaaaaaaaaaaaaaaaaaaa

SEQ ID NO: 41509 - RNA, 1665 nt, Artificial Sequence
  mRNA product Design i-3 (A100) comprising derived and/or modified sequence from LASV(Josiah;Clade IV)__NP_694870__GPCmut12 (opt1)
aggagaaagcuuaccaugggccagaucgugaccuucuuccaggaggucccccacgugaucgaggaggugaugaacaucguccugaucgcccucagcgugcuggccgugcugaaggggcucuacaacuucgcgaccugcggccuggucgggcuggugaccuuccuccugcugugcggccgcuccugcaccaccagccucuacaaggggguguacgagcugcagacccuggagcucaacauggagacgcugaacaugugcaugccgcuguccugcaccaagaacaacagccaccacuacaucauggucggcaacgagaccggccucgagcugacccugacgaacaccuccaucaucaaccacaaguucugcaaccucagcgacgcccacaagaagaaccuguacgaccacgcccugauguccaucaucagcaccuuccaccucuccauccccaacuucaaccaguacgaggccaugagcugcgacuucaacgggggcaagaucuccgugcaguacaaccugagccacuccuacgccggggacgcggccaaccacugcggcaccguggccaacgggguccugcagacguucaugcggauggccuggggcggcagcuacaucgcgcucgacuccgggcgcggcaacugggacugcaucaugaccagcuaccaguaccugaucauccagaacaccaccugggaggaccacugccaguucucccggcccagccccaucggguaccugggccuccugucccagcgcacgcgggacaucuacaucagccgccggcugcucggcaccuucaccuggacccugagcgacuccgaggggaaggacacgccgggcggguacugccugacccgcuggaugcucaucgaggccgagcugaagugcuucggcaacaccgccguggccaagugcaacgagaagcacgacgaggaguucugcgacaugcugcggcuguucgacuucugcaagcaggccauccagcgccugaaggcggaggcccagaugagcauccagcugaucaacaaggccgugaacgcccucaucaacgaccagcugaucaugaagaaccaccuccgggacaucauggggauccccuacugcaacuacuccaaguacugcuaccucaaccacaccacgaccggccgcaccagccugcccaagugcugccuggucuccaacggcagcuaccucaacgagacccacuucuccgacgacaucgagcagcaggccgacaacaugaucacggagaugcugcagaaggaguacauggagcggcaggggaagacgccccugggccugguggaccucuucguguucagcaccuccuucuaccugaucagcaucuuccugcaccucgucaagaucccgacccaccgccacaucguggggaaguccugccccaagccccaccggcugaaccacaugggcaucugcagcugcgggcuguacaagcagcccggcgugccggucaaguggaagcgcugaggacuaguuauaagacugacuagcccgaugggccucccaacgggcccuccuccccuccuugcaccgagauuaauaaaaaaaaaaaaaaaaaaaaaaaaaaaaaaaaaaaaaaaaaaaaaaaaaaaaaaaaaaaaaaaaaaaaaaaaaaaaaaaaaaaaaaaaaaaaaaaaaaaa

SEQ ID NO: 41510 - RNA, 1662 nt, Artificial Sequence
  mRNA product Design i-3 (A100) comprising derived and/or modified sequence from LASV(LP;Clade I)__AAF86701__GPCmut12 (opt1)
aggagaaagcuuaccaugggccagaucaucaccuucuuccaggaggugccccacgucaucgaggaggugaugaacaucgugcugaucgcccucagccugcuggccauccucaaggggcuguacaacaucgcgaccugcggcaucaucgggcuggucgccuuccucuuccugugcggcaaguccugcagccugacgcucaagggcggguacgagcugcagacccuggagcucaacauggagacccugaacaugugcaugccgcuguccugcaccaagaacagcucccaccacuacauccgcgugggcaacgagacggggcucgagcugacccugaccaacaccagcaucaucaaccacaaguucugcaaccucuccgacgcccacaagaagaaccuguacgaccacgcccugaugagcaucaucuccacguuccaccucagcauccccaacuucaaccaguacgaggccauguccugcgacuucaacggcgggaagaucagcgugcaguacaaccugucccacagcuacgcgggcgacgccgccgagcacugcgggaccgucgccaacggcgugcugcagaccuucaugcggauggcguggggcgggcgcuacaucgcccucgacuccggcaaggggaacugggacugcaucaugaccagcuaccaguaccugaucauccagaacacgaccugggaggaccacugccaguucucccggcccagccccaucggcuaccugggccuccugucccagcgcacccgggacaucuacaucagccgccggcugcucgggaccuucacguggacccugagcgacuccgagggcaacgagacccccgggggcuacugccugacccgcuggaugcucaucgaggccgagcugaagugcuucgggaacacggccguggccaagugcaacgagaagcacgacgaggaguucugcgacaugcugcggcuguucgacuucugcaagcaggcgauccgccggcugaaggccgaggcccagaugagcauccagcugaucaacaaggccgucaacgcccucaucaacgaccagcugaucaugaagaaccaccuccgcgacaucaugggcauccccuacugcaacuacuccaaguacugcuaccucaaccacaccagcuccggccggaccagccugcccaagugcugccugaucuccaacgggagcuaccucaacgagacccaguucuccgacgacaucgagcagcaggcggacaacaugaucacggagaugcugcagaaggaguacaucgagcgccagggcaagaccccgcuggggcugguggacaucuucaucuucagcaccuccuucuaccucaucagcaucuuccugcaccugaucaagaucccgacccaccggcacaucgugggcaagcccugccccaagccccaccgccucaaccacaugggggucugcuccugcggccuguacaagcacccgggcgugcccacgaaguggaagcggugaggacuaguuauaagacugacuagcccgaugggccucccaacgggcccuccuccccuccuugcaccgagauuaauaaaaaaaaaaaaaaaaaaaaaaaaaaaaaaaaaaaaaaaaaaaaaaaaaaaaaaaaaaaaaaaaaaaaaaaaaaaaaaaaaaaaaaaaaaaaaaaaaaaa

SEQ ID NO: 41511 - RNA, 1662 nt, Artificial Sequence
  mRNA product Design i-3 (A100) comprising derived and/or modified sequence from LASV(803213;Clade II)__AAF86703__GPCmut12 (opt1)
aggagaaagcuuaccaugggccagaucaucaccuucuuccaggaggugccccacgucaucgaggaggugaugaacaucgugcugaucgcccucagccugcuggccauccucaaggggaucuacaacgucgcgaccugcggccuguucgggcugaucuccuuccuccugcugugcggccgcagcugcuccgugacguacaaggggguguacgagcuccagacccuggagcugaacauggccaaccucaacaugugcaugccgcugagcugcaccaagaacaacucccaccacuacaucauggucggcaacgagaccggccuggagcucacgcugaccaacaccagcaucaucaaccacaaguucugcaaccuguccgacgcccacaagaagaaccucuacgaccacgcccugaugagcaucaucuccaccuuccaccugagcauccccaacuucaaccaguacgaggccauguccugcgacuucaacgggggcaagaucagcgugcaguacaaccucucccacagcuucgcgguggacgccgccaaccacugcgggacgaucgccaacggcguccugcagaccuucaugcggauggcguggggcggguccuacaucgcccuggacagcggcaaggggaacugggacugcaucaugaccuccuaccaguaccucaucauccagaacaccacgugggaggaccacugccaguucagccgccccucccccaucggcuaccuggggcugcucagccagcggacccgcgacaucuacaucagccggcgccugcugggcaccuucaccuggacgcucuccgacagcgagggcaacgaggcccccgggggcuacugccugacccgguggaugcugaucgaggccgagcucaagugcuucgggaacaccgccguggcgaagugcaacgagaagcacgacgaggaguucugcgacaugcugcgccuguucgacuucugcaagcaggccaucaagcggcucaagaccgaggcccagauguccauccagcugaucaacaaggccgugaacgcccugaucaacgaccagcucaucaugaagaaccaccuccgcgacaucaugggcauccccuacugcaacuacagccgguacugcuaccugaaccacacggucaccgggaagaccucccugccccgcugcugccuggugagcaacggcuccuaccugaacgagacccacuucagcgacgacaucgagcagcaggcggacaacaugaucacggagaugcuccagaaggaguacauggaccggcagggcaagaccccgcuggggcugguggaccuguucgucuucuccaccagcuucuaccucaucuccaucuuccugcaccuggugaagaucccgacccaccgccacaucgugggcaagcccugccccaagccccaccggcucaaccacauggggaucugcagcugcggccuguacaagcacccggggguccccgugaaguggaagcgcugaggacuaguuauaagacugacuagcccgaugggccucccaacgggcccuccuccccuccuugcaccgagauuaauaaaaaaaaaaaaaaaaaaaaaaaaaaaaaaaaaaaaaaaaaaaaaaaaaaaaaaaaaaaaaaaaaaaaaaaaaaaaaaaaaaaaaaaaaaaaaaaaaaaa

SEQ ID NO: 41512 - RNA, 1662 nt, Artificial Sequence
  mRNA product Design i-3 (A100) comprising derived and/or modified sequence from LASV(GA391;Clade III)__CAA36645__GPCmut12 (opt1)
aggagaaagcuuaccaugggccagaucgugaccuucuuccaggaggucccccacgugaucgaggaggugaugaacaucguccugaucgcccucagcauccuggccauccugaaggggcucuacaacguggcgaccugcggccugaucgggcuggugaccuuccuccugcuguccggccgcagcugcucccucaucuacaaggggaccuacgagcugcagacccuggagcucaacauggagacccugaacaugugcaugccgcugagcugcacgaagaacaacucccaccacuacauccgggucggcaacgagaccggccucgagcugacccugaccaacacgagcauccucaaccacaaguucugcaaccuguccgacgcccacaagcgcaaccuguacgaccacagccucauguccaucaucagcaccuuccaccuguccauccccaacuucaaccaguacgaggccaugagcugcgacuucaacgggggcaagaucaccgugcaguacaaccugucccacagcuucgccguggacgccgcggggcacugcggcacccucgccaacgggguccugcagacguucaugcggauggccuggggcggcuccuacaucgcccuggacagcgggcgcggcaacugggacugcaucaugaccuccuaccaguaccucaucauccagaacaccaccugggacgaccacugccaguucagccggcccucccccaucggguaccugggccugcucagccagcgcacgcgggacaucuacaucagccgccggcugcugggcaccuucaccuggacccucuccgacagcgaggggaacgagacgccgggcggguacugccugacccgcuggaugcugaucgaggcggagcucaagugcuucggcaacaccgccguggccaagugcaacgagaagcacgacgaggaguucugcgacaugcugcggcuguucgacuucugcaagcaggccauccgccggcucaagaccgaggcccagauguccauccagcugaucaacaaggcggugaacgcccugaucaacgaccagcucaucaugaagaaccaccuccgcgacaucauggggauccccuacugcaacuacagccgguacugcuaccugaaccacacguccaccggcaagaccagccugccccgcugcugccugaucuccaacggcagcuaccugaacgagaccaaguucuccgacgacaucgagcagcaggccgacaacaugaucacggagaugcugcagaaggaguacaucgaccggcaggggaagacgccccucggccuggucgaccuguucguguucagcaccuccuucuaccucaucagcaucuuccugcaccuggugaagaucccgacccaccgccacaucgucgggaagcccugccccaagccccaccggcucaaccacaugggcaucugcuccugcgggcuguacaagcagccgggcgugcccgugcgcuggaagcggugaggacuaguuauaagacugacuagcccgaugggccucccaacgggcccuccuccccuccuugcaccgagauuaauaaaaaaaaaaaaaaaaaaaaaaaaaaaaaaaaaaaaaaaaaaaaaaaaaaaaaaaaaaaaaaaaaaaaaaaaaaaaaaaaaaaaaaaaaaaaaaaaaaaa

SEQ ID NO: 41513 - RNA, 1665 nt, Artificial Sequence
  mRNA product Design i-3 (A100) comprising derived and/or modified sequence from LASV(AV;Clade V)__CCA30314__GPCmut12 (opt1)
aggagaaagcuuaccaugggccagaucgugaccuucuuccaggaggucccccacgugaucgaggaggugaugaacaucguccugaucgcccucagcauccuggccgugcugaaggggcucuacaacaucgcgaccugcggccugaucgggcugaucacguuccuccugcugugcggccgcuccugcagcuccaaccucuacaaggggguguacgagcugcagagccuggaccucaacauggagacccugaacaugugcaugccgcuguccugcaccaagaacaacagccaccacuacauccgggucggcaacgacaccggccucgagcugacgcugaccaacaccuccauccucaaccacaaguucugcaaccugagcgacgcccacaagaaggaccuguacgaccacgcccucauguccaucaucagcaccuuccaccuguccauccccaacuucaaccaguacgaggccaugagcugcgacuucaacgggggcaagaucuccgugcaguacaaccugagccacuccuacgccaucgacgcggccaaccacugcgggacgguggccaacggcauccuccagaccuucaugcgcauggccuggggcgggagcuacaucgcgcuggacuccggccgggggaacugggacugcaucaugaccagcuaccaguaccugaucauccagaacaccacgugggagaaccacugccaguucucccgccccagccccaucggcuaccucgggcugcugagccagcggacccgcgacaucuacaucucccggcgccuccugggcaccuucaccuggacgcugagcgacuccgagggcaacgccacccccgggggcuacugccucacccgguggaugcugaucgaggccgagcugaagugcuucgggaacaccgccgucgccaagugcaacgagaagcacgacgaggaguucugcgacaugcuccgccuguucgacuucugcaagcaggcgaucagccggcugaaguccgaggcccagaugagcauccagcucaucaacaaggccgugaacgcccugaucaacgaccagcugaucaugaagaaccaccuccgcgacaucaugggcauccccuacugcaacuacuccaaguacugcuaccugaaccacacgaucaccgggaagaccagccugcccaagugcugccucguguccaacggcagcuaccugaacgagacccacuucuccgacgacaucgagcagcaggccgacaacaugaucacggagaugcugcagaaggaguacauggagcggcagggcaagaccccgcuggggcucgucgaccuguucguguucagcaccuccuucuaccugaucagcaucuuccuccgccuggugaagaucccgacccaccggcacaucgucggcaagcccugccccaagccccaccgccugaaccacauggggaucugcuccugcggccucuacaagcagccgggggugcccgugcgguggaagcgcugaggacuaguuauaagacugacuagcccgaugggccucccaacgggcccuccuccccuccuugcaccgagauuaauaaaaaaaaaaaaaaaaaaaaaaaaaaaaaaaaaaaaaaaaaaaaaaaaaaaaaaaaaaaaaaaaaaaaaaaaaaaaaaaaaaaaaaaaaaaaaaaaaaaa

SEQ ID NO: 41514 - RNA, 1662 nt, Artificial Sequence
  mRNA product Design i-3 (A100) comprising derived and/or modified sequence from LASV(Togo/2016/7082;Clade VI)__AMR44577__GPCmut12 (opt1)
aggagaaagcuuaccaugggccagaucaucaccuucuuccaggaggugccccacgucaucgaggaggugaugaacaucgugcugaucgcccucagccugcuggccauccucaagggggucuacaacguggcgaccugcggcaucaucgggcuggugacguuccuguuccucugcggccgcuccugcagccugaucuacaagggguccuacgagcugcagacccucgagcugaacauggagacccugaacaugugcaugccgcucagcugcaccaagaacuccagccaccacuacauccgggucggcaacgagacgggccuggagcugacccucaccaacaccuccaucaucaaccacaaguucugcaaccugagcgacgcccacaagcgcaaccuguacgaccacgcccucauguccauccugagcacguuccaccuguccauccccaacuucaaccaguacgaggccaugagcugcgacuucaacgggggcaagaucuccgugcaguacaaccucagccacgccuacgcgguggacgccgccgagcacugcgggaccgucgccaacggcgugcugcagaccuucaugcggauggcguggggcggguccuacaucgcccuggacagcggccgcgggaacugggacugcaucaugaccuccuaccaguaccucaucauccagaacacgaccugggaggaccacugccaguucagccggcccucccccaucggcuaccuggggcugcucagccagcgcacccgggacaucuacaucagccgccggcugcugggcaccuucacguggacccucuccgacagcgagggcaacgagacccccgggggcuacugccugacccgcuggaugcugaucgaggccgagcucaagugcuucgggaacacggccguggccaagugcaacgagaagcacgacgaggaguucugcgacaugcugcggcuguucgacuucugcaagcaggcgauccagcgccucaaguccgaggcccagaugagcauccagcugaucaacaaggccgucaacgcccugaucaacgaccagcucaucaugaagaaccaccuccgggacaugaugggcauccccuacugcaacuacuccaaguacugcuaccugaaccacaccagcuccgggcgcaccagccugcccaagugcugccugguguccaacggcagcuaccugaacgagacccacuucuccgacgacaucgagcagcaggccgacaacaugaucacggagaugcuccagaaggaguacaucgaccggcagggcaagaccccgcuggggcugguggaccuguucgucuucagcaccuccuucuaccucaucagcaucuuccugcaccugaucaagaucccgacccaccgccacaucgugggcaagcccugccccaagccccaccggcucaaccacauggggaucugcuccugcggccuguacaagcagccgggggugcccacgcgcuggaagcggugaggacuaguuauaagacugacuagcccgaugggccucccaacgggcccuccuccccuccuugcaccgagauuaauaaaaaaaaaaaaaaaaaaaaaaaaaaaaaaaaaaaaaaaaaaaaaaaaaaaaaaaaaaaaaaaaaaaaaaaaaaaaaaaaaaaaaaaaaaaaaaaaaaaa

SEQ ID NO: 41515 - RNA, 1662 nt, Artificial Sequence
  mRNA product Design i-3 (A100) comprising derived and/or modified sequence from LASV(KAK-428;Clade n.d. (VII))__ANH09740__GPCmut12 (opt1)
aggagaaagcuuaccaugggccagaucgugaccuucuuccaggaggucccccacgugaucgaggaggugaugaacaucguccugaucgcccucagccugcuggccauccucaaggggcuguacaacuucgcgaccugcggcgugaucgggcugaucacguuccuccugcugugcggccgcuccugcagcgccaccuacaaggggcaguacgagcuccagacccuggagcugaacauggagucccucaacaugugcaugccgcugagcugcaccaagaacaacucccaccacuacauccgggccggcaacaacacgggccuggagcucacccugaccaacaccagcaucaucucccacaaguucugcaaccugagcgacgcccacaagaagaaccucuacgaccacacgcugauguccaucaucaccaccuuccaccugagcauccccaacuucaaccaguacgaggccauguccugcgacuucaacgggggcaagaucagcauccaguacaaccucucccacagcuacgcgggggacgccgcccagcacugcggcaccguggccaacgggguccugcagacguucaugcgcauggcguggggcggcuccuaccuggcccucgacagcgggcggcgcggcugggacugcaucaucuccagcuaccaguaccugaucauccagaacaccaccugggacgaccacugccaguucucccggcccagccccaucggguaccugggcuucgugagccagaagacccgcgacaucuacaucucccggcgccuccugggcacguucaccuggacccugagcgacuccgaggggcacgacaugccgggcggguacugccucacccgguggaugcugaucgaggccgaccugaagugcuucggcaacacggccguggccaagugcaacgagaagcacgacgaggaguucugcgacauguggcgccucuucgacuucugcaagcaggcgauccagcggcugaaggccgaggcccagaugaacauccagcugaucaacaaggccgucaacgcccucaucaacgaccagcugaugaugaagaaccaccuccgcgacaucauggggauccccuacugcaacuacagcaaguucugcuaccugaacaacaccaccaccggccggacgucccugccccgcugcugccugaucagcaacggcuccuaccucaacgagacccacuucagcgacgacaucgagcagcaggcggacaacaugaucaccgagaugcugcagaaggaguacauggaccggcaggggaagacgccccugggccucguggaccuguucguguucuccaccagcuucuaccugaucaccaucuuccugcaccucgucaagaucccgacccaccgccacaucguggggaagcccugccccaagccccaccggcugaaccacaugggcaucugcuccugcgggcuguacaagcagccgggcgugcccguccgcuggaagcggugaggacuaguuauaagacugacuagcccgaugggccucccaacgggcccuccuccccuccuugcaccgagauuaauaaaaaaaaaaaaaaaaaaaaaaaaaaaaaaaaaaaaaaaaaaaaaaaaaaaaaaaaaaaaaaaaaaaaaaaaaaaaaaaaaaaaaaaaaaaaaaaaaaaa

SEQ ID NO: 41516 - RNA, 1662 nt, Artificial Sequence; identical to SEQ ID NO: 41510
  mRNA product Design i-3 (A100) comprising derived and/or modified sequence from LASV(Pinneo-NIG-1969;Clade I)__AIT17836__GPCmut12 (opt1)

SEQ ID NO: 41517 - RNA, 1662 nt, Artificial Sequence
  mRNA product Design i-3 (A100) comprising derived and/or modified sequence from LASV(ISTH0009-NIG-2011;Clade II)__AIT17404__GPCmut12 (opt1)
aggagaaagcuuaccaugggccagaucaucaccuucuuccaggaggugccccacgucaucgaggaggugaugaacaucgugcugaucgcccucagccugcuggccauccucaaggggaucuacaacgucgcgaccugcggccuguucgggcugguguccuuccuccugcugugcggccgcagcugcuccacgaccuacaaggggguguacgagcuccagacccuggagcuggacauggccagccucaacaugugcaugccgcuguccugcaccaagaacaacagccaccacuacaucauggucggcaacgagacgggccuggagcucacccugaccaacaccuccaucaucaaccacaaguucugcaaccugagcgacgcccacaagaagaaccucuacgaccacgcccugauguccaucaucagcacguuccaccuguccauccccaacuucaaccaguacgaggccaugagcugcgacuucaacgggggcaagaucuccgugcaguacaaccucagccacgcguacgccguggacgccgccaaccacugcgggaccaucgcgaacggcguccugcagaccuucaugcggauggccuggggcggguccuacaucgcccuggacagcggcaagggguccugggacugcaucaugaccagcuaccaguaccucaucauccagaacacgaccugggaggaccacugccaguucucccgccccagccccaucggcuaccuggggcugcucagccagcggacccgcgacaucuacaucucccggcgccugcugggcaccuucacguggacccucagcgacuccgagggcaacgagacccccgggggcuacugccugacccgguggaugcugaucgaggccgagcucaagugcuucgggaacacggccguggcgaagugcaacgagaagcacgacgaggaguucugcgacaugcugcgccuguucgacuucugcaagcaggccauccggcgccucaagaccgaggcccagaugagcauccagcugaucaacaaggccgugaacgcccugaucaacgaccagcucaucaugaagaaccaccuccgggacaucaugggcauccccuacugcaacuacuccaaguacugcuaccugaaccacaccgucaccgggaagacgagccugccccgcugcugccugguguccaacggcagcuaccugaacgagacccacuucuccgacgacaucgagcagcaggcggacaacaugaucaccgagcuccugcagaaggaguacauggaccggcagggcaagaccccgcuggggcugguggaccucuucgucuucagcacguccuucuaccugaucagcaucuuccugcaccucaucaagaucccgacccaccgccacaucaccggcaagcccugccccaagccccaccggcugaaccacauggggaucugcuccugcggccuguacaagcacccgggggugcccgugaaguggaagcgcugaggacuaguuauaagacugacuagcccgaugggccucccaacgggcccuccuccccuccuugcaccgagauuaauaaaaaaaaaaaaaaaaaaaaaaaaaaaaaaaaaaaaaaaaaaaaaaaaaaaaaaaaaaaaaaaaaaaaaaaaaaaaaaaaaaaaaaaaaaaaaaaaaaaa

SEQ ID NO: 41518 - RNA, 1662 nt, Artificial Sequence
  mRNA product Design i-3 (A100) comprising derived and/or modified sequence from LASV(ISTH2010-NIG-2012;Clade II)__AIT17482__GPCmut12 (opt1)
aggagaaagcuuaccaugggccagaucaucaccuucuuccaggaggugccccacgucaucgaggaggugaugaacaucgugcugaucgcccucagccugcuggccauccucaaggggaucuacaacgucgcgaccugcggccuguucgggcugguguccuuccuccugcugugcggccgcagcugcuccacgaccuacaaggggguguacgagcuccagacccuggagcuggacauggccagccucaacaugugcaugccgcuguccugcaccaagaacaacagccaccacuacaucauggucggcaacgagacgggccuggagcucacccugaccaacaccuccaucaucaaccacaaguucugcaaccugagcgacgcccacaagaagaaccucuacgaccacgcccugauguccaucaucagcacguuccaccuguccauccccaacuucaaccaguacgaggccaugagcugcgacuucaacgggggcaagaucuccgugcaguacaaccucagccacgcguacgccguggacgccgccaaccacugcgggaccaucgcgaacggcguccugcagaccuucaugcggauggccuggggcggguccuacaucgcccuggacagcggcaagggguccugggacugcaucaugaccagcuaccaguaccucaucauccagaacaucacgugggaggaccacugccaguucucccgccccagccccaucggcuaccuggggcugcucagccagcggacccgcgacaucuacaucucccggcgccugcugggcaccuucaccuggacgcucagcgacuccgagggcaacgagacccccgggggcuacugccugacccgguggaugcugaucgaggccgagcucaagugcuucgggaacaccgccguggcgaagugcaacgagaagcacgacgaggaguucugcgacaugcugcgccuguucgacuucugcaagcaggccauccggcgccucaagacggaggcccagaugagcauccagcugaucaacaaggccgugaacgcccugaucaacgaccagcucaucaugaagaaccaccuccgggacaucaugggcauccccuacugcaacuacuccaaguacugcuaccugaaccacaccgucaccgggaagaccagccugccccgcugcugccugguguccaacggcagcuaccugaacgagacgcacuucuccgacgacaucgagcagcaggcggacaacaugaucaccgagcuccugcagaaggaguacaucgaccggcagggcaagaccccgcuggggcugguggaccucuucgucuucagcaccuccuucuaccugaucagcaucuuccugcaccucgugaagaucccgacgcaccgccacguggucggcaagcccugccccaagccccaccggcugaaccacauggggaucugcuccugcggccuguacaagcacccgggggugcccgugaaguggaagcgcugaggacuaguuauaagacugacuagcccgaugggccucccaacgggcccuccuccccuccuugcaccgagauuaauaaaaaaaaaaaaaaaaaaaaaaaaaaaaaaaaaaaaaaaaaaaaaaaaaaaaaaaaaaaaaaaaaaaaaaaaaaaaaaaaaaaaaaaaaaaaaaaaaaaa

SEQ ID NO: 41519 - RNA, 1662 nt, Artificial Sequence
  mRNA product Design i-3 (A100) comprising derived and/or modified sequence from LASV(Lassa virus/H.sapiens-wt/NGA/2015/ISTH_0543;Clade II)__AVO03639__GPCmut12 (opt1)
aggagaaagcuuaccaugggccagaucaucaccuucuuccaggaggugccccacgucaucgaggaggugaugaacaucgugcugaucgcccucagccugcuggccauccucaaggggaucuacaacgucgcgaccugcggccuguucgggcugguguccuuccuccugcugugcggccgcagcugcuccacgaccuacaaggggguguacgagcuccagacccuggagcuggacauggccaaccucaacaugugcaugccgcugagcugcaccaagaacaacucccaccacuacaucauggucggcaacgagacgggccuggagcucacccugaccaacaccagcaucaucaaccacaaguucugcaaccuguccgacgcccacaagaagaaccucuacgaccacgcccugaugagcaucaucuccacguuccaccugagcauccccaacuucaaccaguacgaggccauguccugcgacuucaacgggggcaagaucagcgugcaguacaaccucucccacaccuacgcgguggacgccgccaaccacugcgggaccaucgccaacggcguccugcagaccuucaugcggauggcguggggcgggagcuacaucgcccuggacuccggcaaggggagcugggacugcaucaugacguccuaccaguaccucgugauccagaacaccaccugggaggaccacugccaguucagccgccccucccccaucggcuaccuggggcugcucagccagcggacccgcgacaucuacaucagccggcgccugcugggcacguucaccuggacccucuccgacagcgagggcaacgagacccccgggggcuacugccugacgcgguggaugcugaucgaggccgagcucaagugcuucgggaacaccgccguggccaagugcaacgagaagcacgacgaggaguucugcgacaugcugcgccuguucgacuucugcaagcaggcgauccggcgccucaagaccgaggcccagauguccauccagcugaucaacaaggccgucaacgcccugaucaacgaccagcucaucaugaagaaccaccuccgggacaucaugggcaucccguacugcaacuacagcaaguacugcuaccugaaccacaccgugacggggaagaccucccugccccgcugcugccuggugagcaacggcuccuaccugaacgagacccacuucagcgacgacaucgagcagcaggccgacaacaugaucaccgagcuccugcagaaggaguacaucgaccggcagggcaagacgccccuggggcuggucgaccucuucguguucuccaccagcuucuaccugaucuccaucuuccugcaccucgugaagaucccgacccaccgccacaucaccggcaagcccugccccaagccccaccggcugaaccacauggggaucugcagcugcggccuguacaagcacccggggguccccgugaaguggaagcgcugaggacuaguuauaagacugacuagcccgaugggccucccaacgggcccuccuccccuccuugcaccgagauuaauaaaaaaaaaaaaaaaaaaaaaaaaaaaaaaaaaaaaaaaaaaaaaaaaaaaaaaaaaaaaaaaaaaaaaaaaaaaaaaaaaaaaaaaaaaaaaaaaaaaa

SEQ ID NO: 41520 - RNA, 1662 nt, Artificial Sequence
  mRNA product Design i-3 (A100) comprising derived and/or modified sequence from LASV(Lassa virus/H.sapiens-wt/NGA/2016/ISTH_0009;Clade II)__AVO03571__GPCmut12 (opt1)
aggagaaagcuuaccaugggccagaucaucaccuucuuccaggaggugccccacgucaucgaggaggugaugaacaucgugcugaucgcccucagccugcuggccauccucaaggggaucuacaacgucgcgaccugcggccugcuggggcucguguccuuccugcugcucugcggccgcagcugcuccacgaccuacaaggggguguacgagcugcagacccuggagcucgacauggccagccugaacaugugcaugccgcuguccugcaccaagaacaacagccaccacuacaucauggucggcaacgagacgggccucgagcugacccugaccaacaccuccaucaucaaccacaaguucugcaaccucagcgacgcccacaagaagaaccuguacgaccacgcccugauguccaucaucagcacguuccaccucuccauccccaacuucaaccaguacgaggccaugagcugcgacuucaacgggggccggaucuccgugcaguacaaccugagccacuccuacgcgguggacgccgccaaccacugcgggaccaucgccaacggcguccugcagaccuucaugcgcauggcguggggcgggagcuacaucgcccucgacuccggcaaggggagcugggacugcaucaugaccuccuaccaguaccugaucauccagaacacgaccugggaggaccacugccaguucagccggcccagccccaucggcuaccuggggcuccugucccagcgcacccgggacaucuacaucagccgccggcugcucggcaccuucacguggacccuguccgacagcgagggcaacgagacccccgggggcuacugccugacccgcuggaugcucaucgaggccgagcugaagugcuucgggaacacggccguggccaagugcaacgagaagcacgacgaggaguucugcgacaugcugcggcuguucgacuucugcaagcaggcgauccgccggcugaagaccgaggcccagauguccauccagcugaucaacaaggccgugaacgcccucaucaacgaccagcugaucaugaagaaccaccuccgcgacaucaugggcauccccuacugcaacuacagcaaguacugcuaccucaaccacaccgucaccgggaagacgucccugccccggugcugccuggugagcaacggcuccuaccucaacgagacccacuucagcgacgacaucgagcagcaggccgacaacaugaucaccgagcugcugcagaaggaguacaucgaccgccagggcaagaccccgcuggggcucguggaccuguucgucuucuccacgagcuucuaccugaucuccaucuuccuccaccuggugaagaucccgacccaccggcacaucaccggcaagcccugccccaagccccaccgccugaaccacauggggaucugcagcugcggccucuacaaccacccgggggugcccgucaaguggaagcggugaggacuaguuauaagacugacuagcccgaugggccucccaacgggcccuccuccccuccuugcaccgagauuaauaaaaaaaaaaaaaaaaaaaaaaaaaaaaaaaaaaaaaaaaaaaaaaaaaaaaaaaaaaaaaaaaaaaaaaaaaaaaaaaaaaaaaaaaaaaaaaaaaaaa

SEQ ID NO: 41521 - RNA, 1662 nt, Artificial Sequence
  mRNA product Design i-3 (A100) comprising derived and/or modified sequence from LASV(Lassa virus/H.sapiens-wt/NGA/2016/ISTH_0017;Clade II)__AVO03567__GPCmut12 (opt1)
aggagaaagcuuaccaugggccagaucaucaccuucuuccaggaggugccccacgucaucgaggaggugaugaacaucgugcugaucgcccucagccugcuggccauccucaaggggaucuacaacgucgcgaccugcggccuguucgggcugguguccuuccuccugcugugcggccgcagcugcuccacgaccuacaaggggguguacgagcuccagacccuggagcuggacauggccagccucaacaugugcaugccgcuguccugcaccaagaacaacagccaccacuacaucauggucggcaacgagacgggccuggagcucacccugaccaacaccuccaucaucaaccacaaguucugcaaccugagcgacgcccacaagaagaaccucuacgaccacgcccugauguccaucaucagcacguuccaccuguccauccccaacuucaaccaguacgaggccaugagcugcgacuucaacgggggcaagaucuccgugcaguacaaccucagccacaccuacgcgaucgacgccgccaaccacugcgggaccaucgccaacggcgugcugcagaccuucaugcggauggcguggggcggguccuacaucgcccuggacagcggcaagggguccugggacugcaucaugacgagcuaccaguaccucaucauccagaacaccaccugggaggaccacugccaguucucccgccccagccccaucggcuaccuggggcugcucagccagcggacccgcgacaucuacaucucccggcgccugcugggcacguucaccuggacccucagcgacuccgagggcaacgagacccccgggggcuacugccugacgcgguggaugcugaucgaggccgagcucaagugcuucgggaacaccgccgucgccaagugcaacgagaagcacgacgaggaguucugcgacaugcugcgccuguucgacuucugcaagcaggcgauccggcgccucaagaccgaggcccagaugagcauccagcugaucaacaaggccgugaacgcccugaucaacgaccagcucaucaugaagaaccaccuccgggacaucaugggcaucccguacugcaacuacuccaaguacugcuaccugaaccacaccgugacggggaagaccagccugccccgcugcugccuggucuccaacggcagcuaccugaacgagacccacuucuccgacgacaucgagcagcaggccgacaacaugaucaccgagcuccugcagaaggaguacauggaccggcagggcaagacgccccuggggcugguggaccucuucguguucagcaccuccuucuaccugaucagcaucuuccugcaccucguccgcaucccgacccaccggcacgugaucggcaagcccugccccaagccccaccgccugaaccacauggggaucugcuccugcggccuguacaagcacccgggggugcccgucaaguggaagcggugaggacuaguuauaagacugacuagcccgaugggccucccaacgggcccuccuccccuccuugcaccgagauuaauaaaaaaaaaaaaaaaaaaaaaaaaaaaaaaaaaaaaaaaaaaaaaaaaaaaaaaaaaaaaaaaaaaaaaaaaaaaaaaaaaaaaaaaaaaaaaaaaaaaa

SEQ ID NO: 41522 - RNA, 1662 nt, Artificial Sequence
  mRNA product Design i-3 (A100) comprising derived and/or modified sequence from LASV(Lassa virus/H.sapiens-wt/NGA/2018/ISTH_0959;Clade II)__AVV65099__GPCmut12 (opt1)
aggagaaagcuuaccaugggccagaucaucaccuucuuccaggaggugccccacgucaucgaggaggugaugaacaucgugcugaucgcccucagccugcuggccauccucaaggggaucuacaacgucgugaccugcggccuguucgggcugguguccuuccuccugcugugcggccgcagcugcuccacgaccuacaagggggucuacgagcuccagacccuggagcuggacauggcgagccucaacaugugcaugccgcuguccugcaccaagaacaacagccaccacuacaucauggugggcaacgagacgggccuggagcucacccugaccaacaccuccaucaucaaccacaaguucugcaaccugagcgacgcccacaagaagaaccucuacgaccacgcccugauguccaucaucagcacguuccaccuguccauccccaacuucaaccaguacgaggccaugagcugcgacuucaacgggggcaagaucuccgugcaguacaaccucagccacgccuacgcgaucgacgccgccaaccacugcgggaccaucgccaacggcguccugcagaccuucaugcggauggcguggggcggguccuacaucgcccuggacagcggcaagggguccugggacugcaucaugaccagcuaccaguaccucaucauccagaacacgaccugggaggaccacugccaguucucccgccccagccccaucggcuaccuggggcugcucagccagcggacccgcgacaucuacaucucccggcgccugcugggcaccuucacguggacccucagcgacuccgagggcaacgagacccccgggggcuacugccugacccgguggaugcugaucgaggccgagcucaagugcuucgggaacacggccguggccaagugcaacgagaagcacgacgaggaguucugcgacaugcugcgccuguucgacuucugcaagcaggcgauccggcgccucaagaccgaggcccagaugagcauccagcugaucaacaaggccgugaacgcccugaucaacgaccagcucaucaugaagaaccaccuccgggacaucaugggcauccccuacugcaacuacuccaaguacugcuaccugaaccacaccgucaccgggaagacgagccugccccgcugcugccugguguccaacggcagcuaccugaacgagacccacuucuccgacgacaucgagcagcaggccgacaacaugaucaccgagcuccugcagaaggaguacaucgaccggcagggcaagaccccgcuggggcugguggaccucuucgucuucagcacguccuucuaccugaucagcaucuuccugcaccucgugaagaucccgacccaccgccacgugaucggcaagcccugccccaagccccaccggcugaaccacauggggaucugcuccugcggccuguacaagcacccggggguccccgugaaguggaagcgcugaggacuaguuauaagacugacuagcccgaugggccucccaacgggcccuccuccccuccuugcaccgagauuaauaaaaaaaaaaaaaaaaaaaaaaaaaaaaaaaaaaaaaaaaaaaaaaaaaaaaaaaaaaaaaaaaaaaaaaaaaaaaaaaaaaaaaaaaaaaaaaaaaaaa

SEQ ID NO: 41523 - RNA, 1662 nt, Artificial Sequence
  mRNA product Design i-3 (A100) comprising derived and/or modified sequence from LASV(LASV003-NIG-2008;Clade II)__AIT17580__GPCmut12 (opt1)
aggagaaagcuuaccaugggccagaucaucaccuucuuccaggaggugccccacgucaucgaggaggugaugaacaucgugcugaucgcccucagccugcuggccauccucaaggggaucuacaacgucgcgaccugcggccuguucgggcugguguccuuccuccugcugugcggccgcagcugcuccacgaccuacaaggggguguacgagcuccagacccuggagcuggacauggccagccucaacaugugcaugccgcuguccugcaccaagaacaacagccaccacuacaucauggucggcaacgagacgggccuggagcucacccugaccaacaccuccaucaucaaccacaaguucugcaaccugagcgacgcccacaagaagaaccucuacgaccacgcccugauguccaucaucagcacguuccaccuguccauccccaacuucaaccaguacgaggccaugagcugcgacuucaacgggggcaagaucuccgugcaguacaaccucagccacaccuacgcgguggacgccgccaaccacugcgggaccaucgccaacggcguccugcagaccuucaugcggauggcguggggcggguccuacaucgcccuggacagcggcaagggguccugggacugcaucaugacgagcuaccaguaccucaucauccagaacaccaccugggaggaccacugccaguucucccgccccagccccaucggcuaccuggggcugcucagccagcggacccgcgacaucuacaucucccggcgccugcugggcacguucaccuggacccucagcgacuccgagagcaacgagaccccgggcggguacugccugacgcgguggaugcugaucgaggccgagcucaagugcuucggcaacaccgccguggccaagugcaacgagaagcacgacgaggaguucugcgacaugcugcgccuguucgacuucugcaagcaggcgauccggcgccucaaggccgaggcccagauguccauccagcugaucaacaaggccgugaacgcccugaucaacgaccagcucaucaugaagaaccaccuccgggacaucauggggauccccuacugcaacuacagcaaguacugcuaccugaaccacaccgucaccggccgcacgucccugccccggugcugccuggugagcaacggguccuaccugaacgagacccacuucagcgacgacaucgagcagcaggcggacaacaugaucaccgagcuccugcagaaggaguacauggaccgccagggcaagacgccccugggccugguggaccucuucgucuucuccaccagcuucuaccugaucuccaucuuccugcaccucgugaagaucccgacccaccggcacgugaucgggaagcccugccccaagccccaccgccugaaccacaugggcaucugcagcugcgggcuguacaagcacccgggcguccccgugaaguggaagcggugaggacuaguuauaagacugacuagcccgaugggccucccaacgggcccuccuccccuccuugcaccgagauuaauaaaaaaaaaaaaaaaaaaaaaaaaaaaaaaaaaaaaaaaaaaaaaaaaaaaaaaaaaaaaaaaaaaaaaaaaaaaaaaaaaaaaaaaaaaaaaaaaaaaa

SEQ ID NO: 41524 - RNA, 1662 nt, Artificial Sequence
  mRNA product Design i-3 (A100) comprising derived and/or modified sequence from LASV(LASV035-NIG-2009;Clade II)__AIT17588__GPCmut12 (opt1)
aggagaaagcuuaccaugggccagaucaucaccuucuuccaggaggugccccacgucaucgaggaggugaugaacaucgugcugaucgcccucagccugcuggccauccucaaggggaucuacaacgucgcgaccugcggccuguucgggcugguguccuuccuccugcugugcggccgcagcugcuccacgaccuacaaggggguguacgagcuccagacccuggagcuggacauggccagccucaacaugugcaugccgcuguccugcaccaagaacaacagccaccacuacaucauggucggcaacgagacgggccuggagcucacccugaccaacaccuccaucaucaaccacaaguucugcaaccugagcgacgcccacaagaagaaccucuacgaccacgcccugauguccaucaucagcacguuccaccuguccauccccaacuucaaccaguacgaggccaugagcugcgacuucaacgggggcaagaucuccgugcaguacaaccucagccacgcguacgccguggacgccgccaaccacugcgggaccaucgcgaacggcguccugcagaccuucaugcggauggccuggggcggguccuacaucgcccuggacagcggcaagggguccugggacugcaucaugaccagcuaccaguaccucaucauccagaacacgaccugggaggaccacugccaguucucccgccccagccccaucggcuaccuggggcugcucagccagcggacccgcgacaucuacaucucccggcgccugcugggcaccuucacguggacccucagcgacuccgagggcaacgagacccccgggggcuacugccugacccgguggaugcugaucgaggccgagcucaagugcuucgggaacacggccguggcgaagugcaacgagaagcacgacgaggaguucugcgacaugcugcgccuguucgacuucugcaagcaggccauccggcgccucaaggccgaggcccagaugagcauccagcugaucaacaaggccgugaacgcgcugaucaacgaccagcucaucaugaagaaccaccuccgggacaucaugggcauccccuacugcaacuacuccaaguacugcuaccugaaccacaccgucaccgggaagaccagccugccccgcugcugccugguguccaacggcagcuaccugaacgagacgcacuucuccgacgacaucgagcagcaggccgacaacaugaucaccgagcuccugcagaaggaguacaucgaccggcagggcaagaccccgcuggggcugguggaccucuucgucuucagcaccuccuucuaccugaucagcaucuuccugcaccucgugaagaucccgacgcaccgccacgugaucggcaagcccugccccaagccccaccggcugaaccacauggggaucugcuccugcggccuguacaagcacccggggguccccgugaaguggaagcgcugaggacuaguuauaagacugacuagcccgaugggccucccaacgggcccuccuccccuccuugcaccgagauuaauaaaaaaaaaaaaaaaaaaaaaaaaaaaaaaaaaaaaaaaaaaaaaaaaaaaaaaaaaaaaaaaaaaaaaaaaaaaaaaaaaaaaaaaaaaaaaaaaaaaa

SEQ ID NO: 41525 - RNA, 1662 nt, Artificial Sequence
  mRNA product Design i-3 (A100) comprising derived and/or modified sequence from LASV(LASV1000-NIG-2009;Clade II)__AIT17782__GPCmut12 (opt1)
aggagaaagcuuaccaugggccagaucaucaccuucuuccaggaggugccccacgucaucgaggaggugaugaacaucgugcugaucgcccucagccugcuggccauccucaaggggaucuacaacgucgcgaccugcggccuguucgggcugguguccuuccuccugcugugcggccgcagcugcuccacgaccuacaaggggguguacgagcuccagacccuggagcuggacauggccagccucaacaugugcaugccgcuguccugcaccaagaacaacagccaccacuacaucauggucggcaacgagacgggccuggagcucacccugaccaacaccuccaucaucaaccacaaguucugcaaccugagcgacgcccacaagaagaaccucuacgaccacgcccugauguccaucaucagcacguuccaccuguccauccccaacuucaaccaguacgaggccaugagcugcgacuucaacgggggcaagaucuccgugcaguacaaccucagccacaccuacgcgguggacgccgccaaccacugcgggaccaucgccaacggcguccugcagaccuucaugcggauggcguggggcggguccuacaucgcccuggacagcggcaagggguccugggacugcaucaugacgagcuaccaguaccucaucauccagaacaccaccugggaggaccacugccaguucucccgccccagccccaucggcuaccuggggcugcucagccagcggacccgcgacaucuacaucucccggcgccugcugggcacguucaccuggacccucagcgacuccgagggcaacgagacccccgggggcuacugccugacgcgguggaugcugaucgaggccgagcucaagugcuucgggaacaccgccguggccaagugcaacgagaagcacgacgaggaguucugcgacaugcugcgccuguucgacuucugcaagcaggcgaucaagcggcucaagaccgaggcccagaugagcauccagcugaucaacaaggccgugaacgcccugaucaacgaccagcucaucaugaagaaccaccuccgcgacaucaugggcaucccguacugcaacuacuccaaguacugcuaccugaaccacaccgucacggggaagaccagccugccccggugcugccugguguccaacggcagcuaccugaacgagacccacuucuccgacgacaucgagcagcaggccgacaacaugaucaccgagcuccugcagaaggaguacaucgaccgccagggcaagacgccccuggggcugguggaccucuucgucuucagcaccuccuucuaccugaucagcaucuuccugcaccucgugaagaucccgacccaccggcacguggucggcaagcccugccccaagccccaccgccugaaccacauggggaucugcuccugcggccuguacaagcacccgggggugcccgugaaguggaagcggugaggacuaguuauaagacugacuagcccgaugggccucccaacgggcccuccuccccuccuugcaccgagauuaauaaaaaaaaaaaaaaaaaaaaaaaaaaaaaaaaaaaaaaaaaaaaaaaaaaaaaaaaaaaaaaaaaaaaaaaaaaaaaaaaaaaaaaaaaaaaaaaaaaaa

SEQ ID NO: 41526 - RNA, 1662 nt, Artificial Sequence
  mRNA product Design i-3 (A100) comprising derived and/or modified sequence from LASV(LASV221-NIG-2010;Clade II)__AIT17624__GPCmut12 (opt1)
aggagaaagcuuaccaugggccagaucaucaccuucuuccaggaggugccccacgucaucgaggaggugaugaacaucgugcugaucgcccucagccugcuggccauccucaaggggaucuacaacgucgcgaccugcggccuguucgggcugguguccuuccuccugcugugcggccgcagcugcuccacgaccuacaaggggguguacgagcuccagacccuggagcuggacauggccagccucaacaugugcaugccgcuguccugcaccaagaacaacagccaccacuacaucauggucggcaacgagacgggccuggagcucacccugaccaacaccuccaucaucaaccacaaguucugcaaccugagcgacgcccacaagaagaaccucuacgaccacgcccugauguccaucaucagcacguuccaccuguccauccccaacuucaaccaguacgaggccaugagcugcgacuucaacgggggcaagaucuccgugcaguacaaccucagccacaccuacgcgaucgacgccgccaaccacugcgggaccaucgccaacggcgugcugcagaccuucaugcggauggcguggggcggguccuacaucgcccuggacagcggcaagggguccugggacugcaucaugacgagcuaccaguaccucaucauccagaacaccaccugggaggaccacugccaguucucccgccccagccccaucggcuaccuggggcugcucagccagcggacccgcgacaucuacaucucccggcgccugcugggcacguucaccuggacccucagcgacuccgagggcaacgagacccccgggggcuacugccugacgcgguggaugcugaucgaggccgagcucaagugcuucgggaacaccgccgucgccaagugcaacgagaagcacgacgaggaguucugcgacaugcugcgccuguucgacuucugcaagcaggcgauccggcgccucaagaccgaggcccagaugagcauccagcugaucaacaaggccgugaacgcccugaucaacgaccagcucaucaugaagaaccaccuccgggacaucaugggcaucccguacugcaacuacuccaaguacugcuaccugaaccacaccgugacggggaagaccagccugccccgcugcugccuggucuccaacggcagcuaccugaacgagacccacuucuccgacgacaucgagcagcaggccgacaacaugaucaccgagaugcuccagaaggaguacauggaccggcagggcaagacgccccuggggcugguggaccuguucguguucagcaccuccuucuaccucaucagcaucuuccugcaccuggucaagaucccgacccaccgccacgugaucggcaagcccugccccaagccccaccggcucaaccacauggggaucugcuccugcggccuguacaagcacccgggggugcccgucaaguggaagcgcugaggacuaguuauaagacugacuagcccgaugggccucccaacgggcccuccuccccuccuugcaccgagauuaauaaaaaaaaaaaaaaaaaaaaaaaaaaaaaaaaaaaaaaaaaaaaaaaaaaaaaaaaaaaaaaaaaaaaaaaaaaaaaaaaaaaaaaaaaaaaaaaaaaaa

SEQ ID NO: 41527 - RNA, 1662 nt, Artificial Sequence
  mRNA product Design i-3 (A100) comprising derived and/or modified sequence from LASV(LASV237-NIG-2010;Clade II)__AIT17638__GPCmut12 (opt1)
aggagaaagcuuaccaugggccagaucaucaccuucuuccaggaggugccccacgucaucgaggaggugaugaacaucgugcugaucgcccucagccugcuggccauccucaaggggaucuacaacgucgcgaccugcggccuguucgggcugguguccuuccuccugcugugcggccgcagcugcuccacgaccuacaaggggguguacgagcuccagacccuggagcuggacauggccagccucaacaugugcaugccgcuguccugcaccaagaacaacagccaccacuacaucauggucggcaacgagacgggccuggagcucacccugaccaacaccuccaucaucaaccacaaguucugcaaccugagcgacgcccacaagaaggaccucuacgaccacgcccugauguccaucaucagcacguuccaccuguccauccccaacuucaaccaguacgaggccaugagcugcgacuucaacgggggcaagaucuccgugcaguacaaccucagccacaccuacgcgguggacgccgccaaccacugcgggaccaucgccaacggcguccugcagaccuucaugcggauggcguggggcggguccuacaucgcccuggacagcggcaagggguccugggacugcaucaugacgagcuaccaguaccucaucauccagaacaccaccugggaggaccacugccaguucucccgccccagccccaucggcuaccuggggcugcucagccagcggacccgcgacaucuacaucucccggcgccugcugggcacguucaccuggacccucagcgacuccgagggcaacgagacccccgggggcuacugccugacgcgguggaugcugaucgaggccgagcucaagugcuucgggaacaccgccguggccaagugcaacgagaagcacgacgaggaguucugcgacaugcugcgccuguucgacuucugcaagcaggcgauccggcgccucaagaccgaggcccagaugagcauccagcugaucaacaaggccgugaacgcccugaucaacgaccagcucaucaugaagaaccaccuccgggacaucaugggcaucccguacugcaacuacuccaaguacugcuaccugaaccacaccgucacggggaagaccagccugccccgcugcugccugguguccaacggcagcuaccugaacgagacccacuucuccgacgacaucgagcagcaggccgacaacaugaucaccgagcuccugcagaaggaguacauggaccggcagggcaagacgccccuggggcugguggaccucuucgucuucagcaccuccuucuaccugaucagcaucuuccugcaccucaucaagaucccgacccaccgccacaucaccggcaagcccugccccaagccccaccggcugaaccacauggggaucugcuccugcggccuguacaagcacccgggggugcccgugaaguggaagcgcugaggacuaguuauaagacugacuagcccgaugggccucccaacgggcccuccuccccuccuugcaccgagauuaauaaaaaaaaaaaaaaaaaaaaaaaaaaaaaaaaaaaaaaaaaaaaaaaaaaaaaaaaaaaaaaaaaaaaaaaaaaaaaaaaaaaaaaaaaaaaaaaaaaaa

SEQ ID NO: 41528 - RNA, 1662 nt, Artificial Sequence
  mRNA product Design i-3 (A100) comprising derived and/or modified sequence from LASV(LASV253-NIG-2011;Clade II)__AIT17670__GPCmut12 (opt1)
aggagaaagcuuaccaugggccagaucaucaccuucuuccaggaggugccccacgucaucgaggaggugaugaacaucgugcugaucgcccucagccugcuggccauccucaaggggaucuacaacgucgcgaccugcggccuguucgggcugguguccuuccuccugcugugcggccgcagcugcuccacgaccuacaaggggguguacgagcuccagacccuggagcuggacauggccagccucaacaugugcaugccgcuguccugcaccaagaacaacagccaccacuacaucauggucggcaacgagacgggccuggagcucacccugaccaacaccuccaucaucaaccacaaguucugcaaccugagcgacgcccacaagaagaaccucuacgaccacgcccugauguccaucaucagcacguuccaccuguccauccccaacuucaaccaguacgaggccaugagcugcgacuucaacgggggcaagaucuccgugcaguacaaccucagccacaccuacgcgguggacgccgccaaccacugcgggaccaucgccaacggcguccugcagaccuucaugcggauggcguggggcggguccuacaucgcccuggacagcggcaagggguccugggacugcaucaugacgagcuaccaguaccucaucauccagaacaccaccugggaggaccacugccaguucucccgccccagccccaucggcuaccuggggcugcucagccagcggacccgcgacaucuacaucucccggcgccugcugggcacguucaccuggacccucagcgacuccgagggcaacgagacccccgggggcuacugccugacgcgguggaugcugaucgaggccgagcucaagugcuucgggaacaccgccguggccaagugcaacgagaagcacgacgaggaguucugcgacaugcugcgccuguucgacuucugcaagcaggcgauccggcgccucaaggccgaggcccagaugagcauccagcugaucaacaaggccgugaacgcccugaucaacgaccagcucaucaugaagaaccaccuccgggacaucaugggcauccccuacugcaacuacuccaaguacugcuaccugaaccacaccgucaccgggcgcacgagccugccccggugcugccugguguccaacggcagcuaccugaacgagacccacuucuccgacgacaucgagcagcaggcggacaacaugaucaccgagcuccugcagaaggaguacaucgaccgccagggcaagaccccgcuggggcugguggaccucuucgucuucagcacguccuucuaccugaucagcaucuuccugcaccucgugaagaucccgacccaccggcacaucaucggcaagcccugccccaagccccaccgccugaaccacauggggaucugcuccugcggccuguacaagcacccgggggugcccgucaaguggaagcggugaggacuaguuauaagacugacuagcccgaugggccucccaacgggcccuccuccccuccuugcaccgagauuaauaaaaaaaaaaaaaaaaaaaaaaaaaaaaaaaaaaaaaaaaaaaaaaaaaaaaaaaaaaaaaaaaaaaaaaaaaaaaaaaaaaaaaaaaaaaaaaaaaaaa

SEQ ID NO: 41529 - RNA, 1662 nt, Artificial Sequence
  mRNA product Design i-3 (A100) comprising derived and/or modified sequence from LASV(LASV254-NIG-2011;Clade II)__AIT17674__GPCmut12 (opt1)
aggagaaagcuuaccaugggccagaucaucaccuucuuccaggaggugccccacgucaucgaggaggugaugaacaucgugcugaucgcccucagccugcuggccauccucaaggggaucuacaacgucgcgaccugcggccuguucgggcugguguccuuccuccugcugugcggccgcagcugcuccacgaccuacaaggggguguacgagcuccagacccuggagcuggacaugaccaaccucaacaugugcaugccgcugagcugcacgaagaacaacucccaccacuacaucauggucggcaacgagaccggccuggagcucacccugaccaacacgagcaucaucaaccacaaguucugcaaccuguccgacgcccacaagaagaaccucuacaaccacgcccugaugagcaucaucuccaccuuccaccugagcauccccaacuucaaccaguacgaggccauguccugcgacuucaacgggggcaagaucagcgugcaguacaaccucucccacagcuacgccguggacgcggccaaccacugcgggaccaucgccaacggcguccugcagaccuucaugcggauggccuggggcggguccuacaucgcgcuggacagcggcaaggggaacugggacugcaucaugacguccuaccaguaccucaucauccagaacaccaccugggaggaccacugccaguucagccgccccucccccaucggcuaccuggggcugcucagccagcggacccgcgacaucuacaucagccggcgccugcugggcacguucaccuggacccucuccgacagcgagggcaacgagacccccgggggcuacugccugacgcgguggaugcugaucgaggccgagcucaagugcuucgggaacaccgccguggccaagugcaacgagaagcacgacgaggaguucugcgacaugcugcgccuguucgacuucugcaagcaggccauccggcgccucaagaccgaggcgcaggccaacauccagcugaucaacaaggccgugaacgcccugaucaacgaccagcucaucaugaagaaccaccuccgggacaucaugggcaucccguacugcaacuacuccaaguacugcuaccugaaccacaccgucacggggaagaccagccugccccgcugcugccugguguccaacggcagcuaccugaacgagacccacuucuccgacgacaucgagcagcaggccgacaacaugaucaccgagcuccugcagaaggaguacauggaccggcagggcaagacgccccuggggcugguggaccucuucgucuucagcaccuccuucuaccugaucagcaucuuccugcaccucgugaagaucccgacccaccgccacgugaucggcaagcccugccccaagccccaccggcugaaccacauggggaucugcuccugcggccuguacaagcacccggggguccccgugaaguggaagcgcugaggacuaguuauaagacugacuagcccgaugggccucccaacgggcccuccuccccuccuugcaccgagauuaauaaaaaaaaaaaaaaaaaaaaaaaaaaaaaaaaaaaaaaaaaaaaaaaaaaaaaaaaaaaaaaaaaaaaaaaaaaaaaaaaaaaaaaaaaaaaaaaaaaaa

SEQ ID NO: 41530 - RNA, 1662 nt, Artificial Sequence
  mRNA product Design i-3 (A100) comprising derived and/or modified sequence from LASV(Nig08-A19;Clade III)__ADU56618__GPCmut12 (opt1)
aggagaaagcuuaccaugggccagaucgugaccuucuuccaggaggucccccacgugaucgaggaggugaugaacaucguccugaucgcccucagcauccuggccauccugaaggggcucuacaacaucgcgaccugcggccugaucgggcuggugacguuccuccugcuguccggccgcagcugcuccaugaccuacaaggggguguacgagcuccagacccuggagcugaacaugaacacccucaacaugugcaugccgcugagcugcacgaagaacaacucccaccacuacaucauggucggcaacgagaccggccuggagcucacccugaccaacacgagccugcuccaccacaaguucugcaaccuguccgacgcccacaagaagaaccuguacgaccacacccucaugagcaucaucuccaccuuccaccugagcauccccaacuucaaccaguacgaggccauguccugcgacuucaacgggggcaagaucaccgugcaguacaaccugagccacuccuacgccaucgacgccgcgaaccacugcgggacgguggccaacggcguccuccagaccuucaugcggauggccuggggcgggagcuacaucgcccuggacuccggccgcgggaagugggacugcaucaugaccagcuaccaguaccugaucauccagaacaccacgugggaggaccacugccaguucucccggcccagccccaucggcuaccucgggcugcugucccagcgcacccgggacaucuacaucagccgccggcuccugggcaccuucaccuggacgcugagcgacuccgagggcaacgagacccccgggggcuacugccucacccgcuggaugcugaucgaggcggagcugaagugcuucgggaacaccgccguggccaagugcaacgagaagcacgacgaggaguucugcgacaugcuccggcuguucgacuucugcaagcaggccauccgccggcugaaggccgaggcgcagaugagcauccagcucaucaacaaggccgugaacgcccugaucaacgaccagcugaucaugaagaaccaccuccgcgacaucaugggcauccccuacugcaacuacuccaaguacugcuaccugaaccacacgagcaccgggcggaccucccugccccgcugcugccucgucagcaacggcuccuaccugaacgagacccacuucagcgacgacaucgagcagcaggccgacaacaugaucacggagaugcugcagaaggaguaccuggaccggcagggcaagaccccgcucgggcugguggaccuguucguguucuccaccagcuucuaccucaucuccaucuuccugcaccuggucaagaucccgacccaccgccacaucgugggcaagcccugccccaagccccaccggcucaaccacauggggaucugcagcugcggccuguacaagcagccgggggugcccguccgcuggaagcggugaggacuaguuauaagacugacuagcccgaugggccucccaacgggcccuccuccccuccuugcaccgagauuaauaaaaaaaaaaaaaaaaaaaaaaaaaaaaaaaaaaaaaaaaaaaaaaaaaaaaaaaaaaaaaaaaaaaaaaaaaaaaaaaaaaaaaaaaaaaaaaaaaaaa

SEQ ID NO: 41531 - RNA, 1665 nt, Artificial Sequence
  mRNA product Design i-3 (A100) comprising derived and/or modified sequence from LASV(G1180-SLE-2010;Clade IV)__AIT17168__GPCmut12 (opt1)
aggagaaagcuuaccaugggccagaucgugaccuucuuccaggaggucccccacgugaucgaggaggugaugaacaucguccugaucgcccucagcauccuggccgugcugaaggggcucuacaacuucgcgaccugcggccugguggggcugcucacguuccugcugcucugcggccgcuccugcaccgccagccgguacaagggggucuacgagcugcagacccuggagcucaacauggagacccugaacaugugcaugccgcuguccugcacgaagaacaacagccaccacuacaucauggugggcaacgagaccggccucgagcugacccugaccaacacguccaucaucaaccacaaguucugcaaccucagcgacgcccacaagaagaaccuguacgaccacgcccugauguccaucaucagcaccuuccaccucuccauccccaacuucaaccaguacgaggccaugagcugcgacuucaacgggggcaagaucuccgugcaguacaaccugagccacuccuacgcgggggacgccgccaaccacugcggcaccgucgccaacggggugcugcagaccuucaugcgcauggcguggggcggcagcuacaucgcccucgacuccgggcacggcagcugggacugcaucaugacguccuaccaguaccugaucauccagaacaccaccugggaggaccacugccaguucagccggcccucccccaucggguaccugggccuccugagccagcgcacccgggacaucuacaucagccgccggcugcucggcacguucaccuggacccuguccgacagcgaggggaaggacaccccgggcggguacugccugacgcgcuggaugcucaucgaggccgagcugaagugcuucggcaacaccgccguggccaagugcaacgagaagcacgacgaggaguucugcgacaugcugcggcuguucgacuucugcaagcaggcgauccagcgccugaaggccgaggcccagauguccauccagcugaucaacaaggccgucaacgcccucaucaacgaccagcugaucaugaagaaccaccuccgggacaucauggggauccccuacugcaacuacagcaaguacugcuaccucaaccacaccaccacgggcaagaccucccugcccaagugcugccuggugagcaacggcuccuaccucaacgagacccacuucagcgacgacaucgagcagcaggcggacaacaugaucaccgagaugcugcagaaggaguacauggagcgccaggggaagacgccccugggccugguggaccucuucgucuucuccaccagcuucuaccugaucuccaucuuccugcaccucgugaagaucccgacccaccggcacaucgugggcaagagcugccccaagccccaccgccugaaccacauggggaucugcuccugcgggcuguacaagcagcccggcgucccggugaaguggaagcggugaggacuaguuauaagacugacuagcccgaugggccucccaacgggcccuccuccccuccuugcaccgagauuaauaaaaaaaaaaaaaaaaaaaaaaaaaaaaaaaaaaaaaaaaaaaaaaaaaaaaaaaaaaaaaaaaaaaaaaaaaaaaaaaaaaaaaaaaaaaaaaaaaaaa

SEQ ID NO: 41532 - RNA, 1665 nt, Artificial Sequence
  mRNA product Design i-3 (A100) comprising derived and/or modified sequence from LASV(G1442-SLE-2011;Clade IV)__AIT17180__GPCmut12 (opt1)
aggagaaagcuuaccaugggccagaucgugaccuucuuccaggaggucccccacgugaucgaggaggugaugaacaucguccugaucgcccucagcauccuggccgugcugaaggggcucuacaacguggcgaccugcggccugaucgggcuggucaccuuccuccugcugugcggccgcuccugcaccaccacccucuacaaggggguguacgagcugcagacgcuggagcucaacauggagacccugaacaugugcaugccgcugagcugcaccaagaacaacucccaccacuacauccgggugggcaacgagaccggccucgagcugacgcugaccaacaccagcaucaucaaccacaaguucugcaaccucuccgacgcccacaagaagaaccuguacgaccacgcccugaugagcaucaucuccaccuuccaccucagcauccccaacuucaaccaguacgaggccauguccugcgacuucaacgggggcaagaucagcguccaguacaaccugucccacagcuacgccggggacgcggccaaccacugcggcacgguggccaacggggugcugcagaccuucaugcgcauggccuggggcggcuccuacaucgcgcucgacagcgggcggggcaacugggacugcaucaugaccuccuaccaguaccugaucauccagaacaccacgugggacgaccacugccaguucagccgccccucccccaucggguaccugggccuccugagccagcggacccgcgacgucuacaucucccggcgccugcucggcaccuucaccuggacgcugagcgacagcgaggggaaggacaccccgggcggguacugccugacccgguggaugcucaucgaggccgagcugaagugcuucggcaacaccgccguggccaagugcaacgagaagcacgacgaggaguucugcgacaugcugcgccucuucgacuucugcaagcaggccauccagcggcugaaggcggaggcccagauguccauccagcugaucaacaaggccgugaacgcccucaucaacgaccagcugaucaugaagaaccaccuccgcgacaucauggggauccccuacugcaacuacagcaaguacugcuaccugaacaacacggccaccggcaagaccucccugcccaagugcugccugaucagcaacggcuccuaccucaacgagacccacuucagcgacgacaucgagcaggaggcggacaacaugaucacggagaugcugcagaaggaguacauggagcggcaggggaagacgccccugggccuggucgaccucuucguguucuccaccagcuucuaccugaucuccaucuuccugcaccucgugaagaucccgacccaccgccacaucgucggcaagagcugccccaagccccaccggcugaaccacauggggaucugcuccugcgggcuguacaagcagcccggcgugccggugcgcuggaagcggugaggacuaguuauaagacugacuagcccgaugggccucccaacgggcccuccuccccuccuugcaccgagauuaauaaaaaaaaaaaaaaaaaaaaaaaaaaaaaaaaaaaaaaaaaaaaaaaaaaaaaaaaaaaaaaaaaaaaaaaaaaaaaaaaaaaaaaaaaaaaaaaaaaaa

SEQ ID NO: 41533 - RNA, 1665 nt, Artificial Sequence
  mRNA product Design i-3 (A100) comprising derived and/or modified sequence from LASV(G3010-SLE-2013;Clade IV)__AIT17344__GPCmut12 (opt1)
aggagaaagcuuaccaugggccagaucgugaccuucuuccaggaggucccccacgugaucgaggaggugaugaacaucguccugaucgcccucagcauccuggccgugcugaaggggcucuacaacuucgcgaccugcggccugguggggcuggucacguuccuccugcugugcggccgcuccugcaccaccagccucuacaaggggguguacgagcugcagacccuggagcucaacauggagacgcugaacaugugcaugccgcuguccugcaccaagaacaacagccaccacuacaucauggugggcaacgagaccggccucgagcugacccugacgaacaccuccaucaucaaccacaaguucugcaaccucagcgacgcccacaagaagaaccuguacaaccacgcccugauguccaucaucagcaccuuccaccucuccauccccaacuucaaccaguacgaggccaugagcugcgacuucaacgggggcaagaucuccguccaguacaaccugagccacuccuacgccggggacgcggccagccacugcggcaccguggccaacggggugcugcagacguucaugcggauggccuggggcggcuccuacaucgcgcucgacagcggguacggcaagugggacugcaucaugaccuccuaccaguaccugaucauccagaacaccaccugggaggaccacugccaguucagccgccccucccccaucggguaccugggccuccugagccagcggacgcgcgacaucuacaucagccggcgccugcucggcaccuucaccuggacccuguccgacagcgaggggaaggacacgccgggcggguacugccugacccgguggaugcucaucgaggccgagcugaagugcuucggcaacaccgccgucgccaagugcaacgagaagcacgacgaggaguucugcgacaugcugcgccucuucgacuucugcaagcaggccauccagcggcugaagaccgaggcgcagauguccauccagcugaucaacaaggccgugaacgcccucaucaacgaccagcugaucaugaagaaccaccuccgcgacaucauggggauccccuacugcaacuacagcaaguacugcuaccugaaccacacgaccaccggcaagaccucccugcccaagugcugccuggugagcaacggcuccuaccucaacgagacgcacuucagcgacgacaucgagcagcaggccgacaacaugaucaccgagaugcugcagaaggaguacauggagcggcaggggaagacgccccugggccuggucgaccucuucguguucuccaccagcuucuaccugaucuccaucuuccugcaccucgugaagaucccgacccaccgccacaucgucggcaagagcugccccaagccccaccggcugaaccacauggggaucugcuccugcgggcuguacaagcagcccggcgugccggugcgcuggaagcggugaggacuaguuauaagacugacuagcccgaugggccucccaacgggcccuccuccccuccuugcaccgagauuaauaaaaaaaaaaaaaaaaaaaaaaaaaaaaaaaaaaaaaaaaaaaaaaaaaaaaaaaaaaaaaaaaaaaaaaaaaaaaaaaaaaaaaaaaaaaaaaaaaaaa

SEQ ID NO: 41534 - RNA, 1665 nt, Artificial Sequence
  mRNA product Design i-3 (A100) comprising derived and/or modified sequence from LASV(G502-SLE-2009;Clade IV)__AIT17126__GPCmut12 (opt1)
aggagaaagcuuaccaugggccagaucgugaccuucuuccaggaggucccccacgugaucgaggaggugaugaacaucguccugaucgcccucagcauccuggccgugcugaaggggcucuacaacuucgcgaccugcggccugguggggcugcucacguuccugcugcucugcggccgcuccugcaccaccgggcuguacaagggcgucuacgagcugcagacccucgagcugaacauggagacgcugaacaugugcaugccgcucagcugcaccaagaacaacucccaccacuacaucauggugggcaacgagaccgggcuggagcugacccucacgaacaccagcaucaucaaccacaaguucugcaaccuguccgacgcccacaagaagaaccuguacgaccacgcccucaugagcaucaucuccaccuuccaccugagcauccccaacuucaaccaguacgaggccauguccugcgacuucaacggcgggaagaucagcgugcaguacaaccugucccacagcuacgccggcgacgcggccgaccacugcgggaccgucgccaacggcgugcuccagacguucaugcggauggccuggggcggguccuacaucgcgcuggacagcggccgcgggcggugggacugcaucaugaccuccuaccaguaccugaucauccagaacaccaccugggaggaccacugccaguucagccgccccucccccaucggcuaccucggccugcugagccagcggacgcgcgacaucuacaucucccggcgccuccuggggaccuucaccuggacccugagcgacagcgagggcaaggacacgcccgggggcuacugccucacccgguggaugcugaucgaggccgagcugaagugcuucgggaacaccgccguggccaagugcaacgagaagcacgacgaggaguucugcgacaugcuccgccuguucgacuucugcaagcaggccauccagcggcugaaggcggaggcccagauguccauccagcucaucaacaaggccgucaacgcccugaucaacgaccagcuggugaugaagaaccaccuccgcgacaucaugggcauccccuacugcaacuacagccgguacugcuaccugaaccacaccacgaccggccgcaccucccugcccaagugcugccucgugagcaacggguccuaccugaacgagacccacuucagcgacgacaucgagcagcaggccgacaacaugaucacggagaugcugcagaaggaguacauggagcggcagggcaagaccccgcuggggcucgucgaccuguucguguucuccaccagcuucuaccugaucuccaucuuccuccaccuggugaagaucccgacccaccgccacaucgucggcaagagcugccccaagccccaccggcugaaccacauggggaucugcuccugcggccucuacaagcagcccggcgugccggugaaguggaagcgcugaggacuaguuauaagacugacuagcccgaugggccucccaacgggcccuccuccccuccuugcaccgagauuaauaaaaaaaaaaaaaaaaaaaaaaaaaaaaaaaaaaaaaaaaaaaaaaaaaaaaaaaaaaaaaaaaaaaaaaaaaaaaaaaaaaaaaaaaaaaaaaaaaaaa

SEQ ID NO: 41535 - RNA, 1665 nt, Artificial Sequence
  mRNA product Design i-3 (A100) comprising derived and/or modified sequence from LASV(G733-SLE-2010;Clade IV)__AIT17154__GPCmut12 (opt1)
aggagaaagcuuaccaugggccagaucgugaccuucuuccaggaggucccccacgugaucgaggaggugaugaacaucguccugaucgcccucagcauccuggccgugcugaaggggcucuacaacuucgcgaccugcggcaucguggggcuggucuccuuccugcuccugugcggccgcagcugcacgaccucccuguacaaggggguguacgagcuccagacccuggagcugaacauggagacccucaacaugugcaugccgcugagcugcacgaagaacaacucccaccacuacaucauggugggcaacgagaccggccuggagcucacccugaccaacacgagcaucaucaaccacaaguucugcaaccuguccgacgcccacaagaagaaccucuacgaccacgcccugaugagcaucaucuccaccuuccaccugagcauccccaacuucaaccaguacgaggccauguccugcgacuucaacgggggcaagaucagcguccaguacaaccucucccacagcuacgccggggacgcggccaaccacugcggcaccaucgccaacggggugcugcagaccuucaugcggauggccuggggcggcuccuacaucgcgcuggacagcgggcgcgaccggugggacugcaucaugacguccuaccaguaccucaucauccagaacaccaccugggaggaccacugccaguucagccgccccucccccaucggcuaccuggggcugcucagccagcggacccgcgacaucuacaucagccggcgccugcugggcacguucaccuggacccucuccgacagcgagggcaaggacacccccgggggcuacugccugacgcgguggaugcugaucgaggccgagcucaagugcuucgggaacaccgccguggccaagugcaacgagaagcacgacgaggaguucugcgacaugcugcgccuguucgacuucugcaagcaggccauccagcggcucaaggcggaggcccagauguccauccagcugaucaacaaggccgucaacgcccugaucaacgaccagcucaucaugaagaaccaccuccgcgacaucaugggcaucccguacugcaacuacagcaaguacugcuaccugaaccacaccaccacggggaagaccucccugcccaagugcugccuggugagcaacggcuccuaccugaacgagacccacuucagcgacgacaucgagcagcaggccgacaacaugaucaccgagaugcuccagaaggaguacauggagcggcagggcaagacgccccuggggcugguggaccuguucgucuucuccaccagcuucuaccucaucuccaucuuccugcaccuggugaagaucccgacccaccgccacguggucggcaagagcugccccaagccccaccggcucaaccacauggggaucugcuccugcggccuguacgggcagcccggcgugccggugaaguggaagcgcugaggacuaguuauaagacugacuagcccgaugggccucccaacgggcccuccuccccuccuugcaccgagauuaauaaaaaaaaaaaaaaaaaaaaaaaaaaaaaaaaaaaaaaaaaaaaaaaaaaaaaaaaaaaaaaaaaaaaaaaaaaaaaaaaaaaaaaaaaaaaaaaaaaaa

SEQ ID NO: 41536 - RNA, 1665 nt, Artificial Sequence
  mRNA product Design i-3 (A100) comprising derived and/or modified sequence from MOPV/LASV reassortant(IGS-1;Clade IV)__AFY05576__GPCmut12 (opt1)
aggagaaagcuuaccaugggccagaucgugaccuucuuccaggaggucccccacgugaucgaggaggugaugaacaucguccugaucgcccucagcgugcuggccgugcugaaggggcucuacaacuucgcgaccugcggccuggucgggcuggugaccuuccuccugcugugcggccgcuccugcaccaccagccucuacaaggggguguacgagcugcagacccuggagcucaacauggagacgcugaacaugugcaugccgcuguccugcaccaagaacaacagccaccacuacaucauggucggcaacgagaccggccucgagcugacccugacgaacaccuccaucaucaaccacaaguucugcaaccucagcgacgcccacaagaagaaccuguacgaccacgcccugauguccaucaucagcaccuuccaccucuccauccccaacuucaaccaguacgaggccaugagcugcgacuucaacgggggcaagaucuccgugcaguacaaccugagccacuccuacgccggggacgcggccaaccacugcggcaccguggccaacgggguccugcagacguucaugcggauggccuggggcggcagcuacaucgcgcucgacuccgggcgcggcaacugggacugcaucaugaccagcuaccaguaccugaucauccagaacaccaccugggaggaccacugccaguucucccggcccagccccaucggguaccugggccuccugucccagcgcacgcgggacaucuacaucagccgccggcugcucggcaccuucaccuggacccugagcgacuccgagggggaggacacgccgggcggguacugccugacccgcuggaugcucaucgaggccgagcugaagugcuucggcaacaccgccguggccaagugcaacgagaagcacgacgaggaguucugcgacaugcugcggcuguucgacuucugcaagcaggccauccagcgccugaaggcggaggcccagaugagcauccagcugaucaacaaggccgugaacgcccucaucaacgaccagcugaucaugaagaaccaccuccgggacaucauggggauccccuacugcaacuacuccaaguacugcuaccucaaccacaccacgaccggccgcaccagccugcccaagugcugccuggucuccaacggcagcuaccucaacgagacccacuucuccgacgacaucgagcagcaggccgacaacaugaucacggagaugcugcagaaggaguacauggagcggcaggggaagacgccccugggccugguggaccucuucguguucagcaccuccuucuaccugaucagcaucuuccugcaccucgucaagaucccgacccaccgccacaucguggggaaguccugccccaagccccaccggcugaaccacaugggcaucugcagcugcgggcuguacaagcagcccggcgugccggucaaguggaagcgcugaggacuaguuauaagacugacuagcccgaugggccucccaacgggcccuccuccccuccuugcaccgagauuaauaaaaaaaaaaaaaaaaaaaaaaaaaaaaaaaaaaaaaaaaaaaaaaaaaaaaaaaaaaaaaaaaaaaaaaaaaaaaaaaaaaaaaaaaaaaaaaaaaaaa

SEQ ID NO: 41537 - RNA, 1665 nt, Artificial Sequence
  mRNA product Design i-3 (A100) comprising derived and/or modified sequence from LASV(LM765-SLE-2012;Clade IV)__AIT17814__GPCmut12 (opt1)
aggagaaagcuuaccaugggccagaucgugaccuucuuccaggaggucccccacgugaucgaggaggugaugaacaucguccugaucgcccucagcauccuggccgugcugaaggggcucuacaacuucgcgaccugcggccugguggggcuggucacguuccuccugcugugcggccgcuccugcaccaccagccucuacaaggggguguacgagcugcagacccuggagcucaacauggagacgcugaacaugugcaugccgcuguccugcaccaagaacaacagccaccacuacaucauggugggcaacgagaccggccucgagcugacccugacgaacaccuccaucaucgaccacaaguucugcaaccucagcgacgcccaccggaagaaccuguacgaccacgcccugauguccaucaucagcaccuuccaccucuccauccccaacuucaaccaguacgaggccaugagcugcgacuucaacgggggcaagaucuccguccaguacaaccugagccacuccuacgccaaggacgcggccgaccacugcgggaccguggccaacggcgugcugcagacguucaugcgcauggccuggggcgggagcuacaucgcgcucgacuccggccgggggcgcugggacugcaucaugaccagcuaccaguaccugaucauccagaacaccaccugggaggaccacugccaguucucccggcccagccccaucggcuaccuggggcuccugucccagcgcacgcgggacaucuacaucagccgccggcugcucggcaccuucaccuggacccugagcgacuccgagggcaaggacacgcccgggggcuacugccugacccgcuggaugcucaucgaggccgagcugaagugcuucgggaacaccgccgucgccaagugcaacgagaagcacgacgaggaguucugcgacaugcugcggcuguucgacuucugcaagcaggccauccagcgccugaaggcggaggcccagaugagcauccagcugaucaacaaggccgugaacgcccucaucaacgaccagcugaucaugaagaaccaccuccgggacaucaugggcauccccuacugcaacuacuccaaguacugcuaccucaaccacaccacgaccgggaagaccagccugcccaagugcugccugguguccaacggcagcuaccucaacgagacccacuucuccgacgacaucgagcagcaggccgacaacaugaucacggagaugcugcagaaggaguacauggagcgccagggcaagaccccgcuggggcuggucgaccucuucguguucagcaccuccuucuaccugaucagcaucuuccugcaccucgugaagaucccgacccaccggcacaucgucggcaagcccugccccaagccccaccgccugaaccacauggggaucugcuccugcggccuguacaagcagccgggggugcccgugaaguggaagcggugaggacuaguuauaagacugacuagcccgaugggccucccaacgggcccuccuccccuccuugcaccgagauuaauaaaaaaaaaaaaaaaaaaaaaaaaaaaaaaaaaaaaaaaaaaaaaaaaaaaaaaaaaaaaaaaaaaaaaaaaaaaaaaaaaaaaaaaaaaaaaaaaaaaa

SEQ ID NO: 41538 - RNA, 1665 nt, Artificial Sequence
  mRNA product Design i-3 (A100) comprising derived and/or modified sequence from LASV(LM776-SLE-2012;Clade IV)__AIT17824__GPCmut12 (opt1)
aggagaaagcuuaccaugggccagaucgugaccuucuuccaggaggucccccacgugaucgaggaggugaugaacaucguccugaucgcccucagcauccuggccgugcugaaggggcucuacaacuucgcgaccugcggccugguggggcuggucaccuuccuccugcugugcggccgcuccugcaccaccagcguguacaaggggguguacgagcuccagacccuggagcugaacauggagacgcucaacaugugcaugccgcuguccugcaccaagaacaacagccaccacuacaucauggucggcaacgagaccggccuggagcucacccugacgaacaccuccaucaucaaccacaaguucugcaaccugagcgacgcccacaagaagaaccucuacgaccacgcccugauguccaucaucagcaccuuccaccuguccauccccaacuucaaccaguacgaggccaugagcugcgacuucaacgggggcaagaucuccgugcaguacaaccucagccacuccuacgccggggacgcggccaaccacugcggcaccguggccaacgggguccugcagacguucaugcggauggccuggggcggcagcuacaucgcgcuggacuccgggcacggcaagugggacugcaucaugaccagcuaccaguaccucaucauccagaacaccaccugggaggaccacugccaguucucccgccccagccccaucggguaccugggccugcucucccagcggacgcgcgacaucuacaucagccggcgccugcugggcaccuucaccuggacccucagcgacuccgaggggaaggacacgccgggcggguacugccugacccgguggaugcugaucgaggccgagcucaagugcuucggcaacaccgccguggccaagugcaacgagaagcacgacgaggaguucugcgacaugcugcgccuguucgacuucugcaagcaggccauccagcggcucaaggcggaggcccagaugagcauccagcugaucaacaaggccgugaacgcccugaucaacgaccagcucaucaugaagaaccaccuccgcgacaucauggggauccccuacugcaacuacuccaaguacugcuaccugaaccacaccacgaccggcaagaccagccugcccaagugcugccuggucuccaacggcagcuaccugaacgagacccacuucuccgacgacaucgagcagcaggccgacaacaugaucacggagaugcuccagaaggaguacauggagcggcaggggaagacgccccugggccugguggaccuguucguguucagcaccuccuucuaccucaucagcaucuuccugcaccuggucaagaucccgacccaccgccacaucguggggaaguccugccccaagccccaccggcucaaccacaugggcaucugcagcugcgggcuguacaagcagcccggcgugccgguccgcuggaagcggugaggacuaguuauaagacugacuagcccgaugggccucccaacgggcccuccuccccuccuugcaccgagauuaauaaaaaaaaaaaaaaaaaaaaaaaaaaaaaaaaaaaaaaaaaaaaaaaaaaaaaaaaaaaaaaaaaaaaaaaaaaaaaaaaaaaaaaaaaaaaaaaaaaaa

SEQ ID NO: 41539 - RNA, 1665 nt, Artificial Sequence
  mRNA product Design i-3 (A100) comprising derived and/or modified sequence from LASV(Mad39;Clade IV)__ANH09722__GPCmut12 (opt1)
aggagaaagcuuaccaugggccagaucgugaccuucuuccaggaggucccccacgugaucgaggaggugaugaacaucguccugaucgcccucagcauccuggccgugcugaaggggcucuacaacguggcgaccugcggccugaucgggcuggucacguuccuccugcugugcggccgcuccugcaccaccacccucuacaaggggguguacgagcugcaggcccuggagcucaacauggagacgcugaacaugugcaugccgcugagcugcaccaagaacaacucccaccacuacauccgggugggcaacgagaccggccucgagcugacccugacgaacaccagccucaucaaccacaaguucugcaaccuguccgacgcccacaagaagaaccuguacgaccacgcccucaugagcaucaucuccaccuuccaccugagcauccccaacuucaaccaguacgaggccauguccugcgacuucaacgacgggaagaucagcguccaguacaaccugucccacaccuacgcgggcgacacggccaaccacugcgggaccguggccaacggcgugcuccagaccuucaugcgcauggccuggggcgggagcuacaucgcgcuggacuccggccgcgggggcugggacugcaucaugaccagcuaccaguaccugaucauccagaacacgaccugggaggaccacugccaguucucccggcccagccccaucggguaccucggccugcugucccagcggacccgcgacaucuacaucagccggcgccuccugggcaccuucacguggacccuguccgacagcgaggggaaggacaccccgggcggguacugccucacccgguggaugcugaucgaggccgagcugaagugcuucggcaacacggccgucgccaagugcaacgagaagcacgacgaggaguucugcgacaugcuccgccuguucgacuucugcaagcaggccauccagcggcugaaggcggaggcccagaugagcauccagcucaucaacaaggccgugaacgcccugaucaacgaccagcugaucaugaagaaccaccuccgcgacaucauggggauccccuacugcaacuacuccaaguacugcuaccugaaccacaccgugaccggcaagaccagccugcccaagugcugccucgucuccaacggcagcuaccugaacgagacgcacuucuccgacgacaucgagcagcaggccgacaacaugaucaccgagaugcugcagaaggaguacauggagcggcaggggaagacgccccugggccucguggaccuguucguguucagcaccuccuucuaccugaucagcaucuuccuccaccuggucaagaucccgacccaccgccacgugguggggaagcccugccccaagccccaccggcugaaccacaugggcaucugcuccugcggguucuacaagcagccgggcguccccgugcgcuggaagcggugaggacuaguuauaagacugacuagcccgaugggccucccaacgggcccuccuccccuccuugcaccgagauuaauaaaaaaaaaaaaaaaaaaaaaaaaaaaaaaaaaaaaaaaaaaaaaaaaaaaaaaaaaaaaaaaaaaaaaaaaaaaaaaaaaaaaaaaaaaaaaaaaaaaa

SEQ ID NO: 41540 - RNA, 1665 nt, Artificial Sequence
  mRNA product Design i-3 (A100) comprising derived and/or modified sequence from LASV(Z0947-SLE-2011;Clade IV)__AIT17840__GPCmut12 (opt1)
aggagaaagcuuaccaugggccagaucgugaccuucuuccaggaggucccccacgugaucgaggaggugaugaacaucguccugaucgcccucagcauccuggccgugcugaaggggcucuacaacuucgcgaccugcggccugguggggcuggucacguuccuccugcugugcggccgcuccugcaccaucagccucuacaaggggguguacgagcugcagacccuggagcucaacauggagacccugaacaugugcaugccgcuguccugcacgaagaacaacagccaccacuacaucauggugggcaacgagaccggccucgagcugacccugaccaacacguccaucaucaaccacaaguucugcaaccucagcgacgcccacaagaagaaccuguacgaccacgcccugauguccaucaucagcaccuuccaccucuccauccccaacuucaaccaguacgaggccaugagcugcgacuucaacgggggcaagaucuccguccaguacaaccugagccacuccuacgccggggacgcggccaaccacugcggcaccguggccaacggggugcugcagaccuucaugcggauggccuggggcggcagcuacaucgcgcucgacuccgggcgcgaccggugggacugcaucaugacgagcuaccaguaccugaucauccagaacaccaccugggaggaccacugccaguucucccgccccagccccaucggcuaccuggggcuccugucccagcggacccgcgacaucuacaucagccggcgccugcucggcacguucaccuggacccugagcgacuccgagggcaaggacacccccgggggcuacugccugacgcgguggaugcucaucgaggccgagcugaagugcuucgggaacaccgccgucgccaagugcaacgagaagcacgacgaggaguucugcgacaugcugcgccucuucgacuucugcaagcaggccauccagcggcugaaggcggaggcccagaugagcauccagcugaucaacaaggccgugaacgcccucaucaacgaccagcugaucaugaagaaccaccuccgcgacaucaugggcaucccguacugcaacuacuccaaguacugcuaccugaaccacaccaccacggggaagaccagccugcccaagugcugccugguguccaacggcagcuaccucaacgagacccacuucuccgacgacaucgagcagcaggccgacaacaugaucaccgagaugcugcagaaggaguacauggagcggcagggcaagacgccccuggggcuggucgaccucuucguguucagcaccuccuucuaccugaucagcaucuuccugcaccucgugaagaucccgacccaccgccacaucgucggcaagcccugccccaagccccaccggcugaaccacauggggaucugcuccugcggccuguacaagcagccgggggugcccgugaaguggaagcgcugaggacuaguuauaagacugacuagcccgaugggccucccaacgggcccuccuccccuccuugcaccgagauuaauaaaaaaaaaaaaaaaaaaaaaaaaaaaaaaaaaaaaaaaaaaaaaaaaaaaaaaaaaaaaaaaaaaaaaaaaaaaaaaaaaaaaaaaaaaaaaaaaaaaa

SEQ ID NO: 41541 - RNA, 1665 nt, Artificial Sequence
  mRNA product Design i-3 (A100) comprising derived and/or modified sequence from LASV(Josiah;Clade IV)__NP_694870__GPCmut12 (opt4)
aggagaaagcuuaccaugggccagaucgugaccuucuuccaggaggugccccacgugaucgaggaggugaugaacaucgugcugaucgcccugagcgugcuggccgugcugaagggccuguacaacuucgccaccugcggccuggugggccuggugaccuuccugcugcugugcggcagaagcugcaccaccagccuguacaagggcguguacgagcugcagacccuggagcugaacauggagacccugaacaugugcaugccccugagcugcaccaagaacaacagccaccacuacaucauggugggcaacgagaccggccuggagcugacccugaccaacaccagcaucaucaaccacaaguucugcaaccugagcgacgcccacaagaagaaccuguacgaccacgcccugaugagcaucaucagcaccuuccaccugagcauccccaacuucaaccaguacgaggccaugagcugcgacuucaacggcggcaagaucagcgugcaguacaaccugagccacagcuacgccggcgacgccgccaaccacugcggcaccguggccaacggcgugcugcagaccuucaugagaauggccuggggcggcagcuacaucgcccuggacagcggcagaggcaacugggacugcaucaugaccagcuaccaguaccugaucauccagaacaccaccugggaggaccacugccaguucagcagacccagccccaucggcuaccugggccugcugagccagagaaccagagacaucuacaucagcagaagacugcugggcaccuucaccuggacccugagcgacagcgagggcaaggacacccccggcggcuacugccugaccagauggaugcugaucgaggccgagcugaagugcuucggcaacaccgccguggccaagugcaacgagaagcacgacgaggaguucugcgacaugcugagacuguucgacuucugcaagcaggccauccagagacugaaggccgaggcccagaugagcauccagcugaucaacaaggccgugaacgcccugaucaacgaccagcugaucaugaagaaccaccugagagacaucaugggcauccccuacugcaacuacagcaaguacugcuaccugaaccacaccaccaccggcagaaccagccugcccaagugcugccuggugagcaacggcagcuaccugaacgagacccacuucagcgacgacaucgagcagcaggccgacaacaugaucaccgagaugcugcagaaggaguacauggagagacagggcaagaccccccugggccugguggaccuguucguguucagcaccagcuucuaccugaucagcaucuuccugcaccuggugaagauccccacccacagacacaucgugggcaagagcugccccaagccccacagacugaaccacaugggcaucugcagcugcggccuguacaagcagcccggcgugcccgugaaguggaagagaugaggacuaguuauaagacugacuagcccgaugggccucccaacgggcccuccuccccuccuugcaccgagauuaauaaaaaaaaaaaaaaaaaaaaaaaaaaaaaaaaaaaaaaaaaaaaaaaaaaaaaaaaaaaaaaaaaaaaaaaaaaaaaaaaaaaaaaaaaaaaaaaaaaaa

SEQ ID NO: 41542 - RNA, 1662 nt, Artificial Sequence
  mRNA product Design i-3 (A100) comprising derived and/or modified sequence from LASV(LP;Clade I)__AAF86701__GPCmut12 (opt4)
aggagaaagcuuaccaugggccagaucaucaccuucuuccaggaggugccccacgugaucgaggaggugaugaacaucgugcugaucgcccugagccugcuggccauccugaagggccuguacaacaucgccaccugcggcaucaucggccugguggccuuccuguuccugugcggcaagagcugcagccugacccugaagggcggcuacgagcugcagacccuggagcugaacauggagacccugaacaugugcaugccccugagcugcaccaagaacagcagccaccacuacaucagagugggcaacgagaccggccuggagcugacccugaccaacaccagcaucaucaaccacaaguucugcaaccugagcgacgcccacaagaagaaccuguacgaccacgcccugaugagcaucaucagcaccuuccaccugagcauccccaacuucaaccaguacgaggccaugagcugcgacuucaacggcggcaagaucagcgugcaguacaaccugagccacagcuacgccggcgacgccgccgagcacugcggcaccguggccaacggcgugcugcagaccuucaugagaauggccuggggcggcagauacaucgcccuggacagcggcaagggcaacugggacugcaucaugaccagcuaccaguaccugaucauccagaacaccaccugggaggaccacugccaguucagcagacccagccccaucggcuaccugggccugcugagccagagaaccagagacaucuacaucagcagaagacugcugggcaccuucaccuggacccugagcgacagcgagggcaacgagacccccggcggcuacugccugaccagauggaugcugaucgaggccgagcugaagugcuucggcaacaccgccguggccaagugcaacgagaagcacgacgaggaguucugcgacaugcugagacuguucgacuucugcaagcaggccaucagaagacugaaggccgaggcccagaugagcauccagcugaucaacaaggccgugaacgcccugaucaacgaccagcugaucaugaagaaccaccugagagacaucaugggcauccccuacugcaacuacagcaaguacugcuaccugaaccacaccagcagcggcagaaccagccugcccaagugcugccugaucagcaacggcagcuaccugaacgagacccaguucagcgacgacaucgagcagcaggccgacaacaugaucaccgagaugcugcagaaggaguacaucgagagacagggcaagaccccccugggccugguggacaucuucaucuucagcaccagcuucuaccugaucagcaucuuccugcaccugaucaagauccccacccacagacacaucgugggcaagcccugccccaagccccacagacugaaccacaugggcgugugcagcugcggccuguacaagcaccccggcgugcccaccaaguggaagagaugaggacuaguuauaagacugacuagcccgaugggccucccaacgggcccuccuccccuccuugcaccgagauuaauaaaaaaaaaaaaaaaaaaaaaaaaaaaaaaaaaaaaaaaaaaaaaaaaaaaaaaaaaaaaaaaaaaaaaaaaaaaaaaaaaaaaaaaaaaaaaaaaaaaa

SEQ ID NO: 41543 - RNA, 1662 nt, Artificial Sequence
  mRNA product Design i-3 (A100) comprising derived and/or modified sequence from LASV(803213;Clade II)__AAF86703__GPCmut12 (opt4)
aggagaaagcuuaccaugggccagaucaucaccuucuuccaggaggugccccacgugaucgaggaggugaugaacaucgugcugaucgcccugagccugcuggccauccugaagggcaucuacaacguggccaccugcggccuguucggccugaucagcuuccugcugcugugcggcagaagcugcagcgugaccuacaagggcguguacgagcugcagacccuggagcugaacauggccaaccugaacaugugcaugccccugagcugcaccaagaacaacagccaccacuacaucauggugggcaacgagaccggccuggagcugacccugaccaacaccagcaucaucaaccacaaguucugcaaccugagcgacgcccacaagaagaaccuguacgaccacgcccugaugagcaucaucagcaccuuccaccugagcauccccaacuucaaccaguacgaggccaugagcugcgacuucaacggcggcaagaucagcgugcaguacaaccugagccacagcuucgccguggacgccgccaaccacugcggcaccaucgccaacggcgugcugcagaccuucaugagaauggccuggggcggcagcuacaucgcccuggacagcggcaagggcaacugggacugcaucaugaccagcuaccaguaccugaucauccagaacaccaccugggaggaccacugccaguucagcagacccagccccaucggcuaccugggccugcugagccagagaaccagagacaucuacaucagcagaagacugcugggcaccuucaccuggacccugagcgacagcgagggcaacgaggcccccggcggcuacugccugaccagauggaugcugaucgaggccgagcugaagugcuucggcaacaccgccguggccaagugcaacgagaagcacgacgaggaguucugcgacaugcugagacuguucgacuucugcaagcaggccaucaagagacugaagaccgaggcccagaugagcauccagcugaucaacaaggccgugaacgcccugaucaacgaccagcugaucaugaagaaccaccugagagacaucaugggcauccccuacugcaacuacagcagauacugcuaccugaaccacaccgugaccggcaagaccagccugcccagaugcugccuggugagcaacggcagcuaccugaacgagacccacuucagcgacgacaucgagcagcaggccgacaacaugaucaccgagaugcugcagaaggaguacauggacagacagggcaagaccccccugggccugguggaccuguucguguucagcaccagcuucuaccugaucagcaucuuccugcaccuggugaagauccccacccacagacacaucgugggcaagcccugccccaagccccacagacugaaccacaugggcaucugcagcugcggccuguacaagcaccccggcgugcccgugaaguggaagagaugaggacuaguuauaagacugacuagcccgaugggccucccaacgggcccuccuccccuccuugcaccgagauuaauaaaaaaaaaaaaaaaaaaaaaaaaaaaaaaaaaaaaaaaaaaaaaaaaaaaaaaaaaaaaaaaaaaaaaaaaaaaaaaaaaaaaaaaaaaaaaaaaaaaa

SEQ ID NO: 41544 - RNA, 1662 nt, Artificial Sequence
  mRNA product Design i-3 (A100) comprising derived and/or modified sequence from LASV(GA391;Clade III)__CAA36645__GPCmut12 (opt4)
aggagaaagcuuaccaugggccagaucgugaccuucuuccaggaggugccccacgugaucgaggaggugaugaacaucgugcugaucgcccugagcauccuggccauccugaagggccuguacaacguggccaccugcggccugaucggccuggugaccuuccugcugcugagcggcagaagcugcagccugaucuacaagggcaccuacgagcugcagacccuggagcugaacauggagacccugaacaugugcaugccccugagcugcaccaagaacaacagccaccacuacaucagagugggcaacgagaccggccuggagcugacccugaccaacaccagcauccugaaccacaaguucugcaaccugagcgacgcccacaagagaaaccuguacgaccacagccugaugagcaucaucagcaccuuccaccugagcauccccaacuucaaccaguacgaggccaugagcugcgacuucaacggcggcaagaucaccgugcaguacaaccugagccacagcuucgccguggacgccgccggccacugcggcacccuggccaacggcgugcugcagaccuucaugagaauggccuggggcggcagcuacaucgcccuggacagcggcagaggcaacugggacugcaucaugaccagcuaccaguaccugaucauccagaacaccaccugggacgaccacugccaguucagcagacccagccccaucggcuaccugggccugcugagccagagaaccagagacaucuacaucagcagaagacugcugggcaccuucaccuggacccugagcgacagcgagggcaacgagacccccggcggcuacugccugaccagauggaugcugaucgaggccgagcugaagugcuucggcaacaccgccguggccaagugcaacgagaagcacgacgaggaguucugcgacaugcugagacuguucgacuucugcaagcaggccaucagaagacugaagaccgaggcccagaugagcauccagcugaucaacaaggccgugaacgcccugaucaacgaccagcugaucaugaagaaccaccugagagacaucaugggcauccccuacugcaacuacagcagauacugcuaccugaaccacaccagcaccggcaagaccagccugcccagaugcugccugaucagcaacggcagcuaccugaacgagaccaaguucagcgacgacaucgagcagcaggccgacaacaugaucaccgagaugcugcagaaggaguacaucgacagacagggcaagaccccccugggccugguggaccuguucguguucagcaccagcuucuaccugaucagcaucuuccugcaccuggugaagauccccacccacagacacaucgugggcaagcccugccccaagccccacagacugaaccacaugggcaucugcagcugcggccuguacaagcagcccggcgugcccgugagauggaagagaugaggacuaguuauaagacugacuagcccgaugggccucccaacgggcccuccuccccuccuugcaccgagauuaauaaaaaaaaaaaaaaaaaaaaaaaaaaaaaaaaaaaaaaaaaaaaaaaaaaaaaaaaaaaaaaaaaaaaaaaaaaaaaaaaaaaaaaaaaaaaaaaaaaaa

SEQ ID NO: 41545 - RNA, 1665 nt, Artificial Sequence
  mRNA product Design i-3 (A100) comprising derived and/or modified sequence from LASV(AV;Clade V)__CCA30314__GPCmut12 (opt4)
aggagaaagcuuaccaugggccagaucgugaccuucuuccaggaggugccccacgugaucgaggaggugaugaacaucgugcugaucgcccugagcauccuggccgugcugaagggccuguacaacaucgccaccugcggccugaucggccugaucaccuuccugcugcugugcggcagaagcugcagcagcaaccuguacaagggcguguacgagcugcagagccuggaccugaacauggagacccugaacaugugcaugccccugagcugcaccaagaacaacagccaccacuacaucagagugggcaacgacaccggccuggagcugacccugaccaacaccagcauccugaaccacaaguucugcaaccugagcgacgcccacaagaaggaccuguacgaccacgcccugaugagcaucaucagcaccuuccaccugagcauccccaacuucaaccaguacgaggccaugagcugcgacuucaacggcggcaagaucagcgugcaguacaaccugagccacagcuacgccaucgacgccgccaaccacugcggcaccguggccaacggcauccugcagaccuucaugagaauggccuggggcggcagcuacaucgcccuggacagcggcagaggcaacugggacugcaucaugaccagcuaccaguaccugaucauccagaacaccaccugggagaaccacugccaguucagcagacccagccccaucggcuaccugggccugcugagccagagaaccagagacaucuacaucagcagaagacugcugggcaccuucaccuggacccugagcgacagcgagggcaacgccacccccggcggcuacugccugaccagauggaugcugaucgaggccgagcugaagugcuucggcaacaccgccguggccaagugcaacgagaagcacgacgaggaguucugcgacaugcugagacuguucgacuucugcaagcaggccaucagcagacugaagagcgaggcccagaugagcauccagcugaucaacaaggccgugaacgcccugaucaacgaccagcugaucaugaagaaccaccugagagacaucaugggcauccccuacugcaacuacagcaaguacugcuaccugaaccacaccaucaccggcaagaccagccugcccaagugcugccuggugagcaacggcagcuaccugaacgagacccacuucagcgacgacaucgagcagcaggccgacaacaugaucaccgagaugcugcagaaggaguacauggagagacagggcaagaccccccugggccugguggaccuguucguguucagcaccagcuucuaccugaucagcaucuuccugagacuggugaagauccccacccacagacacaucgugggcaagcccugccccaagccccacagacugaaccacaugggcaucugcagcugcggccuguacaagcagcccggcgugcccgugagauggaagagaugaggacuaguuauaagacugacuagcccgaugggccucccaacgggcccuccuccccuccuugcaccgagauuaauaaaaaaaaaaaaaaaaaaaaaaaaaaaaaaaaaaaaaaaaaaaaaaaaaaaaaaaaaaaaaaaaaaaaaaaaaaaaaaaaaaaaaaaaaaaaaaaaaaaa

SEQ ID NO: 41546 - RNA, 1662 nt, Artificial Sequence
  mRNA product Design i-3 (A100) comprising derived and/or modified sequence from LASV(Togo/2016/7082;Clade VI)__AMR44577__GPCmut12 (opt4)
aggagaaagcuuaccaugggccagaucaucaccuucuuccaggaggugccccacgugaucgaggaggugaugaacaucgugcugaucgcccugagccugcuggccauccugaagggcguguacaacguggccaccugcggcaucaucggccuggugaccuuccuguuccugugcggcagaagcugcagccugaucuacaagggcagcuacgagcugcagacccuggagcugaacauggagacccugaacaugugcaugccccugagcugcaccaagaacagcagccaccacuacaucagagugggcaacgagaccggccuggagcugacccugaccaacaccagcaucaucaaccacaaguucugcaaccugagcgacgcccacaagagaaaccuguacgaccacgcccugaugagcauccugagcaccuuccaccugagcauccccaacuucaaccaguacgaggccaugagcugcgacuucaacggcggcaagaucagcgugcaguacaaccugagccacgccuacgccguggacgccgccgagcacugcggcaccguggccaacggcgugcugcagaccuucaugagaauggccuggggcggcagcuacaucgcccuggacagcggcagaggcaacugggacugcaucaugaccagcuaccaguaccugaucauccagaacaccaccugggaggaccacugccaguucagcagacccagccccaucggcuaccugggccugcugagccagagaaccagagacaucuacaucagcagaagacugcugggcaccuucaccuggacccugagcgacagcgagggcaacgagacccccggcggcuacugccugaccagauggaugcugaucgaggccgagcugaagugcuucggcaacaccgccguggccaagugcaacgagaagcacgacgaggaguucugcgacaugcugagacuguucgacuucugcaagcaggccauccagagacugaagagcgaggcccagaugagcauccagcugaucaacaaggccgugaacgcccugaucaacgaccagcugaucaugaagaaccaccugagagacaugaugggcauccccuacugcaacuacagcaaguacugcuaccugaaccacaccagcagcggcagaaccagccugcccaagugcugccuggugagcaacggcagcuaccugaacgagacccacuucagcgacgacaucgagcagcaggccgacaacaugaucaccgagaugcugcagaaggaguacaucgacagacagggcaagaccccccugggccugguggaccuguucguguucagcaccagcuucuaccugaucagcaucuuccugcaccugaucaagauccccacccacagacacaucgugggcaagcccugccccaagccccacagacugaaccacaugggcaucugcagcugcggccuguacaagcagcccggcgugcccaccagauggaagagaugaggacuaguuauaagacugacuagcccgaugggccucccaacgggcccuccuccccuccuugcaccgagauuaauaaaaaaaaaaaaaaaaaaaaaaaaaaaaaaaaaaaaaaaaaaaaaaaaaaaaaaaaaaaaaaaaaaaaaaaaaaaaaaaaaaaaaaaaaaaaaaaaaaaa

SEQ ID NO: 41547 - RNA, 1662 nt, Artificial Sequence
  mRNA product Design i-3 (A100) comprising derived and/or modified sequence from LASV(KAK-428;Clade n.d. (VII))__ANH09740__GPCmut12 (opt4)
aggagaaagcuuaccaugggccagaucgugaccuucuuccaggaggugccccacgugaucgaggaggugaugaacaucgugcugaucgcccugagccugcuggccauccugaagggccuguacaacuucgccaccugcggcgugaucggccugaucaccuuccugcugcugugcggcagaagcugcagcgccaccuacaagggccaguacgagcugcagacccuggagcugaacauggagagccugaacaugugcaugccccugagcugcaccaagaacaacagccaccacuacaucagagccggcaacaacaccggccuggagcugacccugaccaacaccagcaucaucagccacaaguucugcaaccugagcgacgcccacaagaagaaccuguacgaccacacccugaugagcaucaucaccaccuuccaccugagcauccccaacuucaaccaguacgaggccaugagcugcgacuucaacggcggcaagaucagcauccaguacaaccugagccacagcuacgccggcgacgccgcccagcacugcggcaccguggccaacggcgugcugcagaccuucaugagaauggccuggggcggcagcuaccuggcccuggacagcggcagaagaggcugggacugcaucaucagcagcuaccaguaccugaucauccagaacaccaccugggacgaccacugccaguucagcagacccagccccaucggcuaccugggcuucgugagccagaagaccagagacaucuacaucagcagaagacugcugggcaccuucaccuggacccugagcgacagcgagggccacgacaugcccggcggcuacugccugaccagauggaugcugaucgaggccgaccugaagugcuucggcaacaccgccguggccaagugcaacgagaagcacgacgaggaguucugcgacauguggagacuguucgacuucugcaagcaggccauccagagacugaaggccgaggcccagaugaacauccagcugaucaacaaggccgugaacgcccugaucaacgaccagcugaugaugaagaaccaccugagagacaucaugggcauccccuacugcaacuacagcaaguucugcuaccugaacaacaccaccaccggcagaaccagccugcccagaugcugccugaucagcaacggcagcuaccugaacgagacccacuucagcgacgacaucgagcagcaggccgacaacaugaucaccgagaugcugcagaaggaguacauggacagacagggcaagaccccccugggccugguggaccuguucguguucagcaccagcuucuaccugaucaccaucuuccugcaccuggugaagauccccacccacagacacaucgugggcaagcccugccccaagccccacagacugaaccacaugggcaucugcagcugcggccuguacaagcagcccggcgugcccgugagauggaagagaugaggacuaguuauaagacugacuagcccgaugggccucccaacgggcccuccuccccuccuugcaccgagauuaauaaaaaaaaaaaaaaaaaaaaaaaaaaaaaaaaaaaaaaaaaaaaaaaaaaaaaaaaaaaaaaaaaaaaaaaaaaaaaaaaaaaaaaaaaaaaaaaaaaaa

SEQ ID NO: 41548 - RNA, 1662 nt, Artificial Sequence; identical to SEQ ID NO: 41542
  mRNA product Design i-3 (A100) comprising derived and/or modified sequence from LASV(Pinneo-NIG-1969;Clade I)__AIT17836__GPCmut12 (opt4)

SEQ ID NO: 41549 - RNA, 1662 nt, Artificial Sequence
  mRNA product Design i-3 (A100) comprising derived and/or modified sequence from LASV(ISTH0009-NIG-2011;Clade II)__AIT17404__GPCmut12 (opt4)
aggagaaagcuuaccaugggccagaucaucaccuucuuccaggaggugccccacgugaucgaggaggugaugaacaucgugcugaucgcccugagccugcuggccauccugaagggcaucuacaacguggccaccugcggccuguucggccuggugagcuuccugcugcugugcggcagaagcugcagcaccaccuacaagggcguguacgagcugcagacccuggagcuggacauggccagccugaacaugugcaugccccugagcugcaccaagaacaacagccaccacuacaucauggugggcaacgagaccggccuggagcugacccugaccaacaccagcaucaucaaccacaaguucugcaaccugagcgacgcccacaagaagaaccuguacgaccacgcccugaugagcaucaucagcaccuuccaccugagcauccccaacuucaaccaguacgaggccaugagcugcgacuucaacggcggcaagaucagcgugcaguacaaccugagccacgccuacgccguggacgccgccaaccacugcggcaccaucgccaacggcgugcugcagaccuucaugagaauggccuggggcggcagcuacaucgcccuggacagcggcaagggcagcugggacugcaucaugaccagcuaccaguaccugaucauccagaacaccaccugggaggaccacugccaguucagcagacccagccccaucggcuaccugggccugcugagccagagaaccagagacaucuacaucagcagaagacugcugggcaccuucaccuggacccugagcgacagcgagggcaacgagacccccggcggcuacugccugaccagauggaugcugaucgaggccgagcugaagugcuucggcaacaccgccguggccaagugcaacgagaagcacgacgaggaguucugcgacaugcugagacuguucgacuucugcaagcaggccaucagaagacugaagaccgaggcccagaugagcauccagcugaucaacaaggccgugaacgcccugaucaacgaccagcugaucaugaagaaccaccugagagacaucaugggcauccccuacugcaacuacagcaaguacugcuaccugaaccacaccgugaccggcaagaccagccugcccagaugcugccuggugagcaacggcagcuaccugaacgagacccacuucagcgacgacaucgagcagcaggccgacaacaugaucaccgagcugcugcagaaggaguacauggacagacagggcaagaccccccugggccugguggaccuguucguguucagcaccagcuucuaccugaucagcaucuuccugcaccugaucaagauccccacccacagacacaucaccggcaagcccugccccaagccccacagacugaaccacaugggcaucugcagcugcggccuguacaagcaccccggcgugcccgugaaguggaagagaugaggacuaguuauaagacugacuagcccgaugggccucccaacgggcccuccuccccuccuugcaccgagauuaauaaaaaaaaaaaaaaaaaaaaaaaaaaaaaaaaaaaaaaaaaaaaaaaaaaaaaaaaaaaaaaaaaaaaaaaaaaaaaaaaaaaaaaaaaaaaaaaaaaaa

SEQ ID NO: 41550 - RNA, 1662 nt, Artificial Sequence
  mRNA product Design i-3 (A100) comprising derived and/or modified sequence from LASV(ISTH2010-NIG-2012;Clade II)__AIT17482__GPCmut12 (opt4)
aggagaaagcuuaccaugggccagaucaucaccuucuuccaggaggugccccacgugaucgaggaggugaugaacaucgugcugaucgcccugagccugcuggccauccugaagggcaucuacaacguggccaccugcggccuguucggccuggugagcuuccugcugcugugcggcagaagcugcagcaccaccuacaagggcguguacgagcugcagacccuggagcuggacauggccagccugaacaugugcaugccccugagcugcaccaagaacaacagccaccacuacaucauggugggcaacgagaccggccuggagcugacccugaccaacaccagcaucaucaaccacaaguucugcaaccugagcgacgcccacaagaagaaccuguacgaccacgcccugaugagcaucaucagcaccuuccaccugagcauccccaacuucaaccaguacgaggccaugagcugcgacuucaacggcggcaagaucagcgugcaguacaaccugagccacgccuacgccguggacgccgccaaccacugcggcaccaucgccaacggcgugcugcagaccuucaugagaauggccuggggcggcagcuacaucgcccuggacagcggcaagggcagcugggacugcaucaugaccagcuaccaguaccugaucauccagaacaucaccugggaggaccacugccaguucagcagacccagccccaucggcuaccugggccugcugagccagagaaccagagacaucuacaucagcagaagacugcugggcaccuucaccuggacccugagcgacagcgagggcaacgagacccccggcggcuacugccugaccagauggaugcugaucgaggccgagcugaagugcuucggcaacaccgccguggccaagugcaacgagaagcacgacgaggaguucugcgacaugcugagacuguucgacuucugcaagcaggccaucagaagacugaagaccgaggcccagaugagcauccagcugaucaacaaggccgugaacgcccugaucaacgaccagcugaucaugaagaaccaccugagagacaucaugggcauccccuacugcaacuacagcaaguacugcuaccugaaccacaccgugaccggcaagaccagccugcccagaugcugccuggugagcaacggcagcuaccugaacgagacccacuucagcgacgacaucgagcagcaggccgacaacaugaucaccgagcugcugcagaaggaguacaucgacagacagggcaagaccccccugggccugguggaccuguucguguucagcaccagcuucuaccugaucagcaucuuccugcaccuggugaagauccccacccacagacacguggugggcaagcccugccccaagccccacagacugaaccacaugggcaucugcagcugcggccuguacaagcaccccggcgugcccgugaaguggaagagaugaggacuaguuauaagacugacuagcccgaugggccucccaacgggcccuccuccccuccuugcaccgagauuaauaaaaaaaaaaaaaaaaaaaaaaaaaaaaaaaaaaaaaaaaaaaaaaaaaaaaaaaaaaaaaaaaaaaaaaaaaaaaaaaaaaaaaaaaaaaaaaaaaaaa

SEQ ID NO: 41551 - RNA, 1662 nt, Artificial Sequence
  mRNA product Design i-3 (A100) comprising derived and/or modified sequence from LASV(Lassa virus/H.sapiens-wt/NGA/2015/ISTH_0543;Clade II)__AVO03639__GPCmut12 (opt4)
aggagaaagcuuaccaugggccagaucaucaccuucuuccaggaggugccccacgugaucgaggaggugaugaacaucgugcugaucgcccugagccugcuggccauccugaagggcaucuacaacguggccaccugcggccuguucggccuggugagcuuccugcugcugugcggcagaagcugcagcaccaccuacaagggcguguacgagcugcagacccuggagcuggacauggccaaccugaacaugugcaugccccugagcugcaccaagaacaacagccaccacuacaucauggugggcaacgagaccggccuggagcugacccugaccaacaccagcaucaucaaccacaaguucugcaaccugagcgacgcccacaagaagaaccuguacgaccacgcccugaugagcaucaucagcaccuuccaccugagcauccccaacuucaaccaguacgaggccaugagcugcgacuucaacggcggcaagaucagcgugcaguacaaccugagccacaccuacgccguggacgccgccaaccacugcggcaccaucgccaacggcgugcugcagaccuucaugagaauggccuggggcggcagcuacaucgcccuggacagcggcaagggcagcugggacugcaucaugaccagcuaccaguaccuggugauccagaacaccaccugggaggaccacugccaguucagcagacccagccccaucggcuaccugggccugcugagccagagaaccagagacaucuacaucagcagaagacugcugggcaccuucaccuggacccugagcgacagcgagggcaacgagacccccggcggcuacugccugaccagauggaugcugaucgaggccgagcugaagugcuucggcaacaccgccguggccaagugcaacgagaagcacgacgaggaguucugcgacaugcugagacuguucgacuucugcaagcaggccaucagaagacugaagaccgaggcccagaugagcauccagcugaucaacaaggccgugaacgcccugaucaacgaccagcugaucaugaagaaccaccugagagacaucaugggcauccccuacugcaacuacagcaaguacugcuaccugaaccacaccgugaccggcaagaccagccugcccagaugcugccuggugagcaacggcagcuaccugaacgagacccacuucagcgacgacaucgagcagcaggccgacaacaugaucaccgagcugcugcagaaggaguacaucgacagacagggcaagaccccccugggccugguggaccuguucguguucagcaccagcuucuaccugaucagcaucuuccugcaccuggugaagauccccacccacagacacaucaccggcaagcccugccccaagccccacagacugaaccacaugggcaucugcagcugcggccuguacaagcaccccggcgugcccgugaaguggaagagaugaggacuaguuauaagacugacuagcccgaugggccucccaacgggcccuccuccccuccuugcaccgagauuaauaaaaaaaaaaaaaaaaaaaaaaaaaaaaaaaaaaaaaaaaaaaaaaaaaaaaaaaaaaaaaaaaaaaaaaaaaaaaaaaaaaaaaaaaaaaaaaaaaaaa

SEQ ID NO: 41552 - RNA, 1662 nt, Artificial Sequence
  mRNA product Design i-3 (A100) comprising derived and/or modified sequence from LASV(Lassa virus/H.sapiens-wt/NGA/2016/ISTH_0009;Clade II)__AVO03571__GPCmut12 (opt4)
aggagaaagcuuaccaugggccagaucaucaccuucuuccaggaggugccccacgugaucgaggaggugaugaacaucgugcugaucgcccugagccugcuggccauccugaagggcaucuacaacguggccaccugcggccugcugggccuggugagcuuccugcugcugugcggcagaagcugcagcaccaccuacaagggcguguacgagcugcagacccuggagcuggacauggccagccugaacaugugcaugccccugagcugcaccaagaacaacagccaccacuacaucauggugggcaacgagaccggccuggagcugacccugaccaacaccagcaucaucaaccacaaguucugcaaccugagcgacgcccacaagaagaaccuguacgaccacgcccugaugagcaucaucagcaccuuccaccugagcauccccaacuucaaccaguacgaggccaugagcugcgacuucaacggcggcagaaucagcgugcaguacaaccugagccacagcuacgccguggacgccgccaaccacugcggcaccaucgccaacggcgugcugcagaccuucaugagaauggccuggggcggcagcuacaucgcccuggacagcggcaagggcagcugggacugcaucaugaccagcuaccaguaccugaucauccagaacaccaccugggaggaccacugccaguucagcagacccagccccaucggcuaccugggccugcugagccagagaaccagagacaucuacaucagcagaagacugcugggcaccuucaccuggacccugagcgacagcgagggcaacgagacccccggcggcuacugccugaccagauggaugcugaucgaggccgagcugaagugcuucggcaacaccgccguggccaagugcaacgagaagcacgacgaggaguucugcgacaugcugagacuguucgacuucugcaagcaggccaucagaagacugaagaccgaggcccagaugagcauccagcugaucaacaaggccgugaacgcccugaucaacgaccagcugaucaugaagaaccaccugagagacaucaugggcauccccuacugcaacuacagcaaguacugcuaccugaaccacaccgugaccggcaagaccagccugcccagaugcugccuggugagcaacggcagcuaccugaacgagacccacuucagcgacgacaucgagcagcaggccgacaacaugaucaccgagcugcugcagaaggaguacaucgacagacagggcaagaccccccugggccugguggaccuguucguguucagcaccagcuucuaccugaucagcaucuuccugcaccuggugaagauccccacccacagacacaucaccggcaagcccugccccaagccccacagacugaaccacaugggcaucugcagcugcggccuguacaaccaccccggcgugcccgugaaguggaagagaugaggacuaguuauaagacugacuagcccgaugggccucccaacgggcccuccuccccuccuugcaccgagauuaauaaaaaaaaaaaaaaaaaaaaaaaaaaaaaaaaaaaaaaaaaaaaaaaaaaaaaaaaaaaaaaaaaaaaaaaaaaaaaaaaaaaaaaaaaaaaaaaaaaaa

SEQ ID NO: 41553 - RNA, 1662 nt, Artificial Sequence
  mRNA product Design i-3 (A100) comprising derived and/or modified sequence from LASV(Lassa virus/H.sapiens-wt/NGA/2016/ISTH_0017;Clade II)__AVO03567__GPCmut12 (opt4)
aggagaaagcuuaccaugggccagaucaucaccuucuuccaggaggugccccacgugaucgaggaggugaugaacaucgugcugaucgcccugagccugcuggccauccugaagggcaucuacaacguggccaccugcggccuguucggccuggugagcuuccugcugcugugcggcagaagcugcagcaccaccuacaagggcguguacgagcugcagacccuggagcuggacauggccagccugaacaugugcaugccccugagcugcaccaagaacaacagccaccacuacaucauggugggcaacgagaccggccuggagcugacccugaccaacaccagcaucaucaaccacaaguucugcaaccugagcgacgcccacaagaagaaccuguacgaccacgcccugaugagcaucaucagcaccuuccaccugagcauccccaacuucaaccaguacgaggccaugagcugcgacuucaacggcggcaagaucagcgugcaguacaaccugagccacaccuacgccaucgacgccgccaaccacugcggcaccaucgccaacggcgugcugcagaccuucaugagaauggccuggggcggcagcuacaucgcccuggacagcggcaagggcagcugggacugcaucaugaccagcuaccaguaccugaucauccagaacaccaccugggaggaccacugccaguucagcagacccagccccaucggcuaccugggccugcugagccagagaaccagagacaucuacaucagcagaagacugcugggcaccuucaccuggacccugagcgacagcgagggcaacgagacccccggcggcuacugccugaccagauggaugcugaucgaggccgagcugaagugcuucggcaacaccgccguggccaagugcaacgagaagcacgacgaggaguucugcgacaugcugagacuguucgacuucugcaagcaggccaucagaagacugaagaccgaggcccagaugagcauccagcugaucaacaaggccgugaacgcccugaucaacgaccagcugaucaugaagaaccaccugagagacaucaugggcauccccuacugcaacuacagcaaguacugcuaccugaaccacaccgugaccggcaagaccagccugcccagaugcugccuggugagcaacggcagcuaccugaacgagacccacuucagcgacgacaucgagcagcaggccgacaacaugaucaccgagcugcugcagaaggaguacauggacagacagggcaagaccccccugggccugguggaccuguucguguucagcaccagcuucuaccugaucagcaucuuccugcaccuggugagaauccccacccacagacacgugaucggcaagcccugccccaagccccacagacugaaccacaugggcaucugcagcugcggccuguacaagcaccccggcgugcccgugaaguggaagagaugaggacuaguuauaagacugacuagcccgaugggccucccaacgggcccuccuccccuccuugcaccgagauuaauaaaaaaaaaaaaaaaaaaaaaaaaaaaaaaaaaaaaaaaaaaaaaaaaaaaaaaaaaaaaaaaaaaaaaaaaaaaaaaaaaaaaaaaaaaaaaaaaaaaa

SEQ ID NO: 41554 - RNA, 1662 nt, Artificial Sequence
  mRNA product Design i-3 (A100) comprising derived and/or modified sequence from LASV(Lassa virus/H.sapiens-wt/NGA/2018/ISTH_0959;Clade II)__AVV65099__GPCmut12 (opt4)
aggagaaagcuuaccaugggccagaucaucaccuucuuccaggaggugccccacgugaucgaggaggugaugaacaucgugcugaucgcccugagccugcuggccauccugaagggcaucuacaacguggugaccugcggccuguucggccuggugagcuuccugcugcugugcggcagaagcugcagcaccaccuacaagggcguguacgagcugcagacccuggagcuggacauggccagccugaacaugugcaugccccugagcugcaccaagaacaacagccaccacuacaucauggugggcaacgagaccggccuggagcugacccugaccaacaccagcaucaucaaccacaaguucugcaaccugagcgacgcccacaagaagaaccuguacgaccacgcccugaugagcaucaucagcaccuuccaccugagcauccccaacuucaaccaguacgaggccaugagcugcgacuucaacggcggcaagaucagcgugcaguacaaccugagccacgccuacgccaucgacgccgccaaccacugcggcaccaucgccaacggcgugcugcagaccuucaugagaauggccuggggcggcagcuacaucgcccuggacagcggcaagggcagcugggacugcaucaugaccagcuaccaguaccugaucauccagaacaccaccugggaggaccacugccaguucagcagacccagccccaucggcuaccugggccugcugagccagagaaccagagacaucuacaucagcagaagacugcugggcaccuucaccuggacccugagcgacagcgagggcaacgagacccccggcggcuacugccugaccagauggaugcugaucgaggccgagcugaagugcuucggcaacaccgccguggccaagugcaacgagaagcacgacgaggaguucugcgacaugcugagacuguucgacuucugcaagcaggccaucagaagacugaagaccgaggcccagaugagcauccagcugaucaacaaggccgugaacgcccugaucaacgaccagcugaucaugaagaaccaccugagagacaucaugggcauccccuacugcaacuacagcaaguacugcuaccugaaccacaccgugaccggcaagaccagccugcccagaugcugccuggugagcaacggcagcuaccugaacgagacccacuucagcgacgacaucgagcagcaggccgacaacaugaucaccgagcugcugcagaaggaguacaucgacagacagggcaagaccccccugggccugguggaccuguucguguucagcaccagcuucuaccugaucagcaucuuccugcaccuggugaagauccccacccacagacacgugaucggcaagcccugccccaagccccacagacugaaccacaugggcaucugcagcugcggccuguacaagcaccccggcgugcccgugaaguggaagagaugaggacuaguuauaagacugacuagcccgaugggccucccaacgggcccuccuccccuccuugcaccgagauuaauaaaaaaaaaaaaaaaaaaaaaaaaaaaaaaaaaaaaaaaaaaaaaaaaaaaaaaaaaaaaaaaaaaaaaaaaaaaaaaaaaaaaaaaaaaaaaaaaaaaa

SEQ ID NO: 41555 - RNA, 1662 nt, Artificial Sequence
  mRNA product Design i-3 (A100) comprising derived and/or modified sequence from LASV(LASV003-NIG-2008;Clade II)__AIT17580__GPCmut12 (opt4)
aggagaaagcuuaccaugggccagaucaucaccuucuuccaggaggugccccacgugaucgaggaggugaugaacaucgugcugaucgcccugagccugcuggccauccugaagggcaucuacaacguggccaccugcggccuguucggccuggugagcuuccugcugcugugcggcagaagcugcagcaccaccuacaagggcguguacgagcugcagacccuggagcuggacauggccagccugaacaugugcaugccccugagcugcaccaagaacaacagccaccacuacaucauggugggcaacgagaccggccuggagcugacccugaccaacaccagcaucaucaaccacaaguucugcaaccugagcgacgcccacaagaagaaccuguacgaccacgcccugaugagcaucaucagcaccuuccaccugagcauccccaacuucaaccaguacgaggccaugagcugcgacuucaacggcggcaagaucagcgugcaguacaaccugagccacaccuacgccguggacgccgccaaccacugcggcaccaucgccaacggcgugcugcagaccuucaugagaauggccuggggcggcagcuacaucgcccuggacagcggcaagggcagcugggacugcaucaugaccagcuaccaguaccugaucauccagaacaccaccugggaggaccacugccaguucagcagacccagccccaucggcuaccugggccugcugagccagagaaccagagacaucuacaucagcagaagacugcugggcaccuucaccuggacccugagcgacagcgagagcaacgagacccccggcggcuacugccugaccagauggaugcugaucgaggccgagcugaagugcuucggcaacaccgccguggccaagugcaacgagaagcacgacgaggaguucugcgacaugcugagacuguucgacuucugcaagcaggccaucagaagacugaaggccgaggcccagaugagcauccagcugaucaacaaggccgugaacgcccugaucaacgaccagcugaucaugaagaaccaccugagagacaucaugggcauccccuacugcaacuacagcaaguacugcuaccugaaccacaccgugaccggcagaaccagccugcccagaugcugccuggugagcaacggcagcuaccugaacgagacccacuucagcgacgacaucgagcagcaggccgacaacaugaucaccgagcugcugcagaaggaguacauggacagacagggcaagaccccccugggccugguggaccuguucguguucagcaccagcuucuaccugaucagcaucuuccugcaccuggugaagauccccacccacagacacgugaucggcaagcccugccccaagccccacagacugaaccacaugggcaucugcagcugcggccuguacaagcaccccggcgugcccgugaaguggaagagaugaggacuaguuauaagacugacuagcccgaugggccucccaacgggcccuccuccccuccuugcaccgagauuaauaaaaaaaaaaaaaaaaaaaaaaaaaaaaaaaaaaaaaaaaaaaaaaaaaaaaaaaaaaaaaaaaaaaaaaaaaaaaaaaaaaaaaaaaaaaaaaaaaaaa

SEQ ID NO: 41556 - RNA, 1662 nt, Artificial Sequence
  mRNA product Design i-3 (A100) comprising derived and/or modified sequence from LASV(LASV035-NIG-2009;Clade II)__AIT17588__GPCmut12 (opt4)
aggagaaagcuuaccaugggccagaucaucaccuucuuccaggaggugccccacgugaucgaggaggugaugaacaucgugcugaucgcccugagccugcuggccauccugaagggcaucuacaacguggccaccugcggccuguucggccuggugagcuuccugcugcugugcggcagaagcugcagcaccaccuacaagggcguguacgagcugcagacccuggagcuggacauggccagccugaacaugugcaugccccugagcugcaccaagaacaacagccaccacuacaucauggugggcaacgagaccggccuggagcugacccugaccaacaccagcaucaucaaccacaaguucugcaaccugagcgacgcccacaagaagaaccuguacgaccacgcccugaugagcaucaucagcaccuuccaccugagcauccccaacuucaaccaguacgaggccaugagcugcgacuucaacggcggcaagaucagcgugcaguacaaccugagccacgccuacgccguggacgccgccaaccacugcggcaccaucgccaacggcgugcugcagaccuucaugagaauggccuggggcggcagcuacaucgcccuggacagcggcaagggcagcugggacugcaucaugaccagcuaccaguaccugaucauccagaacaccaccugggaggaccacugccaguucagcagacccagccccaucggcuaccugggccugcugagccagagaaccagagacaucuacaucagcagaagacugcugggcaccuucaccuggacccugagcgacagcgagggcaacgagacccccggcggcuacugccugaccagauggaugcugaucgaggccgagcugaagugcuucggcaacaccgccguggccaagugcaacgagaagcacgacgaggaguucugcgacaugcugagacuguucgacuucugcaagcaggccaucagaagacugaaggccgaggcccagaugagcauccagcugaucaacaaggccgugaacgcccugaucaacgaccagcugaucaugaagaaccaccugagagacaucaugggcauccccuacugcaacuacagcaaguacugcuaccugaaccacaccgugaccggcaagaccagccugcccagaugcugccuggugagcaacggcagcuaccugaacgagacccacuucagcgacgacaucgagcagcaggccgacaacaugaucaccgagcugcugcagaaggaguacaucgacagacagggcaagaccccccugggccugguggaccuguucguguucagcaccagcuucuaccugaucagcaucuuccugcaccuggugaagauccccacccacagacacgugaucggcaagcccugccccaagccccacagacugaaccacaugggcaucugcagcugcggccuguacaagcaccccggcgugcccgugaaguggaagagaugaggacuaguuauaagacugacuagcccgaugggccucccaacgggcccuccuccccuccuugcaccgagauuaauaaaaaaaaaaaaaaaaaaaaaaaaaaaaaaaaaaaaaaaaaaaaaaaaaaaaaaaaaaaaaaaaaaaaaaaaaaaaaaaaaaaaaaaaaaaaaaaaaaaa

SEQ ID NO: 41557 - RNA, 1662 nt, Artificial Sequence
  mRNA product Design i-3 (A100) comprising derived and/or modified sequence from LASV(LASV1000-NIG-2009;Clade II)__AIT17782__GPCmut12 (opt4)
aggagaaagcuuaccaugggccagaucaucaccuucuuccaggaggugccccacgugaucgaggaggugaugaacaucgugcugaucgcccugagccugcuggccauccugaagggcaucuacaacguggccaccugcggccuguucggccuggugagcuuccugcugcugugcggcagaagcugcagcaccaccuacaagggcguguacgagcugcagacccuggagcuggacauggccagccugaacaugugcaugccccugagcugcaccaagaacaacagccaccacuacaucauggugggcaacgagaccggccuggagcugacccugaccaacaccagcaucaucaaccacaaguucugcaaccugagcgacgcccacaagaagaaccuguacgaccacgcccugaugagcaucaucagcaccuuccaccugagcauccccaacuucaaccaguacgaggccaugagcugcgacuucaacggcggcaagaucagcgugcaguacaaccugagccacaccuacgccguggacgccgccaaccacugcggcaccaucgccaacggcgugcugcagaccuucaugagaauggccuggggcggcagcuacaucgcccuggacagcggcaagggcagcugggacugcaucaugaccagcuaccaguaccugaucauccagaacaccaccugggaggaccacugccaguucagcagacccagccccaucggcuaccugggccugcugagccagagaaccagagacaucuacaucagcagaagacugcugggcaccuucaccuggacccugagcgacagcgagggcaacgagacccccggcggcuacugccugaccagauggaugcugaucgaggccgagcugaagugcuucggcaacaccgccguggccaagugcaacgagaagcacgacgaggaguucugcgacaugcugagacuguucgacuucugcaagcaggccaucaagagacugaagaccgaggcccagaugagcauccagcugaucaacaaggccgugaacgcccugaucaacgaccagcugaucaugaagaaccaccugagagacaucaugggcauccccuacugcaacuacagcaaguacugcuaccugaaccacaccgugaccggcaagaccagccugcccagaugcugccuggugagcaacggcagcuaccugaacgagacccacuucagcgacgacaucgagcagcaggccgacaacaugaucaccgagcugcugcagaaggaguacaucgacagacagggcaagaccccccugggccugguggaccuguucguguucagcaccagcuucuaccugaucagcaucuuccugcaccuggugaagauccccacccacagacacguggugggcaagcccugccccaagccccacagacugaaccacaugggcaucugcagcugcggccuguacaagcaccccggcgugcccgugaaguggaagagaugaggacuaguuauaagacugacuagcccgaugggccucccaacgggcccuccuccccuccuugcaccgagauuaauaaaaaaaaaaaaaaaaaaaaaaaaaaaaaaaaaaaaaaaaaaaaaaaaaaaaaaaaaaaaaaaaaaaaaaaaaaaaaaaaaaaaaaaaaaaaaaaaaaaa

SEQ ID NO: 41558 - RNA, 1662 nt, Artificial Sequence
  mRNA product Design i-3 (A100) comprising derived and/or modified sequence from LASV(LASV221-NIG-2010;Clade II)__AIT17624__GPCmut12 (opt4)
aggagaaagcuuaccaugggccagaucaucaccuucuuccaggaggugccccacgugaucgaggaggugaugaacaucgugcugaucgcccugagccugcuggccauccugaagggcaucuacaacguggccaccugcggccuguucggccuggugagcuuccugcugcugugcggcagaagcugcagcaccaccuacaagggcguguacgagcugcagacccuggagcuggacauggccagccugaacaugugcaugccccugagcugcaccaagaacaacagccaccacuacaucauggugggcaacgagaccggccuggagcugacccugaccaacaccagcaucaucaaccacaaguucugcaaccugagcgacgcccacaagaagaaccuguacgaccacgcccugaugagcaucaucagcaccuuccaccugagcauccccaacuucaaccaguacgaggccaugagcugcgacuucaacggcggcaagaucagcgugcaguacaaccugagccacaccuacgccaucgacgccgccaaccacugcggcaccaucgccaacggcgugcugcagaccuucaugagaauggccuggggcggcagcuacaucgcccuggacagcggcaagggcagcugggacugcaucaugaccagcuaccaguaccugaucauccagaacaccaccugggaggaccacugccaguucagcagacccagccccaucggcuaccugggccugcugagccagagaaccagagacaucuacaucagcagaagacugcugggcaccuucaccuggacccugagcgacagcgagggcaacgagacccccggcggcuacugccugaccagauggaugcugaucgaggccgagcugaagugcuucggcaacaccgccguggccaagugcaacgagaagcacgacgaggaguucugcgacaugcugagacuguucgacuucugcaagcaggccaucagaagacugaagaccgaggcccagaugagcauccagcugaucaacaaggccgugaacgcccugaucaacgaccagcugaucaugaagaaccaccugagagacaucaugggcauccccuacugcaacuacagcaaguacugcuaccugaaccacaccgugaccggcaagaccagccugcccagaugcugccuggugagcaacggcagcuaccugaacgagacccacuucagcgacgacaucgagcagcaggccgacaacaugaucaccgagaugcugcagaaggaguacauggacagacagggcaagaccccccugggccugguggaccuguucguguucagcaccagcuucuaccugaucagcaucuuccugcaccuggugaagauccccacccacagacacgugaucggcaagcccugccccaagccccacagacugaaccacaugggcaucugcagcugcggccuguacaagcaccccggcgugcccgugaaguggaagagaugaggacuaguuauaagacugacuagcccgaugggccucccaacgggcccuccuccccuccuugcaccgagauuaauaaaaaaaaaaaaaaaaaaaaaaaaaaaaaaaaaaaaaaaaaaaaaaaaaaaaaaaaaaaaaaaaaaaaaaaaaaaaaaaaaaaaaaaaaaaaaaaaaaaa

SEQ ID NO: 41559 - RNA, 1662 nt, Artificial Sequence
  mRNA product Design i-3 (A100) comprising derived and/or modified sequence from LASV(LASV237-NIG-2010;Clade II)__AIT17638__GPCmut12 (opt4)
aggagaaagcuuaccaugggccagaucaucaccuucuuccaggaggugccccacgugaucgaggaggugaugaacaucgugcugaucgcccugagccugcuggccauccugaagggcaucuacaacguggccaccugcggccuguucggccuggugagcuuccugcugcugugcggcagaagcugcagcaccaccuacaagggcguguacgagcugcagacccuggagcuggacauggccagccugaacaugugcaugccccugagcugcaccaagaacaacagccaccacuacaucauggugggcaacgagaccggccuggagcugacccugaccaacaccagcaucaucaaccacaaguucugcaaccugagcgacgcccacaagaaggaccuguacgaccacgcccugaugagcaucaucagcaccuuccaccugagcauccccaacuucaaccaguacgaggccaugagcugcgacuucaacggcggcaagaucagcgugcaguacaaccugagccacaccuacgccguggacgccgccaaccacugcggcaccaucgccaacggcgugcugcagaccuucaugagaauggccuggggcggcagcuacaucgcccuggacagcggcaagggcagcugggacugcaucaugaccagcuaccaguaccugaucauccagaacaccaccugggaggaccacugccaguucagcagacccagccccaucggcuaccugggccugcugagccagagaaccagagacaucuacaucagcagaagacugcugggcaccuucaccuggacccugagcgacagcgagggcaacgagacccccggcggcuacugccugaccagauggaugcugaucgaggccgagcugaagugcuucggcaacaccgccguggccaagugcaacgagaagcacgacgaggaguucugcgacaugcugagacuguucgacuucugcaagcaggccaucagaagacugaagaccgaggcccagaugagcauccagcugaucaacaaggccgugaacgcccugaucaacgaccagcugaucaugaagaaccaccugagagacaucaugggcauccccuacugcaacuacagcaaguacugcuaccugaaccacaccgugaccggcaagaccagccugcccagaugcugccuggugagcaacggcagcuaccugaacgagacccacuucagcgacgacaucgagcagcaggccgacaacaugaucaccgagcugcugcagaaggaguacauggacagacagggcaagaccccccugggccugguggaccuguucguguucagcaccagcuucuaccugaucagcaucuuccugcaccugaucaagauccccacccacagacacaucaccggcaagcccugccccaagccccacagacugaaccacaugggcaucugcagcugcggccuguacaagcaccccggcgugcccgugaaguggaagagaugaggacuaguuauaagacugacuagcccgaugggccucccaacgggcccuccuccccuccuugcaccgagauuaauaaaaaaaaaaaaaaaaaaaaaaaaaaaaaaaaaaaaaaaaaaaaaaaaaaaaaaaaaaaaaaaaaaaaaaaaaaaaaaaaaaaaaaaaaaaaaaaaaaaa

SEQ ID NO: 41560 - RNA, 1662 nt, Artificial Sequence
  mRNA product Design i-3 (A100) comprising derived and/or modified sequence from LASV(LASV253-NIG-2011;Clade II)__AIT17670__GPCmut12 (opt4)
aggagaaagcuuaccaugggccagaucaucaccuucuuccaggaggugccccacgugaucgaggaggugaugaacaucgugcugaucgcccugagccugcuggccauccugaagggcaucuacaacguggccaccugcggccuguucggccuggugagcuuccugcugcugugcggcagaagcugcagcaccaccuacaagggcguguacgagcugcagacccuggagcuggacauggccagccugaacaugugcaugccccugagcugcaccaagaacaacagccaccacuacaucauggugggcaacgagaccggccuggagcugacccugaccaacaccagcaucaucaaccacaaguucugcaaccugagcgacgcccacaagaagaaccuguacgaccacgcccugaugagcaucaucagcaccuuccaccugagcauccccaacuucaaccaguacgaggccaugagcugcgacuucaacggcggcaagaucagcgugcaguacaaccugagccacaccuacgccguggacgccgccaaccacugcggcaccaucgccaacggcgugcugcagaccuucaugagaauggccuggggcggcagcuacaucgcccuggacagcggcaagggcagcugggacugcaucaugaccagcuaccaguaccugaucauccagaacaccaccugggaggaccacugccaguucagcagacccagccccaucggcuaccugggccugcugagccagagaaccagagacaucuacaucagcagaagacugcugggcaccuucaccuggacccugagcgacagcgagggcaacgagacccccggcggcuacugccugaccagauggaugcugaucgaggccgagcugaagugcuucggcaacaccgccguggccaagugcaacgagaagcacgacgaggaguucugcgacaugcugagacuguucgacuucugcaagcaggccaucagaagacugaaggccgaggcccagaugagcauccagcugaucaacaaggccgugaacgcccugaucaacgaccagcugaucaugaagaaccaccugagagacaucaugggcauccccuacugcaacuacagcaaguacugcuaccugaaccacaccgugaccggcagaaccagccugcccagaugcugccuggugagcaacggcagcuaccugaacgagacccacuucagcgacgacaucgagcagcaggccgacaacaugaucaccgagcugcugcagaaggaguacaucgacagacagggcaagaccccccugggccugguggaccuguucguguucagcaccagcuucuaccugaucagcaucuuccugcaccuggugaagauccccacccacagacacaucaucggcaagcccugccccaagccccacagacugaaccacaugggcaucugcagcugcggccuguacaagcaccccggcgugcccgugaaguggaagagaugaggacuaguuauaagacugacuagcccgaugggccucccaacgggcccuccuccccuccuugcaccgagauuaauaaaaaaaaaaaaaaaaaaaaaaaaaaaaaaaaaaaaaaaaaaaaaaaaaaaaaaaaaaaaaaaaaaaaaaaaaaaaaaaaaaaaaaaaaaaaaaaaaaaa

SEQ ID NO: 41561 - RNA, 1662 nt, Artificial Sequence
  mRNA product Design i-3 (A100) comprising derived and/or modified sequence from LASV(LASV254-NIG-2011;Clade II)__AIT17674__GPCmut12 (opt4)
aggagaaagcuuaccaugggccagaucaucaccuucuuccaggaggugccccacgugaucgaggaggugaugaacaucgugcugaucgcccugagccugcuggccauccugaagggcaucuacaacguggccaccugcggccuguucggccuggugagcuuccugcugcugugcggcagaagcugcagcaccaccuacaagggcguguacgagcugcagacccuggagcuggacaugaccaaccugaacaugugcaugccccugagcugcaccaagaacaacagccaccacuacaucauggugggcaacgagaccggccuggagcugacccugaccaacaccagcaucaucaaccacaaguucugcaaccugagcgacgcccacaagaagaaccuguacaaccacgcccugaugagcaucaucagcaccuuccaccugagcauccccaacuucaaccaguacgaggccaugagcugcgacuucaacggcggcaagaucagcgugcaguacaaccugagccacagcuacgccguggacgccgccaaccacugcggcaccaucgccaacggcgugcugcagaccuucaugagaauggccuggggcggcagcuacaucgcccuggacagcggcaagggcaacugggacugcaucaugaccagcuaccaguaccugaucauccagaacaccaccugggaggaccacugccaguucagcagacccagccccaucggcuaccugggccugcugagccagagaaccagagacaucuacaucagcagaagacugcugggcaccuucaccuggacccugagcgacagcgagggcaacgagacccccggcggcuacugccugaccagauggaugcugaucgaggccgagcugaagugcuucggcaacaccgccguggccaagugcaacgagaagcacgacgaggaguucugcgacaugcugagacuguucgacuucugcaagcaggccaucagaagacugaagaccgaggcccaggccaacauccagcugaucaacaaggccgugaacgcccugaucaacgaccagcugaucaugaagaaccaccugagagacaucaugggcauccccuacugcaacuacagcaaguacugcuaccugaaccacaccgugaccggcaagaccagccugcccagaugcugccuggugagcaacggcagcuaccugaacgagacccacuucagcgacgacaucgagcagcaggccgacaacaugaucaccgagcugcugcagaaggaguacauggacagacagggcaagaccccccugggccugguggaccuguucguguucagcaccagcuucuaccugaucagcaucuuccugcaccuggugaagauccccacccacagacacgugaucggcaagcccugccccaagccccacagacugaaccacaugggcaucugcagcugcggccuguacaagcaccccggcgugcccgugaaguggaagagaugaggacuaguuauaagacugacuagcccgaugggccucccaacgggcccuccuccccuccuugcaccgagauuaauaaaaaaaaaaaaaaaaaaaaaaaaaaaaaaaaaaaaaaaaaaaaaaaaaaaaaaaaaaaaaaaaaaaaaaaaaaaaaaaaaaaaaaaaaaaaaaaaaaaa

SEQ ID NO: 41562 - RNA, 1662 nt, Artificial Sequence
  mRNA product Design i-3 (A100) comprising derived and/or modified sequence from LASV(Nig08-A19;Clade III)__ADU56618__GPCmut12 (opt4)
aggagaaagcuuaccaugggccagaucgugaccuucuuccaggaggugccccacgugaucgaggaggugaugaacaucgugcugaucgcccugagcauccuggccauccugaagggccuguacaacaucgccaccugcggccugaucggccuggugaccuuccugcugcugagcggcagaagcugcagcaugaccuacaagggcguguacgagcugcagacccuggagcugaacaugaacacccugaacaugugcaugccccugagcugcaccaagaacaacagccaccacuacaucauggugggcaacgagaccggccuggagcugacccugaccaacaccagccugcugcaccacaaguucugcaaccugagcgacgcccacaagaagaaccuguacgaccacacccugaugagcaucaucagcaccuuccaccugagcauccccaacuucaaccaguacgaggccaugagcugcgacuucaacggcggcaagaucaccgugcaguacaaccugagccacagcuacgccaucgacgccgccaaccacugcggcaccguggccaacggcgugcugcagaccuucaugagaauggccuggggcggcagcuacaucgcccuggacagcggcagaggcaagugggacugcaucaugaccagcuaccaguaccugaucauccagaacaccaccugggaggaccacugccaguucagcagacccagccccaucggcuaccugggccugcugagccagagaaccagagacaucuacaucagcagaagacugcugggcaccuucaccuggacccugagcgacagcgagggcaacgagacccccggcggcuacugccugaccagauggaugcugaucgaggccgagcugaagugcuucggcaacaccgccguggccaagugcaacgagaagcacgacgaggaguucugcgacaugcugagacuguucgacuucugcaagcaggccaucagaagacugaaggccgaggcccagaugagcauccagcugaucaacaaggccgugaacgcccugaucaacgaccagcugaucaugaagaaccaccugagagacaucaugggcauccccuacugcaacuacagcaaguacugcuaccugaaccacaccagcaccggcagaaccagccugcccagaugcugccuggugagcaacggcagcuaccugaacgagacccacuucagcgacgacaucgagcagcaggccgacaacaugaucaccgagaugcugcagaaggaguaccuggacagacagggcaagaccccccugggccugguggaccuguucguguucagcaccagcuucuaccugaucagcaucuuccugcaccuggugaagauccccacccacagacacaucgugggcaagcccugccccaagccccacagacugaaccacaugggcaucugcagcugcggccuguacaagcagcccggcgugcccgugagauggaagagaugaggacuaguuauaagacugacuagcccgaugggccucccaacgggcccuccuccccuccuugcaccgagauuaauaaaaaaaaaaaaaaaaaaaaaaaaaaaaaaaaaaaaaaaaaaaaaaaaaaaaaaaaaaaaaaaaaaaaaaaaaaaaaaaaaaaaaaaaaaaaaaaaaaaa

SEQ ID NO: 41563 - RNA, 1665 nt, Artificial Sequence
  mRNA product Design i-3 (A100) comprising derived and/or modified sequence from LASV(G1180-SLE-2010;Clade IV)__AIT17168__GPCmut12 (opt4)
aggagaaagcuuaccaugggccagaucgugaccuucuuccaggaggugccccacgugaucgaggaggugaugaacaucgugcugaucgcccugagcauccuggccgugcugaagggccuguacaacuucgccaccugcggccuggugggccugcugaccuuccugcugcugugcggcagaagcugcaccgccagcagauacaagggcguguacgagcugcagacccuggagcugaacauggagacccugaacaugugcaugccccugagcugcaccaagaacaacagccaccacuacaucauggugggcaacgagaccggccuggagcugacccugaccaacaccagcaucaucaaccacaaguucugcaaccugagcgacgcccacaagaagaaccuguacgaccacgcccugaugagcaucaucagcaccuuccaccugagcauccccaacuucaaccaguacgaggccaugagcugcgacuucaacggcggcaagaucagcgugcaguacaaccugagccacagcuacgccggcgacgccgccaaccacugcggcaccguggccaacggcgugcugcagaccuucaugagaauggccuggggcggcagcuacaucgcccuggacagcggccacggcagcugggacugcaucaugaccagcuaccaguaccugaucauccagaacaccaccugggaggaccacugccaguucagcagacccagccccaucggcuaccugggccugcugagccagagaaccagagacaucuacaucagcagaagacugcugggcaccuucaccuggacccugagcgacagcgagggcaaggacacccccggcggcuacugccugaccagauggaugcugaucgaggccgagcugaagugcuucggcaacaccgccguggccaagugcaacgagaagcacgacgaggaguucugcgacaugcugagacuguucgacuucugcaagcaggccauccagagacugaaggccgaggcccagaugagcauccagcugaucaacaaggccgugaacgcccugaucaacgaccagcugaucaugaagaaccaccugagagacaucaugggcauccccuacugcaacuacagcaaguacugcuaccugaaccacaccaccaccggcaagaccagccugcccaagugcugccuggugagcaacggcagcuaccugaacgagacccacuucagcgacgacaucgagcagcaggccgacaacaugaucaccgagaugcugcagaaggaguacauggagagacagggcaagaccccccugggccugguggaccuguucguguucagcaccagcuucuaccugaucagcaucuuccugcaccuggugaagauccccacccacagacacaucgugggcaagagcugccccaagccccacagacugaaccacaugggcaucugcagcugcggccuguacaagcagcccggcgugcccgugaaguggaagagaugaggacuaguuauaagacugacuagcccgaugggccucccaacgggcccuccuccccuccuugcaccgagauuaauaaaaaaaaaaaaaaaaaaaaaaaaaaaaaaaaaaaaaaaaaaaaaaaaaaaaaaaaaaaaaaaaaaaaaaaaaaaaaaaaaaaaaaaaaaaaaaaaaaaa

SEQ ID NO: 41564 - RNA, 1665 nt, Artificial Sequence
  mRNA product Design i-3 (A100) comprising derived and/or modified sequence from LASV(G1442-SLE-2011;Clade IV)__AIT17180__GPCmut12 (opt4)
aggagaaagcuuaccaugggccagaucgugaccuucuuccaggaggugccccacgugaucgaggaggugaugaacaucgugcugaucgcccugagcauccuggccgugcugaagggccuguacaacguggccaccugcggccugaucggccuggugaccuuccugcugcugugcggcagaagcugcaccaccacccuguacaagggcguguacgagcugcagacccuggagcugaacauggagacccugaacaugugcaugccccugagcugcaccaagaacaacagccaccacuacaucagagugggcaacgagaccggccuggagcugacccugaccaacaccagcaucaucaaccacaaguucugcaaccugagcgacgcccacaagaagaaccuguacgaccacgcccugaugagcaucaucagcaccuuccaccugagcauccccaacuucaaccaguacgaggccaugagcugcgacuucaacggcggcaagaucagcgugcaguacaaccugagccacagcuacgccggcgacgccgccaaccacugcggcaccguggccaacggcgugcugcagaccuucaugagaauggccuggggcggcagcuacaucgcccuggacagcggcagaggcaacugggacugcaucaugaccagcuaccaguaccugaucauccagaacaccaccugggacgaccacugccaguucagcagacccagccccaucggcuaccugggccugcugagccagagaaccagagacguguacaucagcagaagacugcugggcaccuucaccuggacccugagcgacagcgagggcaaggacacccccggcggcuacugccugaccagauggaugcugaucgaggccgagcugaagugcuucggcaacaccgccguggccaagugcaacgagaagcacgacgaggaguucugcgacaugcugagacuguucgacuucugcaagcaggccauccagagacugaaggccgaggcccagaugagcauccagcugaucaacaaggccgugaacgcccugaucaacgaccagcugaucaugaagaaccaccugagagacaucaugggcauccccuacugcaacuacagcaaguacugcuaccugaacaacaccgccaccggcaagaccagccugcccaagugcugccugaucagcaacggcagcuaccugaacgagacccacuucagcgacgacaucgagcaggaggccgacaacaugaucaccgagaugcugcagaaggaguacauggagagacagggcaagaccccccugggccugguggaccuguucguguucagcaccagcuucuaccugaucagcaucuuccugcaccuggugaagauccccacccacagacacaucgugggcaagagcugccccaagccccacagacugaaccacaugggcaucugcagcugcggccuguacaagcagcccggcgugcccgugagauggaagagaugaggacuaguuauaagacugacuagcccgaugggccucccaacgggcccuccuccccuccuugcaccgagauuaauaaaaaaaaaaaaaaaaaaaaaaaaaaaaaaaaaaaaaaaaaaaaaaaaaaaaaaaaaaaaaaaaaaaaaaaaaaaaaaaaaaaaaaaaaaaaaaaaaaaa

SEQ ID NO: 41565 - RNA, 1665 nt, Artificial Sequence
  mRNA product Design i-3 (A100) comprising derived and/or modified sequence from LASV(G3010-SLE-2013;Clade IV)__AIT17344__GPCmut12 (opt4)
aggagaaagcuuaccaugggccagaucgugaccuucuuccaggaggugccccacgugaucgaggaggugaugaacaucgugcugaucgcccugagcauccuggccgugcugaagggccuguacaacuucgccaccugcggccuggugggccuggugaccuuccugcugcugugcggcagaagcugcaccaccagccuguacaagggcguguacgagcugcagacccuggagcugaacauggagacccugaacaugugcaugccccugagcugcaccaagaacaacagccaccacuacaucauggugggcaacgagaccggccuggagcugacccugaccaacaccagcaucaucaaccacaaguucugcaaccugagcgacgcccacaagaagaaccuguacaaccacgcccugaugagcaucaucagcaccuuccaccugagcauccccaacuucaaccaguacgaggccaugagcugcgacuucaacggcggcaagaucagcgugcaguacaaccugagccacagcuacgccggcgacgccgccagccacugcggcaccguggccaacggcgugcugcagaccuucaugagaauggccuggggcggcagcuacaucgcccuggacagcggcuacggcaagugggacugcaucaugaccagcuaccaguaccugaucauccagaacaccaccugggaggaccacugccaguucagcagacccagccccaucggcuaccugggccugcugagccagagaaccagagacaucuacaucagcagaagacugcugggcaccuucaccuggacccugagcgacagcgagggcaaggacacccccggcggcuacugccugaccagauggaugcugaucgaggccgagcugaagugcuucggcaacaccgccguggccaagugcaacgagaagcacgacgaggaguucugcgacaugcugagacuguucgacuucugcaagcaggccauccagagacugaagaccgaggcccagaugagcauccagcugaucaacaaggccgugaacgcccugaucaacgaccagcugaucaugaagaaccaccugagagacaucaugggcauccccuacugcaacuacagcaaguacugcuaccugaaccacaccaccaccggcaagaccagccugcccaagugcugccuggugagcaacggcagcuaccugaacgagacccacuucagcgacgacaucgagcagcaggccgacaacaugaucaccgagaugcugcagaaggaguacauggagagacagggcaagaccccccugggccugguggaccuguucguguucagcaccagcuucuaccugaucagcaucuuccugcaccuggugaagauccccacccacagacacaucgugggcaagagcugccccaagccccacagacugaaccacaugggcaucugcagcugcggccuguacaagcagcccggcgugcccgugagauggaagagaugaggacuaguuauaagacugacuagcccgaugggccucccaacgggcccuccuccccuccuugcaccgagauuaauaaaaaaaaaaaaaaaaaaaaaaaaaaaaaaaaaaaaaaaaaaaaaaaaaaaaaaaaaaaaaaaaaaaaaaaaaaaaaaaaaaaaaaaaaaaaaaaaaaaa

SEQ ID NO: 41566 - RNA, 1665 nt, Artificial Sequence
  mRNA product Design i-3 (A100) comprising derived and/or modified sequence from LASV(G502-SLE-2009;Clade IV)__AIT17126__GPCmut12 (opt4)
aggagaaagcuuaccaugggccagaucgugaccuucuuccaggaggugccccacgugaucgaggaggugaugaacaucgugcugaucgcccugagcauccuggccgugcugaagggccuguacaacuucgccaccugcggccuggugggccugcugaccuuccugcugcugugcggcagaagcugcaccaccggccuguacaagggcguguacgagcugcagacccuggagcugaacauggagacccugaacaugugcaugccccugagcugcaccaagaacaacagccaccacuacaucauggugggcaacgagaccggccuggagcugacccugaccaacaccagcaucaucaaccacaaguucugcaaccugagcgacgcccacaagaagaaccuguacgaccacgcccugaugagcaucaucagcaccuuccaccugagcauccccaacuucaaccaguacgaggccaugagcugcgacuucaacggcggcaagaucagcgugcaguacaaccugagccacagcuacgccggcgacgccgccgaccacugcggcaccguggccaacggcgugcugcagaccuucaugagaauggccuggggcggcagcuacaucgcccuggacagcggcagaggcagaugggacugcaucaugaccagcuaccaguaccugaucauccagaacaccaccugggaggaccacugccaguucagcagacccagccccaucggcuaccugggccugcugagccagagaaccagagacaucuacaucagcagaagacugcugggcaccuucaccuggacccugagcgacagcgagggcaaggacacccccggcggcuacugccugaccagauggaugcugaucgaggccgagcugaagugcuucggcaacaccgccguggccaagugcaacgagaagcacgacgaggaguucugcgacaugcugagacuguucgacuucugcaagcaggccauccagagacugaaggccgaggcccagaugagcauccagcugaucaacaaggccgugaacgcccugaucaacgaccagcuggugaugaagaaccaccugagagacaucaugggcauccccuacugcaacuacagcagauacugcuaccugaaccacaccaccaccggcagaaccagccugcccaagugcugccuggugagcaacggcagcuaccugaacgagacccacuucagcgacgacaucgagcagcaggccgacaacaugaucaccgagaugcugcagaaggaguacauggagagacagggcaagaccccccugggccugguggaccuguucguguucagcaccagcuucuaccugaucagcaucuuccugcaccuggugaagauccccacccacagacacaucgugggcaagagcugccccaagccccacagacugaaccacaugggcaucugcagcugcggccuguacaagcagcccggcgugcccgugaaguggaagagaugaggacuaguuauaagacugacuagcccgaugggccucccaacgggcccuccuccccuccuugcaccgagauuaauaaaaaaaaaaaaaaaaaaaaaaaaaaaaaaaaaaaaaaaaaaaaaaaaaaaaaaaaaaaaaaaaaaaaaaaaaaaaaaaaaaaaaaaaaaaaaaaaaaaa

SEQ ID NO: 41567 - RNA, 1665 nt, Artificial Sequence
  mRNA product Design i-3 (A100) comprising derived and/or modified sequence from LASV(G733-SLE-2010;Clade IV)__AIT17154__GPCmut12 (opt4)
aggagaaagcuuaccaugggccagaucgugaccuucuuccaggaggugccccacgugaucgaggaggugaugaacaucgugcugaucgcccugagcauccuggccgugcugaagggccuguacaacuucgccaccugcggcaucgugggccuggugagcuuccugcugcugugcggcagaagcugcaccaccagccuguacaagggcguguacgagcugcagacccuggagcugaacauggagacccugaacaugugcaugccccugagcugcaccaagaacaacagccaccacuacaucauggugggcaacgagaccggccuggagcugacccugaccaacaccagcaucaucaaccacaaguucugcaaccugagcgacgcccacaagaagaaccuguacgaccacgcccugaugagcaucaucagcaccuuccaccugagcauccccaacuucaaccaguacgaggccaugagcugcgacuucaacggcggcaagaucagcgugcaguacaaccugagccacagcuacgccggcgacgccgccaaccacugcggcaccaucgccaacggcgugcugcagaccuucaugagaauggccuggggcggcagcuacaucgcccuggacagcggcagagacagaugggacugcaucaugaccagcuaccaguaccugaucauccagaacaccaccugggaggaccacugccaguucagcagacccagccccaucggcuaccugggccugcugagccagagaaccagagacaucuacaucagcagaagacugcugggcaccuucaccuggacccugagcgacagcgagggcaaggacacccccggcggcuacugccugaccagauggaugcugaucgaggccgagcugaagugcuucggcaacaccgccguggccaagugcaacgagaagcacgacgaggaguucugcgacaugcugagacuguucgacuucugcaagcaggccauccagagacugaaggccgaggcccagaugagcauccagcugaucaacaaggccgugaacgcccugaucaacgaccagcugaucaugaagaaccaccugagagacaucaugggcauccccuacugcaacuacagcaaguacugcuaccugaaccacaccaccaccggcaagaccagccugcccaagugcugccuggugagcaacggcagcuaccugaacgagacccacuucagcgacgacaucgagcagcaggccgacaacaugaucaccgagaugcugcagaaggaguacauggagagacagggcaagaccccccugggccugguggaccuguucguguucagcaccagcuucuaccugaucagcaucuuccugcaccuggugaagauccccacccacagacacguggugggcaagagcugccccaagccccacagacugaaccacaugggcaucugcagcugcggccuguacggccagcccggcgugcccgugaaguggaagagaugaggacuaguuauaagacugacuagcccgaugggccucccaacgggcccuccuccccuccuugcaccgagauuaauaaaaaaaaaaaaaaaaaaaaaaaaaaaaaaaaaaaaaaaaaaaaaaaaaaaaaaaaaaaaaaaaaaaaaaaaaaaaaaaaaaaaaaaaaaaaaaaaaaaa

SEQ ID NO: 41568 - RNA, 1665 nt, Artificial Sequence
  mRNA product Design i-3 (A100) comprising derived and/or modified sequence from MOPV/LASV reassortant(IGS-1;Clade IV)__AFY05576__GPCmut12 (opt4)
aggagaaagcuuaccaugggccagaucgugaccuucuuccaggaggugccccacgugaucgaggaggugaugaacaucgugcugaucgcccugagcgugcuggccgugcugaagggccuguacaacuucgccaccugcggccuggugggccuggugaccuuccugcugcugugcggcagaagcugcaccaccagccuguacaagggcguguacgagcugcagacccuggagcugaacauggagacccugaacaugugcaugccccugagcugcaccaagaacaacagccaccacuacaucauggugggcaacgagaccggccuggagcugacccugaccaacaccagcaucaucaaccacaaguucugcaaccugagcgacgcccacaagaagaaccuguacgaccacgcccugaugagcaucaucagcaccuuccaccugagcauccccaacuucaaccaguacgaggccaugagcugcgacuucaacggcggcaagaucagcgugcaguacaaccugagccacagcuacgccggcgacgccgccaaccacugcggcaccguggccaacggcgugcugcagaccuucaugagaauggccuggggcggcagcuacaucgcccuggacagcggcagaggcaacugggacugcaucaugaccagcuaccaguaccugaucauccagaacaccaccugggaggaccacugccaguucagcagacccagccccaucggcuaccugggccugcugagccagagaaccagagacaucuacaucagcagaagacugcugggcaccuucaccuggacccugagcgacagcgagggcgaggacacccccggcggcuacugccugaccagauggaugcugaucgaggccgagcugaagugcuucggcaacaccgccguggccaagugcaacgagaagcacgacgaggaguucugcgacaugcugagacuguucgacuucugcaagcaggccauccagagacugaaggccgaggcccagaugagcauccagcugaucaacaaggccgugaacgcccugaucaacgaccagcugaucaugaagaaccaccugagagacaucaugggcauccccuacugcaacuacagcaaguacugcuaccugaaccacaccaccaccggcagaaccagccugcccaagugcugccuggugagcaacggcagcuaccugaacgagacccacuucagcgacgacaucgagcagcaggccgacaacaugaucaccgagaugcugcagaaggaguacauggagagacagggcaagaccccccugggccugguggaccuguucguguucagcaccagcuucuaccugaucagcaucuuccugcaccuggugaagauccccacccacagacacaucgugggcaagagcugccccaagccccacagacugaaccacaugggcaucugcagcugcggccuguacaagcagcccggcgugcccgugaaguggaagagaugaggacuaguuauaagacugacuagcccgaugggccucccaacgggcccuccuccccuccuugcaccgagauuaauaaaaaaaaaaaaaaaaaaaaaaaaaaaaaaaaaaaaaaaaaaaaaaaaaaaaaaaaaaaaaaaaaaaaaaaaaaaaaaaaaaaaaaaaaaaaaaaaaaaa

SEQ ID NO: 41569 - RNA, 1665 nt, Artificial Sequence
  mRNA product Design i-3 (A100) comprising derived and/or modified sequence from LASV(LM765-SLE-2012;Clade IV)__AIT17814__GPCmut12 (opt4)
aggagaaagcuuaccaugggccagaucgugaccuucuuccaggaggugccccacgugaucgaggaggugaugaacaucgugcugaucgcccugagcauccuggccgugcugaagggccuguacaacuucgccaccugcggccuggugggccuggugaccuuccugcugcugugcggcagaagcugcaccaccagccuguacaagggcguguacgagcugcagacccuggagcugaacauggagacccugaacaugugcaugccccugagcugcaccaagaacaacagccaccacuacaucauggugggcaacgagaccggccuggagcugacccugaccaacaccagcaucaucgaccacaaguucugcaaccugagcgacgcccacagaaagaaccuguacgaccacgcccugaugagcaucaucagcaccuuccaccugagcauccccaacuucaaccaguacgaggccaugagcugcgacuucaacggcggcaagaucagcgugcaguacaaccugagccacagcuacgccaaggacgccgccgaccacugcggcaccguggccaacggcgugcugcagaccuucaugagaauggccuggggcggcagcuacaucgcccuggacagcggcagaggcagaugggacugcaucaugaccagcuaccaguaccugaucauccagaacaccaccugggaggaccacugccaguucagcagacccagccccaucggcuaccugggccugcugagccagagaaccagagacaucuacaucagcagaagacugcugggcaccuucaccuggacccugagcgacagcgagggcaaggacacccccggcggcuacugccugaccagauggaugcugaucgaggccgagcugaagugcuucggcaacaccgccguggccaagugcaacgagaagcacgacgaggaguucugcgacaugcugagacuguucgacuucugcaagcaggccauccagagacugaaggccgaggcccagaugagcauccagcugaucaacaaggccgugaacgcccugaucaacgaccagcugaucaugaagaaccaccugagagacaucaugggcauccccuacugcaacuacagcaaguacugcuaccugaaccacaccaccaccggcaagaccagccugcccaagugcugccuggugagcaacggcagcuaccugaacgagacccacuucagcgacgacaucgagcagcaggccgacaacaugaucaccgagaugcugcagaaggaguacauggagagacagggcaagaccccccugggccugguggaccuguucguguucagcaccagcuucuaccugaucagcaucuuccugcaccuggugaagauccccacccacagacacaucgugggcaagcccugccccaagccccacagacugaaccacaugggcaucugcagcugcggccuguacaagcagcccggcgugcccgugaaguggaagagaugaggacuaguuauaagacugacuagcccgaugggccucccaacgggcccuccuccccuccuugcaccgagauuaauaaaaaaaaaaaaaaaaaaaaaaaaaaaaaaaaaaaaaaaaaaaaaaaaaaaaaaaaaaaaaaaaaaaaaaaaaaaaaaaaaaaaaaaaaaaaaaaaaaaa

SEQ ID NO: 41570 - RNA, 1665 nt, Artificial Sequence
  mRNA product Design i-3 (A100) comprising derived and/or modified sequence from LASV(LM776-SLE-2012;Clade IV)__AIT17824__GPCmut12 (opt4)
aggagaaagcuuaccaugggccagaucgugaccuucuuccaggaggugccccacgugaucgaggaggugaugaacaucgugcugaucgcccugagcauccuggccgugcugaagggccuguacaacuucgccaccugcggccuggugggccuggugaccuuccugcugcugugcggcagaagcugcaccaccagcguguacaagggcguguacgagcugcagacccuggagcugaacauggagacccugaacaugugcaugccccugagcugcaccaagaacaacagccaccacuacaucauggugggcaacgagaccggccuggagcugacccugaccaacaccagcaucaucaaccacaaguucugcaaccugagcgacgcccacaagaagaaccuguacgaccacgcccugaugagcaucaucagcaccuuccaccugagcauccccaacuucaaccaguacgaggccaugagcugcgacuucaacggcggcaagaucagcgugcaguacaaccugagccacagcuacgccggcgacgccgccaaccacugcggcaccguggccaacggcgugcugcagaccuucaugagaauggccuggggcggcagcuacaucgcccuggacagcggccacggcaagugggacugcaucaugaccagcuaccaguaccugaucauccagaacaccaccugggaggaccacugccaguucagcagacccagccccaucggcuaccugggccugcugagccagagaaccagagacaucuacaucagcagaagacugcugggcaccuucaccuggacccugagcgacagcgagggcaaggacacccccggcggcuacugccugaccagauggaugcugaucgaggccgagcugaagugcuucggcaacaccgccguggccaagugcaacgagaagcacgacgaggaguucugcgacaugcugagacuguucgacuucugcaagcaggccauccagagacugaaggccgaggcccagaugagcauccagcugaucaacaaggccgugaacgcccugaucaacgaccagcugaucaugaagaaccaccugagagacaucaugggcauccccuacugcaacuacagcaaguacugcuaccugaaccacaccaccaccggcaagaccagccugcccaagugcugccuggugagcaacggcagcuaccugaacgagacccacuucagcgacgacaucgagcagcaggccgacaacaugaucaccgagaugcugcagaaggaguacauggagagacagggcaagaccccccugggccugguggaccuguucguguucagcaccagcuucuaccugaucagcaucuuccugcaccuggugaagauccccacccacagacacaucgugggcaagagcugccccaagccccacagacugaaccacaugggcaucugcagcugcggccuguacaagcagcccggcgugcccgugagauggaagagaugaggacuaguuauaagacugacuagcccgaugggccucccaacgggcccuccuccccuccuugcaccgagauuaauaaaaaaaaaaaaaaaaaaaaaaaaaaaaaaaaaaaaaaaaaaaaaaaaaaaaaaaaaaaaaaaaaaaaaaaaaaaaaaaaaaaaaaaaaaaaaaaaaaaa

SEQ ID NO: 41571 - RNA, 1665 nt, Artificial Sequence
  mRNA product Design i-3 (A100) comprising derived and/or modified sequence from LASV(Mad39;Clade IV)__ANH09722__GPCmut12 (opt4)
aggagaaagcuuaccaugggccagaucgugaccuucuuccaggaggugccccacgugaucgaggaggugaugaacaucgugcugaucgcccugagcauccuggccgugcugaagggccuguacaacguggccaccugcggccugaucggccuggugaccuuccugcugcugugcggcagaagcugcaccaccacccuguacaagggcguguacgagcugcaggcccuggagcugaacauggagacccugaacaugugcaugccccugagcugcaccaagaacaacagccaccacuacaucagagugggcaacgagaccggccuggagcugacccugaccaacaccagccugaucaaccacaaguucugcaaccugagcgacgcccacaagaagaaccuguacgaccacgcccugaugagcaucaucagcaccuuccaccugagcauccccaacuucaaccaguacgaggccaugagcugcgacuucaacgacggcaagaucagcgugcaguacaaccugagccacaccuacgccggcgacaccgccaaccacugcggcaccguggccaacggcgugcugcagaccuucaugagaauggccuggggcggcagcuacaucgcccuggacagcggcagaggcggcugggacugcaucaugaccagcuaccaguaccugaucauccagaacaccaccugggaggaccacugccaguucagcagacccagccccaucggcuaccugggccugcugagccagagaaccagagacaucuacaucagcagaagacugcugggcaccuucaccuggacccugagcgacagcgagggcaaggacacccccggcggcuacugccugaccagauggaugcugaucgaggccgagcugaagugcuucggcaacaccgccguggccaagugcaacgagaagcacgacgaggaguucugcgacaugcugagacuguucgacuucugcaagcaggccauccagagacugaaggccgaggcccagaugagcauccagcugaucaacaaggccgugaacgcccugaucaacgaccagcugaucaugaagaaccaccugagagacaucaugggcauccccuacugcaacuacagcaaguacugcuaccugaaccacaccgugaccggcaagaccagccugcccaagugcugccuggugagcaacggcagcuaccugaacgagacccacuucagcgacgacaucgagcagcaggccgacaacaugaucaccgagaugcugcagaaggaguacauggagagacagggcaagaccccccugggccugguggaccuguucguguucagcaccagcuucuaccugaucagcaucuuccugcaccuggugaagauccccacccacagacacguggugggcaagcccugccccaagccccacagacugaaccacaugggcaucugcagcugcggcuucuacaagcagcccggcgugcccgugagauggaagagaugaggacuaguuauaagacugacuagcccgaugggccucccaacgggcccuccuccccuccuugcaccgagauuaauaaaaaaaaaaaaaaaaaaaaaaaaaaaaaaaaaaaaaaaaaaaaaaaaaaaaaaaaaaaaaaaaaaaaaaaaaaaaaaaaaaaaaaaaaaaaaaaaaaaa

SEQ ID NO: 41572 - RNA, 1665 nt, Artificial Sequence
  mRNA product Design i-3 (A100) comprising derived and/or modified sequence from LASV(Z0947-SLE-2011;Clade IV)__AIT17840__GPCmut12 (opt4)
aggagaaagcuuaccaugggccagaucgugaccuucuuccaggaggugccccacgugaucgaggaggugaugaacaucgugcugaucgcccugagcauccuggccgugcugaagggccuguacaacuucgccaccugcggccuggugggccuggugaccuuccugcugcugugcggcagaagcugcaccaucagccuguacaagggcguguacgagcugcagacccuggagcugaacauggagacccugaacaugugcaugccccugagcugcaccaagaacaacagccaccacuacaucauggugggcaacgagaccggccuggagcugacccugaccaacaccagcaucaucaaccacaaguucugcaaccugagcgacgcccacaagaagaaccuguacgaccacgcccugaugagcaucaucagcaccuuccaccugagcauccccaacuucaaccaguacgaggccaugagcugcgacuucaacggcggcaagaucagcgugcaguacaaccugagccacagcuacgccggcgacgccgccaaccacugcggcaccguggccaacggcgugcugcagaccuucaugagaauggccuggggcggcagcuacaucgcccuggacagcggcagagacagaugggacugcaucaugaccagcuaccaguaccugaucauccagaacaccaccugggaggaccacugccaguucagcagacccagccccaucggcuaccugggccugcugagccagagaaccagagacaucuacaucagcagaagacugcugggcaccuucaccuggacccugagcgacagcgagggcaaggacacccccggcggcuacugccugaccagauggaugcugaucgaggccgagcugaagugcuucggcaacaccgccguggccaagugcaacgagaagcacgacgaggaguucugcgacaugcugagacuguucgacuucugcaagcaggccauccagagacugaaggccgaggcccagaugagcauccagcugaucaacaaggccgugaacgcccugaucaacgaccagcugaucaugaagaaccaccugagagacaucaugggcauccccuacugcaacuacagcaaguacugcuaccugaaccacaccaccaccggcaagaccagccugcccaagugcugccuggugagcaacggcagcuaccugaacgagacccacuucagcgacgacaucgagcagcaggccgacaacaugaucaccgagaugcugcagaaggaguacauggagagacagggcaagaccccccugggccugguggaccuguucguguucagcaccagcuucuaccugaucagcaucuuccugcaccuggugaagauccccacccacagacacaucgugggcaagcccugccccaagccccacagacugaaccacaugggcaucugcagcugcggccuguacaagcagcccggcgugcccgugaaguggaagagaugaggacuaguuauaagacugacuagcccgaugggccucccaacgggcccuccuccccuccuugcaccgagauuaauaaaaaaaaaaaaaaaaaaaaaaaaaaaaaaaaaaaaaaaaaaaaaaaaaaaaaaaaaaaaaaaaaaaaaaaaaaaaaaaaaaaaaaaaaaaaaaaaaaaa

SEQ ID NO: 41573 - RNA, 1665 nt, Artificial Sequence
  mRNA product Design i-3 (A100) comprising derived and/or modified sequence from LASV(Josiah;Clade IV)__NP_694870__GPCmut12 (opt5)
aggagaaagcuuaccaugggccagaucgugaccuucuuucaagaggucccccacguuauugaagaggugaugaacaucgugcugauugcccucagcguccuggcugugcuuaaggggcuguacaauuucgccacaugcggacucguuggccuggugacguuucuucugcucugugggagauccugcaccacaucucuguauaaaggagucuacgaacugcagacccucgagcugaacauggaaacacuuaauauguguaugccucugagcugcaccaagaacaauucccaucacuauaucauggugggcaacgagacagggcucgagcugacccuuacgaauaccucuauuaucaaccauaaauucuguaaucugagcgacgcgcacaagaaaaaccucuacgaucaugcucugauguccaucauuucuacauuucaccugagcaucccgaauuucaaccaguaugaagccauguccugcgacuuuaauggaggcaagauuagcguucaguacaaccucucucacuccuaugccggcgaugcugccaaucauugugggaccguggcuaacggaguccugcaaacauucaugcggauggccuggggcgggagcuacaucgcgcuugacucuggacgcggcaacugggauugcauuaugaccuccuaccaguaucugaucauucagaauacgacaugggaggaccacugucaguuuagcagacccucuccuaucggguaccucggacugcuuucccaacggacccgcgauaucuauauuagcagacggcugcucggcacauucaccuggacccuguccgacucugaaggcaaggauacacccgggggauacugccugacgcgcuggaugcucaucgaggccgagcugaaauguuuuggcaacaccgcuguggccaagugcaaugaaaaacaugacgaggaguucugcgauaugcuuagacuguuugacuucuguaagcaggcuauucagcggcucaaagccgaagcgcagaugagcauccaacugauuaacaaggccgugaaugcucuuaucaacgaucagcugaucaugaagaaucaccuccgcgacauuauggggaucccuuauugcaacuacuccaaauauuguuaccugaaucacacaaccacaggaagaaccagccugcccaagugcugucucgucucuaacggcuccuaccugaaugaaacgcauuucagcgacgauauugagcagcaagccgacaacaugaucacagagaugcuucagaaagaauauauggagcggcaggggaagaccccucugggacucguugaucuguuuguguucucuaccagcuuuuaccugauuuccaucuuccuucaccucgugaaaaucccgacacaucgccacauugucggcaagucuugccccaaaccucauagacugaaucacaugggcaucuguagcugcgggcuguauaagcagcccggagugccuguuaaguggaaacggugaggacuaguuauaagacugacuagcccgaugggccucccaacgggcccuccuccccuccuugcaccgagauuaauaaaaaaaaaaaaaaaaaaaaaaaaaaaaaaaaaaaaaaaaaaaaaaaaaaaaaaaaaaaaaaaaaaaaaaaaaaaaaaaaaaaaaaaaaaaaaaaaaaaa

SEQ ID NO: 41574 - RNA, 1662 nt, Artificial Sequence
  mRNA product Design i-3 (A100) comprising derived and/or modified sequence from LASV(LP;Clade I)__AAF86701__GPCmut12 (opt5)
aggagaaagcuuaccaugggccagaucauuaccuucuuucaagaggugccccacgucaucgaagagguuaugaacauugugcugaucgcccucagccugcuugcuauucugaaggggcucuacaauaucgccacaugcggaaucauuggccugguggcguuccuuuuucugugugggaaauccugcucucucacgcugaagggaggcuaugaacugcagacccucgagcugaacauggaaacacuuaauauguguaugccucugagcugcaccaaaaacuccucucaucacuacaucagagucgggaaugagacaggacucgagcugacccuuacaaacaccagcauuaucaaucauaaguucuguaaccuguccgacgcucacaaaaagaaucucuaugaucaugcccugaugucuauuaucagcacguuucaccuguccauuccgaacuucaaucaguacgaagccaugagcugcgacuuuaacggcggcaagaucucugugcaguauaaucucucccacagcuacgcuggggaugccgcugagcauuguggaaccguugccaacggcgugcugcaaacauucaugcggauggcguggggagggcgcuauaucgcccuugacucuggcaaagggaauugggauugcauuaugaccuccuaccaguaccugaucauucagaacacaaccugggaagaccacugucaguuuagcagacccucuccuaucggauaucucggccugcuuucccaacggacgcgcgauauuuacaucagcagacggcugcucggcacauucaccuggacacuguccgacucugaggggaacgagacccccggaggcuauugccugacccgcuggaugcucaucgaagcugagcugaaguguuuugggaauacagccgucgcuaaaugcaacgaaaagcaugaugaggaguucugcgacaugcuuagacuguuugauuucuguaaacaggccauucggcgccucaaggcggaagcccagaugagcauccagcugauuaauaaggcugugaacgcccuuaucaaugaccaacugauuaugaaaaaccaccucagagauaucaugggaaucccuuacugcaauuauuccaaguacuguuaucugaaccacacgagcucuggccggaccucccugcccaaaugcugucucauuagcaaugggucuuaccugaacgagacacaguucagcgacgacaucgaacagcaagcugauaauaugauuaccgagaugcuucagaaggaauacaucgagcgccagggaaaaacaccucugggccucguugacauuuuuaucuucuccaccucuuuuuaucugauuagcaucuuccugcaucuuaucaagauuccgacgcacagacauaucgugggcaaacccugcccuaagccccaccggcucaaccauaugggggucuguuccugcggacuguacaagcacccuggcgugcccacaaaauggaagcgcugaggacuaguuauaagacugacuagcccgaugggccucccaacgggcccuccuccccuccuugcaccgagauuaauaaaaaaaaaaaaaaaaaaaaaaaaaaaaaaaaaaaaaaaaaaaaaaaaaaaaaaaaaaaaaaaaaaaaaaaaaaaaaaaaaaaaaaaaaaaaaaaaaaaa

SEQ ID NO: 41575 - RNA, 1662 nt, Artificial Sequence
  mRNA product Design i-3 (A100) comprising derived and/or modified sequence from LASV(803213;Clade II)__AAF86703__GPCmut12 (opt5)
aggagaaagcuuaccaugggccagaucauuaccuucuuucaagaggugccccacgucaucgaagagguuaugaacauugugcugaucgcccucagccugcuugcuauucugaaggggaucuacaauguggccacaugcggacucuucggccugaucuccuuucuucugcucugugggagaucuugcagcgucacguauaaaggaguguacgaacugcagacccuggagcucaacauggcgaaucugaacauguguaugccucuuuccugcacaaagaauaacucucaucacuauauuaugguuggcaaugaaaccgggcuggagcucacacugaccaacacaagcaucauuaaucauaaauucuguaaccuuuccgacgcucacaagaaaaaucuguacgaucaugcccucaugucuaucauuagcaccuuucaccuguccaucccgaacuucaaucaguaugaggccaugagcugcgacuuuaacggaggcaagauuucugugcaguacaaucugucccacagcuucgcugucgaugccgcuaaccauuguggcacgaucgccaacggggugcuccaaaccuuuaugcggauggcguggggaggcucuuauaucgcccuggacuccgggaagggaaauugggauugcauuaugacaagcuaccaguaccuuaucauucagaacaccacaugggaagaccacugucaguucucucgccccuccccuaucggcuaucuggggcuccugagccaaagaacccgggauauuuacaucucccgcagacuucugggaacguuuacauggacccucucugacagcgagggcaaugaagcucccggcggguauugccugacacgguggaugcugaucgaggccgagcucaaauguuucggaaacaccgcuguugccaagugcaaugaaaaacaugaugaggaauuuugcgacaugcugcgccuuuucgauuucuguaagcaggcgauuaaaagacugaagaccgaggcccagauguccauccagcucauuaacaaggcugugaaugcccugaucaacgaccaacuuauuaugaaaaaucaucugcgggauaucaugggcaucccuuacugcaacuauagccgcuacuguuaucucaaucacacagucacggggaagaccucucugcccagaugcugucugguguccaacggaagcuaccucaaugaaacacacuuuucugacgacauugagcagcaggcugauaacaugaucaccgagaugcugcaaaaagaauacauggaccggcagggcaagacaccucuugggcugguggaucucuucgucuuuagcaccuccuucuaucugauuucuaucuuucugcaccuuguuaaaauuccgacgcaucgccacaucgugggaaagcccugcccuaaaccccauagacucaaucacaugggcauuuguagcugcggccuguacaagcacccuggggugcccgucaaguggaaacggugaggacuaguuauaagacugacuagcccgaugggccucccaacgggcccuccuccccuccuugcaccgagauuaauaaaaaaaaaaaaaaaaaaaaaaaaaaaaaaaaaaaaaaaaaaaaaaaaaaaaaaaaaaaaaaaaaaaaaaaaaaaaaaaaaaaaaaaaaaaaaaaaaaaa

SEQ ID NO: 41576 - RNA, 1662 nt, Artificial Sequence
  mRNA product Design i-3 (A100) comprising derived and/or modified sequence from LASV(GA391;Clade III)__CAA36645__GPCmut12 (opt5)
aggagaaagcuuaccaugggccagaucgugaccuucuuucaagaggucccccacguuauugaagaggugaugaacaucgugcugauugcccucagcauccuggcuauucuuaaggggcuguacaaugucgccacaugcggacucaucggccuggugacguuccuucugcucuccgggagaucuuguagccugaucuauaaaggaaccuacgaacugcagacacucgagcugaacauggaaacccuuaauaugugcaugccucuguccuguacaaagaacaauucucaucacuauauucggguuggcaacgagaccgggcucgagcugacacuuaccaauacgagcauccugaaccauaaauuuugcaaucucuccgacgcgcacaagcgcaaccuguacgaucauucucugaugagcauuaucuccaccuuccaccucagcauuccgaauuuuaaccaguaugaagcuaugucuugugacuucaauggaggcaaaaucacagugcaguacaaccugucccacagcuuugccgucgaugccgcuggccauugcgggacccuugccaauggagugcugcaaacauucaugagaauggcuuggggcgggucuuauauugcccucgacuccggacggggcaacugggauuguaucaugaccagcuaccaguaccugaucauucagaacacgacaugggacgaucacugccaguuuucucgccccuccccuaucggguaucuuggacugcucagccaaagaacccgggacauuuacaucucccgcagacugcugggcacauucaccuggacccucucugauagcgagggcaaugaaacacccgggggauauugucugacgcgguggaugcuuauugaggcggagcugaagugcuuuggcaacaccgccguugcuaaguguaaugaaaaacaugacgaggaguucugcgauaugcuccgccuguuugacuucugcaagcaggccaucagacggcuuaaaacagaagcucagauguccauccagcugauuaacaaggccgugaaugcgcucaucaacgaucaacugauuaugaaaaaucaucugcgcgacaucauggggauuccuuacuguaacuauagcagauacugcuaucucaaucacaccucuacaggaaagaccucccugccccgguguugccuuaucagcaacggcucuuaccugaaugaaacgaaguucagcgacgauaucgagcagcaggccgacaacaugauuacagagaugcuccaaaaagaauacaucgaucgccaggggaagaccccucugggacuggucgaccuuuuuguguucuccaccucuuuuuaucucauuagcaucuuccugcaccuggugaaaauuccgacacacagacauaucgucggcaagcccuguccuaaaccccaccggcucaaucauaugggcauuugcuccugugggcuguacaagcagccuggaguucccgugagauggaaacgcugaggacuaguuauaagacugacuagcccgaugggccucccaacgggcccuccuccccuccuugcaccgagauuaauaaaaaaaaaaaaaaaaaaaaaaaaaaaaaaaaaaaaaaaaaaaaaaaaaaaaaaaaaaaaaaaaaaaaaaaaaaaaaaaaaaaaaaaaaaaaaaaaaaaa

SEQ ID NO: 41577 - RNA, 1665 nt, Artificial Sequence
  mRNA product Design i-3 (A100) comprising derived and/or modified sequence from LASV(AV;Clade V)__CCA30314__GPCmut12 (opt5)
aggagaaagcuuaccaugggccagaucgugaccuucuuucaagaggucccccacguuauugaagaggugaugaacaucgugcugauugcccucagcauccuggcuguccuuaaggggcuguacaauauugccacaugcggacucaucggccugaucacguuccuucugcucugugggagauccugcucuagcaaccuguauaaaggaguguacgaacugcagucccucgaccugaauauggagacccuuaacauguguaugccucugucuugcacaaagaauaacagccaucacuauauucggguuggcaaugauaccgggcucgaacugacacuuaccaacacauccauccugaaucauaaauuuuguaaccucucugacgcgcacaagaaagaucuguacgaccaugcucugaugagcauuaucuccaccuuccaccucagcauuccgaauuuuaaccaguaugaggccaugucuugcgauuucaauggaggcaagaucuccgugcaguacaaccugagccacucuuaugccauugacgcugccaaucauuguggcacggucgcuaacgggauccuucaaaccuuuaugcgcauggccuggggaggcuccuacaucgcgcuggauagcgggagaggaaacugggacugcauuaugacaucuuaccaguaucucaucauucagaauaccacaugggagaaccacugucaguucucccggcccagcccuaucggcuaccuggggcuucugucccaacgcaccagagauauuuauaucucucggcgccuccugggaacguuuacauggacccugagcgacuccgaaggcaaugccacacccggcggguacugccucaccagauggaugcugaucgaggcugaacuuaaguguuucggaaacaccgccguggcuaaaugcaaugagaagcaugaugaggaauuuugcgacaugcugcgccucuucgauuuuuguaaacaggccauuagccggcugaagucugaggcgcagauguccauccagcuuauuaacaaagccguuaaugcucugaucaacgaccaacucauuaugaagaaucaccugagagacaucaugggcaucccuuauugcaacuacagcaaguauuguuaccugaaucacacaauuacggggaaaaccucucuccccaagugcugucuggugagcaacggauccuaccuuaaugaaacacauuucucugaugacaucgagcagcaggccgauaacaugauuaccgaaaugcugcaaaaagaguauauggagcggcagggcaagacaccucucgggcuggucgaccuguucguguuuagcaccuccuucuaccuuaucagcauuuuucuccgccuggugaaaaucccgacgcacagacauauugucggaaagcccugcccuaaaccccaccggcugaaucauaugggcaucuguucuugcggccucuauaagcagccugggguucccgugcgcuggaagagaugaggacuaguuauaagacugacuagcccgaugggccucccaacgggcccuccuccccuccuugcaccgagauuaauaaaaaaaaaaaaaaaaaaaaaaaaaaaaaaaaaaaaaaaaaaaaaaaaaaaaaaaaaaaaaaaaaaaaaaaaaaaaaaaaaaaaaaaaaaaaaaaaaaaa

SEQ ID NO: 41578 - RNA, 1662 nt, Artificial Sequence
  mRNA product Design i-3 (A100) comprising derived and/or modified sequence from LASV(Togo/2016/7082;Clade VI)__AMR44577__GPCmut12 (opt5)
aggagaaagcuuaccaugggccagaucauuaccuucuuucaagaggugccccacgucaucgaagagguuaugaacauugugcugaucgcccucagccugcuugcuauucugaaggggguguacaaugucgccacaugcggaaucaucggccucgugacguuccuguuucuuugugggagauccugcucucugauuuauaaaggaagcuacgaacuccagacccuggagcugaacauggaaacacucaauauguguaugccucuguccugcaccaagaacucuagccaucacuauauccggguuggcaaugagacagggcuugagcugacccucacaaacaccuccauuaucaaucauaaauucuguaaccugucugacgcgcacaagcgcaaucuuuacgaucaugcucugaugagcauucucuccacguuucaccugagcaucccgaacuucaaucaguaugaagccaugucuugcgacuuuaacggaggcaaaauuuccgugcaguacaaucugagccacgccuaugcugucgaugccgcugagcauuguggcaccguggccaacgggguucuccaaacauucaugagaauggcguggggaggcucuuacaucgcccuggacuccgggcggggaaauugggauugcaucaugaccagcuaccaguaucuuauuauccagaacacaaccugggaagaccacugucaguuuucucgccccuccccuauuggcuaccuggggcuccugagccaaagaacgcgggauaucuauauuucccgcagacuucugggaacauucaccuggacacucucugacagcgagggcaacgagacccccggcggguacugccugacccgguggaugcugaucgaagcugagcucaaguguuuuggaaauacagccguggcuaagugcaacgaaaaacaugaugaggaguucugcgacaugcugcgccuuuuugauuucuguaagcaggccauccagagacugaaauccgaagcgcagaugagcauucaacucaucaauaaggccgucaacgcucugauuaaugaccagcuuaucaugaaaaaccaucugcgggauaugaugggcauuccuuauugcaauuacucuaaguauuguuaccucaaccacacguccagcgggcgcaccucucugcccaagugcugucuggugagcaauggauccuaccucaacgagacacacuucucugacgacaucgaacagcaagccgauaauaugaucaccgagaugcugcagaaagaauauauugacagacagggcaagacaccucuugggcugguggaucucuuugucuucagcaccuccuuuuaccugaucagcauuuuccugcaccuuaucaaaauuccgacgcaucggcacaucguuggaaagcccugcccuaaaccccaucgccucaaccacaugggcauuuguucuugcggccuguauaagcagccuggggugcccacaagauggaaacggugaggacuaguuauaagacugacuagcccgaugggccucccaacgggcccuccuccccuccuugcaccgagauuaauaaaaaaaaaaaaaaaaaaaaaaaaaaaaaaaaaaaaaaaaaaaaaaaaaaaaaaaaaaaaaaaaaaaaaaaaaaaaaaaaaaaaaaaaaaaaaaaaaaaa

SEQ ID NO: 41579 - RNA, 1662 nt, Artificial Sequence
  mRNA product Design i-3 (A100) comprising derived and/or modified sequence from LASV(KAK-428;Clade n.d. (VII))__ANH09740__GPCmut12 (opt5)
aggagaaagcuuaccaugggccagaucgugaccuucuuucaagaggucccccacguuauugaagaggugaugaacaucgugcugauugcccucagccugcuugcuauccugaaggggcucuacaauuucgccacaugcggagucauuggccugaucacguuucuucugcucugugggagauccugcucugcgaccuauaaaggacaguacgaacugcagacacuggagcucaacauggaaagccugaauauguguaugccucuuuccugcaccaagaacaauucucaucacuauauccgggcuggcaacaauacagggcuggagcucacccugacaaacaccagcauuaucucccauaaauucuguaaucuuucugacgcccacaagaaaaaccuguacgaucauacgcucaugagcauuaucaccacauuucaccuguccauuccgaauuucaaccaguaugaggccaugagcugcgacuuuaauggaggcaagaucucuauucaauacaaccugucccacagcuaugcuggcgaugccgcucagcauugugggaccguggccaauggaguucuccagacauucaugcgcauggcguggggcgggucuuaccuggcccuugacuccggaagacggggcugggauugcaucaucagcucuuaccaguaucugauuauccaaaacaccacgugggacgaucacugucaguuuucccgccccagcccuauuggguaccucggauucgugucccagaagacaagagacaucuauauuucucggcgccugcuuggcaccuuuacauggacccugagcgauuccgaaggccaugacaugcccgggggauacugccucaccagauggaugcugaucgaggcugaucugaaauguuucggcaacacagccgucgcuaagugcaaugaaaaacacgacgaggaguuuugcgauauguggcgccucuucgacuucuguaagcaggccauccaacggcugaaagcggaagcccagaugaacauucagcuuaucaauaaggcugugaacgcccugauuaaugaccaacucaugaugaagaaccaccugagagauaucauggggauuccuuauugcaauuacagcaaauuuuguuaucuuaacaauacgaccacaggacggaccucucugccccgcugcugucucaucuccaacggcagcuaccugaaugagacacauuucucugacgauaucgaacagcaggcugacaacaugauuaccgagaugcugcagaaggaauacauggauagacaagggaaaacgccucucggacugguugaccuuuuuguguucagcacauccuuuuaucugaucaccauuuuccuccaccuggucaagaucccgacccaucggcacauugugggcaaacccugcccuaagccccaucgccugaaucacaugggcaucuguucuugcgggcuuuacaaacagccuggagugcccgucagauggaagcggugaggacuaguuauaagacugacuagcccgaugggccucccaacgggcccuccuccccuccuugcaccgagauuaauaaaaaaaaaaaaaaaaaaaaaaaaaaaaaaaaaaaaaaaaaaaaaaaaaaaaaaaaaaaaaaaaaaaaaaaaaaaaaaaaaaaaaaaaaaaaaaaaaaaa

SEQ ID NO: 41580 - RNA, 1662 nt, Artificial Sequence; identical to SEQ ID NO: 41574
  mRNA product Design i-3 (A100) comprising derived and/or modified sequence from LASV(Pinneo-NIG-1969;Clade I)__AIT17836__GPCmut12 (opt5)

SEQ ID NO: 41581 - RNA, 1662 nt, Artificial Sequence
  mRNA product Design i-3 (A100) comprising derived and/or modified sequence from LASV(ISTH0009-NIG-2011;Clade II)__AIT17404__GPCmut12 (opt5)
aggagaaagcuuaccaugggccagaucauuaccuucuuucaagaggugccccacgucaucgaagagguuaugaacauugugcugaucgcccucagccugcuugcuauucugaaggggaucuacaauguggccacaugcggacucuucggccuggucuccuuucuucugcucugugggagaucuugcagcacgaccuauaaaggaguguacgaacugcagacacuggagcucgacauggcgucccugaacauguguaugccucuuucuugcaccaagaauaacagccaucacuauaucaugguuggcaaugaaacagggcuggagcucacccugacaaacaccuccauuaucaaucauaaauucuguaaccuuucugaugcucacaagaaaaaucuguacgaccaugcccucaugagcauuaucuccacguuucaccugagcauuccgaacuucaaucaguaugaggccaugucuugcgauuuuaacggaggcaagaucuccgugcaguacaaucugagccacgcuuaugccgucgacgcugccaaccauuguggcaccauugcgaauggggugcuccaaacauucaugcggauggccuggggaggcucuuacaucgcucuggauuccgggaagggaagcugggacugcaucaugaccucuuaccaguaucuuauuauccagaacacaaccugggaagaucacugucaguuuucccgccccagcccuauuggcuaccuggggcuccugucccaaagaacgcgggacaucuauauuucucgcagacuucugggaacauucaccuggacacucagcgauuccgagggcaacgaaacccccggcggguacugccugacccgguggaugcugaucgaggccgagcucaaauguuuuggaaauacagcuguugccaagugcaacgaaaaacaugacgaggaguucugcgauaugcugcgccuuuuugacuucuguaagcaggcgaucagacggcugaaaacggaagcccagaugagcauucagcucaucaauaaggcugugaacgcccugauuaaugaucaacuuaucaugaagaaccaucugcgcgacauuaugggcaucccuuauugcaauuacucuaaauauuguuaccucaaccacaccgucacagggaagaccucccugcccagaugcugucuggugagcaauggaucuuaccucaacgaaacacacuucagcgacgauaucgagcagcaggcugacaauaugauuaccgagcugcuucaaaaagaauauauggaucggcagggcaagacgccucuggggcucguggaccuguuugucuucuccacaucuuuuuaccugaucagcauuuuccuucaccucaucaaaauuccgacccaucgccacaucaccggaaagcccugcccuaaaccccauagacugaaccacaugggcauuuguuccugcggccuguauaagcacccugggguucccgugaaguggaaacggugaggacuaguuauaagacugacuagcccgaugggccucccaacgggcccuccuccccuccuugcaccgagauuaauaaaaaaaaaaaaaaaaaaaaaaaaaaaaaaaaaaaaaaaaaaaaaaaaaaaaaaaaaaaaaaaaaaaaaaaaaaaaaaaaaaaaaaaaaaaaaaaaaaaa

SEQ ID NO: 41582 - RNA, 1662 nt, Artificial Sequence
  mRNA product Design i-3 (A100) comprising derived and/or modified sequence from LASV(ISTH2010-NIG-2012;Clade II)__AIT17482__GPCmut12 (opt5)
aggagaaagcuuaccaugggccagaucauuaccuucuuucaagaggugccccacgucaucgaagagguuaugaacauugugcugaucgcccucagccugcuugcuauucugaaggggaucuacaauguggccacaugcggacucuucggccuggucuccuuucuucugcucugugggagaucuugcagcacgaccuauaaaggaguguacgaacugcagacacuggagcucgacauggcgucccugaacauguguaugccucuuucuugcaccaagaauaacagccaucacuauaucaugguuggcaaugaaacagggcuggagcucacccugacaaacaccuccauuaucaaucauaaauucuguaaccuuucugaugcucacaagaaaaaucuguacgaccaugcccucaugagcauuaucuccacguuucaccugagcauuccgaacuucaaucaguaugaggccaugucuugcgauuuuaacggaggcaagaucuccgugcaguacaaucugagccacgcuuaugccgucgacgcugccaaccauuguggcaccauugcgaauggggugcuccaaacauucaugcggauggccuggggaggcucuuacaucgcucuggauuccgggaagggaagcugggacugcaucaugaccucuuaccaguaucuuauuauccagaacauuacaugggaagaucacugucaguuuucccgccccagcccuaucggcuaccuggggcuccugucccaaagaacccgggacauuuauaucucucgcagacuucugggaacguucacauggacccucagcgauuccgagggcaacgaaacacccggcggguacugccugacccgguggaugcugaucgaggccgagcucaaauguuuuggaaauaccgcuguugccaagugcaacgaaaaacaugacgaggaguucugcgauaugcugcgccuuuuugacuucuguaagcaggcgauuagacggcugaaaacagaagcccagaugagcauccagcucauuaauaaggcugugaacgcccugaucaaugaucaacuuauuaugaagaaccaucugcgcgacaucaugggcaucccuuauugcaauuacucuaaauauuguuaccucaaccacacggucaccgggaagacaucccugcccagaugcugucuggugagcaauggaucuuaccucaacgaaacccacuucagcgacgauauugagcagcaggcugacaauaugaucacagagcugcuucaaaaagaauauauugaucggcagggcaagaccccucuggggcucguggaccuguuugucuucuccacgucuuuuuaccugaucagcauuuuccuucaccucguuaaaaucccgacacaucgccacguggugggaaagcccugcccuaaaccccauagacugaaccacaugggcauuuguuccugcggccuguauaagcacccugggguccccgugaaguggaaacggugaggacuaguuauaagacugacuagcccgaugggccucccaacgggcccuccuccccuccuugcaccgagauuaauaaaaaaaaaaaaaaaaaaaaaaaaaaaaaaaaaaaaaaaaaaaaaaaaaaaaaaaaaaaaaaaaaaaaaaaaaaaaaaaaaaaaaaaaaaaaaaaaaaaa

SEQ ID NO: 41583 - RNA, 1662 nt, Artificial Sequence
  mRNA product Design i-3 (A100) comprising derived and/or modified sequence from LASV(Lassa virus/H.sapiens-wt/NGA/2015/ISTH_0543;Clade II)__AVO03639__GPCmut12 (opt5)
aggagaaagcuuaccaugggccagaucauuaccuucuuucaagaggugccccacgucaucgaagagguuaugaacauugugcugaucgcccucagccugcuugcuauucugaaggggaucuacaauguggccacaugcggacucuucggccuggucuccuuucuucugcucugugggagaucuugcagcacgaccuauaaaggaguguacgaacugcagacacuggagcucgacauggcgaaccugaauauguguaugccucuuuccugcaccaagaacaauucucaucacuauaucaugguuggcaacgaaacagggcuggagcucacccugacaaauaccagcauuaucaaccauaaauucuguaaucuuuccgaugcucacaagaaaaaccuguacgaccaugcccucaugucuauuaucagcacguuucaccuguccauuccgaauuucaaccaguaugaggccaugagcugcgauuuuaauggaggcaagaucucugugcaguacaaccugucccacaccuaugcugucgacgccgcuaaucauuguggcacaauugccaacggggugcuccaaaccuucaugcggauggcguggggaggcagcuacaucgcccuggauucugggaagggauccugggacugcaucaugacaagcuaccaguaucuuguuauucagaacaccacgugggaagaucacugucaguuuucucgccccuccccuaucggcuaccuggggcuccugagccaaagaacacgggacauuuauaucucccgcagacuucugggaaccuucacauggacccucucugauagcgagggcaaugaaacccccggcggguacugccugacacgguggaugcugauugaggcugagcucaaauguuuuggaaacacggccguggcuaagugcaaugaaaaacaugacgaggaguucugcgauaugcugcgccuuuuugacuucuguaagcaggccaucagacggcugaaaaccgaagcgcagauguccauccagcucauuaacaaggccgucaaugcucugaucaacgaucaacuuauuaugaagaaucaucugcgcgacaucaugggcauuccuuauugcaacuacagcaaauauuguuaccucaaucacacagugaccgggaagacaucucugcccagaugcugucugguguccaacggaagcuaccucaaugaaacccacuucucugacgauaucgagcagcaggccgacaacaugaucacggagcugcuucaaaaagaauauauugaucggcagggcaagacaccucuggggcucgucgaccuguuuguuuucagcaccuccuuuuaccugaucucuauuuuccuucaccucgugaaaaucccgacccaucgccacauuacaggaaagcccugcccuaaaccccauagacugaaucacaugggcaucuguagcugcggccuguauaagcacccuggggugcccgucaaguggaaacggugaggacuaguuauaagacugacuagcccgaugggccucccaacgggcccuccuccccuccuugcaccgagauuaauaaaaaaaaaaaaaaaaaaaaaaaaaaaaaaaaaaaaaaaaaaaaaaaaaaaaaaaaaaaaaaaaaaaaaaaaaaaaaaaaaaaaaaaaaaaaaaaaaaaa

SEQ ID NO: 41584 - RNA, 1662 nt, Artificial Sequence
  mRNA product Design i-3 (A100) comprising derived and/or modified sequence from LASV(Lassa virus/H.sapiens-wt/NGA/2016/ISTH_0009;Clade II)__AVO03571__GPCmut12 (opt5)
aggagaaagcuuaccaugggccagaucauuaccuucuuucaagaggugccccacgucaucgaagagguuaugaacauugugcugaucgcccucagccugcuugcuauucugaaggggaucuacaauguggccacaugcggacuccugggccuugucuccuuccugcuccugugugggagaucuugcagcacgaccuauaaaggaguguacgaacugcagacacucgagcuggacauggcgucccuuaacauguguaugccucugucuugcaccaagaauaacagccaucacuauaucaugguuggcaaugaaacagggcucgagcugacccuuacaaacaccuccauuaucaaucauaaauuuuguaaccugucugaugcucacaagaaaaaucucuacgaccaugcccugaugagcauuaucuccacguuccaccugagcauuccgaacuuuaaucaguaugaggccaugucuugcgauuucaacggaggccggaucuccgugcaguacaaucucagccacucuuaugcugucgacgccgcuaaccauuguggcaccauugccaauggggugcugcaaacauuuaugcgcauggcguggggaggcuccuacaucgcccuugauagcgggaagggaucuugggacugcaucaugaccuccuaccaguaucugauuauccagaacacaaccugggaagaucacugucaguucagcagacccuccccuauuggcuaccucgggcugcuuucucaacggacgcgcgacaucuauauuagcagacggcugcucggaacauuuaccuggacacuguccgauagcgagggcaacgaaacccccggcggguacugccugacccgcuggaugcucaucgaggcugagcugaaguguuucggaaauacagccguugcuaaaugcaacgaaaagcaugacgaggaauuuugcgauaugcuuagacuguucgacuuuuguaaacaggccauccggcgccucaagacggaggcgcagaugucuauucagcugaucaauaaagccgugaacgcucuuauuaaugaucaacugaucaugaagaaccaccucagagacauuaugggcaucccuuauugcaauuacuccaaguauuguuaccugaaccacaccgucacagggaaaaccagccugccccggugcugucucgugucuaauggaagcuaccugaacgaaacacauuucuccgacgauaucgagcagcaggccgacaauaugauuaccgagcuucugcaaaaggaauauaucgaucgccagggcaaaacgccucucgggcugguggaccuguucgucuuuucuaccagcuucuaccuuauuuccaucuuucuccaccugguuaagauuccgacacauagacacaucaccggaaaacccugcccuaagccccaucggcugaaccacaugggcauuuguagcugcggccucuauaaucacccuggggugcccgugaaauggaagcgcugaggacuaguuauaagacugacuagcccgaugggccucccaacgggcccuccuccccuccuugcaccgagauuaauaaaaaaaaaaaaaaaaaaaaaaaaaaaaaaaaaaaaaaaaaaaaaaaaaaaaaaaaaaaaaaaaaaaaaaaaaaaaaaaaaaaaaaaaaaaaaaaaaaaa

SEQ ID NO: 41585 - RNA, 1662 nt, Artificial Sequence
  mRNA product Design i-3 (A100) comprising derived and/or modified sequence from LASV(Lassa virus/H.sapiens-wt/NGA/2016/ISTH_0017;Clade II)__AVO03567__GPCmut12 (opt5)
aggagaaagcuuaccaugggccagaucauuaccuucuuucaagaggugccccacgucaucgaagagguuaugaacauugugcugaucgcccucagccugcuugcuauucugaaggggaucuacaauguggccacaugcggacucuucggccuggucuccuuucuucugcucugugggagaucuugcagcacgaccuauaaaggaguguacgaacugcagacacuggagcucgacauggcgucccugaacauguguaugccucuuucuugcaccaagaauaacagccaucacuauaucaugguuggcaaugaaacagggcuggagcucacccugacaaacaccuccauuaucaaucauaaauucuguaaccuuucugaugcucacaagaaaaaucuguacgaccaugcccucaugagcauuaucuccacguuucaccugagcauuccgaacuucaaucaguaugaggccaugucuugcgauuuuaacggaggcaagaucuccgugcaguacaaucugagccacaccuaugcuauugacgccgcuaaccauuguggcacaaucgccaaugggguccuccaaaccuucaugcggauggcguggggaggcucuuacaucgcccuggauuccgggaagggaagcugggacugcauuaugacaucuuaccaguaucuuaucauucagaacaccacgugggaagaucacugucaguuuucccgccccagcccuaucggcuaccuggggcuccugucccaaagaacacgggacauuuauaucucucgcagacuucugggaaccuucacauggacccucagcgauuccgagggcaacgaaacccccggcggguacugccugacacgguggaugcugaucgaggcugagcucaaauguuuuggaaauacggccguggcuaagugcaacgaaaaacaugacgaggaguucugcgauaugcugcgccuuuuugacuucuguaagcaggccauuagacggcugaaaaccgaagcgcagaugagcauccagcucauuaauaaggccguuaacgcucugaucaaugaucaacuuauuaugaagaaccaucugcgcgacaucaugggcaucccuuauugcaauuacucuaaauauuguuaccucaaccacacagugaccgggaagacaucccugcccagaugcugucuggucagcaauggaucuuaccucaacgaaacccacuucagcgacgauauugagcagcaggccgacaauaugaucacggagcugcuucaaaaagaauauauggaucggcagggcaagacaccucuggggcucguggaccuguuuguguucuccaccucuuuuuaccugauuagcaucuuccuucaccucguccgcauuccgacccauagacacguuaucggaaaacccugcccuaagccccaucggcugaaccacaugggcauuuguuccugcggccuguauaaacacccuggggugcccgugaaguggaagcgcugaggacuaguuauaagacugacuagcccgaugggccucccaacgggcccuccuccccuccuugcaccgagauuaauaaaaaaaaaaaaaaaaaaaaaaaaaaaaaaaaaaaaaaaaaaaaaaaaaaaaaaaaaaaaaaaaaaaaaaaaaaaaaaaaaaaaaaaaaaaaaaaaaaaa

SEQ ID NO: 41586 - RNA, 1662 nt, Artificial Sequence
  mRNA product Design i-3 (A100) comprising derived and/or modified sequence from LASV(Lassa virus/H.sapiens-wt/NGA/2018/ISTH_0959;Clade II)__AVV65099__GPCmut12 (opt5)
aggagaaagcuuaccaugggccagaucauuaccuucuuucaagaggugccccacgucaucgaagagguuaugaacauugugcugaucgcccucagccugcuugcuauucugaaggggaucuacaauguggucacaugcggacucuucggccugguguccuuucuucugcucugugggagaucuugcagcacgaccuauaaaggaguuuacgaacugcagacacuggagcucgacauggccucccugaacauguguaugccucuuucuugcaccaagaauaacagccaucacuauaucauggugggcaaugaaacagggcuggagcucacccugacaaacaccuccauuaucaaucauaaauucuguaaccuuucugaugcgcacaagaaaaaucuguacgaccaugcucucaugagcauuaucuccacguuucaccugagcauuccgaacuucaaucaguaugaggccaugucuugcgauuuuaacggaggcaagaucuccguccaguacaaucugagccacgccuaugcuauugacgccgcuaaccauuguggcaccaucgccaauggggugcuccaaacauucaugcggauggcguggggaggcucuuacaucgcccuggauuccgggaagggaagcugggacugcauuaugaccucuuaccaguaucuuaucauucagaacacaaccugggaagaucacugucaguuuucccgccccagcccuaucggcuaccuggggcuccugucccaaagaacgcgggacauuuauaucucucgcagacuucugggaacauucaccuggacacucagcgauuccgagggcaacgaaacccccggcggguacugccugacccgguggaugcugaucgaggcugagcucaaauguuuuggaaauacagccguugcuaagugcaacgaaaaacaugacgaggaguucugcgauaugcugcgccuuuuugacuucuguaagcaggccauuagacggcugaaaacggaagcgcagaugagcauccagcucauuaauaaggccgugaacgcucugaucaaugaucaacuuauuaugaagaaccaucugcgcgacaucaugggcaucccuuauugcaauuacucuaaauauuguuaccucaaccacaccgucacagggaagaccucccugcccagaugcugucuggugagcaauggaucuuaccucaacgaaacacacuucagcgacgauauugagcagcaggccgacaauaugaucaccgagcugcuucaaaaagaauauauugaucggcagggcaagacgccucuggggcucguggaccuguuugucuucuccacaucuuuuuaccugaucagcauuuuccuucaccucguuaaaaucccgacccaucgccacgugauuggaaagcccugcccuaaaccccauagacugaaccacaugggcaucuguuccugcggccuguauaagcacccuggggugcccgucaaguggaaacggugaggacuaguuauaagacugacuagcccgaugggccucccaacgggcccuccuccccuccuugcaccgagauuaauaaaaaaaaaaaaaaaaaaaaaaaaaaaaaaaaaaaaaaaaaaaaaaaaaaaaaaaaaaaaaaaaaaaaaaaaaaaaaaaaaaaaaaaaaaaaaaaaaaaa

SEQ ID NO: 41587 - RNA, 1662 nt, Artificial Sequence
  mRNA product Design i-3 (A100) comprising derived and/or modified sequence from LASV(LASV003-NIG-2008;Clade II)__AIT17580__GPCmut12 (opt5)
aggagaaagcuuaccaugggccagaucauuaccuucuuucaagaggugccccacgucaucgaagagguuaugaacauugugcugaucgcccucagccugcuugcuauucugaaggggaucuacaauguggccacaugcggacucuucggccuggucuccuuucuucugcucugugggagaucuugcagcacgaccuauaaaggaguguacgaacugcagacacuggagcucgacauggcgucccugaacauguguaugccucuuucuugcaccaagaauaacagccaucacuauaucaugguuggcaaugaaacagggcuggagcucacccugacaaacaccuccauuaucaaucauaaauucuguaaccuuucugaugcucacaagaaaaaucuguacgaccaugcccucaugagcauuaucuccacguuucaccugagcauuccgaacuucaaucaguaugaggccaugucuugcgauuuuaacggaggcaagaucuccgugcaguacaaucugagccacaccuaugcugucgacgccgcuaaccauuguggcacaauugccaauggggugcuccaaaccuucaugcggauggcguggggaggcucuuacaucgcccuggauuccgggaagggaagcugggacugcaucaugacaucuuaccaguaucuuauuauccagaacaccacgugggaagaucacugucaguuuucccgccccagcccuauuggcuaccuggggcuccugucccaaagaacacgggacaucuauauuucucgcagacuucugggaaccuucacauggacccucagcgauuccgagagcaacgaaacccccggcggcuacugccugacacgguggaugcugaucgaggcugagcucaaauguuuugggaauacggccguugcuaagugcaacgaaaaacaugacgaggaguucugcgauaugcugcgccuuuuugacuucuguaagcaggccaucagacggcugaaagcggaagcccagaugucuauucagcucaucaauaaggcugugaacgcccugauuaaugaucaacuuaucaugaagaaccaucugcgcgacauuaugggaaucccuuauugcaauuacuccaaauauuguuaccucaaccacaccgucacaggcagaaccagccugccccggugcugucuggugucuaaugggagcuaccucaacgaaacacacuucuccgacgauaucgagcagcaggcugacaauaugauuaccgagcugcuucaaaaggaauauauggaucgccagggaaaaacgccucugggccucguggaccuguuugucuucucuaccagcuuuuaccugaucuccauuuuccuucaccucguuaagaucccgacacauagacacgugauugggaaacccugcccuaagccccaucggcugaaccacaugggaaucuguagcugcggccuguauaaacacccuggcgugcccgucaaguggaagcgcugaggacuaguuauaagacugacuagcccgaugggccucccaacgggcccuccuccccuccuugcaccgagauuaauaaaaaaaaaaaaaaaaaaaaaaaaaaaaaaaaaaaaaaaaaaaaaaaaaaaaaaaaaaaaaaaaaaaaaaaaaaaaaaaaaaaaaaaaaaaaaaaaaaaa

SEQ ID NO: 41588 - RNA, 1662 nt, Artificial Sequence
  mRNA product Design i-3 (A100) comprising derived and/or modified sequence from LASV(LASV035-NIG-2009;Clade II)__AIT17588__GPCmut12 (opt5)
aggagaaagcuuaccaugggccagaucauuaccuucuuucaagaggugccccacgucaucgaagagguuaugaacauugugcugaucgcccucagccugcuugcuauucugaaggggaucuacaauguggccacaugcggacucuucggccuggucuccuuucuucugcucugugggagaucuugcagcacgaccuauaaaggaguguacgaacugcagacacuggagcucgacauggcgucccugaacauguguaugccucuuucuugcaccaagaauaacagccaucacuauaucaugguuggcaaugaaacagggcuggagcucacccugacaaacaccuccauuaucaaucauaaauucuguaaccuuucugaugcucacaagaaaaaucuguacgaccaugcccucaugagcauuaucuccacguuucaccugagcauuccgaacuucaaucaguaugaggccaugucuugcgauuuuaacggaggcaagaucuccgugcaguacaaucugagccacgcuuaugccgucgacgcugccaaccauuguggcaccauugcgaauggggugcuccaaacauucaugcggauggccuggggaggcucuuacaucgcucuggauuccgggaagggaagcugggacugcaucaugaccucuuaccaguaucuuauuauccagaacacaaccugggaagaucacugucaguuuucccgccccagcccuauuggcuaccuggggcuccugucccaaagaacgcgggacaucuauauuucucgcagacuucugggaacauucaccuggacacucagcgauuccgagggcaacgaaacccccggcggguacugccugacccgguggaugcugaucgaggccgagcucaaauguuuuggaaauacagcuguugccaagugcaacgaaaaacaugacgaggaguucugcgauaugcugcgccuuuuugacuucuguaagcaggcgaucagacggcugaaagccgaagcucagaugagcauucagcucaucaauaaggccgugaacgcucugauuaaugaucaacuuaucaugaagaaccaucugcgcgacauuaugggcaucccuuauugcaauuacucuaaauauuguuaccucaaccacacggucaccgggaagacaucccugcccagaugcugucuggugagcaauggaucuuaccucaacgaaacccacuucagcgacgauaucgagcagcaggccgacaauaugauuacagagcugcuucaaaaagaauauaucgaucggcagggcaagaccccucuggggcucguggaccuguuugucuucuccacgucuuuuuaccugauuagcaucuuccuucaccucguuaaaauuccgacacaucgccacgugaucggaaagcccugcccuaaaccccauagacugaaccacaugggcauuuguuccugcggccuguauaagcacccuggggugcccgucaaguggaaacggugaggacuaguuauaagacugacuagcccgaugggccucccaacgggcccuccuccccuccuugcaccgagauuaauaaaaaaaaaaaaaaaaaaaaaaaaaaaaaaaaaaaaaaaaaaaaaaaaaaaaaaaaaaaaaaaaaaaaaaaaaaaaaaaaaaaaaaaaaaaaaaaaaaaa

SEQ ID NO: 41589 - RNA, 1662 nt, Artificial Sequence
  mRNA product Design i-3 (A100) comprising derived and/or modified sequence from LASV(LASV1000-NIG-2009;Clade II)__AIT17782__GPCmut12 (opt5)
aggagaaagcuuaccaugggccagaucauuaccuucuuucaagaggugccccacgucaucgaagagguuaugaacauugugcugaucgcccucagccugcuugcuauucugaaggggaucuacaauguggccacaugcggacucuucggccuggucuccuuucuucugcucugugggagaucuugcagcacgaccuauaaaggaguguacgaacugcagacacuggagcucgacauggcgucccugaacauguguaugccucuuucuugcaccaagaauaacagccaucacuauaucaugguuggcaaugaaacagggcuggagcucacccugacaaacaccuccauuaucaaucauaaauucuguaaccuuucugaugcucacaagaaaaaucuguacgaccaugcccucaugagcauuaucuccacguuucaccugagcauuccgaacuucaaucaguaugaggccaugucuugcgauuuuaacggaggcaagaucuccgugcaguacaaucugagccacaccuaugcugucgacgccgcuaaccauuguggcacaauugccaauggggugcuccaaaccuucaugcggauggcguggggaggcucuuacaucgcccuggauuccgggaagggaagcugggacugcaucaugacaucuuaccaguaucuuauuauccagaacaccacgugggaagaucacugucaguuuucccgccccagcccuauuggcuaccuggggcuccugucccaaagaacacgggacaucuauauuucucgcagacuucugggaaccuucacauggacccucagcgauuccgagggcaacgaaacccccggcggguacugccugacacgguggaugcugaucgaggcugagcucaaauguuuuggaaauacggccguugcuaagugcaacgaaaaacaugacgaggaguucugcgauaugcugcgccuuuuugacuucuguaagcaggccaucaaaagacugaagaccgaagcgcagaugagcauucagcucaucaauaaggccgugaacgcucugauuaaugaucaacuuaucaugaaaaaccaucugcgggacauuaugggcaucccuuauugcaauuacucuaaguauuguuaccucaaccacacagucaccgggaaaacaucccugccccgcugcugucuggugagcaauggaucuuaccucaacgaaacccacuucagcgacgauaucgagcagcaggccgacaauaugauuacggagcugcuucaaaaggaauauaucgauagacagggcaaaacaccucuggggcucguggaccuguuugucuucuccaccucuuuuuaccugauuagcaucuuccuucaccucguuaagauuccgacccaucggcacguggugggaaaacccugcccuaagccccaucgccugaaccacaugggcaucuguuccugcggccuguauaagcacccugggguccccgugaaauggaagagaugaggacuaguuauaagacugacuagcccgaugggccucccaacgggcccuccuccccuccuugcaccgagauuaauaaaaaaaaaaaaaaaaaaaaaaaaaaaaaaaaaaaaaaaaaaaaaaaaaaaaaaaaaaaaaaaaaaaaaaaaaaaaaaaaaaaaaaaaaaaaaaaaaaaa

SEQ ID NO: 41590 - RNA, 1662 nt, Artificial Sequence
  mRNA product Design i-3 (A100) comprising derived and/or modified sequence from LASV(LASV221-NIG-2010;Clade II)__AIT17624__GPCmut12 (opt5)
aggagaaagcuuaccaugggccagaucauuaccuucuuucaagaggugccccacgucaucgaagagguuaugaacauugugcugaucgcccucagccugcuugcuauucugaaggggaucuacaauguggccacaugcggacucuucggccuggucuccuuucuucugcucugugggagaucuugcagcacgaccuauaaaggaguguacgaacugcagacacuggagcucgacauggcgucccugaacauguguaugccucuuucuugcaccaagaauaacagccaucacuauaucaugguuggcaaugaaacagggcuggagcucacccugacaaacaccuccauuaucaaucauaaauucuguaaccuuucugaugcucacaagaaaaaucuguacgaccaugcccucaugagcauuaucuccacguuucaccugagcauuccgaacuucaaucaguaugaggccaugucuugcgauuuuaacggaggcaagaucuccgugcaguacaaucugagccacaccuaugcuauugacgccgcuaaccauuguggcacaaucgccaaugggguccuccaaaccuucaugcggauggcguggggaggcucuuacaucgcccuggauuccgggaagggaagcugggacugcauuaugacaucuuaccaguaucuuaucauucagaacaccacgugggaagaucacugucaguuuucccgccccagcccuaucggcuaccuggggcuccugucccaaagaacacgggacauuuauaucucucgcagacuucugggaaccuucacauggacccucagcgauuccgagggcaacgaaacccccggcggguacugccugacacgguggaugcugaucgaggcugagcucaaauguuuuggaaauacggccguggcuaagugcaacgaaaaacaugacgaggaguucugcgauaugcugcgccuuuuugacuucuguaagcaggccauuagacggcugaaaaccgaagcgcagaugagcauccagcucauuaauaaggccguuaacgcucugaucaaugaucaacuuauuaugaagaaccaucugcgcgacaucaugggcaucccuuauugcaauuacucuaaauauuguuaccucaaccacacagugaccgggaagacaucccugcccagaugcugucuggucagcaauggaucuuaccucaacgaaacccacuucagcgacgauauugagcagcaggccgacaauaugaucacggagaugcugcaaaaagaauauauggaucggcagggcaagacaccucuugggcugguggaccucuuuguguucuccaccucuuuuuaccugauuagcaucuuccugcaccuugucaaaauuccgacccaucgccacguuaucggaaagcccugcccuaaaccccauagacucaaccacaugggcauuuguuccugcggccuguauaagcacccuggggugcccgugaaguggaaacggugaggacuaguuauaagacugacuagcccgaugggccucccaacgggcccuccuccccuccuugcaccgagauuaauaaaaaaaaaaaaaaaaaaaaaaaaaaaaaaaaaaaaaaaaaaaaaaaaaaaaaaaaaaaaaaaaaaaaaaaaaaaaaaaaaaaaaaaaaaaaaaaaaaaa

SEQ ID NO: 41591 - RNA, 1662 nt, Artificial Sequence
  mRNA product Design i-3 (A100) comprising derived and/or modified sequence from LASV(LASV237-NIG-2010;Clade II)__AIT17638__GPCmut12 (opt5)
aggagaaagcuuaccaugggccagaucauuaccuucuuucaagaggugccccacgucaucgaagagguuaugaacauugugcugaucgcccucagccugcuugcuauucugaaggggaucuacaauguggccacaugcggacucuucggccuggucuccuuucuucugcucugugggagaucuugcagcacgaccuauaaaggaguguacgaacugcagacacuggagcucgacauggcgucccugaacauguguaugccucuuucuugcaccaagaauaacagccaucacuauaucaugguuggcaaugaaacagggcuggagcucacccugacaaacaccuccauuaucaaucauaaauucuguaaccuuucugaugcucacaagaaagaccuguacgaucaugcccucaugagcauuaucuccacguuucaccugagcauuccgaauuucaaccaguaugaggccaugucuugcgacuuuaauggaggcaagaucuccgugcaguacaaccugagccacaccuaugcugucgaugccgcuaaucauuguggcacaauugccaacggggugcuccaaaccuucaugcggauggcguggggaggcucuuacaucgcccuggacuccgggaagggaagcugggauugcaucaugacaucuuaccaguaucuuauuauccagaauaccacgugggaagaccacugucaguuuucccgccccagcccuauuggcuaccuggggcuccugucccaaagaacacgggauaucuauauuucucgcagacuucugggaaccuucacauggacccucagcgacuccgagggcaacgaaacccccggcggguacugccugacacgguggaugcugaucgaggcugagcucaaauguuuuggaaacacggccguugcuaagugcaaugaaaaacaugaugaggaguucugcgacaugcugcgccuuuuugauuucuguaagcaggccaucagacggcugaaaaccgaagcgcagaugagcauucagcucaucaacaaggccgugaaugcucugauuaacgaccaacuuaucaugaagaaucaucugcgcgacauuaugggcaucccuuauugcaacuacucuaaauauuguuaccucaaucacacagucaccgggaagacaucccugcccagaugcugucuggugagcaacggaucuuaccucaaugaaacccacuucagcgaugacaucgagcagcaggccgauaacaugauuacggagcugcuucaaaaagaauauauggaccggcagggcaagacaccucuggggcucguggaucuguuugucuucuccaccucuuuuuaccugaucagcauuuuccuucaccucaucaaaauuccgacccaucgccacaucacaggaaagcccugcccuaaaccccauagacugaaucacaugggcauuuguuccugcggccuguauaagcacccugggguucccgugaaguggaaacggugaggacuaguuauaagacugacuagcccgaugggccucccaacgggcccuccuccccuccuugcaccgagauuaauaaaaaaaaaaaaaaaaaaaaaaaaaaaaaaaaaaaaaaaaaaaaaaaaaaaaaaaaaaaaaaaaaaaaaaaaaaaaaaaaaaaaaaaaaaaaaaaaaaaa

SEQ ID NO: 41592 - RNA, 1662 nt, Artificial Sequence
  mRNA product Design i-3 (A100) comprising derived and/or modified sequence from LASV(LASV253-NIG-2011;Clade II)__AIT17670__GPCmut12 (opt5)
aggagaaagcuuaccaugggccagaucauuaccuucuuucaagaggugccccacgucaucgaagagguuaugaacauugugcugaucgcccucagccugcuugcuauucugaaggggaucuacaauguggccacaugcggacucuucggccuggucuccuuucuucugcucugugggagaucuugcagcacgaccuauaaaggaguguacgaacugcagacacuggagcucgacauggcgucccugaacauguguaugccucuuucuugcaccaagaauaacagccaucacuauaucaugguuggcaaugaaacagggcuggagcucacccugacaaacaccuccauuaucaaucauaaauucuguaaccuuucugaugcucacaagaaaaaucuguacgaccaugcccucaugagcauuaucuccacguuucaccugagcauuccgaacuucaaucaguaugaggccaugucuugcgauuuuaacggaggcaagaucuccgugcaguacaaucugagccacaccuaugcugucgacgccgcuaaccauuguggcacaauugccaauggggugcuccaaaccuucaugcggauggcguggggaggcucuuacaucgcccuggauuccgggaagggaagcugggacugcaucaugacaucuuaccaguaucuuauuauccagaacaccacgugggaagaucacugucaguuuucccgccccagcccuauuggcuaccuggggcuccugucccaaagaacacgggacaucuauauuucucgcagacuucugggaaccuucacauggacccucagcgauuccgagggcaacgaaacccccggcggguacugccugacacgguggaugcugaucgaggcugagcucaaauguuuuggaaauacggccguugcuaagugcaacgaaaaacaugacgaggaguucugcgauaugcugcgccuuuuugacuucuguaagcaggccaucagacggcugaaagcggaagcccagaugagcauucagcucaucaauaaggcugugaacgcccugauuaaugaucaacuuaucaugaagaaccaucugcgcgacauuaugggcaucccuuauugcaauuacucuaaauauuguuaccucaaccacaccgucacagggagaaccucccugccccggugcugucuggugagcaauggaucuuaccucaacgaaacacacuucagcgacgauaucgagcagcaggcugacaauaugauuaccgagcugcuucaaaaggaauauaucgaucgccagggcaaaacgccucuggggcucguggaccuguuugucuucuccacaucuuuuuaccugauuagcaucuuccuucaccucguuaagauuccgacccauagacacaucauuggaaaacccugcccuaagccccaucggcugaaccacaugggcaucuguuccugcggccuguauaaacacccuggggugcccgugaaguggaagcgcugaggacuaguuauaagacugacuagcccgaugggccucccaacgggcccuccuccccuccuugcaccgagauuaauaaaaaaaaaaaaaaaaaaaaaaaaaaaaaaaaaaaaaaaaaaaaaaaaaaaaaaaaaaaaaaaaaaaaaaaaaaaaaaaaaaaaaaaaaaaaaaaaaaaa

SEQ ID NO: 41593 - RNA, 1662 nt, Artificial Sequence
  mRNA product Design i-3 (A100) comprising derived and/or modified sequence from LASV(LASV254-NIG-2011;Clade II)__AIT17674__GPCmut12 (opt5)
aggagaaagcuuaccaugggccagaucauuaccuucuuucaagaggugccccacgucaucgaagagguuaugaacauugugcugaucgcccucagccugcuugcuauucugaaggggaucuacaauguggccacaugcggacucuucggccuggucuccuuucuucugcucugugggagaucuugcagcacgaccuauaaaggaguguacgaacugcagacacuggagcucgacaugaccaaccugaauauguguaugccucuuuccugcacaaagaacaauucucaucacuauaucaugguuggcaacgaaaccgggcuggagcucacacugaccaauacgagcauuaucaaccauaaauucuguaaucuuuccgaugcgcacaagaaaaaccuguacaaucaugcucucaugucuauuaucagcaccuuucaccuguccauuccgaacuucaaucaguaugaggccaugagcugcgacuuuaacggaggcaagaucucugugcaguacaaucugucccacagcuaugccgucgaugcugccaaccauuguggcacaauugcuaacggggugcuccaaaccuucaugcggauggccuggggaggcucuuacaucgcgcuggacuccgggaagggaaauugggauugcaucaugacaagcuaccaguaucuuauuauccagaacaccacgugggaagaccacugucaguuuucucgccccuccccuauuggcuaccuggggcuccugagccaaagaacacgggauaucuauauuucccgcagacuucugggaaccuucacauggacccucucugacagcgagggcaaugaaacccccggcggguacugccugacacgguggaugcugaucgaggccgagcucaaauguuuuggaaacacggcuguugccaagugcaaugaaaaacaugaugaggaguucugcgacaugcugcgccuuuuugauuucuguaagcaggcuaucagacggcugaaaaccgaagcccaggcgaacauucagcucaucaauaaggccgugaacgcucugauuaaugaccaacuuaucaugaagaaccaucugcgcgauauuaugggcaucccuuauugcaauuacuccaaauauuguuaccucaaccacacagucaccgggaagacaagccugcccagaugcugucuggugucuaauggauccuaccucaacgaaacccacuucagcgacgacaucgagcagcaggccgauaauaugauuacggagcugcuucaaaaagaauauauggaccggcagggcaagacaccucuggggcucguggaucuguuugucuucucuaccagcuuuuaccugaucuccauuuuccuucaccucguuaaaaucccgacccaucgccacgugauuggaaagcccugcccuaaaccccauagacugaaccacaugggcaucuguucuugcggccuguauaagcacccuggggugcccgucaaguggaaacggugaggacuaguuauaagacugacuagcccgaugggccucccaacgggcccuccuccccuccuugcaccgagauuaauaaaaaaaaaaaaaaaaaaaaaaaaaaaaaaaaaaaaaaaaaaaaaaaaaaaaaaaaaaaaaaaaaaaaaaaaaaaaaaaaaaaaaaaaaaaaaaaaaaaa

SEQ ID NO: 41594 - RNA, 1662 nt, Artificial Sequence
  mRNA product Design i-3 (A100) comprising derived and/or modified sequence from LASV(Nig08-A19;Clade III)__ADU56618__GPCmut12 (opt5)
aggagaaagcuuaccaugggccagaucgugaccuucuuucaagaggucccccacguuauugaagaggugaugaacaucgugcugauugcccucagcauccuggcuauucuuaaggggcuguacaauaucgccacaugcggacucaucggccuggucacguuccuucugcucuccgggagaucuuguagcaugaccuauaaaggaguguacgaacugcagacacuggagcucaacaugaauacccugaacaugugcaugccucuuuccuguacaaagaauaacucucaucacuauauuaugguuggcaaugaaaccgggcuggagcucacacugaccaacacgagccuucugcaucacaaauuuugcaaucucuccgacgcgcauaagaaaaaccuguacgaucacacccugaugucuaucauuagcacauuccaccucuccaucccgaauuuuaaccaguaugaggcuaugagcugugacuucaauggaggcaagauuaccgugcaguacaaccugucucauuccuaugccaucgaugccgcuaaucacugcggcacagucgccaacggggugcuucaaaccuuuaugcggauggcuuggggaggcagcuacauugcccuggacucugggcgcggaaagugggauuguaucaugacguccuaccaguaucucaucauucagaacacaaccugggaagaccauugccaguucagcagacccucuccuaucggcuaccuggggcuucugucccaacggacacgcgauauuuauaucagcagacggcuccugggaaccuuuaccuggacacuguccgacucugagggcaaugaaacgcccggcggguacugucucacccgcuggaugcugauugaggcggagcuuaaaugcuucggaaacacagccguugcuaaguguaaugaaaaacacgaugaggaauuuugcgacaugcugagacucuucgauuuuugcaagcaggccauccggcgccugaaagcugaggcccagaugagcauccagcuuauuaacaaggcggugaaugcccugaucaacgaccaacucauuaugaagaaucaccugagagauaucaugggcauuccuuauuguaacuacuccaaauauugcuaccugaaucauaccagcacagggcggaccucucucccccgcuguugccuggucuccaacggaagcuaccuuaaugaaacgcacuucucugacgacaucgagcagcaggcugauaacaugaucacagagaugcugcaaaaggaauaucucgacagacagggcaaaaccccucuggggcugguggaucuuuucguguuuagcaccuccuucuaccucauuucuaucuuucugcaucuggucaagauuccgacacaccggcauaucguuggaaaacccuguccuaagccccaccgccucaaucacaugggcauuugcagcuguggccuguauaaacagccuggggugcccgugagauggaagcggugaggacuaguuauaagacugacuagcccgaugggccucccaacgggcccuccuccccuccuugcaccgagauuaauaaaaaaaaaaaaaaaaaaaaaaaaaaaaaaaaaaaaaaaaaaaaaaaaaaaaaaaaaaaaaaaaaaaaaaaaaaaaaaaaaaaaaaaaaaaaaaaaaaaa

SEQ ID NO: 41595 - RNA, 1665 nt, Artificial Sequence
  mRNA product Design i-3 (A100) comprising derived and/or modified sequence from LASV(G1180-SLE-2010;Clade IV)__AIT17168__GPCmut12 (opt5)
aggagaaagcuuaccaugggccagaucgugaccuucuuucaagaggucccccacguuauugaagaggugaugaacaucgugcugauugcccucagcauccuggcuguccuuaaggggcuguacaauuucgccacaugcggacucgugggccugcuuacguuucugcuccugugugggagauccugcaccgcgucucgguauaaaggaguuuacgaacugcagacacucgagcugaacauggaaacccuuaauauguguaugccucugagcugcacaaagaacaauucccaucacuauauuauggugggcaacgagaccgggcucgagcugacacuuaccaauacgucuaucaucaaccauaaauucuguaaucugagcgacgcucacaagaaaaaccucuacgaucaugcccugauguccauuaucucuaccuuucaccugagcauuccgaauuucaaccaguaugaagccauguccugcgacuuuaauggaggcaagaucagcguccaguacaaccucucucacuccuaugcuggcgaugccgcuaaucauugugggacaguggccaacggaguucugcaaaccuucaugcgcauggcguggggcgggagcuacauugcccuugacucuggacacggcuccugggauugcaucaugacaagcuaccaguaucugauuauccagaacaccacgugggaggaccauugucaguuuucuagacccuccccuaucggguaccucggacugcuuagccaacggacacgcgauauuuauaucuccagacggcugcucggcaccuucacauggacccugucugacagcgaaggcaaggauacccccgggggauacugccugacacgcuggaugcucauugaggcugagcugaaauguuuuggcaauacggccguggcuaagugcaacgaaaaacacgacgaggaguucugcgauaugcuuagacuguuugacuucuguaagcaggccauccagcggcucaaagcggaagcccagauguccauucaacugaucaauaaggcugucaacgcccuuaucaaugaucagcugauuaugaagaaccaccuccgcgacaucauggggauuccuuauugcaauuacagcaaauauuguuaccugaaccauaccacaaccggaaagacaucucugcccaaaugcugucucguguccaauggcagcuaccugaacgaaacccacuucucugacgauaucgagcagcaagcugacaauaugauuacggagaugcuucagaaggaauauauggagagacaggggaaaacaccucugggacucguggaucuguuugucuucagcaccuccuuuuaccugaucucuaucuuccuucaucucguuaagauuccgacccaccggcauaucgugggcaaaagcugccccaagccucaccgccugaaccacaugggcauuuguuccugcgggcuguauaagcagcccggagugccugucaaauggaagagaugaggacuaguuauaagacugacuagcccgaugggccucccaacgggcccuccuccccuccuugcaccgagauuaauaaaaaaaaaaaaaaaaaaaaaaaaaaaaaaaaaaaaaaaaaaaaaaaaaaaaaaaaaaaaaaaaaaaaaaaaaaaaaaaaaaaaaaaaaaaaaaaaaaaa

SEQ ID NO: 41596 - RNA, 1665 nt, Artificial Sequence
  mRNA product Design i-3 (A100) comprising derived and/or modified sequence from LASV(G1442-SLE-2011;Clade IV)__AIT17180__GPCmut12 (opt5)
aggagaaagcuuaccaugggccagaucgugaccuucuuucaagaggucccccacguuauugaagaggugaugaacaucgugcugauugcccucagcauccuggcuguccuuaaggggcuguacaauguggccacaugcggacucauuggccugguuacguuccuucugcucugugggagauccugcaccacaacccuguauaaaggaguguacgaacugcagacacucgagcugaacauggaaacccuuaauauguguaugccucugucuugcacaaagaacaauagccaucacuauauccgggucggcaacgagaccgggcucgagcugacgcuuaccaauacauccaucauuaaccauaaauuuuguaaucugucugacgcgcacaagaaaaaccucuacgaucaugcucugaugagcaucauuuccaccuuccaccugucuaucccgaauuuuaaccaguaugaagccaugagcugcgacuucaauggaggcaagauuuccgugcaguacaaccucagccacucuuaugccggcgaugcugccaaucauugugggacaguugcuaacggagugcugcaaaccuuuaugcgcauggccuggggcggguccuacaucgcgcuugacagcggaagaggcaacugggauugcauuaugacgucuuaccaguaucugaucauccagaauacaaccugggacgaucacugucaguucucccggcccagcccuauuggguaccucggacugcuuucucaacgcacaagagacgucuauaucucccggcgccugcucggcaccuuuaccuggacacugagcgauuccgagggcaaggacacgcccgggggauacugccugaccagauggaugcucauugaagccgagcugaaauguuucggcaacacagcuguggccaagugcaaugagaaacaugaugaagaguuuugcgacaugcuucggcuguucgauuuuuguaagcaggcuauccagcgccucaaagccgaagcgcagaugucuauucaacugaucaacaaggccgugaaugcucuuaucaacgaccagcugauuaugaagaaucaccucagagacaucauggggauuccuuauugcaacuacagcaaauauuguuaccugaauaacaccgccacaggaaagaccucccugcccaaaugcugucucaucagcaauggcucuuaccugaacgagacgcacuucuccgaugacauugaacaggaggcugauaauaugaucacagagaugcuucaaaaggaauauauggagcggcaggggaaaaccccucugggacucgucgaccuguucguuuuuagcaccucuuucuaccugaucagcauuuuucuucaucucgugaagaucccgacacaccgccauauugugggcaaauccugccccaagccucacagacugaaccauaugggcaucuguucuugcgggcuguauaagcagcccggagucccugugcgguggaaacgcugaggacuaguuauaagacugacuagcccgaugggccucccaacgggcccuccuccccuccuugcaccgagauuaauaaaaaaaaaaaaaaaaaaaaaaaaaaaaaaaaaaaaaaaaaaaaaaaaaaaaaaaaaaaaaaaaaaaaaaaaaaaaaaaaaaaaaaaaaaaaaaaaaaaa

SEQ ID NO: 41597 - RNA, 1665 nt, Artificial Sequence
  mRNA product Design i-3 (A100) comprising derived and/or modified sequence from LASV(G3010-SLE-2013;Clade IV)__AIT17344__GPCmut12 (opt5)
aggagaaagcuuaccaugggccagaucgugaccuucuuucaagaggucccccacguuauugaagaggugaugaacaucgugcugauugcccucagcauccuggcuguccuuaaggggcuguacaauuucgccacaugcggacucgugggccugguuacguuucuucugcucugugggagauccugcaccacaucucuguauaaaggaguguacgaacugcagacccucgagcugaacauggaaacacuuaauauguguaugccucugagcugcaccaagaacaauucccaucacuauauuauggucggcaacgagacagggcucgagcugacccuuacgaauaccucuaucaucaaccauaaauucuguaaucugagcgacgcgcacaagaaaaaccucuacaaucaugcucugauguccauuaucucuacauuucaccugagcauuccgaacuucaaucaguaugaagccauguccugcgauuuuaacggaggcaagaucagcgugcaguacaaucucucucacuccuaugccggcgacgcugccagccauugugggaccguugcuaacggagugcugcaaacauucaugcggauggccuggggcgggucuuacauugcgcuugauuccggauacggcaagugggacugcaucaugaccagcuaucaguaccugauuauccagaacacgacaugggaggaucacugucaguuuucucgccccuccccuaucggguaucucggacugcuuagccaaagaacccgggacauuuacaucucccgcagacugcucggcacauucaccuggacccugucugauagcgaaggcaaagacacacccgggggauauugccugacgcgguggaugcucauugaggccgagcugaaguguuuuggcaauaccgcugucgccaaaugcaacgaaaagcaugaugaggaguucugcgacaugcuucgccuguuugauuucuguaaacaggcuauccagagacucaagacagaagcccagauguccauucaacugaucaauaaggcggugaacgcccuuaucaaugaccagcugauuaugaaaaaccaccuccgggauaucauggggauuccuuacugcaauuauagcaaguacuguuaccugaaccacaccacaaccggaaaaacgucucugcccaagugcugucucguguccaauggcagcuaucugaacgaaacacauuucucugacgacaucgagcagcaagcugauaauaugauuaccgagaugcuucagaaagaauacauggagcgccaggggaagaccccucugggacucgucgaccuguuuguuuucagcacauccuuuuaucugaucucuaucuuccuucaccucgugaaaauuccgacccauagacacaucgugggcaagagcugccccaagccucaucggcugaaccacaugggcauuuguuccugcgggcuguacaaacagcccggagucccugugcgcuggaagagaugaggacuaguuauaagacugacuagcccgaugggccucccaacgggcccuccuccccuccuugcaccgagauuaauaaaaaaaaaaaaaaaaaaaaaaaaaaaaaaaaaaaaaaaaaaaaaaaaaaaaaaaaaaaaaaaaaaaaaaaaaaaaaaaaaaaaaaaaaaaaaaaaaaaa

SEQ ID NO: 41598 - RNA, 1665 nt, Artificial Sequence
  mRNA product Design i-3 (A100) comprising derived and/or modified sequence from LASV(G502-SLE-2009;Clade IV)__AIT17126__GPCmut12 (opt5)
aggagaaagcuuaccaugggccagaucgugaccuucuuucaagaggucccccacguuauugaagaggugaugaacaucgugcugauugcccucagcauccuggcuguccuuaaggggcuguacaauuucgccacaugcggacucgugggccugcuuacguuucugcuccugugugggagauccugcaccacaggacuguauaaaggcguuuacgaacuccagacccuggagcuuaacauggaaacacugaauauguguaugccucucucuugcaccaagaacaauagccaucacuauauuaugguggggaacgagacaggacuggagcuuacccugacgaauaccuccaucaucaaccauaaauucuguaaucucucugacgcgcacaagaaaaaccuguacgaucaugcucugaugagcauuaucuccacauuucaccucucuauuccgaauuucaaccaguaugaagccaugagcugcgacuuuaauggcggcaagaucuccguccaguacaaccugagccacucuuaugccggggaugcugccgaccauuguggaaccguggcuaauggcguucuucaaacauucaugcggauggccuggggaggguccuacauugcgcuggauagcggccgcgggagaugggacugcaucaugaccucuuaccaguaucucauuauccagaacacgacaugggaggaucacugucaguuuucccggcccagcccuaucggauaccugggccuucugucucaacgcaccagagacauuuauaucucccggcgccuccugggcacauucaccuggacccugagcgauuccgaagggaaggacacacccggaggcuacugccucacgagauggaugcugauugaggccgagcuuaaauguuuugggaacaccgcuguggccaagugcaaugaaaaacaugaugaggaguucugcgacaugcugcggcucuuugauuucuguaagcaggcuauccagcgccugaaagccgaagcgcagaugucuauucaacuuaucaacaaggccgucaaugcucugaucaacgaccagcucgugaugaagaaucaccugagagacauuaugggaaucccuuauugcaacuacagccgguauuguuaccugaaucacacaaccacaggccgcaccucccuccccaaaugcugucuggugagcaacgggucuuaccuuaaugaaacgcauuucuccgaugacauugagcagcaagccgauaacaugaucacagagaugcugcagaaggaauauauggagagacagggaaaaaccccucucggccuggucgaccuguuuguuuucagcaccucuuuuuaccuuauuagcaucuuccuccaccuggugaagaucccgacacaucggcacauugugggcaaauccugccccaagccucaucgccugaaucacauggggaucuguucuugcggacucuauaaacagcccggcgucccugugaaguggaagagaugaggacuaguuauaagacugacuagcccgaugggccucccaacgggcccuccuccccuccuugcaccgagauuaauaaaaaaaaaaaaaaaaaaaaaaaaaaaaaaaaaaaaaaaaaaaaaaaaaaaaaaaaaaaaaaaaaaaaaaaaaaaaaaaaaaaaaaaaaaaaaaaaaaaa

SEQ ID NO: 41599 - RNA, 1665 nt, Artificial Sequence
  mRNA product Design i-3 (A100) comprising derived and/or modified sequence from LASV(G733-SLE-2010;Clade IV)__AIT17154__GPCmut12 (opt5)
aggagaaagcuuaccaugggccagaucgugaccuucuuucaagaggucccccacguuauugaagaggugaugaacaucgugcugauugcccucagcauccuggcuguccuuaaggggcuguacaauuucgccacaugcggaauugugggccucguuuccuuucugcuucugugugggagaucuugcacgaccagccucuauaaaggaguguacgaacugcagacacuggagcucaacauggaaacccugaauauguguaugccucuuuccugcacaaagaacaauucucaucacuauaucauggucggcaacgagaccgggcuggagcucacacugaccaauacgagcaucauuaaccauaaauucuguaaucuuuccgacgcgcacaagaaaaaccuguacgaucaugcucucaugucuaucauuagcaccuuucaccuguccaucccgaauuucaaccaguaugaagccaugagcugcgacuuuaauggaggcaagauuucugugcaguacaaccugucccacagcuaugccggcgaugcugccaaucauugugggacaaucgcuaacggaguucuccaaaccuucaugcggauggccuggggcgggucuuacauugcgcuggacuccggacgcgauagaugggacugcaucaugacaagcuaccaguaucuuaucauucagaacaccacgugggaggaucacugucaguuuucucggcccuccccuaucggcuaccuggggcuccugagccaacgcacaagagacauuuauaucucccggcgccuucugggaaccuucacauggacccucucugauagcgaaggcaaggacacccccggcggguacugccugacaagauggaugcugauugaggccgagcucaaauguuuuggaaauacggcuguggccaagugcaacgaaaaacaugaugaggaguucugcgacaugcugcggcuuuuugauuucuguaagcaggcuauccagcgccugaaagccgaagcgcagauguccauccaacucauuaauaaggccgucaacgcucugaucaaugaccagcuuauuaugaagaaccaccugagagacaucaugggcauuccuuauugcaauuacagcaaauauuguuaccucaaccacaccacaaccgggaagacaucucugcccaaaugcugucugguguccaauggaagcuaccucaacgaaacccauuucucugaugacaucgagcagcaagccgauaauaugaucacggagaugcugcagaaggaauauauggagcggcagggcaaaacaccucuugggcugguggaccucuuugucuucagcaccuccuuuuaccugauuucuaucuuccugcaccuuguuaagauuccgacccaucgccacguggugggaaaaagcugccccaagccucauagacucaaccacaugggcaucuguuccugcggccuguaugggcagcccggagucccugugaaguggaaacggugaggacuaguuauaagacugacuagcccgaugggccucccaacgggcccuccuccccuccuugcaccgagauuaauaaaaaaaaaaaaaaaaaaaaaaaaaaaaaaaaaaaaaaaaaaaaaaaaaaaaaaaaaaaaaaaaaaaaaaaaaaaaaaaaaaaaaaaaaaaaaaaaaaaa

SEQ ID NO: 41600 - RNA, 1665 nt, Artificial Sequence
  mRNA product Design i-3 (A100) comprising derived and/or modified sequence from MOPV/LASV reassortant(IGS-1;Clade IV)__AFY05576__GPCmut12 (opt5)
aggagaaagcuuaccaugggccagaucgugaccuucuuucaagaggucccccacguuauugaagaggugaugaacaucgugcugauugcccucagcguccuggcugugcuuaaggggcuguacaauuucgccacaugcggacucguuggccuggugacguuucuucugcucugugggagauccugcaccacaucucuguauaaaggagucuacgaacugcagacccucgagcugaacauggaaacacuuaauauguguaugccucugagcugcaccaagaacaauucccaucacuauaucauggugggcaacgagacagggcucgagcugacccuuacgaauaccucuauuaucaaccauaaauucuguaaucugagcgacgcgcacaagaaaaaccucuacgaucaugcucugauguccaucauuucuacauuucaccugagcaucccgaauuucaaccaguaugaagccauguccugcgacuuuaauggaggcaagauuagcguucaguacaaccucucucacuccuaugccggcgaugcugccaaucauugugggaccguggcuaacggaguccugcaaacauucaugcggauggccuggggcgggagcuacaucgcgcuugacucuggacgcggcaacugggauugcauuaugaccuccuaccaguaucugaucauucagaauacgacaugggaggaccacugucaguuuagcagacccucuccuaucggguaccucggacugcuuucccaacggacccgcgauaucuauauuagcagacggcugcucggcacauucaccuggacccuguccgacucugaaggcgaggauacacccgggggauacugccugacgcgcuggaugcucaucgaggccgaacugaaguguuuuggcaacaccgcuguggccaaaugcaaugagaagcaugacgaagaguucugcgauaugcuuagacuguuugacuucuguaaacaggcuauucagcggcucaaggccgaagcgcagaugagcauccaacugauuaacaaagccgugaaugcucuuaucaacgaucagcugaucaugaagaaucaccuccgcgacauuauggggaucccuuauugcaacuacuccaaguauuguuaccugaaucacacaaccacaggaagaaccagccugcccaaaugcugucucgucucuaacggcuccuaccugaaugagacgcauuucagcgacgauauugagcagcaagccgacaacaugaucacagaaaugcuucagaaggaguauauggaacggcaggggaaaaccccucugggacucguugaucuguuuguguucucuaccagcuuuuaccugauuuccaucuuccuucaccucgugaagaucccgacacaucgccacauugucggcaaaucuugccccaagccucauagacugaaucacaugggcaucuguagcugcgggcuguauaaacagcccggagugccuguuaaguggaagcggugaggacuaguuauaagacugacuagcccgaugggccucccaacgggcccuccuccccuccuugcaccgagauuaauaaaaaaaaaaaaaaaaaaaaaaaaaaaaaaaaaaaaaaaaaaaaaaaaaaaaaaaaaaaaaaaaaaaaaaaaaaaaaaaaaaaaaaaaaaaaaaaaaaaa

SEQ ID NO: 41601 - RNA, 1665 nt, Artificial Sequence
  mRNA product Design i-3 (A100) comprising derived and/or modified sequence from LASV(LM765-SLE-2012;Clade IV)__AIT17814__GPCmut12 (opt5)
aggagaaagcuuaccaugggccagaucgugaccuucuuucaagaggucccccacguuauugaagaggugaugaacaucgugcugauugcccucagcauccuggcuguccuuaaggggcuguacaauuucgccacaugcggacucgugggccugguuacguuucuucugcucugugggagauccugcaccacaucucuguauaaaggaguguacgaacugcagacccucgagcugaacauggaaacacuuaauauguguaugccucugagcugcaccaagaacaauucccaucacuauauuauggucggcaacgagacagggcucgagcugacccuuacgaauaccucuaucaucgaccauaaauucuguaaccugagcgaugcgcaccggaagaaucucuacgaccaugcucugauguccauuaucucuacauuucaccugagcauuccgaacuucaaucaguaugaagccauguccugcgauuuuaacggaggcaaaaucagcgugcaguacaaucucucucacuccuaugccaaggacgcugccgaucauuguggcaccguugcuaacggggugcugcaaacauucaugcgcauggccuggggaggcagcuacauugcgcuugacucugggagaggacggugggauugcaucaugaccuccuaccaguaucugauuauccagaauacgacaugggaggaccacugucaguuuagccgccccucuccuaucggcuaccucgggcugcuuucccaaagaacccgggauauuuauaucagccgcagacugcucggaacauucaccuggacccuguccgacucugaaggcaaggauacacccggcggguacugccugacgcgguggaugcucauugaggccgagcugaaauguuuuggaaacaccgcugucgccaagugcaacgaaaaacaugacgaggaguucugcgauaugcuucgccuguuugacuucuguaagcaggcuauccagagacucaaagccgaagcgcagaugagcauucaacugaucaauaaggccgugaacgcucuuaucaaugaccagcugauuaugaagaaccaccuccgggauaucaugggcauuccuuauugcaauuacuccaaauauuguuaccugaaccacacaaccacagggaagaccagccugcccaaaugcugucucgugucuaauggauccuaccugaacgaaacgcauuucagcgacgauaucgagcagcaagccgacaauaugauuacagagaugcuucagaaggaauauauggagcgccagggcaaaaccccucuggggcucgucgaucuguuuguuuucucuaccagcuuuuaccugaucuccaucuuccuucaccucgugaagauuccgacacauagacacaucgugggaaaacccugcccuaagccccaucggcugaaccacaugggcauuuguucuugcggccuguauaagcagccugggguccccgugaaauggaagcgcugaggacuaguuauaagacugacuagcccgaugggccucccaacgggcccuccuccccuccuugcaccgagauuaauaaaaaaaaaaaaaaaaaaaaaaaaaaaaaaaaaaaaaaaaaaaaaaaaaaaaaaaaaaaaaaaaaaaaaaaaaaaaaaaaaaaaaaaaaaaaaaaaaaaa

SEQ ID NO: 41602 - RNA, 1665 nt, Artificial Sequence
  mRNA product Design i-3 (A100) comprising derived and/or modified sequence from LASV(LM776-SLE-2012;Clade IV)__AIT17824__GPCmut12 (opt5)
aggagaaagcuuaccaugggccagaucgugaccuucuuucaagaggucccccacguuauugaagaggugaugaacaucgugcugauugcccucagcauccuggcuguccuuaaggggcuguacaauuucgccacaugcggacucgugggccugguuacguuucuucugcucugugggagauccugcaccacaucuguguauaaaggagucuacgaacugcagacccuggagcucaacauggaaacacugaauauguguaugccucuuagcugcaccaagaacaauucccaucacuauauuauggugggcaacgagacagggcuggagcucacccugacgaauaccucuaucaucaaccauaaauucuguaaucuuagcgacgcgcacaagaaaaaccuguacgaucaugcucucauguccauuaucucuacauuucaccugagcauuccgaauuucaaccaguaugaagccauguccugcgacuuuaauggaggcaagaucagcguucaguacaaccugucucacuccuaugccggcgaugcugccaaucauugugggaccguggcuaacggaguccuccaaacauucaugcggauggccuggggcgggagcuacauugcgcuggacucuggacacggcaagugggauugcaucaugaccuccuaccaguaucuuauuauccagaacacgacaugggaggaccauugucaguuuagccgccccucuccuaucggguaccugggacuccugucccaaagaacccgggauauuuauaucagccgcagacuucugggcacauucaccuggacccucuccgacucugaaggcaaagauacacccgggggauacugccugacgcgguggaugcugauugaggccgagcucaaguguuuuggcaauaccgcuguggccaaaugcaacgaaaagcacgacgaggaguucugcgauaugcugcgccuuuuugacuucuguaaacaggcuauccagagacugaaggccgaagcgcagaugagcauucaacucaucaauaaggccgugaacgcucugaucaaugaucagcuuauuaugaaaaaccaucugcgggacaucauggggauuccuuauugcaauuacuccaaguauuguuaccucaaccacacaaccacaggaaaaaccagccugcccaagugcugucuggucucuaauggcuccuaccucaacgaaacgcacuucagcgacgauaucgagcagcaagccgacaauaugauuacagagaugcugcagaaagaauauauggagcgccaggggaagaccccucuuggacugguugaucucuuuguguucucuaccagcuuuuaccugaucuccaucuuccugcaucuugugaaaauuccgacacacagacauaucgucggcaagucuugccccaagccucaccggcucaaccacaugggcauuuguagcugcgggcuguauaaacagcccggagugccuguucgcuggaagagaugaggacuaguuauaagacugacuagcccgaugggccucccaacgggcccuccuccccuccuugcaccgagauuaauaaaaaaaaaaaaaaaaaaaaaaaaaaaaaaaaaaaaaaaaaaaaaaaaaaaaaaaaaaaaaaaaaaaaaaaaaaaaaaaaaaaaaaaaaaaaaaaaaaaa

SEQ ID NO: 41603 - RNA, 1665 nt, Artificial Sequence
  mRNA product Design i-3 (A100) comprising derived and/or modified sequence from LASV(Mad39;Clade IV)__ANH09722__GPCmut12 (opt5)
aggagaaagcuuaccaugggccagaucgugaccuucuuucaagaggucccccacguuauugaagaggugaugaacaucgugcugauugcccucagcauccuggcuguccuuaaggggcuguacaauguggccacaugcggacucauuggccugguuacguuccuucugcucugugggagauccugcaccacaacccuguauaaaggaguguacgaacugcaggcgcucgagcugaacauggaaacacuuaauauguguaugccucugucuugcaccaagaacaauagccaucacuauauccgggucggcaacgagacagggcucgagcugacccuuacgaauaccucccugaucaaccauaaauuuuguaaucucucugacgcucacaagaaaaaccuguacgaucaugcccugaugagcauuaucuccacauuccaccucucuauuccgaauuuuaaccaguaugaagccaugagcugcgacuucaaugauggaaagaucuccgugcaguacaaccugagccacaccuaugcuggcgacacagccaaucauuguggcaccguugcuaacggggugcuucaaacguuuaugcgcauggccuggggaggcucuuacauugcgcuggauuccgggagaggaggcugggacugcaucaugacaagcuaccaguaucucauuauccagaacaccacaugggaggaucacugucaguucucucggcccuccccuaucggguaccugggacuucugagccaacgcaccagagacauuuauaucucucggcgccuccugggcaccuuuacauggacgcuguccgauagcgaaggcaaggacacccccgggggauacugccucacaagauggaugcugauugaggccgagcuuaaauguuucggcaauaccgcugucgccaagugcaacgaaaaacaugaugaggaauuuugcgacaugcugcgccucuucgauuuuuguaagcaggcuauccagcggcugaaagccgaggcgcagauguccauucaacuuaucaauaaggccgugaacgcucugaucaaugaccagcucauuaugaagaaccaccugagagacaucauggggauuccuuauugcaauuacucuaaauauuguuaccugaaccacacagugaccggaaagacgagccuccccaaaugcugucuggucuccaauggcagcuaccuuaacgaaacacauuucucugaugacaucgagcagcaagccgauaauaugauuaccgagaugcugcagaaggaauauauggagcggcaggggaaaaccccucucggacugguugaccuguucguguuuuccaccagcuucuaccuuaucucuaucuuucuccaccuggugaagauuccgacacaucgccacgucgugggcaaacccugcccuaagccccauagacugaaccacaugggcaucuguagcugcggguucuauaagcagccuggaguucccgugcgguggaaacgcugaggacuaguuauaagacugacuagcccgaugggccucccaacgggcccuccuccccuccuugcaccgagauuaauaaaaaaaaaaaaaaaaaaaaaaaaaaaaaaaaaaaaaaaaaaaaaaaaaaaaaaaaaaaaaaaaaaaaaaaaaaaaaaaaaaaaaaaaaaaaaaaaaaaa

SEQ ID NO: 41604 - RNA, 1665 nt, Artificial Sequence
  mRNA product Design i-3 (A100) comprising derived and/or modified sequence from LASV(Z0947-SLE-2011;Clade IV)__AIT17840__GPCmut12 (opt5)
aggagaaagcuuaccaugggccagaucgugaccuucuuucaagaggucccccacguuauugaagaggugaugaacaucgugcugauugcccucagcauccuggcuguccuuaaggggcuguacaauuucgccacaugcggacucgugggccugguuacguuucuucugcucugugggagauccugcaccauuucucuguauaaaggaguguacgaacugcagacacucgagcugaacauggaaacccuuaauauguguaugccucugagcugcacaaagaacaauucccaucacuauaucauggucggcaacgagaccgggcucgagcugacacuuaccaauacgucuaucauuaaccauaaauucuguaaucugagcgacgcgcacaagaaaaaccucuacgaucaugcucugauguccaucauuucuaccuuucaccugagcaucccgaauuucaaccaguaugaagccauguccugcgacuuuaauggaggcaagauuagcgugcaguacaaccucucucacuccuaugccggcgaugcugccaaucauugugggacaguugcuaacggagugcugcaaaccuucaugcggauggccuggggcgggagcuacaucgcgcuugacucuggacgcgauagaugggacugcauuaugacauccuaccaguaucugaucauccagaacaccacgugggaggaucacugucaguuuagccggcccucuccuauuggcuaccucgggcugcuuucccaacgcacaagagacaucuauauuagccggcgccugcucggaaccuucacauggacccuguccgauucugaaggcaaggacacccccggcggguacugccugacaagauggaugcucaucgaggccgagcugaaauguuuuggaaauacggcugucgccaagugcaacgaaaaacaugaugaggaguucugcgacaugcuucggcuguuugauuucuguaagcaggcuauucagcgccucaaagccgaagcgcagaugagcauccaacugaucaauaaggccgugaacgcucuuauuaaugaccagcugaucaugaagaaccaccucagagacauuaugggcaucccuuauugcaauuacuccaaauauuguuaccugaaccacaccacaaccgggaagacaagccugcccaaaugcugucucgugucuaauggauccuaccugaacgaaacccauuucagcgaugacauugagcagcaagccgauaauaugaucacggagaugcuucagaaggaauauauggagcggcagggcaaaacaccucuggggcucgucgaccuguuuguuuucucuaccagcuuuuaccugaucuccauuuuccuucaccucgugaagaucccgacccaucgccacauugugggaaaacccugcccuaagccccauagacugaaccacaugggcaucuguucuugcggccuguauaagcagccugggguccccgugaaauggaagcggugaggacuaguuauaagacugacuagcccgaugggccucccaacgggcccuccuccccuccuugcaccgagauuaauaaaaaaaaaaaaaaaaaaaaaaaaaaaaaaaaaaaaaaaaaaaaaaaaaaaaaaaaaaaaaaaaaaaaaaaaaaaaaaaaaaaaaaaaaaaaaaaaaaaa

SEQ ID NO: 41605 - protein, 453 aa, Artificial Sequence
  derived and/or modified protein sequence (artificial) from LASV(Josiah;Clade IV)__NP_694870__GPCmut13
MGQIVTFFQEVPHVIEEVMNIVLIALSVLAVLKGLYNFATCGLVGLVTFLLLCGRSCTTSLYKGVYELQTLELNMETLNMTMPLSCTKNNSHHYIMVGNETGLELTLTNTSIINHKFCNLSDAHKKNLYDHALMSIISTFHLSIPNFNQYEAMSCDFNGGKISVQYNLSHSYAGDAANHCGTVANGVLQTFMRMAWGGSYIALDSGRGNWDCIMTSYQYLIIQNTTWEDHCQFSRPSPIGYLGLLSQRTRDIYISRRLLGTFTWTLSDSEGKDTPGGYCLTRWMLIEAELKCFGNTAVAKCNEKHDEEFCDMLRLFDFNKQAIQRLKAEAQMSIQLINKAVNALINDQLIMKNHLRDIMGIPYCNYSKYWYLNHTTTGRTSLPKCWLVSNGSYLNETHFSDDIEQQADNMITEMLQKEYMERQGKTPLGLVDLFVFSTSFYLISIFLHLVKIP

SEQ ID NO: 41606 - protein, 452 aa, Artificial Sequence
  derived and/or modified protein sequence (artificial) from LASV(LP;Clade I)__AAF86701__GPCmut13
MGQIITFFQEVPHVIEEVMNIVLIALSLLAILKGLYNIATCGIIGLVAFLFLCGKSCSLTLKGGYELQTLELNMETLNMTMPLSCTKNSSHHYIRVGNETGLELTLTNTSIINHKFCNLSDAHKKNLYDHALMSIISTFHLSIPNFNQYEAMSCDFNGGKISVQYNLSHSYAGDAAEHCGTVANGVLQTFMRMAWGGRYIALDSGKGNWDCIMTSYQYLIIQNTTWEDHCQFSRPSPIGYLGLLSQRTRDIYISRRLLGTFTWTLSDSEGNETPGGYCLTRWMLIEAELKCFGNTAVAKCNEKHDEEFCDMLRLFDFNKQAIRRLKAEAQMSIQLINKAVNALINDQLIMKNHLRDIMGIPYCNYSKYWYLNHTSSGRTSLPKCWLISNGSYLNETQFSDDIEQQADNMITEMLQKEYIERQGKTPLGLVDIFIFSTSFYLISIFLHLIKIP

SEQ ID NO: 41607 - protein, 452 aa, Artificial Sequence
  derived and/or modified protein sequence (artificial) from LASV(803213;Clade II)__AAF86703__GPCmut13
MGQIITFFQEVPHVIEEVMNIVLIALSLLAILKGIYNVATCGLFGLISFLLLCGRSCSVTYKGVYELQTLELNMANLNMTMPLSCTKNNSHHYIMVGNETGLELTLTNTSIINHKFCNLSDAHKKNLYDHALMSIISTFHLSIPNFNQYEAMSCDFNGGKISVQYNLSHSFAVDAANHCGTIANGVLQTFMRMAWGGSYIALDSGKGNWDCIMTSYQYLIIQNTTWEDHCQFSRPSPIGYLGLLSQRTRDIYISRRLLGTFTWTLSDSEGNEAPGGYCLTRWMLIEAELKCFGNTAVAKCNEKHDEEFCDMLRLFDFNKQAIKRLKTEAQMSIQLINKAVNALINDQLIMKNHLRDIMGIPYCNYSRYWYLNHTVTGKTSLPRCWLVSNGSYLNETHFSDDIEQQADNMITEMLQKEYMDRQGKTPLGLVDLFVFSTSFYLISIFLHLVKIP

SEQ ID NO: 41608 - protein, 452 aa, Artificial Sequence
  derived and/or modified protein sequence (artificial) from LASV(GA391;Clade III)__CAA36645__GPCmut13
MGQIVTFFQEVPHVIEEVMNIVLIALSILAILKGLYNVATCGLIGLVTFLLLSGRSCSLIYKGTYELQTLELNMETLNMTMPLSCTKNNSHHYIRVGNETGLELTLTNTSILNHKFCNLSDAHKRNLYDHSLMSIISTFHLSIPNFNQYEAMSCDFNGGKITVQYNLSHSFAVDAAGHCGTLANGVLQTFMRMAWGGSYIALDSGRGNWDCIMTSYQYLIIQNTTWDDHCQFSRPSPIGYLGLLSQRTRDIYISRRLLGTFTWTLSDSEGNETPGGYCLTRWMLIEAELKCFGNTAVAKCNEKHDEEFCDMLRLFDFNKQAIRRLKTEAQMSIQLINKAVNALINDQLIMKNHLRDIMGIPYCNYSRYWYLNHTSTGKTSLPRCWLISNGSYLNETKFSDDIEQQADNMITEMLQKEYIDRQGKTPLGLVDLFVFSTSFYLISIFLHLVKIP

SEQ ID NO: 41609 - protein, 453 aa, Artificial Sequence
  derived and/or modified protein sequence (artificial) from LASV(AV;Clade V)__CCA30314__GPCmut13
MGQIVTFFQEVPHVIEEVMNIVLIALSILAVLKGLYNIATCGLIGLITFLLLCGRSCSSNLYKGVYELQSLDLNMETLNMTMPLSCTKNNSHHYIRVGNDTGLELTLTNTSILNHKFCNLSDAHKKDLYDHALMSIISTFHLSIPNFNQYEAMSCDFNGGKISVQYNLSHSYAIDAANHCGTVANGILQTFMRMAWGGSYIALDSGRGNWDCIMTSYQYLIIQNTTWENHCQFSRPSPIGYLGLLSQRTRDIYISRRLLGTFTWTLSDSEGNATPGGYCLTRWMLIEAELKCFGNTAVAKCNEKHDEEFCDMLRLFDFNKQAISRLKSEAQMSIQLINKAVNALINDQLIMKNHLRDIMGIPYCNYSKYWYLNHTITGKTSLPKCWLVSNGSYLNETHFSDDIEQQADNMITEMLQKEYMERQGKTPLGLVDLFVFSTSFYLISIFLRLVKIP

SEQ ID NO: 41610 - protein, 452 aa, Artificial Sequence
  derived and/or modified protein sequence (artificial) from LASV(Togo/2016/7082;Clade VI)__AMR44577__GPCmut13
MGQIITFFQEVPHVIEEVMNIVLIALSLLAILKGVYNVATCGIIGLVTFLFLCGRSCSLIYKGSYELQTLELNMETLNMTMPLSCTKNSSHHYIRVGNETGLELTLTNTSIINHKFCNLSDAHKRNLYDHALMSILSTFHLSIPNFNQYEAMSCDFNGGKISVQYNLSHAYAVDAAEHCGTVANGVLQTFMRMAWGGSYIALDSGRGNWDCIMTSYQYLIIQNTTWEDHCQFSRPSPIGYLGLLSQRTRDIYISRRLLGTFTWTLSDSEGNETPGGYCLTRWMLIEAELKCFGNTAVAKCNEKHDEEFCDMLRLFDFNKQAIQRLKSEAQMSIQLINKAVNALINDQLIMKNHLRDMMGIPYCNYSKYWYLNHTSSGRTSLPKCWLVSNGSYLNETHFSDDIEQQADNMITEMLQKEYIDRQGKTPLGLVDLFVFSTSFYLISIFLHLIKIP

SEQ ID NO: 41611 - protein, 452 aa, Artificial Sequence
  derived and/or modified protein sequence (artificial) from LASV(KAK-428;Clade n.d. (VII))__ANH09740__GPCmut13
MGQIVTFFQEVPHVIEEVMNIVLIALSLLAILKGLYNFATCGVIGLITFLLLCGRSCSATYKGQYELQTLELNMESLNMTMPLSCTKNNSHHYIRAGNNTGLELTLTNTSIISHKFCNLSDAHKKNLYDHTLMSIITTFHLSIPNFNQYEAMSCDFNGGKISIQYNLSHSYAGDAAQHCGTVANGVLQTFMRMAWGGSYLALDSGRRGWDCIISSYQYLIIQNTTWDDHCQFSRPSPIGYLGFVSQKTRDIYISRRLLGTFTWTLSDSEGHDMPGGYCLTRWMLIEADLKCFGNTAVAKCNEKHDEEFCDMWRLFDFNKQAIQRLKAEAQMNIQLINKAVNALINDQLMMKNHLRDIMGIPYCNYSKFWYLNNTTTGRTSLPRCWLISNGSYLNETHFSDDIEQQADNMITEMLQKEYMDRQGKTPLGLVDLFVFSTSFYLITIFLHLVKIP

SEQ ID NO: 41612 - protein, 452 aa, Artificial Sequence; identical to SEQ ID NO: 41606
  derived and/or modified protein sequence (artificial) from LASV(Pinneo-NIG-1969;Clade I)__AIT17836__GPCmut13

SEQ ID NO: 41613 - protein, 452 aa, Artificial Sequence
  derived and/or modified protein sequence (artificial) from LASV(ISTH0009-NIG-2011;Clade II)__AIT17404__GPCmut13
MGQIITFFQEVPHVIEEVMNIVLIALSLLAILKGIYNVATCGLFGLVSFLLLCGRSCSTTYKGVYELQTLELDMASLNMTMPLSCTKNNSHHYIMVGNETGLELTLTNTSIINHKFCNLSDAHKKNLYDHALMSIISTFHLSIPNFNQYEAMSCDFNGGKISVQYNLSHAYAVDAANHCGTIANGVLQTFMRMAWGGSYIALDSGKGSWDCIMTSYQYLIIQNTTWEDHCQFSRPSPIGYLGLLSQRTRDIYISRRLLGTFTWTLSDSEGNETPGGYCLTRWMLIEAELKCFGNTAVAKCNEKHDEEFCDMLRLFDFNKQAIRRLKTEAQMSIQLINKAVNALINDQLIMKNHLRDIMGIPYCNYSKYWYLNHTVTGKTSLPRCWLVSNGSYLNETHFSDDIEQQADNMITELLQKEYMDRQGKTPLGLVDLFVFSTSFYLISIFLHLIKIP

SEQ ID NO: 41614 - protein, 452 aa, Artificial Sequence
  derived and/or modified protein sequence (artificial) from LASV(ISTH2010-NIG-2012;Clade II)__AIT17482__GPCmut13
MGQIITFFQEVPHVIEEVMNIVLIALSLLAILKGIYNVATCGLFGLVSFLLLCGRSCSTTYKGVYELQTLELDMASLNMTMPLSCTKNNSHHYIMVGNETGLELTLTNTSIINHKFCNLSDAHKKNLYDHALMSIISTFHLSIPNFNQYEAMSCDFNGGKISVQYNLSHAYAVDAANHCGTIANGVLQTFMRMAWGGSYIALDSGKGSWDCIMTSYQYLIIQNITWEDHCQFSRPSPIGYLGLLSQRTRDIYISRRLLGTFTWTLSDSEGNETPGGYCLTRWMLIEAELKCFGNTAVAKCNEKHDEEFCDMLRLFDFNKQAIRRLKTEAQMSIQLINKAVNALINDQLIMKNHLRDIMGIPYCNYSKYWYLNHTVTGKTSLPRCWLVSNGSYLNETHFSDDIEQQADNMITELLQKEYIDRQGKTPLGLVDLFVFSTSFYLISIFLHLVKIP

SEQ ID NO: 41615 - protein, 452 aa, Artificial Sequence
  derived and/or modified protein sequence (artificial) from LASV(Lassa virus/H.sapiens-wt/NGA/2015/ISTH_0543;Clade II)__AVO03639__GPCmut13
MGQIITFFQEVPHVIEEVMNIVLIALSLLAILKGIYNVATCGLFGLVSFLLLCGRSCSTTYKGVYELQTLELDMANLNMTMPLSCTKNNSHHYIMVGNETGLELTLTNTSIINHKFCNLSDAHKKNLYDHALMSIISTFHLSIPNFNQYEAMSCDFNGGKISVQYNLSHTYAVDAANHCGTIANGVLQTFMRMAWGGSYIALDSGKGSWDCIMTSYQYLVIQNTTWEDHCQFSRPSPIGYLGLLSQRTRDIYISRRLLGTFTWTLSDSEGNETPGGYCLTRWMLIEAELKCFGNTAVAKCNEKHDEEFCDMLRLFDFNKQAIRRLKTEAQMSIQLINKAVNALINDQLIMKNHLRDIMGIPYCNYSKYWYLNHTVTGKTSLPRCWLVSNGSYLNETHFSDDIEQQADNMITELLQKEYIDRQGKTPLGLVDLFVFSTSFYLISIFLHLVKIP

SEQ ID NO: 41616 - protein, 452 aa, Artificial Sequence
  derived and/or modified protein sequence (artificial) from LASV(Lassa virus/H.sapiens-wt/NGA/2016/ISTH_0009;Clade II)__AVO03571__GPCmut13
MGQIITFFQEVPHVIEEVMNIVLIALSLLAILKGIYNVATCGLLGLVSFLLLCGRSCSTTYKGVYELQTLELDMASLNMTMPLSCTKNNSHHYIMVGNETGLELTLTNTSIINHKFCNLSDAHKKNLYDHALMSIISTFHLSIPNFNQYEAMSCDFNGGRISVQYNLSHSYAVDAANHCGTIANGVLQTFMRMAWGGSYIALDSGKGSWDCIMTSYQYLIIQNTTWEDHCQFSRPSPIGYLGLLSQRTRDIYISRRLLGTFTWTLSDSEGNETPGGYCLTRWMLIEAELKCFGNTAVAKCNEKHDEEFCDMLRLFDFNKQAIRRLKTEAQMSIQLINKAVNALINDQLIMKNHLRDIMGIPYCNYSKYWYLNHTVTGKTSLPRCWLVSNGSYLNETHFSDDIEQQADNMITELLQKEYIDRQGKTPLGLVDLFVFSTSFYLISIFLHLVKIP

SEQ ID NO: 41617 - protein, 452 aa, Artificial Sequence
  derived and/or modified protein sequence (artificial) from LASV(Lassa virus/H.sapiens-wt/NGA/2016/ISTH_0017;Clade II)__AVO03567__GPCmut13
MGQIITFFQEVPHVIEEVMNIVLIALSLLAILKGIYNVATCGLFGLVSFLLLCGRSCSTTYKGVYELQTLELDMASLNMTMPLSCTKNNSHHYIMVGNETGLELTLTNTSIINHKFCNLSDAHKKNLYDHALMSIISTFHLSIPNFNQYEAMSCDFNGGKISVQYNLSHTYAIDAANHCGTIANGVLQTFMRMAWGGSYIALDSGKGSWDCIMTSYQYLIIQNTTWEDHCQFSRPSPIGYLGLLSQRTRDIYISRRLLGTFTWTLSDSEGNETPGGYCLTRWMLIEAELKCFGNTAVAKCNEKHDEEFCDMLRLFDFNKQAIRRLKTEAQMSIQLINKAVNALINDQLIMKNHLRDIMGIPYCNYSKYWYLNHTVTGKTSLPRCWLVSNGSYLNETHFSDDIEQQADNMITELLQKEYMDRQGKTPLGLVDLFVFSTSFYLISIFLHLVRIP

SEQ ID NO: 41618 - protein, 452 aa, Artificial Sequence
  derived and/or modified protein sequence (artificial) from LASV(Lassa virus/H.sapiens-wt/NGA/2018/ISTH_0959;Clade II)__AVV65099__GPCmut13
MGQIITFFQEVPHVIEEVMNIVLIALSLLAILKGIYNVVTCGLFGLVSFLLLCGRSCSTTYKGVYELQTLELDMASLNMTMPLSCTKNNSHHYIMVGNETGLELTLTNTSIINHKFCNLSDAHKKNLYDHALMSIISTFHLSIPNFNQYEAMSCDFNGGKISVQYNLSHAYAIDAANHCGTIANGVLQTFMRMAWGGSYIALDSGKGSWDCIMTSYQYLIIQNTTWEDHCQFSRPSPIGYLGLLSQRTRDIYISRRLLGTFTWTLSDSEGNETPGGYCLTRWMLIEAELKCFGNTAVAKCNEKHDEEFCDMLRLFDFNKQAIRRLKTEAQMSIQLINKAVNALINDQLIMKNHLRDIMGIPYCNYSKYWYLNHTVTGKTSLPRCWLVSNGSYLNETHFSDDIEQQADNMITELLQKEYIDRQGKTPLGLVDLFVFSTSFYLISIFLHLVKIP

SEQ ID NO: 41619 - protein, 452 aa, Artificial Sequence
  derived and/or modified protein sequence (artificial) from LASV(LASV003-NIG-2008;Clade II)__AIT17580__GPCmut13
MGQIITFFQEVPHVIEEVMNIVLIALSLLAILKGIYNVATCGLFGLVSFLLLCGRSCSTTYKGVYELQTLELDMASLNMTMPLSCTKNNSHHYIMVGNETGLELTLTNTSIINHKFCNLSDAHKKNLYDHALMSIISTFHLSIPNFNQYEAMSCDFNGGKISVQYNLSHTYAVDAANHCGTIANGVLQTFMRMAWGGSYIALDSGKGSWDCIMTSYQYLIIQNTTWEDHCQFSRPSPIGYLGLLSQRTRDIYISRRLLGTFTWTLSDSESNETPGGYCLTRWMLIEAELKCFGNTAVAKCNEKHDEEFCDMLRLFDFNKQAIRRLKAEAQMSIQLINKAVNALINDQLIMKNHLRDIMGIPYCNYSKYWYLNHTVTGRTSLPRCWLVSNGSYLNETHFSDDIEQQADNMITELLQKEYMDRQGKTPLGLVDLFVFSTSFYLISIFLHLVKIP

SEQ ID NO: 41620 - protein, 452 aa, Artificial Sequence
  derived and/or modified protein sequence (artificial) from LASV(LASV035-NIG-2009;Clade II)__AIT17588__GPCmut13
MGQIITFFQEVPHVIEEVMNIVLIALSLLAILKGIYNVATCGLFGLVSFLLLCGRSCSTTYKGVYELQTLELDMASLNMTMPLSCTKNNSHHYIMVGNETGLELTLTNTSIINHKFCNLSDAHKKNLYDHALMSIISTFHLSIPNFNQYEAMSCDFNGGKISVQYNLSHAYAVDAANHCGTIANGVLQTFMRMAWGGSYIALDSGKGSWDCIMTSYQYLIIQNTTWEDHCQFSRPSPIGYLGLLSQRTRDIYISRRLLGTFTWTLSDSEGNETPGGYCLTRWMLIEAELKCFGNTAVAKCNEKHDEEFCDMLRLFDFNKQAIRRLKAEAQMSIQLINKAVNALINDQLIMKNHLRDIMGIPYCNYSKYWYLNHTVTGKTSLPRCWLVSNGSYLNETHFSDDIEQQADNMITELLQKEYIDRQGKTPLGLVDLFVFSTSFYLISIFLHLVKIP

SEQ ID NO: 41621 - protein, 452 aa, Artificial Sequence
  derived and/or modified protein sequence (artificial) from LASV(LASV1000-NIG-2009;Clade II)__AIT17782__GPCmut13
MGQIITFFQEVPHVIEEVMNIVLIALSLLAILKGIYNVATCGLFGLVSFLLLCGRSCSTTYKGVYELQTLELDMASLNMTMPLSCTKNNSHHYIMVGNETGLELTLTNTSIINHKFCNLSDAHKKNLYDHALMSIISTFHLSIPNFNQYEAMSCDFNGGKISVQYNLSHTYAVDAANHCGTIANGVLQTFMRMAWGGSYIALDSGKGSWDCIMTSYQYLIIQNTTWEDHCQFSRPSPIGYLGLLSQRTRDIYISRRLLGTFTWTLSDSEGNETPGGYCLTRWMLIEAELKCFGNTAVAKCNEKHDEEFCDMLRLFDFNKQAIKRLKTEAQMSIQLINKAVNALINDQLIMKNHLRDIMGIPYCNYSKYWYLNHTVTGKTSLPRCWLVSNGSYLNETHFSDDIEQQADNMITELLQKEYIDRQGKTPLGLVDLFVFSTSFYLISIFLHLVKIP

SEQ ID NO: 41622 - protein, 452 aa, Artificial Sequence
  derived and/or modified protein sequence (artificial) from LASV(LASV221-NIG-2010;Clade II)__AIT17624__GPCmut13
MGQIITFFQEVPHVIEEVMNIVLIALSLLAILKGIYNVATCGLFGLVSFLLLCGRSCSTTYKGVYELQTLELDMASLNMTMPLSCTKNNSHHYIMVGNETGLELTLTNTSIINHKFCNLSDAHKKNLYDHALMSIISTFHLSIPNFNQYEAMSCDFNGGKISVQYNLSHTYAIDAANHCGTIANGVLQTFMRMAWGGSYIALDSGKGSWDCIMTSYQYLIIQNTTWEDHCQFSRPSPIGYLGLLSQRTRDIYISRRLLGTFTWTLSDSEGNETPGGYCLTRWMLIEAELKCFGNTAVAKCNEKHDEEFCDMLRLFDFNKQAIRRLKTEAQMSIQLINKAVNALINDQLIMKNHLRDIMGIPYCNYSKYWYLNHTVTGKTSLPRCWLVSNGSYLNETHFSDDIEQQADNMITEMLQKEYMDRQGKTPLGLVDLFVFSTSFYLISIFLHLVKIP

SEQ ID NO: 41623 - protein, 452 aa, Artificial Sequence
  derived and/or modified protein sequence (artificial) from LASV(LASV237-NIG-2010;Clade II)__AIT17638__GPCmut13
MGQIITFFQEVPHVIEEVMNIVLIALSLLAILKGIYNVATCGLFGLVSFLLLCGRSCSTTYKGVYELQTLELDMASLNMTMPLSCTKNNSHHYIMVGNETGLELTLTNTSIINHKFCNLSDAHKKDLYDHALMSIISTFHLSIPNFNQYEAMSCDFNGGKISVQYNLSHTYAVDAANHCGTIANGVLQTFMRMAWGGSYIALDSGKGSWDCIMTSYQYLIIQNTTWEDHCQFSRPSPIGYLGLLSQRTRDIYISRRLLGTFTWTLSDSEGNETPGGYCLTRWMLIEAELKCFGNTAVAKCNEKHDEEFCDMLRLFDFNKQAIRRLKTEAQMSIQLINKAVNALINDQLIMKNHLRDIMGIPYCNYSKYWYLNHTVTGKTSLPRCWLVSNGSYLNETHFSDDIEQQADNMITELLQKEYMDRQGKTPLGLVDLFVFSTSFYLISIFLHLIKIP

SEQ ID NO: 41624 - protein, 452 aa, Artificial Sequence
  derived and/or modified protein sequence (artificial) from LASV(LASV253-NIG-2011;Clade II)__AIT17670__GPCmut13
MGQIITFFQEVPHVIEEVMNIVLIALSLLAILKGIYNVATCGLFGLVSFLLLCGRSCSTTYKGVYELQTLELDMASLNMTMPLSCTKNNSHHYIMVGNETGLELTLTNTSIINHKFCNLSDAHKKNLYDHALMSIISTFHLSIPNFNQYEAMSCDFNGGKISVQYNLSHTYAVDAANHCGTIANGVLQTFMRMAWGGSYIALDSGKGSWDCIMTSYQYLIIQNTTWEDHCQFSRPSPIGYLGLLSQRTRDIYISRRLLGTFTWTLSDSEGNETPGGYCLTRWMLIEAELKCFGNTAVAKCNEKHDEEFCDMLRLFDFNKQAIRRLKAEAQMSIQLINKAVNALINDQLIMKNHLRDIMGIPYCNYSKYWYLNHTVTGRTSLPRCWLVSNGSYLNETHFSDDIEQQADNMITELLQKEYIDRQGKTPLGLVDLFVFSTSFYLISIFLHLVKIP

SEQ ID NO: 41625 - protein, 452 aa, Artificial Sequence
  derived and/or modified protein sequence (artificial) from LASV(LASV254-NIG-2011;Clade II)__AIT17674__GPCmut13
MGQIITFFQEVPHVIEEVMNIVLIALSLLAILKGIYNVATCGLFGLVSFLLLCGRSCSTTYKGVYELQTLELDMTNLNMTMPLSCTKNNSHHYIMVGNETGLELTLTNTSIINHKFCNLSDAHKKNLYNHALMSIISTFHLSIPNFNQYEAMSCDFNGGKISVQYNLSHSYAVDAANHCGTIANGVLQTFMRMAWGGSYIALDSGKGNWDCIMTSYQYLIIQNTTWEDHCQFSRPSPIGYLGLLSQRTRDIYISRRLLGTFTWTLSDSEGNETPGGYCLTRWMLIEAELKCFGNTAVAKCNEKHDEEFCDMLRLFDFNKQAIRRLKTEAQANIQLINKAVNALINDQLIMKNHLRDIMGIPYCNYSKYWYLNHTVTGKTSLPRCWLVSNGSYLNETHFSDDIEQQADNMITELLQKEYMDRQGKTPLGLVDLFVFSTSFYLISIFLHLVKIP

SEQ ID NO: 41626 - protein, 452 aa, Artificial Sequence
  derived and/or modified protein sequence (artificial) from LASV(Nig08-A19;Clade III)__ADU56618__GPCmut13
MGQIVTFFQEVPHVIEEVMNIVLIALSILAILKGLYNIATCGLIGLVTFLLLSGRSCSMTYKGVYELQTLELNMNTLNMTMPLSCTKNNSHHYIMVGNETGLELTLTNTSLLHHKFCNLSDAHKKNLYDHTLMSIISTFHLSIPNFNQYEAMSCDFNGGKITVQYNLSHSYAIDAANHCGTVANGVLQTFMRMAWGGSYIALDSGRGKWDCIMTSYQYLIIQNTTWEDHCQFSRPSPIGYLGLLSQRTRDIYISRRLLGTFTWTLSDSEGNETPGGYCLTRWMLIEAELKCFGNTAVAKCNEKHDEEFCDMLRLFDFNKQAIRRLKAEAQMSIQLINKAVNALINDQLIMKNHLRDIMGIPYCNYSKYWYLNHTSTGRTSLPRCWLVSNGSYLNETHFSDDIEQQADNMITEMLQKEYLDRQGKTPLGLVDLFVFSTSFYLISIFLHLVKIP

SEQ ID NO: 41627 - protein, 453 aa, Artificial Sequence
  derived and/or modified protein sequence (artificial) from LASV(G1180-SLE-2010;Clade IV)__AIT17168__GPCmut13
MGQIVTFFQEVPHVIEEVMNIVLIALSILAVLKGLYNFATCGLVGLLTFLLLCGRSCTASRYKGVYELQTLELNMETLNMTMPLSCTKNNSHHYIMVGNETGLELTLTNTSIINHKFCNLSDAHKKNLYDHALMSIISTFHLSIPNFNQYEAMSCDFNGGKISVQYNLSHSYAGDAANHCGTVANGVLQTFMRMAWGGSYIALDSGHGSWDCIMTSYQYLIIQNTTWEDHCQFSRPSPIGYLGLLSQRTRDIYISRRLLGTFTWTLSDSEGKDTPGGYCLTRWMLIEAELKCFGNTAVAKCNEKHDEEFCDMLRLFDFNKQAIQRLKAEAQMSIQLINKAVNALINDQLIMKNHLRDIMGIPYCNYSKYWYLNHTTTGKTSLPKCWLVSNGSYLNETHFSDDIEQQADNMITEMLQKEYMERQGKTPLGLVDLFVFSTSFYLISIFLHLVKIP

SEQ ID NO: 41628 - protein, 453 aa, Artificial Sequence
  derived and/or modified protein sequence (artificial) from LASV(G1442-SLE-2011;Clade IV)__AIT17180__GPCmut13
MGQIVTFFQEVPHVIEEVMNIVLIALSILAVLKGLYNVATCGLIGLVTFLLLCGRSCTTTLYKGVYELQTLELNMETLNMTMPLSCTKNNSHHYIRVGNETGLELTLTNTSIINHKFCNLSDAHKKNLYDHALMSIISTFHLSIPNFNQYEAMSCDFNGGKISVQYNLSHSYAGDAANHCGTVANGVLQTFMRMAWGGSYIALDSGRGNWDCIMTSYQYLIIQNTTWDDHCQFSRPSPIGYLGLLSQRTRDVYISRRLLGTFTWTLSDSEGKDTPGGYCLTRWMLIEAELKCFGNTAVAKCNEKHDEEFCDMLRLFDFNKQAIQRLKAEAQMSIQLINKAVNALINDQLIMKNHLRDIMGIPYCNYSKYWYLNNTATGKTSLPKCWLISNGSYLNETHFSDDIEQEADNMITEMLQKEYMERQGKTPLGLVDLFVFSTSFYLISIFLHLVKIP

SEQ ID NO: 41629 - protein, 453 aa, Artificial Sequence
  derived and/or modified protein sequence (artificial) from LASV(G3010-SLE-2013;Clade IV)__AIT17344__GPCmut13
MGQIVTFFQEVPHVIEEVMNIVLIALSILAVLKGLYNFATCGLVGLVTFLLLCGRSCTTSLYKGVYELQTLELNMETLNMTMPLSCTKNNSHHYIMVGNETGLELTLTNTSIINHKFCNLSDAHKKNLYNHALMSIISTFHLSIPNFNQYEAMSCDFNGGKISVQYNLSHSYAGDAASHCGTVANGVLQTFMRMAWGGSYIALDSGYGKWDCIMTSYQYLIIQNTTWEDHCQFSRPSPIGYLGLLSQRTRDIYISRRLLGTFTWTLSDSEGKDTPGGYCLTRWMLIEAELKCFGNTAVAKCNEKHDEEFCDMLRLFDFNKQAIQRLKTEAQMSIQLINKAVNALINDQLIMKNHLRDIMGIPYCNYSKYWYLNHTTTGKTSLPKCWLVSNGSYLNETHFSDDIEQQADNMITEMLQKEYMERQGKTPLGLVDLFVFSTSFYLISIFLHLVKIP

SEQ ID NO: 41630 - protein, 453 aa, Artificial Sequence
  derived and/or modified protein sequence (artificial) from LASV(G502-SLE-2009;Clade IV)__AIT17126__GPCmut13
MGQIVTFFQEVPHVIEEVMNIVLIALSILAVLKGLYNFATCGLVGLLTFLLLCGRSCTTGLYKGVYELQTLELNMETLNMTMPLSCTKNNSHHYIMVGNETGLELTLTNTSIINHKFCNLSDAHKKNLYDHALMSIISTFHLSIPNFNQYEAMSCDFNGGKISVQYNLSHSYAGDAADHCGTVANGVLQTFMRMAWGGSYIALDSGRGRWDCIMTSYQYLIIQNTTWEDHCQFSRPSPIGYLGLLSQRTRDIYISRRLLGTFTWTLSDSEGKDTPGGYCLTRWMLIEAELKCFGNTAVAKCNEKHDEEFCDMLRLFDFNKQAIQRLKAEAQMSIQLINKAVNALINDQLVMKNHLRDIMGIPYCNYSRYWYLNHTTTGRTSLPKCWLVSNGSYLNETHFSDDIEQQADNMITEMLQKEYMERQGKTPLGLVDLFVFSTSFYLISIFLHLVKIP

SEQ ID NO: 41631 - protein, 453 aa, Artificial Sequence
  derived and/or modified protein sequence (artificial) from LASV(G733-SLE-2010;Clade IV)__AIT17154__GPCmut13
MGQIVTFFQEVPHVIEEVMNIVLIALSILAVLKGLYNFATCGIVGLVSFLLLCGRSCTTSLYKGVYELQTLELNMETLNMTMPLSCTKNNSHHYIMVGNETGLELTLTNTSIINHKFCNLSDAHKKNLYDHALMSIISTFHLSIPNFNQYEAMSCDFNGGKISVQYNLSHSYAGDAANHCGTIANGVLQTFMRMAWGGSYIALDSGRDRWDCIMTSYQYLIIQNTTWEDHCQFSRPSPIGYLGLLSQRTRDIYISRRLLGTFTWTLSDSEGKDTPGGYCLTRWMLIEAELKCFGNTAVAKCNEKHDEEFCDMLRLFDFNKQAIQRLKAEAQMSIQLINKAVNALINDQLIMKNHLRDIMGIPYCNYSKYWYLNHTTTGKTSLPKCWLVSNGSYLNETHFSDDIEQQADNMITEMLQKEYMERQGKTPLGLVDLFVFSTSFYLISIFLHLVKIP

SEQ ID NO: 41632 - protein, 453 aa, Artificial Sequence
  derived and/or modified protein sequence (artificial) from MOPV/LASV reassortant(IGS-1;Clade IV)__AFY05576__GPCmut13
MGQIVTFFQEVPHVIEEVMNIVLIALSVLAVLKGLYNFATCGLVGLVTFLLLCGRSCTTSLYKGVYELQTLELNMETLNMTMPLSCTKNNSHHYIMVGNETGLELTLTNTSIINHKFCNLSDAHKKNLYDHALMSIISTFHLSIPNFNQYEAMSCDFNGGKISVQYNLSHSYAGDAANHCGTVANGVLQTFMRMAWGGSYIALDSGRGNWDCIMTSYQYLIIQNTTWEDHCQFSRPSPIGYLGLLSQRTRDIYISRRLLGTFTWTLSDSEGEDTPGGYCLTRWMLIEAELKCFGNTAVAKCNEKHDEEFCDMLRLFDFNKQAIQRLKAEAQMSIQLINKAVNALINDQLIMKNHLRDIMGIPYCNYSKYWYLNHTTTGRTSLPKCWLVSNGSYLNETHFSDDIEQQADNMITEMLQKEYMERQGKTPLGLVDLFVFSTSFYLISIFLHLVKIP

SEQ ID NO: 41633 - protein, 453 aa, Artificial Sequence
  derived and/or modified protein sequence (artificial) from LASV(LM765-SLE-2012;Clade IV)__AIT17814__GPCmut13
MGQIVTFFQEVPHVIEEVMNIVLIALSILAVLKGLYNFATCGLVGLVTFLLLCGRSCTTSLYKGVYELQTLELNMETLNMTMPLSCTKNNSHHYIMVGNETGLELTLTNTSIIDHKFCNLSDAHRKNLYDHALMSIISTFHLSIPNFNQYEAMSCDFNGGKISVQYNLSHSYAKDAADHCGTVANGVLQTFMRMAWGGSYIALDSGRGRWDCIMTSYQYLIIQNTTWEDHCQFSRPSPIGYLGLLSQRTRDIYISRRLLGTFTWTLSDSEGKDTPGGYCLTRWMLIEAELKCFGNTAVAKCNEKHDEEFCDMLRLFDFNKQAIQRLKAEAQMSIQLINKAVNALINDQLIMKNHLRDIMGIPYCNYSKYWYLNHTTTGKTSLPKCWLVSNGSYLNETHFSDDIEQQADNMITEMLQKEYMERQGKTPLGLVDLFVFSTSFYLISIFLHLVKIP

SEQ ID NO: 41634 - protein, 453 aa, Artificial Sequence
  derived and/or modified protein sequence (artificial) from LASV(LM776-SLE-2012;Clade IV)__AIT17824__GPCmut13
MGQIVTFFQEVPHVIEEVMNIVLIALSILAVLKGLYNFATCGLVGLVTFLLLCGRSCTTSVYKGVYELQTLELNMETLNMTMPLSCTKNNSHHYIMVGNETGLELTLTNTSIINHKFCNLSDAHKKNLYDHALMSIISTFHLSIPNFNQYEAMSCDFNGGKISVQYNLSHSYAGDAANHCGTVANGVLQTFMRMAWGGSYIALDSGHGKWDCIMTSYQYLIIQNTTWEDHCQFSRPSPIGYLGLLSQRTRDIYISRRLLGTFTWTLSDSEGKDTPGGYCLTRWMLIEAELKCFGNTAVAKCNEKHDEEFCDMLRLFDFNKQAIQRLKAEAQMSIQLINKAVNALINDQLIMKNHLRDIMGIPYCNYSKYWYLNHTTTGKTSLPKCWLVSNGSYLNETHFSDDIEQQADNMITEMLQKEYMERQGKTPLGLVDLFVFSTSFYLISIFLHLVKIP

SEQ ID NO: 41635 - protein, 453 aa, Artificial Sequence
  derived and/or modified protein sequence (artificial) from LASV(Mad39;Clade IV)__ANH09722__GPCmut13
MGQIVTFFQEVPHVIEEVMNIVLIALSILAVLKGLYNVATCGLIGLVTFLLLCGRSCTTTLYKGVYELQALELNMETLNMTMPLSCTKNNSHHYIRVGNETGLELTLTNTSLINHKFCNLSDAHKKNLYDHALMSIISTFHLSIPNFNQYEAMSCDFNDGKISVQYNLSHTYAGDTANHCGTVANGVLQTFMRMAWGGSYIALDSGRGGWDCIMTSYQYLIIQNTTWEDHCQFSRPSPIGYLGLLSQRTRDIYISRRLLGTFTWTLSDSEGKDTPGGYCLTRWMLIEAELKCFGNTAVAKCNEKHDEEFCDMLRLFDFNKQAIQRLKAEAQMSIQLINKAVNALINDQLIMKNHLRDIMGIPYCNYSKYWYLNHTVTGKTSLPKCWLVSNGSYLNETHFSDDIEQQADNMITEMLQKEYMERQGKTPLGLVDLFVFSTSFYLISIFLHLVKIP

SEQ ID NO: 41636 - protein, 453 aa, Artificial Sequence
  derived and/or modified protein sequence (artificial) from LASV(Z0947-SLE-2011;Clade IV)__AIT17840__GPCmut13
MGQIVTFFQEVPHVIEEVMNIVLIALSILAVLKGLYNFATCGLVGLVTFLLLCGRSCTISLYKGVYELQTLELNMETLNMTMPLSCTKNNSHHYIMVGNETGLELTLTNTSIINHKFCNLSDAHKKNLYDHALMSIISTFHLSIPNFNQYEAMSCDFNGGKISVQYNLSHSYAGDAANHCGTVANGVLQTFMRMAWGGSYIALDSGRDRWDCIMTSYQYLIIQNTTWEDHCQFSRPSPIGYLGLLSQRTRDIYISRRLLGTFTWTLSDSEGKDTPGGYCLTRWMLIEAELKCFGNTAVAKCNEKHDEEFCDMLRLFDFNKQAIQRLKAEAQMSIQLINKAVNALINDQLIMKNHLRDIMGIPYCNYSKYWYLNHTTTGKTSLPKCWLVSNGSYLNETHFSDDIEQQADNMITEMLQKEYMERQGKTPLGLVDLFVFSTSFYLISIFLHLVKIP

SEQ ID NO: 41637 - RNA, 1362 nt, Artificial Sequence
  derived and/or modified CDS sequence (opt1) from LASV(Josiah;Clade IV)__NP_694870__GPCmut13
augggccagaucgugaccuucuuccaggaggucccccacgugaucgaggaggugaugaacaucguccugaucgcccucagcgugcuggccgugcugaaggggcucuacaacuucgcgaccugcggccuggucgggcuggugacguuccuccugcugugcggccgcuccugcaccaccagccucuacaaggggguguacgagcugcagacccuggagcucaacauggagacgcugaacaugaccaugccgcuguccugcaccaagaacaacagccaccacuacaucauggucggcaacgagaccggccucgagcugacgcugaccaacaccuccaucaucaaccacaaguucugcaaccucagcgacgcccacaagaagaaccuguacgaccacgcccugauguccaucaucagcaccuuccaccucuccauccccaacuucaaccaguacgaggccaugagcugcgacuucaacgggggcaagaucuccgugcaguacaaccugagccacuccuacgccggggacgcggccaaccacugcggcacgguggccaacgggguccugcagaccuucaugcggauggccuggggcggcagcuacaucgcgcucgacuccgggcgcggcaacugggacugcaucaugaccagcuaccaguaccugaucauccagaacaccacgugggaggaccacugccaguucucccggcccagccccaucggguaccugggccuccugucccagcgcacccgggacaucuacaucagccgccggcugcucggcaccuucaccuggacgcugagcgacuccgaggggaaggacaccccgggcggguacugccugacccgcuggaugcucaucgaggccgagcugaagugcuucggcaacaccgccguggccaagugcaacgagaagcacgacgaggaguucugcgacaugcugcggcuguucgacuucaacaagcaggccauccagcgccugaaggcggaggcccagaugagcauccagcugaucaacaaggccgugaacgcccucaucaacgaccagcugaucaugaagaaccaccuccgggacaucauggggauccccuacugcaacuacuccaaguacugguaccucaaccacacgaccaccggccgcaccagccugcccaagugcuggcuggucuccaacggcagcuaccucaacgagacgcacuucuccgacgacaucgagcagcaggccgacaacaugaucaccgagaugcugcagaaggaguacauggagcggcaggggaagacgccccugggccucguggaccuguucguguucagcaccuccuucuaccugaucagcaucuuccugcaccucgucaagaucccguga

SEQ ID NO: 41638 - RNA, 1359 nt, Artificial Sequence
  derived and/or modified CDS sequence (opt1) from LASV(LP;Clade I)__AAF86701__GPCmut13
augggccagaucaucaccuucuuccaggaggugccccacgucaucgaggaggugaugaacaucgugcugaucgcccucagccugcuggccauccucaaggggcuguacaacaucgcgaccugcggcaucaucgggcuggucgccuuccucuuccugugcggcaaguccugcagccugacgcucaagggcggguacgagcugcagacccuggagcucaacauggagacccugaacaugaccaugccgcuguccugcacgaagaacagcucccaccacuacauccgcgugggcaacgagaccgggcucgagcugacccugaccaacacgagcaucaucaaccacaaguucugcaaccucuccgacgcccacaagaagaaccuguacgaccacgcccugaugagcaucaucuccaccuuccaccucagcauccccaacuucaaccaguacgaggccauguccugcgacuucaacggcgggaagaucagcgugcaguacaaccugucccacagcuacgcgggcgacgccgccgagcacugcgggaccgucgccaacggcgugcugcagaccuucaugcggauggcguggggcgggcgcuacaucgcccucgacuccggcaaggggaacugggacugcaucaugacgagcuaccaguaccugaucauccagaacaccaccugggaggaccacugccaguucucccggcccagccccaucggcuaccugggccuccugucccagcgcacccgggacaucuacaucagccgccggcugcucgggacguucaccuggacccugagcgacuccgagggcaacgagacccccgggggcuacugccugacgcgcuggaugcucaucgaggccgagcugaagugcuucgggaacaccgccguggccaagugcaacgagaagcacgacgaggaguucugcgacaugcugcggcuguucgacuucaacaagcaggcgauccgccggcugaaggccgaggcccagaugagcauccagcugaucaacaaggccgucaacgcccucaucaacgaccagcugaucaugaagaaccaccuccgcgacaucaugggcauccccuacugcaacuacuccaaguacugguaccucaaccacaccagcuccggccggaccagccugcccaagugcuggcugaucuccaacgggagcuaccucaacgagacgcaguucuccgacgacaucgagcagcaggcggacaacaugaucaccgagaugcugcagaaggaguacaucgagcgccagggcaagaccccgcuggggcucguggacaucuucaucuucagcaccuccuucuaccugaucagcaucuuccugcaccugaucaagaucccguga

SEQ ID NO: 41639 - RNA, 1359 nt, Artificial Sequence
  derived and/or modified CDS sequence (opt1) from LASV(803213;Clade II)__AAF86703__GPCmut13
augggccagaucaucaccuucuuccaggaggugccccacgucaucgaggaggugaugaacaucgugcugaucgcccucagccugcuggccauccucaaggggaucuacaacgucgcgaccugcggccuguucgggcugaucuccuuccuccugcugugcggccgcagcugcuccgugacguacaaggggguguacgagcuccagacccuggagcugaacauggccaaccucaacaugaccaugccgcugagcugcaccaagaacaacucccaccacuacaucauggucggcaacgagacgggccuggagcucacccugaccaacaccagcaucaucaaccacaaguucugcaaccuguccgacgcccacaagaagaaccucuacgaccacgcccugaugagcaucaucuccacguuccaccugagcauccccaacuucaaccaguacgaggccauguccugcgacuucaacgggggcaagaucagcgugcaguacaaccucucccacagcuucgcgguggacgccgccaaccacugcgggaccaucgccaacggcguccugcagaccuucaugcggauggcguggggcggguccuacaucgcccuggacagcggcaaggggaacugggacugcaucaugaccuccuaccaguaccucaucauccagaacacgaccugggaggaccacugccaguucagccgccccucccccaucggcuaccuggggcugcucagccagcggacccgcgacaucuacaucagccggcgccugcugggcaccuucacguggacccucuccgacagcgagggcaacgaggcccccgggggcuacugccugacccgguggaugcugaucgaggccgagcucaagugcuucgggaacaccgccguggcgaagugcaacgagaagcacgacgaggaguucugcgacaugcugcgccuguucgacuucaacaagcaggccaucaagcggcucaagacggaggcccagauguccauccagcugaucaacaaggccgugaacgcccugaucaacgaccagcucaucaugaagaaccaccuccgcgacaucaugggcauccccuacugcaacuacagccgguacugguaccugaaccacaccgucaccgggaagaccucccugccccgcugcuggcuggugagcaacggcuccuaccugaacgagacgcacuucagcgacgacaucgagcagcaggcggacaacaugaucaccgagaugcuccagaaggaguacauggaccggcagggcaagaccccgcuggggcugguggaccucuucgucuucuccaccagcuucuaccugaucuccaucuuccugcaccuggugaagaucccguga

SEQ ID NO: 41640 - RNA, 1359 nt, Artificial Sequence
  derived and/or modified CDS sequence (opt1) from LASV(GA391;Clade III)__CAA36645__GPCmut13
augggccagaucgugaccuucuuccaggaggucccccacgugaucgaggaggugaugaacaucguccugaucgcccucagcauccuggccauccugaaggggcucuacaacguggcgaccugcggccugaucgggcuggugacguuccuccugcuguccggccgcagcugcucccucaucuacaaggggaccuacgagcugcagacccuggagcucaacauggagacccugaacaugacgaugccgcugagcugcaccaagaacaacucccaccacuacauccgggucggcaacgagaccggccucgagcugacccugacgaacaccagcauccucaaccacaaguucugcaaccuguccgacgcccacaagcgcaaccuguacgaccacagccucauguccaucaucagcaccuuccaccuguccauccccaacuucaaccaguacgaggccaugagcugcgacuucaacgggggcaagaucaccgugcaguacaaccugucccacagcuucgccguggacgccgcggggcacugcggcacgcucgccaacgggguccugcagaccuucaugcggauggccuggggcggcuccuacaucgcccuggacagcgggcgcggcaacugggacugcaucaugaccuccuaccaguaccucaucauccagaacaccacgugggacgaccacugccaguucagccggcccucccccaucggguaccugggccugcucagccagcgcacccgggacaucuacaucagccgccggcugcugggcaccuucaccuggacgcucuccgacagcgaggggaacgagaccccgggcggguacugccugacccgcuggaugcugaucgaggcggagcucaagugcuucggcaacaccgccguggccaagugcaacgagaagcacgacgaggaguucugcgacaugcugcggcuguucgacuucaacaagcaggccauccgccggcucaagacggaggcccagauguccauccagcugaucaacaaggcggugaacgcccugaucaacgaccagcucaucaugaagaaccaccuccgcgacaucauggggauccccuacugcaacuacagccgguacugguaccugaaccacaccuccaccggcaagaccagccugccccgcugcuggcugaucuccaacggcagcuaccugaacgagacgaaguucuccgacgacaucgagcagcaggccgacaacaugaucaccgagaugcuccagaaggaguacaucgaccggcaggggaagacgccccugggccuggucgaccuguucguguucagcaccuccuucuaccucaucagcaucuuccugcaccuggugaagaucccguga

SEQ ID NO: 41641 - RNA, 1362 nt, Artificial Sequence
  derived and/or modified CDS sequence (opt1) from LASV(AV;Clade V)__CCA30314__GPCmut13
augggccagaucgugaccuucuuccaggaggucccccacgugaucgaggaggugaugaacaucguccugaucgcccucagcauccuggccgugcugaaggggcucuacaacaucgcgaccugcggccugaucgggcugaucacguuccuccugcugugcggccgcuccugcagcuccaaccucuacaaggggguguacgagcugcagagccuggaccucaacauggagacccugaacaugaccaugccgcuguccugcaccaagaacaacagccaccacuacauccgggucggcaacgacacgggccucgagcugacccugaccaacaccuccauccucaaccacaaguucugcaaccugagcgacgcccacaagaaggaccuguacgaccacgcccucauguccaucaucagcacguuccaccuguccauccccaacuucaaccaguacgaggccaugagcugcgacuucaacgggggcaagaucuccgugcaguacaaccugagccacuccuacgccaucgacgcggccaaccacugcgggaccguggccaacggcauccuccagaccuucaugcgcauggccuggggcgggagcuacaucgcgcuggacuccggccgggggaacugggacugcaucaugaccagcuaccaguaccugaucauccagaacacgaccugggagaaccacugccaguucucccgccccagccccaucggcuaccucgggcugcugagccagcggacccgcgacaucuacaucucccggcgccuccugggcaccuucacguggacccugagcgacuccgagggcaacgccacccccgggggcuacugccucacccgguggaugcugaucgaggccgagcugaagugcuucgggaacacggccgucgccaagugcaacgagaagcacgacgaggaguucugcgacaugcuccgccuguucgacuucaacaagcaggcgaucagccggcugaaguccgaggcccagaugagcauccagcucaucaacaaggccgugaacgcccugaucaacgaccagcugaucaugaagaaccaccuccgcgacaucaugggcauccccuacugcaacuacuccaaguacugguaccugaaccacaccaucaccgggaagaccagccugcccaagugcuggcucguguccaacggcagcuaccugaacgagacgcacuucuccgacgacaucgagcagcaggccgacaacaugaucaccgagaugcugcagaaggaguacauggagcggcagggcaagaccccgcucgggcuggucgaccuguucguguucagcaccuccuucuaccugaucagcaucuuccuccgccuggugaagaucccguga

SEQ ID NO: 41642 - RNA, 1359 nt, Artificial Sequence
  derived and/or modified CDS sequence (opt1) from LASV(Togo/2016/7082;Clade VI)__AMR44577__GPCmut13
augggccagaucaucaccuucuuccaggaggugccccacgucaucgaggaggugaugaacaucgugcugaucgcccucagccugcuggccauccucaagggggucuacaacguggcgaccugcggcaucaucgggcuggugacguuccuguuccucugcggccgcuccugcagccugaucuacaagggguccuacgagcugcagacccucgagcugaacauggagacccugaacaugaccaugccgcucagcugcacgaagaacuccagccaccacuacauccgggucggcaacgagaccggccuggagcugacccucaccaacacguccaucaucaaccacaaguucugcaaccugagcgacgcccacaagcgcaaccuguacgaccacgcccucauguccauccugagcaccuuccaccuguccauccccaacuucaaccaguacgaggccaugagcugcgacuucaacgggggcaagaucuccgugcaguacaaccucagccacgccuacgcgguggacgccgccgagcacugcgggaccgucgccaacggcgugcugcagaccuucaugcggauggcguggggcggguccuacaucgcccuggacagcggccgcgggaacugggacugcaucaugacguccuaccaguaccucaucauccagaacaccaccugggaggaccacugccaguucagccggcccucccccaucggcuaccuggggcugcucagccagcgcacccgggacaucuacaucagccgccggcugcugggcacguucaccuggacccucuccgacagcgagggcaacgagacccccgggggcuacugccugacgcgcuggaugcugaucgaggccgagcucaagugcuucgggaacaccgccguggccaagugcaacgagaagcacgacgaggaguucugcgacaugcugcggcuguucgacuucaacaagcaggcgauccagcgccucaaguccgaggcccagaugagcauccagcugaucaacaaggccgucaacgcccugaucaacgaccagcucaucaugaagaaccaccuccgggacaugaugggcauccccuacugcaacuacuccaaguacugguaccugaaccacaccagcuccgggcgcaccagccugcccaagugcuggcugguguccaacggcagcuaccugaacgagacgcacuucuccgacgacaucgagcagcaggccgacaacaugaucaccgagaugcuccagaaggaguacaucgaccggcagggcaagaccccgcuggggcugguggaccucuucgucuucagcaccuccuucuaccugaucagcaucuuccugcaccugaucaagaucccguga

SEQ ID NO: 41643 - RNA, 1359 nt, Artificial Sequence
  derived and/or modified CDS sequence (opt1) from LASV(KAK-428;Clade n.d. (VII))__ANH09740__GPCmut13
augggccagaucgugaccuucuuccaggaggucccccacgugaucgaggaggugaugaacaucguccugaucgcccucagccugcuggccauccucaaggggcuguacaacuucgcgaccugcggcgugaucgggcugaucacguuccuccugcugugcggccgcuccugcagcgccaccuacaaggggcaguacgagcuccagacccuggagcugaacauggagucccucaacaugaccaugccgcugagcugcacgaagaacaacucccaccacuacauccgggccggcaacaacaccggccuggagcucacccugaccaacacgagcaucaucucccacaaguucugcaaccugagcgacgcccacaagaagaaccucuacgaccacacccugauguccaucaucaccaccuuccaccugagcauccccaacuucaaccaguacgaggccauguccugcgacuucaacgggggcaagaucagcauccaguacaaccucucccacagcuacgcgggggacgccgcccagcacugcggcacgguggccaacgggguccugcagaccuucaugcgcauggcguggggcggcuccuaccuggcccucgacagcgggcggcgcggcugggacugcaucaucuccagcuaccaguaccugaucauccagaacaccaccugggacgaccacugccaguucucccggcccagccccaucggguaccugggcuucgugagccagaagacgcgcgacaucuacaucucccggcgccuccugggcaccuucaccuggacccugagcgacuccgaggggcacgacaugccgggcggguacugccucacgcgguggaugcugaucgaggccgaccugaagugcuucggcaacaccgccguggccaagugcaacgagaagcacgacgaggaguucugcgacauguggcgccucuucgacuucaacaagcaggcgauccagcggcugaaggccgaggcccagaugaacauccagcugaucaacaaggccgucaacgcccucaucaacgaccagcugaugaugaagaaccaccuccgcgacaucauggggauccccuacugcaacuacagcaaguucugguaccugaacaacaccaccacgggccggaccucccugccccgcugcuggcugaucagcaacggcuccuaccucaacgagacccacuucagcgacgacaucgagcagcaggcggacaacaugaucaccgagaugcugcagaaggaguacauggaccggcaggggaagacgccccugggccucguggaccuguucguguucuccaccagcuucuaccugaucaccaucuuccuccaccuggucaagaucccguga

SEQ ID NO: 41644 - RNA, 1359 nt, Artificial Sequence; identical to SEQ ID NO: 41638
  derived and/or modified CDS sequence (opt1) from LASV(Pinneo-NIG-1969;Clade I)__AIT17836__GPCmut13

SEQ ID NO: 41645 - RNA, 1359 nt, Artificial Sequence
  derived and/or modified CDS sequence (opt1) from LASV(ISTH0009-NIG-2011;Clade II)__AIT17404__GPCmut13
augggccagaucaucaccuucuuccaggaggugccccacgucaucgaggaggugaugaacaucgugcugaucgcccucagccugcuggccauccucaaggggaucuacaacgucgcgaccugcggccuguucgggcugguguccuuccuccugcugugcggccgcagcugcuccacgaccuacaaggggguguacgagcuccagacccuggagcuggacauggccagccucaacaugaccaugccgcuguccugcacgaagaacaacagccaccacuacaucauggucggcaacgagaccggccuggagcucacccugaccaacacguccaucaucaaccacaaguucugcaaccugagcgacgcccacaagaagaaccucuacgaccacgcccugauguccaucaucagcaccuuccaccuguccauccccaacuucaaccaguacgaggccaugagcugcgacuucaacgggggcaagaucuccgugcaguacaaccucagccacgcguacgccguggacgccgccaaccacugcgggaccaucgcgaacggcguccugcagaccuucaugcggauggccuggggcggguccuacaucgcccuggacagcggcaagggguccugggacugcaucaugacgagcuaccaguaccucaucauccagaacaccaccugggaggaccacugccaguucucccgccccagccccaucggcuaccuggggcugcucagccagcggacccgcgacaucuacaucucccggcgccugcugggcacguucaccuggacccucagcgacuccgagggcaacgagacccccgggggcuacugccugacgcgguggaugcugaucgaggccgagcucaagugcuucgggaacaccgccguggcgaagugcaacgagaagcacgacgaggaguucugcgacaugcugcgccuguucgacuucaacaagcaggccauccggcgccucaagaccgaggcccagaugagcauccagcugaucaacaaggccgugaacgcccugaucaacgaccagcucaucaugaagaaccaccuccgggacaucaugggcaucccguacugcaacuacuccaaguacugguaccugaaccacaccgucacggggaagaccagccugccccgcugcuggcugguguccaacggcagcuaccugaacgagacccacuucuccgacgacaucgagcagcaggcggacaacaugaucaccgagcuccugcagaaggaguacauggaccggcagggcaagacgccccuggggcucguggaccuguucgucuucagcaccuccuucuaccugaucagcaucuuccugcaccucaucaagaucccguga

SEQ ID NO: 41646 - RNA, 1359 nt, Artificial Sequence
  derived and/or modified CDS sequence (opt1) from LASV(ISTH2010-NIG-2012;Clade II)__AIT17482__GPCmut13
augggccagaucaucaccuucuuccaggaggugccccacgucaucgaggaggugaugaacaucgugcugaucgcccucagccugcuggccauccucaaggggaucuacaacgucgcgaccugcggccuguucgggcugguguccuuccuccugcugugcggccgcagcugcuccacgaccuacaaggggguguacgagcuccagacccuggagcuggacauggccagccucaacaugaccaugccgcuguccugcacgaagaacaacagccaccacuacaucauggucggcaacgagaccggccuggagcucacccugaccaacacguccaucaucaaccacaaguucugcaaccugagcgacgcccacaagaagaaccucuacgaccacgcccugauguccaucaucagcaccuuccaccuguccauccccaacuucaaccaguacgaggccaugagcugcgacuucaacgggggcaagaucuccgugcaguacaaccucagccacgcguacgccguggacgccgccaaccacugcgggaccaucgcgaacggcguccugcagaccuucaugcggauggccuggggcggguccuacaucgcccuggacagcggcaagggguccugggacugcaucaugacgagcuaccaguaccucaucauccagaacaucaccugggaggaccacugccaguucucccgccccagccccaucggcuaccuggggcugcucagccagcggacccgcgacaucuacaucucccggcgccugcugggcaccuucacguggacccucagcgacuccgagggcaacgagacccccgggggcuacugccugacccgguggaugcugaucgaggccgagcucaagugcuucgggaacacggccguggcgaagugcaacgagaagcacgacgaggaguucugcgacaugcugcgccuguucgacuucaacaagcaggccauccggcgccucaagaccgaggcccagaugagcauccagcugaucaacaaggccgugaacgcccugaucaacgaccagcucaucaugaagaaccaccuccgggacaucaugggcauccccuacugcaacuacuccaaguacugguaccugaaccacaccgucaccgggaagacgagccugccccgcugcuggcugguguccaacggcagcuaccugaacgagacccacuucuccgacgacaucgagcagcaggcggacaacaugaucaccgagcuccugcagaaggaguacaucgaccggcagggcaagaccccgcuggggcucguggaccuguucgucuucagcacguccuucuaccugaucagcaucuuccugcaccucgugaagaucccguga

SEQ ID NO: 41647 - RNA, 1359 nt, Artificial Sequence
  derived and/or modified CDS sequence (opt1) from LASV(Lassa virus/H.sapiens-wt/NGA/2015/ISTH_0543;Clade II)__AVO03639__GPCmut13
augggccagaucaucaccuucuuccaggaggugccccacgucaucgaggaggugaugaacaucgugcugaucgcccucagccugcuggccauccucaaggggaucuacaacgucgcgaccugcggccuguucgggcugguguccuuccuccugcugugcggccgcagcugcuccacgaccuacaaggggguguacgagcuccagacccuggagcuggacauggccaaccucaacaugaccaugccgcugagcugcacgaagaacaacucccaccacuacaucauggucggcaacgagaccggccuggagcucacccugaccaacacgagcaucaucaaccacaaguucugcaaccuguccgacgcccacaagaagaaccucuacgaccacgcccugaugagcaucaucuccaccuuccaccugagcauccccaacuucaaccaguacgaggccauguccugcgacuucaacgggggcaagaucagcgugcaguacaaccucucccacaccuacgcgguggacgccgccaaccacugcgggaccaucgccaacggcguccugcagacguucaugcggauggcguggggcgggagcuacaucgcccuggacuccggcaaggggagcugggacugcaucaugaccuccuaccaguaccucgugauccagaacaccaccugggaggaccacugccaguucagccgccccucccccaucggcuaccuggggcugcucagccagcggacgcgcgacaucuacaucagccggcgccugcugggcaccuucaccuggacccucuccgacagcgagggcaacgagacgcccgggggcuacugccugacccgguggaugcugaucgaggccgagcucaagugcuucgggaacaccgccguggccaagugcaacgagaagcacgacgaggaguucugcgacaugcugcgccuguucgacuucaacaagcaggcgauccggcgccucaagaccgaggcccagauguccauccagcugaucaacaaggccgucaacgcccugaucaacgaccagcucaucaugaagaaccaccuccgggacaucaugggcauccccuacugcaacuacagcaaguacugguaccugaaccacacggugaccgggaagaccucccugccccgcugcuggcuggugagcaacggcuccuaccugaacgagacccacuucagcgacgacaucgagcagcaggccgacaacaugaucacggagcuccugcagaaggaguacaucgaccggcagggcaagaccccgcuggggcucgucgaccuguucguguucuccaccagcuucuaccugaucuccaucuuccugcaccucgugaagaucccguga

SEQ ID NO: 41648 - RNA, 1359 nt, Artificial Sequence
  derived and/or modified CDS sequence (opt1) from LASV(Lassa virus/H.sapiens-wt/NGA/2016/ISTH_0009;Clade II)__AVO03571__GPCmut13
augggccagaucaucaccuucuuccaggaggugccccacgucaucgaggaggugaugaacaucgugcugaucgcccucagccugcuggccauccucaaggggaucuacaacgucgcgaccugcggccugcuggggcucguguccuuccugcugcucugcggccgcagcugcuccacgaccuacaaggggguguacgagcugcagacccuggagcucgacauggccagccugaacaugaccaugccgcuguccugcacgaagaacaacagccaccacuacaucauggucggcaacgagaccggccucgagcugacccugaccaacacguccaucaucaaccacaaguucugcaaccucagcgacgcccacaagaagaaccuguacgaccacgcccugauguccaucaucagcaccuuccaccucuccauccccaacuucaaccaguacgaggccaugagcugcgacuucaacgggggccggaucuccgugcaguacaaccugagccacuccuacgcgguggacgccgccaaccacugcgggaccaucgccaacggcguccugcagaccuucaugcgcauggcguggggcgggagcuacaucgcccucgacuccggcaaggggagcugggacugcaucaugacguccuaccaguaccugaucauccagaacaccaccugggaggaccacugccaguucagccggcccagccccaucggcuaccuggggcuccugucccagcgcacccgggacaucuacaucagccgccggcugcucggcacguucaccuggacccuguccgacagcgagggcaacgagacccccgggggcuacugccugacgcgcuggaugcucaucgaggccgagcugaagugcuucgggaacaccgccguggccaagugcaacgagaagcacgacgaggaguucugcgacaugcugcggcuguucgacuucaacaagcaggcgauccgccggcugaagaccgaggcccagauguccauccagcugaucaacaaggccgugaacgcccucaucaacgaccagcugaucaugaagaaccaccuccgcgacaucaugggcaucccguacugcaacuacagcaaguacugguaccucaaccacaccgucacggggaagaccucccugccccggugcuggcuggugagcaacggcuccuaccucaacgagacccacuucagcgacgacaucgagcagcaggccgacaacaugaucaccgagcugcugcagaaggaguacaucgaccgccagggcaagacgccccucgggcugguggaccuguucgucuucuccaccagcuucuaccugaucuccaucuuccuccaccuggugaagaucccguga

SEQ ID NO: 41649 - RNA, 1359 nt, Artificial Sequence
  derived and/or modified CDS sequence (opt1) from LASV(Lassa virus/H.sapiens-wt/NGA/2016/ISTH_0017;Clade II)__AVO03567__GPCmut13
augggccagaucaucaccuucuuccaggaggugccccacgucaucgaggaggugaugaacaucgugcugaucgcccucagccugcuggccauccucaaggggaucuacaacgucgcgaccugcggccuguucgggcugguguccuuccuccugcugugcggccgcagcugcuccacgaccuacaaggggguguacgagcuccagacccuggagcuggacauggccagccucaacaugaccaugccgcuguccugcacgaagaacaacagccaccacuacaucauggucggcaacgagaccggccuggagcucacccugaccaacacguccaucaucaaccacaaguucugcaaccugagcgacgcccacaagaagaaccucuacgaccacgcccugauguccaucaucagcaccuuccaccuguccauccccaacuucaaccaguacgaggccaugagcugcgacuucaacgggggcaagaucuccgugcaguacaaccucagccacaccuacgcgaucgacgccgccaaccacugcgggaccaucgccaacggcgugcugcagacguucaugcggauggcguggggcggguccuacaucgcccuggacagcggcaagggguccugggacugcaucaugaccagcuaccaguaccucaucauccagaacaccaccugggaggaccacugccaguucucccgccccagccccaucggcuaccuggggcugcucagccagcggacgcgcgacaucuacaucucccggcgccugcugggcaccuucaccuggacccucagcgacuccgagggcaacgagacgcccgggggcuacugccugacccgguggaugcugaucgaggccgagcucaagugcuucgggaacaccgccgucgccaagugcaacgagaagcacgacgaggaguucugcgacaugcugcgccuguucgacuucaacaagcaggcgauccggcgccucaagaccgaggcccagaugagcauccagcugaucaacaaggccgugaacgcccugaucaacgaccagcucaucaugaagaaccaccuccgggacaucaugggcauccccuacugcaacuacuccaaguacugguaccugaaccacacggugaccgggaagaccagccugccccgcugcuggcuggucuccaacggcagcuaccugaacgagacccacuucuccgacgacaucgagcagcaggccgacaacaugaucacggagcuccugcagaaggaguacauggaccggcagggcaagaccccgcuggggcucguggaccuguucguguucagcaccuccuucuaccugaucagcaucuuccugcaccucguccgcaucccguga

SEQ ID NO: 41650 - RNA, 1359 nt, Artificial Sequence
  derived and/or modified CDS sequence (opt1) from LASV(Lassa virus/H.sapiens-wt/NGA/2018/ISTH_0959;Clade II)__AVV65099__GPCmut13
augggccagaucaucaccuucuuccaggaggugccccacgucaucgaggaggugaugaacaucgugcugaucgcccucagccugcuggccauccucaaggggaucuacaacgucgugaccugcggccuguucgggcugguguccuuccuccugcugugcggccgcagcugcuccacgaccuacaagggggucuacgagcuccagacccuggagcuggacauggcgagccucaacaugaccaugccgcuguccugcacgaagaacaacagccaccacuacaucauggugggcaacgagaccggccuggagcucacccugaccaacacguccaucaucaaccacaaguucugcaaccugagcgacgcccacaagaagaaccucuacgaccacgcccugauguccaucaucagcaccuuccaccuguccauccccaacuucaaccaguacgaggccaugagcugcgacuucaacgggggcaagaucuccgugcaguacaaccucagccacgccuacgcgaucgacgccgccaaccacugcgggaccaucgccaacggcguccugcagaccuucaugcggauggcguggggcggguccuacaucgcccuggacagcggcaagggguccugggacugcaucaugacgagcuaccaguaccucaucauccagaacaccaccugggaggaccacugccaguucucccgccccagccccaucggcuaccuggggcugcucagccagcggacccgcgacaucuacaucucccggcgccugcugggcacguucaccuggacccucagcgacuccgagggcaacgagacccccgggggcuacugccugacgcgguggaugcugaucgaggccgagcucaagugcuucgggaacaccgccguggccaagugcaacgagaagcacgacgaggaguucugcgacaugcugcgccuguucgacuucaacaagcaggcgauccggcgccucaagaccgaggcccagaugagcauccagcugaucaacaaggccgugaacgcccugaucaacgaccagcucaucaugaagaaccaccuccgggacaucaugggcaucccguacugcaacuacuccaaguacugguaccugaaccacaccgucacggggaagaccagccugccccgcugcuggcugguguccaacggcagcuaccugaacgagacccacuucuccgacgacaucgagcagcaggccgacaacaugaucaccgagcuccugcagaaggaguacaucgaccggcagggcaagacgccccuggggcucguggaccuguucgucuucagcaccuccuucuaccugaucagcaucuuccugcaccucgugaagaucccguga

SEQ ID NO: 41651 - RNA, 1359 nt, Artificial Sequence
  derived and/or modified CDS sequence (opt1) from LASV(LASV003-NIG-2008;Clade II)__AIT17580__GPCmut13
augggccagaucaucaccuucuuccaggaggugccccacgucaucgaggaggugaugaacaucgugcugaucgcccucagccugcuggccauccucaaggggaucuacaacgucgcgaccugcggccuguucgggcugguguccuuccuccugcugugcggccgcagcugcuccacgaccuacaaggggguguacgagcuccagacccuggagcuggacauggccagccucaacaugaccaugccgcuguccugcacgaagaacaacagccaccacuacaucauggucggcaacgagaccggccuggagcucacccugaccaacacguccaucaucaaccacaaguucugcaaccugagcgacgcccacaagaagaaccucuacgaccacgcccugauguccaucaucagcaccuuccaccuguccauccccaacuucaaccaguacgaggccaugagcugcgacuucaacgggggcaagaucuccgugcaguacaaccucagccacaccuacgcgguggacgccgccaaccacugcgggaccaucgccaacggcguccugcagacguucaugcggauggcguggggcggguccuacaucgcccuggacagcggcaagggguccugggacugcaucaugaccagcuaccaguaccucaucauccagaacaccaccugggaggaccacugccaguucucccgccccagccccaucggcuaccuggggcugcucagccagcggacgcgcgacaucuacaucucccggcgccugcugggcaccuucaccuggacccucagcgacuccgagagcaacgagacgccgggcggguacugccugacccgguggaugcugaucgaggccgagcucaagugcuucggcaacaccgccguggccaagugcaacgagaagcacgacgaggaguucugcgacaugcugcgccuguucgacuucaacaagcaggcgauccggcgccucaaggccgaggcccagauguccauccagcugaucaacaaggccgugaacgcccugaucaacgaccagcucaucaugaagaaccaccuccgggacaucauggggauccccuacugcaacuacagcaaguacugguaccugaaccacaccgucacgggccgcaccucccugccccggugcuggcuggugagcaacggguccuaccugaacgagacccacuucagcgacgacaucgagcagcaggcggacaacaugaucaccgagcuccugcagaaggaguacauggaccgccagggcaagacgccccugggccucguggaccuguucgucuucuccaccagcuucuaccugaucuccaucuuccugcaccucgugaagaucccguga

SEQ ID NO: 41652 - RNA, 1359 nt, Artificial Sequence
  derived and/or modified CDS sequence (opt1) from LASV(LASV035-NIG-2009;Clade II)__AIT17588__GPCmut13
augggccagaucaucaccuucuuccaggaggugccccacgucaucgaggaggugaugaacaucgugcugaucgcccucagccugcuggccauccucaaggggaucuacaacgucgcgaccugcggccuguucgggcugguguccuuccuccugcugugcggccgcagcugcuccacgaccuacaaggggguguacgagcuccagacccuggagcuggacauggccagccucaacaugaccaugccgcuguccugcacgaagaacaacagccaccacuacaucauggucggcaacgagaccggccuggagcucacccugaccaacacguccaucaucaaccacaaguucugcaaccugagcgacgcccacaagaagaaccucuacgaccacgcccugauguccaucaucagcaccuuccaccuguccauccccaacuucaaccaguacgaggccaugagcugcgacuucaacgggggcaagaucuccgugcaguacaaccucagccacgcguacgccguggacgccgccaaccacugcgggaccaucgcgaacggcguccugcagaccuucaugcggauggccuggggcggguccuacaucgcccuggacagcggcaagggguccugggacugcaucaugacgagcuaccaguaccucaucauccagaacaccaccugggaggaccacugccaguucucccgccccagccccaucggcuaccuggggcugcucagccagcggacccgcgacaucuacaucucccggcgccugcugggcacguucaccuggacccucagcgacuccgagggcaacgagacccccgggggcuacugccugacgcgguggaugcugaucgaggccgagcucaagugcuucgggaacaccgccguggcgaagugcaacgagaagcacgacgaggaguucugcgacaugcugcgccuguucgacuucaacaagcaggccauccggcgccucaaggccgaggcccagaugagcauccagcugaucaacaaggccgugaacgcgcugaucaacgaccagcucaucaugaagaaccaccuccgggacaucaugggcauccccuacugcaacuacuccaaguacugguaccugaaccacaccgucaccgggaagacgagccugccccgcugcuggcugguguccaacggcagcuaccugaacgagacccacuucuccgacgacaucgagcagcaggccgacaacaugaucaccgagcuccugcagaaggaguacaucgaccggcagggcaagaccccgcuggggcucguggaccuguucgucuucagcacguccuucuaccugaucagcaucuuccugcaccucgugaagaucccguga

SEQ ID NO: 41653 - RNA, 1359 nt, Artificial Sequence
  derived and/or modified CDS sequence (opt1) from LASV(LASV1000-NIG-2009;Clade II)__AIT17782__GPCmut13
augggccagaucaucaccuucuuccaggaggugccccacgucaucgaggaggugaugaacaucgugcugaucgcccucagccugcuggccauccucaaggggaucuacaacgucgcgaccugcggccuguucgggcugguguccuuccuccugcugugcggccgcagcugcuccacgaccuacaaggggguguacgagcuccagacccuggagcuggacauggccagccucaacaugaccaugccgcuguccugcacgaagaacaacagccaccacuacaucauggucggcaacgagaccggccuggagcucacccugaccaacacguccaucaucaaccacaaguucugcaaccugagcgacgcccacaagaagaaccucuacgaccacgcccugauguccaucaucagcaccuuccaccuguccauccccaacuucaaccaguacgaggccaugagcugcgacuucaacgggggcaagaucuccgugcaguacaaccucagccacaccuacgcgguggacgccgccaaccacugcgggaccaucgccaacggcguccugcagacguucaugcggauggcguggggcggguccuacaucgcccuggacagcggcaagggguccugggacugcaucaugaccagcuaccaguaccucaucauccagaacaccaccugggaggaccacugccaguucucccgccccagccccaucggcuaccuggggcugcucagccagcggacgcgcgacaucuacaucucccggcgccugcugggcaccuucaccuggacccucagcgacuccgagggcaacgagacgcccgggggcuacugccugacccgguggaugcugaucgaggccgagcucaagugcuucgggaacaccgccguggccaagugcaacgagaagcacgacgaggaguucugcgacaugcugcgccuguucgacuucaacaagcaggcgaucaagcggcucaagaccgaggcccagaugagcauccagcugaucaacaaggccgugaacgcccugaucaacgaccagcucaucaugaagaaccaccuccgcgacaucaugggcauccccuacugcaacuacuccaaguacugguaccugaaccacacggucaccgggaagaccagccugccccggugcuggcugguguccaacggcagcuaccugaacgagacccacuucuccgacgacaucgagcagcaggccgacaacaugaucacggagcuccugcagaaggaguacaucgaccgccagggcaagaccccgcuggggcucguggaccuguucgucuucagcaccuccuucuaccugaucagcaucuuccugcaccucgugaagaucccguga

SEQ ID NO: 41654 - RNA, 1359 nt, Artificial Sequence
  derived and/or modified CDS sequence (opt1) from LASV(LASV221-NIG-2010;Clade II)__AIT17624__GPCmut13
augggccagaucaucaccuucuuccaggaggugccccacgucaucgaggaggugaugaacaucgugcugaucgcccucagccugcuggccauccucaaggggaucuacaacgucgcgaccugcggccuguucgggcugguguccuuccuccugcugugcggccgcagcugcuccacgaccuacaaggggguguacgagcuccagacccuggagcuggacauggccagccucaacaugaccaugccgcuguccugcacgaagaacaacagccaccacuacaucauggucggcaacgagaccggccuggagcucacccugaccaacacguccaucaucaaccacaaguucugcaaccugagcgacgcccacaagaagaaccucuacgaccacgcccugauguccaucaucagcaccuuccaccuguccauccccaacuucaaccaguacgaggccaugagcugcgacuucaacgggggcaagaucuccgugcaguacaaccucagccacaccuacgcgaucgacgccgccaaccacugcgggaccaucgccaacggcgugcugcagacguucaugcggauggcguggggcggguccuacaucgcccuggacagcggcaagggguccugggacugcaucaugaccagcuaccaguaccucaucauccagaacaccaccugggaggaccacugccaguucucccgccccagccccaucggcuaccuggggcugcucagccagcggacgcgcgacaucuacaucucccggcgccugcugggcaccuucaccuggacccucagcgacuccgagggcaacgagacgcccgggggcuacugccugacccgguggaugcugaucgaggccgagcucaagugcuucgggaacaccgccgucgccaagugcaacgagaagcacgacgaggaguucugcgacaugcugcgccuguucgacuucaacaagcaggcgauccggcgccucaagaccgaggcccagaugagcauccagcugaucaacaaggccgugaacgcccugaucaacgaccagcucaucaugaagaaccaccuccgggacaucaugggcauccccuacugcaacuacuccaaguacugguaccugaaccacacggugaccgggaagaccagccugccccgcugcuggcuggucuccaacggcagcuaccugaacgagacccacuucuccgacgacaucgagcagcaggccgacaacaugaucacggagaugcuccagaaggaguacauggaccggcagggcaagaccccgcuggggcugguggaccucuucguguucagcaccuccuucuaccugaucagcaucuuccugcaccuggucaagaucccguga

SEQ ID NO: 41655 - RNA, 1359 nt, Artificial Sequence
  derived and/or modified CDS sequence (opt1) from LASV(LASV237-NIG-2010;Clade II)__AIT17638__GPCmut13
augggccagaucaucaccuucuuccaggaggugccccacgucaucgaggaggugaugaacaucgugcugaucgcccucagccugcuggccauccucaaggggaucuacaacgucgcgaccugcggccuguucgggcugguguccuuccuccugcugugcggccgcagcugcuccacgaccuacaaggggguguacgagcuccagacccuggagcuggacauggccagccucaacaugaccaugccgcuguccugcacgaagaacaacagccaccacuacaucauggucggcaacgagaccggccuggagcucacccugaccaacacguccaucaucaaccacaaguucugcaaccugagcgacgcccacaagaaggaccucuacgaccacgcccugauguccaucaucagcaccuuccaccuguccauccccaacuucaaccaguacgaggccaugagcugcgacuucaacgggggcaagaucuccgugcaguacaaccucagccacaccuacgcgguggacgccgccaaccacugcgggaccaucgccaacggcguccugcagacguucaugcggauggcguggggcggguccuacaucgcccuggacagcggcaagggguccugggacugcaucaugaccagcuaccaguaccucaucauccagaacaccaccugggaggaccacugccaguucucccgccccagccccaucggcuaccuggggcugcucagccagcggacgcgcgacaucuacaucucccggcgccugcugggcaccuucaccuggacccucagcgacuccgagggcaacgagacgcccgggggcuacugccugacccgguggaugcugaucgaggccgagcucaagugcuucgggaacaccgccguggccaagugcaacgagaagcacgacgaggaguucugcgacaugcugcgccuguucgacuucaacaagcaggcgauccggcgccucaagaccgaggcccagaugagcauccagcugaucaacaaggccgugaacgcccugaucaacgaccagcucaucaugaagaaccaccuccgggacaucaugggcauccccuacugcaacuacuccaaguacugguaccugaaccacacggucaccgggaagaccagccugccccgcugcuggcugguguccaacggcagcuaccugaacgagacccacuucuccgacgacaucgagcagcaggccgacaacaugaucacggagcuccugcagaaggaguacauggaccggcagggcaagaccccgcuggggcucguggaccuguucgucuucagcaccuccuucuaccugaucagcaucuuccugcaccucaucaagaucccguga

SEQ ID NO: 41656 - RNA, 1359 nt, Artificial Sequence
  derived and/or modified CDS sequence (opt1) from LASV(LASV253-NIG-2011;Clade II)__AIT17670__GPCmut13
augggccagaucaucaccuucuuccaggaggugccccacgucaucgaggaggugaugaacaucgugcugaucgcccucagccugcuggccauccucaaggggaucuacaacgucgcgaccugcggccuguucgggcugguguccuuccuccugcugugcggccgcagcugcuccacgaccuacaaggggguguacgagcuccagacccuggagcuggacauggccagccucaacaugaccaugccgcuguccugcacgaagaacaacagccaccacuacaucauggucggcaacgagaccggccuggagcucacccugaccaacacguccaucaucaaccacaaguucugcaaccugagcgacgcccacaagaagaaccucuacgaccacgcccugauguccaucaucagcaccuuccaccuguccauccccaacuucaaccaguacgaggccaugagcugcgacuucaacgggggcaagaucuccgugcaguacaaccucagccacaccuacgcgguggacgccgccaaccacugcgggaccaucgccaacggcguccugcagacguucaugcggauggcguggggcggguccuacaucgcccuggacagcggcaagggguccugggacugcaucaugaccagcuaccaguaccucaucauccagaacaccaccugggaggaccacugccaguucucccgccccagccccaucggcuaccuggggcugcucagccagcggacgcgcgacaucuacaucucccggcgccugcugggcaccuucaccuggacccucagcgacuccgagggcaacgagacgcccgggggcuacugccugacccgguggaugcugaucgaggccgagcucaagugcuucgggaacaccgccguggccaagugcaacgagaagcacgacgaggaguucugcgacaugcugcgccuguucgacuucaacaagcaggcgauccggcgccucaaggccgaggcccagaugagcauccagcugaucaacaaggccgugaacgcccugaucaacgaccagcucaucaugaagaaccaccuccgggacaucaugggcaucccguacugcaacuacuccaaguacugguaccugaaccacaccgucacggggcgcaccagccugccccggugcuggcugguguccaacggcagcuaccugaacgagacccacuucuccgacgacaucgagcagcaggcggacaacaugaucaccgagcuccugcagaaggaguacaucgaccgccagggcaagacgccccuggggcucguggaccuguucgucuucagcaccuccuucuaccugaucagcaucuuccugcaccucgugaagaucccguga

SEQ ID NO: 41657 - RNA, 1359 nt, Artificial Sequence
  derived and/or modified CDS sequence (opt1) from LASV(LASV254-NIG-2011;Clade II)__AIT17674__GPCmut13
augggccagaucaucaccuucuuccaggaggugccccacgucaucgaggaggugaugaacaucgugcugaucgcccucagccugcuggccauccucaaggggaucuacaacgucgcgaccugcggccuguucgggcugguguccuuccuccugcugugcggccgcagcugcuccacgaccuacaaggggguguacgagcuccagacccuggagcuggacaugaccaaccucaacaugacgaugccgcugagcugcaccaagaacaacucccaccacuacaucauggucggcaacgagaccggccuggagcucacccugacgaacaccagcaucaucaaccacaaguucugcaaccuguccgacgcccacaagaagaaccucuacaaccacgcccugaugagcaucaucuccaccuuccaccugagcauccccaacuucaaccaguacgaggccauguccugcgacuucaacgggggcaagaucagcgugcaguacaaccucucccacagcuacgccguggacgcggccaaccacugcgggaccaucgccaacggcguccugcagacguucaugcggauggccuggggcggguccuacaucgcgcuggacagcggcaaggggaacugggacugcaucaugaccuccuaccaguaccucaucauccagaacaccaccugggaggaccacugccaguucagccgccccucccccaucggcuaccuggggcugcucagccagcggacgcgcgacaucuacaucagccggcgccugcugggcaccuucaccuggacccucuccgacagcgagggcaacgagacgcccgggggcuacugccugacccgguggaugcugaucgaggccgagcucaagugcuucgggaacaccgccguggccaagugcaacgagaagcacgacgaggaguucugcgacaugcugcgccuguucgacuucaacaagcaggccauccggcgccucaagaccgaggcgcaggccaacauccagcugaucaacaaggccgugaacgcccugaucaacgaccagcucaucaugaagaaccaccuccgggacaucaugggcauccccuacugcaacuacuccaaguacugguaccugaaccacacggucaccgggaagaccagccugccccgcugcuggcugguguccaacggcagcuaccugaacgagacccacuucuccgacgacaucgagcagcaggccgacaacaugaucacggagcuccugcagaaggaguacauggaccggcagggcaagaccccgcuggggcucguggaccuguucgucuucagcaccuccuucuaccugaucagcaucuuccugcaccucgugaagaucccguga

SEQ ID NO: 41658 - RNA, 1359 nt, Artificial Sequence
  derived and/or modified CDS sequence (opt1) from LASV(Nig08-A19;Clade III)__ADU56618__GPCmut13
augggccagaucgugaccuucuuccaggaggucccccacgugaucgaggaggugaugaacaucguccugaucgcccucagcauccuggccauccugaaggggcucuacaacaucgcgaccugcggccugaucgggcuggugacguuccuccugcuguccggccgcagcugcuccaugaccuacaaggggguguacgagcuccagacccuggagcugaacaugaacacccucaacaugacgaugccgcugagcugcaccaagaacaacucccaccacuacaucauggucggcaacgagaccggccuggagcucacccugacgaacaccagccugcuccaccacaaguucugcaaccuguccgacgcccacaagaagaaccuguacgaccacacccucaugagcaucaucuccaccuuccaccugagcauccccaacuucaaccaguacgaggccauguccugcgacuucaacgggggcaagaucacggugcaguacaaccugagccacuccuacgccaucgacgccgcgaaccacugcgggaccguggccaacggcguccuccagaccuucaugcggauggccuggggcgggagcuacaucgcccuggacuccggccgcgggaagugggacugcaucaugaccagcuaccaguaccugaucauccagaacacgaccugggaggaccacugccaguucucccggcccagccccaucggcuaccucgggcugcugucccagcgcacccgggacaucuacaucagccgccggcuccugggcaccuucacguggacccugagcgacuccgagggcaacgagacccccgggggcuacugccucacccgcuggaugcugaucgaggcggagcugaagugcuucgggaacacggccguggccaagugcaacgagaagcacgacgaggaguucugcgacaugcuccggcuguucgacuucaacaagcaggccauccgccggcugaaggccgaggcgcagaugagcauccagcucaucaacaaggccgugaacgcccugaucaacgaccagcugaucaugaagaaccaccuccgcgacaucaugggcauccccuacugcaacuacuccaaguacugguaccugaaccacaccagcaccgggcggaccucccugccccgcugcuggcucgucagcaacggcuccuaccugaacgagacgcacuucagcgacgacaucgagcagcaggccgacaacaugaucaccgagaugcugcagaaggaguaccucgaccggcagggcaagaccccgcuggggcugguggaccuguucguguucuccaccagcuucuaccucaucuccaucuuccugcaccuggucaagaucccguga

SEQ ID NO: 41659 - RNA, 1362 nt, Artificial Sequence
  derived and/or modified CDS sequence (opt1) from LASV(G1180-SLE-2010;Clade IV)__AIT17168__GPCmut13
augggccagaucgugaccuucuuccaggaggucccccacgugaucgaggaggugaugaacaucguccugaucgcccucagcauccuggccgugcugaaggggcucuacaacuucgcgaccugcggccugguggggcugcucaccuuccugcugcucugcggccgcuccugcaccgccagccgguacaagggggucuacgagcugcagacccuggagcucaacauggagacccugaacaugacgaugccgcuguccugcaccaagaacaacagccaccacuacaucauggugggcaacgagaccggccucgagcugacccugacgaacaccuccaucaucaaccacaaguucugcaaccucagcgacgcccacaagaagaaccuguacgaccacgcccugauguccaucaucagcaccuuccaccucuccauccccaacuucaaccaguacgaggccaugagcugcgacuucaacgggggcaagaucuccgugcaguacaaccugagccacuccuacgcgggggacgccgccaaccacugcggcaccgucgccaacggggugcugcagacguucaugcgcauggcguggggcggcagcuacaucgcccucgacuccgggcacggcagcugggacugcaucaugaccuccuaccaguaccugaucauccagaacaccaccugggaggaccacugccaguucagccggcccucccccaucggguaccugggccuccugagccagcgcacgcgggacaucuacaucagccgccggcugcucggcaccuucaccuggacccuguccgacagcgaggggaaggacacgccgggcggguacugccugacccgcuggaugcucaucgaggccgagcugaagugcuucggcaacaccgccguggccaagugcaacgagaagcacgacgaggaguucugcgacaugcugcggcuguucgacuucaacaagcaggcgauccagcgccugaaggccgaggcccagauguccauccagcugaucaacaaggccgucaacgcccucaucaacgaccagcugaucaugaagaaccaccuccgggacaucauggggauccccuacugcaacuacagcaaguacugguaccucaaccacaccacgaccggcaagaccucccugcccaagugcuggcuggugagcaacggcuccuaccucaacgagacccacuucagcgacgacaucgagcagcaggcggacaacaugaucacggagaugcugcagaaggaguacauggagcgccaggggaagacgccccugggccucguggaccuguucgucuucuccaccagcuucuaccugaucuccaucuuccugcaccucgugaagaucccguga

SEQ ID NO: 41660 - RNA, 1362 nt, Artificial Sequence
  derived and/or modified CDS sequence (opt1) from LASV(G1442-SLE-2011;Clade IV)__AIT17180__GPCmut13
augggccagaucgugaccuucuuccaggaggucccccacgugaucgaggaggugaugaacaucguccugaucgcccucagcauccuggccgugcugaaggggcucuacaacguggcgaccugcggccugaucgggcuggucacguuccuccugcugugcggccgcuccugcaccaccacccucuacaaggggguguacgagcugcagacgcuggagcucaacauggagacccugaacaugaccaugccgcugagcugcaccaagaacaacucccaccacuacauccgggugggcaacgagacgggccucgagcugacccugaccaacaccagcaucaucaaccacaaguucugcaaccucuccgacgcccacaagaagaaccuguacgaccacgcccugaugagcaucaucuccacguuccaccucagcauccccaacuucaaccaguacgaggccauguccugcgacuucaacgggggcaagaucagcguccaguacaaccugucccacagcuacgccggggacgcggccaaccacugcggcaccguggccaacggggugcugcagaccuucaugcgcauggccuggggcggcuccuacaucgcgcucgacagcgggcggggcaacugggacugcaucaugaccuccuaccaguaccugaucauccagaacacgaccugggacgaccacugccaguucagccgccccucccccaucggguaccugggccuccugagccagcggacccgcgacgucuacaucucccggcgccugcucggcaccuucacguggacccugagcgacagcgaggggaaggacaccccgggcggguacugccugacccgguggaugcucaucgaggccgagcugaagugcuucggcaacacggccguggccaagugcaacgagaagcacgacgaggaguucugcgacaugcugcgccucuucgacuucaacaagcaggccauccagcggcugaaggcggaggcccagauguccauccagcugaucaacaaggccgugaacgcccucaucaacgaccagcugaucaugaagaaccaccuccgcgacaucauggggauccccuacugcaacuacagcaaguacugguaccugaacaacaccgccaccggcaagaccucccugcccaagugcuggcugaucagcaacggcuccuaccucaacgagacgcacuucagcgacgacaucgagcaggaggcggacaacaugaucaccgagaugcugcagaaggaguacauggagcggcaggggaagacgccccugggccucgucgaccuguucguguucuccaccagcuucuaccugaucuccaucuuccugcaccucgugaagaucccguga

SEQ ID NO: 41661 - RNA, 1362 nt, Artificial Sequence
  derived and/or modified CDS sequence (opt1) from LASV(G3010-SLE-2013;Clade IV)__AIT17344__GPCmut13
augggccagaucgugaccuucuuccaggaggucccccacgugaucgaggaggugaugaacaucguccugaucgcccucagcauccuggccgugcugaaggggcucuacaacuucgcgaccugcggccugguggggcuggucacguuccuccugcugugcggccgcuccugcaccaccagccucuacaaggggguguacgagcugcagacccuggagcucaacauggagacgcugaacaugaccaugccgcuguccugcaccaagaacaacagccaccacuacaucauggugggcaacgagaccggccucgagcugacgcugaccaacaccuccaucaucaaccacaaguucugcaaccucagcgacgcccacaagaagaaccuguacaaccacgcccugauguccaucaucagcaccuuccaccucuccauccccaacuucaaccaguacgaggccaugagcugcgacuucaacgggggcaagaucuccguccaguacaaccugagccacuccuacgccggggacgcggccagccacugcggcacgguggccaacggggugcugcagaccuucaugcggauggccuggggcggcuccuacaucgcgcucgacagcggguacggcaagugggacugcaucaugaccuccuaccaguaccugaucauccagaacaccacgugggaggaccacugccaguucagccgccccucccccaucggguaccugggccuccugagccagcggacccgcgacaucuacaucagccggcgccugcucggcaccuucaccuggacgcuguccgacagcgaggggaaggacaccccgggcggguacugccugacccgguggaugcucaucgaggccgagcugaagugcuucggcaacaccgccgucgccaagugcaacgagaagcacgacgaggaguucugcgacaugcugcgccucuucgacuucaacaagcaggccauccagcggcugaagacggaggcgcagauguccauccagcugaucaacaaggccgugaacgcccucaucaacgaccagcugaucaugaagaaccaccuccgcgacaucauggggauccccuacugcaacuacagcaaguacugguaccugaaccacaccaccaccggcaagacgucccugcccaagugcuggcuggugagcaacggcuccuaccucaacgagacccacuucagcgacgacaucgagcagcaggccgacaacaugaucaccgagaugcugcagaaggaguacauggagcggcaggggaagacgccccugggccucgucgaccuguucguguucuccaccagcuucuaccugaucuccaucuuccugcaccucgugaagaucccguga

SEQ ID NO: 41662 - RNA, 1362 nt, Artificial Sequence
  derived and/or modified CDS sequence (opt1) from LASV(G502-SLE-2009;Clade IV)__AIT17126__GPCmut13
augggccagaucgugaccuucuuccaggaggucccccacgugaucgaggaggugaugaacaucguccugaucgcccucagcauccuggccgugcugaaggggcucuacaacuucgcgaccugcggccugguggggcugcucacguuccugcugcucugcggccgcuccugcaccaccgggcuguacaagggcgucuacgagcugcagacccucgagcugaacauggagacgcugaacaugaccaugccgcucagcugcaccaagaacaacucccaccacuacaucauggugggcaacgagaccgggcuggagcugacgcucaccaacaccagcaucaucaaccacaaguucugcaaccuguccgacgcccacaagaagaaccuguacgaccacgcccucaugagcaucaucuccaccuuccaccugagcauccccaacuucaaccaguacgaggccauguccugcgacuucaacggcgggaagaucagcgugcaguacaaccugucccacagcuacgccggcgacgcggccgaccacugcgggacggucgccaacggcgugcuccagaccuucaugcggauggccuggggcggguccuacaucgcgcuggacagcggccgcgggcggugggacugcaucaugaccuccuaccaguaccugaucauccagaacaccacgugggaggaccacugccaguucagccgccccucccccaucggcuaccucggccugcugagccagcggacccgcgacaucuacaucucccggcgccuccuggggaccuucaccuggacgcugagcgacagcgagggcaaggacacccccgggggcuacugccucacccgguggaugcugaucgaggccgagcugaagugcuucgggaacaccgccguggccaagugcaacgagaagcacgacgaggaguucugcgacaugcuccgccuguucgacuucaacaagcaggccauccagcggcugaaggcggaggcccagauguccauccagcucaucaacaaggccgucaacgcccugaucaacgaccagcuggugaugaagaaccaccuccgcgacaucaugggcauccccuacugcaacuacagccgguacugguaccugaaccacacgaccaccggccgcaccucccugcccaagugcuggcucgugagcaacggguccuaccugaacgagacgcacuucagcgacgacaucgagcagcaggccgacaacaugaucaccgagaugcugcagaaggaguacauggagcggcagggcaagaccccgcucgggcuggucgaccuguucguguucuccaccagcuucuaccugaucuccaucuuccuccaccuggugaagaucccguga

SEQ ID NO: 41663 - RNA, 1362 nt, Artificial Sequence
  derived and/or modified CDS sequence (opt1) from LASV(G733-SLE-2010;Clade IV)__AIT17154__GPCmut13
augggccagaucgugaccuucuuccaggaggucccccacgugaucgaggaggugaugaacaucguccugaucgcccucagcauccuggccgugcugaaggggcucuacaacuucgcgaccugcggcaucguggggcuggucuccuuccugcuccugugcggccgcagcugcacgaccucccuguacaaggggguguacgagcuccagacccuggagcugaacauggagacccucaacaugacgaugccgcugagcugcaccaagaacaacucccaccacuacaucauggugggcaacgagaccggccuggagcucacccugacgaacaccagcaucaucaaccacaaguucugcaaccuguccgacgcccacaagaagaaccucuacgaccacgcccugaugagcaucaucuccaccuuccaccugagcauccccaacuucaaccaguacgaggccauguccugcgacuucaacgggggcaagaucagcguccaguacaaccucucccacagcuacgccggggacgcggccaaccacugcggcaccaucgccaacggggugcugcagacguucaugcggauggccuggggcggcuccuacaucgcgcuggacagcgggcgcgaccggugggacugcaucaugaccuccuaccaguaccucaucauccagaacaccaccugggaggaccacugccaguucagccgccccucccccaucggcuaccuggggcugcucagccagcggacgcgcgacaucuacaucagccggcgccugcugggcaccuucaccuggacccucuccgacagcgagggcaaggacacgcccgggggcuacugccugacccgguggaugcugaucgaggccgagcucaagugcuucgggaacaccgccguggccaagugcaacgagaagcacgacgaggaguucugcgacaugcugcgccuguucgacuucaacaagcaggccauccagcggcucaaggcggaggcccagauguccauccagcugaucaacaaggccgucaacgcccugaucaacgaccagcucaucaugaagaaccaccuccgcgacaucaugggcauccccuacugcaacuacagcaaguacugguaccugaaccacaccacgaccgggaagaccucccugcccaagugcuggcuggugagcaacggcuccuaccugaacgagacccacuucagcgacgacaucgagcagcaggccgacaacaugaucacggagaugcuccagaaggaguacauggagcggcagggcaagaccccgcuggggcugguggaccucuucgucuucuccaccagcuucuaccugaucuccaucuuccugcaccuggugaagaucccguga

SEQ ID NO: 41664 - RNA, 1362 nt, Artificial Sequence
  derived and/or modified CDS sequence (opt1) from MOPV/LASV reassortant(IGS-1;Clade IV)__AFY05576__GPCmut13
augggccagaucgugaccuucuuccaggaggucccccacgugaucgaggaggugaugaacaucguccugaucgcccucagcgugcuggccgugcugaaggggcucuacaacuucgcgaccugcggccuggucgggcuggugacguuccuccugcugugcggccgcuccugcaccaccagccucuacaaggggguguacgagcugcagacccuggagcucaacauggagacgcugaacaugaccaugccgcuguccugcaccaagaacaacagccaccacuacaucauggucggcaacgagaccggccucgagcugacgcugaccaacaccuccaucaucaaccacaaguucugcaaccucagcgacgcccacaagaagaaccuguacgaccacgcccugauguccaucaucagcaccuuccaccucuccauccccaacuucaaccaguacgaggccaugagcugcgacuucaacgggggcaagaucuccgugcaguacaaccugagccacuccuacgccggggacgcggccaaccacugcggcacgguggccaacgggguccugcagaccuucaugcggauggccuggggcggcagcuacaucgcgcucgacuccgggcgcggcaacugggacugcaucaugaccagcuaccaguaccugaucauccagaacaccacgugggaggaccacugccaguucucccggcccagccccaucggguaccugggccuccugucccagcgcacccgggacaucuacaucagccgccggcugcucggcaccuucaccuggacgcugagcgacuccgagggggaggacaccccgggcggguacugccugacccgcuggaugcucaucgaggccgagcugaagugcuucggcaacaccgccguggccaagugcaacgagaagcacgacgaggaguucugcgacaugcugcggcuguucgacuucaacaagcaggccauccagcgccugaaggcggaggcccagaugagcauccagcugaucaacaaggccgugaacgcccucaucaacgaccagcugaucaugaagaaccaccuccgggacaucauggggauccccuacugcaacuacuccaaguacugguaccucaaccacacgaccaccggccgcaccagccugcccaagugcuggcuggucuccaacggcagcuaccucaacgagacgcacuucuccgacgacaucgagcagcaggccgacaacaugaucaccgagaugcugcagaaggaguacauggagcggcaggggaagacgccccugggccucguggaccuguucguguucagcaccuccuucuaccugaucagcaucuuccugcaccucgucaagaucccguga

SEQ ID NO: 41665 - RNA, 1362 nt, Artificial Sequence
  derived and/or modified CDS sequence (opt1) from LASV(LM765-SLE-2012;Clade IV)__AIT17814__GPCmut13
augggccagaucgugaccuucuuccaggaggucccccacgugaucgaggaggugaugaacaucguccugaucgcccucagcauccuggccgugcugaaggggcucuacaacuucgcgaccugcggccugguggggcuggucacguuccuccugcugugcggccgcuccugcaccaccagccucuacaaggggguguacgagcugcagacccuggagcucaacauggagacgcugaacaugaccaugccgcuguccugcaccaagaacaacagccaccacuacaucauggugggcaacgagaccggccucgagcugacgcugaccaacaccuccaucaucgaccacaaguucugcaaccucagcgacgcccaccggaagaaccuguacgaccacgcccugauguccaucaucagcaccuuccaccucuccauccccaacuucaaccaguacgaggccaugagcugcgacuucaacgggggcaagaucuccguccaguacaaccugagccacuccuacgccaaggacgcggccgaccacugcgggacgguggccaacggcgugcugcagaccuucaugcgcauggccuggggcgggagcuacaucgcgcucgacuccggccgggggcgcugggacugcaucaugaccagcuaccaguaccugaucauccagaacaccacgugggaggaccacugccaguucucccggcccagccccaucggcuaccuggggcuccugucccagcgcacccgggacaucuacaucagccgccggcugcucggcaccuucaccuggacgcugagcgacuccgagggcaaggacacccccgggggcuacugccugacccgcuggaugcucaucgaggccgagcugaagugcuucgggaacaccgccgucgccaagugcaacgagaagcacgacgaggaguucugcgacaugcugcggcuguucgacuucaacaagcaggccauccagcgccugaaggcggaggcccagaugagcauccagcugaucaacaaggccgugaacgcccucaucaacgaccagcugaucaugaagaaccaccuccgggacaucaugggcauccccuacugcaacuacuccaaguacugguaccucaaccacacgaccaccgggaagaccagccugcccaagugcuggcugguguccaacggcagcuaccucaacgagacgcacuucuccgacgacaucgagcagcaggccgacaacaugaucaccgagaugcugcagaaggaguacauggagcgccagggcaagaccccgcuggggcucgucgaccuguucguguucagcaccuccuucuaccugaucagcaucuuccugcaccucgugaagaucccguga

SEQ ID NO: 41666 - RNA, 1362 nt, Artificial Sequence
  derived and/or modified CDS sequence (opt1) from LASV(LM776-SLE-2012;Clade IV)__AIT17824__GPCmut13
augggccagaucgugaccuucuuccaggaggucccccacgugaucgaggaggugaugaacaucguccugaucgcccucagcauccuggccgugcugaaggggcucuacaacuucgcgaccugcggccugguggggcuggucacguuccuccugcugugcggccgcuccugcaccaccagcguguacaaggggguguacgagcuccagacccuggagcugaacauggagacgcucaacaugaccaugccgcuguccugcaccaagaacaacagccaccacuacaucauggucggcaacgagaccggccuggagcucacgcugaccaacaccuccaucaucaaccacaaguucugcaaccugagcgacgcccacaagaagaaccucuacgaccacgcccugauguccaucaucagcaccuuccaccuguccauccccaacuucaaccaguacgaggccaugagcugcgacuucaacgggggcaagaucuccgugcaguacaaccucagccacuccuacgccggggacgcggccaaccacugcggcacgguggccaacgggguccugcagaccuucaugcggauggccuggggcggcagcuacaucgcgcuggacuccgggcacggcaagugggacugcaucaugaccagcuaccaguaccucaucauccagaacaccacgugggaggaccacugccaguucucccgccccagccccaucggguaccugggccugcucucccagcggacccgcgacaucuacaucagccggcgccugcugggcaccuucaccuggacgcucagcgacuccgaggggaaggacaccccgggcggguacugccugacccgguggaugcugaucgaggccgagcucaagugcuucggcaacaccgccguggccaagugcaacgagaagcacgacgaggaguucugcgacaugcugcgccuguucgacuucaacaagcaggccauccagcggcucaaggcggaggcccagaugagcauccagcugaucaacaaggccgugaacgcccugaucaacgaccagcucaucaugaagaaccaccuccgcgacaucauggggauccccuacugcaacuacuccaaguacugguaccugaaccacacgaccaccggcaagaccagccugcccaagugcuggcuggucuccaacggcagcuaccugaacgagacgcacuucuccgacgacaucgagcagcaggccgacaacaugaucaccgagaugcuccagaaggaguacauggagcggcaggggaagacgccccugggccugguggaccucuucguguucagcaccuccuucuaccugaucagcaucuuccugcaccuggucaagaucccguga

SEQ ID NO: 41667 - RNA, 1362 nt, Artificial Sequence
  derived and/or modified CDS sequence (opt1) from LASV(Mad39;Clade IV)__ANH09722__GPCmut13
augggccagaucgugaccuucuuccaggaggucccccacgugaucgaggaggugaugaacaucguccugaucgcccucagcauccuggccgugcugaaggggcucuacaacguggcgaccugcggccugaucgggcuggucacguuccuccugcugugcggccgcuccugcaccaccacccucuacaaggggguguacgagcugcaggcccuggagcucaacauggagacgcugaacaugaccaugccgcugagcugcaccaagaacaacucccaccacuacauccgggugggcaacgagaccggccucgagcugacgcugaccaacaccagccucaucaaccacaaguucugcaaccuguccgacgcccacaagaagaaccuguacgaccacgcccucaugagcaucaucuccaccuuccaccugagcauccccaacuucaaccaguacgaggccauguccugcgacuucaacgacgggaagaucagcguccaguacaaccugucccacacguacgcgggcgacaccgccaaccacugcgggaccguggccaacggcgugcuccagaccuucaugcgcauggccuggggcgggagcuacaucgcgcuggacuccggccgcgggggcugggacugcaucaugacgagcuaccaguaccugaucauccagaacaccaccugggaggaccacugccaguucucccggcccagccccaucggguaccucggccugcugucccagcggacccgcgacaucuacaucagccggcgccuccugggcacguucaccuggacccuguccgacagcgaggggaaggacaccccgggcggguacugccucacgcgguggaugcugaucgaggccgagcugaagugcuucggcaacaccgccgucgccaagugcaacgagaagcacgacgaggaguucugcgacaugcuccgccuguucgacuucaacaagcaggccauccagcggcugaaggcggaggcccagaugagcauccagcucaucaacaaggccgugaacgcccugaucaacgaccagcugaucaugaagaaccaccuccgcgacaucauggggauccccuacugcaacuacuccaaguacugguaccugaaccacaccgugaccggcaagacgagccugcccaagugcuggcucgucuccaacggcagcuaccugaacgagacccacuucuccgacgacaucgagcagcaggccgacaacaugaucaccgagaugcugcagaaggaguacauggagcggcaggggaagacgccccucggccugguggaccuguucguguucagcaccuccuucuaccugaucagcaucuuccuccaccuggucaagaucccguga

SEQ ID NO: 41668 - RNA, 1362 nt, Artificial Sequence
  derived and/or modified CDS sequence (opt1) from LASV(Z0947-SLE-2011;Clade IV)__AIT17840__GPCmut13
augggccagaucgugaccuucuuccaggaggucccccacgugaucgaggaggugaugaacaucguccugaucgcccucagcauccuggccgugcugaaggggcucuacaacuucgcgaccugcggccugguggggcuggucacguuccuccugcugugcggccgcuccugcaccaucagccucuacaaggggguguacgagcugcagacccuggagcucaacauggagacccugaacaugacgaugccgcuguccugcaccaagaacaacagccaccacuacaucauggugggcaacgagaccggccucgagcugacccugacgaacaccuccaucaucaaccacaaguucugcaaccucagcgacgcccacaagaagaaccuguacgaccacgcccugauguccaucaucagcaccuuccaccucuccauccccaacuucaaccaguacgaggccaugagcugcgacuucaacgggggcaagaucuccguccaguacaaccugagccacuccuacgccggggacgcggccaaccacugcggcaccguggccaacggggugcugcagacguucaugcggauggccuggggcggcagcuacaucgcgcucgacuccgggcgcgaccggugggacugcaucaugaccagcuaccaguaccugaucauccagaacaccaccugggaggaccacugccaguucucccgccccagccccaucggcuaccuggggcuccugucccagcggacgcgcgacaucuacaucagccggcgccugcucggcaccuucaccuggacccugagcgacuccgagggcaaggacacgcccgggggcuacugccugacccgguggaugcucaucgaggccgagcugaagugcuucgggaacaccgccgucgccaagugcaacgagaagcacgacgaggaguucugcgacaugcugcgccucuucgacuucaacaagcaggccauccagcggcugaaggcggaggcccagaugagcauccagcugaucaacaaggccgugaacgcccucaucaacgaccagcugaucaugaagaaccaccuccgcgacaucaugggcauccccuacugcaacuacuccaaguacugguaccugaaccacaccacgaccgggaagaccagccugcccaagugcuggcugguguccaacggcagcuaccucaacgagacccacuucuccgacgacaucgagcagcaggccgacaacaugaucacggagaugcugcagaaggaguacauggagcggcagggcaagaccccgcuggggcucgucgaccuguucguguucagcaccuccuucuaccugaucagcaucuuccugcaccucgugaagaucccguga

SEQ ID NO: 41669 - RNA, 1362 nt, Artificial Sequence
  derived and/or modified CDS sequence (opt1) from LASV(Josiah;Clade IV)__NP_694870__GPCmut13
augggccagaucgugaccuucuuccaggaggucccccacgugaucgaggaggugaugaacaucguccugaucgcccucagcgugcuggccgugcugaaggggcucuacaacuucgcgaccugcggccuggucgggcuggugacguuccuccugcugugcggccgcuccugcaccaccagccucuacaaggggguguacgagcugcagacccuggagcucaacauggagacgcugaacaugaccaugccgcuguccugcaccaagaacaacagccaccacuacaucauggucggcaacgagaccggccucgagcugacgcugaccaacaccuccaucaucaaccacaaguucugcaaccucagcgacgcccacaagaagaaccuguacgaccacgcccugauguccaucaucagcaccuuccaccucuccauccccaacuucaaccaguacgaggccaugagcugcgacuucaacgggggcaagaucuccgugcaguacaaccugagccacuccuacgccggggacgcggccaaccacugcggcacgguggccaacgggguccugcagaccuucaugcggauggccuggggcggcagcuacaucgcgcucgacuccgggcgcggcaacugggacugcaucaugaccagcuaccaguaccugaucauccagaacaccacgugggaggaccacugccaguucucccggcccagccccaucggguaccugggccuccugucccagcgcacccgggacaucuacaucagccgccggcugcucggcaccuucaccuggacgcugagcgacuccgaggggaaggacaccccgggcggguacugccugacccgcuggaugcucaucgaggccgagcugaagugcuucggcaacaccgccguggccaagugcaacgagaagcacgacgaggaguucugcgacaugcugcggcuguucgacuucaacaagcaggccauccagcgccugaaggcggaggcccagaugagcauccagcugaucaacaaggccgugaacgcccucaucaacgaccagcugaucaugaagaaccaccuccgggacaucauggggauccccuacugcaacuacuccaaguacugguaccucaaccacacgaccaccggccgcaccagccugcccaagugcuggcuggucuccaacggcagcuaccucaacgagacgcacuucuccgacgacaucgagcagcaggccgacaacaugaucaccgagaugcugcagaaggaguacauggagcggcaggggaagacgccccugggccugguggaccucuucguguucagcaccuccuucuaccugaucagcaucuuccugcaccucgucaagaucccguga

SEQ ID NO: 41670 - RNA, 1359 nt, Artificial Sequence
  derived and/or modified CDS sequence (opt1) from LASV(LP;Clade I)__AAF86701__GPCmut13
augggccagaucaucaccuucuuccaggaggugccccacgucaucgaggaggugaugaacaucgugcugaucgcccucagccugcuggccauccucaaggggcuguacaacaucgcgaccugcggcaucaucgggcuggucgccuuccucuuccugugcggcaaguccugcagccugacgcucaagggcggguacgagcugcagacccuggagcucaacauggagacccugaacaugaccaugccgcuguccugcacgaagaacagcucccaccacuacauccgcgugggcaacgagaccgggcucgagcugacccugaccaacacgagcaucaucaaccacaaguucugcaaccucuccgacgcccacaagaagaaccuguacgaccacgcccugaugagcaucaucuccaccuuccaccucagcauccccaacuucaaccaguacgaggccauguccugcgacuucaacggcgggaagaucagcgugcaguacaaccugucccacagcuacgcgggcgacgccgccgagcacugcgggaccgucgccaacggcgugcugcagaccuucaugcggauggcguggggcgggcgcuacaucgcccucgacuccggcaaggggaacugggacugcaucaugacgagcuaccaguaccugaucauccagaacaccaccugggaggaccacugccaguucucccggcccagccccaucggcuaccugggccuccugucccagcgcacccgggacaucuacaucagccgccggcugcucgggacguucaccuggacccugagcgacuccgagggcaacgagacccccgggggcuacugccugacgcgcuggaugcucaucgaggccgagcugaagugcuucgggaacaccgccguggccaagugcaacgagaagcacgacgaggaguucugcgacaugcugcggcuguucgacuucaacaagcaggcgauccgccggcugaaggccgaggcccagaugagcauccagcugaucaacaaggccgucaacgcccucaucaacgaccagcugaucaugaagaaccaccuccgcgacaucaugggcauccccuacugcaacuacuccaaguacugguaccucaaccacaccagcuccggccggaccagccugcccaagugcuggcugaucuccaacgggagcuaccucaacgagacgcaguucuccgacgacaucgagcagcaggcggacaacaugaucaccgagaugcugcagaaggaguacaucgagcgccagggcaagaccccgcuggggcugguggacaucuucaucuucagcaccuccuucuaccucaucagcaucuuccugcaccugaucaagaucccguga

SEQ ID NO: 41671 - RNA, 1359 nt, Artificial Sequence
  derived and/or modified CDS sequence (opt1) from LASV(803213;Clade II)__AAF86703__GPCmut13
augggccagaucaucaccuucuuccaggaggugccccacgucaucgaggaggugaugaacaucgugcugaucgcccucagccugcuggccauccucaaggggaucuacaacgucgcgaccugcggccuguucgggcugaucuccuuccuccugcugugcggccgcagcugcuccgugacguacaaggggguguacgagcuccagacccuggagcugaacauggccaaccucaacaugaccaugccgcugagcugcaccaagaacaacucccaccacuacaucauggucggcaacgagacgggccuggagcucacccugaccaacaccagcaucaucaaccacaaguucugcaaccuguccgacgcccacaagaagaaccucuacgaccacgcccugaugagcaucaucuccacguuccaccugagcauccccaacuucaaccaguacgaggccauguccugcgacuucaacgggggcaagaucagcgugcaguacaaccucucccacagcuucgcgguggacgccgccaaccacugcgggaccaucgccaacggcguccugcagaccuucaugcggauggcguggggcggguccuacaucgcccuggacagcggcaaggggaacugggacugcaucaugaccuccuaccaguaccucaucauccagaacacgaccugggaggaccacugccaguucagccgccccucccccaucggcuaccuggggcugcucagccagcggacccgcgacaucuacaucagccggcgccugcugggcaccuucacguggacccucuccgacagcgagggcaacgaggcccccgggggcuacugccugacccgguggaugcugaucgaggccgagcucaagugcuucgggaacaccgccguggcgaagugcaacgagaagcacgacgaggaguucugcgacaugcugcgccuguucgacuucaacaagcaggccaucaagcggcucaagacggaggcccagauguccauccagcugaucaacaaggccgugaacgcccugaucaacgaccagcucaucaugaagaaccaccuccgcgacaucaugggcauccccuacugcaacuacagccgguacugguaccugaaccacaccgucaccgggaagaccucccugccccgcugcuggcuggugagcaacggcuccuaccugaacgagacgcacuucagcgacgacaucgagcagcaggcggacaacaugaucaccgagaugcuccagaaggaguacauggaccggcagggcaagaccccgcuggggcugguggaccuguucgucuucuccaccagcuucuaccucaucuccaucuuccugcaccuggugaagaucccguga

SEQ ID NO: 41672 - RNA, 1359 nt, Artificial Sequence
  derived and/or modified CDS sequence (opt1) from LASV(GA391;Clade III)__CAA36645__GPCmut13
augggccagaucgugaccuucuuccaggaggucccccacgugaucgaggaggugaugaacaucguccugaucgcccucagcauccuggccauccugaaggggcucuacaacguggcgaccugcggccugaucgggcuggugacguuccuccugcuguccggccgcagcugcucccucaucuacaaggggaccuacgagcugcagacccuggagcucaacauggagacccugaacaugacgaugccgcugagcugcaccaagaacaacucccaccacuacauccgggucggcaacgagaccggccucgagcugacccugacgaacaccagcauccucaaccacaaguucugcaaccuguccgacgcccacaagcgcaaccuguacgaccacagccucauguccaucaucagcaccuuccaccuguccauccccaacuucaaccaguacgaggccaugagcugcgacuucaacgggggcaagaucaccgugcaguacaaccugucccacagcuucgccguggacgccgcggggcacugcggcacgcucgccaacgggguccugcagaccuucaugcggauggccuggggcggcuccuacaucgcccuggacagcgggcgcggcaacugggacugcaucaugaccuccuaccaguaccucaucauccagaacaccacgugggacgaccacugccaguucagccggcccucccccaucggguaccugggccugcucagccagcgcacccgggacaucuacaucagccgccggcugcugggcaccuucaccuggacgcucuccgacagcgaggggaacgagaccccgggcggguacugccugacccgcuggaugcugaucgaggcggagcucaagugcuucggcaacaccgccguggccaagugcaacgagaagcacgacgaggaguucugcgacaugcugcggcuguucgacuucaacaagcaggccauccgccggcucaagacggaggcccagauguccauccagcugaucaacaaggcggugaacgcccugaucaacgaccagcucaucaugaagaaccaccuccgcgacaucauggggauccccuacugcaacuacagccgguacugguaccugaaccacaccuccaccggcaagaccagccugccccgcugcuggcugaucuccaacggcagcuaccugaacgagacgaaguucuccgacgacaucgagcagcaggccgacaacaugaucaccgagaugcugcagaaggaguacaucgaccggcaggggaagacgccccucggccuggucgaccuguucguguucagcaccuccuucuaccucaucagcaucuuccugcaccuggugaagaucccguga

SEQ ID NO: 41673 - RNA, 1362 nt, Artificial Sequence
  derived and/or modified CDS sequence (opt1) from LASV(AV;Clade V)__CCA30314__GPCmut13
augggccagaucgugaccuucuuccaggaggucccccacgugaucgaggaggugaugaacaucguccugaucgcccucagcauccuggccgugcugaaggggcucuacaacaucgcgaccugcggccugaucgggcugaucacguuccuccugcugugcggccgcuccugcagcuccaaccucuacaaggggguguacgagcugcagagccuggaccucaacauggagacccugaacaugaccaugccgcuguccugcaccaagaacaacagccaccacuacauccgggucggcaacgacacgggccucgagcugacccugaccaacaccuccauccucaaccacaaguucugcaaccugagcgacgcccacaagaaggaccuguacgaccacgcccucauguccaucaucagcacguuccaccuguccauccccaacuucaaccaguacgaggccaugagcugcgacuucaacgggggcaagaucuccgugcaguacaaccugagccacuccuacgccaucgacgcggccaaccacugcgggaccguggccaacggcauccuccagaccuucaugcgcauggccuggggcgggagcuacaucgcgcuggacuccggccgggggaacugggacugcaucaugaccagcuaccaguaccugaucauccagaacacgaccugggagaaccacugccaguucucccgccccagccccaucggcuaccucgggcugcugagccagcggacccgcgacaucuacaucucccggcgccuccugggcaccuucacguggacccugagcgacuccgagggcaacgccacccccgggggcuacugccucacccgguggaugcugaucgaggccgagcugaagugcuucgggaacacggccgucgccaagugcaacgagaagcacgacgaggaguucugcgacaugcuccgccuguucgacuucaacaagcaggcgaucagccggcugaaguccgaggcccagaugagcauccagcucaucaacaaggccgugaacgcccugaucaacgaccagcugaucaugaagaaccaccuccgcgacaucaugggcauccccuacugcaacuacuccaaguacugguaccugaaccacaccaucaccgggaagaccagccugcccaagugcuggcucguguccaacggcagcuaccugaacgagacgcacuucuccgacgacaucgagcagcaggccgacaacaugaucaccgagaugcugcagaaggaguacauggagcggcagggcaagaccccgcuggggcucgucgaccuguucguguucagcaccuccuucuaccugaucagcaucuuccuccgccuggugaagaucccguga

SEQ ID NO: 41674 - RNA, 1359 nt, Artificial Sequence
  derived and/or modified CDS sequence (opt1) from LASV(Togo/2016/7082;Clade VI)__AMR44577__GPCmut13
augggccagaucaucaccuucuuccaggaggugccccacgucaucgaggaggugaugaacaucgugcugaucgcccucagccugcuggccauccucaagggggucuacaacguggcgaccugcggcaucaucgggcuggugacguuccuguuccucugcggccgcuccugcagccugaucuacaagggguccuacgagcugcagacccucgagcugaacauggagacccugaacaugaccaugccgcucagcugcacgaagaacuccagccaccacuacauccgggucggcaacgagaccggccuggagcugacccucaccaacacguccaucaucaaccacaaguucugcaaccugagcgacgcccacaagcgcaaccuguacgaccacgcccucauguccauccugagcaccuuccaccuguccauccccaacuucaaccaguacgaggccaugagcugcgacuucaacgggggcaagaucuccgugcaguacaaccucagccacgccuacgcgguggacgccgccgagcacugcgggaccgucgccaacggcgugcugcagaccuucaugcggauggcguggggcggguccuacaucgcccuggacagcggccgcgggaacugggacugcaucaugacguccuaccaguaccucaucauccagaacaccaccugggaggaccacugccaguucagccggcccucccccaucggcuaccuggggcugcucagccagcgcacccgggacaucuacaucagccgccggcugcugggcacguucaccuggacccucuccgacagcgagggcaacgagacccccgggggcuacugccugacgcgcuggaugcugaucgaggccgagcucaagugcuucgggaacaccgccguggccaagugcaacgagaagcacgacgaggaguucugcgacaugcugcggcuguucgacuucaacaagcaggcgauccagcgccucaaguccgaggcccagaugagcauccagcugaucaacaaggccgucaacgcccugaucaacgaccagcucaucaugaagaaccaccuccgggacaugaugggcauccccuacugcaacuacuccaaguacugguaccugaaccacaccagcuccgggcgcaccagccugcccaagugcuggcugguguccaacggcagcuaccugaacgagacgcacuucuccgacgacaucgagcagcaggccgacaacaugaucaccgagaugcuccagaaggaguacaucgaccggcagggcaagaccccgcuggggcugguggaccuguucgucuucagcaccuccuucuaccucaucagcaucuuccugcaccugaucaagaucccguga

SEQ ID NO: 41675 - RNA, 1359 nt, Artificial Sequence
  derived and/or modified CDS sequence (opt1) from LASV(KAK-428;Clade n.d. (VII))__ANH09740__GPCmut13
augggccagaucgugaccuucuuccaggaggucccccacgugaucgaggaggugaugaacaucguccugaucgcccucagccugcuggccauccucaaggggcuguacaacuucgcgaccugcggcgugaucgggcugaucacguuccuccugcugugcggccgcuccugcagcgccaccuacaaggggcaguacgagcuccagacccuggagcugaacauggagucccucaacaugaccaugccgcugagcugcacgaagaacaacucccaccacuacauccgggccggcaacaacaccggccuggagcucacccugaccaacacgagcaucaucucccacaaguucugcaaccugagcgacgcccacaagaagaaccucuacgaccacacccugauguccaucaucaccaccuuccaccugagcauccccaacuucaaccaguacgaggccauguccugcgacuucaacgggggcaagaucagcauccaguacaaccucucccacagcuacgcgggggacgccgcccagcacugcggcacgguggccaacgggguccugcagaccuucaugcgcauggcguggggcggcuccuaccuggcccucgacagcgggcggcgcggcugggacugcaucaucuccagcuaccaguaccugaucauccagaacaccaccugggacgaccacugccaguucucccggcccagccccaucggguaccugggcuucgugagccagaagacgcgcgacaucuacaucucccggcgccuccugggcaccuucaccuggacccugagcgacuccgaggggcacgacaugccgggcggguacugccucacgcgguggaugcugaucgaggccgaccugaagugcuucggcaacaccgccguggccaagugcaacgagaagcacgacgaggaguucugcgacauguggcgccucuucgacuucaacaagcaggcgauccagcggcugaaggccgaggcccagaugaacauccagcugaucaacaaggccgucaacgcccucaucaacgaccagcugaugaugaagaaccaccuccgcgacaucauggggauccccuacugcaacuacagcaaguucugguaccugaacaacaccaccacgggccggaccucccugccccgcugcuggcugaucagcaacggcuccuaccucaacgagacccacuucagcgacgacaucgagcagcaggcggacaacaugaucaccgagaugcugcagaaggaguacauggaccggcaggggaagacgccccugggccucguggaccuguucguguucuccaccagcuucuaccugaucaccaucuuccugcaccucgucaagaucccguga

SEQ ID NO: 41676 - RNA, 1359 nt, Artificial Sequence; identical to SEQ ID NO: 41670
  derived and/or modified CDS sequence (opt1) from LASV(Pinneo-NIG-1969;Clade I)__AIT17836__GPCmut13

SEQ ID NO: 41677 - RNA, 1359 nt, Artificial Sequence
  derived and/or modified CDS sequence (opt1) from LASV(ISTH0009-NIG-2011;Clade II)__AIT17404__GPCmut13
augggccagaucaucaccuucuuccaggaggugccccacgucaucgaggaggugaugaacaucgugcugaucgcccucagccugcuggccauccucaaggggaucuacaacgucgcgaccugcggccuguucgggcugguguccuuccuccugcugugcggccgcagcugcuccacgaccuacaaggggguguacgagcuccagacccuggagcuggacauggccagccucaacaugaccaugccgcuguccugcacgaagaacaacagccaccacuacaucauggucggcaacgagaccggccuggagcucacccugaccaacacguccaucaucaaccacaaguucugcaaccugagcgacgcccacaagaagaaccucuacgaccacgcccugauguccaucaucagcaccuuccaccuguccauccccaacuucaaccaguacgaggccaugagcugcgacuucaacgggggcaagaucuccgugcaguacaaccucagccacgcguacgccguggacgccgccaaccacugcgggaccaucgcgaacggcguccugcagaccuucaugcggauggccuggggcggguccuacaucgcccuggacagcggcaagggguccugggacugcaucaugacgagcuaccaguaccucaucauccagaacaccaccugggaggaccacugccaguucucccgccccagccccaucggcuaccuggggcugcucagccagcggacccgcgacaucuacaucucccggcgccugcugggcacguucaccuggacccucagcgacuccgagggcaacgagacccccgggggcuacugccugacgcgguggaugcugaucgaggccgagcucaagugcuucgggaacaccgccguggcgaagugcaacgagaagcacgacgaggaguucugcgacaugcugcgccuguucgacuucaacaagcaggccauccggcgccucaagaccgaggcccagaugagcauccagcugaucaacaaggccgugaacgcccugaucaacgaccagcucaucaugaagaaccaccuccgggacaucaugggcaucccguacugcaacuacuccaaguacugguaccugaaccacaccgucacggggaagaccagccugccccgcugcuggcugguguccaacggcagcuaccugaacgagacccacuucuccgacgacaucgagcagcaggcggacaacaugaucaccgagcuccugcagaaggaguacauggaccggcagggcaagacgccccuggggcugguggaccucuucgucuucagcaccuccuucuaccugaucagcaucuuccugcaccucaucaagaucccguga

SEQ ID NO: 41678 - RNA, 1359 nt, Artificial Sequence
  derived and/or modified CDS sequence (opt1) from LASV(ISTH2010-NIG-2012;Clade II)__AIT17482__GPCmut13
augggccagaucaucaccuucuuccaggaggugccccacgucaucgaggaggugaugaacaucgugcugaucgcccucagccugcuggccauccucaaggggaucuacaacgucgcgaccugcggccuguucgggcugguguccuuccuccugcugugcggccgcagcugcuccacgaccuacaaggggguguacgagcuccagacccuggagcuggacauggccagccucaacaugaccaugccgcuguccugcacgaagaacaacagccaccacuacaucauggucggcaacgagaccggccuggagcucacccugaccaacacguccaucaucaaccacaaguucugcaaccugagcgacgcccacaagaagaaccucuacgaccacgcccugauguccaucaucagcaccuuccaccuguccauccccaacuucaaccaguacgaggccaugagcugcgacuucaacgggggcaagaucuccgugcaguacaaccucagccacgcguacgccguggacgccgccaaccacugcgggaccaucgcgaacggcguccugcagaccuucaugcggauggccuggggcggguccuacaucgcccuggacagcggcaagggguccugggacugcaucaugacgagcuaccaguaccucaucauccagaacaucaccugggaggaccacugccaguucucccgccccagccccaucggcuaccuggggcugcucagccagcggacccgcgacaucuacaucucccggcgccugcugggcaccuucacguggacccucagcgacuccgagggcaacgagacccccgggggcuacugccugacccgguggaugcugaucgaggccgagcucaagugcuucgggaacacggccguggcgaagugcaacgagaagcacgacgaggaguucugcgacaugcugcgccuguucgacuucaacaagcaggccauccggcgccucaagaccgaggcccagaugagcauccagcugaucaacaaggccgugaacgcccugaucaacgaccagcucaucaugaagaaccaccuccgggacaucaugggcauccccuacugcaacuacuccaaguacugguaccugaaccacaccgucaccgggaagacgagccugccccgcugcuggcugguguccaacggcagcuaccugaacgagacccacuucuccgacgacaucgagcagcaggcggacaacaugaucaccgagcuccugcagaaggaguacaucgaccggcagggcaagaccccgcuggggcugguggaccucuucgucuucagcacguccuucuaccugaucagcaucuuccugcaccucgugaagaucccguga

SEQ ID NO: 41679 - RNA, 1359 nt, Artificial Sequence
  derived and/or modified CDS sequence (opt1) from LASV(Lassa virus/H.sapiens-wt/NGA/2015/ISTH_0543;Clade II)__AVO03639__GPCmut13
augggccagaucaucaccuucuuccaggaggugccccacgucaucgaggaggugaugaacaucgugcugaucgcccucagccugcuggccauccucaaggggaucuacaacgucgcgaccugcggccuguucgggcugguguccuuccuccugcugugcggccgcagcugcuccacgaccuacaaggggguguacgagcuccagacccuggagcuggacauggccaaccucaacaugaccaugccgcugagcugcacgaagaacaacucccaccacuacaucauggucggcaacgagaccggccuggagcucacccugaccaacacgagcaucaucaaccacaaguucugcaaccuguccgacgcccacaagaagaaccucuacgaccacgcccugaugagcaucaucuccaccuuccaccugagcauccccaacuucaaccaguacgaggccauguccugcgacuucaacgggggcaagaucagcgugcaguacaaccucucccacaccuacgcgguggacgccgccaaccacugcgggaccaucgccaacggcguccugcagacguucaugcggauggcguggggcgggagcuacaucgcccuggacuccggcaaggggagcugggacugcaucaugaccuccuaccaguaccucgugauccagaacaccaccugggaggaccacugccaguucagccgccccucccccaucggcuaccuggggcugcucagccagcggacgcgcgacaucuacaucagccggcgccugcugggcaccuucaccuggacccucuccgacagcgagggcaacgagacgcccgggggcuacugccugacccgguggaugcugaucgaggccgagcucaagugcuucgggaacaccgccguggccaagugcaacgagaagcacgacgaggaguucugcgacaugcugcgccuguucgacuucaacaagcaggcgauccggcgccucaagaccgaggcccagauguccauccagcugaucaacaaggccgucaacgcccugaucaacgaccagcucaucaugaagaaccaccuccgggacaucaugggcauccccuacugcaacuacagcaaguacugguaccugaaccacacggugaccgggaagaccucccugccccgcugcuggcuggugagcaacggcuccuaccugaacgagacccacuucagcgacgacaucgagcagcaggccgacaacaugaucacggagcuccugcagaaggaguacaucgaccggcagggcaagaccccgcuggggcuggucgaccucuucguguucuccaccagcuucuaccugaucuccaucuuccugcaccucgugaagaucccguga

SEQ ID NO: 41680 - RNA, 1359 nt, Artificial Sequence
  derived and/or modified CDS sequence (opt1) from LASV(Lassa virus/H.sapiens-wt/NGA/2016/ISTH_0009;Clade II)__AVO03571__GPCmut13
augggccagaucaucaccuucuuccaggaggugccccacgucaucgaggaggugaugaacaucgugcugaucgcccucagccugcuggccauccucaaggggaucuacaacgucgcgaccugcggccugcuggggcucguguccuuccugcugcucugcggccgcagcugcuccacgaccuacaaggggguguacgagcugcagacccuggagcucgacauggccagccugaacaugaccaugccgcuguccugcacgaagaacaacagccaccacuacaucauggucggcaacgagaccggccucgagcugacccugaccaacacguccaucaucaaccacaaguucugcaaccucagcgacgcccacaagaagaaccuguacgaccacgcccugauguccaucaucagcaccuuccaccucuccauccccaacuucaaccaguacgaggccaugagcugcgacuucaacgggggccggaucuccgugcaguacaaccugagccacuccuacgcgguggacgccgccaaccacugcgggaccaucgccaacggcguccugcagaccuucaugcgcauggcguggggcgggagcuacaucgcccucgacuccggcaaggggagcugggacugcaucaugacguccuaccaguaccugaucauccagaacaccaccugggaggaccacugccaguucagccggcccagccccaucggcuaccuggggcuccugucccagcgcacccgggacaucuacaucagccgccggcugcucggcacguucaccuggacccuguccgacagcgagggcaacgagacccccgggggcuacugccugacgcgcuggaugcucaucgaggccgagcugaagugcuucgggaacaccgccguggccaagugcaacgagaagcacgacgaggaguucugcgacaugcugcggcuguucgacuucaacaagcaggcgauccgccggcugaagaccgaggcccagauguccauccagcugaucaacaaggccgugaacgcccucaucaacgaccagcugaucaugaagaaccaccuccgcgacaucaugggcaucccguacugcaacuacagcaaguacugguaccucaaccacaccgucacggggaagaccucccugccccggugcuggcuggugagcaacggcuccuaccucaacgagacccacuucagcgacgacaucgagcagcaggccgacaacaugaucaccgagcugcugcagaaggaguacaucgaccgccagggcaagacgccccuggggcucguggaccuguucgucuucuccaccagcuucuaccugaucuccaucuuccuccaccuggugaagaucccguga

SEQ ID NO: 41681 - RNA, 1359 nt, Artificial Sequence
  derived and/or modified CDS sequence (opt1) from LASV(Lassa virus/H.sapiens-wt/NGA/2016/ISTH_0017;Clade II)__AVO03567__GPCmut13
augggccagaucaucaccuucuuccaggaggugccccacgucaucgaggaggugaugaacaucgugcugaucgcccucagccugcuggccauccucaaggggaucuacaacgucgcgaccugcggccuguucgggcugguguccuuccuccugcugugcggccgcagcugcuccacgaccuacaaggggguguacgagcuccagacccuggagcuggacauggccagccucaacaugaccaugccgcuguccugcacgaagaacaacagccaccacuacaucauggucggcaacgagaccggccuggagcucacccugaccaacacguccaucaucaaccacaaguucugcaaccugagcgacgcccacaagaagaaccucuacgaccacgcccugauguccaucaucagcaccuuccaccuguccauccccaacuucaaccaguacgaggccaugagcugcgacuucaacgggggcaagaucuccgugcaguacaaccucagccacaccuacgcgaucgacgccgccaaccacugcgggaccaucgccaacggcgugcugcagacguucaugcggauggcguggggcggguccuacaucgcccuggacagcggcaagggguccugggacugcaucaugaccagcuaccaguaccucaucauccagaacaccaccugggaggaccacugccaguucucccgccccagccccaucggcuaccuggggcugcucagccagcggacgcgcgacaucuacaucucccggcgccugcugggcaccuucaccuggacccucagcgacuccgagggcaacgagacgcccgggggcuacugccugacccgguggaugcugaucgaggccgagcucaagugcuucgggaacaccgccgucgccaagugcaacgagaagcacgacgaggaguucugcgacaugcugcgccuguucgacuucaacaagcaggcgauccggcgccucaagaccgaggcccagaugagcauccagcugaucaacaaggccgugaacgcccugaucaacgaccagcucaucaugaagaaccaccuccgggacaucaugggcauccccuacugcaacuacuccaaguacugguaccugaaccacacggugaccgggaagaccagccugccccgcugcuggcuggucuccaacggcagcuaccugaacgagacccacuucuccgacgacaucgagcagcaggccgacaacaugaucacggagcuccugcagaaggaguacauggaccggcagggcaagaccccgcuggggcugguggaccucuucguguucagcaccuccuucuaccugaucagcaucuuccugcaccucguccgcaucccguga

SEQ ID NO: 41682 - RNA, 1359 nt, Artificial Sequence
  derived and/or modified CDS sequence (opt1) from LASV(Lassa virus/H.sapiens-wt/NGA/2018/ISTH_0959;Clade II)__AVV65099__GPCmut13
augggccagaucaucaccuucuuccaggaggugccccacgucaucgaggaggugaugaacaucgugcugaucgcccucagccugcuggccauccucaaggggaucuacaacgucgugaccugcggccuguucgggcugguguccuuccuccugcugugcggccgcagcugcuccacgaccuacaagggggucuacgagcuccagacccuggagcuggacauggcgagccucaacaugaccaugccgcuguccugcacgaagaacaacagccaccacuacaucauggugggcaacgagaccggccuggagcucacccugaccaacacguccaucaucaaccacaaguucugcaaccugagcgacgcccacaagaagaaccucuacgaccacgcccugauguccaucaucagcaccuuccaccuguccauccccaacuucaaccaguacgaggccaugagcugcgacuucaacgggggcaagaucuccgugcaguacaaccucagccacgccuacgcgaucgacgccgccaaccacugcgggaccaucgccaacggcguccugcagaccuucaugcggauggcguggggcggguccuacaucgcccuggacagcggcaagggguccugggacugcaucaugacgagcuaccaguaccucaucauccagaacaccaccugggaggaccacugccaguucucccgccccagccccaucggcuaccuggggcugcucagccagcggacccgcgacaucuacaucucccggcgccugcugggcacguucaccuggacccucagcgacuccgagggcaacgagacccccgggggcuacugccugacgcgguggaugcugaucgaggccgagcucaagugcuucgggaacaccgccguggccaagugcaacgagaagcacgacgaggaguucugcgacaugcugcgccuguucgacuucaacaagcaggcgauccggcgccucaagaccgaggcccagaugagcauccagcugaucaacaaggccgugaacgcccugaucaacgaccagcucaucaugaagaaccaccuccgggacaucaugggcaucccguacugcaacuacuccaaguacugguaccugaaccacaccgucacggggaagaccagccugccccgcugcuggcugguguccaacggcagcuaccugaacgagacccacuucuccgacgacaucgagcagcaggccgacaacaugaucaccgagcuccugcagaaggaguacaucgaccggcagggcaagacgccccuggggcugguggaccucuucgucuucagcaccuccuucuaccugaucagcaucuuccugcaccucgugaagaucccguga

SEQ ID NO: 41683 - RNA, 1359 nt, Artificial Sequence
  derived and/or modified CDS sequence (opt1) from LASV(LASV003-NIG-2008;Clade II)__AIT17580__GPCmut13
augggccagaucaucaccuucuuccaggaggugccccacgucaucgaggaggugaugaacaucgugcugaucgcccucagccugcuggccauccucaaggggaucuacaacgucgcgaccugcggccuguucgggcugguguccuuccuccugcugugcggccgcagcugcuccacgaccuacaaggggguguacgagcuccagacccuggagcuggacauggccagccucaacaugaccaugccgcuguccugcacgaagaacaacagccaccacuacaucauggucggcaacgagaccggccuggagcucacccugaccaacacguccaucaucaaccacaaguucugcaaccugagcgacgcccacaagaagaaccucuacgaccacgcccugauguccaucaucagcaccuuccaccuguccauccccaacuucaaccaguacgaggccaugagcugcgacuucaacgggggcaagaucuccgugcaguacaaccucagccacaccuacgcgguggacgccgccaaccacugcgggaccaucgccaacggcguccugcagacguucaugcggauggcguggggcggguccuacaucgcccuggacagcggcaagggguccugggacugcaucaugaccagcuaccaguaccucaucauccagaacaccaccugggaggaccacugccaguucucccgccccagccccaucggcuaccuggggcugcucagccagcggacgcgcgacaucuacaucucccggcgccugcugggcaccuucaccuggacccucagcgacuccgagagcaacgagacgccgggcggguacugccugacccgguggaugcugaucgaggccgagcucaagugcuucggcaacaccgccguggccaagugcaacgagaagcacgacgaggaguucugcgacaugcugcgccuguucgacuucaacaagcaggcgauccggcgccucaaggccgaggcccagauguccauccagcugaucaacaaggccgugaacgcccugaucaacgaccagcucaucaugaagaaccaccuccgggacaucauggggauccccuacugcaacuacagcaaguacugguaccugaaccacaccgucacgggccgcaccucccugccccggugcuggcuggugagcaacggguccuaccugaacgagacccacuucagcgacgacaucgagcagcaggcggacaacaugaucaccgagcuccugcagaaggaguacauggaccgccagggcaagacgccccugggccugguggaccucuucgucuucuccaccagcuucuaccugaucuccaucuuccugcaccucgugaagaucccguga

SEQ ID NO: 41684 - RNA, 1359 nt, Artificial Sequence
  derived and/or modified CDS sequence (opt1) from LASV(LASV035-NIG-2009;Clade II)__AIT17588__GPCmut13
augggccagaucaucaccuucuuccaggaggugccccacgucaucgaggaggugaugaacaucgugcugaucgcccucagccugcuggccauccucaaggggaucuacaacgucgcgaccugcggccuguucgggcugguguccuuccuccugcugugcggccgcagcugcuccacgaccuacaaggggguguacgagcuccagacccuggagcuggacauggccagccucaacaugaccaugccgcuguccugcacgaagaacaacagccaccacuacaucauggucggcaacgagaccggccuggagcucacccugaccaacacguccaucaucaaccacaaguucugcaaccugagcgacgcccacaagaagaaccucuacgaccacgcccugauguccaucaucagcaccuuccaccuguccauccccaacuucaaccaguacgaggccaugagcugcgacuucaacgggggcaagaucuccgugcaguacaaccucagccacgcguacgccguggacgccgccaaccacugcgggaccaucgcgaacggcguccugcagaccuucaugcggauggccuggggcggguccuacaucgcccuggacagcggcaagggguccugggacugcaucaugacgagcuaccaguaccucaucauccagaacaccaccugggaggaccacugccaguucucccgccccagccccaucggcuaccuggggcugcucagccagcggacccgcgacaucuacaucucccggcgccugcugggcacguucaccuggacccucagcgacuccgagggcaacgagacccccgggggcuacugccugacgcgguggaugcugaucgaggccgagcucaagugcuucgggaacaccgccguggcgaagugcaacgagaagcacgacgaggaguucugcgacaugcugcgccuguucgacuucaacaagcaggccauccggcgccucaaggccgaggcccagaugagcauccagcugaucaacaaggccgugaacgcgcugaucaacgaccagcucaucaugaagaaccaccuccgggacaucaugggcauccccuacugcaacuacuccaaguacugguaccugaaccacaccgucaccgggaagacgagccugccccgcugcuggcugguguccaacggcagcuaccugaacgagacccacuucuccgacgacaucgagcagcaggccgacaacaugaucaccgagcuccugcagaaggaguacaucgaccggcagggcaagaccccgcuggggcugguggaccucuucgucuucagcacguccuucuaccugaucagcaucuuccugcaccucgugaagaucccguga

SEQ ID NO: 41685 - RNA, 1359 nt, Artificial Sequence
  derived and/or modified CDS sequence (opt1) from LASV(LASV1000-NIG-2009;Clade II)__AIT17782__GPCmut13
augggccagaucaucaccuucuuccaggaggugccccacgucaucgaggaggugaugaacaucgugcugaucgcccucagccugcuggccauccucaaggggaucuacaacgucgcgaccugcggccuguucgggcugguguccuuccuccugcugugcggccgcagcugcuccacgaccuacaaggggguguacgagcuccagacccuggagcuggacauggccagccucaacaugaccaugccgcuguccugcacgaagaacaacagccaccacuacaucauggucggcaacgagaccggccuggagcucacccugaccaacacguccaucaucaaccacaaguucugcaaccugagcgacgcccacaagaagaaccucuacgaccacgcccugauguccaucaucagcaccuuccaccuguccauccccaacuucaaccaguacgaggccaugagcugcgacuucaacgggggcaagaucuccgugcaguacaaccucagccacaccuacgcgguggacgccgccaaccacugcgggaccaucgccaacggcguccugcagacguucaugcggauggcguggggcggguccuacaucgcccuggacagcggcaagggguccugggacugcaucaugaccagcuaccaguaccucaucauccagaacaccaccugggaggaccacugccaguucucccgccccagccccaucggcuaccuggggcugcucagccagcggacgcgcgacaucuacaucucccggcgccugcugggcaccuucaccuggacccucagcgacuccgagggcaacgagacgcccgggggcuacugccugacccgguggaugcugaucgaggccgagcucaagugcuucgggaacaccgccguggccaagugcaacgagaagcacgacgaggaguucugcgacaugcugcgccuguucgacuucaacaagcaggcgaucaagcggcucaagaccgaggcccagaugagcauccagcugaucaacaaggccgugaacgcccugaucaacgaccagcucaucaugaagaaccaccuccgcgacaucaugggcauccccuacugcaacuacuccaaguacugguaccugaaccacacggucaccgggaagaccagccugccccggugcuggcugguguccaacggcagcuaccugaacgagacccacuucuccgacgacaucgagcagcaggccgacaacaugaucacggagcuccugcagaaggaguacaucgaccgccagggcaagaccccgcuggggcugguggaccucuucgucuucagcaccuccuucuaccugaucagcaucuuccugcaccucgugaagaucccguga

SEQ ID NO: 41686 - RNA, 1359 nt, Artificial Sequence
  derived and/or modified CDS sequence (opt1) from LASV(LASV221-NIG-2010;Clade II)__AIT17624__GPCmut13
augggccagaucaucaccuucuuccaggaggugccccacgucaucgaggaggugaugaacaucgugcugaucgcccucagccugcuggccauccucaaggggaucuacaacgucgcgaccugcggccuguucgggcugguguccuuccuccugcugugcggccgcagcugcuccacgaccuacaaggggguguacgagcuccagacccuggagcuggacauggccagccucaacaugaccaugccgcuguccugcacgaagaacaacagccaccacuacaucauggucggcaacgagaccggccuggagcucacccugaccaacacguccaucaucaaccacaaguucugcaaccugagcgacgcccacaagaagaaccucuacgaccacgcccugauguccaucaucagcaccuuccaccuguccauccccaacuucaaccaguacgaggccaugagcugcgacuucaacgggggcaagaucuccgugcaguacaaccucagccacaccuacgcgaucgacgccgccaaccacugcgggaccaucgccaacggcgugcugcagacguucaugcggauggcguggggcggguccuacaucgcccuggacagcggcaagggguccugggacugcaucaugaccagcuaccaguaccucaucauccagaacaccaccugggaggaccacugccaguucucccgccccagccccaucggcuaccuggggcugcucagccagcggacgcgcgacaucuacaucucccggcgccugcugggcaccuucaccuggacccucagcgacuccgagggcaacgagacgcccgggggcuacugccugacccgguggaugcugaucgaggccgagcucaagugcuucgggaacaccgccgucgccaagugcaacgagaagcacgacgaggaguucugcgacaugcugcgccuguucgacuucaacaagcaggcgauccggcgccucaagaccgaggcccagaugagcauccagcugaucaacaaggccgugaacgcccugaucaacgaccagcucaucaugaagaaccaccuccgggacaucaugggcauccccuacugcaacuacuccaaguacugguaccugaaccacacggugaccgggaagaccagccugccccgcugcuggcuggucuccaacggcagcuaccugaacgagacccacuucuccgacgacaucgagcagcaggccgacaacaugaucacggagaugcuccagaaggaguacauggaccggcagggcaagaccccgcuggggcugguggaccuguucguguucagcaccuccuucuaccucaucagcaucuuccugcaccuggucaagaucccguga

SEQ ID NO: 41687 - RNA, 1359 nt, Artificial Sequence
  derived and/or modified CDS sequence (opt1) from LASV(LASV237-NIG-2010;Clade II)__AIT17638__GPCmut13
augggccagaucaucaccuucuuccaggaggugccccacgucaucgaggaggugaugaacaucgugcugaucgcccucagccugcuggccauccucaaggggaucuacaacgucgcgaccugcggccuguucgggcugguguccuuccuccugcugugcggccgcagcugcuccacgaccuacaaggggguguacgagcuccagacccuggagcuggacauggccagccucaacaugaccaugccgcuguccugcacgaagaacaacagccaccacuacaucauggucggcaacgagaccggccuggagcucacccugaccaacacguccaucaucaaccacaaguucugcaaccugagcgacgcccacaagaaggaccucuacgaccacgcccugauguccaucaucagcaccuuccaccuguccauccccaacuucaaccaguacgaggccaugagcugcgacuucaacgggggcaagaucuccgugcaguacaaccucagccacaccuacgcgguggacgccgccaaccacugcgggaccaucgccaacggcguccugcagacguucaugcggauggcguggggcggguccuacaucgcccuggacagcggcaagggguccugggacugcaucaugaccagcuaccaguaccucaucauccagaacaccaccugggaggaccacugccaguucucccgccccagccccaucggcuaccuggggcugcucagccagcggacgcgcgacaucuacaucucccggcgccugcugggcaccuucaccuggacccucagcgacuccgagggcaacgagacgcccgggggcuacugccugacccgguggaugcugaucgaggccgagcucaagugcuucgggaacaccgccguggccaagugcaacgagaagcacgacgaggaguucugcgacaugcugcgccuguucgacuucaacaagcaggcgauccggcgccucaagaccgaggcccagaugagcauccagcugaucaacaaggccgugaacgcccugaucaacgaccagcucaucaugaagaaccaccuccgggacaucaugggcauccccuacugcaacuacuccaaguacugguaccugaaccacacggucaccgggaagaccagccugccccgcugcuggcugguguccaacggcagcuaccugaacgagacccacuucuccgacgacaucgagcagcaggccgacaacaugaucacggagcuccugcagaaggaguacauggaccggcagggcaagaccccgcuggggcugguggaccucuucgucuucagcaccuccuucuaccugaucagcaucuuccugcaccucaucaagaucccguga

SEQ ID NO: 41688 - RNA, 1359 nt, Artificial Sequence
  derived and/or modified CDS sequence (opt1) from LASV(LASV253-NIG-2011;Clade II)__AIT17670__GPCmut13
augggccagaucaucaccuucuuccaggaggugccccacgucaucgaggaggugaugaacaucgugcugaucgcccucagccugcuggccauccucaaggggaucuacaacgucgcgaccugcggccuguucgggcugguguccuuccuccugcugugcggccgcagcugcuccacgaccuacaaggggguguacgagcuccagacccuggagcuggacauggccagccucaacaugaccaugccgcuguccugcacgaagaacaacagccaccacuacaucauggucggcaacgagaccggccuggagcucacccugaccaacacguccaucaucaaccacaaguucugcaaccugagcgacgcccacaagaagaaccucuacgaccacgcccugauguccaucaucagcaccuuccaccuguccauccccaacuucaaccaguacgaggccaugagcugcgacuucaacgggggcaagaucuccgugcaguacaaccucagccacaccuacgcgguggacgccgccaaccacugcgggaccaucgccaacggcguccugcagacguucaugcggauggcguggggcggguccuacaucgcccuggacagcggcaagggguccugggacugcaucaugaccagcuaccaguaccucaucauccagaacaccaccugggaggaccacugccaguucucccgccccagccccaucggcuaccuggggcugcucagccagcggacgcgcgacaucuacaucucccggcgccugcugggcaccuucaccuggacccucagcgacuccgagggcaacgagacgcccgggggcuacugccugacccgguggaugcugaucgaggccgagcucaagugcuucgggaacaccgccguggccaagugcaacgagaagcacgacgaggaguucugcgacaugcugcgccuguucgacuucaacaagcaggcgauccggcgccucaaggccgaggcccagaugagcauccagcugaucaacaaggccgugaacgcccugaucaacgaccagcucaucaugaagaaccaccuccgggacaucaugggcaucccguacugcaacuacuccaaguacugguaccugaaccacaccgucacggggcgcaccagccugccccggugcuggcugguguccaacggcagcuaccugaacgagacccacuucuccgacgacaucgagcagcaggcggacaacaugaucaccgagcuccugcagaaggaguacaucgaccgccagggcaagacgccccuggggcugguggaccucuucgucuucagcaccuccuucuaccugaucagcaucuuccugcaccucgugaagaucccguga

SEQ ID NO: 41689 - RNA, 1359 nt, Artificial Sequence
  derived and/or modified CDS sequence (opt1) from LASV(LASV254-NIG-2011;Clade II)__AIT17674__GPCmut13
augggccagaucaucaccuucuuccaggaggugccccacgucaucgaggaggugaugaacaucgugcugaucgcccucagccugcuggccauccucaaggggaucuacaacgucgcgaccugcggccuguucgggcugguguccuuccuccugcugugcggccgcagcugcuccacgaccuacaaggggguguacgagcuccagacccuggagcuggacaugaccaaccucaacaugacgaugccgcugagcugcaccaagaacaacucccaccacuacaucauggucggcaacgagaccggccuggagcucacccugacgaacaccagcaucaucaaccacaaguucugcaaccuguccgacgcccacaagaagaaccucuacaaccacgcccugaugagcaucaucuccaccuuccaccugagcauccccaacuucaaccaguacgaggccauguccugcgacuucaacgggggcaagaucagcgugcaguacaaccucucccacagcuacgccguggacgcggccaaccacugcgggaccaucgccaacggcguccugcagacguucaugcggauggccuggggcggguccuacaucgcgcuggacagcggcaaggggaacugggacugcaucaugaccuccuaccaguaccucaucauccagaacaccaccugggaggaccacugccaguucagccgccccucccccaucggcuaccuggggcugcucagccagcggacgcgcgacaucuacaucagccggcgccugcugggcaccuucaccuggacccucuccgacagcgagggcaacgagacgcccgggggcuacugccugacccgguggaugcugaucgaggccgagcucaagugcuucgggaacaccgccguggccaagugcaacgagaagcacgacgaggaguucugcgacaugcugcgccuguucgacuucaacaagcaggccauccggcgccucaagaccgaggcgcaggccaacauccagcugaucaacaaggccgugaacgcccugaucaacgaccagcucaucaugaagaaccaccuccgggacaucaugggcauccccuacugcaacuacuccaaguacugguaccugaaccacacggucaccgggaagaccagccugccccgcugcuggcugguguccaacggcagcuaccugaacgagacccacuucuccgacgacaucgagcagcaggccgacaacaugaucacggagcuccugcagaaggaguacauggaccggcagggcaagaccccgcuggggcugguggaccucuucgucuucagcaccuccuucuaccugaucagcaucuuccugcaccucgugaagaucccguga

SEQ ID NO: 41690 - RNA, 1359 nt, Artificial Sequence
  derived and/or modified CDS sequence (opt1) from LASV(Nig08-A19;Clade III)__ADU56618__GPCmut13
augggccagaucgugaccuucuuccaggaggucccccacgugaucgaggaggugaugaacaucguccugaucgcccucagcauccuggccauccugaaggggcucuacaacaucgcgaccugcggccugaucgggcuggugacguuccuccugcuguccggccgcagcugcuccaugaccuacaaggggguguacgagcuccagacccuggagcugaacaugaacacccucaacaugacgaugccgcugagcugcaccaagaacaacucccaccacuacaucauggucggcaacgagaccggccuggagcucacccugacgaacaccagccugcuccaccacaaguucugcaaccuguccgacgcccacaagaagaaccuguacgaccacacccucaugagcaucaucuccaccuuccaccugagcauccccaacuucaaccaguacgaggccauguccugcgacuucaacgggggcaagaucacggugcaguacaaccugagccacuccuacgccaucgacgccgcgaaccacugcgggaccguggccaacggcguccuccagaccuucaugcggauggccuggggcgggagcuacaucgcccuggacuccggccgcgggaagugggacugcaucaugaccagcuaccaguaccugaucauccagaacacgaccugggaggaccacugccaguucucccggcccagccccaucggcuaccucgggcugcugucccagcgcacccgggacaucuacaucagccgccggcuccugggcaccuucacguggacccugagcgacuccgagggcaacgagacccccgggggcuacugccucacccgcuggaugcugaucgaggcggagcugaagugcuucgggaacacggccguggccaagugcaacgagaagcacgacgaggaguucugcgacaugcuccggcuguucgacuucaacaagcaggccauccgccggcugaaggccgaggcgcagaugagcauccagcucaucaacaaggccgugaacgcccugaucaacgaccagcugaucaugaagaaccaccuccgcgacaucaugggcauccccuacugcaacuacuccaaguacugguaccugaaccacaccagcaccgggcggaccucccugccccgcugcuggcucgucagcaacggcuccuaccugaacgagacgcacuucagcgacgacaucgagcagcaggccgacaacaugaucaccgagaugcugcagaaggaguaccuggaccggcagggcaagaccccgcucgggcugguggaccuguucguguucuccaccagcuucuaccucaucuccaucuuccugcaccuggucaagaucccguga

SEQ ID NO: 41691 - RNA, 1362 nt, Artificial Sequence
  derived and/or modified CDS sequence (opt1) from LASV(G1180-SLE-2010;Clade IV)__AIT17168__GPCmut13
augggccagaucgugaccuucuuccaggaggucccccacgugaucgaggaggugaugaacaucguccugaucgcccucagcauccuggccgugcugaaggggcucuacaacuucgcgaccugcggccugguggggcugcucaccuuccugcugcucugcggccgcuccugcaccgccagccgguacaagggggucuacgagcugcagacccuggagcucaacauggagacccugaacaugacgaugccgcuguccugcaccaagaacaacagccaccacuacaucauggugggcaacgagaccggccucgagcugacccugacgaacaccuccaucaucaaccacaaguucugcaaccucagcgacgcccacaagaagaaccuguacgaccacgcccugauguccaucaucagcaccuuccaccucuccauccccaacuucaaccaguacgaggccaugagcugcgacuucaacgggggcaagaucuccgugcaguacaaccugagccacuccuacgcgggggacgccgccaaccacugcggcaccgucgccaacggggugcugcagacguucaugcgcauggcguggggcggcagcuacaucgcccucgacuccgggcacggcagcugggacugcaucaugaccuccuaccaguaccugaucauccagaacaccaccugggaggaccacugccaguucagccggcccucccccaucggguaccugggccuccugagccagcgcacgcgggacaucuacaucagccgccggcugcucggcaccuucaccuggacccuguccgacagcgaggggaaggacacgccgggcggguacugccugacccgcuggaugcucaucgaggccgagcugaagugcuucggcaacaccgccguggccaagugcaacgagaagcacgacgaggaguucugcgacaugcugcggcuguucgacuucaacaagcaggcgauccagcgccugaaggccgaggcccagauguccauccagcugaucaacaaggccgucaacgcccucaucaacgaccagcugaucaugaagaaccaccuccgggacaucauggggauccccuacugcaacuacagcaaguacugguaccucaaccacaccacgaccggcaagaccucccugcccaagugcuggcuggugagcaacggcuccuaccucaacgagacccacuucagcgacgacaucgagcagcaggcggacaacaugaucacggagaugcugcagaaggaguacauggagcgccaggggaagacgccccugggccugguggaccucuucgucuucuccaccagcuucuaccugaucuccaucuuccugcaccucgugaagaucccguga

SEQ ID NO: 41692 - RNA, 1362 nt, Artificial Sequence
  derived and/or modified CDS sequence (opt1) from LASV(G1442-SLE-2011;Clade IV)__AIT17180__GPCmut13
augggccagaucgugaccuucuuccaggaggucccccacgugaucgaggaggugaugaacaucguccugaucgcccucagcauccuggccgugcugaaggggcucuacaacguggcgaccugcggccugaucgggcuggucacguuccuccugcugugcggccgcuccugcaccaccacccucuacaaggggguguacgagcugcagacgcuggagcucaacauggagacccugaacaugaccaugccgcugagcugcaccaagaacaacucccaccacuacauccgggugggcaacgagacgggccucgagcugacccugaccaacaccagcaucaucaaccacaaguucugcaaccucuccgacgcccacaagaagaaccuguacgaccacgcccugaugagcaucaucuccacguuccaccucagcauccccaacuucaaccaguacgaggccauguccugcgacuucaacgggggcaagaucagcguccaguacaaccugucccacagcuacgccggggacgcggccaaccacugcggcaccguggccaacggggugcugcagaccuucaugcgcauggccuggggcggcuccuacaucgcgcucgacagcgggcggggcaacugggacugcaucaugaccuccuaccaguaccugaucauccagaacacgaccugggacgaccacugccaguucagccgccccucccccaucggguaccugggccuccugagccagcggacccgcgacgucuacaucucccggcgccugcucggcaccuucacguggacccugagcgacagcgaggggaaggacaccccgggcggguacugccugacccgguggaugcucaucgaggccgagcugaagugcuucggcaacacggccguggccaagugcaacgagaagcacgacgaggaguucugcgacaugcugcgccucuucgacuucaacaagcaggccauccagcggcugaaggcggaggcccagauguccauccagcugaucaacaaggccgugaacgcccucaucaacgaccagcugaucaugaagaaccaccuccgcgacaucauggggauccccuacugcaacuacagcaaguacugguaccugaacaacaccgccaccggcaagaccucccugcccaagugcuggcugaucagcaacggcuccuaccucaacgagacgcacuucagcgacgacaucgagcaggaggcggacaacaugaucaccgagaugcugcagaaggaguacauggagcggcaggggaagacgccccugggccuggucgaccucuucguguucuccaccagcuucuaccugaucuccaucuuccugcaccucgugaagaucccguga

SEQ ID NO: 41693 - RNA, 1362 nt, Artificial Sequence
  derived and/or modified CDS sequence (opt1) from LASV(G3010-SLE-2013;Clade IV)__AIT17344__GPCmut13
augggccagaucgugaccuucuuccaggaggucccccacgugaucgaggaggugaugaacaucguccugaucgcccucagcauccuggccgugcugaaggggcucuacaacuucgcgaccugcggccugguggggcuggucacguuccuccugcugugcggccgcuccugcaccaccagccucuacaaggggguguacgagcugcagacccuggagcucaacauggagacgcugaacaugaccaugccgcuguccugcaccaagaacaacagccaccacuacaucauggugggcaacgagaccggccucgagcugacgcugaccaacaccuccaucaucaaccacaaguucugcaaccucagcgacgcccacaagaagaaccuguacaaccacgcccugauguccaucaucagcaccuuccaccucuccauccccaacuucaaccaguacgaggccaugagcugcgacuucaacgggggcaagaucuccguccaguacaaccugagccacuccuacgccggggacgcggccagccacugcggcacgguggccaacggggugcugcagaccuucaugcggauggccuggggcggcuccuacaucgcgcucgacagcggguacggcaagugggacugcaucaugaccuccuaccaguaccugaucauccagaacaccacgugggaggaccacugccaguucagccgccccucccccaucggguaccugggccuccugagccagcggacccgcgacaucuacaucagccggcgccugcucggcaccuucaccuggacgcuguccgacagcgaggggaaggacaccccgggcggguacugccugacccgguggaugcucaucgaggccgagcugaagugcuucggcaacaccgccgucgccaagugcaacgagaagcacgacgaggaguucugcgacaugcugcgccucuucgacuucaacaagcaggccauccagcggcugaagacggaggcgcagauguccauccagcugaucaacaaggccgugaacgcccucaucaacgaccagcugaucaugaagaaccaccuccgcgacaucauggggauccccuacugcaacuacagcaaguacugguaccugaaccacaccaccaccggcaagacgucccugcccaagugcuggcuggugagcaacggcuccuaccucaacgagacccacuucagcgacgacaucgagcagcaggccgacaacaugaucaccgagaugcugcagaaggaguacauggagcggcaggggaagacgccccugggccuggucgaccucuucguguucuccaccagcuucuaccugaucuccaucuuccugcaccucgugaagaucccguga

SEQ ID NO: 41694 - RNA, 1362 nt, Artificial Sequence
  derived and/or modified CDS sequence (opt1) from LASV(G502-SLE-2009;Clade IV)__AIT17126__GPCmut13
augggccagaucgugaccuucuuccaggaggucccccacgugaucgaggaggugaugaacaucguccugaucgcccucagcauccuggccgugcugaaggggcucuacaacuucgcgaccugcggccugguggggcugcucacguuccugcugcucugcggccgcuccugcaccaccgggcuguacaagggcgucuacgagcugcagacccucgagcugaacauggagacgcugaacaugaccaugccgcucagcugcaccaagaacaacucccaccacuacaucauggugggcaacgagaccgggcuggagcugacgcucaccaacaccagcaucaucaaccacaaguucugcaaccuguccgacgcccacaagaagaaccuguacgaccacgcccucaugagcaucaucuccaccuuccaccugagcauccccaacuucaaccaguacgaggccauguccugcgacuucaacggcgggaagaucagcgugcaguacaaccugucccacagcuacgccggcgacgcggccgaccacugcgggacggucgccaacggcgugcuccagaccuucaugcggauggccuggggcggguccuacaucgcgcuggacagcggccgcgggcggugggacugcaucaugaccuccuaccaguaccugaucauccagaacaccacgugggaggaccacugccaguucagccgccccucccccaucggcuaccucggccugcugagccagcggacccgcgacaucuacaucucccggcgccuccuggggaccuucaccuggacgcugagcgacagcgagggcaaggacacccccgggggcuacugccucacccgguggaugcugaucgaggccgagcugaagugcuucgggaacaccgccguggccaagugcaacgagaagcacgacgaggaguucugcgacaugcuccgccuguucgacuucaacaagcaggccauccagcggcugaaggcggaggcccagauguccauccagcucaucaacaaggccgucaacgcccugaucaacgaccagcuggugaugaagaaccaccuccgcgacaucaugggcauccccuacugcaacuacagccgguacugguaccugaaccacacgaccaccggccgcaccucccugcccaagugcuggcucgugagcaacggguccuaccugaacgagacgcacuucagcgacgacaucgagcagcaggccgacaacaugaucaccgagaugcugcagaaggaguacauggagcggcagggcaagaccccgcuggggcucgucgaccuguucguguucuccaccagcuucuaccugaucuccaucuuccuccaccuggugaagaucccguga

SEQ ID NO: 41695 - RNA, 1362 nt, Artificial Sequence
  derived and/or modified CDS sequence (opt1) from LASV(G733-SLE-2010;Clade IV)__AIT17154__GPCmut13
augggccagaucgugaccuucuuccaggaggucccccacgugaucgaggaggugaugaacaucguccugaucgcccucagcauccuggccgugcugaaggggcucuacaacuucgcgaccugcggcaucguggggcuggucuccuuccugcuccugugcggccgcagcugcacgaccucccuguacaaggggguguacgagcuccagacccuggagcugaacauggagacccucaacaugacgaugccgcugagcugcaccaagaacaacucccaccacuacaucauggugggcaacgagaccggccuggagcucacccugacgaacaccagcaucaucaaccacaaguucugcaaccuguccgacgcccacaagaagaaccucuacgaccacgcccugaugagcaucaucuccaccuuccaccugagcauccccaacuucaaccaguacgaggccauguccugcgacuucaacgggggcaagaucagcguccaguacaaccucucccacagcuacgccggggacgcggccaaccacugcggcaccaucgccaacggggugcugcagacguucaugcggauggccuggggcggcuccuacaucgcgcuggacagcgggcgcgaccggugggacugcaucaugaccuccuaccaguaccucaucauccagaacaccaccugggaggaccacugccaguucagccgccccucccccaucggcuaccuggggcugcucagccagcggacgcgcgacaucuacaucagccggcgccugcugggcaccuucaccuggacccucuccgacagcgagggcaaggacacgcccgggggcuacugccugacccgguggaugcugaucgaggccgagcucaagugcuucgggaacaccgccguggccaagugcaacgagaagcacgacgaggaguucugcgacaugcugcgccuguucgacuucaacaagcaggccauccagcggcucaaggcggaggcccagauguccauccagcugaucaacaaggccgucaacgcccugaucaacgaccagcucaucaugaagaaccaccuccgcgacaucaugggcauccccuacugcaacuacagcaaguacugguaccugaaccacaccacgaccgggaagaccucccugcccaagugcuggcuggugagcaacggcuccuaccugaacgagacccacuucagcgacgacaucgagcagcaggccgacaacaugaucacggagaugcuccagaaggaguacauggagcggcagggcaagaccccgcuggggcugguggaccuguucgucuucuccaccagcuucuaccucaucuccaucuuccugcaccuggugaagaucccguga

SEQ ID NO: 41696 - RNA, 1362 nt, Artificial Sequence
  derived and/or modified CDS sequence (opt1) from MOPV/LASV reassortant(IGS-1;Clade IV)__AFY05576__GPCmut13
augggccagaucgugaccuucuuccaggaggucccccacgugaucgaggaggugaugaacaucguccugaucgcccucagcgugcuggccgugcugaaggggcucuacaacuucgcgaccugcggccuggucgggcuggugacguuccuccugcugugcggccgcuccugcaccaccagccucuacaaggggguguacgagcugcagacccuggagcucaacauggagacgcugaacaugaccaugccgcuguccugcaccaagaacaacagccaccacuacaucauggucggcaacgagaccggccucgagcugacgcugaccaacaccuccaucaucaaccacaaguucugcaaccucagcgacgcccacaagaagaaccuguacgaccacgcccugauguccaucaucagcaccuuccaccucuccauccccaacuucaaccaguacgaggccaugagcugcgacuucaacgggggcaagaucuccgugcaguacaaccugagccacuccuacgccggggacgcggccaaccacugcggcacgguggccaacgggguccugcagaccuucaugcggauggccuggggcggcagcuacaucgcgcucgacuccgggcgcggcaacugggacugcaucaugaccagcuaccaguaccugaucauccagaacaccacgugggaggaccacugccaguucucccggcccagccccaucggguaccugggccuccugucccagcgcacccgggacaucuacaucagccgccggcugcucggcaccuucaccuggacgcugagcgacuccgagggggaggacaccccgggcggguacugccugacccgcuggaugcucaucgaggccgagcugaagugcuucggcaacaccgccguggccaagugcaacgagaagcacgacgaggaguucugcgacaugcugcggcuguucgacuucaacaagcaggccauccagcgccugaaggcggaggcccagaugagcauccagcugaucaacaaggccgugaacgcccucaucaacgaccagcugaucaugaagaaccaccuccgggacaucauggggauccccuacugcaacuacuccaaguacugguaccucaaccacacgaccaccggccgcaccagccugcccaagugcuggcuggucuccaacggcagcuaccucaacgagacgcacuucuccgacgacaucgagcagcaggccgacaacaugaucaccgagaugcugcagaaggaguacauggagcggcaggggaagacgccccugggccugguggaccucuucguguucagcaccuccuucuaccugaucagcaucuuccugcaccucgucaagaucccguga

SEQ ID NO: 41697 - RNA, 1362 nt, Artificial Sequence
  derived and/or modified CDS sequence (opt1) from LASV(LM765-SLE-2012;Clade IV)__AIT17814__GPCmut13
augggccagaucgugaccuucuuccaggaggucccccacgugaucgaggaggugaugaacaucguccugaucgcccucagcauccuggccgugcugaaggggcucuacaacuucgcgaccugcggccugguggggcuggucacguuccuccugcugugcggccgcuccugcaccaccagccucuacaaggggguguacgagcugcagacccuggagcucaacauggagacgcugaacaugaccaugccgcuguccugcaccaagaacaacagccaccacuacaucauggugggcaacgagaccggccucgagcugacgcugaccaacaccuccaucaucgaccacaaguucugcaaccucagcgacgcccaccggaagaaccuguacgaccacgcccugauguccaucaucagcaccuuccaccucuccauccccaacuucaaccaguacgaggccaugagcugcgacuucaacgggggcaagaucuccguccaguacaaccugagccacuccuacgccaaggacgcggccgaccacugcgggacgguggccaacggcgugcugcagaccuucaugcgcauggccuggggcgggagcuacaucgcgcucgacuccggccgggggcgcugggacugcaucaugaccagcuaccaguaccugaucauccagaacaccacgugggaggaccacugccaguucucccggcccagccccaucggcuaccuggggcuccugucccagcgcacccgggacaucuacaucagccgccggcugcucggcaccuucaccuggacgcugagcgacuccgagggcaaggacacccccgggggcuacugccugacccgcuggaugcucaucgaggccgagcugaagugcuucgggaacaccgccgucgccaagugcaacgagaagcacgacgaggaguucugcgacaugcugcggcuguucgacuucaacaagcaggccauccagcgccugaaggcggaggcccagaugagcauccagcugaucaacaaggccgugaacgcccucaucaacgaccagcugaucaugaagaaccaccuccgggacaucaugggcauccccuacugcaacuacuccaaguacugguaccucaaccacacgaccaccgggaagaccagccugcccaagugcuggcugguguccaacggcagcuaccucaacgagacgcacuucuccgacgacaucgagcagcaggccgacaacaugaucaccgagaugcugcagaaggaguacauggagcgccagggcaagaccccgcuggggcuggucgaccucuucguguucagcaccuccuucuaccugaucagcaucuuccugcaccucgugaagaucccguga

SEQ ID NO: 41698 - RNA, 1362 nt, Artificial Sequence
  derived and/or modified CDS sequence (opt1) from LASV(LM776-SLE-2012;Clade IV)__AIT17824__GPCmut13
augggccagaucgugaccuucuuccaggaggucccccacgugaucgaggaggugaugaacaucguccugaucgcccucagcauccuggccgugcugaaggggcucuacaacuucgcgaccugcggccugguggggcuggucacguuccuccugcugugcggccgcuccugcaccaccagcguguacaaggggguguacgagcuccagacccuggagcugaacauggagacgcucaacaugaccaugccgcuguccugcaccaagaacaacagccaccacuacaucauggucggcaacgagaccggccuggagcucacgcugaccaacaccuccaucaucaaccacaaguucugcaaccugagcgacgcccacaagaagaaccucuacgaccacgcccugauguccaucaucagcaccuuccaccuguccauccccaacuucaaccaguacgaggccaugagcugcgacuucaacgggggcaagaucuccgugcaguacaaccucagccacuccuacgccggggacgcggccaaccacugcggcacgguggccaacgggguccugcagaccuucaugcggauggccuggggcggcagcuacaucgcgcuggacuccgggcacggcaagugggacugcaucaugaccagcuaccaguaccucaucauccagaacaccacgugggaggaccacugccaguucucccgccccagccccaucggguaccugggccugcucucccagcggacccgcgacaucuacaucagccggcgccugcugggcaccuucaccuggacgcucagcgacuccgaggggaaggacaccccgggcggguacugccugacccgguggaugcugaucgaggccgagcucaagugcuucggcaacaccgccguggccaagugcaacgagaagcacgacgaggaguucugcgacaugcugcgccuguucgacuucaacaagcaggccauccagcggcucaaggcggaggcccagaugagcauccagcugaucaacaaggccgugaacgcccugaucaacgaccagcucaucaugaagaaccaccuccgcgacaucauggggauccccuacugcaacuacuccaaguacugguaccugaaccacacgaccaccggcaagaccagccugcccaagugcuggcuggucuccaacggcagcuaccugaacgagacgcacuucuccgacgacaucgagcagcaggccgacaacaugaucaccgagaugcuccagaaggaguacauggagcggcaggggaagacgccccugggccugguggaccuguucguguucagcaccuccuucuaccucaucagcaucuuccugcaccuggucaagaucccguga

SEQ ID NO: 41699 - RNA, 1362 nt, Artificial Sequence
  derived and/or modified CDS sequence (opt1) from LASV(Mad39;Clade IV)__ANH09722__GPCmut13
augggccagaucgugaccuucuuccaggaggucccccacgugaucgaggaggugaugaacaucguccugaucgcccucagcauccuggccgugcugaaggggcucuacaacguggcgaccugcggccugaucgggcuggucacguuccuccugcugugcggccgcuccugcaccaccacccucuacaaggggguguacgagcugcaggcccuggagcucaacauggagacgcugaacaugaccaugccgcugagcugcaccaagaacaacucccaccacuacauccgggugggcaacgagaccggccucgagcugacgcugaccaacaccagccucaucaaccacaaguucugcaaccuguccgacgcccacaagaagaaccuguacgaccacgcccucaugagcaucaucuccaccuuccaccugagcauccccaacuucaaccaguacgaggccauguccugcgacuucaacgacgggaagaucagcguccaguacaaccugucccacacguacgcgggcgacaccgccaaccacugcgggaccguggccaacggcgugcuccagaccuucaugcgcauggccuggggcgggagcuacaucgcgcuggacuccggccgcgggggcugggacugcaucaugacgagcuaccaguaccugaucauccagaacaccaccugggaggaccacugccaguucucccggcccagccccaucggguaccucggccugcugucccagcggacccgcgacaucuacaucagccggcgccuccugggcacguucaccuggacccuguccgacagcgaggggaaggacaccccgggcggguacugccucacgcgguggaugcugaucgaggccgagcugaagugcuucggcaacaccgccgucgccaagugcaacgagaagcacgacgaggaguucugcgacaugcuccgccuguucgacuucaacaagcaggccauccagcggcugaaggcggaggcccagaugagcauccagcucaucaacaaggccgugaacgcccugaucaacgaccagcugaucaugaagaaccaccuccgcgacaucauggggauccccuacugcaacuacuccaaguacugguaccugaaccacaccgugaccggcaagacgagccugcccaagugcuggcucgucuccaacggcagcuaccugaacgagacccacuucuccgacgacaucgagcagcaggccgacaacaugaucaccgagaugcugcagaaggaguacauggagcggcaggggaagacgccccugggccucguggaccuguucguguucagcaccuccuucuaccugaucagcaucuuccuccaccuggucaagaucccguga

SEQ ID NO: 41700 - RNA, 1362 nt, Artificial Sequence
  derived and/or modified CDS sequence (opt1) from LASV(Z0947-SLE-2011;Clade IV)__AIT17840__GPCmut13
augggccagaucgugaccuucuuccaggaggucccccacgugaucgaggaggugaugaacaucguccugaucgcccucagcauccuggccgugcugaaggggcucuacaacuucgcgaccugcggccugguggggcuggucacguuccuccugcugugcggccgcuccugcaccaucagccucuacaaggggguguacgagcugcagacccuggagcucaacauggagacccugaacaugacgaugccgcuguccugcaccaagaacaacagccaccacuacaucauggugggcaacgagaccggccucgagcugacccugacgaacaccuccaucaucaaccacaaguucugcaaccucagcgacgcccacaagaagaaccuguacgaccacgcccugauguccaucaucagcaccuuccaccucuccauccccaacuucaaccaguacgaggccaugagcugcgacuucaacgggggcaagaucuccguccaguacaaccugagccacuccuacgccggggacgcggccaaccacugcggcaccguggccaacggggugcugcagacguucaugcggauggccuggggcggcagcuacaucgcgcucgacuccgggcgcgaccggugggacugcaucaugaccagcuaccaguaccugaucauccagaacaccaccugggaggaccacugccaguucucccgccccagccccaucggcuaccuggggcuccugucccagcggacgcgcgacaucuacaucagccggcgccugcucggcaccuucaccuggacccugagcgacuccgagggcaaggacacgcccgggggcuacugccugacccgguggaugcucaucgaggccgagcugaagugcuucgggaacaccgccgucgccaagugcaacgagaagcacgacgaggaguucugcgacaugcugcgccucuucgacuucaacaagcaggccauccagcggcugaaggcggaggcccagaugagcauccagcugaucaacaaggccgugaacgcccucaucaacgaccagcugaucaugaagaaccaccuccgcgacaucaugggcauccccuacugcaacuacuccaaguacugguaccugaaccacaccacgaccgggaagaccagccugcccaagugcuggcugguguccaacggcagcuaccucaacgagacccacuucuccgacgacaucgagcagcaggccgacaacaugaucacggagaugcugcagaaggaguacauggagcggcagggcaagaccccgcuggggcuggucgaccucuucguguucagcaccuccuucuaccugaucagcaucuuccugcaccucgugaagaucccguga

SEQ ID NO: 41701 - RNA, 1362 nt, Artificial Sequence
  derived and/or modified CDS sequence (opt4) from LASV(Josiah;Clade IV)__NP_694870__GPCmut13
augggccagaucgugaccuucuuccaggaggugccccacgugaucgaggaggugaugaacaucgugcugaucgcccugagcgugcuggccgugcugaagggccuguacaacuucgccaccugcggccuggugggccuggugaccuuccugcugcugugcggcagaagcugcaccaccagccuguacaagggcguguacgagcugcagacccuggagcugaacauggagacccugaacaugaccaugccccugagcugcaccaagaacaacagccaccacuacaucauggugggcaacgagaccggccuggagcugacccugaccaacaccagcaucaucaaccacaaguucugcaaccugagcgacgcccacaagaagaaccuguacgaccacgcccugaugagcaucaucagcaccuuccaccugagcauccccaacuucaaccaguacgaggccaugagcugcgacuucaacggcggcaagaucagcgugcaguacaaccugagccacagcuacgccggcgacgccgccaaccacugcggcaccguggccaacggcgugcugcagaccuucaugagaauggccuggggcggcagcuacaucgcccuggacagcggcagaggcaacugggacugcaucaugaccagcuaccaguaccugaucauccagaacaccaccugggaggaccacugccaguucagcagacccagccccaucggcuaccugggccugcugagccagagaaccagagacaucuacaucagcagaagacugcugggcaccuucaccuggacccugagcgacagcgagggcaaggacacccccggcggcuacugccugaccagauggaugcugaucgaggccgagcugaagugcuucggcaacaccgccguggccaagugcaacgagaagcacgacgaggaguucugcgacaugcugagacuguucgacuucaacaagcaggccauccagagacugaaggccgaggcccagaugagcauccagcugaucaacaaggccgugaacgcccugaucaacgaccagcugaucaugaagaaccaccugagagacaucaugggcauccccuacugcaacuacagcaaguacugguaccugaaccacaccaccaccggcagaaccagccugcccaagugcuggcuggugagcaacggcagcuaccugaacgagacccacuucagcgacgacaucgagcagcaggccgacaacaugaucaccgagaugcugcagaaggaguacauggagagacagggcaagaccccccugggccugguggaccuguucguguucagcaccagcuucuaccugaucagcaucuuccugcaccuggugaagauccccuga

SEQ ID NO: 41702 - RNA, 1359 nt, Artificial Sequence
  derived and/or modified CDS sequence (opt4) from LASV(LP;Clade I)__AAF86701__GPCmut13
augggccagaucaucaccuucuuccaggaggugccccacgugaucgaggaggugaugaacaucgugcugaucgcccugagccugcuggccauccugaagggccuguacaacaucgccaccugcggcaucaucggccugguggccuuccuguuccugugcggcaagagcugcagccugacccugaagggcggcuacgagcugcagacccuggagcugaacauggagacccugaacaugaccaugccccugagcugcaccaagaacagcagccaccacuacaucagagugggcaacgagaccggccuggagcugacccugaccaacaccagcaucaucaaccacaaguucugcaaccugagcgacgcccacaagaagaaccuguacgaccacgcccugaugagcaucaucagcaccuuccaccugagcauccccaacuucaaccaguacgaggccaugagcugcgacuucaacggcggcaagaucagcgugcaguacaaccugagccacagcuacgccggcgacgccgccgagcacugcggcaccguggccaacggcgugcugcagaccuucaugagaauggccuggggcggcagauacaucgcccuggacagcggcaagggcaacugggacugcaucaugaccagcuaccaguaccugaucauccagaacaccaccugggaggaccacugccaguucagcagacccagccccaucggcuaccugggccugcugagccagagaaccagagacaucuacaucagcagaagacugcugggcaccuucaccuggacccugagcgacagcgagggcaacgagacccccggcggcuacugccugaccagauggaugcugaucgaggccgagcugaagugcuucggcaacaccgccguggccaagugcaacgagaagcacgacgaggaguucugcgacaugcugagacuguucgacuucaacaagcaggccaucagaagacugaaggccgaggcccagaugagcauccagcugaucaacaaggccgugaacgcccugaucaacgaccagcugaucaugaagaaccaccugagagacaucaugggcauccccuacugcaacuacagcaaguacugguaccugaaccacaccagcagcggcagaaccagccugcccaagugcuggcugaucagcaacggcagcuaccugaacgagacccaguucagcgacgacaucgagcagcaggccgacaacaugaucaccgagaugcugcagaaggaguacaucgagagacagggcaagaccccccugggccugguggacaucuucaucuucagcaccagcuucuaccugaucagcaucuuccugcaccugaucaagauccccuga

SEQ ID NO: 41703 - RNA, 1359 nt, Artificial Sequence
  derived and/or modified CDS sequence (opt4) from LASV(803213;Clade II)__AAF86703__GPCmut13
augggccagaucaucaccuucuuccaggaggugccccacgugaucgaggaggugaugaacaucgugcugaucgcccugagccugcuggccauccugaagggcaucuacaacguggccaccugcggccuguucggccugaucagcuuccugcugcugugcggcagaagcugcagcgugaccuacaagggcguguacgagcugcagacccuggagcugaacauggccaaccugaacaugaccaugccccugagcugcaccaagaacaacagccaccacuacaucauggugggcaacgagaccggccuggagcugacccugaccaacaccagcaucaucaaccacaaguucugcaaccugagcgacgcccacaagaagaaccuguacgaccacgcccugaugagcaucaucagcaccuuccaccugagcauccccaacuucaaccaguacgaggccaugagcugcgacuucaacggcggcaagaucagcgugcaguacaaccugagccacagcuucgccguggacgccgccaaccacugcggcaccaucgccaacggcgugcugcagaccuucaugagaauggccuggggcggcagcuacaucgcccuggacagcggcaagggcaacugggacugcaucaugaccagcuaccaguaccugaucauccagaacaccaccugggaggaccacugccaguucagcagacccagccccaucggcuaccugggccugcugagccagagaaccagagacaucuacaucagcagaagacugcugggcaccuucaccuggacccugagcgacagcgagggcaacgaggcccccggcggcuacugccugaccagauggaugcugaucgaggccgagcugaagugcuucggcaacaccgccguggccaagugcaacgagaagcacgacgaggaguucugcgacaugcugagacuguucgacuucaacaagcaggccaucaagagacugaagaccgaggcccagaugagcauccagcugaucaacaaggccgugaacgcccugaucaacgaccagcugaucaugaagaaccaccugagagacaucaugggcauccccuacugcaacuacagcagauacugguaccugaaccacaccgugaccggcaagaccagccugcccagaugcuggcuggugagcaacggcagcuaccugaacgagacccacuucagcgacgacaucgagcagcaggccgacaacaugaucaccgagaugcugcagaaggaguacauggacagacagggcaagaccccccugggccugguggaccuguucguguucagcaccagcuucuaccugaucagcaucuuccugcaccuggugaagauccccuga

SEQ ID NO: 41704 - RNA, 1359 nt, Artificial Sequence
  derived and/or modified CDS sequence (opt4) from LASV(GA391;Clade III)__CAA36645__GPCmut13
augggccagaucgugaccuucuuccaggaggugccccacgugaucgaggaggugaugaacaucgugcugaucgcccugagcauccuggccauccugaagggccuguacaacguggccaccugcggccugaucggccuggugaccuuccugcugcugagcggcagaagcugcagccugaucuacaagggcaccuacgagcugcagacccuggagcugaacauggagacccugaacaugaccaugccccugagcugcaccaagaacaacagccaccacuacaucagagugggcaacgagaccggccuggagcugacccugaccaacaccagcauccugaaccacaaguucugcaaccugagcgacgcccacaagagaaaccuguacgaccacagccugaugagcaucaucagcaccuuccaccugagcauccccaacuucaaccaguacgaggccaugagcugcgacuucaacggcggcaagaucaccgugcaguacaaccugagccacagcuucgccguggacgccgccggccacugcggcacccuggccaacggcgugcugcagaccuucaugagaauggccuggggcggcagcuacaucgcccuggacagcggcagaggcaacugggacugcaucaugaccagcuaccaguaccugaucauccagaacaccaccugggacgaccacugccaguucagcagacccagccccaucggcuaccugggccugcugagccagagaaccagagacaucuacaucagcagaagacugcugggcaccuucaccuggacccugagcgacagcgagggcaacgagacccccggcggcuacugccugaccagauggaugcugaucgaggccgagcugaagugcuucggcaacaccgccguggccaagugcaacgagaagcacgacgaggaguucugcgacaugcugagacuguucgacuucaacaagcaggccaucagaagacugaagaccgaggcccagaugagcauccagcugaucaacaaggccgugaacgcccugaucaacgaccagcugaucaugaagaaccaccugagagacaucaugggcauccccuacugcaacuacagcagauacugguaccugaaccacaccagcaccggcaagaccagccugcccagaugcuggcugaucagcaacggcagcuaccugaacgagaccaaguucagcgacgacaucgagcagcaggccgacaacaugaucaccgagaugcugcagaaggaguacaucgacagacagggcaagaccccccugggccugguggaccuguucguguucagcaccagcuucuaccugaucagcaucuuccugcaccuggugaagauccccuga

SEQ ID NO: 41705 - RNA, 1362 nt, Artificial Sequence
  derived and/or modified CDS sequence (opt4) from LASV(AV;Clade V)__CCA30314__GPCmut13
augggccagaucgugaccuucuuccaggaggugccccacgugaucgaggaggugaugaacaucgugcugaucgcccugagcauccuggccgugcugaagggccuguacaacaucgccaccugcggccugaucggccugaucaccuuccugcugcugugcggcagaagcugcagcagcaaccuguacaagggcguguacgagcugcagagccuggaccugaacauggagacccugaacaugaccaugccccugagcugcaccaagaacaacagccaccacuacaucagagugggcaacgacaccggccuggagcugacccugaccaacaccagcauccugaaccacaaguucugcaaccugagcgacgcccacaagaaggaccuguacgaccacgcccugaugagcaucaucagcaccuuccaccugagcauccccaacuucaaccaguacgaggccaugagcugcgacuucaacggcggcaagaucagcgugcaguacaaccugagccacagcuacgccaucgacgccgccaaccacugcggcaccguggccaacggcauccugcagaccuucaugagaauggccuggggcggcagcuacaucgcccuggacagcggcagaggcaacugggacugcaucaugaccagcuaccaguaccugaucauccagaacaccaccugggagaaccacugccaguucagcagacccagccccaucggcuaccugggccugcugagccagagaaccagagacaucuacaucagcagaagacugcugggcaccuucaccuggacccugagcgacagcgagggcaacgccacccccggcggcuacugccugaccagauggaugcugaucgaggccgagcugaagugcuucggcaacaccgccguggccaagugcaacgagaagcacgacgaggaguucugcgacaugcugagacuguucgacuucaacaagcaggccaucagcagacugaagagcgaggcccagaugagcauccagcugaucaacaaggccgugaacgcccugaucaacgaccagcugaucaugaagaaccaccugagagacaucaugggcauccccuacugcaacuacagcaaguacugguaccugaaccacaccaucaccggcaagaccagccugcccaagugcuggcuggugagcaacggcagcuaccugaacgagacccacuucagcgacgacaucgagcagcaggccgacaacaugaucaccgagaugcugcagaaggaguacauggagagacagggcaagaccccccugggccugguggaccuguucguguucagcaccagcuucuaccugaucagcaucuuccugagacuggugaagauccccuga

SEQ ID NO: 41706 - RNA, 1359 nt, Artificial Sequence
  derived and/or modified CDS sequence (opt4) from LASV(Togo/2016/7082;Clade VI)__AMR44577__GPCmut13
augggccagaucaucaccuucuuccaggaggugccccacgugaucgaggaggugaugaacaucgugcugaucgcccugagccugcuggccauccugaagggcguguacaacguggccaccugcggcaucaucggccuggugaccuuccuguuccugugcggcagaagcugcagccugaucuacaagggcagcuacgagcugcagacccuggagcugaacauggagacccugaacaugaccaugccccugagcugcaccaagaacagcagccaccacuacaucagagugggcaacgagaccggccuggagcugacccugaccaacaccagcaucaucaaccacaaguucugcaaccugagcgacgcccacaagagaaaccuguacgaccacgcccugaugagcauccugagcaccuuccaccugagcauccccaacuucaaccaguacgaggccaugagcugcgacuucaacggcggcaagaucagcgugcaguacaaccugagccacgccuacgccguggacgccgccgagcacugcggcaccguggccaacggcgugcugcagaccuucaugagaauggccuggggcggcagcuacaucgcccuggacagcggcagaggcaacugggacugcaucaugaccagcuaccaguaccugaucauccagaacaccaccugggaggaccacugccaguucagcagacccagccccaucggcuaccugggccugcugagccagagaaccagagacaucuacaucagcagaagacugcugggcaccuucaccuggacccugagcgacagcgagggcaacgagacccccggcggcuacugccugaccagauggaugcugaucgaggccgagcugaagugcuucggcaacaccgccguggccaagugcaacgagaagcacgacgaggaguucugcgacaugcugagacuguucgacuucaacaagcaggccauccagagacugaagagcgaggcccagaugagcauccagcugaucaacaaggccgugaacgcccugaucaacgaccagcugaucaugaagaaccaccugagagacaugaugggcauccccuacugcaacuacagcaaguacugguaccugaaccacaccagcagcggcagaaccagccugcccaagugcuggcuggugagcaacggcagcuaccugaacgagacccacuucagcgacgacaucgagcagcaggccgacaacaugaucaccgagaugcugcagaaggaguacaucgacagacagggcaagaccccccugggccugguggaccuguucguguucagcaccagcuucuaccugaucagcaucuuccugcaccugaucaagauccccuga

SEQ ID NO: 41707 - RNA, 1359 nt, Artificial Sequence
  derived and/or modified CDS sequence (opt4) from LASV(KAK-428;Clade n.d. (VII))__ANH09740__GPCmut13
augggccagaucgugaccuucuuccaggaggugccccacgugaucgaggaggugaugaacaucgugcugaucgcccugagccugcuggccauccugaagggccuguacaacuucgccaccugcggcgugaucggccugaucaccuuccugcugcugugcggcagaagcugcagcgccaccuacaagggccaguacgagcugcagacccuggagcugaacauggagagccugaacaugaccaugccccugagcugcaccaagaacaacagccaccacuacaucagagccggcaacaacaccggccuggagcugacccugaccaacaccagcaucaucagccacaaguucugcaaccugagcgacgcccacaagaagaaccuguacgaccacacccugaugagcaucaucaccaccuuccaccugagcauccccaacuucaaccaguacgaggccaugagcugcgacuucaacggcggcaagaucagcauccaguacaaccugagccacagcuacgccggcgacgccgcccagcacugcggcaccguggccaacggcgugcugcagaccuucaugagaauggccuggggcggcagcuaccuggcccuggacagcggcagaagaggcugggacugcaucaucagcagcuaccaguaccugaucauccagaacaccaccugggacgaccacugccaguucagcagacccagccccaucggcuaccugggcuucgugagccagaagaccagagacaucuacaucagcagaagacugcugggcaccuucaccuggacccugagcgacagcgagggccacgacaugcccggcggcuacugccugaccagauggaugcugaucgaggccgaccugaagugcuucggcaacaccgccguggccaagugcaacgagaagcacgacgaggaguucugcgacauguggagacuguucgacuucaacaagcaggccauccagagacugaaggccgaggcccagaugaacauccagcugaucaacaaggccgugaacgcccugaucaacgaccagcugaugaugaagaaccaccugagagacaucaugggcauccccuacugcaacuacagcaaguucugguaccugaacaacaccaccaccggcagaaccagccugcccagaugcuggcugaucagcaacggcagcuaccugaacgagacccacuucagcgacgacaucgagcagcaggccgacaacaugaucaccgagaugcugcagaaggaguacauggacagacagggcaagaccccccugggccugguggaccuguucguguucagcaccagcuucuaccugaucaccaucuuccugcaccuggugaagauccccuga

SEQ ID NO: 41708 - RNA, 1359 nt, Artificial Sequence; identical to SEQ ID NO: 41702
  derived and/or modified CDS sequence (opt4) from LASV(Pinneo-NIG-1969;Clade I)__AIT17836__GPCmut13

SEQ ID NO: 41709 - RNA, 1359 nt, Artificial Sequence
  derived and/or modified CDS sequence (opt4) from LASV(ISTH0009-NIG-2011;Clade II)__AIT17404__GPCmut13
augggccagaucaucaccuucuuccaggaggugccccacgugaucgaggaggugaugaacaucgugcugaucgcccugagccugcuggccauccugaagggcaucuacaacguggccaccugcggccuguucggccuggugagcuuccugcugcugugcggcagaagcugcagcaccaccuacaagggcguguacgagcugcagacccuggagcuggacauggccagccugaacaugaccaugccccugagcugcaccaagaacaacagccaccacuacaucauggugggcaacgagaccggccuggagcugacccugaccaacaccagcaucaucaaccacaaguucugcaaccugagcgacgcccacaagaagaaccuguacgaccacgcccugaugagcaucaucagcaccuuccaccugagcauccccaacuucaaccaguacgaggccaugagcugcgacuucaacggcggcaagaucagcgugcaguacaaccugagccacgccuacgccguggacgccgccaaccacugcggcaccaucgccaacggcgugcugcagaccuucaugagaauggccuggggcggcagcuacaucgcccuggacagcggcaagggcagcugggacugcaucaugaccagcuaccaguaccugaucauccagaacaccaccugggaggaccacugccaguucagcagacccagccccaucggcuaccugggccugcugagccagagaaccagagacaucuacaucagcagaagacugcugggcaccuucaccuggacccugagcgacagcgagggcaacgagacccccggcggcuacugccugaccagauggaugcugaucgaggccgagcugaagugcuucggcaacaccgccguggccaagugcaacgagaagcacgacgaggaguucugcgacaugcugagacuguucgacuucaacaagcaggccaucagaagacugaagaccgaggcccagaugagcauccagcugaucaacaaggccgugaacgcccugaucaacgaccagcugaucaugaagaaccaccugagagacaucaugggcauccccuacugcaacuacagcaaguacugguaccugaaccacaccgugaccggcaagaccagccugcccagaugcuggcuggugagcaacggcagcuaccugaacgagacccacuucagcgacgacaucgagcagcaggccgacaacaugaucaccgagcugcugcagaaggaguacauggacagacagggcaagaccccccugggccugguggaccuguucguguucagcaccagcuucuaccugaucagcaucuuccugcaccugaucaagauccccuga

SEQ ID NO: 41710 - RNA, 1359 nt, Artificial Sequence
  derived and/or modified CDS sequence (opt4) from LASV(ISTH2010-NIG-2012;Clade II)__AIT17482__GPCmut13
augggccagaucaucaccuucuuccaggaggugccccacgugaucgaggaggugaugaacaucgugcugaucgcccugagccugcuggccauccugaagggcaucuacaacguggccaccugcggccuguucggccuggugagcuuccugcugcugugcggcagaagcugcagcaccaccuacaagggcguguacgagcugcagacccuggagcuggacauggccagccugaacaugaccaugccccugagcugcaccaagaacaacagccaccacuacaucauggugggcaacgagaccggccuggagcugacccugaccaacaccagcaucaucaaccacaaguucugcaaccugagcgacgcccacaagaagaaccuguacgaccacgcccugaugagcaucaucagcaccuuccaccugagcauccccaacuucaaccaguacgaggccaugagcugcgacuucaacggcggcaagaucagcgugcaguacaaccugagccacgccuacgccguggacgccgccaaccacugcggcaccaucgccaacggcgugcugcagaccuucaugagaauggccuggggcggcagcuacaucgcccuggacagcggcaagggcagcugggacugcaucaugaccagcuaccaguaccugaucauccagaacaucaccugggaggaccacugccaguucagcagacccagccccaucggcuaccugggccugcugagccagagaaccagagacaucuacaucagcagaagacugcugggcaccuucaccuggacccugagcgacagcgagggcaacgagacccccggcggcuacugccugaccagauggaugcugaucgaggccgagcugaagugcuucggcaacaccgccguggccaagugcaacgagaagcacgacgaggaguucugcgacaugcugagacuguucgacuucaacaagcaggccaucagaagacugaagaccgaggcccagaugagcauccagcugaucaacaaggccgugaacgcccugaucaacgaccagcugaucaugaagaaccaccugagagacaucaugggcauccccuacugcaacuacagcaaguacugguaccugaaccacaccgugaccggcaagaccagccugcccagaugcuggcuggugagcaacggcagcuaccugaacgagacccacuucagcgacgacaucgagcagcaggccgacaacaugaucaccgagcugcugcagaaggaguacaucgacagacagggcaagaccccccugggccugguggaccuguucguguucagcaccagcuucuaccugaucagcaucuuccugcaccuggugaagauccccuga

SEQ ID NO: 41711 - RNA, 1359 nt, Artificial Sequence
  derived and/or modified CDS sequence (opt4) from LASV(Lassa virus/H.sapiens-wt/NGA/2015/ISTH_0543;Clade II)__AVO03639__GPCmut13
augggccagaucaucaccuucuuccaggaggugccccacgugaucgaggaggugaugaacaucgugcugaucgcccugagccugcuggccauccugaagggcaucuacaacguggccaccugcggccuguucggccuggugagcuuccugcugcugugcggcagaagcugcagcaccaccuacaagggcguguacgagcugcagacccuggagcuggacauggccaaccugaacaugaccaugccccugagcugcaccaagaacaacagccaccacuacaucauggugggcaacgagaccggccuggagcugacccugaccaacaccagcaucaucaaccacaaguucugcaaccugagcgacgcccacaagaagaaccuguacgaccacgcccugaugagcaucaucagcaccuuccaccugagcauccccaacuucaaccaguacgaggccaugagcugcgacuucaacggcggcaagaucagcgugcaguacaaccugagccacaccuacgccguggacgccgccaaccacugcggcaccaucgccaacggcgugcugcagaccuucaugagaauggccuggggcggcagcuacaucgcccuggacagcggcaagggcagcugggacugcaucaugaccagcuaccaguaccuggugauccagaacaccaccugggaggaccacugccaguucagcagacccagccccaucggcuaccugggccugcugagccagagaaccagagacaucuacaucagcagaagacugcugggcaccuucaccuggacccugagcgacagcgagggcaacgagacccccggcggcuacugccugaccagauggaugcugaucgaggccgagcugaagugcuucggcaacaccgccguggccaagugcaacgagaagcacgacgaggaguucugcgacaugcugagacuguucgacuucaacaagcaggccaucagaagacugaagaccgaggcccagaugagcauccagcugaucaacaaggccgugaacgcccugaucaacgaccagcugaucaugaagaaccaccugagagacaucaugggcauccccuacugcaacuacagcaaguacugguaccugaaccacaccgugaccggcaagaccagccugcccagaugcuggcuggugagcaacggcagcuaccugaacgagacccacuucagcgacgacaucgagcagcaggccgacaacaugaucaccgagcugcugcagaaggaguacaucgacagacagggcaagaccccccugggccugguggaccuguucguguucagcaccagcuucuaccugaucagcaucuuccugcaccuggugaagauccccuga

SEQ ID NO: 41712 - RNA, 1359 nt, Artificial Sequence
  derived and/or modified CDS sequence (opt4) from LASV(Lassa virus/H.sapiens-wt/NGA/2016/ISTH_0009;Clade II)__AVO03571__GPCmut13
augggccagaucaucaccuucuuccaggaggugccccacgugaucgaggaggugaugaacaucgugcugaucgcccugagccugcuggccauccugaagggcaucuacaacguggccaccugcggccugcugggccuggugagcuuccugcugcugugcggcagaagcugcagcaccaccuacaagggcguguacgagcugcagacccuggagcuggacauggccagccugaacaugaccaugccccugagcugcaccaagaacaacagccaccacuacaucauggugggcaacgagaccggccuggagcugacccugaccaacaccagcaucaucaaccacaaguucugcaaccugagcgacgcccacaagaagaaccuguacgaccacgcccugaugagcaucaucagcaccuuccaccugagcauccccaacuucaaccaguacgaggccaugagcugcgacuucaacggcggcagaaucagcgugcaguacaaccugagccacagcuacgccguggacgccgccaaccacugcggcaccaucgccaacggcgugcugcagaccuucaugagaauggccuggggcggcagcuacaucgcccuggacagcggcaagggcagcugggacugcaucaugaccagcuaccaguaccugaucauccagaacaccaccugggaggaccacugccaguucagcagacccagccccaucggcuaccugggccugcugagccagagaaccagagacaucuacaucagcagaagacugcugggcaccuucaccuggacccugagcgacagcgagggcaacgagacccccggcggcuacugccugaccagauggaugcugaucgaggccgagcugaagugcuucggcaacaccgccguggccaagugcaacgagaagcacgacgaggaguucugcgacaugcugagacuguucgacuucaacaagcaggccaucagaagacugaagaccgaggcccagaugagcauccagcugaucaacaaggccgugaacgcccugaucaacgaccagcugaucaugaagaaccaccugagagacaucaugggcauccccuacugcaacuacagcaaguacugguaccugaaccacaccgugaccggcaagaccagccugcccagaugcuggcuggugagcaacggcagcuaccugaacgagacccacuucagcgacgacaucgagcagcaggccgacaacaugaucaccgagcugcugcagaaggaguacaucgacagacagggcaagaccccccugggccugguggaccuguucguguucagcaccagcuucuaccugaucagcaucuuccugcaccuggugaagauccccuga

SEQ ID NO: 41713 - RNA, 1359 nt, Artificial Sequence
  derived and/or modified CDS sequence (opt4) from LASV(Lassa virus/H.sapiens-wt/NGA/2016/ISTH_0017;Clade II)__AVO03567__GPCmut13
augggccagaucaucaccuucuuccaggaggugccccacgugaucgaggaggugaugaacaucgugcugaucgcccugagccugcuggccauccugaagggcaucuacaacguggccaccugcggccuguucggccuggugagcuuccugcugcugugcggcagaagcugcagcaccaccuacaagggcguguacgagcugcagacccuggagcuggacauggccagccugaacaugaccaugccccugagcugcaccaagaacaacagccaccacuacaucauggugggcaacgagaccggccuggagcugacccugaccaacaccagcaucaucaaccacaaguucugcaaccugagcgacgcccacaagaagaaccuguacgaccacgcccugaugagcaucaucagcaccuuccaccugagcauccccaacuucaaccaguacgaggccaugagcugcgacuucaacggcggcaagaucagcgugcaguacaaccugagccacaccuacgccaucgacgccgccaaccacugcggcaccaucgccaacggcgugcugcagaccuucaugagaauggccuggggcggcagcuacaucgcccuggacagcggcaagggcagcugggacugcaucaugaccagcuaccaguaccugaucauccagaacaccaccugggaggaccacugccaguucagcagacccagccccaucggcuaccugggccugcugagccagagaaccagagacaucuacaucagcagaagacugcugggcaccuucaccuggacccugagcgacagcgagggcaacgagacccccggcggcuacugccugaccagauggaugcugaucgaggccgagcugaagugcuucggcaacaccgccguggccaagugcaacgagaagcacgacgaggaguucugcgacaugcugagacuguucgacuucaacaagcaggccaucagaagacugaagaccgaggcccagaugagcauccagcugaucaacaaggccgugaacgcccugaucaacgaccagcugaucaugaagaaccaccugagagacaucaugggcauccccuacugcaacuacagcaaguacugguaccugaaccacaccgugaccggcaagaccagccugcccagaugcuggcuggugagcaacggcagcuaccugaacgagacccacuucagcgacgacaucgagcagcaggccgacaacaugaucaccgagcugcugcagaaggaguacauggacagacagggcaagaccccccugggccugguggaccuguucguguucagcaccagcuucuaccugaucagcaucuuccugcaccuggugagaauccccuga

SEQ ID NO: 41714 - RNA, 1359 nt, Artificial Sequence
  derived and/or modified CDS sequence (opt4) from LASV(Lassa virus/H.sapiens-wt/NGA/2018/ISTH_0959;Clade II)__AVV65099__GPCmut13
augggccagaucaucaccuucuuccaggaggugccccacgugaucgaggaggugaugaacaucgugcugaucgcccugagccugcuggccauccugaagggcaucuacaacguggugaccugcggccuguucggccuggugagcuuccugcugcugugcggcagaagcugcagcaccaccuacaagggcguguacgagcugcagacccuggagcuggacauggccagccugaacaugaccaugccccugagcugcaccaagaacaacagccaccacuacaucauggugggcaacgagaccggccuggagcugacccugaccaacaccagcaucaucaaccacaaguucugcaaccugagcgacgcccacaagaagaaccuguacgaccacgcccugaugagcaucaucagcaccuuccaccugagcauccccaacuucaaccaguacgaggccaugagcugcgacuucaacggcggcaagaucagcgugcaguacaaccugagccacgccuacgccaucgacgccgccaaccacugcggcaccaucgccaacggcgugcugcagaccuucaugagaauggccuggggcggcagcuacaucgcccuggacagcggcaagggcagcugggacugcaucaugaccagcuaccaguaccugaucauccagaacaccaccugggaggaccacugccaguucagcagacccagccccaucggcuaccugggccugcugagccagagaaccagagacaucuacaucagcagaagacugcugggcaccuucaccuggacccugagcgacagcgagggcaacgagacccccggcggcuacugccugaccagauggaugcugaucgaggccgagcugaagugcuucggcaacaccgccguggccaagugcaacgagaagcacgacgaggaguucugcgacaugcugagacuguucgacuucaacaagcaggccaucagaagacugaagaccgaggcccagaugagcauccagcugaucaacaaggccgugaacgcccugaucaacgaccagcugaucaugaagaaccaccugagagacaucaugggcauccccuacugcaacuacagcaaguacugguaccugaaccacaccgugaccggcaagaccagccugcccagaugcuggcuggugagcaacggcagcuaccugaacgagacccacuucagcgacgacaucgagcagcaggccgacaacaugaucaccgagcugcugcagaaggaguacaucgacagacagggcaagaccccccugggccugguggaccuguucguguucagcaccagcuucuaccugaucagcaucuuccugcaccuggugaagauccccuga

SEQ ID NO: 41715 - RNA, 1359 nt, Artificial Sequence
  derived and/or modified CDS sequence (opt4) from LASV(LASV003-NIG-2008;Clade II)__AIT17580__GPCmut13
augggccagaucaucaccuucuuccaggaggugccccacgugaucgaggaggugaugaacaucgugcugaucgcccugagccugcuggccauccugaagggcaucuacaacguggccaccugcggccuguucggccuggugagcuuccugcugcugugcggcagaagcugcagcaccaccuacaagggcguguacgagcugcagacccuggagcuggacauggccagccugaacaugaccaugccccugagcugcaccaagaacaacagccaccacuacaucauggugggcaacgagaccggccuggagcugacccugaccaacaccagcaucaucaaccacaaguucugcaaccugagcgacgcccacaagaagaaccuguacgaccacgcccugaugagcaucaucagcaccuuccaccugagcauccccaacuucaaccaguacgaggccaugagcugcgacuucaacggcggcaagaucagcgugcaguacaaccugagccacaccuacgccguggacgccgccaaccacugcggcaccaucgccaacggcgugcugcagaccuucaugagaauggccuggggcggcagcuacaucgcccuggacagcggcaagggcagcugggacugcaucaugaccagcuaccaguaccugaucauccagaacaccaccugggaggaccacugccaguucagcagacccagccccaucggcuaccugggccugcugagccagagaaccagagacaucuacaucagcagaagacugcugggcaccuucaccuggacccugagcgacagcgagagcaacgagacccccggcggcuacugccugaccagauggaugcugaucgaggccgagcugaagugcuucggcaacaccgccguggccaagugcaacgagaagcacgacgaggaguucugcgacaugcugagacuguucgacuucaacaagcaggccaucagaagacugaaggccgaggcccagaugagcauccagcugaucaacaaggccgugaacgcccugaucaacgaccagcugaucaugaagaaccaccugagagacaucaugggcauccccuacugcaacuacagcaaguacugguaccugaaccacaccgugaccggcagaaccagccugcccagaugcuggcuggugagcaacggcagcuaccugaacgagacccacuucagcgacgacaucgagcagcaggccgacaacaugaucaccgagcugcugcagaaggaguacauggacagacagggcaagaccccccugggccugguggaccuguucguguucagcaccagcuucuaccugaucagcaucuuccugcaccuggugaagauccccuga

SEQ ID NO: 41716 - RNA, 1359 nt, Artificial Sequence
  derived and/or modified CDS sequence (opt4) from LASV(LASV035-NIG-2009;Clade II)__AIT17588__GPCmut13
augggccagaucaucaccuucuuccaggaggugccccacgugaucgaggaggugaugaacaucgugcugaucgcccugagccugcuggccauccugaagggcaucuacaacguggccaccugcggccuguucggccuggugagcuuccugcugcugugcggcagaagcugcagcaccaccuacaagggcguguacgagcugcagacccuggagcuggacauggccagccugaacaugaccaugccccugagcugcaccaagaacaacagccaccacuacaucauggugggcaacgagaccggccuggagcugacccugaccaacaccagcaucaucaaccacaaguucugcaaccugagcgacgcccacaagaagaaccuguacgaccacgcccugaugagcaucaucagcaccuuccaccugagcauccccaacuucaaccaguacgaggccaugagcugcgacuucaacggcggcaagaucagcgugcaguacaaccugagccacgccuacgccguggacgccgccaaccacugcggcaccaucgccaacggcgugcugcagaccuucaugagaauggccuggggcggcagcuacaucgcccuggacagcggcaagggcagcugggacugcaucaugaccagcuaccaguaccugaucauccagaacaccaccugggaggaccacugccaguucagcagacccagccccaucggcuaccugggccugcugagccagagaaccagagacaucuacaucagcagaagacugcugggcaccuucaccuggacccugagcgacagcgagggcaacgagacccccggcggcuacugccugaccagauggaugcugaucgaggccgagcugaagugcuucggcaacaccgccguggccaagugcaacgagaagcacgacgaggaguucugcgacaugcugagacuguucgacuucaacaagcaggccaucagaagacugaaggccgaggcccagaugagcauccagcugaucaacaaggccgugaacgcccugaucaacgaccagcugaucaugaagaaccaccugagagacaucaugggcauccccuacugcaacuacagcaaguacugguaccugaaccacaccgugaccggcaagaccagccugcccagaugcuggcuggugagcaacggcagcuaccugaacgagacccacuucagcgacgacaucgagcagcaggccgacaacaugaucaccgagcugcugcagaaggaguacaucgacagacagggcaagaccccccugggccugguggaccuguucguguucagcaccagcuucuaccugaucagcaucuuccugcaccuggugaagauccccuga

SEQ ID NO: 41717 - RNA, 1359 nt, Artificial Sequence
  derived and/or modified CDS sequence (opt4) from LASV(LASV1000-NIG-2009;Clade II)__AIT17782__GPCmut13
augggccagaucaucaccuucuuccaggaggugccccacgugaucgaggaggugaugaacaucgugcugaucgcccugagccugcuggccauccugaagggcaucuacaacguggccaccugcggccuguucggccuggugagcuuccugcugcugugcggcagaagcugcagcaccaccuacaagggcguguacgagcugcagacccuggagcuggacauggccagccugaacaugaccaugccccugagcugcaccaagaacaacagccaccacuacaucauggugggcaacgagaccggccuggagcugacccugaccaacaccagcaucaucaaccacaaguucugcaaccugagcgacgcccacaagaagaaccuguacgaccacgcccugaugagcaucaucagcaccuuccaccugagcauccccaacuucaaccaguacgaggccaugagcugcgacuucaacggcggcaagaucagcgugcaguacaaccugagccacaccuacgccguggacgccgccaaccacugcggcaccaucgccaacggcgugcugcagaccuucaugagaauggccuggggcggcagcuacaucgcccuggacagcggcaagggcagcugggacugcaucaugaccagcuaccaguaccugaucauccagaacaccaccugggaggaccacugccaguucagcagacccagccccaucggcuaccugggccugcugagccagagaaccagagacaucuacaucagcagaagacugcugggcaccuucaccuggacccugagcgacagcgagggcaacgagacccccggcggcuacugccugaccagauggaugcugaucgaggccgagcugaagugcuucggcaacaccgccguggccaagugcaacgagaagcacgacgaggaguucugcgacaugcugagacuguucgacuucaacaagcaggccaucaagagacugaagaccgaggcccagaugagcauccagcugaucaacaaggccgugaacgcccugaucaacgaccagcugaucaugaagaaccaccugagagacaucaugggcauccccuacugcaacuacagcaaguacugguaccugaaccacaccgugaccggcaagaccagccugcccagaugcuggcuggugagcaacggcagcuaccugaacgagacccacuucagcgacgacaucgagcagcaggccgacaacaugaucaccgagcugcugcagaaggaguacaucgacagacagggcaagaccccccugggccugguggaccuguucguguucagcaccagcuucuaccugaucagcaucuuccugcaccuggugaagauccccuga

SEQ ID NO: 41718 - RNA, 1359 nt, Artificial Sequence
  derived and/or modified CDS sequence (opt4) from LASV(LASV221-NIG-2010;Clade II)__AIT17624__GPCmut13
augggccagaucaucaccuucuuccaggaggugccccacgugaucgaggaggugaugaacaucgugcugaucgcccugagccugcuggccauccugaagggcaucuacaacguggccaccugcggccuguucggccuggugagcuuccugcugcugugcggcagaagcugcagcaccaccuacaagggcguguacgagcugcagacccuggagcuggacauggccagccugaacaugaccaugccccugagcugcaccaagaacaacagccaccacuacaucauggugggcaacgagaccggccuggagcugacccugaccaacaccagcaucaucaaccacaaguucugcaaccugagcgacgcccacaagaagaaccuguacgaccacgcccugaugagcaucaucagcaccuuccaccugagcauccccaacuucaaccaguacgaggccaugagcugcgacuucaacggcggcaagaucagcgugcaguacaaccugagccacaccuacgccaucgacgccgccaaccacugcggcaccaucgccaacggcgugcugcagaccuucaugagaauggccuggggcggcagcuacaucgcccuggacagcggcaagggcagcugggacugcaucaugaccagcuaccaguaccugaucauccagaacaccaccugggaggaccacugccaguucagcagacccagccccaucggcuaccugggccugcugagccagagaaccagagacaucuacaucagcagaagacugcugggcaccuucaccuggacccugagcgacagcgagggcaacgagacccccggcggcuacugccugaccagauggaugcugaucgaggccgagcugaagugcuucggcaacaccgccguggccaagugcaacgagaagcacgacgaggaguucugcgacaugcugagacuguucgacuucaacaagcaggccaucagaagacugaagaccgaggcccagaugagcauccagcugaucaacaaggccgugaacgcccugaucaacgaccagcugaucaugaagaaccaccugagagacaucaugggcauccccuacugcaacuacagcaaguacugguaccugaaccacaccgugaccggcaagaccagccugcccagaugcuggcuggugagcaacggcagcuaccugaacgagacccacuucagcgacgacaucgagcagcaggccgacaacaugaucaccgagaugcugcagaaggaguacauggacagacagggcaagaccccccugggccugguggaccuguucguguucagcaccagcuucuaccugaucagcaucuuccugcaccuggugaagauccccuga

SEQ ID NO: 41719 - RNA, 1359 nt, Artificial Sequence
  derived and/or modified CDS sequence (opt4) from LASV(LASV237-NIG-2010;Clade II)__AIT17638__GPCmut13
augggccagaucaucaccuucuuccaggaggugccccacgugaucgaggaggugaugaacaucgugcugaucgcccugagccugcuggccauccugaagggcaucuacaacguggccaccugcggccuguucggccuggugagcuuccugcugcugugcggcagaagcugcagcaccaccuacaagggcguguacgagcugcagacccuggagcuggacauggccagccugaacaugaccaugccccugagcugcaccaagaacaacagccaccacuacaucauggugggcaacgagaccggccuggagcugacccugaccaacaccagcaucaucaaccacaaguucugcaaccugagcgacgcccacaagaaggaccuguacgaccacgcccugaugagcaucaucagcaccuuccaccugagcauccccaacuucaaccaguacgaggccaugagcugcgacuucaacggcggcaagaucagcgugcaguacaaccugagccacaccuacgccguggacgccgccaaccacugcggcaccaucgccaacggcgugcugcagaccuucaugagaauggccuggggcggcagcuacaucgcccuggacagcggcaagggcagcugggacugcaucaugaccagcuaccaguaccugaucauccagaacaccaccugggaggaccacugccaguucagcagacccagccccaucggcuaccugggccugcugagccagagaaccagagacaucuacaucagcagaagacugcugggcaccuucaccuggacccugagcgacagcgagggcaacgagacccccggcggcuacugccugaccagauggaugcugaucgaggccgagcugaagugcuucggcaacaccgccguggccaagugcaacgagaagcacgacgaggaguucugcgacaugcugagacuguucgacuucaacaagcaggccaucagaagacugaagaccgaggcccagaugagcauccagcugaucaacaaggccgugaacgcccugaucaacgaccagcugaucaugaagaaccaccugagagacaucaugggcauccccuacugcaacuacagcaaguacugguaccugaaccacaccgugaccggcaagaccagccugcccagaugcuggcuggugagcaacggcagcuaccugaacgagacccacuucagcgacgacaucgagcagcaggccgacaacaugaucaccgagcugcugcagaaggaguacauggacagacagggcaagaccccccugggccugguggaccuguucguguucagcaccagcuucuaccugaucagcaucuuccugcaccugaucaagauccccuga

SEQ ID NO: 41720 - RNA, 1359 nt, Artificial Sequence
  derived and/or modified CDS sequence (opt4) from LASV(LASV253-NIG-2011;Clade II)__AIT17670__GPCmut13
augggccagaucaucaccuucuuccaggaggugccccacgugaucgaggaggugaugaacaucgugcugaucgcccugagccugcuggccauccugaagggcaucuacaacguggccaccugcggccuguucggccuggugagcuuccugcugcugugcggcagaagcugcagcaccaccuacaagggcguguacgagcugcagacccuggagcuggacauggccagccugaacaugaccaugccccugagcugcaccaagaacaacagccaccacuacaucauggugggcaacgagaccggccuggagcugacccugaccaacaccagcaucaucaaccacaaguucugcaaccugagcgacgcccacaagaagaaccuguacgaccacgcccugaugagcaucaucagcaccuuccaccugagcauccccaacuucaaccaguacgaggccaugagcugcgacuucaacggcggcaagaucagcgugcaguacaaccugagccacaccuacgccguggacgccgccaaccacugcggcaccaucgccaacggcgugcugcagaccuucaugagaauggccuggggcggcagcuacaucgcccuggacagcggcaagggcagcugggacugcaucaugaccagcuaccaguaccugaucauccagaacaccaccugggaggaccacugccaguucagcagacccagccccaucggcuaccugggccugcugagccagagaaccagagacaucuacaucagcagaagacugcugggcaccuucaccuggacccugagcgacagcgagggcaacgagacccccggcggcuacugccugaccagauggaugcugaucgaggccgagcugaagugcuucggcaacaccgccguggccaagugcaacgagaagcacgacgaggaguucugcgacaugcugagacuguucgacuucaacaagcaggccaucagaagacugaaggccgaggcccagaugagcauccagcugaucaacaaggccgugaacgcccugaucaacgaccagcugaucaugaagaaccaccugagagacaucaugggcauccccuacugcaacuacagcaaguacugguaccugaaccacaccgugaccggcagaaccagccugcccagaugcuggcuggugagcaacggcagcuaccugaacgagacccacuucagcgacgacaucgagcagcaggccgacaacaugaucaccgagcugcugcagaaggaguacaucgacagacagggcaagaccccccugggccugguggaccuguucguguucagcaccagcuucuaccugaucagcaucuuccugcaccuggugaagauccccuga

SEQ ID NO: 41721 - RNA, 1359 nt, Artificial Sequence
  derived and/or modified CDS sequence (opt4) from LASV(LASV254-NIG-2011;Clade II)__AIT17674__GPCmut13
augggccagaucaucaccuucuuccaggaggugccccacgugaucgaggaggugaugaacaucgugcugaucgcccugagccugcuggccauccugaagggcaucuacaacguggccaccugcggccuguucggccuggugagcuuccugcugcugugcggcagaagcugcagcaccaccuacaagggcguguacgagcugcagacccuggagcuggacaugaccaaccugaacaugaccaugccccugagcugcaccaagaacaacagccaccacuacaucauggugggcaacgagaccggccuggagcugacccugaccaacaccagcaucaucaaccacaaguucugcaaccugagcgacgcccacaagaagaaccuguacaaccacgcccugaugagcaucaucagcaccuuccaccugagcauccccaacuucaaccaguacgaggccaugagcugcgacuucaacggcggcaagaucagcgugcaguacaaccugagccacagcuacgccguggacgccgccaaccacugcggcaccaucgccaacggcgugcugcagaccuucaugagaauggccuggggcggcagcuacaucgcccuggacagcggcaagggcaacugggacugcaucaugaccagcuaccaguaccugaucauccagaacaccaccugggaggaccacugccaguucagcagacccagccccaucggcuaccugggccugcugagccagagaaccagagacaucuacaucagcagaagacugcugggcaccuucaccuggacccugagcgacagcgagggcaacgagacccccggcggcuacugccugaccagauggaugcugaucgaggccgagcugaagugcuucggcaacaccgccguggccaagugcaacgagaagcacgacgaggaguucugcgacaugcugagacuguucgacuucaacaagcaggccaucagaagacugaagaccgaggcccaggccaacauccagcugaucaacaaggccgugaacgcccugaucaacgaccagcugaucaugaagaaccaccugagagacaucaugggcauccccuacugcaacuacagcaaguacugguaccugaaccacaccgugaccggcaagaccagccugcccagaugcuggcuggugagcaacggcagcuaccugaacgagacccacuucagcgacgacaucgagcagcaggccgacaacaugaucaccgagcugcugcagaaggaguacauggacagacagggcaagaccccccugggccugguggaccuguucguguucagcaccagcuucuaccugaucagcaucuuccugcaccuggugaagauccccuga

SEQ ID NO: 41722 - RNA, 1359 nt, Artificial Sequence
  derived and/or modified CDS sequence (opt4) from LASV(Nig08-A19;Clade III)__ADU56618__GPCmut13
augggccagaucgugaccuucuuccaggaggugccccacgugaucgaggaggugaugaacaucgugcugaucgcccugagcauccuggccauccugaagggccuguacaacaucgccaccugcggccugaucggccuggugaccuuccugcugcugagcggcagaagcugcagcaugaccuacaagggcguguacgagcugcagacccuggagcugaacaugaacacccugaacaugaccaugccccugagcugcaccaagaacaacagccaccacuacaucauggugggcaacgagaccggccuggagcugacccugaccaacaccagccugcugcaccacaaguucugcaaccugagcgacgcccacaagaagaaccuguacgaccacacccugaugagcaucaucagcaccuuccaccugagcauccccaacuucaaccaguacgaggccaugagcugcgacuucaacggcggcaagaucaccgugcaguacaaccugagccacagcuacgccaucgacgccgccaaccacugcggcaccguggccaacggcgugcugcagaccuucaugagaauggccuggggcggcagcuacaucgcccuggacagcggcagaggcaagugggacugcaucaugaccagcuaccaguaccugaucauccagaacaccaccugggaggaccacugccaguucagcagacccagccccaucggcuaccugggccugcugagccagagaaccagagacaucuacaucagcagaagacugcugggcaccuucaccuggacccugagcgacagcgagggcaacgagacccccggcggcuacugccugaccagauggaugcugaucgaggccgagcugaagugcuucggcaacaccgccguggccaagugcaacgagaagcacgacgaggaguucugcgacaugcugagacuguucgacuucaacaagcaggccaucagaagacugaaggccgaggcccagaugagcauccagcugaucaacaaggccgugaacgcccugaucaacgaccagcugaucaugaagaaccaccugagagacaucaugggcauccccuacugcaacuacagcaaguacugguaccugaaccacaccagcaccggcagaaccagccugcccagaugcuggcuggugagcaacggcagcuaccugaacgagacccacuucagcgacgacaucgagcagcaggccgacaacaugaucaccgagaugcugcagaaggaguaccuggacagacagggcaagaccccccugggccugguggaccuguucguguucagcaccagcuucuaccugaucagcaucuuccugcaccuggugaagauccccuga

SEQ ID NO: 41723 - RNA, 1362 nt, Artificial Sequence
  derived and/or modified CDS sequence (opt4) from LASV(G1180-SLE-2010;Clade IV)__AIT17168__GPCmut13
augggccagaucgugaccuucuuccaggaggugccccacgugaucgaggaggugaugaacaucgugcugaucgcccugagcauccuggccgugcugaagggccuguacaacuucgccaccugcggccuggugggccugcugaccuuccugcugcugugcggcagaagcugcaccgccagcagauacaagggcguguacgagcugcagacccuggagcugaacauggagacccugaacaugaccaugccccugagcugcaccaagaacaacagccaccacuacaucauggugggcaacgagaccggccuggagcugacccugaccaacaccagcaucaucaaccacaaguucugcaaccugagcgacgcccacaagaagaaccuguacgaccacgcccugaugagcaucaucagcaccuuccaccugagcauccccaacuucaaccaguacgaggccaugagcugcgacuucaacggcggcaagaucagcgugcaguacaaccugagccacagcuacgccggcgacgccgccaaccacugcggcaccguggccaacggcgugcugcagaccuucaugagaauggccuggggcggcagcuacaucgcccuggacagcggccacggcagcugggacugcaucaugaccagcuaccaguaccugaucauccagaacaccaccugggaggaccacugccaguucagcagacccagccccaucggcuaccugggccugcugagccagagaaccagagacaucuacaucagcagaagacugcugggcaccuucaccuggacccugagcgacagcgagggcaaggacacccccggcggcuacugccugaccagauggaugcugaucgaggccgagcugaagugcuucggcaacaccgccguggccaagugcaacgagaagcacgacgaggaguucugcgacaugcugagacuguucgacuucaacaagcaggccauccagagacugaaggccgaggcccagaugagcauccagcugaucaacaaggccgugaacgcccugaucaacgaccagcugaucaugaagaaccaccugagagacaucaugggcauccccuacugcaacuacagcaaguacugguaccugaaccacaccaccaccggcaagaccagccugcccaagugcuggcuggugagcaacggcagcuaccugaacgagacccacuucagcgacgacaucgagcagcaggccgacaacaugaucaccgagaugcugcagaaggaguacauggagagacagggcaagaccccccugggccugguggaccuguucguguucagcaccagcuucuaccugaucagcaucuuccugcaccuggugaagauccccuga

SEQ ID NO: 41724 - RNA, 1362 nt, Artificial Sequence
  derived and/or modified CDS sequence (opt4) from LASV(G1442-SLE-2011;Clade IV)__AIT17180__GPCmut13
augggccagaucgugaccuucuuccaggaggugccccacgugaucgaggaggugaugaacaucgugcugaucgcccugagcauccuggccgugcugaagggccuguacaacguggccaccugcggccugaucggccuggugaccuuccugcugcugugcggcagaagcugcaccaccacccuguacaagggcguguacgagcugcagacccuggagcugaacauggagacccugaacaugaccaugccccugagcugcaccaagaacaacagccaccacuacaucagagugggcaacgagaccggccuggagcugacccugaccaacaccagcaucaucaaccacaaguucugcaaccugagcgacgcccacaagaagaaccuguacgaccacgcccugaugagcaucaucagcaccuuccaccugagcauccccaacuucaaccaguacgaggccaugagcugcgacuucaacggcggcaagaucagcgugcaguacaaccugagccacagcuacgccggcgacgccgccaaccacugcggcaccguggccaacggcgugcugcagaccuucaugagaauggccuggggcggcagcuacaucgcccuggacagcggcagaggcaacugggacugcaucaugaccagcuaccaguaccugaucauccagaacaccaccugggacgaccacugccaguucagcagacccagccccaucggcuaccugggccugcugagccagagaaccagagacguguacaucagcagaagacugcugggcaccuucaccuggacccugagcgacagcgagggcaaggacacccccggcggcuacugccugaccagauggaugcugaucgaggccgagcugaagugcuucggcaacaccgccguggccaagugcaacgagaagcacgacgaggaguucugcgacaugcugagacuguucgacuucaacaagcaggccauccagagacugaaggccgaggcccagaugagcauccagcugaucaacaaggccgugaacgcccugaucaacgaccagcugaucaugaagaaccaccugagagacaucaugggcauccccuacugcaacuacagcaaguacugguaccugaacaacaccgccaccggcaagaccagccugcccaagugcuggcugaucagcaacggcagcuaccugaacgagacccacuucagcgacgacaucgagcaggaggccgacaacaugaucaccgagaugcugcagaaggaguacauggagagacagggcaagaccccccugggccugguggaccuguucguguucagcaccagcuucuaccugaucagcaucuuccugcaccuggugaagauccccuga

SEQ ID NO: 41725 - RNA, 1362 nt, Artificial Sequence
  derived and/or modified CDS sequence (opt4) from LASV(G3010-SLE-2013;Clade IV)__AIT17344__GPCmut13
augggccagaucgugaccuucuuccaggaggugccccacgugaucgaggaggugaugaacaucgugcugaucgcccugagcauccuggccgugcugaagggccuguacaacuucgccaccugcggccuggugggccuggugaccuuccugcugcugugcggcagaagcugcaccaccagccuguacaagggcguguacgagcugcagacccuggagcugaacauggagacccugaacaugaccaugccccugagcugcaccaagaacaacagccaccacuacaucauggugggcaacgagaccggccuggagcugacccugaccaacaccagcaucaucaaccacaaguucugcaaccugagcgacgcccacaagaagaaccuguacaaccacgcccugaugagcaucaucagcaccuuccaccugagcauccccaacuucaaccaguacgaggccaugagcugcgacuucaacggcggcaagaucagcgugcaguacaaccugagccacagcuacgccggcgacgccgccagccacugcggcaccguggccaacggcgugcugcagaccuucaugagaauggccuggggcggcagcuacaucgcccuggacagcggcuacggcaagugggacugcaucaugaccagcuaccaguaccugaucauccagaacaccaccugggaggaccacugccaguucagcagacccagccccaucggcuaccugggccugcugagccagagaaccagagacaucuacaucagcagaagacugcugggcaccuucaccuggacccugagcgacagcgagggcaaggacacccccggcggcuacugccugaccagauggaugcugaucgaggccgagcugaagugcuucggcaacaccgccguggccaagugcaacgagaagcacgacgaggaguucugcgacaugcugagacuguucgacuucaacaagcaggccauccagagacugaagaccgaggcccagaugagcauccagcugaucaacaaggccgugaacgcccugaucaacgaccagcugaucaugaagaaccaccugagagacaucaugggcauccccuacugcaacuacagcaaguacugguaccugaaccacaccaccaccggcaagaccagccugcccaagugcuggcuggugagcaacggcagcuaccugaacgagacccacuucagcgacgacaucgagcagcaggccgacaacaugaucaccgagaugcugcagaaggaguacauggagagacagggcaagaccccccugggccugguggaccuguucguguucagcaccagcuucuaccugaucagcaucuuccugcaccuggugaagauccccuga

SEQ ID NO: 41726 - RNA, 1362 nt, Artificial Sequence
  derived and/or modified CDS sequence (opt4) from LASV(G502-SLE-2009;Clade IV)__AIT17126__GPCmut13
augggccagaucgugaccuucuuccaggaggugccccacgugaucgaggaggugaugaacaucgugcugaucgcccugagcauccuggccgugcugaagggccuguacaacuucgccaccugcggccuggugggccugcugaccuuccugcugcugugcggcagaagcugcaccaccggccuguacaagggcguguacgagcugcagacccuggagcugaacauggagacccugaacaugaccaugccccugagcugcaccaagaacaacagccaccacuacaucauggugggcaacgagaccggccuggagcugacccugaccaacaccagcaucaucaaccacaaguucugcaaccugagcgacgcccacaagaagaaccuguacgaccacgcccugaugagcaucaucagcaccuuccaccugagcauccccaacuucaaccaguacgaggccaugagcugcgacuucaacggcggcaagaucagcgugcaguacaaccugagccacagcuacgccggcgacgccgccgaccacugcggcaccguggccaacggcgugcugcagaccuucaugagaauggccuggggcggcagcuacaucgcccuggacagcggcagaggcagaugggacugcaucaugaccagcuaccaguaccugaucauccagaacaccaccugggaggaccacugccaguucagcagacccagccccaucggcuaccugggccugcugagccagagaaccagagacaucuacaucagcagaagacugcugggcaccuucaccuggacccugagcgacagcgagggcaaggacacccccggcggcuacugccugaccagauggaugcugaucgaggccgagcugaagugcuucggcaacaccgccguggccaagugcaacgagaagcacgacgaggaguucugcgacaugcugagacuguucgacuucaacaagcaggccauccagagacugaaggccgaggcccagaugagcauccagcugaucaacaaggccgugaacgcccugaucaacgaccagcuggugaugaagaaccaccugagagacaucaugggcauccccuacugcaacuacagcagauacugguaccugaaccacaccaccaccggcagaaccagccugcccaagugcuggcuggugagcaacggcagcuaccugaacgagacccacuucagcgacgacaucgagcagcaggccgacaacaugaucaccgagaugcugcagaaggaguacauggagagacagggcaagaccccccugggccugguggaccuguucguguucagcaccagcuucuaccugaucagcaucuuccugcaccuggugaagauccccuga

SEQ ID NO: 41727 - RNA, 1362 nt, Artificial Sequence
  derived and/or modified CDS sequence (opt4) from LASV(G733-SLE-2010;Clade IV)__AIT17154__GPCmut13
augggccagaucgugaccuucuuccaggaggugccccacgugaucgaggaggugaugaacaucgugcugaucgcccugagcauccuggccgugcugaagggccuguacaacuucgccaccugcggcaucgugggccuggugagcuuccugcugcugugcggcagaagcugcaccaccagccuguacaagggcguguacgagcugcagacccuggagcugaacauggagacccugaacaugaccaugccccugagcugcaccaagaacaacagccaccacuacaucauggugggcaacgagaccggccuggagcugacccugaccaacaccagcaucaucaaccacaaguucugcaaccugagcgacgcccacaagaagaaccuguacgaccacgcccugaugagcaucaucagcaccuuccaccugagcauccccaacuucaaccaguacgaggccaugagcugcgacuucaacggcggcaagaucagcgugcaguacaaccugagccacagcuacgccggcgacgccgccaaccacugcggcaccaucgccaacggcgugcugcagaccuucaugagaauggccuggggcggcagcuacaucgcccuggacagcggcagagacagaugggacugcaucaugaccagcuaccaguaccugaucauccagaacaccaccugggaggaccacugccaguucagcagacccagccccaucggcuaccugggccugcugagccagagaaccagagacaucuacaucagcagaagacugcugggcaccuucaccuggacccugagcgacagcgagggcaaggacacccccggcggcuacugccugaccagauggaugcugaucgaggccgagcugaagugcuucggcaacaccgccguggccaagugcaacgagaagcacgacgaggaguucugcgacaugcugagacuguucgacuucaacaagcaggccauccagagacugaaggccgaggcccagaugagcauccagcugaucaacaaggccgugaacgcccugaucaacgaccagcugaucaugaagaaccaccugagagacaucaugggcauccccuacugcaacuacagcaaguacugguaccugaaccacaccaccaccggcaagaccagccugcccaagugcuggcuggugagcaacggcagcuaccugaacgagacccacuucagcgacgacaucgagcagcaggccgacaacaugaucaccgagaugcugcagaaggaguacauggagagacagggcaagaccccccugggccugguggaccuguucguguucagcaccagcuucuaccugaucagcaucuuccugcaccuggugaagauccccuga

SEQ ID NO: 41728 - RNA, 1362 nt, Artificial Sequence
  derived and/or modified CDS sequence (opt4) from MOPV/LASV reassortant(IGS-1;Clade IV)__AFY05576__GPCmut13
augggccagaucgugaccuucuuccaggaggugccccacgugaucgaggaggugaugaacaucgugcugaucgcccugagcgugcuggccgugcugaagggccuguacaacuucgccaccugcggccuggugggccuggugaccuuccugcugcugugcggcagaagcugcaccaccagccuguacaagggcguguacgagcugcagacccuggagcugaacauggagacccugaacaugaccaugccccugagcugcaccaagaacaacagccaccacuacaucauggugggcaacgagaccggccuggagcugacccugaccaacaccagcaucaucaaccacaaguucugcaaccugagcgacgcccacaagaagaaccuguacgaccacgcccugaugagcaucaucagcaccuuccaccugagcauccccaacuucaaccaguacgaggccaugagcugcgacuucaacggcggcaagaucagcgugcaguacaaccugagccacagcuacgccggcgacgccgccaaccacugcggcaccguggccaacggcgugcugcagaccuucaugagaauggccuggggcggcagcuacaucgcccuggacagcggcagaggcaacugggacugcaucaugaccagcuaccaguaccugaucauccagaacaccaccugggaggaccacugccaguucagcagacccagccccaucggcuaccugggccugcugagccagagaaccagagacaucuacaucagcagaagacugcugggcaccuucaccuggacccugagcgacagcgagggcgaggacacccccggcggcuacugccugaccagauggaugcugaucgaggccgagcugaagugcuucggcaacaccgccguggccaagugcaacgagaagcacgacgaggaguucugcgacaugcugagacuguucgacuucaacaagcaggccauccagagacugaaggccgaggcccagaugagcauccagcugaucaacaaggccgugaacgcccugaucaacgaccagcugaucaugaagaaccaccugagagacaucaugggcauccccuacugcaacuacagcaaguacugguaccugaaccacaccaccaccggcagaaccagccugcccaagugcuggcuggugagcaacggcagcuaccugaacgagacccacuucagcgacgacaucgagcagcaggccgacaacaugaucaccgagaugcugcagaaggaguacauggagagacagggcaagaccccccugggccugguggaccuguucguguucagcaccagcuucuaccugaucagcaucuuccugcaccuggugaagauccccuga

SEQ ID NO: 41729 - RNA, 1362 nt, Artificial Sequence
  derived and/or modified CDS sequence (opt4) from LASV(LM765-SLE-2012;Clade IV)__AIT17814__GPCmut13
augggccagaucgugaccuucuuccaggaggugccccacgugaucgaggaggugaugaacaucgugcugaucgcccugagcauccuggccgugcugaagggccuguacaacuucgccaccugcggccuggugggccuggugaccuuccugcugcugugcggcagaagcugcaccaccagccuguacaagggcguguacgagcugcagacccuggagcugaacauggagacccugaacaugaccaugccccugagcugcaccaagaacaacagccaccacuacaucauggugggcaacgagaccggccuggagcugacccugaccaacaccagcaucaucgaccacaaguucugcaaccugagcgacgcccacagaaagaaccuguacgaccacgcccugaugagcaucaucagcaccuuccaccugagcauccccaacuucaaccaguacgaggccaugagcugcgacuucaacggcggcaagaucagcgugcaguacaaccugagccacagcuacgccaaggacgccgccgaccacugcggcaccguggccaacggcgugcugcagaccuucaugagaauggccuggggcggcagcuacaucgcccuggacagcggcagaggcagaugggacugcaucaugaccagcuaccaguaccugaucauccagaacaccaccugggaggaccacugccaguucagcagacccagccccaucggcuaccugggccugcugagccagagaaccagagacaucuacaucagcagaagacugcugggcaccuucaccuggacccugagcgacagcgagggcaaggacacccccggcggcuacugccugaccagauggaugcugaucgaggccgagcugaagugcuucggcaacaccgccguggccaagugcaacgagaagcacgacgaggaguucugcgacaugcugagacuguucgacuucaacaagcaggccauccagagacugaaggccgaggcccagaugagcauccagcugaucaacaaggccgugaacgcccugaucaacgaccagcugaucaugaagaaccaccugagagacaucaugggcauccccuacugcaacuacagcaaguacugguaccugaaccacaccaccaccggcaagaccagccugcccaagugcuggcuggugagcaacggcagcuaccugaacgagacccacuucagcgacgacaucgagcagcaggccgacaacaugaucaccgagaugcugcagaaggaguacauggagagacagggcaagaccccccugggccugguggaccuguucguguucagcaccagcuucuaccugaucagcaucuuccugcaccuggugaagauccccuga

SEQ ID NO: 41730 - RNA, 1362 nt, Artificial Sequence
  derived and/or modified CDS sequence (opt4) from LASV(LM776-SLE-2012;Clade IV)__AIT17824__GPCmut13
augggccagaucgugaccuucuuccaggaggugccccacgugaucgaggaggugaugaacaucgugcugaucgcccugagcauccuggccgugcugaagggccuguacaacuucgccaccugcggccuggugggccuggugaccuuccugcugcugugcggcagaagcugcaccaccagcguguacaagggcguguacgagcugcagacccuggagcugaacauggagacccugaacaugaccaugccccugagcugcaccaagaacaacagccaccacuacaucauggugggcaacgagaccggccuggagcugacccugaccaacaccagcaucaucaaccacaaguucugcaaccugagcgacgcccacaagaagaaccuguacgaccacgcccugaugagcaucaucagcaccuuccaccugagcauccccaacuucaaccaguacgaggccaugagcugcgacuucaacggcggcaagaucagcgugcaguacaaccugagccacagcuacgccggcgacgccgccaaccacugcggcaccguggccaacggcgugcugcagaccuucaugagaauggccuggggcggcagcuacaucgcccuggacagcggccacggcaagugggacugcaucaugaccagcuaccaguaccugaucauccagaacaccaccugggaggaccacugccaguucagcagacccagccccaucggcuaccugggccugcugagccagagaaccagagacaucuacaucagcagaagacugcugggcaccuucaccuggacccugagcgacagcgagggcaaggacacccccggcggcuacugccugaccagauggaugcugaucgaggccgagcugaagugcuucggcaacaccgccguggccaagugcaacgagaagcacgacgaggaguucugcgacaugcugagacuguucgacuucaacaagcaggccauccagagacugaaggccgaggcccagaugagcauccagcugaucaacaaggccgugaacgcccugaucaacgaccagcugaucaugaagaaccaccugagagacaucaugggcauccccuacugcaacuacagcaaguacugguaccugaaccacaccaccaccggcaagaccagccugcccaagugcuggcuggugagcaacggcagcuaccugaacgagacccacuucagcgacgacaucgagcagcaggccgacaacaugaucaccgagaugcugcagaaggaguacauggagagacagggcaagaccccccugggccugguggaccuguucguguucagcaccagcuucuaccugaucagcaucuuccugcaccuggugaagauccccuga

SEQ ID NO: 41731 - RNA, 1362 nt, Artificial Sequence
  derived and/or modified CDS sequence (opt4) from LASV(Mad39;Clade IV)__ANH09722__GPCmut13
augggccagaucgugaccuucuuccaggaggugccccacgugaucgaggaggugaugaacaucgugcugaucgcccugagcauccuggccgugcugaagggccuguacaacguggccaccugcggccugaucggccuggugaccuuccugcugcugugcggcagaagcugcaccaccacccuguacaagggcguguacgagcugcaggcccuggagcugaacauggagacccugaacaugaccaugccccugagcugcaccaagaacaacagccaccacuacaucagagugggcaacgagaccggccuggagcugacccugaccaacaccagccugaucaaccacaaguucugcaaccugagcgacgcccacaagaagaaccuguacgaccacgcccugaugagcaucaucagcaccuuccaccugagcauccccaacuucaaccaguacgaggccaugagcugcgacuucaacgacggcaagaucagcgugcaguacaaccugagccacaccuacgccggcgacaccgccaaccacugcggcaccguggccaacggcgugcugcagaccuucaugagaauggccuggggcggcagcuacaucgcccuggacagcggcagaggcggcugggacugcaucaugaccagcuaccaguaccugaucauccagaacaccaccugggaggaccacugccaguucagcagacccagccccaucggcuaccugggccugcugagccagagaaccagagacaucuacaucagcagaagacugcugggcaccuucaccuggacccugagcgacagcgagggcaaggacacccccggcggcuacugccugaccagauggaugcugaucgaggccgagcugaagugcuucggcaacaccgccguggccaagugcaacgagaagcacgacgaggaguucugcgacaugcugagacuguucgacuucaacaagcaggccauccagagacugaaggccgaggcccagaugagcauccagcugaucaacaaggccgugaacgcccugaucaacgaccagcugaucaugaagaaccaccugagagacaucaugggcauccccuacugcaacuacagcaaguacugguaccugaaccacaccgugaccggcaagaccagccugcccaagugcuggcuggugagcaacggcagcuaccugaacgagacccacuucagcgacgacaucgagcagcaggccgacaacaugaucaccgagaugcugcagaaggaguacauggagagacagggcaagaccccccugggccugguggaccuguucguguucagcaccagcuucuaccugaucagcaucuuccugcaccuggugaagauccccuga

SEQ ID NO: 41732 - RNA, 1362 nt, Artificial Sequence
  derived and/or modified CDS sequence (opt4) from LASV(Z0947-SLE-2011;Clade IV)__AIT17840__GPCmut13
augggccagaucgugaccuucuuccaggaggugccccacgugaucgaggaggugaugaacaucgugcugaucgcccugagcauccuggccgugcugaagggccuguacaacuucgccaccugcggccuggugggccuggugaccuuccugcugcugugcggcagaagcugcaccaucagccuguacaagggcguguacgagcugcagacccuggagcugaacauggagacccugaacaugaccaugccccugagcugcaccaagaacaacagccaccacuacaucauggugggcaacgagaccggccuggagcugacccugaccaacaccagcaucaucaaccacaaguucugcaaccugagcgacgcccacaagaagaaccuguacgaccacgcccugaugagcaucaucagcaccuuccaccugagcauccccaacuucaaccaguacgaggccaugagcugcgacuucaacggcggcaagaucagcgugcaguacaaccugagccacagcuacgccggcgacgccgccaaccacugcggcaccguggccaacggcgugcugcagaccuucaugagaauggccuggggcggcagcuacaucgcccuggacagcggcagagacagaugggacugcaucaugaccagcuaccaguaccugaucauccagaacaccaccugggaggaccacugccaguucagcagacccagccccaucggcuaccugggccugcugagccagagaaccagagacaucuacaucagcagaagacugcugggcaccuucaccuggacccugagcgacagcgagggcaaggacacccccggcggcuacugccugaccagauggaugcugaucgaggccgagcugaagugcuucggcaacaccgccguggccaagugcaacgagaagcacgacgaggaguucugcgacaugcugagacuguucgacuucaacaagcaggccauccagagacugaaggccgaggcccagaugagcauccagcugaucaacaaggccgugaacgcccugaucaacgaccagcugaucaugaagaaccaccugagagacaucaugggcauccccuacugcaacuacagcaaguacugguaccugaaccacaccaccaccggcaagaccagccugcccaagugcuggcuggugagcaacggcagcuaccugaacgagacccacuucagcgacgacaucgagcagcaggccgacaacaugaucaccgagaugcugcagaaggaguacauggagagacagggcaagaccccccugggccugguggaccuguucguguucagcaccagcuucuaccugaucagcaucuuccugcaccuggugaagauccccuga

SEQ ID NO: 41733 - RNA, 1362 nt, Artificial Sequence
  derived and/or modified CDS sequence (opt5) from LASV(Josiah;Clade IV)__NP_694870__GPCmut13
augggccagaucgugaccuucuuucaagaggucccccacguuauugaagaggugaugaacaucgugcugauugcccucagcguccuggcugugcuuaaggggcuguacaauuucgccacaugcggacucguuggccuggugacguuucuucugcucugugggagauccugcaccacaucucuguauaaaggagucuacgaacugcagacccucgagcugaacauggaaacacuuaauaugaccaugccucugagcuguacaaagaacaauucccaucacuauaucauggugggcaacgagaccgggcucgagcugacgcuuaccaauacaucuauuaucaaccauaaauucugcaaucugagcgacgcgcacaagaaaaaccucuacgaucaugcucugauguccaucauuucuaccuuucaccugagcaucccgaauuucaaccaguaugaagccauguccugugacuuuaauggaggcaagauuagcguucaguacaaccucucucacuccuaugccggcgaugcugccaaucauugcgggacaguggcuaacggaguccugcaaaccuucaugcggauggccuggggcgggagcuacaucgcgcuugacucuggacgcggcaacugggauuguauuaugacguccuaccaguaucugaucauucagaauacaaccugggaggaccacugccaguuuagcagacccucuccuaucggguaccucggacugcuuucccaacggacacgcgauaucuauauuagcagacggcugcucggcaccuucaccuggacacuguccgacucugaaggcaaggauacgcccgggggauacugucugacccgcuggaugcucaucgaggccgagcugaaaugcuuuggcaacacagcuguggccaaguguaaugaaaaacaugacgaggaguucugcgauaugcuuagacuguuugacuucaacaagcaggcuauucagcggcucaaagccgaagcgcagaugagcauccaacugauuaauaaggccgugaacgcucuuaucaaugaucagcugaucaugaagaaccaccuccgcgacauuauggggaucccuuauugcaauuacuccaaauauugguaccugaaccacaccacaaccggaagaacgagccugcccaaguguuggcucgucucuaauggcuccuaccugaacgaaacacauuucagcgacgauauugagcagcaagccgacaauaugaucaccgagaugcuucagaaagaauauauggagcggcaggggaagaccccucugggacucguugaucuguuuguguucucuaccagcuuuuaccugauuuccaucuuccuucaccucgugaaaaucccguga

SEQ ID NO: 41734 - RNA, 1359 nt, Artificial Sequence
  derived and/or modified CDS sequence (opt5) from LASV(LP;Clade I)__AAF86701__GPCmut13
augggccagaucauuaccuucuuucaagaggugccccacgucaucgaagagguuaugaacauugugcugaucgcccucagccugcuugcuauucugaaggggcucuacaauaucgccacaugcggaaucauuggccugguggcguuccuuuuucugugugggaaauccugcucucucacgcugaagggaggcuaugaacugcagacccucgagcugaacauggaaacacuuaauaugaccaugccucugagcuguaccaaaaacuccucucaucacuacaucagagucgggaaugagacaggacucgagcugacacuuaccaacacgagcauuaucaaucauaaguucugcaaccuguccgacgcucacaaaaagaaucucuaugaucaugcccugaugucuauuaucagcaccuuucaccuguccauuccgaacuucaaucaguacgaagccaugagcugugacuuuaacggcggcaagaucucugugcaguauaaucucucccacagcuacgcuggggaugccgcugagcauugcggaacaguugccaacggcgugcugcaaaccuucaugcggauggcguggggagggcgcuauaucgcccuugacucuggcaaagggaauugggauuguauuaugacauccuaccaguaccugaucauucagaacaccacgugggaagaccacugccaguuuagcagacccucuccuaucggauaucucggccugcuuucccaacggacacgcgauauuuacaucagcagacggcugcucggcaccuucacauggacccuguccgacucugaggggaacgagacccccggaggcuauugucugacacgcuggaugcucaucgaagcugagcugaagugcuuugggaauacggccgucgcuaaauguaacgaaaagcaugaugaggaguucugcgacaugcuuagacuguuugauuucaauaaacaggccauucggcgccucaaggcggaagcccagaugagcauccagcugauuaacaaggcugugaaugcccuuaucaacgaccaacugauuaugaaaaaucaccucagagauaucaugggaaucccuuacugcaacuauuccaaguacugguaucugaaucacaccagcucuggccggacaucccugcccaaauguuggcucauuagcaacgggucuuaccugaaugagacccaguucagcgacgacaucgaacagcaagcugauaacaugauuacagagaugcuucagaaggaauacaucgagcgccagggaaaaaccccucugggccucguugacauuuuuaucuucuccacgucuuuuuaucugauuagcaucuuccugcaucuuaucaagauuccguga

SEQ ID NO: 41735 - RNA, 1359 nt, Artificial Sequence
  derived and/or modified CDS sequence (opt5) from LASV(803213;Clade II)__AAF86703__GPCmut13
augggccagaucauuaccuucuuucaagaggugccccacgucaucgaagagguuaugaacauugugcugaucgcccucagccugcuugcuauucugaaggggaucuacaauguggccacaugcggacucuucggccugaucuccuuucuucugcucugugggagaucuugcagcgucacguauaaaggaguguacgaacugcagacccuggagcucaacauggcgaaucugaacaugacaaugccucuuuccuguaccaagaauaacucucaucacuauauuaugguuggcaaugaaacagggcuggagcucacccugacaaacaccagcaucauuaaucauaaauucugcaaccuuuccgacgcucacaagaaaaaucuguacgaucaugcccucaugucuaucauuagcacguuucaccuguccaucccgaacuucaaucaguaugaggccaugagcugugacuuuaacggaggcaagauuucugugcaguacaaucugucccacagcuucgcugucgaugccgcuaaccauugcggcaccaucgccaacggggugcuccaaacauuuaugcggauggcguggggaggcucuuauaucgcccuggacuccgggaagggaaauugggauuguauuaugaccagcuaccaguaccuuaucauucagaacacaaccugggaagaccacugccaguucucucgccccuccccuaucggcuaucuggggcuccugagccaaagaacgcgggauauuuacaucucccgcagacuucugggaacauuuaccuggacacucucugacagcgagggcaaugaagcucccggcggguauugucugacccgguggaugcugaucgaggccgagcucaaaugcuucggaaacaccgcuguugccaaguguaaugaaaaacaugaugaggaauuuugcgacaugcugcgccuuuucgauuucaacaagcaggcgauuaaaagacugaagacagaggcccagauguccauccagcucauuaauaaggcugugaacgcccugaucaaugaccaacuuauuaugaaaaaccaucugcgggauaucaugggcaucccuuacugcaauuauagccgcuacugguaucucaaccacacggucaccgggaagacaucucugcccagauguuggcugguguccaauggaagcuaccucaacgaaacccacuuuucugacgacauugagcagcaggcugauaauaugaucacagagaugcugcaaaaagaauacauggaccggcagggcaagaccccucuugggcugguggaucucuucgucuuuagcacguccuucuaucugauuucuaucuuucugcaccuuguuaaaauuccguga

SEQ ID NO: 41736 - RNA, 1359 nt, Artificial Sequence
  derived and/or modified CDS sequence (opt5) from LASV(GA391;Clade III)__CAA36645__GPCmut13
augggccagaucgugaccuucuuucaagaggucccccacguuauugaagaggugaugaacaucgugcugauugcccucagcauccuggcuauucuuaaggggcuguacaaugucgccacaugcggacucaucggccuggugacguuccuucugcucuccgggagaucuuguagccugaucuauaaaggaaccuacgaacugcagacacucgagcugaacauggaaacccuuaauaugacaaugccucuguccugcaccaagaacaauucucaucacuauauucggguuggcaacgagacagggcucgagcugacccuuacgaauaccagcauccugaaccauaaauuuuguaaucucuccgacgcgcacaagcgcaaccuguacgaucauucucugaugagcauuaucuccacauuccaccucagcauuccgaauuuuaaccaguaugaagcuaugucuugcgacuucaauggaggcaaaaucaccgugcaguacaaccugucccacagcuuugccgucgaugccgcuggccauugugggacacuugccaauggagugcugcaaaccuucaugagaauggcuuggggcgggucuuauauugcccucgacuccggacggggcaacugggauugcaucaugacgagcuaccaguaccugaucauucagaacacaaccugggacgaucacugucaguuuucucgccccuccccuaucggguaucuuggacugcucagccaaagaacacgggacauuuacaucucccgcagacugcugggcaccuucaccuggacacucucugauagcgagggcaaugaaacgcccgggggauauugccugacccgguggaugcuuauugaggcggagcugaaguguuuuggcaacacagccguugcuaagugcaaugaaaaacaugacgaggaguucugugauaugcuccgccuguuugacuucaacaagcaggccaucagacggcuuaaaaccgaagcucagauguccauccagcugauuaauaaggccgugaacgcgcucaucaaugaucaacugauuaugaaaaaccaucugcgcgacaucauggggauuccuuacugcaauuauagcagauacugguaucucaaccacacaucuaccggaaagacgucccugccccggugcuggcuuaucagcaauggcucuuaccugaacgaaacaaaguucagcgacgauaucgagcagcaggccgacaauaugauuaccgagaugcuccaaaaagaauacaucgaucgccaggggaagaccccucugggacuggucgaccuuuuuguguucuccacaucuuuuuaucucauuagcaucuuccugcaccuggugaaaauuccguga

SEQ ID NO: 41737 - RNA, 1362 nt, Artificial Sequence
  derived and/or modified CDS sequence (opt5) from LASV(AV;Clade V)__CCA30314__GPCmut13
augggccagaucgugaccuucuuucaagaggucccccacguuauugaagaggugaugaacaucgugcugauugcccucagcauccuggcuguccuuaaggggcuguacaauauugccacaugcggacucaucggccugaucacguuccuucugcucugugggagauccugcucuagcaaccuguauaaaggaguguacgaacugcagucccucgaccugaauauggagacccuuaacaugacaaugccucugucuuguaccaagaauaacagccaucacuauauucggguuggcaaugauacagggcucgaacugacccuuacaaacaccuccauccugaaucauaaauuuugcaaccucucugacgcgcacaagaaagaucuguacgaccaugcucugaugagcauuaucuccacguuccaccucagcauuccgaauuuuaaccaguaugaggccaugucuugugauuucaauggaggcaagaucuccgugcaguacaaccugagccacucuuaugccauugacgcugccaaucauugcggcaccgucgcuaacgggauccuucaaacauuuaugcgcauggccuggggaggcuccuacaucgcgcuggauagcgggagaggaaacugggacuguauuaugaccucuuaccaguaucucaucauucagaauacaaccugggagaaccacugccaguucucccggcccagcccuaucggcuaccuggggcuucugucccaacgcacgagagauauuuauaucucucggcgccuccugggaacauuuaccuggacacugagcgacuccgaaggcaaugccacccccggcggguacugucucaccagauggaugcugaucgaggcugaacuuaagugcuucggaaacacagccguggcuaaauguaaugagaagcaugaugaggaauuuugcgacaugcugcgccucuucgauuuuaacaaacaggccauuagccggcugaagucugaggcgcagauguccauccagcuuauuaauaaagccguuaacgcucugaucaaugaccaacucauuaugaagaaccaccugagagacaucaugggcaucccuuauugcaauuacagcaaguauugguaccugaaccacacgauuaccgggaaaacaucucuccccaaguguuggcuggugagcaauggauccuaccuuaacgaaacccauuucucugaugacaucgagcagcaggccgauaauaugauuacagaaaugcugcaaaaagaguauauggagcggcagggcaagaccccucucgggcuggucgaccuguucguguuuagcacguccuucuaccuuaucagcauuuuucuccgccuggugaaaaucccguga

SEQ ID NO: 41738 - RNA, 1359 nt, Artificial Sequence
  derived and/or modified CDS sequence (opt5) from LASV(Togo/2016/7082;Clade VI)__AMR44577__GPCmut13
augggccagaucauuaccuucuuucaagaggugccccacgucaucgaagagguuaugaacauugugcugaucgcccucagccugcuugcuauucugaaggggguguacaaugucgccacaugcggaaucaucggccucgugacguuccuguuucuuugugggagauccugcucucugauuuauaaaggaagcuacgaacuccagacccuggagcugaacauggaaacacucaauaugaccaugccucuguccuguacaaagaacucuagccaucacuauauccggguuggcaaugagaccgggcuugagcugacacucaccaacacguccauuaucaaucauaaauucugcaaccugucugacgcgcacaagcgcaaucuuuacgaucaugcucugaugagcauucucuccaccuuucaccugagcaucccgaacuucaaucaguaugaagccaugucuugugacuuuaacggaggcaaaauuuccgugcaguacaaucugagccacgccuaugcugucgaugccgcugagcauugcggcacaguggccaacgggguucuccaaaccuucaugagaauggcguggggaggcucuuacaucgcccuggacuccgggcggggaaauugggauuguaucaugacaagcuaccaguaucuuauuauccagaacaccacgugggaagaccacugccaguuuucucgccccuccccuauuggcuaccuggggcuccugagccaaagaacacgggauaucuauauuucccgcagacuucugggaaccuucacauggacccucucugacagcgagggcaacgagacccccggcggguacugucugacacgguggaugcugaucgaagcugagcucaagugcuuuggaaauacggccguggcuaaguguaacgaaaaacaugaugaggaguucugcgacaugcugcgccuuuuugauuucaauaagcaggccauccagagacugaaauccgaagcgcagaugagcauucaacucaucaacaaggccgucaaugcucugauuaacgaccagcuuaucaugaaaaaucaucugcgggauaugaugggcauuccuuauugcaacuacucuaaguauugguaccucaaucacaccuccagcgggcgcacaucucugcccaaguguuggcuggugagcaacggauccuaccucaaugagacccacuucucugacgacaucgaacagcaagccgauaacaugaucacagagaugcugcagaaagaauauauugacagacagggcaagaccccucuugggcugguggaucucuuugucuucagcacguccuuuuaccugaucagcauuuuccugcaccuuaucaaaauuccguga

SEQ ID NO: 41739 - RNA, 1359 nt, Artificial Sequence
  derived and/or modified CDS sequence (opt5) from LASV(KAK-428;Clade n.d. (VII))__ANH09740__GPCmut13
augggccagaucgugaccuucuuucaagaggucccccacguuauugaagaggugaugaacaucgugcugauugcccucagccugcuugcuauccugaaggggcucuacaauuucgccacaugcggagucauuggccugaucacguuucuucugcucugugggagauccugcucugcgaccuauaaaggacaguacgaacugcagacacuggagcucaacauggaaagccugaauaugaccaugccucuuuccuguacaaagaacaauucucaucacuauauccgggcuggcaacaauaccgggcuggagcucacacugaccaacacgagcauuaucucccauaaauucugcaaucuuucugacgcccacaagaaaaaccuguacgaucauacccucaugagcauuaucacaaccuuucaccuguccauuccgaauuucaaccaguaugaggccaugagcugugacuuuaauggaggcaagaucucuauucaauacaaccugucccacagcuaugcuggcgaugccgcucagcauugcgggacaguggccaauggaguucuccagaccuucaugcgcauggcguggggcgggucuuaccuggcccuugacuccggaagacggggcugggauuguaucaucagcucuuaccaguaucugauuauccaaaacacgacaugggacgaucacugccaguuuucccgccccagcccuauuggguaccucggauucgugucccagaagaccagagacaucuauauuucucggcgccugcuuggcacauuuaccuggacccugagcgauuccgaaggccaugacaugcccgggggauacugucucacaagauggaugcugaucgaggcugaucugaaaugcuucggcaacacggccgucgcuaaguguaaugaaaaacacgacgaggaguuuugcgauauguggcgccucuucgacuucaacaagcaggccauccaacggcugaaagcggaagcccagaugaauauucagcuuaucaacaaggcugugaaugcccugauuaacgaccaacucaugaugaagaaucaccugagagauaucauggggauuccuuauugcaacuacagcaaauuuugguaucuuaauaacaccacaaccggacggacaucucugccccgcuguuggcucaucuccaauggcagcuaccugaacgagacccauuucucugacgauaucgaacagcaggcugacaauaugauuacggagaugcugcagaaggaauacauggauagacaagggaaaacaccucucggacugguugaccuuuuuguguucagcaccuccuuuuaucugaucaccauuuuccuccaccuggucaagaucccguga

SEQ ID NO: 41740 - RNA, 1359 nt, Artificial Sequence; identical to SEQ ID NO: 41734
  derived and/or modified CDS sequence (opt5) from LASV(Pinneo-NIG-1969;Clade I)__AIT17836__GPCmut13

SEQ ID NO: 41741 - RNA, 1359 nt, Artificial Sequence
  derived and/or modified CDS sequence (opt5) from LASV(ISTH0009-NIG-2011;Clade II)__AIT17404__GPCmut13
augggccagaucauuaccuucuuucaagaggugccccacgucaucgaagagguuaugaacauugugcugaucgcccucagccugcuugcuauucugaaggggaucuacaauguggccacaugcggacucuucggccuggucuccuuucuucugcucugugggagaucuugcagcacgaccuauaaaggaguguacgaacugcagacacuggagcucgacauggcgucccugaacaugaccaugccucuuucuuguacaaagaauaacagccaucacuauaucaugguuggcaaugaaaccgggcuggagcucacacugaccaacacguccauuaucaaucauaaauucugcaaccuuucugaugcucacaagaaaaaucuguacgaccaugcccucaugagcauuaucuccaccuuucaccugagcauuccgaacuucaaucaguaugaggccaugucuugugauuuuaacggaggcaagaucuccgugcaguacaaucugagccacgcuuaugccgucgacgcugccaaccauugcggcacaauugcgaauggggugcuccaaaccuucaugcggauggccuggggaggcucuuacaucgcucuggauuccgggaagggaagcugggacuguaucaugacaucuuaccaguaucuuauuauccagaacaccacgugggaagaucacugccaguuuucccgccccagcccuauuggcuaccuggggcuccugucccaaagaacacgggacaucuauauuucucgcagacuucugggaaccuucacauggacccucagcgauuccgagggcaacgaaacccccggcggguacugucugacacgguggaugcugaucgaggccgagcucaaaugcuuuggaaauacggcuguugccaaguguaacgaaaaacaugacgaggaguucugcgauaugcugcgccuuuuugacuucaauaagcaggcgaucagacggcugaaaaccgaagcccagaugagcauucagcucaucaacaaggcugugaaugcccugauuaacgaucaacuuaucaugaagaaucaucugcgcgacauuaugggcaucccuuauugcaacuacucuaaauauugguaccucaaucacacagucaccgggaagacaucccugcccagauguuggcuggugagcaacggaucuuaccucaaugaaacccacuucagcgacgauaucgagcagcaggcugacaacaugauuacggagcugcuucaaaaagaauauauggaucggcagggcaagacaccucuggggcucguggaccuguuugucuucuccaccucuuuuuaccugaucagcauuuuccuucaccucaucaaaauuccguga

SEQ ID NO: 41742 - RNA, 1359 nt, Artificial Sequence
  derived and/or modified CDS sequence (opt5) from LASV(ISTH2010-NIG-2012;Clade II)__AIT17482__GPCmut13
augggccagaucauuaccuucuuucaagaggugccccacgucaucgaagagguuaugaacauugugcugaucgcccucagccugcuugcuauucugaaggggaucuacaauguggccacaugcggacucuucggccuggucuccuuucuucugcucugugggagaucuugcagcacgaccuauaaaggaguguacgaacugcagacacuggagcucgacauggcgucccugaacaugaccaugccucuuucuuguacaaagaauaacagccaucacuauaucaugguuggcaaugaaaccgggcuggagcucacacugaccaacacguccauuaucaaucauaaauucugcaaccuuucugaugcucacaagaaaaaucuguacgaccaugcccucaugagcauuaucuccaccuuucaccugagcauuccgaacuucaaucaguaugaggccaugucuugugauuuuaacggaggcaagaucuccgugcaguacaaucugagccacgcuuaugccgucgacgcugccaaccauugcggcacaauugcgaauggggugcuccaaaccuucaugcggauggccuggggaggcucuuacaucgcucuggauuccgggaagggaagcugggacuguaucaugacaucuuaccaguaucuuauuauccagaacauuaccugggaagaucacugccaguuuucccgccccagcccuaucggcuaccuggggcuccugucccaaagaacgcgggacauuuauaucucucgcagacuucugggaacauucaccuggacacucagcgauuccgagggcaacgaaacccccggcggguacugucugacccgguggaugcugaucgaggccgagcucaaaugcuuuggaaauacagcuguugccaaguguaacgaaaaacaugacgaggaguucugcgauaugcugcgccuuuuugacuucaauaagcaggcgauuagacggcugaaaacggaagcccagaugagcauccagcucauuaacaaggcugugaaugcccugaucaacgaucaacuuauuaugaagaaucaucugcgcgacaucaugggcaucccuuauugcaacuacucuaaauauugguaccucaaucacaccgucacagggaagaccucccugcccagauguuggcuggugagcaacggaucuuaccucaaugaaacacacuucagcgacgauauugagcagcaggcugacaacaugaucaccgagcugcuucaaaaagaauauauugaucggcagggcaagacgccucuggggcucguggaccuguuugucuucuccacaucuuuuuaccugaucagcauuuuccuucaccucguuaaaaucccguga

SEQ ID NO: 41743 - RNA, 1359 nt, Artificial Sequence
  derived and/or modified CDS sequence (opt5) from LASV(Lassa virus/H.sapiens-wt/NGA/2015/ISTH_0543;Clade II)__AVO03639__GPCmut13
augggccagaucauuaccuucuuucaagaggugccccacgucaucgaagagguuaugaacauugugcugaucgcccucagccugcuugcuauucugaaggggaucuacaauguggccacaugcggacucuucggccuggucuccuuucuucugcucugugggagaucuugcagcacgaccuauaaaggaguguacgaacugcagacacuggagcucgacauggcgaaccugaauaugaccaugccucuuuccuguacaaagaacaauucucaucacuauaucaugguuggcaacgaaaccgggcuggagcucacacugaccaauacgagcauuaucaaccauaaauucugcaaucuuuccgaugcucacaagaaaaaccuguacgaccaugcccucaugucuauuaucagcaccuuucaccuguccauuccgaauuucaaccaguaugaggccaugagcugugauuuuaauggaggcaagaucucugugcaguacaaccugucccacacauaugcugucgacgccgcuaaucauugcggcaccauugccaacggggugcuccaaacauucaugcggauggcguggggaggcagcuacaucgcccuggauucugggaagggauccugggacuguaucaugaccagcuaccaguaucuuguuauucagaacacgacaugggaagaucacugccaguuuucucgccccuccccuaucggcuaccuggggcuccugagccaaagaacccgggacauuuauaucucccgcagacuucugggaacauucaccuggacccucucugauagcgagggcaaugaaacacccggcggguacugucugacgcgguggaugcugauugaggcugagcucaaaugcuuuggaaacaccgccguggcuaaguguaaugaaaaacaugacgaggaguucugcgauaugcugcgccuuuuugacuucaacaagcaggccaucagacggcugaaaacagaagcgcagauguccauccagcucauuaauaaggccgucaacgcucugaucaaugaucaacuuauuaugaagaaccaucugcgcgacaucaugggcauuccuuauugcaauuacagcaaauauugguaccucaaccacaccgugacagggaagaccucucugcccagauguuggcugguguccaauggaagcuaccucaacgaaacgcacuucucugacgauaucgagcagcaggccgacaauaugaucacagagcugcuucaaaaagaauauauugaucggcagggcaagaccccucuggggcucgucgaccuguuuguuuucagcaccuccuuuuaccugaucucuauuuuccuucaccucgugaaaaucccguga

SEQ ID NO: 41744 - RNA, 1359 nt, Artificial Sequence
  derived and/or modified CDS sequence (opt5) from LASV(Lassa virus/H.sapiens-wt/NGA/2016/ISTH_0009;Clade II)__AVO03571__GPCmut13
augggccagaucauuaccuucuuucaagaggugccccacgucaucgaagagguuaugaacauugugcugaucgcccucagccugcuugcuauucugaaggggaucuacaauguggccacaugcggacuccugggccuugucuccuuccugcuccugugugggagaucuugcagcacgaccuauaaaggaguguacgaacugcagacacucgagcuggacauggcgucccuuaacaugaccaugccucugucuuguacaaagaauaacagccaucacuauaucaugguuggcaaugaaaccgggcucgagcugacacuuaccaacacguccauuaucaaucauaaauuuugcaaccugucugaugcucacaagaaaaaucucuacgaccaugcccugaugagcauuaucuccaccuuccaccugagcauuccgaacuuuaaucaguaugaggccaugucuugugauuucaacggaggccggaucuccgugcaguacaaucucagccacucuuaugcugucgacgccgcuaaccauugcggcacaauugccaauggggugcugcaaaccuuuaugcgcauggcguggggaggcuccuacaucgcccuugauagcgggaagggaucuugggacuguaucaugacauccuaccaguaucugauuauccagaacaccacgugggaagaucacugccaguucagcagacccuccccuauuggcuaccucgggcugcuuucucaacggacacgcgacaucuauauuagcagacggcugcucggaaccuuuacauggacccuguccgauagcgagggcaacgaaacccccggcggguacugucugacacgcuggaugcucaucgaggcugagcugaagugcuucggaaauacggccguugcuaaauguaacgaaaagcaugacgaggaauuuugcgauaugcuuagacuguucgacuuuaauaaacaggccauccggcgccucaagaccgaggcgcagaugucuauucagcugaucaacaaagccgugaaugcucuuauuaacgaucaacugaucaugaagaaucaccucagagacauuaugggcaucccuuauugcaacuacuccaaguauugguaccugaaucacacagucaccgggaaaacaagccugccccgguguuggcucgugucuaacggaagcuaccugaaugaaacccauuucuccgacgauaucgagcagcaggccgacaacaugauuacggagcuucugcaaaaggaauauaucgaucgccagggcaaaacaccucucgggcugguggaccuguucgucuuuucuaccagcuucuaccuuauuuccaucuuucuccaccugguuaagauuccguga

SEQ ID NO: 41745 - RNA, 1359 nt, Artificial Sequence
  derived and/or modified CDS sequence (opt5) from LASV(Lassa virus/H.sapiens-wt/NGA/2016/ISTH_0017;Clade II)__AVO03567__GPCmut13
augggccagaucauuaccuucuuucaagaggugccccacgucaucgaagagguuaugaacauugugcugaucgcccucagccugcuugcuauucugaaggggaucuacaauguggccacaugcggacucuucggccuggucuccuuucuucugcucugugggagaucuugcagcacgaccuauaaaggaguguacgaacugcagacacuggagcucgacauggcgucccugaacaugaccaugccucuuucuuguacaaagaauaacagccaucacuauaucaugguuggcaaugaaaccgggcuggagcucacacugaccaacacguccauuaucaaucauaaauucugcaaccuuucugaugcucacaagaaaaaucuguacgaccaugcccucaugagcauuaucuccaccuuucaccugagcauuccgaacuucaaucaguaugaggccaugucuugugauuuuaacggaggcaagaucuccgugcaguacaaucugagccacacauaugcuauugacgccgcuaaccauugcggcaccaucgccaaugggguccuccaaacauucaugcggauggcguggggaggcucuuacaucgcccuggauuccgggaagggaagcugggacuguauuaugaccucuuaccaguaucuuaucauucagaacacgacaugggaagaucacugccaguuuucccgccccagcccuaucggcuaccuggggcuccugucccaaagaacccgggacauuuauaucucucgcagacuucugggaacauucaccuggacccucagcgauuccgagggcaacgaaacacccggcggguacugucugacgcgguggaugcugaucgaggcugagcucaaaugcuuuggaaauaccgccguggcuaaguguaacgaaaaacaugacgaggaguucugcgauaugcugcgccuuuuugacuucaauaagcaggccauuagacggcugaaaacagaagcgcagaugagcauccagcucauuaacaaggccguuaaugcucugaucaacgaucaacuuauuaugaagaaucaucugcgcgacaucaugggcaucccuuauugcaacuacucuaaauauugguaccucaaucacaccgugacagggaagaccucccugcccagauguuggcuggucagcaacggaucuuaccucaaugaaacgcacuucagcgacgauauugagcagcaggccgacaacaugaucacagagcugcuucaaaaagaauauauggaucggcagggcaagaccccucuggggcucguggaccuguuuguguucuccaccucuuuuuaccugauuagcaucuuccuucaccucguccgcauuccguga

SEQ ID NO: 41746 - RNA, 1359 nt, Artificial Sequence
  derived and/or modified CDS sequence (opt5) from LASV(Lassa virus/H.sapiens-wt/NGA/2018/ISTH_0959;Clade II)__AVV65099__GPCmut13
augggccagaucauuaccuucuuucaagaggugccccacgucaucgaagagguuaugaacauugugcugaucgcccucagccugcuugcuauucugaaggggaucuacaauguggucacaugcggacucuucggccugguguccuuucuucugcucugugggagaucuugcagcacgaccuauaaaggaguuuacgaacugcagacacuggagcucgacauggccucccugaacaugaccaugccucuuucuuguacaaagaauaacagccaucacuauaucauggugggcaaugaaaccgggcuggagcucacacugaccaacacguccauuaucaaucauaaauucugcaaccuuucugaugcgcacaagaaaaaucuguacgaccaugcucucaugagcauuaucuccaccuuucaccugagcauuccgaacuucaaucaguaugaggccaugucuugugauuuuaacggaggcaagaucuccguccaguacaaucugagccacgccuaugcuauugacgccgcuaaccauugcggcacaaucgccaauggggugcuccaaaccuucaugcggauggcguggggaggcucuuacaucgcccuggauuccgggaagggaagcugggacuguauuaugacaucuuaccaguaucuuaucauucagaacaccacgugggaagaucacugccaguuuucccgccccagcccuaucggcuaccuggggcuccugucccaaagaacacgggacauuuauaucucucgcagacuucugggaaccuucacauggacccucagcgauuccgagggcaacgaaacccccggcggguacugucugacacgguggaugcugaucgaggcugagcucaaaugcuuuggaaauacggccguugcuaaguguaacgaaaaacaugacgaggaguucugcgauaugcugcgccuuuuugacuucaauaagcaggccauuagacggcugaaaaccgaagcgcagaugagcauccagcucauuaacaaggccgugaaugcucugaucaacgaucaacuuauuaugaagaaucaucugcgcgacaucaugggcaucccuuauugcaacuacucuaaauauugguaccucaaucacacagucaccgggaagacaucccugcccagauguuggcuggugagcaacggaucuuaccucaaugaaacccacuucagcgacgauauugagcagcaggccgacaacaugaucacggagcugcuucaaaaagaauauauugaucggcagggcaagacaccucuggggcucguggaccuguuugucuucuccaccucuuuuuaccugaucagcauuuuccuucaccucguuaaaaucccguga

SEQ ID NO: 41747 - RNA, 1359 nt, Artificial Sequence
  derived and/or modified CDS sequence (opt5) from LASV(LASV003-NIG-2008;Clade II)__AIT17580__GPCmut13
augggccagaucauuaccuucuuucaagaggugccccacgucaucgaagagguuaugaacauugugcugaucgcccucagccugcuugcuauucugaaggggaucuacaauguggccacaugcggacucuucggccuggucuccuuucuucugcucugugggagaucuugcagcacgaccuauaaaggaguguacgaacugcagacacuggagcucgacauggcgucccugaacaugaccaugccucuuucuuguacaaagaauaacagccaucacuauaucaugguuggcaaugaaaccgggcuggagcucacacugaccaacacguccauuaucaaucauaaauucugcaaccuuucugaugcucacaagaaaaaucuguacgaccaugcccucaugagcauuaucuccaccuuucaccugagcauuccgaacuucaaucaguaugaggccaugucuugugauuuuaacggaggcaagaucuccgugcaguacaaucugagccacacauaugcugucgacgccgcuaaccauugcggcaccauugccaauggggugcuccaaacauucaugcggauggcguggggaggcucuuacaucgcccuggauuccgggaagggaagcugggacuguaucaugaccucuuaccaguaucuuauuauccagaacacgacaugggaagaucacugccaguuuucccgccccagcccuauuggcuaccuggggcuccugucccaaagaacccgggacaucuauauuucucgcagacuucugggaacauucaccuggacccucagcgauuccgagagcaacgaaacacccggcggcuacugucugacgcgguggaugcugaucgaggcugagcucaaaugcuuugggaauaccgccguugcuaaguguaacgaaaaacaugacgaggaguucugcgauaugcugcgccuuuuugacuucaauaagcaggccaucagacggcugaaagcggaagcccagaugucuauucagcucaucaacaaggcugugaaugcccugauuaacgaucaacuuaucaugaagaaucaucugcgcgacauuaugggaaucccuuauugcaacuacuccaaauauugguaccucaaucacacagucaccggcagaacaagccugccccgguguuggcuggugucuaacgggagcuaccucaaugaaacccacuucuccgacgauaucgagcagcaggcugacaacaugauuacggagcugcuucaaaaggaauauauggaucgccagggaaaaacaccucugggccucguggaccuguuugucuucucuaccagcuuuuaccugaucuccauuuuccuucaccucguuaagaucccguga

SEQ ID NO: 41748 - RNA, 1359 nt, Artificial Sequence
  derived and/or modified CDS sequence (opt5) from LASV(LASV035-NIG-2009;Clade II)__AIT17588__GPCmut13
augggccagaucauuaccuucuuucaagaggugccccacgucaucgaagagguuaugaacauugugcugaucgcccucagccugcuugcuauucugaaggggaucuacaauguggccacaugcggacucuucggccuggucuccuuucuucugcucugugggagaucuugcagcacgaccuauaaaggaguguacgaacugcagacacuggagcucgacauggcgucccugaacaugaccaugccucuuucuuguacaaagaauaacagccaucacuauaucaugguuggcaaugaaaccgggcuggagcucacacugaccaacacguccauuaucaaucauaaauucugcaaccuuucugaugcucacaagaaaaaucuguacgaccaugcccucaugagcauuaucuccaccuuucaccugagcauuccgaacuucaaucaguaugaggccaugucuugugauuuuaacggaggcaagaucuccgugcaguacaaucugagccacgcuuaugccgucgacgcugccaaccauugcggcacaauugcgaauggggugcuccaaaccuucaugcggauggccuggggaggcucuuacaucgcucuggauuccgggaagggaagcugggacuguaucaugacaucuuaccaguaucuuauuauccagaacaccacgugggaagaucacugccaguuuucccgccccagcccuauuggcuaccuggggcuccugucccaaagaacacgggacaucuauauuucucgcagacuucugggaaccuucacauggacccucagcgauuccgagggcaacgaaacccccggcggguacugucugacacgguggaugcugaucgaggccgagcucaaaugcuuuggaaauacggcuguugccaaguguaacgaaaaacaugacgaggaguucugcgauaugcugcgccuuuuugacuucaauaagcaggcgaucagacggcugaaagccgaagcucagaugagcauucagcucaucaacaaggccgugaaugcucugauuaacgaucaacuuaucaugaagaaucaucugcgcgacauuaugggcaucccuuauugcaacuacucuaaauauugguaccucaaucacaccgucacagggaagaccucccugcccagauguuggcuggugagcaacggaucuuaccucaaugaaacacacuucagcgacgauaucgagcagcaggccgacaacaugauuaccgagcugcuucaaaaagaauauaucgaucggcagggcaagacgccucuggggcucguggaccuguuugucuucuccacaucuuuuuaccugauuagcaucuuccuucaccucguuaaaauuccguga

SEQ ID NO: 41749 - RNA, 1359 nt, Artificial Sequence
  derived and/or modified CDS sequence (opt5) from LASV(LASV1000-NIG-2009;Clade II)__AIT17782__GPCmut13
augggccagaucauuaccuucuuucaagaggugccccacgucaucgaagagguuaugaacauugugcugaucgcccucagccugcuugcuauucugaaggggaucuacaauguggccacaugcggacucuucggccuggucuccuuucuucugcucugugggagaucuugcagcacgaccuauaaaggaguguacgaacugcagacacuggagcucgacauggcgucccugaacaugaccaugccucuuucuuguacaaagaauaacagccaucacuauaucaugguuggcaaugaaaccgggcuggagcucacacugaccaacacguccauuaucaaucauaaauucugcaaccuuucugaugcucacaagaaaaaucuguacgaccaugcccucaugagcauuaucuccaccuuucaccugagcauuccgaacuucaaucaguaugaggccaugucuugugauuuuaacggaggcaagaucuccgugcaguacaaucugagccacacauaugcugucgacgccgcuaaccauugcggcaccauugccaauggggugcuccaaacauucaugcggauggcguggggaggcucuuacaucgcccuggauuccgggaagggaagcugggacuguaucaugaccucuuaccaguaucuuauuauccagaacacgacaugggaagaucacugccaguuuucccgccccagcccuauuggcuaccuggggcuccugucccaaagaacccgggacaucuauauuucucgcagacuucugggaacauucaccuggacccucagcgauuccgagggcaacgaaacacccggcggguacugucugacgcgguggaugcugaucgaggcugagcucaaaugcuuuggaaauaccgccguugcuaaguguaacgaaaaacaugacgaggaguucugcgauaugcugcgccuuuuugacuucaauaagcaggccaucaaaagacugaagacagaagcgcagaugagcauucagcucaucaacaaggccgugaaugcucugauuaacgaucaacuuaucaugaaaaaucaucugcgggacauuaugggcaucccuuauugcaacuacucuaaguauugguaccucaaucacaccgucacagggaaaaccucccugccccgcuguuggcuggugagcaacggaucuuaccucaaugaaacgcacuucagcgacgauaucgagcagcaggccgacaacaugauuacagagcugcuucaaaaggaauauaucgauagacagggcaaaaccccucuggggcucguggaccuguuugucuucuccaccucuuuuuaccugauuagcaucuuccuucaccucguuaagauuccguga

SEQ ID NO: 41750 - RNA, 1359 nt, Artificial Sequence
  derived and/or modified CDS sequence (opt5) from LASV(LASV221-NIG-2010;Clade II)__AIT17624__GPCmut13
augggccagaucauuaccuucuuucaagaggugccccacgucaucgaagagguuaugaacauugugcugaucgcccucagccugcuugcuauucugaaggggaucuacaauguggccacaugcggacucuucggccuggucuccuuucuucugcucugugggagaucuugcagcacgaccuauaaaggaguguacgaacugcagacacuggagcucgacauggcgucccugaacaugaccaugccucuuucuuguacaaagaauaacagccaucacuauaucaugguuggcaaugaaaccgggcuggagcucacacugaccaacacguccauuaucaaucauaaauucugcaaccuuucugaugcucacaagaaaaaucuguacgaccaugcccucaugagcauuaucuccaccuuucaccugagcauuccgaacuucaaucaguaugaggccaugucuugugauuuuaacggaggcaagaucuccgugcaguacaaucugagccacacauaugcuauugacgccgcuaaccauugcggcaccaucgccaaugggguccuccaaacauucaugcggauggcguggggaggcucuuacaucgcccuggauuccgggaagggaagcugggacuguauuaugaccucuuaccaguaucuuaucauucagaacacgacaugggaagaucacugccaguuuucccgccccagcccuaucggcuaccuggggcuccugucccaaagaacccgggacauuuauaucucucgcagacuucugggaacauucaccuggacccucagcgauuccgagggcaacgaaacacccggcggguacugucugacgcgguggaugcugaucgaggcugagcucaaaugcuuuggaaauaccgccguggcuaaguguaacgaaaaacaugacgaggaguucugcgauaugcugcgccuuuuugacuucaauaagcaggccauuagacggcugaaaacagaagcgcagaugagcauccagcucauuaacaaggccguuaaugcucugaucaacgaucaacuuauuaugaagaaucaucugcgcgacaucaugggcaucccuuauugcaacuacucuaaauauugguaccucaaucacaccgugacagggaagaccucccugcccagauguuggcuggucagcaacggaucuuaccucaaugaaacgcacuucagcgacgauauugagcagcaggccgacaacaugaucacagagaugcugcaaaaagaauauauggaucggcagggcaagaccccucuugggcugguggaccucuuuguguucuccaccucuuuuuaccugauuagcaucuuccugcaccuugucaaaauuccguga

SEQ ID NO: 41751 - RNA, 1359 nt, Artificial Sequence
  derived and/or modified CDS sequence (opt5) from LASV(LASV237-NIG-2010;Clade II)__AIT17638__GPCmut13
augggccagaucauuaccuucuuucaagaggugccccacgucaucgaagagguuaugaacauugugcugaucgcccucagccugcuugcuauucugaaggggaucuacaauguggccacaugcggacucuucggccuggucuccuuucuucugcucugugggagaucuugcagcacgaccuauaaaggaguguacgaacugcagacacuggagcucgacauggcgucccugaacaugaccaugccucuuucuuguacaaagaauaacagccaucacuauaucaugguuggcaaugaaaccgggcuggagcucacacugaccaacacguccauuaucaaucauaaauucugcaaccuuucugaugcucacaagaaagaccuguacgaucaugcccucaugagcauuaucuccaccuuucaccugagcauuccgaauuucaaccaguaugaggccaugucuugugacuuuaauggaggcaagaucuccgugcaguacaaccugagccacacauaugcugucgaugccgcuaaucauugcggcaccauugccaacggggugcuccaaacauucaugcggauggcguggggaggcucuuacaucgcccuggacuccgggaagggaagcugggauuguaucaugaccucuuaccaguaucuuauuauccagaauacgacaugggaagaccacugccaguuuucccgccccagcccuauuggcuaccuggggcuccugucccaaagaacccgggauaucuauauuucucgcagacuucugggaacauucaccuggacccucagcgacuccgagggcaacgaaacacccggcggguacugucugacgcgguggaugcugaucgaggcugagcucaaaugcuuuggaaacaccgccguugcuaaguguaaugaaaaacaugaugaggaguucugcgacaugcugcgccuuuuugauuucaacaagcaggccaucagacggcugaaaacagaagcgcagaugagcauucagcucaucaauaaggccgugaacgcucugauuaaugaccaacuuaucaugaagaaccaucugcgcgacauuaugggcaucccuuauugcaauuacucuaaauauugguaccucaaccacaccgucacagggaagaccucccugcccagauguuggcuggugagcaauggaucuuaccucaacgaaacgcacuucagcgaugacaucgagcagcaggccgauaauaugauuacagagcugcuucaaaaagaauauauggaccggcagggcaagaccccucuggggcucguggaucuguuugucuucuccaccucuuuuuaccugaucagcauuuuccuucaccucaucaaaauuccguga

SEQ ID NO: 41752 - RNA, 1359 nt, Artificial Sequence
  derived and/or modified CDS sequence (opt5) from LASV(LASV253-NIG-2011;Clade II)__AIT17670__GPCmut13
augggccagaucauuaccuucuuucaagaggugccccacgucaucgaagagguuaugaacauugugcugaucgcccucagccugcuugcuauucugaaggggaucuacaauguggccacaugcggacucuucggccuggucuccuuucuucugcucugugggagaucuugcagcacgaccuauaaaggaguguacgaacugcagacacuggagcucgacauggcgucccugaacaugaccaugccucuuucuuguacaaagaauaacagccaucacuauaucaugguuggcaaugaaaccgggcuggagcucacacugaccaacacguccauuaucaaucauaaauucugcaaccuuucugaugcucacaagaaaaaucuguacgaccaugcccucaugagcauuaucuccaccuuucaccugagcauuccgaacuucaaucaguaugaggccaugucuugugauuuuaacggaggcaagaucuccgugcaguacaaucugagccacacauaugcugucgacgccgcuaaccauugcggcaccauugccaauggggugcuccaaacauucaugcggauggcguggggaggcucuuacaucgcccuggauuccgggaagggaagcugggacuguaucaugaccucuuaccaguaucuuauuauccagaacacgacaugggaagaucacugccaguuuucccgccccagcccuauuggcuaccuggggcuccugucccaaagaacccgggacaucuauauuucucgcagacuucugggaacauucaccuggacccucagcgauuccgagggcaacgaaacacccggcggguacugucugacgcgguggaugcugaucgaggcugagcucaaaugcuuuggaaauaccgccguugcuaaguguaacgaaaaacaugacgaggaguucugcgauaugcugcgccuuuuugacuucaauaagcaggccaucagacggcugaaagcggaagcccagaugagcauucagcucaucaacaaggcugugaaugcccugauuaacgaucaacuuaucaugaagaaucaucugcgcgacauuaugggcaucccuuauugcaacuacucuaaauauugguaccucaaucacacagucaccgggagaacaucccugccccgguguuggcuggugagcaacggaucuuaccucaaugaaacccacuucagcgacgauaucgagcagcaggcugacaacaugauuacggagcugcuucaaaaggaauauaucgaucgccagggcaaaacaccucuggggcucguggaccuguuugucuucuccaccucuuuuuaccugauuagcaucuuccuucaccucguuaagauuccguga

SEQ ID NO: 41753 - RNA, 1359 nt, Artificial Sequence
  derived and/or modified CDS sequence (opt5) from LASV(LASV254-NIG-2011;Clade II)__AIT17674__GPCmut13
augggccagaucauuaccuucuuucaagaggugccccacgucaucgaagagguuaugaacauugugcugaucgcccucagccugcuugcuauucugaaggggaucuacaauguggccacaugcggacucuucggccuggucuccuuucuucugcucugugggagaucuugcagcacgaccuauaaaggaguguacgaacugcagacacuggagcucgacaugaccaaccugaauaugacaaugccucuuuccuguaccaagaacaauucucaucacuauaucaugguuggcaacgaaacagggcuggagcucacccugacgaauaccagcauuaucaaccauaaauucugcaaucuuuccgaugcgcacaagaaaaaccuguacaaucaugcucucaugucuauuaucagcacauuucaccuguccauuccgaacuucaaucaguaugaggccaugagcugugacuuuaacggaggcaagaucucugugcaguacaaucugucccacagcuaugccgucgaugcugccaaccauugcggcaccauugcuaacggggugcuccaaacauucaugcggauggccuggggaggcucuuacaucgcgcuggacuccgggaagggaaauugggauuguaucaugaccagcuaccaguaucuuauuauccagaacacgacaugggaagaccacugccaguuuucucgccccuccccuauuggcuaccuggggcuccugagccaaagaacccgggauaucuauauuucccgcagacuucugggaacauucaccuggacccucucugacagcgagggcaaugaaacacccggcggguacugucugacgcgguggaugcugaucgaggccgagcucaaaugcuuuggaaacaccgcuguugccaaguguaaugaaaaacaugaugaggaguucugcgacaugcugcgccuuuuugauuucaacaagcaggcuaucagacggcugaaaacagaagcccaggcgaauauucagcucaucaacaaggccgugaaugcucugauuaacgaccaacuuaucaugaagaaucaucugcgcgauauuaugggcaucccuuauugcaacuacuccaaauauugguaccucaaucacaccgucacagggaagaccagccugcccagauguuggcuggugucuaacggauccuaccucaaugaaacgcacuucagcgacgacaucgagcagcaggccgauaacaugauuacagagcugcuucaaaaagaauauauggaccggcagggcaagaccccucuggggcucguggaucuguuugucuucucuaccagcuuuuaccugaucuccauuuuccuucaccucguuaaaaucccguga

SEQ ID NO: 41754 - RNA, 1359 nt, Artificial Sequence
  derived and/or modified CDS sequence (opt5) from LASV(Nig08-A19;Clade III)__ADU56618__GPCmut13
augggccagaucgugaccuucuuucaagaggucccccacguuauugaagaggugaugaacaucgugcugauugcccucagcauccuggcuauucuuaaggggcuguacaauaucgccacaugcggacucaucggccuggucacguuccuucugcucuccgggagaucuuguagcaugaccuauaaaggaguguacgaacugcagacacuggagcucaacaugaauacccugaacaugacaaugccucuuuccugcaccaagaauaacucucaucacuauauuaugguuggcaaugaaacagggcuggagcucacccugacgaacaccagccuucugcaucacaaauuuuguaaucucuccgacgcgcauaagaaaaaccuguacgaucacacacugaugucuaucauuagcaccuuccaccucuccaucccgaauuuuaaccaguaugaggcuaugagcugcgacuucaauggaggcaagauuacagugcaguacaaccugucucauuccuaugccaucgaugccgcuaaucacuguggcaccgucgccaacggggugcuucaaacguuuaugcggauggcuuggggaggcagcuacauugcccuggacucugggcgcggaaagugggauugcaucaugacauccuaccaguaucucaucauucagaacaccacaugggaagaccauugucaguucagcagacccucuccuaucggcuaccuggggcuucugucccaacggacccgcgauauuuauaucagcagacggcuccugggaaccuuuacauggacgcuguccgacucugagggcaaugaaacccccggcggguacugccucacacgcuggaugcugauugaggcggagcuuaaauguuucggaaacaccgccguugcuaagugcaaugaaaaacacgaugaggaauuuugugacaugcugagacucuucgauuuuaacaagcaggccauccggcgccugaaagcugaggcccagaugagcauccagcuuauuaauaaggcggugaacgcccugaucaaugaccaacucauuaugaagaaccaccugagagauaucaugggcauuccuuauugcaauuacuccaaauauugguaccugaaccauacaagcaccgggcggacgucucucccccgcugcuggcuggucuccaauggaagcuaccuuaacgaaacacacuucucugacgacaucgagcagcaggcugauaauaugaucaccgagaugcugcaaaaggaauaucucgacagacagggcaaaaccccucuggggcugguggaucuuuucguguuuagcacauccuucuaccucauuucuaucuuucugcaucuggucaagauuccguga

SEQ ID NO: 41755 - RNA, 1362 nt, Artificial Sequence
  derived and/or modified CDS sequence (opt5) from LASV(G1180-SLE-2010;Clade IV)__AIT17168__GPCmut13
augggccagaucgugaccuucuuucaagaggucccccacguuauugaagaggugaugaacaucgugcugauugcccucagcauccuggcuguccuuaaggggcuguacaauuucgccacaugcggacucgugggccugcuuacguuucugcuccugugugggagauccugcaccgcgucucgguauaaaggaguuuacgaacugcagacacucgagcugaacauggaaacccuuaauaugacaaugccucugagcuguaccaagaacaauucccaucacuauauuauggugggcaacgagacagggcucgagcugacccuuacgaauaccucuaucaucaaccauaaauucugcaaucugagcgacgcucacaagaaaaaccucuacgaucaugcccugauguccauuaucucuacauuucaccugagcauuccgaauuucaaccaguaugaagccauguccugugacuuuaauggaggcaagaucagcguccaguacaaccucucucacuccuaugcuggcgaugccgcuaaucauugcgggaccguggccaacggaguucugcaaacauucaugcgcauggcguggggcgggagcuacauugcccuugacucuggacacggcuccugggauuguaucaugaccagcuaccaguaucugauuauccagaacacgacaugggaggaccauugccaguuuucuagacccuccccuaucggguaccucggacugcuuagccaacggacccgcgauauuuauaucuccagacggcugcucggcacauucaccuggacccugucugacagcgaaggcaaggauacacccgggggauacugucugacgcgcuggaugcucauugaggcugagcugaaaugcuuuggcaauaccgccguggcuaaguguaacgaaaaacacgacgaggaguucugcgauaugcuuagacuguuugacuucaauaagcaggccauccagcggcucaaagcggaagcccagauguccauucaacugaucaacaaggcugucaaugcccuuaucaacgaucagcugauuaugaagaaucaccuccgcgacaucauggggauuccuuauugcaacuacagcaaauauugguaccugaaucauacaaccacaggaaagaccucucugcccaaauguuggcucguguccaacggcagcuaccugaaugaaacgcacuucucugacgauaucgagcagcaagcugacaacaugauuacagagaugcuucagaaggaauauauggagagacaggggaaaaccccucugggacucguggaucuguuugucuucagcaccuccuuuuaccugaucucuaucuuccuucaucucguuaagauuccguga

SEQ ID NO: 41756 - RNA, 1362 nt, Artificial Sequence
  derived and/or modified CDS sequence (opt5) from LASV(G1442-SLE-2011;Clade IV)__AIT17180__GPCmut13
augggccagaucgugaccuucuuucaagaggucccccacguuauugaagaggugaugaacaucgugcugauugcccucagcauccuggcuguccuuaaggggcuguacaauguggccacaugcggacucauuggccugguuacguuccuucugcucugugggagauccugcaccacaacccuguauaaaggaguguacgaacugcagacacucgagcugaacauggaaacccuuaauaugacaaugccucugucuuguaccaagaacaauagccaucacuauauccgggucggcaacgagacggggcucgagcugacccuuacaaauaccuccaucauuaaccauaaauuuugcaaucugucugacgcgcacaagaaaaaccucuacgaucaugcucugaugagcaucauuuccacauuccaccugucuaucccgaauuuuaaccaguaugaagccaugagcugugacuucaauggaggcaagauuuccgugcaguacaaccucagccacucuuaugccggcgaugcugccaaucauugcgggaccguugcuaacggagugcugcaaacguuuaugcgcauggccuggggcggguccuacaucgcgcuugacagcggaagaggcaacugggauuguauuaugacaucuuaccaguaucugaucauccagaauaccacaugggacgaucacugccaguucucccggcccagcccuauuggguaccucggacugcuuucucaacgcaccagagacgucuauaucucccggcgccugcucggcaccuuuacauggacgcugagcgauuccgagggcaaggacacccccgggggauacugucugacaagauggaugcucauugaagccgagcugaaaugcuucggcaacaccgcuguggccaaguguaaugagaaacaugaugaagaguuuugcgacaugcuucggcuguucgauuuuaacaagcaggcuauccagcgccucaaagccgaagcgcagaugucuauucaacugaucaauaaggccgugaacgcucuuaucaaugaccagcugauuaugaagaaccaccucagagacaucauggggauuccuuauugcaauuacagcaaauauugguaccugaacaauacagccaccggaaagacgucccugcccaaauguuggcucaucagcaacggcucuuaccugaaugagacacacuucuccgaugacauugaacaggaggcugauaacaugaucaccgagaugcuucaaaaggaauauauggagcggcaggggaaaaccccucugggacucgucgaccuguucguuuuuagcacaucuuucuaccugaucagcauuuuucuucaucucgugaagaucccguga

SEQ ID NO: 41757 - RNA, 1362 nt, Artificial Sequence
  derived and/or modified CDS sequence (opt5) from LASV(G3010-SLE-2013;Clade IV)__AIT17344__GPCmut13
augggccagaucgugaccuucuuucaagaggucccccacguuauugaagaggugaugaacaucgugcugauugcccucagcauccuggcuguccuuaaggggcuguacaauuucgccacaugcggacucgugggccugguuacguuucuucugcucugugggagauccugcaccacaucucuguauaaaggaguguacgaacugcagacccucgagcugaacauggaaacacuuaauaugaccaugccucugagcuguacaaagaacaauucccaucacuauauuauggucggcaacgagaccgggcucgagcugacgcuuaccaauacaucuaucaucaaccauaaauucugcaaucugagcgacgcgcacaagaaaaaccucuacaaucaugcucugauguccauuaucucuaccuuucaccugagcauuccgaacuucaaucaguaugaagccauguccugugauuuuaacggaggcaagaucagcgugcaguacaaucucucucacuccuaugccggcgacgcugccagccauugcgggacaguugcuaacggagugcugcaaaccuucaugcggauggccuggggcgggucuuacauugcgcuugauuccggauacggcaagugggacuguaucaugacgagcuaucaguaccugauuauccagaacacaaccugggaggaucacugccaguuuucucgccccuccccuaucggguaucucggacugcuuagccaaagaacacgggacauuuacaucucccgcagacugcucggcaccuucaccuggacacugucugauagcgaaggcaaagacacgcccgggggauauugucugacccgguggaugcucauugaggccgagcugaagugcuuuggcaauacagcugucgccaaauguaacgaaaagcaugaugaggaguucugcgacaugcuucgccuguuugauuucaauaaacaggcuauccagagacucaagaccgaagcccagauguccauucaacugaucaacaaggcggugaaugcccuuaucaacgaccagcugauuaugaaaaaucaccuccgggauaucauggggauuccuuacugcaacuauagcaaguacugguaccugaaucacacaaccacgggaaaaacaucucugcccaaguguuggcucguguccaacggcagcuaucugaaugaaacccauuucucugacgacaucgagcagcaagcugauaacaugauuaccgagaugcuucagaaagaauacauggagcgccaggggaagacaccucugggacucgucgaccuguuuguuuucagcaccuccuuuuaucugaucucuaucuuccuucaccucgugaaaauuccguga

SEQ ID NO: 41758 - RNA, 1362 nt, Artificial Sequence
  derived and/or modified CDS sequence (opt5) from LASV(G502-SLE-2009;Clade IV)__AIT17126__GPCmut13
augggccagaucgugaccuucuuucaagaggucccccacguuauugaagaggugaugaacaucgugcugauugcccucagcauccuggcuguccuuaaggggcuguacaauuucgccacaugcggacucgugggccugcuuacguuucugcuccugugugggagauccugcaccacaggacuguauaaaggcguuuacgaacuccagacccuggagcuuaacauggaaacacugaauaugaccaugccucucucuuguacaaagaacaauagccaucacuauauuaugguggggaacgagaccggacuggagcuuacgcugaccaauacauccaucaucaaccauaaauucugcaaucucucugacgcgcacaagaaaaaccuguacgaucaugcucugaugagcauuaucuccaccuuucaccucucuauuccgaauuucaaccaguaugaagccaugagcugugacuuuaauggcggcaagaucuccguccaguacaaccugagccacucuuaugccggggaugcugccgaccauugcggaacaguggcuaauggcguucuucaaaccuucaugcggauggccuggggaggguccuacauugcgcuggauagcggccgcgggagaugggacuguaucaugacgucuuaccaguaucucauuauccagaacacaaccugggaggaucacugccaguuuucccggcccagcccuaucggauaccugggccuucugucucaacgcacaagagacauuuauaucucccggcgccuccugggcaccuucaccuggacacugagcgauuccgaagggaaggacacgcccggaggcuacugucucaccagauggaugcugauugaggccgagcuuaaaugcuuugggaacacagcuguggccaaguguaaugaaaaacaugaugaggaguucugcgacaugcugcggcucuuugauuucaacaagcaggcuauccagcgccugaaagccgaagcgcagaugucuauucaacuuaucaauaaggccgucaacgcucugaucaaugaccagcucgugaugaagaaccaccugagagacauuaugggaaucccuuauugcaauuacagccgguauugguaccugaaccacaccacaaccggccgcacgucccuccccaaauguuggcuggugagcaaugggucuuaccuuaacgaaacacauuucuccgaugacauugagcagcaagccgauaauaugaucaccgagaugcugcagaaggaauauauggagagacagggaaaaaccccucucggccuggucgaccuguuuguuuucagcacaucuuuuuaccuuauuagcaucuuccuccaccuggugaagaucccguga

SEQ ID NO: 41759 - RNA, 1362 nt, Artificial Sequence
  derived and/or modified CDS sequence (opt5) from LASV(G733-SLE-2010;Clade IV)__AIT17154__GPCmut13
augggccagaucgugaccuucuuucaagaggucccccacguuauugaagaggugaugaacaucgugcugauugcccucagcauccuggcuguccuuaaggggcuguacaauuucgccacaugcggaauugugggccucguuuccuuucugcuucugugugggagaucuugcacgaccagccucuauaaaggaguguacgaacugcagacacuggagcucaacauggaaacccugaauaugacaaugccucuuuccuguaccaagaacaauucucaucacuauaucauggucggcaacgagacagggcuggagcucacccugacgaauaccagcaucauuaaccauaaauucugcaaucuuuccgacgcgcacaagaaaaaccuguacgaucaugcucucaugucuaucauuagcacauuucaccuguccaucccgaauuucaaccaguaugaagccaugagcugugacuuuaauggaggcaagauuucugugcaguacaaccugucccacagcuaugccggcgaugcugccaaucauugcgggaccaucgcuaacggaguucuccaaacauucaugcggauggccuggggcgggucuuacauugcgcuggacuccggacgcgauagaugggacuguaucaugaccagcuaccaguaucuuaucauucagaacacgacaugggaggaucacugccaguuuucucggcccuccccuaucggcuaccuggggcuccugagccaacgcaccagagacauuuauaucucccggcgccuucugggaacauucaccuggacccucucugauagcgaaggcaaggacacacccggcggguacugucugacgagauggaugcugauugaggccgagcucaaaugcuuuggaaauaccgcuguggccaaguguaacgaaaaacaugaugaggaguucugcgacaugcugcggcuuuuugauuucaauaagcaggcuauccagcgccugaaagccgaagcgcagauguccauccaacucauuaacaaggccgucaaugcucugaucaacgaccagcuuauuaugaagaaucaccugagagacaucaugggcauuccuuauugcaacuacagcaaauauugguaccucaaucacacaaccacagggaagaccucucugcccaaauguuggcugguguccaacggaagcuaccucaaugaaacgcauuucucugaugacaucgagcagcaagccgauaacaugaucacagagaugcugcagaaggaauauauggagcggcagggcaaaaccccucuugggcugguggaccucuuugucuucagcaccuccuuuuaccugauuucuaucuuccugcaccuuguuaagauuccguga

SEQ ID NO: 41760 - RNA, 1362 nt, Artificial Sequence
  derived and/or modified CDS sequence (opt5) from MOPV/LASV reassortant(IGS-1;Clade IV)__AFY05576__GPCmut13
augggccagaucgugaccuucuuucaagaggucccccacguuauugaagaggugaugaacaucgugcugauugcccucagcguccuggcugugcuuaaggggcuguacaauuucgccacaugcggacucguuggccuggugacguuucuucugcucugugggagauccugcaccacaucucuguauaaaggagucuacgaacugcagacccucgagcugaacauggaaacacuuaauaugaccaugccucugagcuguacaaagaacaauucccaucacuauaucauggugggcaacgagaccgggcucgagcugacgcuuaccaauacaucuauuaucaaccauaaauucugcaaucugagcgacgcgcacaagaaaaaccucuacgaucaugcucugauguccaucauuucuaccuuucaccugagcaucccgaauuucaaccaguaugaagccauguccugugacuuuaauggaggcaagauuagcguucaguacaaccucucucacuccuaugccggcgaugcugccaaucauugcgggacaguggcuaacggaguccugcaaaccuucaugcggauggccuggggcgggagcuacaucgcgcuugacucuggacgcggcaacugggauuguauuaugacguccuaccaguaucugaucauucagaauacaaccugggaggaccacugccaguuuagcagacccucuccuaucggguaccucggacugcuuucccaacggacacgcgauaucuauauuagcagacggcugcucggcaccuucaccuggacacuguccgacucugaaggcgaggauacgcccgggggauacugucugacccgcuggaugcucaucgaggccgaacugaagugcuuuggcaacacagcuguggccaaauguaaugagaagcaugacgaagaguucugcgauaugcuuagacuguuugacuucaacaaacaggcuauucagcggcucaaggccgaagcgcagaugagcauccaacugauuaauaaagccgugaacgcucuuaucaaugaucagcugaucaugaagaaccaccuccgcgacauuauggggaucccuuauugcaauuacuccaaguauugguaccugaaccacaccacaaccggaagaacgagccugcccaaauguuggcucgucucuaauggcuccuaccugaacgagacacauuucagcgacgauauugagcagcaagccgacaauaugaucaccgaaaugcuucagaaggaguauauggaacggcaggggaaaaccccucugggacucguugaucuguuuguguucucuaccagcuuuuaccugauuuccaucuuccuucaccucgugaagaucccguga

SEQ ID NO: 41761 - RNA, 1362 nt, Artificial Sequence
  derived and/or modified CDS sequence (opt5) from LASV(LM765-SLE-2012;Clade IV)__AIT17814__GPCmut13
augggccagaucgugaccuucuuucaagaggucccccacguuauugaagaggugaugaacaucgugcugauugcccucagcauccuggcuguccuuaaggggcuguacaauuucgccacaugcggacucgugggccugguuacguuucuucugcucugugggagauccugcaccacaucucuguauaaaggaguguacgaacugcagacccucgagcugaacauggaaacacuuaauaugaccaugccucugagcuguacaaagaacaauucccaucacuauauuauggucggcaacgagaccgggcucgagcugacgcuuaccaauacaucuaucaucgaccauaaauucugcaaccugagcgaugcgcaccggaagaaucucuacgaccaugcucugauguccauuaucucuaccuuucaccugagcauuccgaacuucaaucaguaugaagccauguccugugauuuuaacggaggcaaaaucagcgugcaguacaaucucucucacuccuaugccaaggacgcugccgaucauugcggcacaguugcuaacggggugcugcaaaccuucaugcgcauggccuggggaggcagcuacauugcgcuugacucugggagaggacggugggauuguaucaugacguccuaccaguaucugauuauccagaauacaaccugggaggaccacugccaguuuagccgccccucuccuaucggcuaccucgggcugcuuucccaaagaacacgggauauuuauaucagccgcagacugcucggaaccuucaccuggacacuguccgacucugaaggcaaggauacgcccggcggguacugucugacccgguggaugcucauugaggccgagcugaaaugcuuuggaaacacagcugucgccaaguguaacgaaaaacaugacgaggaguucugcgauaugcuucgccuguuugacuucaauaagcaggcuauccagagacucaaagccgaagcgcagaugagcauucaacugaucaacaaggccgugaaugcucuuaucaacgaccagcugauuaugaagaaucaccuccgggauaucaugggcauuccuuauugcaacuacuccaaauauugguaccugaaucacaccacaaccgggaagacgagccugcccaaauguuggcucgugucuaacggauccuaccugaaugaaacacauuucagcgacgauaucgagcagcaagccgacaacaugauuaccgagaugcuucagaaggaauauauggagcgccagggcaaaaccccucuggggcucgucgaucuguuuguuuucucuaccagcuuuuaccugaucuccaucuuccuucaccucgugaagauuccguga

SEQ ID NO: 41762 - RNA, 1362 nt, Artificial Sequence
  derived and/or modified CDS sequence (opt5) from LASV(LM776-SLE-2012;Clade IV)__AIT17824__GPCmut13
augggccagaucgugaccuucuuucaagaggucccccacguuauugaagaggugaugaacaucgugcugauugcccucagcauccuggcuguccuuaaggggcuguacaauuucgccacaugcggacucgugggccugguuacguuucuucugcucugugggagauccugcaccacaucuguguauaaaggagucuacgaacugcagacccuggagcucaacauggaaacacugaauaugaccaugccucuuagcuguacaaagaacaauucccaucacuauauuauggugggcaacgagaccgggcuggagcucacgcugaccaauacaucuaucaucaaccauaaauucugcaaucuuagcgacgcgcacaagaaaaaccuguacgaucaugcucucauguccauuaucucuaccuuucaccugagcauuccgaauuucaaccaguaugaagccauguccugugacuuuaauggaggcaagaucagcguucaguacaaccugucucacuccuaugccggcgaugcugccaaucauugcgggacaguggcuaacggaguccuccaaaccuucaugcggauggccuggggcgggagcuacauugcgcuggacucuggacacggcaagugggauuguaucaugacguccuaccaguaucuuauuauccagaacacaaccugggaggaccauugccaguuuagccgccccucuccuaucggguaccugggacuccugucccaaagaacacgggauauuuauaucagccgcagacuucugggcaccuucaccuggacacucuccgacucugaaggcaaagauacgcccgggggauacugucugacccgguggaugcugauugaggccgagcucaagugcuuuggcaauacagcuguggccaaauguaacgaaaagcacgacgaggaguucugcgauaugcugcgccuuuuugacuucaauaaacaggcuauccagagacugaaggccgaagcgcagaugagcauucaacucaucaacaaggccgugaaugcucugaucaacgaucagcuuauuaugaaaaaucaucugcgggacaucauggggauuccuuauugcaacuacuccaaguauugguaccucaaucacaccacaaccggaaaaacgagccugcccaaguguuggcuggucucuaacggcuccuaccucaaugaaacacacuucagcgacgauaucgagcagcaagccgacaacaugauuaccgagaugcugcagaaagaauauauggagcgccaggggaagaccccucuuggacugguugaucucuuuguguucucuaccagcuuuuaccugaucuccaucuuccugcaucuugugaaaauuccguga

SEQ ID NO: 41763 - RNA, 1362 nt, Artificial Sequence
  derived and/or modified CDS sequence (opt5) from LASV(Mad39;Clade IV)__ANH09722__GPCmut13
augggccagaucgugaccuucuuucaagaggucccccacguuauugaagaggugaugaacaucgugcugauugcccucagcauccuggcuguccuuaaggggcuguacaauguggccacaugcggacucauuggccugguuacguuccuucugcucugugggagauccugcaccacaacccuguauaaaggaguguacgaacugcaggcgcucgagcugaacauggaaacacuuaauaugaccaugccucugucuuguacaaagaacaauagccaucacuauauccgggucggcaacgagaccgggcucgagcugacgcuuaccaauacaucccugaucaaccauaaauuuugcaaucucucugacgcucacaagaaaaaccuguacgaucaugcccugaugagcauuaucuccaccuuccaccucucuauuccgaauuuuaaccaguaugaagccaugagcugugacuucaaugauggaaagaucuccgugcaguacaaccugagccacacauaugcuggcgacaccgccaaucauugcggcacgguugcuaacggggugcuucaaacauuuaugcgcauggccuggggaggcucuuacauugcgcuggauuccgggagaggaggcugggacuguaucaugaccagcuaccaguaucucauuauccagaacacaaccugggaggaucacugccaguucucucggcccuccccuaucggguaccugggacuucugagccaacgcaccagagacauuuauaucucucggcgccuccugggcacauuuacguggacccuguccgauagcgaaggcaaggacacacccgggggauacugucucaccagauggaugcugauugaggccgagcuuaaaugcuucggcaauacagcugucgccaaguguaacgaaaaacaugaugaggaauuuugcgacaugcugcgccucuucgauuuuaauaagcaggcuauccagcggcugaaagccgaggcgcagauguccauucaacuuaucaacaaggccgugaaugcucugaucaacgaccagcucauuaugaagaaucaccugagagacaucauggggauuccuuauugcaacuacucuaaauauugguaccugaaucacaccgugacgggaaagacaagccuccccaaauguuggcuggucuccaacggcagcuaccuuaaugaaacccauuucucugaugacaucgagcagcaagccgauaacaugauuaccgagaugcugcagaaggaauauauggagcggcaggggaaaacaccucucggacugguugaccuguucguguuuuccaccagcuucuaccuuaucucuaucuuucuccaccuggugaagauuccguga

SEQ ID NO: 41764 - RNA, 1362 nt, Artificial Sequence
  derived and/or modified CDS sequence (opt5) from LASV(Z0947-SLE-2011;Clade IV)__AIT17840__GPCmut13
augggccagaucgugaccuucuuucaagaggucccccacguuauugaagaggugaugaacaucgugcugauugcccucagcauccuggcuguccuuaaggggcuguacaauuucgccacaugcggacucgugggccugguuacguuucuucugcucugugggagauccugcaccauuucucuguauaaaggaguguacgaacugcagacacucgagcugaacauggaaacccuuaauaugacaaugccucugagcuguaccaagaacaauucccaucacuauaucauggucggcaacgagacagggcucgagcugacccuuacgaauaccucuaucauuaaccauaaauucugcaaucugagcgacgcgcacaagaaaaaccucuacgaucaugcucugauguccaucauuucuacauuucaccugagcaucccgaauuucaaccaguaugaagccauguccugugacuuuaauggaggcaagauuagcgugcaguacaaccucucucacuccuaugccggcgaugcugccaaucauugcgggaccguugcuaacggagugcugcaaacauucaugcggauggccuggggcgggagcuacaucgcgcuugacucuggacgcgauagaugggacuguauuaugaccuccuaccaguaucugaucauccagaacacgacaugggaggaucacugccaguuuagccggcccucuccuauuggcuaccucgggcugcuuucccaacgcaccagagacaucuauauuagccggcgccugcucggaacauucaccuggacccuguccgauucugaaggcaaggacacacccggcggguacugucugacgagauggaugcucaucgaggccgagcugaaaugcuuuggaaauaccgcugucgccaaguguaacgaaaaacaugaugaggaguucugcgacaugcuucggcuguuugauuucaauaagcaggcuauucagcgccucaaagccgaagcgcagaugagcauccaacugaucaacaaggccgugaaugcucuuauuaacgaccagcugaucaugaagaaucaccucagagacauuaugggcaucccuuauugcaacuacuccaaauauugguaccugaaucacacaaccacagggaagaccagccugcccaaauguuggcucgugucuaacggauccuaccugaaugaaacgcauuucagcgaugacauugagcagcaagccgauaacaugaucacagagaugcuucagaaggaauauauggagcggcagggcaaaaccccucuggggcucgucgaccuguuuguuuucucuaccagcuuuuaccugaucuccauuuuccuucaccucgugaagaucccguga

SEQ ID NO: 41765 - RNA, 1603 nt, Artificial Sequence
  mRNA product Design a-1 (hSL-A64-N5) comprising derived and/or modified sequence from LASV(Josiah;Clade IV)__NP_694870__GPCmut13 (opt1)
aggagagucccgcagucggcguccagcggcucugcuuguucgugugugugucguugcaggccuuauucaagcuuaccaugggccagaucgugaccuucuuccaggaggucccccacgugaucgaggaggugaugaacaucguccugaucgcccucagcgugcuggccgugcugaaggggcucuacaacuucgcgaccugcggccuggucgggcuggugacguuccuccugcugugcggccgcuccugcaccaccagccucuacaaggggguguacgagcugcagacccuggagcucaacauggagacgcugaacaugaccaugccgcuguccugcaccaagaacaacagccaccacuacaucauggucggcaacgagaccggccucgagcugacgcugaccaacaccuccaucaucaaccacaaguucugcaaccucagcgacgcccacaagaagaaccuguacgaccacgcccugauguccaucaucagcaccuuccaccucuccauccccaacuucaaccaguacgaggccaugagcugcgacuucaacgggggcaagaucuccgugcaguacaaccugagccacuccuacgccggggacgcggccaaccacugcggcacgguggccaacgggguccugcagaccuucaugcggauggccuggggcggcagcuacaucgcgcucgacuccgggcgcggcaacugggacugcaucaugaccagcuaccaguaccugaucauccagaacaccacgugggaggaccacugccaguucucccggcccagccccaucggguaccugggccuccugucccagcgcacccgggacaucuacaucagccgccggcugcucggcaccuucaccuggacgcugagcgacuccgaggggaaggacaccccgggcggguacugccugacccgcuggaugcucaucgaggccgagcugaagugcuucggcaacaccgccguggccaagugcaacgagaagcacgacgaggaguucugcgacaugcugcggcuguucgacuucaacaagcaggccauccagcgccugaaggcggaggcccagaugagcauccagcugaucaacaaggccgugaacgcccucaucaacgaccagcugaucaugaagaaccaccuccgggacaucauggggauccccuacugcaacuacuccaaguacugguaccucaaccacacgaccaccggccgcaccagccugcccaagugcuggcuggucuccaacggcagcuaccucaacgagacgcacuucuccgacgacaucgagcagcaggccgacaacaugaucaccgagaugcugcagaaggaguacauggagcggcaggggaagacgccccugggccucguggaccuguucguguucagcaccuccuucuaccugaucagcaucuuccugcaccucgucaagaucccgugaggacuagucccuguucccagagcccacuuuuuuuucuuuuuuugaaauaaaauagccugucuuucagaucucaaaggcucuuuucagagccaccaaaaaaaaaaaaaaaaaaaaaaaaaaaaaaaaaaaaaaaaaaaaaaaaaaaaaaaaaaaaaaaaagaauu

SEQ ID NO: 41766 - RNA, 1600 nt, Artificial Sequence
  mRNA product Design a-1 (hSL-A64-N5) comprising derived and/or modified sequence from LASV(LP;Clade I)__AAF86701__GPCmut13 (opt1)
aggagagucccgcagucggcguccagcggcucugcuuguucgugugugugucguugcaggccuuauucaagcuuaccaugggccagaucaucaccuucuuccaggaggugccccacgucaucgaggaggugaugaacaucgugcugaucgcccucagccugcuggccauccucaaggggcuguacaacaucgcgaccugcggcaucaucgggcuggucgccuuccucuuccugugcggcaaguccugcagccugacgcucaagggcggguacgagcugcagacccuggagcucaacauggagacccugaacaugaccaugccgcuguccugcacgaagaacagcucccaccacuacauccgcgugggcaacgagaccgggcucgagcugacccugaccaacacgagcaucaucaaccacaaguucugcaaccucuccgacgcccacaagaagaaccuguacgaccacgcccugaugagcaucaucuccaccuuccaccucagcauccccaacuucaaccaguacgaggccauguccugcgacuucaacggcgggaagaucagcgugcaguacaaccugucccacagcuacgcgggcgacgccgccgagcacugcgggaccgucgccaacggcgugcugcagaccuucaugcggauggcguggggcgggcgcuacaucgcccucgacuccggcaaggggaacugggacugcaucaugacgagcuaccaguaccugaucauccagaacaccaccugggaggaccacugccaguucucccggcccagccccaucggcuaccugggccuccugucccagcgcacccgggacaucuacaucagccgccggcugcucgggacguucaccuggacccugagcgacuccgagggcaacgagacccccgggggcuacugccugacgcgcuggaugcucaucgaggccgagcugaagugcuucgggaacaccgccguggccaagugcaacgagaagcacgacgaggaguucugcgacaugcugcggcuguucgacuucaacaagcaggcgauccgccggcugaaggccgaggcccagaugagcauccagcugaucaacaaggccgucaacgcccucaucaacgaccagcugaucaugaagaaccaccuccgcgacaucaugggcauccccuacugcaacuacuccaaguacugguaccucaaccacaccagcuccggccggaccagccugcccaagugcuggcugaucuccaacgggagcuaccucaacgagacgcaguucuccgacgacaucgagcagcaggcggacaacaugaucaccgagaugcugcagaaggaguacaucgagcgccagggcaagaccccgcuggggcucguggacaucuucaucuucagcaccuccuucuaccugaucagcaucuuccugcaccugaucaagaucccgugaggacuagucccuguucccagagcccacuuuuuuuucuuuuuuugaaauaaaauagccugucuuucagaucucaaaggcucuuuucagagccaccaaaaaaaaaaaaaaaaaaaaaaaaaaaaaaaaaaaaaaaaaaaaaaaaaaaaaaaaaaaaaaaaagaauu

SEQ ID NO: 41767 - RNA, 1600 nt, Artificial Sequence
  mRNA product Design a-1 (hSL-A64-N5) comprising derived and/or modified sequence from LASV(803213;Clade II)__AAF86703__GPCmut13 (opt1)
aggagagucccgcagucggcguccagcggcucugcuuguucgugugugugucguugcaggccuuauucaagcuuaccaugggccagaucaucaccuucuuccaggaggugccccacgucaucgaggaggugaugaacaucgugcugaucgcccucagccugcuggccauccucaaggggaucuacaacgucgcgaccugcggccuguucgggcugaucuccuuccuccugcugugcggccgcagcugcuccgugacguacaaggggguguacgagcuccagacccuggagcugaacauggccaaccucaacaugaccaugccgcugagcugcaccaagaacaacucccaccacuacaucauggucggcaacgagacgggccuggagcucacccugaccaacaccagcaucaucaaccacaaguucugcaaccuguccgacgcccacaagaagaaccucuacgaccacgcccugaugagcaucaucuccacguuccaccugagcauccccaacuucaaccaguacgaggccauguccugcgacuucaacgggggcaagaucagcgugcaguacaaccucucccacagcuucgcgguggacgccgccaaccacugcgggaccaucgccaacggcguccugcagaccuucaugcggauggcguggggcggguccuacaucgcccuggacagcggcaaggggaacugggacugcaucaugaccuccuaccaguaccucaucauccagaacacgaccugggaggaccacugccaguucagccgccccucccccaucggcuaccuggggcugcucagccagcggacccgcgacaucuacaucagccggcgccugcugggcaccuucacguggacccucuccgacagcgagggcaacgaggcccccgggggcuacugccugacccgguggaugcugaucgaggccgagcucaagugcuucgggaacaccgccguggcgaagugcaacgagaagcacgacgaggaguucugcgacaugcugcgccuguucgacuucaacaagcaggccaucaagcggcucaagacggaggcccagauguccauccagcugaucaacaaggccgugaacgcccugaucaacgaccagcucaucaugaagaaccaccuccgcgacaucaugggcauccccuacugcaacuacagccgguacugguaccugaaccacaccgucaccgggaagaccucccugccccgcugcuggcuggugagcaacggcuccuaccugaacgagacgcacuucagcgacgacaucgagcagcaggcggacaacaugaucaccgagaugcuccagaaggaguacauggaccggcagggcaagaccccgcuggggcugguggaccucuucgucuucuccaccagcuucuaccugaucuccaucuuccugcaccuggugaagaucccgugaggacuagucccuguucccagagcccacuuuuuuuucuuuuuuugaaauaaaauagccugucuuucagaucucaaaggcucuuuucagagccaccaaaaaaaaaaaaaaaaaaaaaaaaaaaaaaaaaaaaaaaaaaaaaaaaaaaaaaaaaaaaaaaaagaauu

SEQ ID NO: 41768 - RNA, 1600 nt, Artificial Sequence
  mRNA product Design a-1 (hSL-A64-N5) comprising derived and/or modified sequence from LASV(GA391;Clade III)__CAA36645__GPCmut13 (opt1)
aggagagucccgcagucggcguccagcggcucugcuuguucgugugugugucguugcaggccuuauucaagcuuaccaugggccagaucgugaccuucuuccaggaggucccccacgugaucgaggaggugaugaacaucguccugaucgcccucagcauccuggccauccugaaggggcucuacaacguggcgaccugcggccugaucgggcuggugacguuccuccugcuguccggccgcagcugcucccucaucuacaaggggaccuacgagcugcagacccuggagcucaacauggagacccugaacaugacgaugccgcugagcugcaccaagaacaacucccaccacuacauccgggucggcaacgagaccggccucgagcugacccugacgaacaccagcauccucaaccacaaguucugcaaccuguccgacgcccacaagcgcaaccuguacgaccacagccucauguccaucaucagcaccuuccaccuguccauccccaacuucaaccaguacgaggccaugagcugcgacuucaacgggggcaagaucaccgugcaguacaaccugucccacagcuucgccguggacgccgcggggcacugcggcacgcucgccaacgggguccugcagaccuucaugcggauggccuggggcggcuccuacaucgcccuggacagcgggcgcggcaacugggacugcaucaugaccuccuaccaguaccucaucauccagaacaccacgugggacgaccacugccaguucagccggcccucccccaucggguaccugggccugcucagccagcgcacccgggacaucuacaucagccgccggcugcugggcaccuucaccuggacgcucuccgacagcgaggggaacgagaccccgggcggguacugccugacccgcuggaugcugaucgaggcggagcucaagugcuucggcaacaccgccguggccaagugcaacgagaagcacgacgaggaguucugcgacaugcugcggcuguucgacuucaacaagcaggccauccgccggcucaagacggaggcccagauguccauccagcugaucaacaaggcggugaacgcccugaucaacgaccagcucaucaugaagaaccaccuccgcgacaucauggggauccccuacugcaacuacagccgguacugguaccugaaccacaccuccaccggcaagaccagccugccccgcugcuggcugaucuccaacggcagcuaccugaacgagacgaaguucuccgacgacaucgagcagcaggccgacaacaugaucaccgagaugcuccagaaggaguacaucgaccggcaggggaagacgccccugggccuggucgaccuguucguguucagcaccuccuucuaccucaucagcaucuuccugcaccuggugaagaucccgugaggacuagucccuguucccagagcccacuuuuuuuucuuuuuuugaaauaaaauagccugucuuucagaucucaaaggcucuuuucagagccaccaaaaaaaaaaaaaaaaaaaaaaaaaaaaaaaaaaaaaaaaaaaaaaaaaaaaaaaaaaaaaaaaagaauu

SEQ ID NO: 41769 - RNA, 1603 nt, Artificial Sequence
  mRNA product Design a-1 (hSL-A64-N5) comprising derived and/or modified sequence from LASV(AV;Clade V)__CCA30314__GPCmut13 (opt1)
aggagagucccgcagucggcguccagcggcucugcuuguucgugugugugucguugcaggccuuauucaagcuuaccaugggccagaucgugaccuucuuccaggaggucccccacgugaucgaggaggugaugaacaucguccugaucgcccucagcauccuggccgugcugaaggggcucuacaacaucgcgaccugcggccugaucgggcugaucacguuccuccugcugugcggccgcuccugcagcuccaaccucuacaaggggguguacgagcugcagagccuggaccucaacauggagacccugaacaugaccaugccgcuguccugcaccaagaacaacagccaccacuacauccgggucggcaacgacacgggccucgagcugacccugaccaacaccuccauccucaaccacaaguucugcaaccugagcgacgcccacaagaaggaccuguacgaccacgcccucauguccaucaucagcacguuccaccuguccauccccaacuucaaccaguacgaggccaugagcugcgacuucaacgggggcaagaucuccgugcaguacaaccugagccacuccuacgccaucgacgcggccaaccacugcgggaccguggccaacggcauccuccagaccuucaugcgcauggccuggggcgggagcuacaucgcgcuggacuccggccgggggaacugggacugcaucaugaccagcuaccaguaccugaucauccagaacacgaccugggagaaccacugccaguucucccgccccagccccaucggcuaccucgggcugcugagccagcggacccgcgacaucuacaucucccggcgccuccugggcaccuucacguggacccugagcgacuccgagggcaacgccacccccgggggcuacugccucacccgguggaugcugaucgaggccgagcugaagugcuucgggaacacggccgucgccaagugcaacgagaagcacgacgaggaguucugcgacaugcuccgccuguucgacuucaacaagcaggcgaucagccggcugaaguccgaggcccagaugagcauccagcucaucaacaaggccgugaacgcccugaucaacgaccagcugaucaugaagaaccaccuccgcgacaucaugggcauccccuacugcaacuacuccaaguacugguaccugaaccacaccaucaccgggaagaccagccugcccaagugcuggcucguguccaacggcagcuaccugaacgagacgcacuucuccgacgacaucgagcagcaggccgacaacaugaucaccgagaugcugcagaaggaguacauggagcggcagggcaagaccccgcucgggcuggucgaccuguucguguucagcaccuccuucuaccugaucagcaucuuccuccgccuggugaagaucccgugaggacuagucccuguucccagagcccacuuuuuuuucuuuuuuugaaauaaaauagccugucuuucagaucucaaaggcucuuuucagagccaccaaaaaaaaaaaaaaaaaaaaaaaaaaaaaaaaaaaaaaaaaaaaaaaaaaaaaaaaaaaaaaaaagaauu

SEQ ID NO: 41770 - RNA, 1600 nt, Artificial Sequence
  mRNA product Design a-1 (hSL-A64-N5) comprising derived and/or modified sequence from LASV(Togo/2016/7082;Clade VI)__AMR44577__GPCmut13 (opt1)
aggagagucccgcagucggcguccagcggcucugcuuguucgugugugugucguugcaggccuuauucaagcuuaccaugggccagaucaucaccuucuuccaggaggugccccacgucaucgaggaggugaugaacaucgugcugaucgcccucagccugcuggccauccucaagggggucuacaacguggcgaccugcggcaucaucgggcuggugacguuccuguuccucugcggccgcuccugcagccugaucuacaagggguccuacgagcugcagacccucgagcugaacauggagacccugaacaugaccaugccgcucagcugcacgaagaacuccagccaccacuacauccgggucggcaacgagaccggccuggagcugacccucaccaacacguccaucaucaaccacaaguucugcaaccugagcgacgcccacaagcgcaaccuguacgaccacgcccucauguccauccugagcaccuuccaccuguccauccccaacuucaaccaguacgaggccaugagcugcgacuucaacgggggcaagaucuccgugcaguacaaccucagccacgccuacgcgguggacgccgccgagcacugcgggaccgucgccaacggcgugcugcagaccuucaugcggauggcguggggcggguccuacaucgcccuggacagcggccgcgggaacugggacugcaucaugacguccuaccaguaccucaucauccagaacaccaccugggaggaccacugccaguucagccggcccucccccaucggcuaccuggggcugcucagccagcgcacccgggacaucuacaucagccgccggcugcugggcacguucaccuggacccucuccgacagcgagggcaacgagacccccgggggcuacugccugacgcgcuggaugcugaucgaggccgagcucaagugcuucgggaacaccgccguggccaagugcaacgagaagcacgacgaggaguucugcgacaugcugcggcuguucgacuucaacaagcaggcgauccagcgccucaaguccgaggcccagaugagcauccagcugaucaacaaggccgucaacgcccugaucaacgaccagcucaucaugaagaaccaccuccgggacaugaugggcauccccuacugcaacuacuccaaguacugguaccugaaccacaccagcuccgggcgcaccagccugcccaagugcuggcugguguccaacggcagcuaccugaacgagacgcacuucuccgacgacaucgagcagcaggccgacaacaugaucaccgagaugcuccagaaggaguacaucgaccggcagggcaagaccccgcuggggcugguggaccucuucgucuucagcaccuccuucuaccugaucagcaucuuccugcaccugaucaagaucccgugaggacuagucccuguucccagagcccacuuuuuuuucuuuuuuugaaauaaaauagccugucuuucagaucucaaaggcucuuuucagagccaccaaaaaaaaaaaaaaaaaaaaaaaaaaaaaaaaaaaaaaaaaaaaaaaaaaaaaaaaaaaaaaaaagaauu

SEQ ID NO: 41771 - RNA, 1600 nt, Artificial Sequence
  mRNA product Design a-1 (hSL-A64-N5) comprising derived and/or modified sequence from LASV(KAK-428;Clade n.d. (VII))__ANH09740__GPCmut13 (opt1)
aggagagucccgcagucggcguccagcggcucugcuuguucgugugugugucguugcaggccuuauucaagcuuaccaugggccagaucgugaccuucuuccaggaggucccccacgugaucgaggaggugaugaacaucguccugaucgcccucagccugcuggccauccucaaggggcuguacaacuucgcgaccugcggcgugaucgggcugaucacguuccuccugcugugcggccgcuccugcagcgccaccuacaaggggcaguacgagcuccagacccuggagcugaacauggagucccucaacaugaccaugccgcugagcugcacgaagaacaacucccaccacuacauccgggccggcaacaacaccggccuggagcucacccugaccaacacgagcaucaucucccacaaguucugcaaccugagcgacgcccacaagaagaaccucuacgaccacacccugauguccaucaucaccaccuuccaccugagcauccccaacuucaaccaguacgaggccauguccugcgacuucaacgggggcaagaucagcauccaguacaaccucucccacagcuacgcgggggacgccgcccagcacugcggcacgguggccaacgggguccugcagaccuucaugcgcauggcguggggcggcuccuaccuggcccucgacagcgggcggcgcggcugggacugcaucaucuccagcuaccaguaccugaucauccagaacaccaccugggacgaccacugccaguucucccggcccagccccaucggguaccugggcuucgugagccagaagacgcgcgacaucuacaucucccggcgccuccugggcaccuucaccuggacccugagcgacuccgaggggcacgacaugccgggcggguacugccucacgcgguggaugcugaucgaggccgaccugaagugcuucggcaacaccgccguggccaagugcaacgagaagcacgacgaggaguucugcgacauguggcgccucuucgacuucaacaagcaggcgauccagcggcugaaggccgaggcccagaugaacauccagcugaucaacaaggccgucaacgcccucaucaacgaccagcugaugaugaagaaccaccuccgcgacaucauggggauccccuacugcaacuacagcaaguucugguaccugaacaacaccaccacgggccggaccucccugccccgcugcuggcugaucagcaacggcuccuaccucaacgagacccacuucagcgacgacaucgagcagcaggcggacaacaugaucaccgagaugcugcagaaggaguacauggaccggcaggggaagacgccccugggccucguggaccuguucguguucuccaccagcuucuaccugaucaccaucuuccuccaccuggucaagaucccgugaggacuagucccuguucccagagcccacuuuuuuuucuuuuuuugaaauaaaauagccugucuuucagaucucaaaggcucuuuucagagccaccaaaaaaaaaaaaaaaaaaaaaaaaaaaaaaaaaaaaaaaaaaaaaaaaaaaaaaaaaaaaaaaaagaauu

SEQ ID NO: 41772 - RNA, 1600 nt, Artificial Sequence; identical to SEQ ID NO: 41766
  mRNA product Design a-1 (hSL-A64-N5) comprising derived and/or modified sequence from LASV(Pinneo-NIG-1969;Clade I)__AIT17836__GPCmut13 (opt1)

SEQ ID NO: 41773 - RNA, 1600 nt, Artificial Sequence
  mRNA product Design a-1 (hSL-A64-N5) comprising derived and/or modified sequence from LASV(ISTH0009-NIG-2011;Clade II)__AIT17404__GPCmut13 (opt1)
aggagagucccgcagucggcguccagcggcucugcuuguucgugugugugucguugcaggccuuauucaagcuuaccaugggccagaucaucaccuucuuccaggaggugccccacgucaucgaggaggugaugaacaucgugcugaucgcccucagccugcuggccauccucaaggggaucuacaacgucgcgaccugcggccuguucgggcugguguccuuccuccugcugugcggccgcagcugcuccacgaccuacaaggggguguacgagcuccagacccuggagcuggacauggccagccucaacaugaccaugccgcuguccugcacgaagaacaacagccaccacuacaucauggucggcaacgagaccggccuggagcucacccugaccaacacguccaucaucaaccacaaguucugcaaccugagcgacgcccacaagaagaaccucuacgaccacgcccugauguccaucaucagcaccuuccaccuguccauccccaacuucaaccaguacgaggccaugagcugcgacuucaacgggggcaagaucuccgugcaguacaaccucagccacgcguacgccguggacgccgccaaccacugcgggaccaucgcgaacggcguccugcagaccuucaugcggauggccuggggcggguccuacaucgcccuggacagcggcaagggguccugggacugcaucaugacgagcuaccaguaccucaucauccagaacaccaccugggaggaccacugccaguucucccgccccagccccaucggcuaccuggggcugcucagccagcggacccgcgacaucuacaucucccggcgccugcugggcacguucaccuggacccucagcgacuccgagggcaacgagacccccgggggcuacugccugacgcgguggaugcugaucgaggccgagcucaagugcuucgggaacaccgccguggcgaagugcaacgagaagcacgacgaggaguucugcgacaugcugcgccuguucgacuucaacaagcaggccauccggcgccucaagaccgaggcccagaugagcauccagcugaucaacaaggccgugaacgcccugaucaacgaccagcucaucaugaagaaccaccuccgggacaucaugggcaucccguacugcaacuacuccaaguacugguaccugaaccacaccgucacggggaagaccagccugccccgcugcuggcugguguccaacggcagcuaccugaacgagacccacuucuccgacgacaucgagcagcaggcggacaacaugaucaccgagcuccugcagaaggaguacauggaccggcagggcaagacgccccuggggcucguggaccuguucgucuucagcaccuccuucuaccugaucagcaucuuccugcaccucaucaagaucccgugaggacuagucccuguucccagagcccacuuuuuuuucuuuuuuugaaauaaaauagccugucuuucagaucucaaaggcucuuuucagagccaccaaaaaaaaaaaaaaaaaaaaaaaaaaaaaaaaaaaaaaaaaaaaaaaaaaaaaaaaaaaaaaaaagaauu

SEQ ID NO: 41774 - RNA, 1600 nt, Artificial Sequence
  mRNA product Design a-1 (hSL-A64-N5) comprising derived and/or modified sequence from LASV(ISTH2010-NIG-2012;Clade II)__AIT17482__GPCmut13 (opt1)
aggagagucccgcagucggcguccagcggcucugcuuguucgugugugugucguugcaggccuuauucaagcuuaccaugggccagaucaucaccuucuuccaggaggugccccacgucaucgaggaggugaugaacaucgugcugaucgcccucagccugcuggccauccucaaggggaucuacaacgucgcgaccugcggccuguucgggcugguguccuuccuccugcugugcggccgcagcugcuccacgaccuacaaggggguguacgagcuccagacccuggagcuggacauggccagccucaacaugaccaugccgcuguccugcacgaagaacaacagccaccacuacaucauggucggcaacgagaccggccuggagcucacccugaccaacacguccaucaucaaccacaaguucugcaaccugagcgacgcccacaagaagaaccucuacgaccacgcccugauguccaucaucagcaccuuccaccuguccauccccaacuucaaccaguacgaggccaugagcugcgacuucaacgggggcaagaucuccgugcaguacaaccucagccacgcguacgccguggacgccgccaaccacugcgggaccaucgcgaacggcguccugcagaccuucaugcggauggccuggggcggguccuacaucgcccuggacagcggcaagggguccugggacugcaucaugacgagcuaccaguaccucaucauccagaacaucaccugggaggaccacugccaguucucccgccccagccccaucggcuaccuggggcugcucagccagcggacccgcgacaucuacaucucccggcgccugcugggcaccuucacguggacccucagcgacuccgagggcaacgagacccccgggggcuacugccugacccgguggaugcugaucgaggccgagcucaagugcuucgggaacacggccguggcgaagugcaacgagaagcacgacgaggaguucugcgacaugcugcgccuguucgacuucaacaagcaggccauccggcgccucaagaccgaggcccagaugagcauccagcugaucaacaaggccgugaacgcccugaucaacgaccagcucaucaugaagaaccaccuccgggacaucaugggcauccccuacugcaacuacuccaaguacugguaccugaaccacaccgucaccgggaagacgagccugccccgcugcuggcugguguccaacggcagcuaccugaacgagacccacuucuccgacgacaucgagcagcaggcggacaacaugaucaccgagcuccugcagaaggaguacaucgaccggcagggcaagaccccgcuggggcucguggaccuguucgucuucagcacguccuucuaccugaucagcaucuuccugcaccucgugaagaucccgugaggacuagucccuguucccagagcccacuuuuuuuucuuuuuuugaaauaaaauagccugucuuucagaucucaaaggcucuuuucagagccaccaaaaaaaaaaaaaaaaaaaaaaaaaaaaaaaaaaaaaaaaaaaaaaaaaaaaaaaaaaaaaaaaagaauu

SEQ ID NO: 41775 - RNA, 1600 nt, Artificial Sequence
  mRNA product Design a-1 (hSL-A64-N5) comprising derived and/or modified sequence from LASV(Lassa virus/H.sapiens-wt/NGA/2015/ISTH_0543;Clade II)__AVO03639__GPCmut13 (opt1)
aggagagucccgcagucggcguccagcggcucugcuuguucgugugugugucguugcaggccuuauucaagcuuaccaugggccagaucaucaccuucuuccaggaggugccccacgucaucgaggaggugaugaacaucgugcugaucgcccucagccugcuggccauccucaaggggaucuacaacgucgcgaccugcggccuguucgggcugguguccuuccuccugcugugcggccgcagcugcuccacgaccuacaaggggguguacgagcuccagacccuggagcuggacauggccaaccucaacaugaccaugccgcugagcugcacgaagaacaacucccaccacuacaucauggucggcaacgagaccggccuggagcucacccugaccaacacgagcaucaucaaccacaaguucugcaaccuguccgacgcccacaagaagaaccucuacgaccacgcccugaugagcaucaucuccaccuuccaccugagcauccccaacuucaaccaguacgaggccauguccugcgacuucaacgggggcaagaucagcgugcaguacaaccucucccacaccuacgcgguggacgccgccaaccacugcgggaccaucgccaacggcguccugcagacguucaugcggauggcguggggcgggagcuacaucgcccuggacuccggcaaggggagcugggacugcaucaugaccuccuaccaguaccucgugauccagaacaccaccugggaggaccacugccaguucagccgccccucccccaucggcuaccuggggcugcucagccagcggacgcgcgacaucuacaucagccggcgccugcugggcaccuucaccuggacccucuccgacagcgagggcaacgagacgcccgggggcuacugccugacccgguggaugcugaucgaggccgagcucaagugcuucgggaacaccgccguggccaagugcaacgagaagcacgacgaggaguucugcgacaugcugcgccuguucgacuucaacaagcaggcgauccggcgccucaagaccgaggcccagauguccauccagcugaucaacaaggccgucaacgcccugaucaacgaccagcucaucaugaagaaccaccuccgggacaucaugggcauccccuacugcaacuacagcaaguacugguaccugaaccacacggugaccgggaagaccucccugccccgcugcuggcuggugagcaacggcuccuaccugaacgagacccacuucagcgacgacaucgagcagcaggccgacaacaugaucacggagcuccugcagaaggaguacaucgaccggcagggcaagaccccgcuggggcucgucgaccuguucguguucuccaccagcuucuaccugaucuccaucuuccugcaccucgugaagaucccgugaggacuagucccuguucccagagcccacuuuuuuuucuuuuuuugaaauaaaauagccugucuuucagaucucaaaggcucuuuucagagccaccaaaaaaaaaaaaaaaaaaaaaaaaaaaaaaaaaaaaaaaaaaaaaaaaaaaaaaaaaaaaaaaaagaauu

SEQ ID NO: 41776 - RNA, 1600 nt, Artificial Sequence
  mRNA product Design a-1 (hSL-A64-N5) comprising derived and/or modified sequence from LASV(Lassa virus/H.sapiens-wt/NGA/2016/ISTH_0009;Clade II)__AVO03571__GPCmut13 (opt1)
aggagagucccgcagucggcguccagcggcucugcuuguucgugugugugucguugcaggccuuauucaagcuuaccaugggccagaucaucaccuucuuccaggaggugccccacgucaucgaggaggugaugaacaucgugcugaucgcccucagccugcuggccauccucaaggggaucuacaacgucgcgaccugcggccugcuggggcucguguccuuccugcugcucugcggccgcagcugcuccacgaccuacaaggggguguacgagcugcagacccuggagcucgacauggccagccugaacaugaccaugccgcuguccugcacgaagaacaacagccaccacuacaucauggucggcaacgagaccggccucgagcugacccugaccaacacguccaucaucaaccacaaguucugcaaccucagcgacgcccacaagaagaaccuguacgaccacgcccugauguccaucaucagcaccuuccaccucuccauccccaacuucaaccaguacgaggccaugagcugcgacuucaacgggggccggaucuccgugcaguacaaccugagccacuccuacgcgguggacgccgccaaccacugcgggaccaucgccaacggcguccugcagaccuucaugcgcauggcguggggcgggagcuacaucgcccucgacuccggcaaggggagcugggacugcaucaugacguccuaccaguaccugaucauccagaacaccaccugggaggaccacugccaguucagccggcccagccccaucggcuaccuggggcuccugucccagcgcacccgggacaucuacaucagccgccggcugcucggcacguucaccuggacccuguccgacagcgagggcaacgagacccccgggggcuacugccugacgcgcuggaugcucaucgaggccgagcugaagugcuucgggaacaccgccguggccaagugcaacgagaagcacgacgaggaguucugcgacaugcugcggcuguucgacuucaacaagcaggcgauccgccggcugaagaccgaggcccagauguccauccagcugaucaacaaggccgugaacgcccucaucaacgaccagcugaucaugaagaaccaccuccgcgacaucaugggcaucccguacugcaacuacagcaaguacugguaccucaaccacaccgucacggggaagaccucccugccccggugcuggcuggugagcaacggcuccuaccucaacgagacccacuucagcgacgacaucgagcagcaggccgacaacaugaucaccgagcugcugcagaaggaguacaucgaccgccagggcaagacgccccucgggcugguggaccuguucgucuucuccaccagcuucuaccugaucuccaucuuccuccaccuggugaagaucccgugaggacuagucccuguucccagagcccacuuuuuuuucuuuuuuugaaauaaaauagccugucuuucagaucucaaaggcucuuuucagagccaccaaaaaaaaaaaaaaaaaaaaaaaaaaaaaaaaaaaaaaaaaaaaaaaaaaaaaaaaaaaaaaaaagaauu

SEQ ID NO: 41777 - RNA, 1600 nt, Artificial Sequence
  mRNA product Design a-1 (hSL-A64-N5) comprising derived and/or modified sequence from LASV(Lassa virus/H.sapiens-wt/NGA/2016/ISTH_0017;Clade II)__AVO03567__GPCmut13 (opt1)
aggagagucccgcagucggcguccagcggcucugcuuguucgugugugugucguugcaggccuuauucaagcuuaccaugggccagaucaucaccuucuuccaggaggugccccacgucaucgaggaggugaugaacaucgugcugaucgcccucagccugcuggccauccucaaggggaucuacaacgucgcgaccugcggccuguucgggcugguguccuuccuccugcugugcggccgcagcugcuccacgaccuacaaggggguguacgagcuccagacccuggagcuggacauggccagccucaacaugaccaugccgcuguccugcacgaagaacaacagccaccacuacaucauggucggcaacgagaccggccuggagcucacccugaccaacacguccaucaucaaccacaaguucugcaaccugagcgacgcccacaagaagaaccucuacgaccacgcccugauguccaucaucagcaccuuccaccuguccauccccaacuucaaccaguacgaggccaugagcugcgacuucaacgggggcaagaucuccgugcaguacaaccucagccacaccuacgcgaucgacgccgccaaccacugcgggaccaucgccaacggcgugcugcagacguucaugcggauggcguggggcggguccuacaucgcccuggacagcggcaagggguccugggacugcaucaugaccagcuaccaguaccucaucauccagaacaccaccugggaggaccacugccaguucucccgccccagccccaucggcuaccuggggcugcucagccagcggacgcgcgacaucuacaucucccggcgccugcugggcaccuucaccuggacccucagcgacuccgagggcaacgagacgcccgggggcuacugccugacccgguggaugcugaucgaggccgagcucaagugcuucgggaacaccgccgucgccaagugcaacgagaagcacgacgaggaguucugcgacaugcugcgccuguucgacuucaacaagcaggcgauccggcgccucaagaccgaggcccagaugagcauccagcugaucaacaaggccgugaacgcccugaucaacgaccagcucaucaugaagaaccaccuccgggacaucaugggcauccccuacugcaacuacuccaaguacugguaccugaaccacacggugaccgggaagaccagccugccccgcugcuggcuggucuccaacggcagcuaccugaacgagacccacuucuccgacgacaucgagcagcaggccgacaacaugaucacggagcuccugcagaaggaguacauggaccggcagggcaagaccccgcuggggcucguggaccuguucguguucagcaccuccuucuaccugaucagcaucuuccugcaccucguccgcaucccgugaggacuagucccuguucccagagcccacuuuuuuuucuuuuuuugaaauaaaauagccugucuuucagaucucaaaggcucuuuucagagccaccaaaaaaaaaaaaaaaaaaaaaaaaaaaaaaaaaaaaaaaaaaaaaaaaaaaaaaaaaaaaaaaaagaauu

SEQ ID NO: 41778 - RNA, 1600 nt, Artificial Sequence
  mRNA product Design a-1 (hSL-A64-N5) comprising derived and/or modified sequence from LASV(Lassa virus/H.sapiens-wt/NGA/2018/ISTH_0959;Clade II)__AVV65099__GPCmut13 (opt1)
aggagagucccgcagucggcguccagcggcucugcuuguucgugugugugucguugcaggccuuauucaagcuuaccaugggccagaucaucaccuucuuccaggaggugccccacgucaucgaggaggugaugaacaucgugcugaucgcccucagccugcuggccauccucaaggggaucuacaacgucgugaccugcggccuguucgggcugguguccuuccuccugcugugcggccgcagcugcuccacgaccuacaagggggucuacgagcuccagacccuggagcuggacauggcgagccucaacaugaccaugccgcuguccugcacgaagaacaacagccaccacuacaucauggugggcaacgagaccggccuggagcucacccugaccaacacguccaucaucaaccacaaguucugcaaccugagcgacgcccacaagaagaaccucuacgaccacgcccugauguccaucaucagcaccuuccaccuguccauccccaacuucaaccaguacgaggccaugagcugcgacuucaacgggggcaagaucuccgugcaguacaaccucagccacgccuacgcgaucgacgccgccaaccacugcgggaccaucgccaacggcguccugcagaccuucaugcggauggcguggggcggguccuacaucgcccuggacagcggcaagggguccugggacugcaucaugacgagcuaccaguaccucaucauccagaacaccaccugggaggaccacugccaguucucccgccccagccccaucggcuaccuggggcugcucagccagcggacccgcgacaucuacaucucccggcgccugcugggcacguucaccuggacccucagcgacuccgagggcaacgagacccccgggggcuacugccugacgcgguggaugcugaucgaggccgagcucaagugcuucgggaacaccgccguggccaagugcaacgagaagcacgacgaggaguucugcgacaugcugcgccuguucgacuucaacaagcaggcgauccggcgccucaagaccgaggcccagaugagcauccagcugaucaacaaggccgugaacgcccugaucaacgaccagcucaucaugaagaaccaccuccgggacaucaugggcaucccguacugcaacuacuccaaguacugguaccugaaccacaccgucacggggaagaccagccugccccgcugcuggcugguguccaacggcagcuaccugaacgagacccacuucuccgacgacaucgagcagcaggccgacaacaugaucaccgagcuccugcagaaggaguacaucgaccggcagggcaagacgccccuggggcucguggaccuguucgucuucagcaccuccuucuaccugaucagcaucuuccugcaccucgugaagaucccgugaggacuagucccuguucccagagcccacuuuuuuuucuuuuuuugaaauaaaauagccugucuuucagaucucaaaggcucuuuucagagccaccaaaaaaaaaaaaaaaaaaaaaaaaaaaaaaaaaaaaaaaaaaaaaaaaaaaaaaaaaaaaaaaaagaauu

SEQ ID NO: 41779 - RNA, 1600 nt, Artificial Sequence
  mRNA product Design a-1 (hSL-A64-N5) comprising derived and/or modified sequence from LASV(LASV003-NIG-2008;Clade II)__AIT17580__GPCmut13 (opt1)
aggagagucccgcagucggcguccagcggcucugcuuguucgugugugugucguugcaggccuuauucaagcuuaccaugggccagaucaucaccuucuuccaggaggugccccacgucaucgaggaggugaugaacaucgugcugaucgcccucagccugcuggccauccucaaggggaucuacaacgucgcgaccugcggccuguucgggcugguguccuuccuccugcugugcggccgcagcugcuccacgaccuacaaggggguguacgagcuccagacccuggagcuggacauggccagccucaacaugaccaugccgcuguccugcacgaagaacaacagccaccacuacaucauggucggcaacgagaccggccuggagcucacccugaccaacacguccaucaucaaccacaaguucugcaaccugagcgacgcccacaagaagaaccucuacgaccacgcccugauguccaucaucagcaccuuccaccuguccauccccaacuucaaccaguacgaggccaugagcugcgacuucaacgggggcaagaucuccgugcaguacaaccucagccacaccuacgcgguggacgccgccaaccacugcgggaccaucgccaacggcguccugcagacguucaugcggauggcguggggcggguccuacaucgcccuggacagcggcaagggguccugggacugcaucaugaccagcuaccaguaccucaucauccagaacaccaccugggaggaccacugccaguucucccgccccagccccaucggcuaccuggggcugcucagccagcggacgcgcgacaucuacaucucccggcgccugcugggcaccuucaccuggacccucagcgacuccgagagcaacgagacgccgggcggguacugccugacccgguggaugcugaucgaggccgagcucaagugcuucggcaacaccgccguggccaagugcaacgagaagcacgacgaggaguucugcgacaugcugcgccuguucgacuucaacaagcaggcgauccggcgccucaaggccgaggcccagauguccauccagcugaucaacaaggccgugaacgcccugaucaacgaccagcucaucaugaagaaccaccuccgggacaucauggggauccccuacugcaacuacagcaaguacugguaccugaaccacaccgucacgggccgcaccucccugccccggugcuggcuggugagcaacggguccuaccugaacgagacccacuucagcgacgacaucgagcagcaggcggacaacaugaucaccgagcuccugcagaaggaguacauggaccgccagggcaagacgccccugggccucguggaccuguucgucuucuccaccagcuucuaccugaucuccaucuuccugcaccucgugaagaucccgugaggacuagucccuguucccagagcccacuuuuuuuucuuuuuuugaaauaaaauagccugucuuucagaucucaaaggcucuuuucagagccaccaaaaaaaaaaaaaaaaaaaaaaaaaaaaaaaaaaaaaaaaaaaaaaaaaaaaaaaaaaaaaaaaagaauu

SEQ ID NO: 41780 - RNA, 1600 nt, Artificial Sequence
  mRNA product Design a-1 (hSL-A64-N5) comprising derived and/or modified sequence from LASV(LASV035-NIG-2009;Clade II)__AIT17588__GPCmut13 (opt1)
aggagagucccgcagucggcguccagcggcucugcuuguucgugugugugucguugcaggccuuauucaagcuuaccaugggccagaucaucaccuucuuccaggaggugccccacgucaucgaggaggugaugaacaucgugcugaucgcccucagccugcuggccauccucaaggggaucuacaacgucgcgaccugcggccuguucgggcugguguccuuccuccugcugugcggccgcagcugcuccacgaccuacaaggggguguacgagcuccagacccuggagcuggacauggccagccucaacaugaccaugccgcuguccugcacgaagaacaacagccaccacuacaucauggucggcaacgagaccggccuggagcucacccugaccaacacguccaucaucaaccacaaguucugcaaccugagcgacgcccacaagaagaaccucuacgaccacgcccugauguccaucaucagcaccuuccaccuguccauccccaacuucaaccaguacgaggccaugagcugcgacuucaacgggggcaagaucuccgugcaguacaaccucagccacgcguacgccguggacgccgccaaccacugcgggaccaucgcgaacggcguccugcagaccuucaugcggauggccuggggcggguccuacaucgcccuggacagcggcaagggguccugggacugcaucaugacgagcuaccaguaccucaucauccagaacaccaccugggaggaccacugccaguucucccgccccagccccaucggcuaccuggggcugcucagccagcggacccgcgacaucuacaucucccggcgccugcugggcacguucaccuggacccucagcgacuccgagggcaacgagacccccgggggcuacugccugacgcgguggaugcugaucgaggccgagcucaagugcuucgggaacaccgccguggcgaagugcaacgagaagcacgacgaggaguucugcgacaugcugcgccuguucgacuucaacaagcaggccauccggcgccucaaggccgaggcccagaugagcauccagcugaucaacaaggccgugaacgcgcugaucaacgaccagcucaucaugaagaaccaccuccgggacaucaugggcauccccuacugcaacuacuccaaguacugguaccugaaccacaccgucaccgggaagacgagccugccccgcugcuggcugguguccaacggcagcuaccugaacgagacccacuucuccgacgacaucgagcagcaggccgacaacaugaucaccgagcuccugcagaaggaguacaucgaccggcagggcaagaccccgcuggggcucguggaccuguucgucuucagcacguccuucuaccugaucagcaucuuccugcaccucgugaagaucccgugaggacuagucccuguucccagagcccacuuuuuuuucuuuuuuugaaauaaaauagccugucuuucagaucucaaaggcucuuuucagagccaccaaaaaaaaaaaaaaaaaaaaaaaaaaaaaaaaaaaaaaaaaaaaaaaaaaaaaaaaaaaaaaaaagaauu

SEQ ID NO: 41781 - RNA, 1600 nt, Artificial Sequence
  mRNA product Design a-1 (hSL-A64-N5) comprising derived and/or modified sequence from LASV(LASV1000-NIG-2009;Clade II)__AIT17782__GPCmut13 (opt1)
aggagagucccgcagucggcguccagcggcucugcuuguucgugugugugucguugcaggccuuauucaagcuuaccaugggccagaucaucaccuucuuccaggaggugccccacgucaucgaggaggugaugaacaucgugcugaucgcccucagccugcuggccauccucaaggggaucuacaacgucgcgaccugcggccuguucgggcugguguccuuccuccugcugugcggccgcagcugcuccacgaccuacaaggggguguacgagcuccagacccuggagcuggacauggccagccucaacaugaccaugccgcuguccugcacgaagaacaacagccaccacuacaucauggucggcaacgagaccggccuggagcucacccugaccaacacguccaucaucaaccacaaguucugcaaccugagcgacgcccacaagaagaaccucuacgaccacgcccugauguccaucaucagcaccuuccaccuguccauccccaacuucaaccaguacgaggccaugagcugcgacuucaacgggggcaagaucuccgugcaguacaaccucagccacaccuacgcgguggacgccgccaaccacugcgggaccaucgccaacggcguccugcagacguucaugcggauggcguggggcggguccuacaucgcccuggacagcggcaagggguccugggacugcaucaugaccagcuaccaguaccucaucauccagaacaccaccugggaggaccacugccaguucucccgccccagccccaucggcuaccuggggcugcucagccagcggacgcgcgacaucuacaucucccggcgccugcugggcaccuucaccuggacccucagcgacuccgagggcaacgagacgcccgggggcuacugccugacccgguggaugcugaucgaggccgagcucaagugcuucgggaacaccgccguggccaagugcaacgagaagcacgacgaggaguucugcgacaugcugcgccuguucgacuucaacaagcaggcgaucaagcggcucaagaccgaggcccagaugagcauccagcugaucaacaaggccgugaacgcccugaucaacgaccagcucaucaugaagaaccaccuccgcgacaucaugggcauccccuacugcaacuacuccaaguacugguaccugaaccacacggucaccgggaagaccagccugccccggugcuggcugguguccaacggcagcuaccugaacgagacccacuucuccgacgacaucgagcagcaggccgacaacaugaucacggagcuccugcagaaggaguacaucgaccgccagggcaagaccccgcuggggcucguggaccuguucgucuucagcaccuccuucuaccugaucagcaucuuccugcaccucgugaagaucccgugaggacuagucccuguucccagagcccacuuuuuuuucuuuuuuugaaauaaaauagccugucuuucagaucucaaaggcucuuuucagagccaccaaaaaaaaaaaaaaaaaaaaaaaaaaaaaaaaaaaaaaaaaaaaaaaaaaaaaaaaaaaaaaaaagaauu

SEQ ID NO: 41782 - RNA, 1600 nt, Artificial Sequence
  mRNA product Design a-1 (hSL-A64-N5) comprising derived and/or modified sequence from LASV(LASV221-NIG-2010;Clade II)__AIT17624__GPCmut13 (opt1)
aggagagucccgcagucggcguccagcggcucugcuuguucgugugugugucguugcaggccuuauucaagcuuaccaugggccagaucaucaccuucuuccaggaggugccccacgucaucgaggaggugaugaacaucgugcugaucgcccucagccugcuggccauccucaaggggaucuacaacgucgcgaccugcggccuguucgggcugguguccuuccuccugcugugcggccgcagcugcuccacgaccuacaaggggguguacgagcuccagacccuggagcuggacauggccagccucaacaugaccaugccgcuguccugcacgaagaacaacagccaccacuacaucauggucggcaacgagaccggccuggagcucacccugaccaacacguccaucaucaaccacaaguucugcaaccugagcgacgcccacaagaagaaccucuacgaccacgcccugauguccaucaucagcaccuuccaccuguccauccccaacuucaaccaguacgaggccaugagcugcgacuucaacgggggcaagaucuccgugcaguacaaccucagccacaccuacgcgaucgacgccgccaaccacugcgggaccaucgccaacggcgugcugcagacguucaugcggauggcguggggcggguccuacaucgcccuggacagcggcaagggguccugggacugcaucaugaccagcuaccaguaccucaucauccagaacaccaccugggaggaccacugccaguucucccgccccagccccaucggcuaccuggggcugcucagccagcggacgcgcgacaucuacaucucccggcgccugcugggcaccuucaccuggacccucagcgacuccgagggcaacgagacgcccgggggcuacugccugacccgguggaugcugaucgaggccgagcucaagugcuucgggaacaccgccgucgccaagugcaacgagaagcacgacgaggaguucugcgacaugcugcgccuguucgacuucaacaagcaggcgauccggcgccucaagaccgaggcccagaugagcauccagcugaucaacaaggccgugaacgcccugaucaacgaccagcucaucaugaagaaccaccuccgggacaucaugggcauccccuacugcaacuacuccaaguacugguaccugaaccacacggugaccgggaagaccagccugccccgcugcuggcuggucuccaacggcagcuaccugaacgagacccacuucuccgacgacaucgagcagcaggccgacaacaugaucacggagaugcuccagaaggaguacauggaccggcagggcaagaccccgcuggggcugguggaccucuucguguucagcaccuccuucuaccugaucagcaucuuccugcaccuggucaagaucccgugaggacuagucccuguucccagagcccacuuuuuuuucuuuuuuugaaauaaaauagccugucuuucagaucucaaaggcucuuuucagagccaccaaaaaaaaaaaaaaaaaaaaaaaaaaaaaaaaaaaaaaaaaaaaaaaaaaaaaaaaaaaaaaaaagaauu

SEQ ID NO: 41783 - RNA, 1600 nt, Artificial Sequence
  mRNA product Design a-1 (hSL-A64-N5) comprising derived and/or modified sequence from LASV(LASV237-NIG-2010;Clade II)__AIT17638__GPCmut13 (opt1)
aggagagucccgcagucggcguccagcggcucugcuuguucgugugugugucguugcaggccuuauucaagcuuaccaugggccagaucaucaccuucuuccaggaggugccccacgucaucgaggaggugaugaacaucgugcugaucgcccucagccugcuggccauccucaaggggaucuacaacgucgcgaccugcggccuguucgggcugguguccuuccuccugcugugcggccgcagcugcuccacgaccuacaaggggguguacgagcuccagacccuggagcuggacauggccagccucaacaugaccaugccgcuguccugcacgaagaacaacagccaccacuacaucauggucggcaacgagaccggccuggagcucacccugaccaacacguccaucaucaaccacaaguucugcaaccugagcgacgcccacaagaaggaccucuacgaccacgcccugauguccaucaucagcaccuuccaccuguccauccccaacuucaaccaguacgaggccaugagcugcgacuucaacgggggcaagaucuccgugcaguacaaccucagccacaccuacgcgguggacgccgccaaccacugcgggaccaucgccaacggcguccugcagacguucaugcggauggcguggggcggguccuacaucgcccuggacagcggcaagggguccugggacugcaucaugaccagcuaccaguaccucaucauccagaacaccaccugggaggaccacugccaguucucccgccccagccccaucggcuaccuggggcugcucagccagcggacgcgcgacaucuacaucucccggcgccugcugggcaccuucaccuggacccucagcgacuccgagggcaacgagacgcccgggggcuacugccugacccgguggaugcugaucgaggccgagcucaagugcuucgggaacaccgccguggccaagugcaacgagaagcacgacgaggaguucugcgacaugcugcgccuguucgacuucaacaagcaggcgauccggcgccucaagaccgaggcccagaugagcauccagcugaucaacaaggccgugaacgcccugaucaacgaccagcucaucaugaagaaccaccuccgggacaucaugggcauccccuacugcaacuacuccaaguacugguaccugaaccacacggucaccgggaagaccagccugccccgcugcuggcugguguccaacggcagcuaccugaacgagacccacuucuccgacgacaucgagcagcaggccgacaacaugaucacggagcuccugcagaaggaguacauggaccggcagggcaagaccccgcuggggcucguggaccuguucgucuucagcaccuccuucuaccugaucagcaucuuccugcaccucaucaagaucccgugaggacuagucccuguucccagagcccacuuuuuuuucuuuuuuugaaauaaaauagccugucuuucagaucucaaaggcucuuuucagagccaccaaaaaaaaaaaaaaaaaaaaaaaaaaaaaaaaaaaaaaaaaaaaaaaaaaaaaaaaaaaaaaaaagaauu

SEQ ID NO: 41784 - RNA, 1600 nt, Artificial Sequence
  mRNA product Design a-1 (hSL-A64-N5) comprising derived and/or modified sequence from LASV(LASV253-NIG-2011;Clade II)__AIT17670__GPCmut13 (opt1)
aggagagucccgcagucggcguccagcggcucugcuuguucgugugugugucguugcaggccuuauucaagcuuaccaugggccagaucaucaccuucuuccaggaggugccccacgucaucgaggaggugaugaacaucgugcugaucgcccucagccugcuggccauccucaaggggaucuacaacgucgcgaccugcggccuguucgggcugguguccuuccuccugcugugcggccgcagcugcuccacgaccuacaaggggguguacgagcuccagacccuggagcuggacauggccagccucaacaugaccaugccgcuguccugcacgaagaacaacagccaccacuacaucauggucggcaacgagaccggccuggagcucacccugaccaacacguccaucaucaaccacaaguucugcaaccugagcgacgcccacaagaagaaccucuacgaccacgcccugauguccaucaucagcaccuuccaccuguccauccccaacuucaaccaguacgaggccaugagcugcgacuucaacgggggcaagaucuccgugcaguacaaccucagccacaccuacgcgguggacgccgccaaccacugcgggaccaucgccaacggcguccugcagacguucaugcggauggcguggggcggguccuacaucgcccuggacagcggcaagggguccugggacugcaucaugaccagcuaccaguaccucaucauccagaacaccaccugggaggaccacugccaguucucccgccccagccccaucggcuaccuggggcugcucagccagcggacgcgcgacaucuacaucucccggcgccugcugggcaccuucaccuggacccucagcgacuccgagggcaacgagacgcccgggggcuacugccugacccgguggaugcugaucgaggccgagcucaagugcuucgggaacaccgccguggccaagugcaacgagaagcacgacgaggaguucugcgacaugcugcgccuguucgacuucaacaagcaggcgauccggcgccucaaggccgaggcccagaugagcauccagcugaucaacaaggccgugaacgcccugaucaacgaccagcucaucaugaagaaccaccuccgggacaucaugggcaucccguacugcaacuacuccaaguacugguaccugaaccacaccgucacggggcgcaccagccugccccggugcuggcugguguccaacggcagcuaccugaacgagacccacuucuccgacgacaucgagcagcaggcggacaacaugaucaccgagcuccugcagaaggaguacaucgaccgccagggcaagacgccccuggggcucguggaccuguucgucuucagcaccuccuucuaccugaucagcaucuuccugcaccucgugaagaucccgugaggacuagucccuguucccagagcccacuuuuuuuucuuuuuuugaaauaaaauagccugucuuucagaucucaaaggcucuuuucagagccaccaaaaaaaaaaaaaaaaaaaaaaaaaaaaaaaaaaaaaaaaaaaaaaaaaaaaaaaaaaaaaaaaagaauu

SEQ ID NO: 41785 - RNA, 1600 nt, Artificial Sequence
  mRNA product Design a-1 (hSL-A64-N5) comprising derived and/or modified sequence from LASV(LASV254-NIG-2011;Clade II)__AIT17674__GPCmut13 (opt1)
aggagagucccgcagucggcguccagcggcucugcuuguucgugugugugucguugcaggccuuauucaagcuuaccaugggccagaucaucaccuucuuccaggaggugccccacgucaucgaggaggugaugaacaucgugcugaucgcccucagccugcuggccauccucaaggggaucuacaacgucgcgaccugcggccuguucgggcugguguccuuccuccugcugugcggccgcagcugcuccacgaccuacaaggggguguacgagcuccagacccuggagcuggacaugaccaaccucaacaugacgaugccgcugagcugcaccaagaacaacucccaccacuacaucauggucggcaacgagaccggccuggagcucacccugacgaacaccagcaucaucaaccacaaguucugcaaccuguccgacgcccacaagaagaaccucuacaaccacgcccugaugagcaucaucuccaccuuccaccugagcauccccaacuucaaccaguacgaggccauguccugcgacuucaacgggggcaagaucagcgugcaguacaaccucucccacagcuacgccguggacgcggccaaccacugcgggaccaucgccaacggcguccugcagacguucaugcggauggccuggggcggguccuacaucgcgcuggacagcggcaaggggaacugggacugcaucaugaccuccuaccaguaccucaucauccagaacaccaccugggaggaccacugccaguucagccgccccucccccaucggcuaccuggggcugcucagccagcggacgcgcgacaucuacaucagccggcgccugcugggcaccuucaccuggacccucuccgacagcgagggcaacgagacgcccgggggcuacugccugacccgguggaugcugaucgaggccgagcucaagugcuucgggaacaccgccguggccaagugcaacgagaagcacgacgaggaguucugcgacaugcugcgccuguucgacuucaacaagcaggccauccggcgccucaagaccgaggcgcaggccaacauccagcugaucaacaaggccgugaacgcccugaucaacgaccagcucaucaugaagaaccaccuccgggacaucaugggcauccccuacugcaacuacuccaaguacugguaccugaaccacacggucaccgggaagaccagccugccccgcugcuggcugguguccaacggcagcuaccugaacgagacccacuucuccgacgacaucgagcagcaggccgacaacaugaucacggagcuccugcagaaggaguacauggaccggcagggcaagaccccgcuggggcucguggaccuguucgucuucagcaccuccuucuaccugaucagcaucuuccugcaccucgugaagaucccgugaggacuagucccuguucccagagcccacuuuuuuuucuuuuuuugaaauaaaauagccugucuuucagaucucaaaggcucuuuucagagccaccaaaaaaaaaaaaaaaaaaaaaaaaaaaaaaaaaaaaaaaaaaaaaaaaaaaaaaaaaaaaaaaaagaauu

SEQ ID NO: 41786 - RNA, 1600 nt, Artificial Sequence
  mRNA product Design a-1 (hSL-A64-N5) comprising derived and/or modified sequence from LASV(Nig08-A19;Clade III)__ADU56618__GPCmut13 (opt1)
aggagagucccgcagucggcguccagcggcucugcuuguucgugugugugucguugcaggccuuauucaagcuuaccaugggccagaucgugaccuucuuccaggaggucccccacgugaucgaggaggugaugaacaucguccugaucgcccucagcauccuggccauccugaaggggcucuacaacaucgcgaccugcggccugaucgggcuggugacguuccuccugcuguccggccgcagcugcuccaugaccuacaaggggguguacgagcuccagacccuggagcugaacaugaacacccucaacaugacgaugccgcugagcugcaccaagaacaacucccaccacuacaucauggucggcaacgagaccggccuggagcucacccugacgaacaccagccugcuccaccacaaguucugcaaccuguccgacgcccacaagaagaaccuguacgaccacacccucaugagcaucaucuccaccuuccaccugagcauccccaacuucaaccaguacgaggccauguccugcgacuucaacgggggcaagaucacggugcaguacaaccugagccacuccuacgccaucgacgccgcgaaccacugcgggaccguggccaacggcguccuccagaccuucaugcggauggccuggggcgggagcuacaucgcccuggacuccggccgcgggaagugggacugcaucaugaccagcuaccaguaccugaucauccagaacacgaccugggaggaccacugccaguucucccggcccagccccaucggcuaccucgggcugcugucccagcgcacccgggacaucuacaucagccgccggcuccugggcaccuucacguggacccugagcgacuccgagggcaacgagacccccgggggcuacugccucacccgcuggaugcugaucgaggcggagcugaagugcuucgggaacacggccguggccaagugcaacgagaagcacgacgaggaguucugcgacaugcuccggcuguucgacuucaacaagcaggccauccgccggcugaaggccgaggcgcagaugagcauccagcucaucaacaaggccgugaacgcccugaucaacgaccagcugaucaugaagaaccaccuccgcgacaucaugggcauccccuacugcaacuacuccaaguacugguaccugaaccacaccagcaccgggcggaccucccugccccgcugcuggcucgucagcaacggcuccuaccugaacgagacgcacuucagcgacgacaucgagcagcaggccgacaacaugaucaccgagaugcugcagaaggaguaccucgaccggcagggcaagaccccgcuggggcugguggaccuguucguguucuccaccagcuucuaccucaucuccaucuuccugcaccuggucaagaucccgugaggacuagucccuguucccagagcccacuuuuuuuucuuuuuuugaaauaaaauagccugucuuucagaucucaaaggcucuuuucagagccaccaaaaaaaaaaaaaaaaaaaaaaaaaaaaaaaaaaaaaaaaaaaaaaaaaaaaaaaaaaaaaaaaagaauu

SEQ ID NO: 41787 - RNA, 1603 nt, Artificial Sequence
  mRNA product Design a-1 (hSL-A64-N5) comprising derived and/or modified sequence from LASV(G1180-SLE-2010;Clade IV)__AIT17168__GPCmut13 (opt1)
aggagagucccgcagucggcguccagcggcucugcuuguucgugugugugucguugcaggccuuauucaagcuuaccaugggccagaucgugaccuucuuccaggaggucccccacgugaucgaggaggugaugaacaucguccugaucgcccucagcauccuggccgugcugaaggggcucuacaacuucgcgaccugcggccugguggggcugcucaccuuccugcugcucugcggccgcuccugcaccgccagccgguacaagggggucuacgagcugcagacccuggagcucaacauggagacccugaacaugacgaugccgcuguccugcaccaagaacaacagccaccacuacaucauggugggcaacgagaccggccucgagcugacccugacgaacaccuccaucaucaaccacaaguucugcaaccucagcgacgcccacaagaagaaccuguacgaccacgcccugauguccaucaucagcaccuuccaccucuccauccccaacuucaaccaguacgaggccaugagcugcgacuucaacgggggcaagaucuccgugcaguacaaccugagccacuccuacgcgggggacgccgccaaccacugcggcaccgucgccaacggggugcugcagacguucaugcgcauggcguggggcggcagcuacaucgcccucgacuccgggcacggcagcugggacugcaucaugaccuccuaccaguaccugaucauccagaacaccaccugggaggaccacugccaguucagccggcccucccccaucggguaccugggccuccugagccagcgcacgcgggacaucuacaucagccgccggcugcucggcaccuucaccuggacccuguccgacagcgaggggaaggacacgccgggcggguacugccugacccgcuggaugcucaucgaggccgagcugaagugcuucggcaacaccgccguggccaagugcaacgagaagcacgacgaggaguucugcgacaugcugcggcuguucgacuucaacaagcaggcgauccagcgccugaaggccgaggcccagauguccauccagcugaucaacaaggccgucaacgcccucaucaacgaccagcugaucaugaagaaccaccuccgggacaucauggggauccccuacugcaacuacagcaaguacugguaccucaaccacaccacgaccggcaagaccucccugcccaagugcuggcuggugagcaacggcuccuaccucaacgagacccacuucagcgacgacaucgagcagcaggcggacaacaugaucacggagaugcugcagaaggaguacauggagcgccaggggaagacgccccugggccucguggaccuguucgucuucuccaccagcuucuaccugaucuccaucuuccugcaccucgugaagaucccgugaggacuagucccuguucccagagcccacuuuuuuuucuuuuuuugaaauaaaauagccugucuuucagaucucaaaggcucuuuucagagccaccaaaaaaaaaaaaaaaaaaaaaaaaaaaaaaaaaaaaaaaaaaaaaaaaaaaaaaaaaaaaaaaaagaauu

SEQ ID NO: 41788 - RNA, 1603 nt, Artificial Sequence
  mRNA product Design a-1 (hSL-A64-N5) comprising derived and/or modified sequence from LASV(G1442-SLE-2011;Clade IV)__AIT17180__GPCmut13 (opt1)
aggagagucccgcagucggcguccagcggcucugcuuguucgugugugugucguugcaggccuuauucaagcuuaccaugggccagaucgugaccuucuuccaggaggucccccacgugaucgaggaggugaugaacaucguccugaucgcccucagcauccuggccgugcugaaggggcucuacaacguggcgaccugcggccugaucgggcuggucacguuccuccugcugugcggccgcuccugcaccaccacccucuacaaggggguguacgagcugcagacgcuggagcucaacauggagacccugaacaugaccaugccgcugagcugcaccaagaacaacucccaccacuacauccgggugggcaacgagacgggccucgagcugacccugaccaacaccagcaucaucaaccacaaguucugcaaccucuccgacgcccacaagaagaaccuguacgaccacgcccugaugagcaucaucuccacguuccaccucagcauccccaacuucaaccaguacgaggccauguccugcgacuucaacgggggcaagaucagcguccaguacaaccugucccacagcuacgccggggacgcggccaaccacugcggcaccguggccaacggggugcugcagaccuucaugcgcauggccuggggcggcuccuacaucgcgcucgacagcgggcggggcaacugggacugcaucaugaccuccuaccaguaccugaucauccagaacacgaccugggacgaccacugccaguucagccgccccucccccaucggguaccugggccuccugagccagcggacccgcgacgucuacaucucccggcgccugcucggcaccuucacguggacccugagcgacagcgaggggaaggacaccccgggcggguacugccugacccgguggaugcucaucgaggccgagcugaagugcuucggcaacacggccguggccaagugcaacgagaagcacgacgaggaguucugcgacaugcugcgccucuucgacuucaacaagcaggccauccagcggcugaaggcggaggcccagauguccauccagcugaucaacaaggccgugaacgcccucaucaacgaccagcugaucaugaagaaccaccuccgcgacaucauggggauccccuacugcaacuacagcaaguacugguaccugaacaacaccgccaccggcaagaccucccugcccaagugcuggcugaucagcaacggcuccuaccucaacgagacgcacuucagcgacgacaucgagcaggaggcggacaacaugaucaccgagaugcugcagaaggaguacauggagcggcaggggaagacgccccugggccucgucgaccuguucguguucuccaccagcuucuaccugaucuccaucuuccugcaccucgugaagaucccgugaggacuagucccuguucccagagcccacuuuuuuuucuuuuuuugaaauaaaauagccugucuuucagaucucaaaggcucuuuucagagccaccaaaaaaaaaaaaaaaaaaaaaaaaaaaaaaaaaaaaaaaaaaaaaaaaaaaaaaaaaaaaaaaaagaauu

SEQ ID NO: 41789 - RNA, 1603 nt, Artificial Sequence
  mRNA product Design a-1 (hSL-A64-N5) comprising derived and/or modified sequence from LASV(G3010-SLE-2013;Clade IV)__AIT17344__GPCmut13 (opt1)
aggagagucccgcagucggcguccagcggcucugcuuguucgugugugugucguugcaggccuuauucaagcuuaccaugggccagaucgugaccuucuuccaggaggucccccacgugaucgaggaggugaugaacaucguccugaucgcccucagcauccuggccgugcugaaggggcucuacaacuucgcgaccugcggccugguggggcuggucacguuccuccugcugugcggccgcuccugcaccaccagccucuacaaggggguguacgagcugcagacccuggagcucaacauggagacgcugaacaugaccaugccgcuguccugcaccaagaacaacagccaccacuacaucauggugggcaacgagaccggccucgagcugacgcugaccaacaccuccaucaucaaccacaaguucugcaaccucagcgacgcccacaagaagaaccuguacaaccacgcccugauguccaucaucagcaccuuccaccucuccauccccaacuucaaccaguacgaggccaugagcugcgacuucaacgggggcaagaucuccguccaguacaaccugagccacuccuacgccggggacgcggccagccacugcggcacgguggccaacggggugcugcagaccuucaugcggauggccuggggcggcuccuacaucgcgcucgacagcggguacggcaagugggacugcaucaugaccuccuaccaguaccugaucauccagaacaccacgugggaggaccacugccaguucagccgccccucccccaucggguaccugggccuccugagccagcggacccgcgacaucuacaucagccggcgccugcucggcaccuucaccuggacgcuguccgacagcgaggggaaggacaccccgggcggguacugccugacccgguggaugcucaucgaggccgagcugaagugcuucggcaacaccgccgucgccaagugcaacgagaagcacgacgaggaguucugcgacaugcugcgccucuucgacuucaacaagcaggccauccagcggcugaagacggaggcgcagauguccauccagcugaucaacaaggccgugaacgcccucaucaacgaccagcugaucaugaagaaccaccuccgcgacaucauggggauccccuacugcaacuacagcaaguacugguaccugaaccacaccaccaccggcaagacgucccugcccaagugcuggcuggugagcaacggcuccuaccucaacgagacccacuucagcgacgacaucgagcagcaggccgacaacaugaucaccgagaugcugcagaaggaguacauggagcggcaggggaagacgccccugggccucgucgaccuguucguguucuccaccagcuucuaccugaucuccaucuuccugcaccucgugaagaucccgugaggacuagucccuguucccagagcccacuuuuuuuucuuuuuuugaaauaaaauagccugucuuucagaucucaaaggcucuuuucagagccaccaaaaaaaaaaaaaaaaaaaaaaaaaaaaaaaaaaaaaaaaaaaaaaaaaaaaaaaaaaaaaaaaagaauu

SEQ ID NO: 41790 - RNA, 1603 nt, Artificial Sequence
  mRNA product Design a-1 (hSL-A64-N5) comprising derived and/or modified sequence from LASV(G502-SLE-2009;Clade IV)__AIT17126__GPCmut13 (opt1)
aggagagucccgcagucggcguccagcggcucugcuuguucgugugugugucguugcaggccuuauucaagcuuaccaugggccagaucgugaccuucuuccaggaggucccccacgugaucgaggaggugaugaacaucguccugaucgcccucagcauccuggccgugcugaaggggcucuacaacuucgcgaccugcggccugguggggcugcucacguuccugcugcucugcggccgcuccugcaccaccgggcuguacaagggcgucuacgagcugcagacccucgagcugaacauggagacgcugaacaugaccaugccgcucagcugcaccaagaacaacucccaccacuacaucauggugggcaacgagaccgggcuggagcugacgcucaccaacaccagcaucaucaaccacaaguucugcaaccuguccgacgcccacaagaagaaccuguacgaccacgcccucaugagcaucaucuccaccuuccaccugagcauccccaacuucaaccaguacgaggccauguccugcgacuucaacggcgggaagaucagcgugcaguacaaccugucccacagcuacgccggcgacgcggccgaccacugcgggacggucgccaacggcgugcuccagaccuucaugcggauggccuggggcggguccuacaucgcgcuggacagcggccgcgggcggugggacugcaucaugaccuccuaccaguaccugaucauccagaacaccacgugggaggaccacugccaguucagccgccccucccccaucggcuaccucggccugcugagccagcggacccgcgacaucuacaucucccggcgccuccuggggaccuucaccuggacgcugagcgacagcgagggcaaggacacccccgggggcuacugccucacccgguggaugcugaucgaggccgagcugaagugcuucgggaacaccgccguggccaagugcaacgagaagcacgacgaggaguucugcgacaugcuccgccuguucgacuucaacaagcaggccauccagcggcugaaggcggaggcccagauguccauccagcucaucaacaaggccgucaacgcccugaucaacgaccagcuggugaugaagaaccaccuccgcgacaucaugggcauccccuacugcaacuacagccgguacugguaccugaaccacacgaccaccggccgcaccucccugcccaagugcuggcucgugagcaacggguccuaccugaacgagacgcacuucagcgacgacaucgagcagcaggccgacaacaugaucaccgagaugcugcagaaggaguacauggagcggcagggcaagaccccgcucgggcuggucgaccuguucguguucuccaccagcuucuaccugaucuccaucuuccuccaccuggugaagaucccgugaggacuagucccuguucccagagcccacuuuuuuuucuuuuuuugaaauaaaauagccugucuuucagaucucaaaggcucuuuucagagccaccaaaaaaaaaaaaaaaaaaaaaaaaaaaaaaaaaaaaaaaaaaaaaaaaaaaaaaaaaaaaaaaaagaauu

SEQ ID NO: 41791 - RNA, 1603 nt, Artificial Sequence
  mRNA product Design a-1 (hSL-A64-N5) comprising derived and/or modified sequence from LASV(G733-SLE-2010;Clade IV)__AIT17154__GPCmut13 (opt1)
aggagagucccgcagucggcguccagcggcucugcuuguucgugugugugucguugcaggccuuauucaagcuuaccaugggccagaucgugaccuucuuccaggaggucccccacgugaucgaggaggugaugaacaucguccugaucgcccucagcauccuggccgugcugaaggggcucuacaacuucgcgaccugcggcaucguggggcuggucuccuuccugcuccugugcggccgcagcugcacgaccucccuguacaaggggguguacgagcuccagacccuggagcugaacauggagacccucaacaugacgaugccgcugagcugcaccaagaacaacucccaccacuacaucauggugggcaacgagaccggccuggagcucacccugacgaacaccagcaucaucaaccacaaguucugcaaccuguccgacgcccacaagaagaaccucuacgaccacgcccugaugagcaucaucuccaccuuccaccugagcauccccaacuucaaccaguacgaggccauguccugcgacuucaacgggggcaagaucagcguccaguacaaccucucccacagcuacgccggggacgcggccaaccacugcggcaccaucgccaacggggugcugcagacguucaugcggauggccuggggcggcuccuacaucgcgcuggacagcgggcgcgaccggugggacugcaucaugaccuccuaccaguaccucaucauccagaacaccaccugggaggaccacugccaguucagccgccccucccccaucggcuaccuggggcugcucagccagcggacgcgcgacaucuacaucagccggcgccugcugggcaccuucaccuggacccucuccgacagcgagggcaaggacacgcccgggggcuacugccugacccgguggaugcugaucgaggccgagcucaagugcuucgggaacaccgccguggccaagugcaacgagaagcacgacgaggaguucugcgacaugcugcgccuguucgacuucaacaagcaggccauccagcggcucaaggcggaggcccagauguccauccagcugaucaacaaggccgucaacgcccugaucaacgaccagcucaucaugaagaaccaccuccgcgacaucaugggcauccccuacugcaacuacagcaaguacugguaccugaaccacaccacgaccgggaagaccucccugcccaagugcuggcuggugagcaacggcuccuaccugaacgagacccacuucagcgacgacaucgagcagcaggccgacaacaugaucacggagaugcuccagaaggaguacauggagcggcagggcaagaccccgcuggggcugguggaccucuucgucuucuccaccagcuucuaccugaucuccaucuuccugcaccuggugaagaucccgugaggacuagucccuguucccagagcccacuuuuuuuucuuuuuuugaaauaaaauagccugucuuucagaucucaaaggcucuuuucagagccaccaaaaaaaaaaaaaaaaaaaaaaaaaaaaaaaaaaaaaaaaaaaaaaaaaaaaaaaaaaaaaaaaagaauu

SEQ ID NO: 41792 - RNA, 1603 nt, Artificial Sequence
  mRNA product Design a-1 (hSL-A64-N5) comprising derived and/or modified sequence from MOPV/LASV reassortant(IGS-1;Clade IV)__AFY05576__GPCmut13 (opt1)
aggagagucccgcagucggcguccagcggcucugcuuguucgugugugugucguugcaggccuuauucaagcuuaccaugggccagaucgugaccuucuuccaggaggucccccacgugaucgaggaggugaugaacaucguccugaucgcccucagcgugcuggccgugcugaaggggcucuacaacuucgcgaccugcggccuggucgggcuggugacguuccuccugcugugcggccgcuccugcaccaccagccucuacaaggggguguacgagcugcagacccuggagcucaacauggagacgcugaacaugaccaugccgcuguccugcaccaagaacaacagccaccacuacaucauggucggcaacgagaccggccucgagcugacgcugaccaacaccuccaucaucaaccacaaguucugcaaccucagcgacgcccacaagaagaaccuguacgaccacgcccugauguccaucaucagcaccuuccaccucuccauccccaacuucaaccaguacgaggccaugagcugcgacuucaacgggggcaagaucuccgugcaguacaaccugagccacuccuacgccggggacgcggccaaccacugcggcacgguggccaacgggguccugcagaccuucaugcggauggccuggggcggcagcuacaucgcgcucgacuccgggcgcggcaacugggacugcaucaugaccagcuaccaguaccugaucauccagaacaccacgugggaggaccacugccaguucucccggcccagccccaucggguaccugggccuccugucccagcgcacccgggacaucuacaucagccgccggcugcucggcaccuucaccuggacgcugagcgacuccgagggggaggacaccccgggcggguacugccugacccgcuggaugcucaucgaggccgagcugaagugcuucggcaacaccgccguggccaagugcaacgagaagcacgacgaggaguucugcgacaugcugcggcuguucgacuucaacaagcaggccauccagcgccugaaggcggaggcccagaugagcauccagcugaucaacaaggccgugaacgcccucaucaacgaccagcugaucaugaagaaccaccuccgggacaucauggggauccccuacugcaacuacuccaaguacugguaccucaaccacacgaccaccggccgcaccagccugcccaagugcuggcuggucuccaacggcagcuaccucaacgagacgcacuucuccgacgacaucgagcagcaggccgacaacaugaucaccgagaugcugcagaaggaguacauggagcggcaggggaagacgccccugggccucguggaccuguucguguucagcaccuccuucuaccugaucagcaucuuccugcaccucgucaagaucccgugaggacuagucccuguucccagagcccacuuuuuuuucuuuuuuugaaauaaaauagccugucuuucagaucucaaaggcucuuuucagagccaccaaaaaaaaaaaaaaaaaaaaaaaaaaaaaaaaaaaaaaaaaaaaaaaaaaaaaaaaaaaaaaaaagaauu

SEQ ID NO: 41793 - RNA, 1603 nt, Artificial Sequence
  mRNA product Design a-1 (hSL-A64-N5) comprising derived and/or modified sequence from LASV(LM765-SLE-2012;Clade IV)__AIT17814__GPCmut13 (opt1)
aggagagucccgcagucggcguccagcggcucugcuuguucgugugugugucguugcaggccuuauucaagcuuaccaugggccagaucgugaccuucuuccaggaggucccccacgugaucgaggaggugaugaacaucguccugaucgcccucagcauccuggccgugcugaaggggcucuacaacuucgcgaccugcggccugguggggcuggucacguuccuccugcugugcggccgcuccugcaccaccagccucuacaaggggguguacgagcugcagacccuggagcucaacauggagacgcugaacaugaccaugccgcuguccugcaccaagaacaacagccaccacuacaucauggugggcaacgagaccggccucgagcugacgcugaccaacaccuccaucaucgaccacaaguucugcaaccucagcgacgcccaccggaagaaccuguacgaccacgcccugauguccaucaucagcaccuuccaccucuccauccccaacuucaaccaguacgaggccaugagcugcgacuucaacgggggcaagaucuccguccaguacaaccugagccacuccuacgccaaggacgcggccgaccacugcgggacgguggccaacggcgugcugcagaccuucaugcgcauggccuggggcgggagcuacaucgcgcucgacuccggccgggggcgcugggacugcaucaugaccagcuaccaguaccugaucauccagaacaccacgugggaggaccacugccaguucucccggcccagccccaucggcuaccuggggcuccugucccagcgcacccgggacaucuacaucagccgccggcugcucggcaccuucaccuggacgcugagcgacuccgagggcaaggacacccccgggggcuacugccugacccgcuggaugcucaucgaggccgagcugaagugcuucgggaacaccgccgucgccaagugcaacgagaagcacgacgaggaguucugcgacaugcugcggcuguucgacuucaacaagcaggccauccagcgccugaaggcggaggcccagaugagcauccagcugaucaacaaggccgugaacgcccucaucaacgaccagcugaucaugaagaaccaccuccgggacaucaugggcauccccuacugcaacuacuccaaguacugguaccucaaccacacgaccaccgggaagaccagccugcccaagugcuggcugguguccaacggcagcuaccucaacgagacgcacuucuccgacgacaucgagcagcaggccgacaacaugaucaccgagaugcugcagaaggaguacauggagcgccagggcaagaccccgcuggggcucgucgaccuguucguguucagcaccuccuucuaccugaucagcaucuuccugcaccucgugaagaucccgugaggacuagucccuguucccagagcccacuuuuuuuucuuuuuuugaaauaaaauagccugucuuucagaucucaaaggcucuuuucagagccaccaaaaaaaaaaaaaaaaaaaaaaaaaaaaaaaaaaaaaaaaaaaaaaaaaaaaaaaaaaaaaaaaagaauu

SEQ ID NO: 41794 - RNA, 1603 nt, Artificial Sequence
  mRNA product Design a-1 (hSL-A64-N5) comprising derived and/or modified sequence from LASV(LM776-SLE-2012;Clade IV)__AIT17824__GPCmut13 (opt1)
aggagagucccgcagucggcguccagcggcucugcuuguucgugugugugucguugcaggccuuauucaagcuuaccaugggccagaucgugaccuucuuccaggaggucccccacgugaucgaggaggugaugaacaucguccugaucgcccucagcauccuggccgugcugaaggggcucuacaacuucgcgaccugcggccugguggggcuggucacguuccuccugcugugcggccgcuccugcaccaccagcguguacaaggggguguacgagcuccagacccuggagcugaacauggagacgcucaacaugaccaugccgcuguccugcaccaagaacaacagccaccacuacaucauggucggcaacgagaccggccuggagcucacgcugaccaacaccuccaucaucaaccacaaguucugcaaccugagcgacgcccacaagaagaaccucuacgaccacgcccugauguccaucaucagcaccuuccaccuguccauccccaacuucaaccaguacgaggccaugagcugcgacuucaacgggggcaagaucuccgugcaguacaaccucagccacuccuacgccggggacgcggccaaccacugcggcacgguggccaacgggguccugcagaccuucaugcggauggccuggggcggcagcuacaucgcgcuggacuccgggcacggcaagugggacugcaucaugaccagcuaccaguaccucaucauccagaacaccacgugggaggaccacugccaguucucccgccccagccccaucggguaccugggccugcucucccagcggacccgcgacaucuacaucagccggcgccugcugggcaccuucaccuggacgcucagcgacuccgaggggaaggacaccccgggcggguacugccugacccgguggaugcugaucgaggccgagcucaagugcuucggcaacaccgccguggccaagugcaacgagaagcacgacgaggaguucugcgacaugcugcgccuguucgacuucaacaagcaggccauccagcggcucaaggcggaggcccagaugagcauccagcugaucaacaaggccgugaacgcccugaucaacgaccagcucaucaugaagaaccaccuccgcgacaucauggggauccccuacugcaacuacuccaaguacugguaccugaaccacacgaccaccggcaagaccagccugcccaagugcuggcuggucuccaacggcagcuaccugaacgagacgcacuucuccgacgacaucgagcagcaggccgacaacaugaucaccgagaugcuccagaaggaguacauggagcggcaggggaagacgccccugggccugguggaccucuucguguucagcaccuccuucuaccugaucagcaucuuccugcaccuggucaagaucccgugaggacuagucccuguucccagagcccacuuuuuuuucuuuuuuugaaauaaaauagccugucuuucagaucucaaaggcucuuuucagagccaccaaaaaaaaaaaaaaaaaaaaaaaaaaaaaaaaaaaaaaaaaaaaaaaaaaaaaaaaaaaaaaaaagaauu

SEQ ID NO: 41795 - RNA, 1603 nt, Artificial Sequence
  mRNA product Design a-1 (hSL-A64-N5) comprising derived and/or modified sequence from LASV(Mad39;Clade IV)__ANH09722__GPCmut13 (opt1)
aggagagucccgcagucggcguccagcggcucugcuuguucgugugugugucguugcaggccuuauucaagcuuaccaugggccagaucgugaccuucuuccaggaggucccccacgugaucgaggaggugaugaacaucguccugaucgcccucagcauccuggccgugcugaaggggcucuacaacguggcgaccugcggccugaucgggcuggucacguuccuccugcugugcggccgcuccugcaccaccacccucuacaaggggguguacgagcugcaggcccuggagcucaacauggagacgcugaacaugaccaugccgcugagcugcaccaagaacaacucccaccacuacauccgggugggcaacgagaccggccucgagcugacgcugaccaacaccagccucaucaaccacaaguucugcaaccuguccgacgcccacaagaagaaccuguacgaccacgcccucaugagcaucaucuccaccuuccaccugagcauccccaacuucaaccaguacgaggccauguccugcgacuucaacgacgggaagaucagcguccaguacaaccugucccacacguacgcgggcgacaccgccaaccacugcgggaccguggccaacggcgugcuccagaccuucaugcgcauggccuggggcgggagcuacaucgcgcuggacuccggccgcgggggcugggacugcaucaugacgagcuaccaguaccugaucauccagaacaccaccugggaggaccacugccaguucucccggcccagccccaucggguaccucggccugcugucccagcggacccgcgacaucuacaucagccggcgccuccugggcacguucaccuggacccuguccgacagcgaggggaaggacaccccgggcggguacugccucacgcgguggaugcugaucgaggccgagcugaagugcuucggcaacaccgccgucgccaagugcaacgagaagcacgacgaggaguucugcgacaugcuccgccuguucgacuucaacaagcaggccauccagcggcugaaggcggaggcccagaugagcauccagcucaucaacaaggccgugaacgcccugaucaacgaccagcugaucaugaagaaccaccuccgcgacaucauggggauccccuacugcaacuacuccaaguacugguaccugaaccacaccgugaccggcaagacgagccugcccaagugcuggcucgucuccaacggcagcuaccugaacgagacccacuucuccgacgacaucgagcagcaggccgacaacaugaucaccgagaugcugcagaaggaguacauggagcggcaggggaagacgccccucggccugguggaccuguucguguucagcaccuccuucuaccugaucagcaucuuccuccaccuggucaagaucccgugaggacuagucccuguucccagagcccacuuuuuuuucuuuuuuugaaauaaaauagccugucuuucagaucucaaaggcucuuuucagagccaccaaaaaaaaaaaaaaaaaaaaaaaaaaaaaaaaaaaaaaaaaaaaaaaaaaaaaaaaaaaaaaaaagaauu

SEQ ID NO: 41796 - RNA, 1603 nt, Artificial Sequence
  mRNA product Design a-1 (hSL-A64-N5) comprising derived and/or modified sequence from LASV(Z0947-SLE-2011;Clade IV)__AIT17840__GPCmut13 (opt1)
aggagagucccgcagucggcguccagcggcucugcuuguucgugugugugucguugcaggccuuauucaagcuuaccaugggccagaucgugaccuucuuccaggaggucccccacgugaucgaggaggugaugaacaucguccugaucgcccucagcauccuggccgugcugaaggggcucuacaacuucgcgaccugcggccugguggggcuggucacguuccuccugcugugcggccgcuccugcaccaucagccucuacaaggggguguacgagcugcagacccuggagcucaacauggagacccugaacaugacgaugccgcuguccugcaccaagaacaacagccaccacuacaucauggugggcaacgagaccggccucgagcugacccugacgaacaccuccaucaucaaccacaaguucugcaaccucagcgacgcccacaagaagaaccuguacgaccacgcccugauguccaucaucagcaccuuccaccucuccauccccaacuucaaccaguacgaggccaugagcugcgacuucaacgggggcaagaucuccguccaguacaaccugagccacuccuacgccggggacgcggccaaccacugcggcaccguggccaacggggugcugcagacguucaugcggauggccuggggcggcagcuacaucgcgcucgacuccgggcgcgaccggugggacugcaucaugaccagcuaccaguaccugaucauccagaacaccaccugggaggaccacugccaguucucccgccccagccccaucggcuaccuggggcuccugucccagcggacgcgcgacaucuacaucagccggcgccugcucggcaccuucaccuggacccugagcgacuccgagggcaaggacacgcccgggggcuacugccugacccgguggaugcucaucgaggccgagcugaagugcuucgggaacaccgccgucgccaagugcaacgagaagcacgacgaggaguucugcgacaugcugcgccucuucgacuucaacaagcaggccauccagcggcugaaggcggaggcccagaugagcauccagcugaucaacaaggccgugaacgcccucaucaacgaccagcugaucaugaagaaccaccuccgcgacaucaugggcauccccuacugcaacuacuccaaguacugguaccugaaccacaccacgaccgggaagaccagccugcccaagugcuggcugguguccaacggcagcuaccucaacgagacccacuucuccgacgacaucgagcagcaggccgacaacaugaucacggagaugcugcagaaggaguacauggagcggcagggcaagaccccgcuggggcucgucgaccuguucguguucagcaccuccuucuaccugaucagcaucuuccugcaccucgugaagaucccgugaggacuagucccuguucccagagcccacuuuuuuuucuuuuuuugaaauaaaauagccugucuuucagaucucaaaggcucuuuucagagccaccaaaaaaaaaaaaaaaaaaaaaaaaaaaaaaaaaaaaaaaaaaaaaaaaaaaaaaaaaaaaaaaaagaauu

SEQ ID NO: 41797 - RNA, 1603 nt, Artificial Sequence
  mRNA product Design a-1 (hSL-A64-N5) comprising derived and/or modified sequence from LASV(Josiah;Clade IV)__NP_694870__GPCmut13 (opt1)
aggagagucccgcagucggcguccagcggcucugcuuguucgugugugugucguugcaggccuuauucaagcuuaccaugggccagaucgugaccuucuuccaggaggucccccacgugaucgaggaggugaugaacaucguccugaucgcccucagcgugcuggccgugcugaaggggcucuacaacuucgcgaccugcggccuggucgggcuggugacguuccuccugcugugcggccgcuccugcaccaccagccucuacaaggggguguacgagcugcagacccuggagcucaacauggagacgcugaacaugaccaugccgcuguccugcaccaagaacaacagccaccacuacaucauggucggcaacgagaccggccucgagcugacgcugaccaacaccuccaucaucaaccacaaguucugcaaccucagcgacgcccacaagaagaaccuguacgaccacgcccugauguccaucaucagcaccuuccaccucuccauccccaacuucaaccaguacgaggccaugagcugcgacuucaacgggggcaagaucuccgugcaguacaaccugagccacuccuacgccggggacgcggccaaccacugcggcacgguggccaacgggguccugcagaccuucaugcggauggccuggggcggcagcuacaucgcgcucgacuccgggcgcggcaacugggacugcaucaugaccagcuaccaguaccugaucauccagaacaccacgugggaggaccacugccaguucucccggcccagccccaucggguaccugggccuccugucccagcgcacccgggacaucuacaucagccgccggcugcucggcaccuucaccuggacgcugagcgacuccgaggggaaggacaccccgggcggguacugccugacccgcuggaugcucaucgaggccgagcugaagugcuucggcaacaccgccguggccaagugcaacgagaagcacgacgaggaguucugcgacaugcugcggcuguucgacuucaacaagcaggccauccagcgccugaaggcggaggcccagaugagcauccagcugaucaacaaggccgugaacgcccucaucaacgaccagcugaucaugaagaaccaccuccgggacaucauggggauccccuacugcaacuacuccaaguacugguaccucaaccacacgaccaccggccgcaccagccugcccaagugcuggcuggucuccaacggcagcuaccucaacgagacgcacuucuccgacgacaucgagcagcaggccgacaacaugaucaccgagaugcugcagaaggaguacauggagcggcaggggaagacgccccugggccugguggaccucuucguguucagcaccuccuucuaccugaucagcaucuuccugcaccucgucaagaucccgugaggacuagucccuguucccagagcccacuuuuuuuucuuuuuuugaaauaaaauagccugucuuucagaucucaaaggcucuuuucagagccaccaaaaaaaaaaaaaaaaaaaaaaaaaaaaaaaaaaaaaaaaaaaaaaaaaaaaaaaaaaaaaaaaagaauu

SEQ ID NO: 41798 - RNA, 1600 nt, Artificial Sequence
  mRNA product Design a-1 (hSL-A64-N5) comprising derived and/or modified sequence from LASV(LP;Clade I)__AAF86701__GPCmut13 (opt1)
aggagagucccgcagucggcguccagcggcucugcuuguucgugugugugucguugcaggccuuauucaagcuuaccaugggccagaucaucaccuucuuccaggaggugccccacgucaucgaggaggugaugaacaucgugcugaucgcccucagccugcuggccauccucaaggggcuguacaacaucgcgaccugcggcaucaucgggcuggucgccuuccucuuccugugcggcaaguccugcagccugacgcucaagggcggguacgagcugcagacccuggagcucaacauggagacccugaacaugaccaugccgcuguccugcacgaagaacagcucccaccacuacauccgcgugggcaacgagaccgggcucgagcugacccugaccaacacgagcaucaucaaccacaaguucugcaaccucuccgacgcccacaagaagaaccuguacgaccacgcccugaugagcaucaucuccaccuuccaccucagcauccccaacuucaaccaguacgaggccauguccugcgacuucaacggcgggaagaucagcgugcaguacaaccugucccacagcuacgcgggcgacgccgccgagcacugcgggaccgucgccaacggcgugcugcagaccuucaugcggauggcguggggcgggcgcuacaucgcccucgacuccggcaaggggaacugggacugcaucaugacgagcuaccaguaccugaucauccagaacaccaccugggaggaccacugccaguucucccggcccagccccaucggcuaccugggccuccugucccagcgcacccgggacaucuacaucagccgccggcugcucgggacguucaccuggacccugagcgacuccgagggcaacgagacccccgggggcuacugccugacgcgcuggaugcucaucgaggccgagcugaagugcuucgggaacaccgccguggccaagugcaacgagaagcacgacgaggaguucugcgacaugcugcggcuguucgacuucaacaagcaggcgauccgccggcugaaggccgaggcccagaugagcauccagcugaucaacaaggccgucaacgcccucaucaacgaccagcugaucaugaagaaccaccuccgcgacaucaugggcauccccuacugcaacuacuccaaguacugguaccucaaccacaccagcuccggccggaccagccugcccaagugcuggcugaucuccaacgggagcuaccucaacgagacgcaguucuccgacgacaucgagcagcaggcggacaacaugaucaccgagaugcugcagaaggaguacaucgagcgccagggcaagaccccgcuggggcugguggacaucuucaucuucagcaccuccuucuaccucaucagcaucuuccugcaccugaucaagaucccgugaggacuagucccuguucccagagcccacuuuuuuuucuuuuuuugaaauaaaauagccugucuuucagaucucaaaggcucuuuucagagccaccaaaaaaaaaaaaaaaaaaaaaaaaaaaaaaaaaaaaaaaaaaaaaaaaaaaaaaaaaaaaaaaaagaauu

SEQ ID NO: 41799 - RNA, 1600 nt, Artificial Sequence
  mRNA product Design a-1 (hSL-A64-N5) comprising derived and/or modified sequence from LASV(803213;Clade II)__AAF86703__GPCmut13 (opt1)
aggagagucccgcagucggcguccagcggcucugcuuguucgugugugugucguugcaggccuuauucaagcuuaccaugggccagaucaucaccuucuuccaggaggugccccacgucaucgaggaggugaugaacaucgugcugaucgcccucagccugcuggccauccucaaggggaucuacaacgucgcgaccugcggccuguucgggcugaucuccuuccuccugcugugcggccgcagcugcuccgugacguacaaggggguguacgagcuccagacccuggagcugaacauggccaaccucaacaugaccaugccgcugagcugcaccaagaacaacucccaccacuacaucauggucggcaacgagacgggccuggagcucacccugaccaacaccagcaucaucaaccacaaguucugcaaccuguccgacgcccacaagaagaaccucuacgaccacgcccugaugagcaucaucuccacguuccaccugagcauccccaacuucaaccaguacgaggccauguccugcgacuucaacgggggcaagaucagcgugcaguacaaccucucccacagcuucgcgguggacgccgccaaccacugcgggaccaucgccaacggcguccugcagaccuucaugcggauggcguggggcggguccuacaucgcccuggacagcggcaaggggaacugggacugcaucaugaccuccuaccaguaccucaucauccagaacacgaccugggaggaccacugccaguucagccgccccucccccaucggcuaccuggggcugcucagccagcggacccgcgacaucuacaucagccggcgccugcugggcaccuucacguggacccucuccgacagcgagggcaacgaggcccccgggggcuacugccugacccgguggaugcugaucgaggccgagcucaagugcuucgggaacaccgccguggcgaagugcaacgagaagcacgacgaggaguucugcgacaugcugcgccuguucgacuucaacaagcaggccaucaagcggcucaagacggaggcccagauguccauccagcugaucaacaaggccgugaacgcccugaucaacgaccagcucaucaugaagaaccaccuccgcgacaucaugggcauccccuacugcaacuacagccgguacugguaccugaaccacaccgucaccgggaagaccucccugccccgcugcuggcuggugagcaacggcuccuaccugaacgagacgcacuucagcgacgacaucgagcagcaggcggacaacaugaucaccgagaugcuccagaaggaguacauggaccggcagggcaagaccccgcuggggcugguggaccuguucgucuucuccaccagcuucuaccucaucuccaucuuccugcaccuggugaagaucccgugaggacuagucccuguucccagagcccacuuuuuuuucuuuuuuugaaauaaaauagccugucuuucagaucucaaaggcucuuuucagagccaccaaaaaaaaaaaaaaaaaaaaaaaaaaaaaaaaaaaaaaaaaaaaaaaaaaaaaaaaaaaaaaaaagaauu

SEQ ID NO: 41800 - RNA, 1600 nt, Artificial Sequence
  mRNA product Design a-1 (hSL-A64-N5) comprising derived and/or modified sequence from LASV(GA391;Clade III)__CAA36645__GPCmut13 (opt1)
aggagagucccgcagucggcguccagcggcucugcuuguucgugugugugucguugcaggccuuauucaagcuuaccaugggccagaucgugaccuucuuccaggaggucccccacgugaucgaggaggugaugaacaucguccugaucgcccucagcauccuggccauccugaaggggcucuacaacguggcgaccugcggccugaucgggcuggugacguuccuccugcuguccggccgcagcugcucccucaucuacaaggggaccuacgagcugcagacccuggagcucaacauggagacccugaacaugacgaugccgcugagcugcaccaagaacaacucccaccacuacauccgggucggcaacgagaccggccucgagcugacccugacgaacaccagcauccucaaccacaaguucugcaaccuguccgacgcccacaagcgcaaccuguacgaccacagccucauguccaucaucagcaccuuccaccuguccauccccaacuucaaccaguacgaggccaugagcugcgacuucaacgggggcaagaucaccgugcaguacaaccugucccacagcuucgccguggacgccgcggggcacugcggcacgcucgccaacgggguccugcagaccuucaugcggauggccuggggcggcuccuacaucgcccuggacagcgggcgcggcaacugggacugcaucaugaccuccuaccaguaccucaucauccagaacaccacgugggacgaccacugccaguucagccggcccucccccaucggguaccugggccugcucagccagcgcacccgggacaucuacaucagccgccggcugcugggcaccuucaccuggacgcucuccgacagcgaggggaacgagaccccgggcggguacugccugacccgcuggaugcugaucgaggcggagcucaagugcuucggcaacaccgccguggccaagugcaacgagaagcacgacgaggaguucugcgacaugcugcggcuguucgacuucaacaagcaggccauccgccggcucaagacggaggcccagauguccauccagcugaucaacaaggcggugaacgcccugaucaacgaccagcucaucaugaagaaccaccuccgcgacaucauggggauccccuacugcaacuacagccgguacugguaccugaaccacaccuccaccggcaagaccagccugccccgcugcuggcugaucuccaacggcagcuaccugaacgagacgaaguucuccgacgacaucgagcagcaggccgacaacaugaucaccgagaugcugcagaaggaguacaucgaccggcaggggaagacgccccucggccuggucgaccuguucguguucagcaccuccuucuaccucaucagcaucuuccugcaccuggugaagaucccgugaggacuagucccuguucccagagcccacuuuuuuuucuuuuuuugaaauaaaauagccugucuuucagaucucaaaggcucuuuucagagccaccaaaaaaaaaaaaaaaaaaaaaaaaaaaaaaaaaaaaaaaaaaaaaaaaaaaaaaaaaaaaaaaaagaauu

SEQ ID NO: 41801 - RNA, 1603 nt, Artificial Sequence
  mRNA product Design a-1 (hSL-A64-N5) comprising derived and/or modified sequence from LASV(AV;Clade V)__CCA30314__GPCmut13 (opt1)
aggagagucccgcagucggcguccagcggcucugcuuguucgugugugugucguugcaggccuuauucaagcuuaccaugggccagaucgugaccuucuuccaggaggucccccacgugaucgaggaggugaugaacaucguccugaucgcccucagcauccuggccgugcugaaggggcucuacaacaucgcgaccugcggccugaucgggcugaucacguuccuccugcugugcggccgcuccugcagcuccaaccucuacaaggggguguacgagcugcagagccuggaccucaacauggagacccugaacaugaccaugccgcuguccugcaccaagaacaacagccaccacuacauccgggucggcaacgacacgggccucgagcugacccugaccaacaccuccauccucaaccacaaguucugcaaccugagcgacgcccacaagaaggaccuguacgaccacgcccucauguccaucaucagcacguuccaccuguccauccccaacuucaaccaguacgaggccaugagcugcgacuucaacgggggcaagaucuccgugcaguacaaccugagccacuccuacgccaucgacgcggccaaccacugcgggaccguggccaacggcauccuccagaccuucaugcgcauggccuggggcgggagcuacaucgcgcuggacuccggccgggggaacugggacugcaucaugaccagcuaccaguaccugaucauccagaacacgaccugggagaaccacugccaguucucccgccccagccccaucggcuaccucgggcugcugagccagcggacccgcgacaucuacaucucccggcgccuccugggcaccuucacguggacccugagcgacuccgagggcaacgccacccccgggggcuacugccucacccgguggaugcugaucgaggccgagcugaagugcuucgggaacacggccgucgccaagugcaacgagaagcacgacgaggaguucugcgacaugcuccgccuguucgacuucaacaagcaggcgaucagccggcugaaguccgaggcccagaugagcauccagcucaucaacaaggccgugaacgcccugaucaacgaccagcugaucaugaagaaccaccuccgcgacaucaugggcauccccuacugcaacuacuccaaguacugguaccugaaccacaccaucaccgggaagaccagccugcccaagugcuggcucguguccaacggcagcuaccugaacgagacgcacuucuccgacgacaucgagcagcaggccgacaacaugaucaccgagaugcugcagaaggaguacauggagcggcagggcaagaccccgcuggggcucgucgaccuguucguguucagcaccuccuucuaccugaucagcaucuuccuccgccuggugaagaucccgugaggacuagucccuguucccagagcccacuuuuuuuucuuuuuuugaaauaaaauagccugucuuucagaucucaaaggcucuuuucagagccaccaaaaaaaaaaaaaaaaaaaaaaaaaaaaaaaaaaaaaaaaaaaaaaaaaaaaaaaaaaaaaaaaagaauu

SEQ ID NO: 41802 - RNA, 1600 nt, Artificial Sequence
  mRNA product Design a-1 (hSL-A64-N5) comprising derived and/or modified sequence from LASV(Togo/2016/7082;Clade VI)__AMR44577__GPCmut13 (opt1)
aggagagucccgcagucggcguccagcggcucugcuuguucgugugugugucguugcaggccuuauucaagcuuaccaugggccagaucaucaccuucuuccaggaggugccccacgucaucgaggaggugaugaacaucgugcugaucgcccucagccugcuggccauccucaagggggucuacaacguggcgaccugcggcaucaucgggcuggugacguuccuguuccucugcggccgcuccugcagccugaucuacaagggguccuacgagcugcagacccucgagcugaacauggagacccugaacaugaccaugccgcucagcugcacgaagaacuccagccaccacuacauccgggucggcaacgagaccggccuggagcugacccucaccaacacguccaucaucaaccacaaguucugcaaccugagcgacgcccacaagcgcaaccuguacgaccacgcccucauguccauccugagcaccuuccaccuguccauccccaacuucaaccaguacgaggccaugagcugcgacuucaacgggggcaagaucuccgugcaguacaaccucagccacgccuacgcgguggacgccgccgagcacugcgggaccgucgccaacggcgugcugcagaccuucaugcggauggcguggggcggguccuacaucgcccuggacagcggccgcgggaacugggacugcaucaugacguccuaccaguaccucaucauccagaacaccaccugggaggaccacugccaguucagccggcccucccccaucggcuaccuggggcugcucagccagcgcacccgggacaucuacaucagccgccggcugcugggcacguucaccuggacccucuccgacagcgagggcaacgagacccccgggggcuacugccugacgcgcuggaugcugaucgaggccgagcucaagugcuucgggaacaccgccguggccaagugcaacgagaagcacgacgaggaguucugcgacaugcugcggcuguucgacuucaacaagcaggcgauccagcgccucaaguccgaggcccagaugagcauccagcugaucaacaaggccgucaacgcccugaucaacgaccagcucaucaugaagaaccaccuccgggacaugaugggcauccccuacugcaacuacuccaaguacugguaccugaaccacaccagcuccgggcgcaccagccugcccaagugcuggcugguguccaacggcagcuaccugaacgagacgcacuucuccgacgacaucgagcagcaggccgacaacaugaucaccgagaugcuccagaaggaguacaucgaccggcagggcaagaccccgcuggggcugguggaccuguucgucuucagcaccuccuucuaccucaucagcaucuuccugcaccugaucaagaucccgugaggacuagucccuguucccagagcccacuuuuuuuucuuuuuuugaaauaaaauagccugucuuucagaucucaaaggcucuuuucagagccaccaaaaaaaaaaaaaaaaaaaaaaaaaaaaaaaaaaaaaaaaaaaaaaaaaaaaaaaaaaaaaaaaagaauu

SEQ ID NO: 41803 - RNA, 1600 nt, Artificial Sequence
  mRNA product Design a-1 (hSL-A64-N5) comprising derived and/or modified sequence from LASV(KAK-428;Clade n.d. (VII))__ANH09740__GPCmut13 (opt1)
aggagagucccgcagucggcguccagcggcucugcuuguucgugugugugucguugcaggccuuauucaagcuuaccaugggccagaucgugaccuucuuccaggaggucccccacgugaucgaggaggugaugaacaucguccugaucgcccucagccugcuggccauccucaaggggcuguacaacuucgcgaccugcggcgugaucgggcugaucacguuccuccugcugugcggccgcuccugcagcgccaccuacaaggggcaguacgagcuccagacccuggagcugaacauggagucccucaacaugaccaugccgcugagcugcacgaagaacaacucccaccacuacauccgggccggcaacaacaccggccuggagcucacccugaccaacacgagcaucaucucccacaaguucugcaaccugagcgacgcccacaagaagaaccucuacgaccacacccugauguccaucaucaccaccuuccaccugagcauccccaacuucaaccaguacgaggccauguccugcgacuucaacgggggcaagaucagcauccaguacaaccucucccacagcuacgcgggggacgccgcccagcacugcggcacgguggccaacgggguccugcagaccuucaugcgcauggcguggggcggcuccuaccuggcccucgacagcgggcggcgcggcugggacugcaucaucuccagcuaccaguaccugaucauccagaacaccaccugggacgaccacugccaguucucccggcccagccccaucggguaccugggcuucgugagccagaagacgcgcgacaucuacaucucccggcgccuccugggcaccuucaccuggacccugagcgacuccgaggggcacgacaugccgggcggguacugccucacgcgguggaugcugaucgaggccgaccugaagugcuucggcaacaccgccguggccaagugcaacgagaagcacgacgaggaguucugcgacauguggcgccucuucgacuucaacaagcaggcgauccagcggcugaaggccgaggcccagaugaacauccagcugaucaacaaggccgucaacgcccucaucaacgaccagcugaugaugaagaaccaccuccgcgacaucauggggauccccuacugcaacuacagcaaguucugguaccugaacaacaccaccacgggccggaccucccugccccgcugcuggcugaucagcaacggcuccuaccucaacgagacccacuucagcgacgacaucgagcagcaggcggacaacaugaucaccgagaugcugcagaaggaguacauggaccggcaggggaagacgccccugggccucguggaccuguucguguucuccaccagcuucuaccugaucaccaucuuccugcaccucgucaagaucccgugaggacuagucccuguucccagagcccacuuuuuuuucuuuuuuugaaauaaaauagccugucuuucagaucucaaaggcucuuuucagagccaccaaaaaaaaaaaaaaaaaaaaaaaaaaaaaaaaaaaaaaaaaaaaaaaaaaaaaaaaaaaaaaaaagaauu

SEQ ID NO: 41804 - RNA, 1600 nt, Artificial Sequence; identical to SEQ ID NO: 41798
  mRNA product Design a-1 (hSL-A64-N5) comprising derived and/or modified sequence from LASV(Pinneo-NIG-1969;Clade I)__AIT17836__GPCmut13 (opt1)

SEQ ID NO: 41805 - RNA, 1600 nt, Artificial Sequence
  mRNA product Design a-1 (hSL-A64-N5) comprising derived and/or modified sequence from LASV(ISTH0009-NIG-2011;Clade II)__AIT17404__GPCmut13 (opt1)
aggagagucccgcagucggcguccagcggcucugcuuguucgugugugugucguugcaggccuuauucaagcuuaccaugggccagaucaucaccuucuuccaggaggugccccacgucaucgaggaggugaugaacaucgugcugaucgcccucagccugcuggccauccucaaggggaucuacaacgucgcgaccugcggccuguucgggcugguguccuuccuccugcugugcggccgcagcugcuccacgaccuacaaggggguguacgagcuccagacccuggagcuggacauggccagccucaacaugaccaugccgcuguccugcacgaagaacaacagccaccacuacaucauggucggcaacgagaccggccuggagcucacccugaccaacacguccaucaucaaccacaaguucugcaaccugagcgacgcccacaagaagaaccucuacgaccacgcccugauguccaucaucagcaccuuccaccuguccauccccaacuucaaccaguacgaggccaugagcugcgacuucaacgggggcaagaucuccgugcaguacaaccucagccacgcguacgccguggacgccgccaaccacugcgggaccaucgcgaacggcguccugcagaccuucaugcggauggccuggggcggguccuacaucgcccuggacagcggcaagggguccugggacugcaucaugacgagcuaccaguaccucaucauccagaacaccaccugggaggaccacugccaguucucccgccccagccccaucggcuaccuggggcugcucagccagcggacccgcgacaucuacaucucccggcgccugcugggcacguucaccuggacccucagcgacuccgagggcaacgagacccccgggggcuacugccugacgcgguggaugcugaucgaggccgagcucaagugcuucgggaacaccgccguggcgaagugcaacgagaagcacgacgaggaguucugcgacaugcugcgccuguucgacuucaacaagcaggccauccggcgccucaagaccgaggcccagaugagcauccagcugaucaacaaggccgugaacgcccugaucaacgaccagcucaucaugaagaaccaccuccgggacaucaugggcaucccguacugcaacuacuccaaguacugguaccugaaccacaccgucacggggaagaccagccugccccgcugcuggcugguguccaacggcagcuaccugaacgagacccacuucuccgacgacaucgagcagcaggcggacaacaugaucaccgagcuccugcagaaggaguacauggaccggcagggcaagacgccccuggggcugguggaccucuucgucuucagcaccuccuucuaccugaucagcaucuuccugcaccucaucaagaucccgugaggacuagucccuguucccagagcccacuuuuuuuucuuuuuuugaaauaaaauagccugucuuucagaucucaaaggcucuuuucagagccaccaaaaaaaaaaaaaaaaaaaaaaaaaaaaaaaaaaaaaaaaaaaaaaaaaaaaaaaaaaaaaaaaagaauu

SEQ ID NO: 41806 - RNA, 1600 nt, Artificial Sequence
  mRNA product Design a-1 (hSL-A64-N5) comprising derived and/or modified sequence from LASV(ISTH2010-NIG-2012;Clade II)__AIT17482__GPCmut13 (opt1)
aggagagucccgcagucggcguccagcggcucugcuuguucgugugugugucguugcaggccuuauucaagcuuaccaugggccagaucaucaccuucuuccaggaggugccccacgucaucgaggaggugaugaacaucgugcugaucgcccucagccugcuggccauccucaaggggaucuacaacgucgcgaccugcggccuguucgggcugguguccuuccuccugcugugcggccgcagcugcuccacgaccuacaaggggguguacgagcuccagacccuggagcuggacauggccagccucaacaugaccaugccgcuguccugcacgaagaacaacagccaccacuacaucauggucggcaacgagaccggccuggagcucacccugaccaacacguccaucaucaaccacaaguucugcaaccugagcgacgcccacaagaagaaccucuacgaccacgcccugauguccaucaucagcaccuuccaccuguccauccccaacuucaaccaguacgaggccaugagcugcgacuucaacgggggcaagaucuccgugcaguacaaccucagccacgcguacgccguggacgccgccaaccacugcgggaccaucgcgaacggcguccugcagaccuucaugcggauggccuggggcggguccuacaucgcccuggacagcggcaagggguccugggacugcaucaugacgagcuaccaguaccucaucauccagaacaucaccugggaggaccacugccaguucucccgccccagccccaucggcuaccuggggcugcucagccagcggacccgcgacaucuacaucucccggcgccugcugggcaccuucacguggacccucagcgacuccgagggcaacgagacccccgggggcuacugccugacccgguggaugcugaucgaggccgagcucaagugcuucgggaacacggccguggcgaagugcaacgagaagcacgacgaggaguucugcgacaugcugcgccuguucgacuucaacaagcaggccauccggcgccucaagaccgaggcccagaugagcauccagcugaucaacaaggccgugaacgcccugaucaacgaccagcucaucaugaagaaccaccuccgggacaucaugggcauccccuacugcaacuacuccaaguacugguaccugaaccacaccgucaccgggaagacgagccugccccgcugcuggcugguguccaacggcagcuaccugaacgagacccacuucuccgacgacaucgagcagcaggcggacaacaugaucaccgagcuccugcagaaggaguacaucgaccggcagggcaagaccccgcuggggcugguggaccucuucgucuucagcacguccuucuaccugaucagcaucuuccugcaccucgugaagaucccgugaggacuagucccuguucccagagcccacuuuuuuuucuuuuuuugaaauaaaauagccugucuuucagaucucaaaggcucuuuucagagccaccaaaaaaaaaaaaaaaaaaaaaaaaaaaaaaaaaaaaaaaaaaaaaaaaaaaaaaaaaaaaaaaaagaauu

SEQ ID NO: 41807 - RNA, 1600 nt, Artificial Sequence
  mRNA product Design a-1 (hSL-A64-N5) comprising derived and/or modified sequence from LASV(Lassa virus/H.sapiens-wt/NGA/2015/ISTH_0543;Clade II)__AVO03639__GPCmut13 (opt1)
aggagagucccgcagucggcguccagcggcucugcuuguucgugugugugucguugcaggccuuauucaagcuuaccaugggccagaucaucaccuucuuccaggaggugccccacgucaucgaggaggugaugaacaucgugcugaucgcccucagccugcuggccauccucaaggggaucuacaacgucgcgaccugcggccuguucgggcugguguccuuccuccugcugugcggccgcagcugcuccacgaccuacaaggggguguacgagcuccagacccuggagcuggacauggccaaccucaacaugaccaugccgcugagcugcacgaagaacaacucccaccacuacaucauggucggcaacgagaccggccuggagcucacccugaccaacacgagcaucaucaaccacaaguucugcaaccuguccgacgcccacaagaagaaccucuacgaccacgcccugaugagcaucaucuccaccuuccaccugagcauccccaacuucaaccaguacgaggccauguccugcgacuucaacgggggcaagaucagcgugcaguacaaccucucccacaccuacgcgguggacgccgccaaccacugcgggaccaucgccaacggcguccugcagacguucaugcggauggcguggggcgggagcuacaucgcccuggacuccggcaaggggagcugggacugcaucaugaccuccuaccaguaccucgugauccagaacaccaccugggaggaccacugccaguucagccgccccucccccaucggcuaccuggggcugcucagccagcggacgcgcgacaucuacaucagccggcgccugcugggcaccuucaccuggacccucuccgacagcgagggcaacgagacgcccgggggcuacugccugacccgguggaugcugaucgaggccgagcucaagugcuucgggaacaccgccguggccaagugcaacgagaagcacgacgaggaguucugcgacaugcugcgccuguucgacuucaacaagcaggcgauccggcgccucaagaccgaggcccagauguccauccagcugaucaacaaggccgucaacgcccugaucaacgaccagcucaucaugaagaaccaccuccgggacaucaugggcauccccuacugcaacuacagcaaguacugguaccugaaccacacggugaccgggaagaccucccugccccgcugcuggcuggugagcaacggcuccuaccugaacgagacccacuucagcgacgacaucgagcagcaggccgacaacaugaucacggagcuccugcagaaggaguacaucgaccggcagggcaagaccccgcuggggcuggucgaccucuucguguucuccaccagcuucuaccugaucuccaucuuccugcaccucgugaagaucccgugaggacuagucccuguucccagagcccacuuuuuuuucuuuuuuugaaauaaaauagccugucuuucagaucucaaaggcucuuuucagagccaccaaaaaaaaaaaaaaaaaaaaaaaaaaaaaaaaaaaaaaaaaaaaaaaaaaaaaaaaaaaaaaaaagaauu

SEQ ID NO: 41808 - RNA, 1600 nt, Artificial Sequence
  mRNA product Design a-1 (hSL-A64-N5) comprising derived and/or modified sequence from LASV(Lassa virus/H.sapiens-wt/NGA/2016/ISTH_0009;Clade II)__AVO03571__GPCmut13 (opt1)
aggagagucccgcagucggcguccagcggcucugcuuguucgugugugugucguugcaggccuuauucaagcuuaccaugggccagaucaucaccuucuuccaggaggugccccacgucaucgaggaggugaugaacaucgugcugaucgcccucagccugcuggccauccucaaggggaucuacaacgucgcgaccugcggccugcuggggcucguguccuuccugcugcucugcggccgcagcugcuccacgaccuacaaggggguguacgagcugcagacccuggagcucgacauggccagccugaacaugaccaugccgcuguccugcacgaagaacaacagccaccacuacaucauggucggcaacgagaccggccucgagcugacccugaccaacacguccaucaucaaccacaaguucugcaaccucagcgacgcccacaagaagaaccuguacgaccacgcccugauguccaucaucagcaccuuccaccucuccauccccaacuucaaccaguacgaggccaugagcugcgacuucaacgggggccggaucuccgugcaguacaaccugagccacuccuacgcgguggacgccgccaaccacugcgggaccaucgccaacggcguccugcagaccuucaugcgcauggcguggggcgggagcuacaucgcccucgacuccggcaaggggagcugggacugcaucaugacguccuaccaguaccugaucauccagaacaccaccugggaggaccacugccaguucagccggcccagccccaucggcuaccuggggcuccugucccagcgcacccgggacaucuacaucagccgccggcugcucggcacguucaccuggacccuguccgacagcgagggcaacgagacccccgggggcuacugccugacgcgcuggaugcucaucgaggccgagcugaagugcuucgggaacaccgccguggccaagugcaacgagaagcacgacgaggaguucugcgacaugcugcggcuguucgacuucaacaagcaggcgauccgccggcugaagaccgaggcccagauguccauccagcugaucaacaaggccgugaacgcccucaucaacgaccagcugaucaugaagaaccaccuccgcgacaucaugggcaucccguacugcaacuacagcaaguacugguaccucaaccacaccgucacggggaagaccucccugccccggugcuggcuggugagcaacggcuccuaccucaacgagacccacuucagcgacgacaucgagcagcaggccgacaacaugaucaccgagcugcugcagaaggaguacaucgaccgccagggcaagacgccccuggggcucguggaccuguucgucuucuccaccagcuucuaccugaucuccaucuuccuccaccuggugaagaucccgugaggacuagucccuguucccagagcccacuuuuuuuucuuuuuuugaaauaaaauagccugucuuucagaucucaaaggcucuuuucagagccaccaaaaaaaaaaaaaaaaaaaaaaaaaaaaaaaaaaaaaaaaaaaaaaaaaaaaaaaaaaaaaaaaagaauu

SEQ ID NO: 41809 - RNA, 1600 nt, Artificial Sequence
  mRNA product Design a-1 (hSL-A64-N5) comprising derived and/or modified sequence from LASV(Lassa virus/H.sapiens-wt/NGA/2016/ISTH_0017;Clade II)__AVO03567__GPCmut13 (opt1)
aggagagucccgcagucggcguccagcggcucugcuuguucgugugugugucguugcaggccuuauucaagcuuaccaugggccagaucaucaccuucuuccaggaggugccccacgucaucgaggaggugaugaacaucgugcugaucgcccucagccugcuggccauccucaaggggaucuacaacgucgcgaccugcggccuguucgggcugguguccuuccuccugcugugcggccgcagcugcuccacgaccuacaaggggguguacgagcuccagacccuggagcuggacauggccagccucaacaugaccaugccgcuguccugcacgaagaacaacagccaccacuacaucauggucggcaacgagaccggccuggagcucacccugaccaacacguccaucaucaaccacaaguucugcaaccugagcgacgcccacaagaagaaccucuacgaccacgcccugauguccaucaucagcaccuuccaccuguccauccccaacuucaaccaguacgaggccaugagcugcgacuucaacgggggcaagaucuccgugcaguacaaccucagccacaccuacgcgaucgacgccgccaaccacugcgggaccaucgccaacggcgugcugcagacguucaugcggauggcguggggcggguccuacaucgcccuggacagcggcaagggguccugggacugcaucaugaccagcuaccaguaccucaucauccagaacaccaccugggaggaccacugccaguucucccgccccagccccaucggcuaccuggggcugcucagccagcggacgcgcgacaucuacaucucccggcgccugcugggcaccuucaccuggacccucagcgacuccgagggcaacgagacgcccgggggcuacugccugacccgguggaugcugaucgaggccgagcucaagugcuucgggaacaccgccgucgccaagugcaacgagaagcacgacgaggaguucugcgacaugcugcgccuguucgacuucaacaagcaggcgauccggcgccucaagaccgaggcccagaugagcauccagcugaucaacaaggccgugaacgcccugaucaacgaccagcucaucaugaagaaccaccuccgggacaucaugggcauccccuacugcaacuacuccaaguacugguaccugaaccacacggugaccgggaagaccagccugccccgcugcuggcuggucuccaacggcagcuaccugaacgagacccacuucuccgacgacaucgagcagcaggccgacaacaugaucacggagcuccugcagaaggaguacauggaccggcagggcaagaccccgcuggggcugguggaccucuucguguucagcaccuccuucuaccugaucagcaucuuccugcaccucguccgcaucccgugaggacuagucccuguucccagagcccacuuuuuuuucuuuuuuugaaauaaaauagccugucuuucagaucucaaaggcucuuuucagagccaccaaaaaaaaaaaaaaaaaaaaaaaaaaaaaaaaaaaaaaaaaaaaaaaaaaaaaaaaaaaaaaaaagaauu

SEQ ID NO: 41810 - RNA, 1600 nt, Artificial Sequence
  mRNA product Design a-1 (hSL-A64-N5) comprising derived and/or modified sequence from LASV(Lassa virus/H.sapiens-wt/NGA/2018/ISTH_0959;Clade II)__AVV65099__GPCmut13 (opt1)
aggagagucccgcagucggcguccagcggcucugcuuguucgugugugugucguugcaggccuuauucaagcuuaccaugggccagaucaucaccuucuuccaggaggugccccacgucaucgaggaggugaugaacaucgugcugaucgcccucagccugcuggccauccucaaggggaucuacaacgucgugaccugcggccuguucgggcugguguccuuccuccugcugugcggccgcagcugcuccacgaccuacaagggggucuacgagcuccagacccuggagcuggacauggcgagccucaacaugaccaugccgcuguccugcacgaagaacaacagccaccacuacaucauggugggcaacgagaccggccuggagcucacccugaccaacacguccaucaucaaccacaaguucugcaaccugagcgacgcccacaagaagaaccucuacgaccacgcccugauguccaucaucagcaccuuccaccuguccauccccaacuucaaccaguacgaggccaugagcugcgacuucaacgggggcaagaucuccgugcaguacaaccucagccacgccuacgcgaucgacgccgccaaccacugcgggaccaucgccaacggcguccugcagaccuucaugcggauggcguggggcggguccuacaucgcccuggacagcggcaagggguccugggacugcaucaugacgagcuaccaguaccucaucauccagaacaccaccugggaggaccacugccaguucucccgccccagccccaucggcuaccuggggcugcucagccagcggacccgcgacaucuacaucucccggcgccugcugggcacguucaccuggacccucagcgacuccgagggcaacgagacccccgggggcuacugccugacgcgguggaugcugaucgaggccgagcucaagugcuucgggaacaccgccguggccaagugcaacgagaagcacgacgaggaguucugcgacaugcugcgccuguucgacuucaacaagcaggcgauccggcgccucaagaccgaggcccagaugagcauccagcugaucaacaaggccgugaacgcccugaucaacgaccagcucaucaugaagaaccaccuccgggacaucaugggcaucccguacugcaacuacuccaaguacugguaccugaaccacaccgucacggggaagaccagccugccccgcugcuggcugguguccaacggcagcuaccugaacgagacccacuucuccgacgacaucgagcagcaggccgacaacaugaucaccgagcuccugcagaaggaguacaucgaccggcagggcaagacgccccuggggcugguggaccucuucgucuucagcaccuccuucuaccugaucagcaucuuccugcaccucgugaagaucccgugaggacuagucccuguucccagagcccacuuuuuuuucuuuuuuugaaauaaaauagccugucuuucagaucucaaaggcucuuuucagagccaccaaaaaaaaaaaaaaaaaaaaaaaaaaaaaaaaaaaaaaaaaaaaaaaaaaaaaaaaaaaaaaaaagaauu

SEQ ID NO: 41811 - RNA, 1600 nt, Artificial Sequence
  mRNA product Design a-1 (hSL-A64-N5) comprising derived and/or modified sequence from LASV(LASV003-NIG-2008;Clade II)__AIT17580__GPCmut13 (opt1)
aggagagucccgcagucggcguccagcggcucugcuuguucgugugugugucguugcaggccuuauucaagcuuaccaugggccagaucaucaccuucuuccaggaggugccccacgucaucgaggaggugaugaacaucgugcugaucgcccucagccugcuggccauccucaaggggaucuacaacgucgcgaccugcggccuguucgggcugguguccuuccuccugcugugcggccgcagcugcuccacgaccuacaaggggguguacgagcuccagacccuggagcuggacauggccagccucaacaugaccaugccgcuguccugcacgaagaacaacagccaccacuacaucauggucggcaacgagaccggccuggagcucacccugaccaacacguccaucaucaaccacaaguucugcaaccugagcgacgcccacaagaagaaccucuacgaccacgcccugauguccaucaucagcaccuuccaccuguccauccccaacuucaaccaguacgaggccaugagcugcgacuucaacgggggcaagaucuccgugcaguacaaccucagccacaccuacgcgguggacgccgccaaccacugcgggaccaucgccaacggcguccugcagacguucaugcggauggcguggggcggguccuacaucgcccuggacagcggcaagggguccugggacugcaucaugaccagcuaccaguaccucaucauccagaacaccaccugggaggaccacugccaguucucccgccccagccccaucggcuaccuggggcugcucagccagcggacgcgcgacaucuacaucucccggcgccugcugggcaccuucaccuggacccucagcgacuccgagagcaacgagacgccgggcggguacugccugacccgguggaugcugaucgaggccgagcucaagugcuucggcaacaccgccguggccaagugcaacgagaagcacgacgaggaguucugcgacaugcugcgccuguucgacuucaacaagcaggcgauccggcgccucaaggccgaggcccagauguccauccagcugaucaacaaggccgugaacgcccugaucaacgaccagcucaucaugaagaaccaccuccgggacaucauggggauccccuacugcaacuacagcaaguacugguaccugaaccacaccgucacgggccgcaccucccugccccggugcuggcuggugagcaacggguccuaccugaacgagacccacuucagcgacgacaucgagcagcaggcggacaacaugaucaccgagcuccugcagaaggaguacauggaccgccagggcaagacgccccugggccugguggaccucuucgucuucuccaccagcuucuaccugaucuccaucuuccugcaccucgugaagaucccgugaggacuagucccuguucccagagcccacuuuuuuuucuuuuuuugaaauaaaauagccugucuuucagaucucaaaggcucuuuucagagccaccaaaaaaaaaaaaaaaaaaaaaaaaaaaaaaaaaaaaaaaaaaaaaaaaaaaaaaaaaaaaaaaaagaauu

SEQ ID NO: 41812 - RNA, 1600 nt, Artificial Sequence
  mRNA product Design a-1 (hSL-A64-N5) comprising derived and/or modified sequence from LASV(LASV035-NIG-2009;Clade II)__AIT17588__GPCmut13 (opt1)
aggagagucccgcagucggcguccagcggcucugcuuguucgugugugugucguugcaggccuuauucaagcuuaccaugggccagaucaucaccuucuuccaggaggugccccacgucaucgaggaggugaugaacaucgugcugaucgcccucagccugcuggccauccucaaggggaucuacaacgucgcgaccugcggccuguucgggcugguguccuuccuccugcugugcggccgcagcugcuccacgaccuacaaggggguguacgagcuccagacccuggagcuggacauggccagccucaacaugaccaugccgcuguccugcacgaagaacaacagccaccacuacaucauggucggcaacgagaccggccuggagcucacccugaccaacacguccaucaucaaccacaaguucugcaaccugagcgacgcccacaagaagaaccucuacgaccacgcccugauguccaucaucagcaccuuccaccuguccauccccaacuucaaccaguacgaggccaugagcugcgacuucaacgggggcaagaucuccgugcaguacaaccucagccacgcguacgccguggacgccgccaaccacugcgggaccaucgcgaacggcguccugcagaccuucaugcggauggccuggggcggguccuacaucgcccuggacagcggcaagggguccugggacugcaucaugacgagcuaccaguaccucaucauccagaacaccaccugggaggaccacugccaguucucccgccccagccccaucggcuaccuggggcugcucagccagcggacccgcgacaucuacaucucccggcgccugcugggcacguucaccuggacccucagcgacuccgagggcaacgagacccccgggggcuacugccugacgcgguggaugcugaucgaggccgagcucaagugcuucgggaacaccgccguggcgaagugcaacgagaagcacgacgaggaguucugcgacaugcugcgccuguucgacuucaacaagcaggccauccggcgccucaaggccgaggcccagaugagcauccagcugaucaacaaggccgugaacgcgcugaucaacgaccagcucaucaugaagaaccaccuccgggacaucaugggcauccccuacugcaacuacuccaaguacugguaccugaaccacaccgucaccgggaagacgagccugccccgcugcuggcugguguccaacggcagcuaccugaacgagacccacuucuccgacgacaucgagcagcaggccgacaacaugaucaccgagcuccugcagaaggaguacaucgaccggcagggcaagaccccgcuggggcugguggaccucuucgucuucagcacguccuucuaccugaucagcaucuuccugcaccucgugaagaucccgugaggacuagucccuguucccagagcccacuuuuuuuucuuuuuuugaaauaaaauagccugucuuucagaucucaaaggcucuuuucagagccaccaaaaaaaaaaaaaaaaaaaaaaaaaaaaaaaaaaaaaaaaaaaaaaaaaaaaaaaaaaaaaaaaagaauu

SEQ ID NO: 41813 - RNA, 1600 nt, Artificial Sequence
  mRNA product Design a-1 (hSL-A64-N5) comprising derived and/or modified sequence from LASV(LASV1000-NIG-2009;Clade II)__AIT17782__GPCmut13 (opt1)
aggagagucccgcagucggcguccagcggcucugcuuguucgugugugugucguugcaggccuuauucaagcuuaccaugggccagaucaucaccuucuuccaggaggugccccacgucaucgaggaggugaugaacaucgugcugaucgcccucagccugcuggccauccucaaggggaucuacaacgucgcgaccugcggccuguucgggcugguguccuuccuccugcugugcggccgcagcugcuccacgaccuacaaggggguguacgagcuccagacccuggagcuggacauggccagccucaacaugaccaugccgcuguccugcacgaagaacaacagccaccacuacaucauggucggcaacgagaccggccuggagcucacccugaccaacacguccaucaucaaccacaaguucugcaaccugagcgacgcccacaagaagaaccucuacgaccacgcccugauguccaucaucagcaccuuccaccuguccauccccaacuucaaccaguacgaggccaugagcugcgacuucaacgggggcaagaucuccgugcaguacaaccucagccacaccuacgcgguggacgccgccaaccacugcgggaccaucgccaacggcguccugcagacguucaugcggauggcguggggcggguccuacaucgcccuggacagcggcaagggguccugggacugcaucaugaccagcuaccaguaccucaucauccagaacaccaccugggaggaccacugccaguucucccgccccagccccaucggcuaccuggggcugcucagccagcggacgcgcgacaucuacaucucccggcgccugcugggcaccuucaccuggacccucagcgacuccgagggcaacgagacgcccgggggcuacugccugacccgguggaugcugaucgaggccgagcucaagugcuucgggaacaccgccguggccaagugcaacgagaagcacgacgaggaguucugcgacaugcugcgccuguucgacuucaacaagcaggcgaucaagcggcucaagaccgaggcccagaugagcauccagcugaucaacaaggccgugaacgcccugaucaacgaccagcucaucaugaagaaccaccuccgcgacaucaugggcauccccuacugcaacuacuccaaguacugguaccugaaccacacggucaccgggaagaccagccugccccggugcuggcugguguccaacggcagcuaccugaacgagacccacuucuccgacgacaucgagcagcaggccgacaacaugaucacggagcuccugcagaaggaguacaucgaccgccagggcaagaccccgcuggggcugguggaccucuucgucuucagcaccuccuucuaccugaucagcaucuuccugcaccucgugaagaucccgugaggacuagucccuguucccagagcccacuuuuuuuucuuuuuuugaaauaaaauagccugucuuucagaucucaaaggcucuuuucagagccaccaaaaaaaaaaaaaaaaaaaaaaaaaaaaaaaaaaaaaaaaaaaaaaaaaaaaaaaaaaaaaaaaagaauu

SEQ ID NO: 41814 - RNA, 1600 nt, Artificial Sequence
  mRNA product Design a-1 (hSL-A64-N5) comprising derived and/or modified sequence from LASV(LASV221-NIG-2010;Clade II)__AIT17624__GPCmut13 (opt1)
aggagagucccgcagucggcguccagcggcucugcuuguucgugugugugucguugcaggccuuauucaagcuuaccaugggccagaucaucaccuucuuccaggaggugccccacgucaucgaggaggugaugaacaucgugcugaucgcccucagccugcuggccauccucaaggggaucuacaacgucgcgaccugcggccuguucgggcugguguccuuccuccugcugugcggccgcagcugcuccacgaccuacaaggggguguacgagcuccagacccuggagcuggacauggccagccucaacaugaccaugccgcuguccugcacgaagaacaacagccaccacuacaucauggucggcaacgagaccggccuggagcucacccugaccaacacguccaucaucaaccacaaguucugcaaccugagcgacgcccacaagaagaaccucuacgaccacgcccugauguccaucaucagcaccuuccaccuguccauccccaacuucaaccaguacgaggccaugagcugcgacuucaacgggggcaagaucuccgugcaguacaaccucagccacaccuacgcgaucgacgccgccaaccacugcgggaccaucgccaacggcgugcugcagacguucaugcggauggcguggggcggguccuacaucgcccuggacagcggcaagggguccugggacugcaucaugaccagcuaccaguaccucaucauccagaacaccaccugggaggaccacugccaguucucccgccccagccccaucggcuaccuggggcugcucagccagcggacgcgcgacaucuacaucucccggcgccugcugggcaccuucaccuggacccucagcgacuccgagggcaacgagacgcccgggggcuacugccugacccgguggaugcugaucgaggccgagcucaagugcuucgggaacaccgccgucgccaagugcaacgagaagcacgacgaggaguucugcgacaugcugcgccuguucgacuucaacaagcaggcgauccggcgccucaagaccgaggcccagaugagcauccagcugaucaacaaggccgugaacgcccugaucaacgaccagcucaucaugaagaaccaccuccgggacaucaugggcauccccuacugcaacuacuccaaguacugguaccugaaccacacggugaccgggaagaccagccugccccgcugcuggcuggucuccaacggcagcuaccugaacgagacccacuucuccgacgacaucgagcagcaggccgacaacaugaucacggagaugcuccagaaggaguacauggaccggcagggcaagaccccgcuggggcugguggaccuguucguguucagcaccuccuucuaccucaucagcaucuuccugcaccuggucaagaucccgugaggacuagucccuguucccagagcccacuuuuuuuucuuuuuuugaaauaaaauagccugucuuucagaucucaaaggcucuuuucagagccaccaaaaaaaaaaaaaaaaaaaaaaaaaaaaaaaaaaaaaaaaaaaaaaaaaaaaaaaaaaaaaaaaagaauu

SEQ ID NO: 41815 - RNA, 1600 nt, Artificial Sequence
  mRNA product Design a-1 (hSL-A64-N5) comprising derived and/or modified sequence from LASV(LASV237-NIG-2010;Clade II)__AIT17638__GPCmut13 (opt1)
aggagagucccgcagucggcguccagcggcucugcuuguucgugugugugucguugcaggccuuauucaagcuuaccaugggccagaucaucaccuucuuccaggaggugccccacgucaucgaggaggugaugaacaucgugcugaucgcccucagccugcuggccauccucaaggggaucuacaacgucgcgaccugcggccuguucgggcugguguccuuccuccugcugugcggccgcagcugcuccacgaccuacaaggggguguacgagcuccagacccuggagcuggacauggccagccucaacaugaccaugccgcuguccugcacgaagaacaacagccaccacuacaucauggucggcaacgagaccggccuggagcucacccugaccaacacguccaucaucaaccacaaguucugcaaccugagcgacgcccacaagaaggaccucuacgaccacgcccugauguccaucaucagcaccuuccaccuguccauccccaacuucaaccaguacgaggccaugagcugcgacuucaacgggggcaagaucuccgugcaguacaaccucagccacaccuacgcgguggacgccgccaaccacugcgggaccaucgccaacggcguccugcagacguucaugcggauggcguggggcggguccuacaucgcccuggacagcggcaagggguccugggacugcaucaugaccagcuaccaguaccucaucauccagaacaccaccugggaggaccacugccaguucucccgccccagccccaucggcuaccuggggcugcucagccagcggacgcgcgacaucuacaucucccggcgccugcugggcaccuucaccuggacccucagcgacuccgagggcaacgagacgcccgggggcuacugccugacccgguggaugcugaucgaggccgagcucaagugcuucgggaacaccgccguggccaagugcaacgagaagcacgacgaggaguucugcgacaugcugcgccuguucgacuucaacaagcaggcgauccggcgccucaagaccgaggcccagaugagcauccagcugaucaacaaggccgugaacgcccugaucaacgaccagcucaucaugaagaaccaccuccgggacaucaugggcauccccuacugcaacuacuccaaguacugguaccugaaccacacggucaccgggaagaccagccugccccgcugcuggcugguguccaacggcagcuaccugaacgagacccacuucuccgacgacaucgagcagcaggccgacaacaugaucacggagcuccugcagaaggaguacauggaccggcagggcaagaccccgcuggggcugguggaccucuucgucuucagcaccuccuucuaccugaucagcaucuuccugcaccucaucaagaucccgugaggacuagucccuguucccagagcccacuuuuuuuucuuuuuuugaaauaaaauagccugucuuucagaucucaaaggcucuuuucagagccaccaaaaaaaaaaaaaaaaaaaaaaaaaaaaaaaaaaaaaaaaaaaaaaaaaaaaaaaaaaaaaaaaagaauu

SEQ ID NO: 41816 - RNA, 1600 nt, Artificial Sequence
  mRNA product Design a-1 (hSL-A64-N5) comprising derived and/or modified sequence from LASV(LASV253-NIG-2011;Clade II)__AIT17670__GPCmut13 (opt1)
aggagagucccgcagucggcguccagcggcucugcuuguucgugugugugucguugcaggccuuauucaagcuuaccaugggccagaucaucaccuucuuccaggaggugccccacgucaucgaggaggugaugaacaucgugcugaucgcccucagccugcuggccauccucaaggggaucuacaacgucgcgaccugcggccuguucgggcugguguccuuccuccugcugugcggccgcagcugcuccacgaccuacaaggggguguacgagcuccagacccuggagcuggacauggccagccucaacaugaccaugccgcuguccugcacgaagaacaacagccaccacuacaucauggucggcaacgagaccggccuggagcucacccugaccaacacguccaucaucaaccacaaguucugcaaccugagcgacgcccacaagaagaaccucuacgaccacgcccugauguccaucaucagcaccuuccaccuguccauccccaacuucaaccaguacgaggccaugagcugcgacuucaacgggggcaagaucuccgugcaguacaaccucagccacaccuacgcgguggacgccgccaaccacugcgggaccaucgccaacggcguccugcagacguucaugcggauggcguggggcggguccuacaucgcccuggacagcggcaagggguccugggacugcaucaugaccagcuaccaguaccucaucauccagaacaccaccugggaggaccacugccaguucucccgccccagccccaucggcuaccuggggcugcucagccagcggacgcgcgacaucuacaucucccggcgccugcugggcaccuucaccuggacccucagcgacuccgagggcaacgagacgcccgggggcuacugccugacccgguggaugcugaucgaggccgagcucaagugcuucgggaacaccgccguggccaagugcaacgagaagcacgacgaggaguucugcgacaugcugcgccuguucgacuucaacaagcaggcgauccggcgccucaaggccgaggcccagaugagcauccagcugaucaacaaggccgugaacgcccugaucaacgaccagcucaucaugaagaaccaccuccgggacaucaugggcaucccguacugcaacuacuccaaguacugguaccugaaccacaccgucacggggcgcaccagccugccccggugcuggcugguguccaacggcagcuaccugaacgagacccacuucuccgacgacaucgagcagcaggcggacaacaugaucaccgagcuccugcagaaggaguacaucgaccgccagggcaagacgccccuggggcugguggaccucuucgucuucagcaccuccuucuaccugaucagcaucuuccugcaccucgugaagaucccgugaggacuagucccuguucccagagcccacuuuuuuuucuuuuuuugaaauaaaauagccugucuuucagaucucaaaggcucuuuucagagccaccaaaaaaaaaaaaaaaaaaaaaaaaaaaaaaaaaaaaaaaaaaaaaaaaaaaaaaaaaaaaaaaaagaauu

SEQ ID NO: 41817 - RNA, 1600 nt, Artificial Sequence
  mRNA product Design a-1 (hSL-A64-N5) comprising derived and/or modified sequence from LASV(LASV254-NIG-2011;Clade II)__AIT17674__GPCmut13 (opt1)
aggagagucccgcagucggcguccagcggcucugcuuguucgugugugugucguugcaggccuuauucaagcuuaccaugggccagaucaucaccuucuuccaggaggugccccacgucaucgaggaggugaugaacaucgugcugaucgcccucagccugcuggccauccucaaggggaucuacaacgucgcgaccugcggccuguucgggcugguguccuuccuccugcugugcggccgcagcugcuccacgaccuacaaggggguguacgagcuccagacccuggagcuggacaugaccaaccucaacaugacgaugccgcugagcugcaccaagaacaacucccaccacuacaucauggucggcaacgagaccggccuggagcucacccugacgaacaccagcaucaucaaccacaaguucugcaaccuguccgacgcccacaagaagaaccucuacaaccacgcccugaugagcaucaucuccaccuuccaccugagcauccccaacuucaaccaguacgaggccauguccugcgacuucaacgggggcaagaucagcgugcaguacaaccucucccacagcuacgccguggacgcggccaaccacugcgggaccaucgccaacggcguccugcagacguucaugcggauggccuggggcggguccuacaucgcgcuggacagcggcaaggggaacugggacugcaucaugaccuccuaccaguaccucaucauccagaacaccaccugggaggaccacugccaguucagccgccccucccccaucggcuaccuggggcugcucagccagcggacgcgcgacaucuacaucagccggcgccugcugggcaccuucaccuggacccucuccgacagcgagggcaacgagacgcccgggggcuacugccugacccgguggaugcugaucgaggccgagcucaagugcuucgggaacaccgccguggccaagugcaacgagaagcacgacgaggaguucugcgacaugcugcgccuguucgacuucaacaagcaggccauccggcgccucaagaccgaggcgcaggccaacauccagcugaucaacaaggccgugaacgcccugaucaacgaccagcucaucaugaagaaccaccuccgggacaucaugggcauccccuacugcaacuacuccaaguacugguaccugaaccacacggucaccgggaagaccagccugccccgcugcuggcugguguccaacggcagcuaccugaacgagacccacuucuccgacgacaucgagcagcaggccgacaacaugaucacggagcuccugcagaaggaguacauggaccggcagggcaagaccccgcuggggcugguggaccucuucgucuucagcaccuccuucuaccugaucagcaucuuccugcaccucgugaagaucccgugaggacuagucccuguucccagagcccacuuuuuuuucuuuuuuugaaauaaaauagccugucuuucagaucucaaaggcucuuuucagagccaccaaaaaaaaaaaaaaaaaaaaaaaaaaaaaaaaaaaaaaaaaaaaaaaaaaaaaaaaaaaaaaaaagaauu

SEQ ID NO: 41818 - RNA, 1600 nt, Artificial Sequence
  mRNA product Design a-1 (hSL-A64-N5) comprising derived and/or modified sequence from LASV(Nig08-A19;Clade III)__ADU56618__GPCmut13 (opt1)
aggagagucccgcagucggcguccagcggcucugcuuguucgugugugugucguugcaggccuuauucaagcuuaccaugggccagaucgugaccuucuuccaggaggucccccacgugaucgaggaggugaugaacaucguccugaucgcccucagcauccuggccauccugaaggggcucuacaacaucgcgaccugcggccugaucgggcuggugacguuccuccugcuguccggccgcagcugcuccaugaccuacaaggggguguacgagcuccagacccuggagcugaacaugaacacccucaacaugacgaugccgcugagcugcaccaagaacaacucccaccacuacaucauggucggcaacgagaccggccuggagcucacccugacgaacaccagccugcuccaccacaaguucugcaaccuguccgacgcccacaagaagaaccuguacgaccacacccucaugagcaucaucuccaccuuccaccugagcauccccaacuucaaccaguacgaggccauguccugcgacuucaacgggggcaagaucacggugcaguacaaccugagccacuccuacgccaucgacgccgcgaaccacugcgggaccguggccaacggcguccuccagaccuucaugcggauggccuggggcgggagcuacaucgcccuggacuccggccgcgggaagugggacugcaucaugaccagcuaccaguaccugaucauccagaacacgaccugggaggaccacugccaguucucccggcccagccccaucggcuaccucgggcugcugucccagcgcacccgggacaucuacaucagccgccggcuccugggcaccuucacguggacccugagcgacuccgagggcaacgagacccccgggggcuacugccucacccgcuggaugcugaucgaggcggagcugaagugcuucgggaacacggccguggccaagugcaacgagaagcacgacgaggaguucugcgacaugcuccggcuguucgacuucaacaagcaggccauccgccggcugaaggccgaggcgcagaugagcauccagcucaucaacaaggccgugaacgcccugaucaacgaccagcugaucaugaagaaccaccuccgcgacaucaugggcauccccuacugcaacuacuccaaguacugguaccugaaccacaccagcaccgggcggaccucccugccccgcugcuggcucgucagcaacggcuccuaccugaacgagacgcacuucagcgacgacaucgagcagcaggccgacaacaugaucaccgagaugcugcagaaggaguaccuggaccggcagggcaagaccccgcucgggcugguggaccuguucguguucuccaccagcuucuaccucaucuccaucuuccugcaccuggucaagaucccgugaggacuagucccuguucccagagcccacuuuuuuuucuuuuuuugaaauaaaauagccugucuuucagaucucaaaggcucuuuucagagccaccaaaaaaaaaaaaaaaaaaaaaaaaaaaaaaaaaaaaaaaaaaaaaaaaaaaaaaaaaaaaaaaaagaauu

SEQ ID NO: 41819 - RNA, 1603 nt, Artificial Sequence
  mRNA product Design a-1 (hSL-A64-N5) comprising derived and/or modified sequence from LASV(G1180-SLE-2010;Clade IV)__AIT17168__GPCmut13 (opt1)
aggagagucccgcagucggcguccagcggcucugcuuguucgugugugugucguugcaggccuuauucaagcuuaccaugggccagaucgugaccuucuuccaggaggucccccacgugaucgaggaggugaugaacaucguccugaucgcccucagcauccuggccgugcugaaggggcucuacaacuucgcgaccugcggccugguggggcugcucaccuuccugcugcucugcggccgcuccugcaccgccagccgguacaagggggucuacgagcugcagacccuggagcucaacauggagacccugaacaugacgaugccgcuguccugcaccaagaacaacagccaccacuacaucauggugggcaacgagaccggccucgagcugacccugacgaacaccuccaucaucaaccacaaguucugcaaccucagcgacgcccacaagaagaaccuguacgaccacgcccugauguccaucaucagcaccuuccaccucuccauccccaacuucaaccaguacgaggccaugagcugcgacuucaacgggggcaagaucuccgugcaguacaaccugagccacuccuacgcgggggacgccgccaaccacugcggcaccgucgccaacggggugcugcagacguucaugcgcauggcguggggcggcagcuacaucgcccucgacuccgggcacggcagcugggacugcaucaugaccuccuaccaguaccugaucauccagaacaccaccugggaggaccacugccaguucagccggcccucccccaucggguaccugggccuccugagccagcgcacgcgggacaucuacaucagccgccggcugcucggcaccuucaccuggacccuguccgacagcgaggggaaggacacgccgggcggguacugccugacccgcuggaugcucaucgaggccgagcugaagugcuucggcaacaccgccguggccaagugcaacgagaagcacgacgaggaguucugcgacaugcugcggcuguucgacuucaacaagcaggcgauccagcgccugaaggccgaggcccagauguccauccagcugaucaacaaggccgucaacgcccucaucaacgaccagcugaucaugaagaaccaccuccgggacaucauggggauccccuacugcaacuacagcaaguacugguaccucaaccacaccacgaccggcaagaccucccugcccaagugcuggcuggugagcaacggcuccuaccucaacgagacccacuucagcgacgacaucgagcagcaggcggacaacaugaucacggagaugcugcagaaggaguacauggagcgccaggggaagacgccccugggccugguggaccucuucgucuucuccaccagcuucuaccugaucuccaucuuccugcaccucgugaagaucccgugaggacuagucccuguucccagagcccacuuuuuuuucuuuuuuugaaauaaaauagccugucuuucagaucucaaaggcucuuuucagagccaccaaaaaaaaaaaaaaaaaaaaaaaaaaaaaaaaaaaaaaaaaaaaaaaaaaaaaaaaaaaaaaaaagaauu

SEQ ID NO: 41820 - RNA, 1603 nt, Artificial Sequence
  mRNA product Design a-1 (hSL-A64-N5) comprising derived and/or modified sequence from LASV(G1442-SLE-2011;Clade IV)__AIT17180__GPCmut13 (opt1)
aggagagucccgcagucggcguccagcggcucugcuuguucgugugugugucguugcaggccuuauucaagcuuaccaugggccagaucgugaccuucuuccaggaggucccccacgugaucgaggaggugaugaacaucguccugaucgcccucagcauccuggccgugcugaaggggcucuacaacguggcgaccugcggccugaucgggcuggucacguuccuccugcugugcggccgcuccugcaccaccacccucuacaaggggguguacgagcugcagacgcuggagcucaacauggagacccugaacaugaccaugccgcugagcugcaccaagaacaacucccaccacuacauccgggugggcaacgagacgggccucgagcugacccugaccaacaccagcaucaucaaccacaaguucugcaaccucuccgacgcccacaagaagaaccuguacgaccacgcccugaugagcaucaucuccacguuccaccucagcauccccaacuucaaccaguacgaggccauguccugcgacuucaacgggggcaagaucagcguccaguacaaccugucccacagcuacgccggggacgcggccaaccacugcggcaccguggccaacggggugcugcagaccuucaugcgcauggccuggggcggcuccuacaucgcgcucgacagcgggcggggcaacugggacugcaucaugaccuccuaccaguaccugaucauccagaacacgaccugggacgaccacugccaguucagccgccccucccccaucggguaccugggccuccugagccagcggacccgcgacgucuacaucucccggcgccugcucggcaccuucacguggacccugagcgacagcgaggggaaggacaccccgggcggguacugccugacccgguggaugcucaucgaggccgagcugaagugcuucggcaacacggccguggccaagugcaacgagaagcacgacgaggaguucugcgacaugcugcgccucuucgacuucaacaagcaggccauccagcggcugaaggcggaggcccagauguccauccagcugaucaacaaggccgugaacgcccucaucaacgaccagcugaucaugaagaaccaccuccgcgacaucauggggauccccuacugcaacuacagcaaguacugguaccugaacaacaccgccaccggcaagaccucccugcccaagugcuggcugaucagcaacggcuccuaccucaacgagacgcacuucagcgacgacaucgagcaggaggcggacaacaugaucaccgagaugcugcagaaggaguacauggagcggcaggggaagacgccccugggccuggucgaccucuucguguucuccaccagcuucuaccugaucuccaucuuccugcaccucgugaagaucccgugaggacuagucccuguucccagagcccacuuuuuuuucuuuuuuugaaauaaaauagccugucuuucagaucucaaaggcucuuuucagagccaccaaaaaaaaaaaaaaaaaaaaaaaaaaaaaaaaaaaaaaaaaaaaaaaaaaaaaaaaaaaaaaaaagaauu

SEQ ID NO: 41821 - RNA, 1603 nt, Artificial Sequence
  mRNA product Design a-1 (hSL-A64-N5) comprising derived and/or modified sequence from LASV(G3010-SLE-2013;Clade IV)__AIT17344__GPCmut13 (opt1)
aggagagucccgcagucggcguccagcggcucugcuuguucgugugugugucguugcaggccuuauucaagcuuaccaugggccagaucgugaccuucuuccaggaggucccccacgugaucgaggaggugaugaacaucguccugaucgcccucagcauccuggccgugcugaaggggcucuacaacuucgcgaccugcggccugguggggcuggucacguuccuccugcugugcggccgcuccugcaccaccagccucuacaaggggguguacgagcugcagacccuggagcucaacauggagacgcugaacaugaccaugccgcuguccugcaccaagaacaacagccaccacuacaucauggugggcaacgagaccggccucgagcugacgcugaccaacaccuccaucaucaaccacaaguucugcaaccucagcgacgcccacaagaagaaccuguacaaccacgcccugauguccaucaucagcaccuuccaccucuccauccccaacuucaaccaguacgaggccaugagcugcgacuucaacgggggcaagaucuccguccaguacaaccugagccacuccuacgccggggacgcggccagccacugcggcacgguggccaacggggugcugcagaccuucaugcggauggccuggggcggcuccuacaucgcgcucgacagcggguacggcaagugggacugcaucaugaccuccuaccaguaccugaucauccagaacaccacgugggaggaccacugccaguucagccgccccucccccaucggguaccugggccuccugagccagcggacccgcgacaucuacaucagccggcgccugcucggcaccuucaccuggacgcuguccgacagcgaggggaaggacaccccgggcggguacugccugacccgguggaugcucaucgaggccgagcugaagugcuucggcaacaccgccgucgccaagugcaacgagaagcacgacgaggaguucugcgacaugcugcgccucuucgacuucaacaagcaggccauccagcggcugaagacggaggcgcagauguccauccagcugaucaacaaggccgugaacgcccucaucaacgaccagcugaucaugaagaaccaccuccgcgacaucauggggauccccuacugcaacuacagcaaguacugguaccugaaccacaccaccaccggcaagacgucccugcccaagugcuggcuggugagcaacggcuccuaccucaacgagacccacuucagcgacgacaucgagcagcaggccgacaacaugaucaccgagaugcugcagaaggaguacauggagcggcaggggaagacgccccugggccuggucgaccucuucguguucuccaccagcuucuaccugaucuccaucuuccugcaccucgugaagaucccgugaggacuagucccuguucccagagcccacuuuuuuuucuuuuuuugaaauaaaauagccugucuuucagaucucaaaggcucuuuucagagccaccaaaaaaaaaaaaaaaaaaaaaaaaaaaaaaaaaaaaaaaaaaaaaaaaaaaaaaaaaaaaaaaaagaauu

SEQ ID NO: 41822 - RNA, 1603 nt, Artificial Sequence
  mRNA product Design a-1 (hSL-A64-N5) comprising derived and/or modified sequence from LASV(G502-SLE-2009;Clade IV)__AIT17126__GPCmut13 (opt1)
aggagagucccgcagucggcguccagcggcucugcuuguucgugugugugucguugcaggccuuauucaagcuuaccaugggccagaucgugaccuucuuccaggaggucccccacgugaucgaggaggugaugaacaucguccugaucgcccucagcauccuggccgugcugaaggggcucuacaacuucgcgaccugcggccugguggggcugcucacguuccugcugcucugcggccgcuccugcaccaccgggcuguacaagggcgucuacgagcugcagacccucgagcugaacauggagacgcugaacaugaccaugccgcucagcugcaccaagaacaacucccaccacuacaucauggugggcaacgagaccgggcuggagcugacgcucaccaacaccagcaucaucaaccacaaguucugcaaccuguccgacgcccacaagaagaaccuguacgaccacgcccucaugagcaucaucuccaccuuccaccugagcauccccaacuucaaccaguacgaggccauguccugcgacuucaacggcgggaagaucagcgugcaguacaaccugucccacagcuacgccggcgacgcggccgaccacugcgggacggucgccaacggcgugcuccagaccuucaugcggauggccuggggcggguccuacaucgcgcuggacagcggccgcgggcggugggacugcaucaugaccuccuaccaguaccugaucauccagaacaccacgugggaggaccacugccaguucagccgccccucccccaucggcuaccucggccugcugagccagcggacccgcgacaucuacaucucccggcgccuccuggggaccuucaccuggacgcugagcgacagcgagggcaaggacacccccgggggcuacugccucacccgguggaugcugaucgaggccgagcugaagugcuucgggaacaccgccguggccaagugcaacgagaagcacgacgaggaguucugcgacaugcuccgccuguucgacuucaacaagcaggccauccagcggcugaaggcggaggcccagauguccauccagcucaucaacaaggccgucaacgcccugaucaacgaccagcuggugaugaagaaccaccuccgcgacaucaugggcauccccuacugcaacuacagccgguacugguaccugaaccacacgaccaccggccgcaccucccugcccaagugcuggcucgugagcaacggguccuaccugaacgagacgcacuucagcgacgacaucgagcagcaggccgacaacaugaucaccgagaugcugcagaaggaguacauggagcggcagggcaagaccccgcuggggcucgucgaccuguucguguucuccaccagcuucuaccugaucuccaucuuccuccaccuggugaagaucccgugaggacuagucccuguucccagagcccacuuuuuuuucuuuuuuugaaauaaaauagccugucuuucagaucucaaaggcucuuuucagagccaccaaaaaaaaaaaaaaaaaaaaaaaaaaaaaaaaaaaaaaaaaaaaaaaaaaaaaaaaaaaaaaaaagaauu

SEQ ID NO: 41823 - RNA, 1603 nt, Artificial Sequence
  mRNA product Design a-1 (hSL-A64-N5) comprising derived and/or modified sequence from LASV(G733-SLE-2010;Clade IV)__AIT17154__GPCmut13 (opt1)
aggagagucccgcagucggcguccagcggcucugcuuguucgugugugugucguugcaggccuuauucaagcuuaccaugggccagaucgugaccuucuuccaggaggucccccacgugaucgaggaggugaugaacaucguccugaucgcccucagcauccuggccgugcugaaggggcucuacaacuucgcgaccugcggcaucguggggcuggucuccuuccugcuccugugcggccgcagcugcacgaccucccuguacaaggggguguacgagcuccagacccuggagcugaacauggagacccucaacaugacgaugccgcugagcugcaccaagaacaacucccaccacuacaucauggugggcaacgagaccggccuggagcucacccugacgaacaccagcaucaucaaccacaaguucugcaaccuguccgacgcccacaagaagaaccucuacgaccacgcccugaugagcaucaucuccaccuuccaccugagcauccccaacuucaaccaguacgaggccauguccugcgacuucaacgggggcaagaucagcguccaguacaaccucucccacagcuacgccggggacgcggccaaccacugcggcaccaucgccaacggggugcugcagacguucaugcggauggccuggggcggcuccuacaucgcgcuggacagcgggcgcgaccggugggacugcaucaugaccuccuaccaguaccucaucauccagaacaccaccugggaggaccacugccaguucagccgccccucccccaucggcuaccuggggcugcucagccagcggacgcgcgacaucuacaucagccggcgccugcugggcaccuucaccuggacccucuccgacagcgagggcaaggacacgcccgggggcuacugccugacccgguggaugcugaucgaggccgagcucaagugcuucgggaacaccgccguggccaagugcaacgagaagcacgacgaggaguucugcgacaugcugcgccuguucgacuucaacaagcaggccauccagcggcucaaggcggaggcccagauguccauccagcugaucaacaaggccgucaacgcccugaucaacgaccagcucaucaugaagaaccaccuccgcgacaucaugggcauccccuacugcaacuacagcaaguacugguaccugaaccacaccacgaccgggaagaccucccugcccaagugcuggcuggugagcaacggcuccuaccugaacgagacccacuucagcgacgacaucgagcagcaggccgacaacaugaucacggagaugcuccagaaggaguacauggagcggcagggcaagaccccgcuggggcugguggaccuguucgucuucuccaccagcuucuaccucaucuccaucuuccugcaccuggugaagaucccgugaggacuagucccuguucccagagcccacuuuuuuuucuuuuuuugaaauaaaauagccugucuuucagaucucaaaggcucuuuucagagccaccaaaaaaaaaaaaaaaaaaaaaaaaaaaaaaaaaaaaaaaaaaaaaaaaaaaaaaaaaaaaaaaaagaauu

SEQ ID NO: 41824 - RNA, 1603 nt, Artificial Sequence
  mRNA product Design a-1 (hSL-A64-N5) comprising derived and/or modified sequence from MOPV/LASV reassortant(IGS-1;Clade IV)__AFY05576__GPCmut13 (opt1)
aggagagucccgcagucggcguccagcggcucugcuuguucgugugugugucguugcaggccuuauucaagcuuaccaugggccagaucgugaccuucuuccaggaggucccccacgugaucgaggaggugaugaacaucguccugaucgcccucagcgugcuggccgugcugaaggggcucuacaacuucgcgaccugcggccuggucgggcuggugacguuccuccugcugugcggccgcuccugcaccaccagccucuacaaggggguguacgagcugcagacccuggagcucaacauggagacgcugaacaugaccaugccgcuguccugcaccaagaacaacagccaccacuacaucauggucggcaacgagaccggccucgagcugacgcugaccaacaccuccaucaucaaccacaaguucugcaaccucagcgacgcccacaagaagaaccuguacgaccacgcccugauguccaucaucagcaccuuccaccucuccauccccaacuucaaccaguacgaggccaugagcugcgacuucaacgggggcaagaucuccgugcaguacaaccugagccacuccuacgccggggacgcggccaaccacugcggcacgguggccaacgggguccugcagaccuucaugcggauggccuggggcggcagcuacaucgcgcucgacuccgggcgcggcaacugggacugcaucaugaccagcuaccaguaccugaucauccagaacaccacgugggaggaccacugccaguucucccggcccagccccaucggguaccugggccuccugucccagcgcacccgggacaucuacaucagccgccggcugcucggcaccuucaccuggacgcugagcgacuccgagggggaggacaccccgggcggguacugccugacccgcuggaugcucaucgaggccgagcugaagugcuucggcaacaccgccguggccaagugcaacgagaagcacgacgaggaguucugcgacaugcugcggcuguucgacuucaacaagcaggccauccagcgccugaaggcggaggcccagaugagcauccagcugaucaacaaggccgugaacgcccucaucaacgaccagcugaucaugaagaaccaccuccgggacaucauggggauccccuacugcaacuacuccaaguacugguaccucaaccacacgaccaccggccgcaccagccugcccaagugcuggcuggucuccaacggcagcuaccucaacgagacgcacuucuccgacgacaucgagcagcaggccgacaacaugaucaccgagaugcugcagaaggaguacauggagcggcaggggaagacgccccugggccugguggaccucuucguguucagcaccuccuucuaccugaucagcaucuuccugcaccucgucaagaucccgugaggacuagucccuguucccagagcccacuuuuuuuucuuuuuuugaaauaaaauagccugucuuucagaucucaaaggcucuuuucagagccaccaaaaaaaaaaaaaaaaaaaaaaaaaaaaaaaaaaaaaaaaaaaaaaaaaaaaaaaaaaaaaaaaagaauu

SEQ ID NO: 41825 - RNA, 1603 nt, Artificial Sequence
  mRNA product Design a-1 (hSL-A64-N5) comprising derived and/or modified sequence from LASV(LM765-SLE-2012;Clade IV)__AIT17814__GPCmut13 (opt1)
aggagagucccgcagucggcguccagcggcucugcuuguucgugugugugucguugcaggccuuauucaagcuuaccaugggccagaucgugaccuucuuccaggaggucccccacgugaucgaggaggugaugaacaucguccugaucgcccucagcauccuggccgugcugaaggggcucuacaacuucgcgaccugcggccugguggggcuggucacguuccuccugcugugcggccgcuccugcaccaccagccucuacaaggggguguacgagcugcagacccuggagcucaacauggagacgcugaacaugaccaugccgcuguccugcaccaagaacaacagccaccacuacaucauggugggcaacgagaccggccucgagcugacgcugaccaacaccuccaucaucgaccacaaguucugcaaccucagcgacgcccaccggaagaaccuguacgaccacgcccugauguccaucaucagcaccuuccaccucuccauccccaacuucaaccaguacgaggccaugagcugcgacuucaacgggggcaagaucuccguccaguacaaccugagccacuccuacgccaaggacgcggccgaccacugcgggacgguggccaacggcgugcugcagaccuucaugcgcauggccuggggcgggagcuacaucgcgcucgacuccggccgggggcgcugggacugcaucaugaccagcuaccaguaccugaucauccagaacaccacgugggaggaccacugccaguucucccggcccagccccaucggcuaccuggggcuccugucccagcgcacccgggacaucuacaucagccgccggcugcucggcaccuucaccuggacgcugagcgacuccgagggcaaggacacccccgggggcuacugccugacccgcuggaugcucaucgaggccgagcugaagugcuucgggaacaccgccgucgccaagugcaacgagaagcacgacgaggaguucugcgacaugcugcggcuguucgacuucaacaagcaggccauccagcgccugaaggcggaggcccagaugagcauccagcugaucaacaaggccgugaacgcccucaucaacgaccagcugaucaugaagaaccaccuccgggacaucaugggcauccccuacugcaacuacuccaaguacugguaccucaaccacacgaccaccgggaagaccagccugcccaagugcuggcugguguccaacggcagcuaccucaacgagacgcacuucuccgacgacaucgagcagcaggccgacaacaugaucaccgagaugcugcagaaggaguacauggagcgccagggcaagaccccgcuggggcuggucgaccucuucguguucagcaccuccuucuaccugaucagcaucuuccugcaccucgugaagaucccgugaggacuagucccuguucccagagcccacuuuuuuuucuuuuuuugaaauaaaauagccugucuuucagaucucaaaggcucuuuucagagccaccaaaaaaaaaaaaaaaaaaaaaaaaaaaaaaaaaaaaaaaaaaaaaaaaaaaaaaaaaaaaaaaaagaauu

SEQ ID NO: 41826 - RNA, 1603 nt, Artificial Sequence
  mRNA product Design a-1 (hSL-A64-N5) comprising derived and/or modified sequence from LASV(LM776-SLE-2012;Clade IV)__AIT17824__GPCmut13 (opt1)
aggagagucccgcagucggcguccagcggcucugcuuguucgugugugugucguugcaggccuuauucaagcuuaccaugggccagaucgugaccuucuuccaggaggucccccacgugaucgaggaggugaugaacaucguccugaucgcccucagcauccuggccgugcugaaggggcucuacaacuucgcgaccugcggccugguggggcuggucacguuccuccugcugugcggccgcuccugcaccaccagcguguacaaggggguguacgagcuccagacccuggagcugaacauggagacgcucaacaugaccaugccgcuguccugcaccaagaacaacagccaccacuacaucauggucggcaacgagaccggccuggagcucacgcugaccaacaccuccaucaucaaccacaaguucugcaaccugagcgacgcccacaagaagaaccucuacgaccacgcccugauguccaucaucagcaccuuccaccuguccauccccaacuucaaccaguacgaggccaugagcugcgacuucaacgggggcaagaucuccgugcaguacaaccucagccacuccuacgccggggacgcggccaaccacugcggcacgguggccaacgggguccugcagaccuucaugcggauggccuggggcggcagcuacaucgcgcuggacuccgggcacggcaagugggacugcaucaugaccagcuaccaguaccucaucauccagaacaccacgugggaggaccacugccaguucucccgccccagccccaucggguaccugggccugcucucccagcggacccgcgacaucuacaucagccggcgccugcugggcaccuucaccuggacgcucagcgacuccgaggggaaggacaccccgggcggguacugccugacccgguggaugcugaucgaggccgagcucaagugcuucggcaacaccgccguggccaagugcaacgagaagcacgacgaggaguucugcgacaugcugcgccuguucgacuucaacaagcaggccauccagcggcucaaggcggaggcccagaugagcauccagcugaucaacaaggccgugaacgcccugaucaacgaccagcucaucaugaagaaccaccuccgcgacaucauggggauccccuacugcaacuacuccaaguacugguaccugaaccacacgaccaccggcaagaccagccugcccaagugcuggcuggucuccaacggcagcuaccugaacgagacgcacuucuccgacgacaucgagcagcaggccgacaacaugaucaccgagaugcuccagaaggaguacauggagcggcaggggaagacgccccugggccugguggaccuguucguguucagcaccuccuucuaccucaucagcaucuuccugcaccuggucaagaucccgugaggacuagucccuguucccagagcccacuuuuuuuucuuuuuuugaaauaaaauagccugucuuucagaucucaaaggcucuuuucagagccaccaaaaaaaaaaaaaaaaaaaaaaaaaaaaaaaaaaaaaaaaaaaaaaaaaaaaaaaaaaaaaaaaagaauu

SEQ ID NO: 41827 - RNA, 1603 nt, Artificial Sequence
  mRNA product Design a-1 (hSL-A64-N5) comprising derived and/or modified sequence from LASV(Mad39;Clade IV)__ANH09722__GPCmut13 (opt1)
aggagagucccgcagucggcguccagcggcucugcuuguucgugugugugucguugcaggccuuauucaagcuuaccaugggccagaucgugaccuucuuccaggaggucccccacgugaucgaggaggugaugaacaucguccugaucgcccucagcauccuggccgugcugaaggggcucuacaacguggcgaccugcggccugaucgggcuggucacguuccuccugcugugcggccgcuccugcaccaccacccucuacaaggggguguacgagcugcaggcccuggagcucaacauggagacgcugaacaugaccaugccgcugagcugcaccaagaacaacucccaccacuacauccgggugggcaacgagaccggccucgagcugacgcugaccaacaccagccucaucaaccacaaguucugcaaccuguccgacgcccacaagaagaaccuguacgaccacgcccucaugagcaucaucuccaccuuccaccugagcauccccaacuucaaccaguacgaggccauguccugcgacuucaacgacgggaagaucagcguccaguacaaccugucccacacguacgcgggcgacaccgccaaccacugcgggaccguggccaacggcgugcuccagaccuucaugcgcauggccuggggcgggagcuacaucgcgcuggacuccggccgcgggggcugggacugcaucaugacgagcuaccaguaccugaucauccagaacaccaccugggaggaccacugccaguucucccggcccagccccaucggguaccucggccugcugucccagcggacccgcgacaucuacaucagccggcgccuccugggcacguucaccuggacccuguccgacagcgaggggaaggacaccccgggcggguacugccucacgcgguggaugcugaucgaggccgagcugaagugcuucggcaacaccgccgucgccaagugcaacgagaagcacgacgaggaguucugcgacaugcuccgccuguucgacuucaacaagcaggccauccagcggcugaaggcggaggcccagaugagcauccagcucaucaacaaggccgugaacgcccugaucaacgaccagcugaucaugaagaaccaccuccgcgacaucauggggauccccuacugcaacuacuccaaguacugguaccugaaccacaccgugaccggcaagacgagccugcccaagugcuggcucgucuccaacggcagcuaccugaacgagacccacuucuccgacgacaucgagcagcaggccgacaacaugaucaccgagaugcugcagaaggaguacauggagcggcaggggaagacgccccugggccucguggaccuguucguguucagcaccuccuucuaccugaucagcaucuuccuccaccuggucaagaucccgugaggacuagucccuguucccagagcccacuuuuuuuucuuuuuuugaaauaaaauagccugucuuucagaucucaaaggcucuuuucagagccaccaaaaaaaaaaaaaaaaaaaaaaaaaaaaaaaaaaaaaaaaaaaaaaaaaaaaaaaaaaaaaaaaagaauu

SEQ ID NO: 41828 - RNA, 1603 nt, Artificial Sequence
  mRNA product Design a-1 (hSL-A64-N5) comprising derived and/or modified sequence from LASV(Z0947-SLE-2011;Clade IV)__AIT17840__GPCmut13 (opt1)
aggagagucccgcagucggcguccagcggcucugcuuguucgugugugugucguugcaggccuuauucaagcuuaccaugggccagaucgugaccuucuuccaggaggucccccacgugaucgaggaggugaugaacaucguccugaucgcccucagcauccuggccgugcugaaggggcucuacaacuucgcgaccugcggccugguggggcuggucacguuccuccugcugugcggccgcuccugcaccaucagccucuacaaggggguguacgagcugcagacccuggagcucaacauggagacccugaacaugacgaugccgcuguccugcaccaagaacaacagccaccacuacaucauggugggcaacgagaccggccucgagcugacccugacgaacaccuccaucaucaaccacaaguucugcaaccucagcgacgcccacaagaagaaccuguacgaccacgcccugauguccaucaucagcaccuuccaccucuccauccccaacuucaaccaguacgaggccaugagcugcgacuucaacgggggcaagaucuccguccaguacaaccugagccacuccuacgccggggacgcggccaaccacugcggcaccguggccaacggggugcugcagacguucaugcggauggccuggggcggcagcuacaucgcgcucgacuccgggcgcgaccggugggacugcaucaugaccagcuaccaguaccugaucauccagaacaccaccugggaggaccacugccaguucucccgccccagccccaucggcuaccuggggcuccugucccagcggacgcgcgacaucuacaucagccggcgccugcucggcaccuucaccuggacccugagcgacuccgagggcaaggacacgcccgggggcuacugccugacccgguggaugcucaucgaggccgagcugaagugcuucgggaacaccgccgucgccaagugcaacgagaagcacgacgaggaguucugcgacaugcugcgccucuucgacuucaacaagcaggccauccagcggcugaaggcggaggcccagaugagcauccagcugaucaacaaggccgugaacgcccucaucaacgaccagcugaucaugaagaaccaccuccgcgacaucaugggcauccccuacugcaacuacuccaaguacugguaccugaaccacaccacgaccgggaagaccagccugcccaagugcuggcugguguccaacggcagcuaccucaacgagacccacuucuccgacgacaucgagcagcaggccgacaacaugaucacggagaugcugcagaaggaguacauggagcggcagggcaagaccccgcuggggcuggucgaccucuucguguucagcaccuccuucuaccugaucagcaucuuccugcaccucgugaagaucccgugaggacuagucccuguucccagagcccacuuuuuuuucuuuuuuugaaauaaaauagccugucuuucagaucucaaaggcucuuuucagagccaccaaaaaaaaaaaaaaaaaaaaaaaaaaaaaaaaaaaaaaaaaaaaaaaaaaaaaaaaaaaaaaaaagaauu

SEQ ID NO: 41829 - RNA, 1603 nt, Artificial Sequence
  mRNA product Design a-1 (hSL-A64-N5) comprising derived and/or modified sequence from LASV(Josiah;Clade IV)__NP_694870__GPCmut13 (opt4)
aggagagucccgcagucggcguccagcggcucugcuuguucgugugugugucguugcaggccuuauucaagcuuaccaugggccagaucgugaccuucuuccaggaggugccccacgugaucgaggaggugaugaacaucgugcugaucgcccugagcgugcuggccgugcugaagggccuguacaacuucgccaccugcggccuggugggccuggugaccuuccugcugcugugcggcagaagcugcaccaccagccuguacaagggcguguacgagcugcagacccuggagcugaacauggagacccugaacaugaccaugccccugagcugcaccaagaacaacagccaccacuacaucauggugggcaacgagaccggccuggagcugacccugaccaacaccagcaucaucaaccacaaguucugcaaccugagcgacgcccacaagaagaaccuguacgaccacgcccugaugagcaucaucagcaccuuccaccugagcauccccaacuucaaccaguacgaggccaugagcugcgacuucaacggcggcaagaucagcgugcaguacaaccugagccacagcuacgccggcgacgccgccaaccacugcggcaccguggccaacggcgugcugcagaccuucaugagaauggccuggggcggcagcuacaucgcccuggacagcggcagaggcaacugggacugcaucaugaccagcuaccaguaccugaucauccagaacaccaccugggaggaccacugccaguucagcagacccagccccaucggcuaccugggccugcugagccagagaaccagagacaucuacaucagcagaagacugcugggcaccuucaccuggacccugagcgacagcgagggcaaggacacccccggcggcuacugccugaccagauggaugcugaucgaggccgagcugaagugcuucggcaacaccgccguggccaagugcaacgagaagcacgacgaggaguucugcgacaugcugagacuguucgacuucaacaagcaggccauccagagacugaaggccgaggcccagaugagcauccagcugaucaacaaggccgugaacgcccugaucaacgaccagcugaucaugaagaaccaccugagagacaucaugggcauccccuacugcaacuacagcaaguacugguaccugaaccacaccaccaccggcagaaccagccugcccaagugcuggcuggugagcaacggcagcuaccugaacgagacccacuucagcgacgacaucgagcagcaggccgacaacaugaucaccgagaugcugcagaaggaguacauggagagacagggcaagaccccccugggccugguggaccuguucguguucagcaccagcuucuaccugaucagcaucuuccugcaccuggugaagauccccugaggacuagucccuguucccagagcccacuuuuuuuucuuuuuuugaaauaaaauagccugucuuucagaucucaaaggcucuuuucagagccaccaaaaaaaaaaaaaaaaaaaaaaaaaaaaaaaaaaaaaaaaaaaaaaaaaaaaaaaaaaaaaaaaagaauu

SEQ ID NO: 41830 - RNA, 1600 nt, Artificial Sequence
  mRNA product Design a-1 (hSL-A64-N5) comprising derived and/or modified sequence from LASV(LP;Clade I)__AAF86701__GPCmut13 (opt4)
aggagagucccgcagucggcguccagcggcucugcuuguucgugugugugucguugcaggccuuauucaagcuuaccaugggccagaucaucaccuucuuccaggaggugccccacgugaucgaggaggugaugaacaucgugcugaucgcccugagccugcuggccauccugaagggccuguacaacaucgccaccugcggcaucaucggccugguggccuuccuguuccugugcggcaagagcugcagccugacccugaagggcggcuacgagcugcagacccuggagcugaacauggagacccugaacaugaccaugccccugagcugcaccaagaacagcagccaccacuacaucagagugggcaacgagaccggccuggagcugacccugaccaacaccagcaucaucaaccacaaguucugcaaccugagcgacgcccacaagaagaaccuguacgaccacgcccugaugagcaucaucagcaccuuccaccugagcauccccaacuucaaccaguacgaggccaugagcugcgacuucaacggcggcaagaucagcgugcaguacaaccugagccacagcuacgccggcgacgccgccgagcacugcggcaccguggccaacggcgugcugcagaccuucaugagaauggccuggggcggcagauacaucgcccuggacagcggcaagggcaacugggacugcaucaugaccagcuaccaguaccugaucauccagaacaccaccugggaggaccacugccaguucagcagacccagccccaucggcuaccugggccugcugagccagagaaccagagacaucuacaucagcagaagacugcugggcaccuucaccuggacccugagcgacagcgagggcaacgagacccccggcggcuacugccugaccagauggaugcugaucgaggccgagcugaagugcuucggcaacaccgccguggccaagugcaacgagaagcacgacgaggaguucugcgacaugcugagacuguucgacuucaacaagcaggccaucagaagacugaaggccgaggcccagaugagcauccagcugaucaacaaggccgugaacgcccugaucaacgaccagcugaucaugaagaaccaccugagagacaucaugggcauccccuacugcaacuacagcaaguacugguaccugaaccacaccagcagcggcagaaccagccugcccaagugcuggcugaucagcaacggcagcuaccugaacgagacccaguucagcgacgacaucgagcagcaggccgacaacaugaucaccgagaugcugcagaaggaguacaucgagagacagggcaagaccccccugggccugguggacaucuucaucuucagcaccagcuucuaccugaucagcaucuuccugcaccugaucaagauccccugaggacuagucccuguucccagagcccacuuuuuuuucuuuuuuugaaauaaaauagccugucuuucagaucucaaaggcucuuuucagagccaccaaaaaaaaaaaaaaaaaaaaaaaaaaaaaaaaaaaaaaaaaaaaaaaaaaaaaaaaaaaaaaaaagaauu

SEQ ID NO: 41831 - RNA, 1600 nt, Artificial Sequence
  mRNA product Design a-1 (hSL-A64-N5) comprising derived and/or modified sequence from LASV(803213;Clade II)__AAF86703__GPCmut13 (opt4)
aggagagucccgcagucggcguccagcggcucugcuuguucgugugugugucguugcaggccuuauucaagcuuaccaugggccagaucaucaccuucuuccaggaggugccccacgugaucgaggaggugaugaacaucgugcugaucgcccugagccugcuggccauccugaagggcaucuacaacguggccaccugcggccuguucggccugaucagcuuccugcugcugugcggcagaagcugcagcgugaccuacaagggcguguacgagcugcagacccuggagcugaacauggccaaccugaacaugaccaugccccugagcugcaccaagaacaacagccaccacuacaucauggugggcaacgagaccggccuggagcugacccugaccaacaccagcaucaucaaccacaaguucugcaaccugagcgacgcccacaagaagaaccuguacgaccacgcccugaugagcaucaucagcaccuuccaccugagcauccccaacuucaaccaguacgaggccaugagcugcgacuucaacggcggcaagaucagcgugcaguacaaccugagccacagcuucgccguggacgccgccaaccacugcggcaccaucgccaacggcgugcugcagaccuucaugagaauggccuggggcggcagcuacaucgcccuggacagcggcaagggcaacugggacugcaucaugaccagcuaccaguaccugaucauccagaacaccaccugggaggaccacugccaguucagcagacccagccccaucggcuaccugggccugcugagccagagaaccagagacaucuacaucagcagaagacugcugggcaccuucaccuggacccugagcgacagcgagggcaacgaggcccccggcggcuacugccugaccagauggaugcugaucgaggccgagcugaagugcuucggcaacaccgccguggccaagugcaacgagaagcacgacgaggaguucugcgacaugcugagacuguucgacuucaacaagcaggccaucaagagacugaagaccgaggcccagaugagcauccagcugaucaacaaggccgugaacgcccugaucaacgaccagcugaucaugaagaaccaccugagagacaucaugggcauccccuacugcaacuacagcagauacugguaccugaaccacaccgugaccggcaagaccagccugcccagaugcuggcuggugagcaacggcagcuaccugaacgagacccacuucagcgacgacaucgagcagcaggccgacaacaugaucaccgagaugcugcagaaggaguacauggacagacagggcaagaccccccugggccugguggaccuguucguguucagcaccagcuucuaccugaucagcaucuuccugcaccuggugaagauccccugaggacuagucccuguucccagagcccacuuuuuuuucuuuuuuugaaauaaaauagccugucuuucagaucucaaaggcucuuuucagagccaccaaaaaaaaaaaaaaaaaaaaaaaaaaaaaaaaaaaaaaaaaaaaaaaaaaaaaaaaaaaaaaaaagaauu

SEQ ID NO: 41832 - RNA, 1600 nt, Artificial Sequence
  mRNA product Design a-1 (hSL-A64-N5) comprising derived and/or modified sequence from LASV(GA391;Clade III)__CAA36645__GPCmut13 (opt4)
aggagagucccgcagucggcguccagcggcucugcuuguucgugugugugucguugcaggccuuauucaagcuuaccaugggccagaucgugaccuucuuccaggaggugccccacgugaucgaggaggugaugaacaucgugcugaucgcccugagcauccuggccauccugaagggccuguacaacguggccaccugcggccugaucggccuggugaccuuccugcugcugagcggcagaagcugcagccugaucuacaagggcaccuacgagcugcagacccuggagcugaacauggagacccugaacaugaccaugccccugagcugcaccaagaacaacagccaccacuacaucagagugggcaacgagaccggccuggagcugacccugaccaacaccagcauccugaaccacaaguucugcaaccugagcgacgcccacaagagaaaccuguacgaccacagccugaugagcaucaucagcaccuuccaccugagcauccccaacuucaaccaguacgaggccaugagcugcgacuucaacggcggcaagaucaccgugcaguacaaccugagccacagcuucgccguggacgccgccggccacugcggcacccuggccaacggcgugcugcagaccuucaugagaauggccuggggcggcagcuacaucgcccuggacagcggcagaggcaacugggacugcaucaugaccagcuaccaguaccugaucauccagaacaccaccugggacgaccacugccaguucagcagacccagccccaucggcuaccugggccugcugagccagagaaccagagacaucuacaucagcagaagacugcugggcaccuucaccuggacccugagcgacagcgagggcaacgagacccccggcggcuacugccugaccagauggaugcugaucgaggccgagcugaagugcuucggcaacaccgccguggccaagugcaacgagaagcacgacgaggaguucugcgacaugcugagacuguucgacuucaacaagcaggccaucagaagacugaagaccgaggcccagaugagcauccagcugaucaacaaggccgugaacgcccugaucaacgaccagcugaucaugaagaaccaccugagagacaucaugggcauccccuacugcaacuacagcagauacugguaccugaaccacaccagcaccggcaagaccagccugcccagaugcuggcugaucagcaacggcagcuaccugaacgagaccaaguucagcgacgacaucgagcagcaggccgacaacaugaucaccgagaugcugcagaaggaguacaucgacagacagggcaagaccccccugggccugguggaccuguucguguucagcaccagcuucuaccugaucagcaucuuccugcaccuggugaagauccccugaggacuagucccuguucccagagcccacuuuuuuuucuuuuuuugaaauaaaauagccugucuuucagaucucaaaggcucuuuucagagccaccaaaaaaaaaaaaaaaaaaaaaaaaaaaaaaaaaaaaaaaaaaaaaaaaaaaaaaaaaaaaaaaaagaauu

SEQ ID NO: 41833 - RNA, 1603 nt, Artificial Sequence
  mRNA product Design a-1 (hSL-A64-N5) comprising derived and/or modified sequence from LASV(AV;Clade V)__CCA30314__GPCmut13 (opt4)
aggagagucccgcagucggcguccagcggcucugcuuguucgugugugugucguugcaggccuuauucaagcuuaccaugggccagaucgugaccuucuuccaggaggugccccacgugaucgaggaggugaugaacaucgugcugaucgcccugagcauccuggccgugcugaagggccuguacaacaucgccaccugcggccugaucggccugaucaccuuccugcugcugugcggcagaagcugcagcagcaaccuguacaagggcguguacgagcugcagagccuggaccugaacauggagacccugaacaugaccaugccccugagcugcaccaagaacaacagccaccacuacaucagagugggcaacgacaccggccuggagcugacccugaccaacaccagcauccugaaccacaaguucugcaaccugagcgacgcccacaagaaggaccuguacgaccacgcccugaugagcaucaucagcaccuuccaccugagcauccccaacuucaaccaguacgaggccaugagcugcgacuucaacggcggcaagaucagcgugcaguacaaccugagccacagcuacgccaucgacgccgccaaccacugcggcaccguggccaacggcauccugcagaccuucaugagaauggccuggggcggcagcuacaucgcccuggacagcggcagaggcaacugggacugcaucaugaccagcuaccaguaccugaucauccagaacaccaccugggagaaccacugccaguucagcagacccagccccaucggcuaccugggccugcugagccagagaaccagagacaucuacaucagcagaagacugcugggcaccuucaccuggacccugagcgacagcgagggcaacgccacccccggcggcuacugccugaccagauggaugcugaucgaggccgagcugaagugcuucggcaacaccgccguggccaagugcaacgagaagcacgacgaggaguucugcgacaugcugagacuguucgacuucaacaagcaggccaucagcagacugaagagcgaggcccagaugagcauccagcugaucaacaaggccgugaacgcccugaucaacgaccagcugaucaugaagaaccaccugagagacaucaugggcauccccuacugcaacuacagcaaguacugguaccugaaccacaccaucaccggcaagaccagccugcccaagugcuggcuggugagcaacggcagcuaccugaacgagacccacuucagcgacgacaucgagcagcaggccgacaacaugaucaccgagaugcugcagaaggaguacauggagagacagggcaagaccccccugggccugguggaccuguucguguucagcaccagcuucuaccugaucagcaucuuccugagacuggugaagauccccugaggacuagucccuguucccagagcccacuuuuuuuucuuuuuuugaaauaaaauagccugucuuucagaucucaaaggcucuuuucagagccaccaaaaaaaaaaaaaaaaaaaaaaaaaaaaaaaaaaaaaaaaaaaaaaaaaaaaaaaaaaaaaaaaagaauu

SEQ ID NO: 41834 - RNA, 1600 nt, Artificial Sequence
  mRNA product Design a-1 (hSL-A64-N5) comprising derived and/or modified sequence from LASV(Togo/2016/7082;Clade VI)__AMR44577__GPCmut13 (opt4)
aggagagucccgcagucggcguccagcggcucugcuuguucgugugugugucguugcaggccuuauucaagcuuaccaugggccagaucaucaccuucuuccaggaggugccccacgugaucgaggaggugaugaacaucgugcugaucgcccugagccugcuggccauccugaagggcguguacaacguggccaccugcggcaucaucggccuggugaccuuccuguuccugugcggcagaagcugcagccugaucuacaagggcagcuacgagcugcagacccuggagcugaacauggagacccugaacaugaccaugccccugagcugcaccaagaacagcagccaccacuacaucagagugggcaacgagaccggccuggagcugacccugaccaacaccagcaucaucaaccacaaguucugcaaccugagcgacgcccacaagagaaaccuguacgaccacgcccugaugagcauccugagcaccuuccaccugagcauccccaacuucaaccaguacgaggccaugagcugcgacuucaacggcggcaagaucagcgugcaguacaaccugagccacgccuacgccguggacgccgccgagcacugcggcaccguggccaacggcgugcugcagaccuucaugagaauggccuggggcggcagcuacaucgcccuggacagcggcagaggcaacugggacugcaucaugaccagcuaccaguaccugaucauccagaacaccaccugggaggaccacugccaguucagcagacccagccccaucggcuaccugggccugcugagccagagaaccagagacaucuacaucagcagaagacugcugggcaccuucaccuggacccugagcgacagcgagggcaacgagacccccggcggcuacugccugaccagauggaugcugaucgaggccgagcugaagugcuucggcaacaccgccguggccaagugcaacgagaagcacgacgaggaguucugcgacaugcugagacuguucgacuucaacaagcaggccauccagagacugaagagcgaggcccagaugagcauccagcugaucaacaaggccgugaacgcccugaucaacgaccagcugaucaugaagaaccaccugagagacaugaugggcauccccuacugcaacuacagcaaguacugguaccugaaccacaccagcagcggcagaaccagccugcccaagugcuggcuggugagcaacggcagcuaccugaacgagacccacuucagcgacgacaucgagcagcaggccgacaacaugaucaccgagaugcugcagaaggaguacaucgacagacagggcaagaccccccugggccugguggaccuguucguguucagcaccagcuucuaccugaucagcaucuuccugcaccugaucaagauccccugaggacuagucccuguucccagagcccacuuuuuuuucuuuuuuugaaauaaaauagccugucuuucagaucucaaaggcucuuuucagagccaccaaaaaaaaaaaaaaaaaaaaaaaaaaaaaaaaaaaaaaaaaaaaaaaaaaaaaaaaaaaaaaaaagaauu

SEQ ID NO: 41835 - RNA, 1600 nt, Artificial Sequence
  mRNA product Design a-1 (hSL-A64-N5) comprising derived and/or modified sequence from LASV(KAK-428;Clade n.d. (VII))__ANH09740__GPCmut13 (opt4)
aggagagucccgcagucggcguccagcggcucugcuuguucgugugugugucguugcaggccuuauucaagcuuaccaugggccagaucgugaccuucuuccaggaggugccccacgugaucgaggaggugaugaacaucgugcugaucgcccugagccugcuggccauccugaagggccuguacaacuucgccaccugcggcgugaucggccugaucaccuuccugcugcugugcggcagaagcugcagcgccaccuacaagggccaguacgagcugcagacccuggagcugaacauggagagccugaacaugaccaugccccugagcugcaccaagaacaacagccaccacuacaucagagccggcaacaacaccggccuggagcugacccugaccaacaccagcaucaucagccacaaguucugcaaccugagcgacgcccacaagaagaaccuguacgaccacacccugaugagcaucaucaccaccuuccaccugagcauccccaacuucaaccaguacgaggccaugagcugcgacuucaacggcggcaagaucagcauccaguacaaccugagccacagcuacgccggcgacgccgcccagcacugcggcaccguggccaacggcgugcugcagaccuucaugagaauggccuggggcggcagcuaccuggcccuggacagcggcagaagaggcugggacugcaucaucagcagcuaccaguaccugaucauccagaacaccaccugggacgaccacugccaguucagcagacccagccccaucggcuaccugggcuucgugagccagaagaccagagacaucuacaucagcagaagacugcugggcaccuucaccuggacccugagcgacagcgagggccacgacaugcccggcggcuacugccugaccagauggaugcugaucgaggccgaccugaagugcuucggcaacaccgccguggccaagugcaacgagaagcacgacgaggaguucugcgacauguggagacuguucgacuucaacaagcaggccauccagagacugaaggccgaggcccagaugaacauccagcugaucaacaaggccgugaacgcccugaucaacgaccagcugaugaugaagaaccaccugagagacaucaugggcauccccuacugcaacuacagcaaguucugguaccugaacaacaccaccaccggcagaaccagccugcccagaugcuggcugaucagcaacggcagcuaccugaacgagacccacuucagcgacgacaucgagcagcaggccgacaacaugaucaccgagaugcugcagaaggaguacauggacagacagggcaagaccccccugggccugguggaccuguucguguucagcaccagcuucuaccugaucaccaucuuccugcaccuggugaagauccccugaggacuagucccuguucccagagcccacuuuuuuuucuuuuuuugaaauaaaauagccugucuuucagaucucaaaggcucuuuucagagccaccaaaaaaaaaaaaaaaaaaaaaaaaaaaaaaaaaaaaaaaaaaaaaaaaaaaaaaaaaaaaaaaaagaauu

SEQ ID NO: 41836 - RNA, 1600 nt, Artificial Sequence; identical to SEQ ID NO: 41830
  mRNA product Design a-1 (hSL-A64-N5) comprising derived and/or modified sequence from LASV(Pinneo-NIG-1969;Clade I)__AIT17836__GPCmut13 (opt4)

SEQ ID NO: 41837 - RNA, 1600 nt, Artificial Sequence
  mRNA product Design a-1 (hSL-A64-N5) comprising derived and/or modified sequence from LASV(ISTH0009-NIG-2011;Clade II)__AIT17404__GPCmut13 (opt4)
aggagagucccgcagucggcguccagcggcucugcuuguucgugugugugucguugcaggccuuauucaagcuuaccaugggccagaucaucaccuucuuccaggaggugccccacgugaucgaggaggugaugaacaucgugcugaucgcccugagccugcuggccauccugaagggcaucuacaacguggccaccugcggccuguucggccuggugagcuuccugcugcugugcggcagaagcugcagcaccaccuacaagggcguguacgagcugcagacccuggagcuggacauggccagccugaacaugaccaugccccugagcugcaccaagaacaacagccaccacuacaucauggugggcaacgagaccggccuggagcugacccugaccaacaccagcaucaucaaccacaaguucugcaaccugagcgacgcccacaagaagaaccuguacgaccacgcccugaugagcaucaucagcaccuuccaccugagcauccccaacuucaaccaguacgaggccaugagcugcgacuucaacggcggcaagaucagcgugcaguacaaccugagccacgccuacgccguggacgccgccaaccacugcggcaccaucgccaacggcgugcugcagaccuucaugagaauggccuggggcggcagcuacaucgcccuggacagcggcaagggcagcugggacugcaucaugaccagcuaccaguaccugaucauccagaacaccaccugggaggaccacugccaguucagcagacccagccccaucggcuaccugggccugcugagccagagaaccagagacaucuacaucagcagaagacugcugggcaccuucaccuggacccugagcgacagcgagggcaacgagacccccggcggcuacugccugaccagauggaugcugaucgaggccgagcugaagugcuucggcaacaccgccguggccaagugcaacgagaagcacgacgaggaguucugcgacaugcugagacuguucgacuucaacaagcaggccaucagaagacugaagaccgaggcccagaugagcauccagcugaucaacaaggccgugaacgcccugaucaacgaccagcugaucaugaagaaccaccugagagacaucaugggcauccccuacugcaacuacagcaaguacugguaccugaaccacaccgugaccggcaagaccagccugcccagaugcuggcuggugagcaacggcagcuaccugaacgagacccacuucagcgacgacaucgagcagcaggccgacaacaugaucaccgagcugcugcagaaggaguacauggacagacagggcaagaccccccugggccugguggaccuguucguguucagcaccagcuucuaccugaucagcaucuuccugcaccugaucaagauccccugaggacuagucccuguucccagagcccacuuuuuuuucuuuuuuugaaauaaaauagccugucuuucagaucucaaaggcucuuuucagagccaccaaaaaaaaaaaaaaaaaaaaaaaaaaaaaaaaaaaaaaaaaaaaaaaaaaaaaaaaaaaaaaaaagaauu

SEQ ID NO: 41838 - RNA, 1600 nt, Artificial Sequence
  mRNA product Design a-1 (hSL-A64-N5) comprising derived and/or modified sequence from LASV(ISTH2010-NIG-2012;Clade II)__AIT17482__GPCmut13 (opt4)
aggagagucccgcagucggcguccagcggcucugcuuguucgugugugugucguugcaggccuuauucaagcuuaccaugggccagaucaucaccuucuuccaggaggugccccacgugaucgaggaggugaugaacaucgugcugaucgcccugagccugcuggccauccugaagggcaucuacaacguggccaccugcggccuguucggccuggugagcuuccugcugcugugcggcagaagcugcagcaccaccuacaagggcguguacgagcugcagacccuggagcuggacauggccagccugaacaugaccaugccccugagcugcaccaagaacaacagccaccacuacaucauggugggcaacgagaccggccuggagcugacccugaccaacaccagcaucaucaaccacaaguucugcaaccugagcgacgcccacaagaagaaccuguacgaccacgcccugaugagcaucaucagcaccuuccaccugagcauccccaacuucaaccaguacgaggccaugagcugcgacuucaacggcggcaagaucagcgugcaguacaaccugagccacgccuacgccguggacgccgccaaccacugcggcaccaucgccaacggcgugcugcagaccuucaugagaauggccuggggcggcagcuacaucgcccuggacagcggcaagggcagcugggacugcaucaugaccagcuaccaguaccugaucauccagaacaucaccugggaggaccacugccaguucagcagacccagccccaucggcuaccugggccugcugagccagagaaccagagacaucuacaucagcagaagacugcugggcaccuucaccuggacccugagcgacagcgagggcaacgagacccccggcggcuacugccugaccagauggaugcugaucgaggccgagcugaagugcuucggcaacaccgccguggccaagugcaacgagaagcacgacgaggaguucugcgacaugcugagacuguucgacuucaacaagcaggccaucagaagacugaagaccgaggcccagaugagcauccagcugaucaacaaggccgugaacgcccugaucaacgaccagcugaucaugaagaaccaccugagagacaucaugggcauccccuacugcaacuacagcaaguacugguaccugaaccacaccgugaccggcaagaccagccugcccagaugcuggcuggugagcaacggcagcuaccugaacgagacccacuucagcgacgacaucgagcagcaggccgacaacaugaucaccgagcugcugcagaaggaguacaucgacagacagggcaagaccccccugggccugguggaccuguucguguucagcaccagcuucuaccugaucagcaucuuccugcaccuggugaagauccccugaggacuagucccuguucccagagcccacuuuuuuuucuuuuuuugaaauaaaauagccugucuuucagaucucaaaggcucuuuucagagccaccaaaaaaaaaaaaaaaaaaaaaaaaaaaaaaaaaaaaaaaaaaaaaaaaaaaaaaaaaaaaaaaaagaauu

SEQ ID NO: 41839 - RNA, 1600 nt, Artificial Sequence
  mRNA product Design a-1 (hSL-A64-N5) comprising derived and/or modified sequence from LASV(Lassa virus/H.sapiens-wt/NGA/2015/ISTH_0543;Clade II)__AVO03639__GPCmut13 (opt4)
aggagagucccgcagucggcguccagcggcucugcuuguucgugugugugucguugcaggccuuauucaagcuuaccaugggccagaucaucaccuucuuccaggaggugccccacgugaucgaggaggugaugaacaucgugcugaucgcccugagccugcuggccauccugaagggcaucuacaacguggccaccugcggccuguucggccuggugagcuuccugcugcugugcggcagaagcugcagcaccaccuacaagggcguguacgagcugcagacccuggagcuggacauggccaaccugaacaugaccaugccccugagcugcaccaagaacaacagccaccacuacaucauggugggcaacgagaccggccuggagcugacccugaccaacaccagcaucaucaaccacaaguucugcaaccugagcgacgcccacaagaagaaccuguacgaccacgcccugaugagcaucaucagcaccuuccaccugagcauccccaacuucaaccaguacgaggccaugagcugcgacuucaacggcggcaagaucagcgugcaguacaaccugagccacaccuacgccguggacgccgccaaccacugcggcaccaucgccaacggcgugcugcagaccuucaugagaauggccuggggcggcagcuacaucgcccuggacagcggcaagggcagcugggacugcaucaugaccagcuaccaguaccuggugauccagaacaccaccugggaggaccacugccaguucagcagacccagccccaucggcuaccugggccugcugagccagagaaccagagacaucuacaucagcagaagacugcugggcaccuucaccuggacccugagcgacagcgagggcaacgagacccccggcggcuacugccugaccagauggaugcugaucgaggccgagcugaagugcuucggcaacaccgccguggccaagugcaacgagaagcacgacgaggaguucugcgacaugcugagacuguucgacuucaacaagcaggccaucagaagacugaagaccgaggcccagaugagcauccagcugaucaacaaggccgugaacgcccugaucaacgaccagcugaucaugaagaaccaccugagagacaucaugggcauccccuacugcaacuacagcaaguacugguaccugaaccacaccgugaccggcaagaccagccugcccagaugcuggcuggugagcaacggcagcuaccugaacgagacccacuucagcgacgacaucgagcagcaggccgacaacaugaucaccgagcugcugcagaaggaguacaucgacagacagggcaagaccccccugggccugguggaccuguucguguucagcaccagcuucuaccugaucagcaucuuccugcaccuggugaagauccccugaggacuagucccuguucccagagcccacuuuuuuuucuuuuuuugaaauaaaauagccugucuuucagaucucaaaggcucuuuucagagccaccaaaaaaaaaaaaaaaaaaaaaaaaaaaaaaaaaaaaaaaaaaaaaaaaaaaaaaaaaaaaaaaaagaauu

SEQ ID NO: 41840 - RNA, 1600 nt, Artificial Sequence
  mRNA product Design a-1 (hSL-A64-N5) comprising derived and/or modified sequence from LASV(Lassa virus/H.sapiens-wt/NGA/2016/ISTH_0009;Clade II)__AVO03571__GPCmut13 (opt4)
aggagagucccgcagucggcguccagcggcucugcuuguucgugugugugucguugcaggccuuauucaagcuuaccaugggccagaucaucaccuucuuccaggaggugccccacgugaucgaggaggugaugaacaucgugcugaucgcccugagccugcuggccauccugaagggcaucuacaacguggccaccugcggccugcugggccuggugagcuuccugcugcugugcggcagaagcugcagcaccaccuacaagggcguguacgagcugcagacccuggagcuggacauggccagccugaacaugaccaugccccugagcugcaccaagaacaacagccaccacuacaucauggugggcaacgagaccggccuggagcugacccugaccaacaccagcaucaucaaccacaaguucugcaaccugagcgacgcccacaagaagaaccuguacgaccacgcccugaugagcaucaucagcaccuuccaccugagcauccccaacuucaaccaguacgaggccaugagcugcgacuucaacggcggcagaaucagcgugcaguacaaccugagccacagcuacgccguggacgccgccaaccacugcggcaccaucgccaacggcgugcugcagaccuucaugagaauggccuggggcggcagcuacaucgcccuggacagcggcaagggcagcugggacugcaucaugaccagcuaccaguaccugaucauccagaacaccaccugggaggaccacugccaguucagcagacccagccccaucggcuaccugggccugcugagccagagaaccagagacaucuacaucagcagaagacugcugggcaccuucaccuggacccugagcgacagcgagggcaacgagacccccggcggcuacugccugaccagauggaugcugaucgaggccgagcugaagugcuucggcaacaccgccguggccaagugcaacgagaagcacgacgaggaguucugcgacaugcugagacuguucgacuucaacaagcaggccaucagaagacugaagaccgaggcccagaugagcauccagcugaucaacaaggccgugaacgcccugaucaacgaccagcugaucaugaagaaccaccugagagacaucaugggcauccccuacugcaacuacagcaaguacugguaccugaaccacaccgugaccggcaagaccagccugcccagaugcuggcuggugagcaacggcagcuaccugaacgagacccacuucagcgacgacaucgagcagcaggccgacaacaugaucaccgagcugcugcagaaggaguacaucgacagacagggcaagaccccccugggccugguggaccuguucguguucagcaccagcuucuaccugaucagcaucuuccugcaccuggugaagauccccugaggacuagucccuguucccagagcccacuuuuuuuucuuuuuuugaaauaaaauagccugucuuucagaucucaaaggcucuuuucagagccaccaaaaaaaaaaaaaaaaaaaaaaaaaaaaaaaaaaaaaaaaaaaaaaaaaaaaaaaaaaaaaaaaagaauu

SEQ ID NO: 41841 - RNA, 1600 nt, Artificial Sequence
  mRNA product Design a-1 (hSL-A64-N5) comprising derived and/or modified sequence from LASV(Lassa virus/H.sapiens-wt/NGA/2016/ISTH_0017;Clade II)__AVO03567__GPCmut13 (opt4)
aggagagucccgcagucggcguccagcggcucugcuuguucgugugugugucguugcaggccuuauucaagcuuaccaugggccagaucaucaccuucuuccaggaggugccccacgugaucgaggaggugaugaacaucgugcugaucgcccugagccugcuggccauccugaagggcaucuacaacguggccaccugcggccuguucggccuggugagcuuccugcugcugugcggcagaagcugcagcaccaccuacaagggcguguacgagcugcagacccuggagcuggacauggccagccugaacaugaccaugccccugagcugcaccaagaacaacagccaccacuacaucauggugggcaacgagaccggccuggagcugacccugaccaacaccagcaucaucaaccacaaguucugcaaccugagcgacgcccacaagaagaaccuguacgaccacgcccugaugagcaucaucagcaccuuccaccugagcauccccaacuucaaccaguacgaggccaugagcugcgacuucaacggcggcaagaucagcgugcaguacaaccugagccacaccuacgccaucgacgccgccaaccacugcggcaccaucgccaacggcgugcugcagaccuucaugagaauggccuggggcggcagcuacaucgcccuggacagcggcaagggcagcugggacugcaucaugaccagcuaccaguaccugaucauccagaacaccaccugggaggaccacugccaguucagcagacccagccccaucggcuaccugggccugcugagccagagaaccagagacaucuacaucagcagaagacugcugggcaccuucaccuggacccugagcgacagcgagggcaacgagacccccggcggcuacugccugaccagauggaugcugaucgaggccgagcugaagugcuucggcaacaccgccguggccaagugcaacgagaagcacgacgaggaguucugcgacaugcugagacuguucgacuucaacaagcaggccaucagaagacugaagaccgaggcccagaugagcauccagcugaucaacaaggccgugaacgcccugaucaacgaccagcugaucaugaagaaccaccugagagacaucaugggcauccccuacugcaacuacagcaaguacugguaccugaaccacaccgugaccggcaagaccagccugcccagaugcuggcuggugagcaacggcagcuaccugaacgagacccacuucagcgacgacaucgagcagcaggccgacaacaugaucaccgagcugcugcagaaggaguacauggacagacagggcaagaccccccugggccugguggaccuguucguguucagcaccagcuucuaccugaucagcaucuuccugcaccuggugagaauccccugaggacuagucccuguucccagagcccacuuuuuuuucuuuuuuugaaauaaaauagccugucuuucagaucucaaaggcucuuuucagagccaccaaaaaaaaaaaaaaaaaaaaaaaaaaaaaaaaaaaaaaaaaaaaaaaaaaaaaaaaaaaaaaaaagaauu

SEQ ID NO: 41842 - RNA, 1600 nt, Artificial Sequence
  mRNA product Design a-1 (hSL-A64-N5) comprising derived and/or modified sequence from LASV(Lassa virus/H.sapiens-wt/NGA/2018/ISTH_0959;Clade II)__AVV65099__GPCmut13 (opt4)
aggagagucccgcagucggcguccagcggcucugcuuguucgugugugugucguugcaggccuuauucaagcuuaccaugggccagaucaucaccuucuuccaggaggugccccacgugaucgaggaggugaugaacaucgugcugaucgcccugagccugcuggccauccugaagggcaucuacaacguggugaccugcggccuguucggccuggugagcuuccugcugcugugcggcagaagcugcagcaccaccuacaagggcguguacgagcugcagacccuggagcuggacauggccagccugaacaugaccaugccccugagcugcaccaagaacaacagccaccacuacaucauggugggcaacgagaccggccuggagcugacccugaccaacaccagcaucaucaaccacaaguucugcaaccugagcgacgcccacaagaagaaccuguacgaccacgcccugaugagcaucaucagcaccuuccaccugagcauccccaacuucaaccaguacgaggccaugagcugcgacuucaacggcggcaagaucagcgugcaguacaaccugagccacgccuacgccaucgacgccgccaaccacugcggcaccaucgccaacggcgugcugcagaccuucaugagaauggccuggggcggcagcuacaucgcccuggacagcggcaagggcagcugggacugcaucaugaccagcuaccaguaccugaucauccagaacaccaccugggaggaccacugccaguucagcagacccagccccaucggcuaccugggccugcugagccagagaaccagagacaucuacaucagcagaagacugcugggcaccuucaccuggacccugagcgacagcgagggcaacgagacccccggcggcuacugccugaccagauggaugcugaucgaggccgagcugaagugcuucggcaacaccgccguggccaagugcaacgagaagcacgacgaggaguucugcgacaugcugagacuguucgacuucaacaagcaggccaucagaagacugaagaccgaggcccagaugagcauccagcugaucaacaaggccgugaacgcccugaucaacgaccagcugaucaugaagaaccaccugagagacaucaugggcauccccuacugcaacuacagcaaguacugguaccugaaccacaccgugaccggcaagaccagccugcccagaugcuggcuggugagcaacggcagcuaccugaacgagacccacuucagcgacgacaucgagcagcaggccgacaacaugaucaccgagcugcugcagaaggaguacaucgacagacagggcaagaccccccugggccugguggaccuguucguguucagcaccagcuucuaccugaucagcaucuuccugcaccuggugaagauccccugaggacuagucccuguucccagagcccacuuuuuuuucuuuuuuugaaauaaaauagccugucuuucagaucucaaaggcucuuuucagagccaccaaaaaaaaaaaaaaaaaaaaaaaaaaaaaaaaaaaaaaaaaaaaaaaaaaaaaaaaaaaaaaaaagaauu

SEQ ID NO: 41843 - RNA, 1600 nt, Artificial Sequence
  mRNA product Design a-1 (hSL-A64-N5) comprising derived and/or modified sequence from LASV(LASV003-NIG-2008;Clade II)__AIT17580__GPCmut13 (opt4)
aggagagucccgcagucggcguccagcggcucugcuuguucgugugugugucguugcaggccuuauucaagcuuaccaugggccagaucaucaccuucuuccaggaggugccccacgugaucgaggaggugaugaacaucgugcugaucgcccugagccugcuggccauccugaagggcaucuacaacguggccaccugcggccuguucggccuggugagcuuccugcugcugugcggcagaagcugcagcaccaccuacaagggcguguacgagcugcagacccuggagcuggacauggccagccugaacaugaccaugccccugagcugcaccaagaacaacagccaccacuacaucauggugggcaacgagaccggccuggagcugacccugaccaacaccagcaucaucaaccacaaguucugcaaccugagcgacgcccacaagaagaaccuguacgaccacgcccugaugagcaucaucagcaccuuccaccugagcauccccaacuucaaccaguacgaggccaugagcugcgacuucaacggcggcaagaucagcgugcaguacaaccugagccacaccuacgccguggacgccgccaaccacugcggcaccaucgccaacggcgugcugcagaccuucaugagaauggccuggggcggcagcuacaucgcccuggacagcggcaagggcagcugggacugcaucaugaccagcuaccaguaccugaucauccagaacaccaccugggaggaccacugccaguucagcagacccagccccaucggcuaccugggccugcugagccagagaaccagagacaucuacaucagcagaagacugcugggcaccuucaccuggacccugagcgacagcgagagcaacgagacccccggcggcuacugccugaccagauggaugcugaucgaggccgagcugaagugcuucggcaacaccgccguggccaagugcaacgagaagcacgacgaggaguucugcgacaugcugagacuguucgacuucaacaagcaggccaucagaagacugaaggccgaggcccagaugagcauccagcugaucaacaaggccgugaacgcccugaucaacgaccagcugaucaugaagaaccaccugagagacaucaugggcauccccuacugcaacuacagcaaguacugguaccugaaccacaccgugaccggcagaaccagccugcccagaugcuggcuggugagcaacggcagcuaccugaacgagacccacuucagcgacgacaucgagcagcaggccgacaacaugaucaccgagcugcugcagaaggaguacauggacagacagggcaagaccccccugggccugguggaccuguucguguucagcaccagcuucuaccugaucagcaucuuccugcaccuggugaagauccccugaggacuagucccuguucccagagcccacuuuuuuuucuuuuuuugaaauaaaauagccugucuuucagaucucaaaggcucuuuucagagccaccaaaaaaaaaaaaaaaaaaaaaaaaaaaaaaaaaaaaaaaaaaaaaaaaaaaaaaaaaaaaaaaaagaauu

SEQ ID NO: 41844 - RNA, 1600 nt, Artificial Sequence
  mRNA product Design a-1 (hSL-A64-N5) comprising derived and/or modified sequence from LASV(LASV035-NIG-2009;Clade II)__AIT17588__GPCmut13 (opt4)
aggagagucccgcagucggcguccagcggcucugcuuguucgugugugugucguugcaggccuuauucaagcuuaccaugggccagaucaucaccuucuuccaggaggugccccacgugaucgaggaggugaugaacaucgugcugaucgcccugagccugcuggccauccugaagggcaucuacaacguggccaccugcggccuguucggccuggugagcuuccugcugcugugcggcagaagcugcagcaccaccuacaagggcguguacgagcugcagacccuggagcuggacauggccagccugaacaugaccaugccccugagcugcaccaagaacaacagccaccacuacaucauggugggcaacgagaccggccuggagcugacccugaccaacaccagcaucaucaaccacaaguucugcaaccugagcgacgcccacaagaagaaccuguacgaccacgcccugaugagcaucaucagcaccuuccaccugagcauccccaacuucaaccaguacgaggccaugagcugcgacuucaacggcggcaagaucagcgugcaguacaaccugagccacgccuacgccguggacgccgccaaccacugcggcaccaucgccaacggcgugcugcagaccuucaugagaauggccuggggcggcagcuacaucgcccuggacagcggcaagggcagcugggacugcaucaugaccagcuaccaguaccugaucauccagaacaccaccugggaggaccacugccaguucagcagacccagccccaucggcuaccugggccugcugagccagagaaccagagacaucuacaucagcagaagacugcugggcaccuucaccuggacccugagcgacagcgagggcaacgagacccccggcggcuacugccugaccagauggaugcugaucgaggccgagcugaagugcuucggcaacaccgccguggccaagugcaacgagaagcacgacgaggaguucugcgacaugcugagacuguucgacuucaacaagcaggccaucagaagacugaaggccgaggcccagaugagcauccagcugaucaacaaggccgugaacgcccugaucaacgaccagcugaucaugaagaaccaccugagagacaucaugggcauccccuacugcaacuacagcaaguacugguaccugaaccacaccgugaccggcaagaccagccugcccagaugcuggcuggugagcaacggcagcuaccugaacgagacccacuucagcgacgacaucgagcagcaggccgacaacaugaucaccgagcugcugcagaaggaguacaucgacagacagggcaagaccccccugggccugguggaccuguucguguucagcaccagcuucuaccugaucagcaucuuccugcaccuggugaagauccccugaggacuagucccuguucccagagcccacuuuuuuuucuuuuuuugaaauaaaauagccugucuuucagaucucaaaggcucuuuucagagccaccaaaaaaaaaaaaaaaaaaaaaaaaaaaaaaaaaaaaaaaaaaaaaaaaaaaaaaaaaaaaaaaaagaauu

SEQ ID NO: 41845 - RNA, 1600 nt, Artificial Sequence
  mRNA product Design a-1 (hSL-A64-N5) comprising derived and/or modified sequence from LASV(LASV1000-NIG-2009;Clade II)__AIT17782__GPCmut13 (opt4)
aggagagucccgcagucggcguccagcggcucugcuuguucgugugugugucguugcaggccuuauucaagcuuaccaugggccagaucaucaccuucuuccaggaggugccccacgugaucgaggaggugaugaacaucgugcugaucgcccugagccugcuggccauccugaagggcaucuacaacguggccaccugcggccuguucggccuggugagcuuccugcugcugugcggcagaagcugcagcaccaccuacaagggcguguacgagcugcagacccuggagcuggacauggccagccugaacaugaccaugccccugagcugcaccaagaacaacagccaccacuacaucauggugggcaacgagaccggccuggagcugacccugaccaacaccagcaucaucaaccacaaguucugcaaccugagcgacgcccacaagaagaaccuguacgaccacgcccugaugagcaucaucagcaccuuccaccugagcauccccaacuucaaccaguacgaggccaugagcugcgacuucaacggcggcaagaucagcgugcaguacaaccugagccacaccuacgccguggacgccgccaaccacugcggcaccaucgccaacggcgugcugcagaccuucaugagaauggccuggggcggcagcuacaucgcccuggacagcggcaagggcagcugggacugcaucaugaccagcuaccaguaccugaucauccagaacaccaccugggaggaccacugccaguucagcagacccagccccaucggcuaccugggccugcugagccagagaaccagagacaucuacaucagcagaagacugcugggcaccuucaccuggacccugagcgacagcgagggcaacgagacccccggcggcuacugccugaccagauggaugcugaucgaggccgagcugaagugcuucggcaacaccgccguggccaagugcaacgagaagcacgacgaggaguucugcgacaugcugagacuguucgacuucaacaagcaggccaucaagagacugaagaccgaggcccagaugagcauccagcugaucaacaaggccgugaacgcccugaucaacgaccagcugaucaugaagaaccaccugagagacaucaugggcauccccuacugcaacuacagcaaguacugguaccugaaccacaccgugaccggcaagaccagccugcccagaugcuggcuggugagcaacggcagcuaccugaacgagacccacuucagcgacgacaucgagcagcaggccgacaacaugaucaccgagcugcugcagaaggaguacaucgacagacagggcaagaccccccugggccugguggaccuguucguguucagcaccagcuucuaccugaucagcaucuuccugcaccuggugaagauccccugaggacuagucccuguucccagagcccacuuuuuuuucuuuuuuugaaauaaaauagccugucuuucagaucucaaaggcucuuuucagagccaccaaaaaaaaaaaaaaaaaaaaaaaaaaaaaaaaaaaaaaaaaaaaaaaaaaaaaaaaaaaaaaaaagaauu

SEQ ID NO: 41846 - RNA, 1600 nt, Artificial Sequence
  mRNA product Design a-1 (hSL-A64-N5) comprising derived and/or modified sequence from LASV(LASV221-NIG-2010;Clade II)__AIT17624__GPCmut13 (opt4)
aggagagucccgcagucggcguccagcggcucugcuuguucgugugugugucguugcaggccuuauucaagcuuaccaugggccagaucaucaccuucuuccaggaggugccccacgugaucgaggaggugaugaacaucgugcugaucgcccugagccugcuggccauccugaagggcaucuacaacguggccaccugcggccuguucggccuggugagcuuccugcugcugugcggcagaagcugcagcaccaccuacaagggcguguacgagcugcagacccuggagcuggacauggccagccugaacaugaccaugccccugagcugcaccaagaacaacagccaccacuacaucauggugggcaacgagaccggccuggagcugacccugaccaacaccagcaucaucaaccacaaguucugcaaccugagcgacgcccacaagaagaaccuguacgaccacgcccugaugagcaucaucagcaccuuccaccugagcauccccaacuucaaccaguacgaggccaugagcugcgacuucaacggcggcaagaucagcgugcaguacaaccugagccacaccuacgccaucgacgccgccaaccacugcggcaccaucgccaacggcgugcugcagaccuucaugagaauggccuggggcggcagcuacaucgcccuggacagcggcaagggcagcugggacugcaucaugaccagcuaccaguaccugaucauccagaacaccaccugggaggaccacugccaguucagcagacccagccccaucggcuaccugggccugcugagccagagaaccagagacaucuacaucagcagaagacugcugggcaccuucaccuggacccugagcgacagcgagggcaacgagacccccggcggcuacugccugaccagauggaugcugaucgaggccgagcugaagugcuucggcaacaccgccguggccaagugcaacgagaagcacgacgaggaguucugcgacaugcugagacuguucgacuucaacaagcaggccaucagaagacugaagaccgaggcccagaugagcauccagcugaucaacaaggccgugaacgcccugaucaacgaccagcugaucaugaagaaccaccugagagacaucaugggcauccccuacugcaacuacagcaaguacugguaccugaaccacaccgugaccggcaagaccagccugcccagaugcuggcuggugagcaacggcagcuaccugaacgagacccacuucagcgacgacaucgagcagcaggccgacaacaugaucaccgagaugcugcagaaggaguacauggacagacagggcaagaccccccugggccugguggaccuguucguguucagcaccagcuucuaccugaucagcaucuuccugcaccuggugaagauccccugaggacuagucccuguucccagagcccacuuuuuuuucuuuuuuugaaauaaaauagccugucuuucagaucucaaaggcucuuuucagagccaccaaaaaaaaaaaaaaaaaaaaaaaaaaaaaaaaaaaaaaaaaaaaaaaaaaaaaaaaaaaaaaaaagaauu

SEQ ID NO: 41847 - RNA, 1600 nt, Artificial Sequence
  mRNA product Design a-1 (hSL-A64-N5) comprising derived and/or modified sequence from LASV(LASV237-NIG-2010;Clade II)__AIT17638__GPCmut13 (opt4)
aggagagucccgcagucggcguccagcggcucugcuuguucgugugugugucguugcaggccuuauucaagcuuaccaugggccagaucaucaccuucuuccaggaggugccccacgugaucgaggaggugaugaacaucgugcugaucgcccugagccugcuggccauccugaagggcaucuacaacguggccaccugcggccuguucggccuggugagcuuccugcugcugugcggcagaagcugcagcaccaccuacaagggcguguacgagcugcagacccuggagcuggacauggccagccugaacaugaccaugccccugagcugcaccaagaacaacagccaccacuacaucauggugggcaacgagaccggccuggagcugacccugaccaacaccagcaucaucaaccacaaguucugcaaccugagcgacgcccacaagaaggaccuguacgaccacgcccugaugagcaucaucagcaccuuccaccugagcauccccaacuucaaccaguacgaggccaugagcugcgacuucaacggcggcaagaucagcgugcaguacaaccugagccacaccuacgccguggacgccgccaaccacugcggcaccaucgccaacggcgugcugcagaccuucaugagaauggccuggggcggcagcuacaucgcccuggacagcggcaagggcagcugggacugcaucaugaccagcuaccaguaccugaucauccagaacaccaccugggaggaccacugccaguucagcagacccagccccaucggcuaccugggccugcugagccagagaaccagagacaucuacaucagcagaagacugcugggcaccuucaccuggacccugagcgacagcgagggcaacgagacccccggcggcuacugccugaccagauggaugcugaucgaggccgagcugaagugcuucggcaacaccgccguggccaagugcaacgagaagcacgacgaggaguucugcgacaugcugagacuguucgacuucaacaagcaggccaucagaagacugaagaccgaggcccagaugagcauccagcugaucaacaaggccgugaacgcccugaucaacgaccagcugaucaugaagaaccaccugagagacaucaugggcauccccuacugcaacuacagcaaguacugguaccugaaccacaccgugaccggcaagaccagccugcccagaugcuggcuggugagcaacggcagcuaccugaacgagacccacuucagcgacgacaucgagcagcaggccgacaacaugaucaccgagcugcugcagaaggaguacauggacagacagggcaagaccccccugggccugguggaccuguucguguucagcaccagcuucuaccugaucagcaucuuccugcaccugaucaagauccccugaggacuagucccuguucccagagcccacuuuuuuuucuuuuuuugaaauaaaauagccugucuuucagaucucaaaggcucuuuucagagccaccaaaaaaaaaaaaaaaaaaaaaaaaaaaaaaaaaaaaaaaaaaaaaaaaaaaaaaaaaaaaaaaaagaauu

SEQ ID NO: 41848 - RNA, 1600 nt, Artificial Sequence
  mRNA product Design a-1 (hSL-A64-N5) comprising derived and/or modified sequence from LASV(LASV253-NIG-2011;Clade II)__AIT17670__GPCmut13 (opt4)
aggagagucccgcagucggcguccagcggcucugcuuguucgugugugugucguugcaggccuuauucaagcuuaccaugggccagaucaucaccuucuuccaggaggugccccacgugaucgaggaggugaugaacaucgugcugaucgcccugagccugcuggccauccugaagggcaucuacaacguggccaccugcggccuguucggccuggugagcuuccugcugcugugcggcagaagcugcagcaccaccuacaagggcguguacgagcugcagacccuggagcuggacauggccagccugaacaugaccaugccccugagcugcaccaagaacaacagccaccacuacaucauggugggcaacgagaccggccuggagcugacccugaccaacaccagcaucaucaaccacaaguucugcaaccugagcgacgcccacaagaagaaccuguacgaccacgcccugaugagcaucaucagcaccuuccaccugagcauccccaacuucaaccaguacgaggccaugagcugcgacuucaacggcggcaagaucagcgugcaguacaaccugagccacaccuacgccguggacgccgccaaccacugcggcaccaucgccaacggcgugcugcagaccuucaugagaauggccuggggcggcagcuacaucgcccuggacagcggcaagggcagcugggacugcaucaugaccagcuaccaguaccugaucauccagaacaccaccugggaggaccacugccaguucagcagacccagccccaucggcuaccugggccugcugagccagagaaccagagacaucuacaucagcagaagacugcugggcaccuucaccuggacccugagcgacagcgagggcaacgagacccccggcggcuacugccugaccagauggaugcugaucgaggccgagcugaagugcuucggcaacaccgccguggccaagugcaacgagaagcacgacgaggaguucugcgacaugcugagacuguucgacuucaacaagcaggccaucagaagacugaaggccgaggcccagaugagcauccagcugaucaacaaggccgugaacgcccugaucaacgaccagcugaucaugaagaaccaccugagagacaucaugggcauccccuacugcaacuacagcaaguacugguaccugaaccacaccgugaccggcagaaccagccugcccagaugcuggcuggugagcaacggcagcuaccugaacgagacccacuucagcgacgacaucgagcagcaggccgacaacaugaucaccgagcugcugcagaaggaguacaucgacagacagggcaagaccccccugggccugguggaccuguucguguucagcaccagcuucuaccugaucagcaucuuccugcaccuggugaagauccccugaggacuagucccuguucccagagcccacuuuuuuuucuuuuuuugaaauaaaauagccugucuuucagaucucaaaggcucuuuucagagccaccaaaaaaaaaaaaaaaaaaaaaaaaaaaaaaaaaaaaaaaaaaaaaaaaaaaaaaaaaaaaaaaaagaauu

SEQ ID NO: 41849 - RNA, 1600 nt, Artificial Sequence
  mRNA product Design a-1 (hSL-A64-N5) comprising derived and/or modified sequence from LASV(LASV254-NIG-2011;Clade II)__AIT17674__GPCmut13 (opt4)
aggagagucccgcagucggcguccagcggcucugcuuguucgugugugugucguugcaggccuuauucaagcuuaccaugggccagaucaucaccuucuuccaggaggugccccacgugaucgaggaggugaugaacaucgugcugaucgcccugagccugcuggccauccugaagggcaucuacaacguggccaccugcggccuguucggccuggugagcuuccugcugcugugcggcagaagcugcagcaccaccuacaagggcguguacgagcugcagacccuggagcuggacaugaccaaccugaacaugaccaugccccugagcugcaccaagaacaacagccaccacuacaucauggugggcaacgagaccggccuggagcugacccugaccaacaccagcaucaucaaccacaaguucugcaaccugagcgacgcccacaagaagaaccuguacaaccacgcccugaugagcaucaucagcaccuuccaccugagcauccccaacuucaaccaguacgaggccaugagcugcgacuucaacggcggcaagaucagcgugcaguacaaccugagccacagcuacgccguggacgccgccaaccacugcggcaccaucgccaacggcgugcugcagaccuucaugagaauggccuggggcggcagcuacaucgcccuggacagcggcaagggcaacugggacugcaucaugaccagcuaccaguaccugaucauccagaacaccaccugggaggaccacugccaguucagcagacccagccccaucggcuaccugggccugcugagccagagaaccagagacaucuacaucagcagaagacugcugggcaccuucaccuggacccugagcgacagcgagggcaacgagacccccggcggcuacugccugaccagauggaugcugaucgaggccgagcugaagugcuucggcaacaccgccguggccaagugcaacgagaagcacgacgaggaguucugcgacaugcugagacuguucgacuucaacaagcaggccaucagaagacugaagaccgaggcccaggccaacauccagcugaucaacaaggccgugaacgcccugaucaacgaccagcugaucaugaagaaccaccugagagacaucaugggcauccccuacugcaacuacagcaaguacugguaccugaaccacaccgugaccggcaagaccagccugcccagaugcuggcuggugagcaacggcagcuaccugaacgagacccacuucagcgacgacaucgagcagcaggccgacaacaugaucaccgagcugcugcagaaggaguacauggacagacagggcaagaccccccugggccugguggaccuguucguguucagcaccagcuucuaccugaucagcaucuuccugcaccuggugaagauccccugaggacuagucccuguucccagagcccacuuuuuuuucuuuuuuugaaauaaaauagccugucuuucagaucucaaaggcucuuuucagagccaccaaaaaaaaaaaaaaaaaaaaaaaaaaaaaaaaaaaaaaaaaaaaaaaaaaaaaaaaaaaaaaaaagaauu

SEQ ID NO: 41850 - RNA, 1600 nt, Artificial Sequence
  mRNA product Design a-1 (hSL-A64-N5) comprising derived and/or modified sequence from LASV(Nig08-A19;Clade III)__ADU56618__GPCmut13 (opt4)
aggagagucccgcagucggcguccagcggcucugcuuguucgugugugugucguugcaggccuuauucaagcuuaccaugggccagaucgugaccuucuuccaggaggugccccacgugaucgaggaggugaugaacaucgugcugaucgcccugagcauccuggccauccugaagggccuguacaacaucgccaccugcggccugaucggccuggugaccuuccugcugcugagcggcagaagcugcagcaugaccuacaagggcguguacgagcugcagacccuggagcugaacaugaacacccugaacaugaccaugccccugagcugcaccaagaacaacagccaccacuacaucauggugggcaacgagaccggccuggagcugacccugaccaacaccagccugcugcaccacaaguucugcaaccugagcgacgcccacaagaagaaccuguacgaccacacccugaugagcaucaucagcaccuuccaccugagcauccccaacuucaaccaguacgaggccaugagcugcgacuucaacggcggcaagaucaccgugcaguacaaccugagccacagcuacgccaucgacgccgccaaccacugcggcaccguggccaacggcgugcugcagaccuucaugagaauggccuggggcggcagcuacaucgcccuggacagcggcagaggcaagugggacugcaucaugaccagcuaccaguaccugaucauccagaacaccaccugggaggaccacugccaguucagcagacccagccccaucggcuaccugggccugcugagccagagaaccagagacaucuacaucagcagaagacugcugggcaccuucaccuggacccugagcgacagcgagggcaacgagacccccggcggcuacugccugaccagauggaugcugaucgaggccgagcugaagugcuucggcaacaccgccguggccaagugcaacgagaagcacgacgaggaguucugcgacaugcugagacuguucgacuucaacaagcaggccaucagaagacugaaggccgaggcccagaugagcauccagcugaucaacaaggccgugaacgcccugaucaacgaccagcugaucaugaagaaccaccugagagacaucaugggcauccccuacugcaacuacagcaaguacugguaccugaaccacaccagcaccggcagaaccagccugcccagaugcuggcuggugagcaacggcagcuaccugaacgagacccacuucagcgacgacaucgagcagcaggccgacaacaugaucaccgagaugcugcagaaggaguaccuggacagacagggcaagaccccccugggccugguggaccuguucguguucagcaccagcuucuaccugaucagcaucuuccugcaccuggugaagauccccugaggacuagucccuguucccagagcccacuuuuuuuucuuuuuuugaaauaaaauagccugucuuucagaucucaaaggcucuuuucagagccaccaaaaaaaaaaaaaaaaaaaaaaaaaaaaaaaaaaaaaaaaaaaaaaaaaaaaaaaaaaaaaaaaagaauu

SEQ ID NO: 41851 - RNA, 1603 nt, Artificial Sequence
  mRNA product Design a-1 (hSL-A64-N5) comprising derived and/or modified sequence from LASV(G1180-SLE-2010;Clade IV)__AIT17168__GPCmut13 (opt4)
aggagagucccgcagucggcguccagcggcucugcuuguucgugugugugucguugcaggccuuauucaagcuuaccaugggccagaucgugaccuucuuccaggaggugccccacgugaucgaggaggugaugaacaucgugcugaucgcccugagcauccuggccgugcugaagggccuguacaacuucgccaccugcggccuggugggccugcugaccuuccugcugcugugcggcagaagcugcaccgccagcagauacaagggcguguacgagcugcagacccuggagcugaacauggagacccugaacaugaccaugccccugagcugcaccaagaacaacagccaccacuacaucauggugggcaacgagaccggccuggagcugacccugaccaacaccagcaucaucaaccacaaguucugcaaccugagcgacgcccacaagaagaaccuguacgaccacgcccugaugagcaucaucagcaccuuccaccugagcauccccaacuucaaccaguacgaggccaugagcugcgacuucaacggcggcaagaucagcgugcaguacaaccugagccacagcuacgccggcgacgccgccaaccacugcggcaccguggccaacggcgugcugcagaccuucaugagaauggccuggggcggcagcuacaucgcccuggacagcggccacggcagcugggacugcaucaugaccagcuaccaguaccugaucauccagaacaccaccugggaggaccacugccaguucagcagacccagccccaucggcuaccugggccugcugagccagagaaccagagacaucuacaucagcagaagacugcugggcaccuucaccuggacccugagcgacagcgagggcaaggacacccccggcggcuacugccugaccagauggaugcugaucgaggccgagcugaagugcuucggcaacaccgccguggccaagugcaacgagaagcacgacgaggaguucugcgacaugcugagacuguucgacuucaacaagcaggccauccagagacugaaggccgaggcccagaugagcauccagcugaucaacaaggccgugaacgcccugaucaacgaccagcugaucaugaagaaccaccugagagacaucaugggcauccccuacugcaacuacagcaaguacugguaccugaaccacaccaccaccggcaagaccagccugcccaagugcuggcuggugagcaacggcagcuaccugaacgagacccacuucagcgacgacaucgagcagcaggccgacaacaugaucaccgagaugcugcagaaggaguacauggagagacagggcaagaccccccugggccugguggaccuguucguguucagcaccagcuucuaccugaucagcaucuuccugcaccuggugaagauccccugaggacuagucccuguucccagagcccacuuuuuuuucuuuuuuugaaauaaaauagccugucuuucagaucucaaaggcucuuuucagagccaccaaaaaaaaaaaaaaaaaaaaaaaaaaaaaaaaaaaaaaaaaaaaaaaaaaaaaaaaaaaaaaaaagaauu

SEQ ID NO: 41852 - RNA, 1603 nt, Artificial Sequence
  mRNA product Design a-1 (hSL-A64-N5) comprising derived and/or modified sequence from LASV(G1442-SLE-2011;Clade IV)__AIT17180__GPCmut13 (opt4)
aggagagucccgcagucggcguccagcggcucugcuuguucgugugugugucguugcaggccuuauucaagcuuaccaugggccagaucgugaccuucuuccaggaggugccccacgugaucgaggaggugaugaacaucgugcugaucgcccugagcauccuggccgugcugaagggccuguacaacguggccaccugcggccugaucggccuggugaccuuccugcugcugugcggcagaagcugcaccaccacccuguacaagggcguguacgagcugcagacccuggagcugaacauggagacccugaacaugaccaugccccugagcugcaccaagaacaacagccaccacuacaucagagugggcaacgagaccggccuggagcugacccugaccaacaccagcaucaucaaccacaaguucugcaaccugagcgacgcccacaagaagaaccuguacgaccacgcccugaugagcaucaucagcaccuuccaccugagcauccccaacuucaaccaguacgaggccaugagcugcgacuucaacggcggcaagaucagcgugcaguacaaccugagccacagcuacgccggcgacgccgccaaccacugcggcaccguggccaacggcgugcugcagaccuucaugagaauggccuggggcggcagcuacaucgcccuggacagcggcagaggcaacugggacugcaucaugaccagcuaccaguaccugaucauccagaacaccaccugggacgaccacugccaguucagcagacccagccccaucggcuaccugggccugcugagccagagaaccagagacguguacaucagcagaagacugcugggcaccuucaccuggacccugagcgacagcgagggcaaggacacccccggcggcuacugccugaccagauggaugcugaucgaggccgagcugaagugcuucggcaacaccgccguggccaagugcaacgagaagcacgacgaggaguucugcgacaugcugagacuguucgacuucaacaagcaggccauccagagacugaaggccgaggcccagaugagcauccagcugaucaacaaggccgugaacgcccugaucaacgaccagcugaucaugaagaaccaccugagagacaucaugggcauccccuacugcaacuacagcaaguacugguaccugaacaacaccgccaccggcaagaccagccugcccaagugcuggcugaucagcaacggcagcuaccugaacgagacccacuucagcgacgacaucgagcaggaggccgacaacaugaucaccgagaugcugcagaaggaguacauggagagacagggcaagaccccccugggccugguggaccuguucguguucagcaccagcuucuaccugaucagcaucuuccugcaccuggugaagauccccugaggacuagucccuguucccagagcccacuuuuuuuucuuuuuuugaaauaaaauagccugucuuucagaucucaaaggcucuuuucagagccaccaaaaaaaaaaaaaaaaaaaaaaaaaaaaaaaaaaaaaaaaaaaaaaaaaaaaaaaaaaaaaaaaagaauu

SEQ ID NO: 41853 - RNA, 1603 nt, Artificial Sequence
  mRNA product Design a-1 (hSL-A64-N5) comprising derived and/or modified sequence from LASV(G3010-SLE-2013;Clade IV)__AIT17344__GPCmut13 (opt4)
aggagagucccgcagucggcguccagcggcucugcuuguucgugugugugucguugcaggccuuauucaagcuuaccaugggccagaucgugaccuucuuccaggaggugccccacgugaucgaggaggugaugaacaucgugcugaucgcccugagcauccuggccgugcugaagggccuguacaacuucgccaccugcggccuggugggccuggugaccuuccugcugcugugcggcagaagcugcaccaccagccuguacaagggcguguacgagcugcagacccuggagcugaacauggagacccugaacaugaccaugccccugagcugcaccaagaacaacagccaccacuacaucauggugggcaacgagaccggccuggagcugacccugaccaacaccagcaucaucaaccacaaguucugcaaccugagcgacgcccacaagaagaaccuguacaaccacgcccugaugagcaucaucagcaccuuccaccugagcauccccaacuucaaccaguacgaggccaugagcugcgacuucaacggcggcaagaucagcgugcaguacaaccugagccacagcuacgccggcgacgccgccagccacugcggcaccguggccaacggcgugcugcagaccuucaugagaauggccuggggcggcagcuacaucgcccuggacagcggcuacggcaagugggacugcaucaugaccagcuaccaguaccugaucauccagaacaccaccugggaggaccacugccaguucagcagacccagccccaucggcuaccugggccugcugagccagagaaccagagacaucuacaucagcagaagacugcugggcaccuucaccuggacccugagcgacagcgagggcaaggacacccccggcggcuacugccugaccagauggaugcugaucgaggccgagcugaagugcuucggcaacaccgccguggccaagugcaacgagaagcacgacgaggaguucugcgacaugcugagacuguucgacuucaacaagcaggccauccagagacugaagaccgaggcccagaugagcauccagcugaucaacaaggccgugaacgcccugaucaacgaccagcugaucaugaagaaccaccugagagacaucaugggcauccccuacugcaacuacagcaaguacugguaccugaaccacaccaccaccggcaagaccagccugcccaagugcuggcuggugagcaacggcagcuaccugaacgagacccacuucagcgacgacaucgagcagcaggccgacaacaugaucaccgagaugcugcagaaggaguacauggagagacagggcaagaccccccugggccugguggaccuguucguguucagcaccagcuucuaccugaucagcaucuuccugcaccuggugaagauccccugaggacuagucccuguucccagagcccacuuuuuuuucuuuuuuugaaauaaaauagccugucuuucagaucucaaaggcucuuuucagagccaccaaaaaaaaaaaaaaaaaaaaaaaaaaaaaaaaaaaaaaaaaaaaaaaaaaaaaaaaaaaaaaaaagaauu

SEQ ID NO: 41854 - RNA, 1603 nt, Artificial Sequence
  mRNA product Design a-1 (hSL-A64-N5) comprising derived and/or modified sequence from LASV(G502-SLE-2009;Clade IV)__AIT17126__GPCmut13 (opt4)
aggagagucccgcagucggcguccagcggcucugcuuguucgugugugugucguugcaggccuuauucaagcuuaccaugggccagaucgugaccuucuuccaggaggugccccacgugaucgaggaggugaugaacaucgugcugaucgcccugagcauccuggccgugcugaagggccuguacaacuucgccaccugcggccuggugggccugcugaccuuccugcugcugugcggcagaagcugcaccaccggccuguacaagggcguguacgagcugcagacccuggagcugaacauggagacccugaacaugaccaugccccugagcugcaccaagaacaacagccaccacuacaucauggugggcaacgagaccggccuggagcugacccugaccaacaccagcaucaucaaccacaaguucugcaaccugagcgacgcccacaagaagaaccuguacgaccacgcccugaugagcaucaucagcaccuuccaccugagcauccccaacuucaaccaguacgaggccaugagcugcgacuucaacggcggcaagaucagcgugcaguacaaccugagccacagcuacgccggcgacgccgccgaccacugcggcaccguggccaacggcgugcugcagaccuucaugagaauggccuggggcggcagcuacaucgcccuggacagcggcagaggcagaugggacugcaucaugaccagcuaccaguaccugaucauccagaacaccaccugggaggaccacugccaguucagcagacccagccccaucggcuaccugggccugcugagccagagaaccagagacaucuacaucagcagaagacugcugggcaccuucaccuggacccugagcgacagcgagggcaaggacacccccggcggcuacugccugaccagauggaugcugaucgaggccgagcugaagugcuucggcaacaccgccguggccaagugcaacgagaagcacgacgaggaguucugcgacaugcugagacuguucgacuucaacaagcaggccauccagagacugaaggccgaggcccagaugagcauccagcugaucaacaaggccgugaacgcccugaucaacgaccagcuggugaugaagaaccaccugagagacaucaugggcauccccuacugcaacuacagcagauacugguaccugaaccacaccaccaccggcagaaccagccugcccaagugcuggcuggugagcaacggcagcuaccugaacgagacccacuucagcgacgacaucgagcagcaggccgacaacaugaucaccgagaugcugcagaaggaguacauggagagacagggcaagaccccccugggccugguggaccuguucguguucagcaccagcuucuaccugaucagcaucuuccugcaccuggugaagauccccugaggacuagucccuguucccagagcccacuuuuuuuucuuuuuuugaaauaaaauagccugucuuucagaucucaaaggcucuuuucagagccaccaaaaaaaaaaaaaaaaaaaaaaaaaaaaaaaaaaaaaaaaaaaaaaaaaaaaaaaaaaaaaaaaagaauu

SEQ ID NO: 41855 - RNA, 1603 nt, Artificial Sequence
  mRNA product Design a-1 (hSL-A64-N5) comprising derived and/or modified sequence from LASV(G733-SLE-2010;Clade IV)__AIT17154__GPCmut13 (opt4)
aggagagucccgcagucggcguccagcggcucugcuuguucgugugugugucguugcaggccuuauucaagcuuaccaugggccagaucgugaccuucuuccaggaggugccccacgugaucgaggaggugaugaacaucgugcugaucgcccugagcauccuggccgugcugaagggccuguacaacuucgccaccugcggcaucgugggccuggugagcuuccugcugcugugcggcagaagcugcaccaccagccuguacaagggcguguacgagcugcagacccuggagcugaacauggagacccugaacaugaccaugccccugagcugcaccaagaacaacagccaccacuacaucauggugggcaacgagaccggccuggagcugacccugaccaacaccagcaucaucaaccacaaguucugcaaccugagcgacgcccacaagaagaaccuguacgaccacgcccugaugagcaucaucagcaccuuccaccugagcauccccaacuucaaccaguacgaggccaugagcugcgacuucaacggcggcaagaucagcgugcaguacaaccugagccacagcuacgccggcgacgccgccaaccacugcggcaccaucgccaacggcgugcugcagaccuucaugagaauggccuggggcggcagcuacaucgcccuggacagcggcagagacagaugggacugcaucaugaccagcuaccaguaccugaucauccagaacaccaccugggaggaccacugccaguucagcagacccagccccaucggcuaccugggccugcugagccagagaaccagagacaucuacaucagcagaagacugcugggcaccuucaccuggacccugagcgacagcgagggcaaggacacccccggcggcuacugccugaccagauggaugcugaucgaggccgagcugaagugcuucggcaacaccgccguggccaagugcaacgagaagcacgacgaggaguucugcgacaugcugagacuguucgacuucaacaagcaggccauccagagacugaaggccgaggcccagaugagcauccagcugaucaacaaggccgugaacgcccugaucaacgaccagcugaucaugaagaaccaccugagagacaucaugggcauccccuacugcaacuacagcaaguacugguaccugaaccacaccaccaccggcaagaccagccugcccaagugcuggcuggugagcaacggcagcuaccugaacgagacccacuucagcgacgacaucgagcagcaggccgacaacaugaucaccgagaugcugcagaaggaguacauggagagacagggcaagaccccccugggccugguggaccuguucguguucagcaccagcuucuaccugaucagcaucuuccugcaccuggugaagauccccugaggacuagucccuguucccagagcccacuuuuuuuucuuuuuuugaaauaaaauagccugucuuucagaucucaaaggcucuuuucagagccaccaaaaaaaaaaaaaaaaaaaaaaaaaaaaaaaaaaaaaaaaaaaaaaaaaaaaaaaaaaaaaaaaagaauu

SEQ ID NO: 41856 - RNA, 1603 nt, Artificial Sequence
  mRNA product Design a-1 (hSL-A64-N5) comprising derived and/or modified sequence from MOPV/LASV reassortant(IGS-1;Clade IV)__AFY05576__GPCmut13 (opt4)
aggagagucccgcagucggcguccagcggcucugcuuguucgugugugugucguugcaggccuuauucaagcuuaccaugggccagaucgugaccuucuuccaggaggugccccacgugaucgaggaggugaugaacaucgugcugaucgcccugagcgugcuggccgugcugaagggccuguacaacuucgccaccugcggccuggugggccuggugaccuuccugcugcugugcggcagaagcugcaccaccagccuguacaagggcguguacgagcugcagacccuggagcugaacauggagacccugaacaugaccaugccccugagcugcaccaagaacaacagccaccacuacaucauggugggcaacgagaccggccuggagcugacccugaccaacaccagcaucaucaaccacaaguucugcaaccugagcgacgcccacaagaagaaccuguacgaccacgcccugaugagcaucaucagcaccuuccaccugagcauccccaacuucaaccaguacgaggccaugagcugcgacuucaacggcggcaagaucagcgugcaguacaaccugagccacagcuacgccggcgacgccgccaaccacugcggcaccguggccaacggcgugcugcagaccuucaugagaauggccuggggcggcagcuacaucgcccuggacagcggcagaggcaacugggacugcaucaugaccagcuaccaguaccugaucauccagaacaccaccugggaggaccacugccaguucagcagacccagccccaucggcuaccugggccugcugagccagagaaccagagacaucuacaucagcagaagacugcugggcaccuucaccuggacccugagcgacagcgagggcgaggacacccccggcggcuacugccugaccagauggaugcugaucgaggccgagcugaagugcuucggcaacaccgccguggccaagugcaacgagaagcacgacgaggaguucugcgacaugcugagacuguucgacuucaacaagcaggccauccagagacugaaggccgaggcccagaugagcauccagcugaucaacaaggccgugaacgcccugaucaacgaccagcugaucaugaagaaccaccugagagacaucaugggcauccccuacugcaacuacagcaaguacugguaccugaaccacaccaccaccggcagaaccagccugcccaagugcuggcuggugagcaacggcagcuaccugaacgagacccacuucagcgacgacaucgagcagcaggccgacaacaugaucaccgagaugcugcagaaggaguacauggagagacagggcaagaccccccugggccugguggaccuguucguguucagcaccagcuucuaccugaucagcaucuuccugcaccuggugaagauccccugaggacuagucccuguucccagagcccacuuuuuuuucuuuuuuugaaauaaaauagccugucuuucagaucucaaaggcucuuuucagagccaccaaaaaaaaaaaaaaaaaaaaaaaaaaaaaaaaaaaaaaaaaaaaaaaaaaaaaaaaaaaaaaaaagaauu

SEQ ID NO: 41857 - RNA, 1603 nt, Artificial Sequence
  mRNA product Design a-1 (hSL-A64-N5) comprising derived and/or modified sequence from LASV(LM765-SLE-2012;Clade IV)__AIT17814__GPCmut13 (opt4)
aggagagucccgcagucggcguccagcggcucugcuuguucgugugugugucguugcaggccuuauucaagcuuaccaugggccagaucgugaccuucuuccaggaggugccccacgugaucgaggaggugaugaacaucgugcugaucgcccugagcauccuggccgugcugaagggccuguacaacuucgccaccugcggccuggugggccuggugaccuuccugcugcugugcggcagaagcugcaccaccagccuguacaagggcguguacgagcugcagacccuggagcugaacauggagacccugaacaugaccaugccccugagcugcaccaagaacaacagccaccacuacaucauggugggcaacgagaccggccuggagcugacccugaccaacaccagcaucaucgaccacaaguucugcaaccugagcgacgcccacagaaagaaccuguacgaccacgcccugaugagcaucaucagcaccuuccaccugagcauccccaacuucaaccaguacgaggccaugagcugcgacuucaacggcggcaagaucagcgugcaguacaaccugagccacagcuacgccaaggacgccgccgaccacugcggcaccguggccaacggcgugcugcagaccuucaugagaauggccuggggcggcagcuacaucgcccuggacagcggcagaggcagaugggacugcaucaugaccagcuaccaguaccugaucauccagaacaccaccugggaggaccacugccaguucagcagacccagccccaucggcuaccugggccugcugagccagagaaccagagacaucuacaucagcagaagacugcugggcaccuucaccuggacccugagcgacagcgagggcaaggacacccccggcggcuacugccugaccagauggaugcugaucgaggccgagcugaagugcuucggcaacaccgccguggccaagugcaacgagaagcacgacgaggaguucugcgacaugcugagacuguucgacuucaacaagcaggccauccagagacugaaggccgaggcccagaugagcauccagcugaucaacaaggccgugaacgcccugaucaacgaccagcugaucaugaagaaccaccugagagacaucaugggcauccccuacugcaacuacagcaaguacugguaccugaaccacaccaccaccggcaagaccagccugcccaagugcuggcuggugagcaacggcagcuaccugaacgagacccacuucagcgacgacaucgagcagcaggccgacaacaugaucaccgagaugcugcagaaggaguacauggagagacagggcaagaccccccugggccugguggaccuguucguguucagcaccagcuucuaccugaucagcaucuuccugcaccuggugaagauccccugaggacuagucccuguucccagagcccacuuuuuuuucuuuuuuugaaauaaaauagccugucuuucagaucucaaaggcucuuuucagagccaccaaaaaaaaaaaaaaaaaaaaaaaaaaaaaaaaaaaaaaaaaaaaaaaaaaaaaaaaaaaaaaaaagaauu

SEQ ID NO: 41858 - RNA, 1603 nt, Artificial Sequence
  mRNA product Design a-1 (hSL-A64-N5) comprising derived and/or modified sequence from LASV(LM776-SLE-2012;Clade IV)__AIT17824__GPCmut13 (opt4)
aggagagucccgcagucggcguccagcggcucugcuuguucgugugugugucguugcaggccuuauucaagcuuaccaugggccagaucgugaccuucuuccaggaggugccccacgugaucgaggaggugaugaacaucgugcugaucgcccugagcauccuggccgugcugaagggccuguacaacuucgccaccugcggccuggugggccuggugaccuuccugcugcugugcggcagaagcugcaccaccagcguguacaagggcguguacgagcugcagacccuggagcugaacauggagacccugaacaugaccaugccccugagcugcaccaagaacaacagccaccacuacaucauggugggcaacgagaccggccuggagcugacccugaccaacaccagcaucaucaaccacaaguucugcaaccugagcgacgcccacaagaagaaccuguacgaccacgcccugaugagcaucaucagcaccuuccaccugagcauccccaacuucaaccaguacgaggccaugagcugcgacuucaacggcggcaagaucagcgugcaguacaaccugagccacagcuacgccggcgacgccgccaaccacugcggcaccguggccaacggcgugcugcagaccuucaugagaauggccuggggcggcagcuacaucgcccuggacagcggccacggcaagugggacugcaucaugaccagcuaccaguaccugaucauccagaacaccaccugggaggaccacugccaguucagcagacccagccccaucggcuaccugggccugcugagccagagaaccagagacaucuacaucagcagaagacugcugggcaccuucaccuggacccugagcgacagcgagggcaaggacacccccggcggcuacugccugaccagauggaugcugaucgaggccgagcugaagugcuucggcaacaccgccguggccaagugcaacgagaagcacgacgaggaguucugcgacaugcugagacuguucgacuucaacaagcaggccauccagagacugaaggccgaggcccagaugagcauccagcugaucaacaaggccgugaacgcccugaucaacgaccagcugaucaugaagaaccaccugagagacaucaugggcauccccuacugcaacuacagcaaguacugguaccugaaccacaccaccaccggcaagaccagccugcccaagugcuggcuggugagcaacggcagcuaccugaacgagacccacuucagcgacgacaucgagcagcaggccgacaacaugaucaccgagaugcugcagaaggaguacauggagagacagggcaagaccccccugggccugguggaccuguucguguucagcaccagcuucuaccugaucagcaucuuccugcaccuggugaagauccccugaggacuagucccuguucccagagcccacuuuuuuuucuuuuuuugaaauaaaauagccugucuuucagaucucaaaggcucuuuucagagccaccaaaaaaaaaaaaaaaaaaaaaaaaaaaaaaaaaaaaaaaaaaaaaaaaaaaaaaaaaaaaaaaaagaauu

SEQ ID NO: 41859 - RNA, 1603 nt, Artificial Sequence
  mRNA product Design a-1 (hSL-A64-N5) comprising derived and/or modified sequence from LASV(Mad39;Clade IV)__ANH09722__GPCmut13 (opt4)
aggagagucccgcagucggcguccagcggcucugcuuguucgugugugugucguugcaggccuuauucaagcuuaccaugggccagaucgugaccuucuuccaggaggugccccacgugaucgaggaggugaugaacaucgugcugaucgcccugagcauccuggccgugcugaagggccuguacaacguggccaccugcggccugaucggccuggugaccuuccugcugcugugcggcagaagcugcaccaccacccuguacaagggcguguacgagcugcaggcccuggagcugaacauggagacccugaacaugaccaugccccugagcugcaccaagaacaacagccaccacuacaucagagugggcaacgagaccggccuggagcugacccugaccaacaccagccugaucaaccacaaguucugcaaccugagcgacgcccacaagaagaaccuguacgaccacgcccugaugagcaucaucagcaccuuccaccugagcauccccaacuucaaccaguacgaggccaugagcugcgacuucaacgacggcaagaucagcgugcaguacaaccugagccacaccuacgccggcgacaccgccaaccacugcggcaccguggccaacggcgugcugcagaccuucaugagaauggccuggggcggcagcuacaucgcccuggacagcggcagaggcggcugggacugcaucaugaccagcuaccaguaccugaucauccagaacaccaccugggaggaccacugccaguucagcagacccagccccaucggcuaccugggccugcugagccagagaaccagagacaucuacaucagcagaagacugcugggcaccuucaccuggacccugagcgacagcgagggcaaggacacccccggcggcuacugccugaccagauggaugcugaucgaggccgagcugaagugcuucggcaacaccgccguggccaagugcaacgagaagcacgacgaggaguucugcgacaugcugagacuguucgacuucaacaagcaggccauccagagacugaaggccgaggcccagaugagcauccagcugaucaacaaggccgugaacgcccugaucaacgaccagcugaucaugaagaaccaccugagagacaucaugggcauccccuacugcaacuacagcaaguacugguaccugaaccacaccgugaccggcaagaccagccugcccaagugcuggcuggugagcaacggcagcuaccugaacgagacccacuucagcgacgacaucgagcagcaggccgacaacaugaucaccgagaugcugcagaaggaguacauggagagacagggcaagaccccccugggccugguggaccuguucguguucagcaccagcuucuaccugaucagcaucuuccugcaccuggugaagauccccugaggacuagucccuguucccagagcccacuuuuuuuucuuuuuuugaaauaaaauagccugucuuucagaucucaaaggcucuuuucagagccaccaaaaaaaaaaaaaaaaaaaaaaaaaaaaaaaaaaaaaaaaaaaaaaaaaaaaaaaaaaaaaaaaagaauu

SEQ ID NO: 41860 - RNA, 1603 nt, Artificial Sequence
  mRNA product Design a-1 (hSL-A64-N5) comprising derived and/or modified sequence from LASV(Z0947-SLE-2011;Clade IV)__AIT17840__GPCmut13 (opt4)
aggagagucccgcagucggcguccagcggcucugcuuguucgugugugugucguugcaggccuuauucaagcuuaccaugggccagaucgugaccuucuuccaggaggugccccacgugaucgaggaggugaugaacaucgugcugaucgcccugagcauccuggccgugcugaagggccuguacaacuucgccaccugcggccuggugggccuggugaccuuccugcugcugugcggcagaagcugcaccaucagccuguacaagggcguguacgagcugcagacccuggagcugaacauggagacccugaacaugaccaugccccugagcugcaccaagaacaacagccaccacuacaucauggugggcaacgagaccggccuggagcugacccugaccaacaccagcaucaucaaccacaaguucugcaaccugagcgacgcccacaagaagaaccuguacgaccacgcccugaugagcaucaucagcaccuuccaccugagcauccccaacuucaaccaguacgaggccaugagcugcgacuucaacggcggcaagaucagcgugcaguacaaccugagccacagcuacgccggcgacgccgccaaccacugcggcaccguggccaacggcgugcugcagaccuucaugagaauggccuggggcggcagcuacaucgcccuggacagcggcagagacagaugggacugcaucaugaccagcuaccaguaccugaucauccagaacaccaccugggaggaccacugccaguucagcagacccagccccaucggcuaccugggccugcugagccagagaaccagagacaucuacaucagcagaagacugcugggcaccuucaccuggacccugagcgacagcgagggcaaggacacccccggcggcuacugccugaccagauggaugcugaucgaggccgagcugaagugcuucggcaacaccgccguggccaagugcaacgagaagcacgacgaggaguucugcgacaugcugagacuguucgacuucaacaagcaggccauccagagacugaaggccgaggcccagaugagcauccagcugaucaacaaggccgugaacgcccugaucaacgaccagcugaucaugaagaaccaccugagagacaucaugggcauccccuacugcaacuacagcaaguacugguaccugaaccacaccaccaccggcaagaccagccugcccaagugcuggcuggugagcaacggcagcuaccugaacgagacccacuucagcgacgacaucgagcagcaggccgacaacaugaucaccgagaugcugcagaaggaguacauggagagacagggcaagaccccccugggccugguggaccuguucguguucagcaccagcuucuaccugaucagcaucuuccugcaccuggugaagauccccugaggacuagucccuguucccagagcccacuuuuuuuucuuuuuuugaaauaaaauagccugucuuucagaucucaaaggcucuuuucagagccaccaaaaaaaaaaaaaaaaaaaaaaaaaaaaaaaaaaaaaaaaaaaaaaaaaaaaaaaaaaaaaaaaagaauu

SEQ ID NO: 41861 - RNA, 1603 nt, Artificial Sequence
  mRNA product Design a-1 (hSL-A64-N5) comprising derived and/or modified sequence from LASV(Josiah;Clade IV)__NP_694870__GPCmut13 (opt5)
aggagagucccgcagucggcguccagcggcucugcuuguucgugugugugucguugcaggccuuauucaagcuuaccaugggccagaucgugaccuucuuucaagaggucccccacguuauugaagaggugaugaacaucgugcugauugcccucagcguccuggcugugcuuaaggggcuguacaauuucgccacaugcggacucguuggccuggugacguuucuucugcucugugggagauccugcaccacaucucuguauaaaggagucuacgaacugcagacccucgagcugaacauggaaacacuuaauaugaccaugccucugagcuguacaaagaacaauucccaucacuauaucauggugggcaacgagaccgggcucgagcugacgcuuaccaauacaucuauuaucaaccauaaauucugcaaucugagcgacgcgcacaagaaaaaccucuacgaucaugcucugauguccaucauuucuaccuuucaccugagcaucccgaauuucaaccaguaugaagccauguccugugacuuuaauggaggcaagauuagcguucaguacaaccucucucacuccuaugccggcgaugcugccaaucauugcgggacaguggcuaacggaguccugcaaaccuucaugcggauggccuggggcgggagcuacaucgcgcuugacucuggacgcggcaacugggauuguauuaugacguccuaccaguaucugaucauucagaauacaaccugggaggaccacugccaguuuagcagacccucuccuaucggguaccucggacugcuuucccaacggacacgcgauaucuauauuagcagacggcugcucggcaccuucaccuggacacuguccgacucugaaggcaaggauacgcccgggggauacugucugacccgcuggaugcucaucgaggccgagcugaaaugcuuuggcaacacagcuguggccaaguguaaugaaaaacaugacgaggaguucugcgauaugcuuagacuguuugacuucaacaagcaggcuauucagcggcucaaagccgaagcgcagaugagcauccaacugauuaauaaggccgugaacgcucuuaucaaugaucagcugaucaugaagaaccaccuccgcgacauuauggggaucccuuauugcaauuacuccaaauauugguaccugaaccacaccacaaccggaagaacgagccugcccaaguguuggcucgucucuaauggcuccuaccugaacgaaacacauuucagcgacgauauugagcagcaagccgacaauaugaucaccgagaugcuucagaaagaauauauggagcggcaggggaagaccccucugggacucguugaucuguuuguguucucuaccagcuuuuaccugauuuccaucuuccuucaccucgugaaaaucccgugaggacuagucccuguucccagagcccacuuuuuuuucuuuuuuugaaauaaaauagccugucuuucagaucucaaaggcucuuuucagagccaccaaaaaaaaaaaaaaaaaaaaaaaaaaaaaaaaaaaaaaaaaaaaaaaaaaaaaaaaaaaaaaaaagaauu

SEQ ID NO: 41862 - RNA, 1600 nt, Artificial Sequence
  mRNA product Design a-1 (hSL-A64-N5) comprising derived and/or modified sequence from LASV(LP;Clade I)__AAF86701__GPCmut13 (opt5)
aggagagucccgcagucggcguccagcggcucugcuuguucgugugugugucguugcaggccuuauucaagcuuaccaugggccagaucauuaccuucuuucaagaggugccccacgucaucgaagagguuaugaacauugugcugaucgcccucagccugcuugcuauucugaaggggcucuacaauaucgccacaugcggaaucauuggccugguggcguuccuuuuucugugugggaaauccugcucucucacgcugaagggaggcuaugaacugcagacccucgagcugaacauggaaacacuuaauaugaccaugccucugagcuguaccaaaaacuccucucaucacuacaucagagucgggaaugagacaggacucgagcugacacuuaccaacacgagcauuaucaaucauaaguucugcaaccuguccgacgcucacaaaaagaaucucuaugaucaugcccugaugucuauuaucagcaccuuucaccuguccauuccgaacuucaaucaguacgaagccaugagcugugacuuuaacggcggcaagaucucugugcaguauaaucucucccacagcuacgcuggggaugccgcugagcauugcggaacaguugccaacggcgugcugcaaaccuucaugcggauggcguggggagggcgcuauaucgcccuugacucuggcaaagggaauugggauuguauuaugacauccuaccaguaccugaucauucagaacaccacgugggaagaccacugccaguuuagcagacccucuccuaucggauaucucggccugcuuucccaacggacacgcgauauuuacaucagcagacggcugcucggcaccuucacauggacccuguccgacucugaggggaacgagacccccggaggcuauugucugacacgcuggaugcucaucgaagcugagcugaagugcuuugggaauacggccgucgcuaaauguaacgaaaagcaugaugaggaguucugcgacaugcuuagacuguuugauuucaauaaacaggccauucggcgccucaaggcggaagcccagaugagcauccagcugauuaacaaggcugugaaugcccuuaucaacgaccaacugauuaugaaaaaucaccucagagauaucaugggaaucccuuacugcaacuauuccaaguacugguaucugaaucacaccagcucuggccggacaucccugcccaaauguuggcucauuagcaacgggucuuaccugaaugagacccaguucagcgacgacaucgaacagcaagcugauaacaugauuacagagaugcuucagaaggaauacaucgagcgccagggaaaaaccccucugggccucguugacauuuuuaucuucuccacgucuuuuuaucugauuagcaucuuccugcaucuuaucaagauuccgugaggacuagucccuguucccagagcccacuuuuuuuucuuuuuuugaaauaaaauagccugucuuucagaucucaaaggcucuuuucagagccaccaaaaaaaaaaaaaaaaaaaaaaaaaaaaaaaaaaaaaaaaaaaaaaaaaaaaaaaaaaaaaaaaagaauu

SEQ ID NO: 41863 - RNA, 1600 nt, Artificial Sequence
  mRNA product Design a-1 (hSL-A64-N5) comprising derived and/or modified sequence from LASV(803213;Clade II)__AAF86703__GPCmut13 (opt5)
aggagagucccgcagucggcguccagcggcucugcuuguucgugugugugucguugcaggccuuauucaagcuuaccaugggccagaucauuaccuucuuucaagaggugccccacgucaucgaagagguuaugaacauugugcugaucgcccucagccugcuugcuauucugaaggggaucuacaauguggccacaugcggacucuucggccugaucuccuuucuucugcucugugggagaucuugcagcgucacguauaaaggaguguacgaacugcagacccuggagcucaacauggcgaaucugaacaugacaaugccucuuuccuguaccaagaauaacucucaucacuauauuaugguuggcaaugaaacagggcuggagcucacccugacaaacaccagcaucauuaaucauaaauucugcaaccuuuccgacgcucacaagaaaaaucuguacgaucaugcccucaugucuaucauuagcacguuucaccuguccaucccgaacuucaaucaguaugaggccaugagcugugacuuuaacggaggcaagauuucugugcaguacaaucugucccacagcuucgcugucgaugccgcuaaccauugcggcaccaucgccaacggggugcuccaaacauuuaugcggauggcguggggaggcucuuauaucgcccuggacuccgggaagggaaauugggauuguauuaugaccagcuaccaguaccuuaucauucagaacacaaccugggaagaccacugccaguucucucgccccuccccuaucggcuaucuggggcuccugagccaaagaacgcgggauauuuacaucucccgcagacuucugggaacauuuaccuggacacucucugacagcgagggcaaugaagcucccggcggguauugucugacccgguggaugcugaucgaggccgagcucaaaugcuucggaaacaccgcuguugccaaguguaaugaaaaacaugaugaggaauuuugcgacaugcugcgccuuuucgauuucaacaagcaggcgauuaaaagacugaagacagaggcccagauguccauccagcucauuaauaaggcugugaacgcccugaucaaugaccaacuuauuaugaaaaaccaucugcgggauaucaugggcaucccuuacugcaauuauagccgcuacugguaucucaaccacacggucaccgggaagacaucucugcccagauguuggcugguguccaauggaagcuaccucaacgaaacccacuuuucugacgacauugagcagcaggcugauaauaugaucacagagaugcugcaaaaagaauacauggaccggcagggcaagaccccucuugggcugguggaucucuucgucuuuagcacguccuucuaucugauuucuaucuuucugcaccuuguuaaaauuccgugaggacuagucccuguucccagagcccacuuuuuuuucuuuuuuugaaauaaaauagccugucuuucagaucucaaaggcucuuuucagagccaccaaaaaaaaaaaaaaaaaaaaaaaaaaaaaaaaaaaaaaaaaaaaaaaaaaaaaaaaaaaaaaaaagaauu

SEQ ID NO: 41864 - RNA, 1600 nt, Artificial Sequence
  mRNA product Design a-1 (hSL-A64-N5) comprising derived and/or modified sequence from LASV(GA391;Clade III)__CAA36645__GPCmut13 (opt5)
aggagagucccgcagucggcguccagcggcucugcuuguucgugugugugucguugcaggccuuauucaagcuuaccaugggccagaucgugaccuucuuucaagaggucccccacguuauugaagaggugaugaacaucgugcugauugcccucagcauccuggcuauucuuaaggggcuguacaaugucgccacaugcggacucaucggccuggugacguuccuucugcucuccgggagaucuuguagccugaucuauaaaggaaccuacgaacugcagacacucgagcugaacauggaaacccuuaauaugacaaugccucuguccugcaccaagaacaauucucaucacuauauucggguuggcaacgagacagggcucgagcugacccuuacgaauaccagcauccugaaccauaaauuuuguaaucucuccgacgcgcacaagcgcaaccuguacgaucauucucugaugagcauuaucuccacauuccaccucagcauuccgaauuuuaaccaguaugaagcuaugucuugcgacuucaauggaggcaaaaucaccgugcaguacaaccugucccacagcuuugccgucgaugccgcuggccauugugggacacuugccaauggagugcugcaaaccuucaugagaauggcuuggggcgggucuuauauugcccucgacuccggacggggcaacugggauugcaucaugacgagcuaccaguaccugaucauucagaacacaaccugggacgaucacugucaguuuucucgccccuccccuaucggguaucuuggacugcucagccaaagaacacgggacauuuacaucucccgcagacugcugggcaccuucaccuggacacucucugauagcgagggcaaugaaacgcccgggggauauugccugacccgguggaugcuuauugaggcggagcugaaguguuuuggcaacacagccguugcuaagugcaaugaaaaacaugacgaggaguucugugauaugcuccgccuguuugacuucaacaagcaggccaucagacggcuuaaaaccgaagcucagauguccauccagcugauuaauaaggccgugaacgcgcucaucaaugaucaacugauuaugaaaaaccaucugcgcgacaucauggggauuccuuacugcaauuauagcagauacugguaucucaaccacacaucuaccggaaagacgucccugccccggugcuggcuuaucagcaauggcucuuaccugaacgaaacaaaguucagcgacgauaucgagcagcaggccgacaauaugauuaccgagaugcuccaaaaagaauacaucgaucgccaggggaagaccccucugggacuggucgaccuuuuuguguucuccacaucuuuuuaucucauuagcaucuuccugcaccuggugaaaauuccgugaggacuagucccuguucccagagcccacuuuuuuuucuuuuuuugaaauaaaauagccugucuuucagaucucaaaggcucuuuucagagccaccaaaaaaaaaaaaaaaaaaaaaaaaaaaaaaaaaaaaaaaaaaaaaaaaaaaaaaaaaaaaaaaaagaauu

SEQ ID NO: 41865 - RNA, 1603 nt, Artificial Sequence
  mRNA product Design a-1 (hSL-A64-N5) comprising derived and/or modified sequence from LASV(AV;Clade V)__CCA30314__GPCmut13 (opt5)
aggagagucccgcagucggcguccagcggcucugcuuguucgugugugugucguugcaggccuuauucaagcuuaccaugggccagaucgugaccuucuuucaagaggucccccacguuauugaagaggugaugaacaucgugcugauugcccucagcauccuggcuguccuuaaggggcuguacaauauugccacaugcggacucaucggccugaucacguuccuucugcucugugggagauccugcucuagcaaccuguauaaaggaguguacgaacugcagucccucgaccugaauauggagacccuuaacaugacaaugccucugucuuguaccaagaauaacagccaucacuauauucggguuggcaaugauacagggcucgaacugacccuuacaaacaccuccauccugaaucauaaauuuugcaaccucucugacgcgcacaagaaagaucuguacgaccaugcucugaugagcauuaucuccacguuccaccucagcauuccgaauuuuaaccaguaugaggccaugucuugugauuucaauggaggcaagaucuccgugcaguacaaccugagccacucuuaugccauugacgcugccaaucauugcggcaccgucgcuaacgggauccuucaaacauuuaugcgcauggccuggggaggcuccuacaucgcgcuggauagcgggagaggaaacugggacuguauuaugaccucuuaccaguaucucaucauucagaauacaaccugggagaaccacugccaguucucccggcccagcccuaucggcuaccuggggcuucugucccaacgcacgagagauauuuauaucucucggcgccuccugggaacauuuaccuggacacugagcgacuccgaaggcaaugccacccccggcggguacugucucaccagauggaugcugaucgaggcugaacuuaagugcuucggaaacacagccguggcuaaauguaaugagaagcaugaugaggaauuuugcgacaugcugcgccucuucgauuuuaacaaacaggccauuagccggcugaagucugaggcgcagauguccauccagcuuauuaauaaagccguuaacgcucugaucaaugaccaacucauuaugaagaaccaccugagagacaucaugggcaucccuuauugcaauuacagcaaguauugguaccugaaccacacgauuaccgggaaaacaucucuccccaaguguuggcuggugagcaauggauccuaccuuaacgaaacccauuucucugaugacaucgagcagcaggccgauaauaugauuacagaaaugcugcaaaaagaguauauggagcggcagggcaagaccccucucgggcuggucgaccuguucguguuuagcacguccuucuaccuuaucagcauuuuucuccgccuggugaaaaucccgugaggacuagucccuguucccagagcccacuuuuuuuucuuuuuuugaaauaaaauagccugucuuucagaucucaaaggcucuuuucagagccaccaaaaaaaaaaaaaaaaaaaaaaaaaaaaaaaaaaaaaaaaaaaaaaaaaaaaaaaaaaaaaaaaagaauu

SEQ ID NO: 41866 - RNA, 1600 nt, Artificial Sequence
  mRNA product Design a-1 (hSL-A64-N5) comprising derived and/or modified sequence from LASV(Togo/2016/7082;Clade VI)__AMR44577__GPCmut13 (opt5)
aggagagucccgcagucggcguccagcggcucugcuuguucgugugugugucguugcaggccuuauucaagcuuaccaugggccagaucauuaccuucuuucaagaggugccccacgucaucgaagagguuaugaacauugugcugaucgcccucagccugcuugcuauucugaaggggguguacaaugucgccacaugcggaaucaucggccucgugacguuccuguuucuuugugggagauccugcucucugauuuauaaaggaagcuacgaacuccagacccuggagcugaacauggaaacacucaauaugaccaugccucuguccuguacaaagaacucuagccaucacuauauccggguuggcaaugagaccgggcuugagcugacacucaccaacacguccauuaucaaucauaaauucugcaaccugucugacgcgcacaagcgcaaucuuuacgaucaugcucugaugagcauucucuccaccuuucaccugagcaucccgaacuucaaucaguaugaagccaugucuugugacuuuaacggaggcaaaauuuccgugcaguacaaucugagccacgccuaugcugucgaugccgcugagcauugcggcacaguggccaacgggguucuccaaaccuucaugagaauggcguggggaggcucuuacaucgcccuggacuccgggcggggaaauugggauuguaucaugacaagcuaccaguaucuuauuauccagaacaccacgugggaagaccacugccaguuuucucgccccuccccuauuggcuaccuggggcuccugagccaaagaacacgggauaucuauauuucccgcagacuucugggaaccuucacauggacccucucugacagcgagggcaacgagacccccggcggguacugucugacacgguggaugcugaucgaagcugagcucaagugcuuuggaaauacggccguggcuaaguguaacgaaaaacaugaugaggaguucugcgacaugcugcgccuuuuugauuucaauaagcaggccauccagagacugaaauccgaagcgcagaugagcauucaacucaucaacaaggccgucaaugcucugauuaacgaccagcuuaucaugaaaaaucaucugcgggauaugaugggcauuccuuauugcaacuacucuaaguauugguaccucaaucacaccuccagcgggcgcacaucucugcccaaguguuggcuggugagcaacggauccuaccucaaugagacccacuucucugacgacaucgaacagcaagccgauaacaugaucacagagaugcugcagaaagaauauauugacagacagggcaagaccccucuugggcugguggaucucuuugucuucagcacguccuuuuaccugaucagcauuuuccugcaccuuaucaaaauuccgugaggacuagucccuguucccagagcccacuuuuuuuucuuuuuuugaaauaaaauagccugucuuucagaucucaaaggcucuuuucagagccaccaaaaaaaaaaaaaaaaaaaaaaaaaaaaaaaaaaaaaaaaaaaaaaaaaaaaaaaaaaaaaaaaagaauu

SEQ ID NO: 41867 - RNA, 1600 nt, Artificial Sequence
  mRNA product Design a-1 (hSL-A64-N5) comprising derived and/or modified sequence from LASV(KAK-428;Clade n.d. (VII))__ANH09740__GPCmut13 (opt5)
aggagagucccgcagucggcguccagcggcucugcuuguucgugugugugucguugcaggccuuauucaagcuuaccaugggccagaucgugaccuucuuucaagaggucccccacguuauugaagaggugaugaacaucgugcugauugcccucagccugcuugcuauccugaaggggcucuacaauuucgccacaugcggagucauuggccugaucacguuucuucugcucugugggagauccugcucugcgaccuauaaaggacaguacgaacugcagacacuggagcucaacauggaaagccugaauaugaccaugccucuuuccuguacaaagaacaauucucaucacuauauccgggcuggcaacaauaccgggcuggagcucacacugaccaacacgagcauuaucucccauaaauucugcaaucuuucugacgcccacaagaaaaaccuguacgaucauacccucaugagcauuaucacaaccuuucaccuguccauuccgaauuucaaccaguaugaggccaugagcugugacuuuaauggaggcaagaucucuauucaauacaaccugucccacagcuaugcuggcgaugccgcucagcauugcgggacaguggccaauggaguucuccagaccuucaugcgcauggcguggggcgggucuuaccuggcccuugacuccggaagacggggcugggauuguaucaucagcucuuaccaguaucugauuauccaaaacacgacaugggacgaucacugccaguuuucccgccccagcccuauuggguaccucggauucgugucccagaagaccagagacaucuauauuucucggcgccugcuuggcacauuuaccuggacccugagcgauuccgaaggccaugacaugcccgggggauacugucucacaagauggaugcugaucgaggcugaucugaaaugcuucggcaacacggccgucgcuaaguguaaugaaaaacacgacgaggaguuuugcgauauguggcgccucuucgacuucaacaagcaggccauccaacggcugaaagcggaagcccagaugaauauucagcuuaucaacaaggcugugaaugcccugauuaacgaccaacucaugaugaagaaucaccugagagauaucauggggauuccuuauugcaacuacagcaaauuuugguaucuuaauaacaccacaaccggacggacaucucugccccgcuguuggcucaucuccaauggcagcuaccugaacgagacccauuucucugacgauaucgaacagcaggcugacaauaugauuacggagaugcugcagaaggaauacauggauagacaagggaaaacaccucucggacugguugaccuuuuuguguucagcaccuccuuuuaucugaucaccauuuuccuccaccuggucaagaucccgugaggacuagucccuguucccagagcccacuuuuuuuucuuuuuuugaaauaaaauagccugucuuucagaucucaaaggcucuuuucagagccaccaaaaaaaaaaaaaaaaaaaaaaaaaaaaaaaaaaaaaaaaaaaaaaaaaaaaaaaaaaaaaaaaagaauu

SEQ ID NO: 41868 - RNA, 1600 nt, Artificial Sequence; identical to SEQ ID NO: 41862
  mRNA product Design a-1 (hSL-A64-N5) comprising derived and/or modified sequence from LASV(Pinneo-NIG-1969;Clade I)__AIT17836__GPCmut13 (opt5)

SEQ ID NO: 41869 - RNA, 1600 nt, Artificial Sequence
  mRNA product Design a-1 (hSL-A64-N5) comprising derived and/or modified sequence from LASV(ISTH0009-NIG-2011;Clade II)__AIT17404__GPCmut13 (opt5)
aggagagucccgcagucggcguccagcggcucugcuuguucgugugugugucguugcaggccuuauucaagcuuaccaugggccagaucauuaccuucuuucaagaggugccccacgucaucgaagagguuaugaacauugugcugaucgcccucagccugcuugcuauucugaaggggaucuacaauguggccacaugcggacucuucggccuggucuccuuucuucugcucugugggagaucuugcagcacgaccuauaaaggaguguacgaacugcagacacuggagcucgacauggcgucccugaacaugaccaugccucuuucuuguacaaagaauaacagccaucacuauaucaugguuggcaaugaaaccgggcuggagcucacacugaccaacacguccauuaucaaucauaaauucugcaaccuuucugaugcucacaagaaaaaucuguacgaccaugcccucaugagcauuaucuccaccuuucaccugagcauuccgaacuucaaucaguaugaggccaugucuugugauuuuaacggaggcaagaucuccgugcaguacaaucugagccacgcuuaugccgucgacgcugccaaccauugcggcacaauugcgaauggggugcuccaaaccuucaugcggauggccuggggaggcucuuacaucgcucuggauuccgggaagggaagcugggacuguaucaugacaucuuaccaguaucuuauuauccagaacaccacgugggaagaucacugccaguuuucccgccccagcccuauuggcuaccuggggcuccugucccaaagaacacgggacaucuauauuucucgcagacuucugggaaccuucacauggacccucagcgauuccgagggcaacgaaacccccggcggguacugucugacacgguggaugcugaucgaggccgagcucaaaugcuuuggaaauacggcuguugccaaguguaacgaaaaacaugacgaggaguucugcgauaugcugcgccuuuuugacuucaauaagcaggcgaucagacggcugaaaaccgaagcccagaugagcauucagcucaucaacaaggcugugaaugcccugauuaacgaucaacuuaucaugaagaaucaucugcgcgacauuaugggcaucccuuauugcaacuacucuaaauauugguaccucaaucacacagucaccgggaagacaucccugcccagauguuggcuggugagcaacggaucuuaccucaaugaaacccacuucagcgacgauaucgagcagcaggcugacaacaugauuacggagcugcuucaaaaagaauauauggaucggcagggcaagacaccucuggggcucguggaccuguuugucuucuccaccucuuuuuaccugaucagcauuuuccuucaccucaucaaaauuccgugaggacuagucccuguucccagagcccacuuuuuuuucuuuuuuugaaauaaaauagccugucuuucagaucucaaaggcucuuuucagagccaccaaaaaaaaaaaaaaaaaaaaaaaaaaaaaaaaaaaaaaaaaaaaaaaaaaaaaaaaaaaaaaaaagaauu

SEQ ID NO: 41870 - RNA, 1600 nt, Artificial Sequence
  mRNA product Design a-1 (hSL-A64-N5) comprising derived and/or modified sequence from LASV(ISTH2010-NIG-2012;Clade II)__AIT17482__GPCmut13 (opt5)
aggagagucccgcagucggcguccagcggcucugcuuguucgugugugugucguugcaggccuuauucaagcuuaccaugggccagaucauuaccuucuuucaagaggugccccacgucaucgaagagguuaugaacauugugcugaucgcccucagccugcuugcuauucugaaggggaucuacaauguggccacaugcggacucuucggccuggucuccuuucuucugcucugugggagaucuugcagcacgaccuauaaaggaguguacgaacugcagacacuggagcucgacauggcgucccugaacaugaccaugccucuuucuuguacaaagaauaacagccaucacuauaucaugguuggcaaugaaaccgggcuggagcucacacugaccaacacguccauuaucaaucauaaauucugcaaccuuucugaugcucacaagaaaaaucuguacgaccaugcccucaugagcauuaucuccaccuuucaccugagcauuccgaacuucaaucaguaugaggccaugucuugugauuuuaacggaggcaagaucuccgugcaguacaaucugagccacgcuuaugccgucgacgcugccaaccauugcggcacaauugcgaauggggugcuccaaaccuucaugcggauggccuggggaggcucuuacaucgcucuggauuccgggaagggaagcugggacuguaucaugacaucuuaccaguaucuuauuauccagaacauuaccugggaagaucacugccaguuuucccgccccagcccuaucggcuaccuggggcuccugucccaaagaacgcgggacauuuauaucucucgcagacuucugggaacauucaccuggacacucagcgauuccgagggcaacgaaacccccggcggguacugucugacccgguggaugcugaucgaggccgagcucaaaugcuuuggaaauacagcuguugccaaguguaacgaaaaacaugacgaggaguucugcgauaugcugcgccuuuuugacuucaauaagcaggcgauuagacggcugaaaacggaagcccagaugagcauccagcucauuaacaaggcugugaaugcccugaucaacgaucaacuuauuaugaagaaucaucugcgcgacaucaugggcaucccuuauugcaacuacucuaaauauugguaccucaaucacaccgucacagggaagaccucccugcccagauguuggcuggugagcaacggaucuuaccucaaugaaacacacuucagcgacgauauugagcagcaggcugacaacaugaucaccgagcugcuucaaaaagaauauauugaucggcagggcaagacgccucuggggcucguggaccuguuugucuucuccacaucuuuuuaccugaucagcauuuuccuucaccucguuaaaaucccgugaggacuagucccuguucccagagcccacuuuuuuuucuuuuuuugaaauaaaauagccugucuuucagaucucaaaggcucuuuucagagccaccaaaaaaaaaaaaaaaaaaaaaaaaaaaaaaaaaaaaaaaaaaaaaaaaaaaaaaaaaaaaaaaaagaauu

SEQ ID NO: 41871 - RNA, 1600 nt, Artificial Sequence
  mRNA product Design a-1 (hSL-A64-N5) comprising derived and/or modified sequence from LASV(Lassa virus/H.sapiens-wt/NGA/2015/ISTH_0543;Clade II)__AVO03639__GPCmut13 (opt5)
aggagagucccgcagucggcguccagcggcucugcuuguucgugugugugucguugcaggccuuauucaagcuuaccaugggccagaucauuaccuucuuucaagaggugccccacgucaucgaagagguuaugaacauugugcugaucgcccucagccugcuugcuauucugaaggggaucuacaauguggccacaugcggacucuucggccuggucuccuuucuucugcucugugggagaucuugcagcacgaccuauaaaggaguguacgaacugcagacacuggagcucgacauggcgaaccugaauaugaccaugccucuuuccuguacaaagaacaauucucaucacuauaucaugguuggcaacgaaaccgggcuggagcucacacugaccaauacgagcauuaucaaccauaaauucugcaaucuuuccgaugcucacaagaaaaaccuguacgaccaugcccucaugucuauuaucagcaccuuucaccuguccauuccgaauuucaaccaguaugaggccaugagcugugauuuuaauggaggcaagaucucugugcaguacaaccugucccacacauaugcugucgacgccgcuaaucauugcggcaccauugccaacggggugcuccaaacauucaugcggauggcguggggaggcagcuacaucgcccuggauucugggaagggauccugggacuguaucaugaccagcuaccaguaucuuguuauucagaacacgacaugggaagaucacugccaguuuucucgccccuccccuaucggcuaccuggggcuccugagccaaagaacccgggacauuuauaucucccgcagacuucugggaacauucaccuggacccucucugauagcgagggcaaugaaacacccggcggguacugucugacgcgguggaugcugauugaggcugagcucaaaugcuuuggaaacaccgccguggcuaaguguaaugaaaaacaugacgaggaguucugcgauaugcugcgccuuuuugacuucaacaagcaggccaucagacggcugaaaacagaagcgcagauguccauccagcucauuaauaaggccgucaacgcucugaucaaugaucaacuuauuaugaagaaccaucugcgcgacaucaugggcauuccuuauugcaauuacagcaaauauugguaccucaaccacaccgugacagggaagaccucucugcccagauguuggcugguguccaauggaagcuaccucaacgaaacgcacuucucugacgauaucgagcagcaggccgacaauaugaucacagagcugcuucaaaaagaauauauugaucggcagggcaagaccccucuggggcucgucgaccuguuuguuuucagcaccuccuuuuaccugaucucuauuuuccuucaccucgugaaaaucccgugaggacuagucccuguucccagagcccacuuuuuuuucuuuuuuugaaauaaaauagccugucuuucagaucucaaaggcucuuuucagagccaccaaaaaaaaaaaaaaaaaaaaaaaaaaaaaaaaaaaaaaaaaaaaaaaaaaaaaaaaaaaaaaaaagaauu

SEQ ID NO: 41872 - RNA, 1600 nt, Artificial Sequence
  mRNA product Design a-1 (hSL-A64-N5) comprising derived and/or modified sequence from LASV(Lassa virus/H.sapiens-wt/NGA/2016/ISTH_0009;Clade II)__AVO03571__GPCmut13 (opt5)
aggagagucccgcagucggcguccagcggcucugcuuguucgugugugugucguugcaggccuuauucaagcuuaccaugggccagaucauuaccuucuuucaagaggugccccacgucaucgaagagguuaugaacauugugcugaucgcccucagccugcuugcuauucugaaggggaucuacaauguggccacaugcggacuccugggccuugucuccuuccugcuccugugugggagaucuugcagcacgaccuauaaaggaguguacgaacugcagacacucgagcuggacauggcgucccuuaacaugaccaugccucugucuuguacaaagaauaacagccaucacuauaucaugguuggcaaugaaaccgggcucgagcugacacuuaccaacacguccauuaucaaucauaaauuuugcaaccugucugaugcucacaagaaaaaucucuacgaccaugcccugaugagcauuaucuccaccuuccaccugagcauuccgaacuuuaaucaguaugaggccaugucuugugauuucaacggaggccggaucuccgugcaguacaaucucagccacucuuaugcugucgacgccgcuaaccauugcggcacaauugccaauggggugcugcaaaccuuuaugcgcauggcguggggaggcuccuacaucgcccuugauagcgggaagggaucuugggacuguaucaugacauccuaccaguaucugauuauccagaacaccacgugggaagaucacugccaguucagcagacccuccccuauuggcuaccucgggcugcuuucucaacggacacgcgacaucuauauuagcagacggcugcucggaaccuuuacauggacccuguccgauagcgagggcaacgaaacccccggcggguacugucugacacgcuggaugcucaucgaggcugagcugaagugcuucggaaauacggccguugcuaaauguaacgaaaagcaugacgaggaauuuugcgauaugcuuagacuguucgacuuuaauaaacaggccauccggcgccucaagaccgaggcgcagaugucuauucagcugaucaacaaagccgugaaugcucuuauuaacgaucaacugaucaugaagaaucaccucagagacauuaugggcaucccuuauugcaacuacuccaaguauugguaccugaaucacacagucaccgggaaaacaagccugccccgguguuggcucgugucuaacggaagcuaccugaaugaaacccauuucuccgacgauaucgagcagcaggccgacaacaugauuacggagcuucugcaaaaggaauauaucgaucgccagggcaaaacaccucucgggcugguggaccuguucgucuuuucuaccagcuucuaccuuauuuccaucuuucuccaccugguuaagauuccgugaggacuagucccuguucccagagcccacuuuuuuuucuuuuuuugaaauaaaauagccugucuuucagaucucaaaggcucuuuucagagccaccaaaaaaaaaaaaaaaaaaaaaaaaaaaaaaaaaaaaaaaaaaaaaaaaaaaaaaaaaaaaaaaaagaauu

SEQ ID NO: 41873 - RNA, 1600 nt, Artificial Sequence
  mRNA product Design a-1 (hSL-A64-N5) comprising derived and/or modified sequence from LASV(Lassa virus/H.sapiens-wt/NGA/2016/ISTH_0017;Clade II)__AVO03567__GPCmut13 (opt5)
aggagagucccgcagucggcguccagcggcucugcuuguucgugugugugucguugcaggccuuauucaagcuuaccaugggccagaucauuaccuucuuucaagaggugccccacgucaucgaagagguuaugaacauugugcugaucgcccucagccugcuugcuauucugaaggggaucuacaauguggccacaugcggacucuucggccuggucuccuuucuucugcucugugggagaucuugcagcacgaccuauaaaggaguguacgaacugcagacacuggagcucgacauggcgucccugaacaugaccaugccucuuucuuguacaaagaauaacagccaucacuauaucaugguuggcaaugaaaccgggcuggagcucacacugaccaacacguccauuaucaaucauaaauucugcaaccuuucugaugcucacaagaaaaaucuguacgaccaugcccucaugagcauuaucuccaccuuucaccugagcauuccgaacuucaaucaguaugaggccaugucuugugauuuuaacggaggcaagaucuccgugcaguacaaucugagccacacauaugcuauugacgccgcuaaccauugcggcaccaucgccaaugggguccuccaaacauucaugcggauggcguggggaggcucuuacaucgcccuggauuccgggaagggaagcugggacuguauuaugaccucuuaccaguaucuuaucauucagaacacgacaugggaagaucacugccaguuuucccgccccagcccuaucggcuaccuggggcuccugucccaaagaacccgggacauuuauaucucucgcagacuucugggaacauucaccuggacccucagcgauuccgagggcaacgaaacacccggcggguacugucugacgcgguggaugcugaucgaggcugagcucaaaugcuuuggaaauaccgccguggcuaaguguaacgaaaaacaugacgaggaguucugcgauaugcugcgccuuuuugacuucaauaagcaggccauuagacggcugaaaacagaagcgcagaugagcauccagcucauuaacaaggccguuaaugcucugaucaacgaucaacuuauuaugaagaaucaucugcgcgacaucaugggcaucccuuauugcaacuacucuaaauauugguaccucaaucacaccgugacagggaagaccucccugcccagauguuggcuggucagcaacggaucuuaccucaaugaaacgcacuucagcgacgauauugagcagcaggccgacaacaugaucacagagcugcuucaaaaagaauauauggaucggcagggcaagaccccucuggggcucguggaccuguuuguguucuccaccucuuuuuaccugauuagcaucuuccuucaccucguccgcauuccgugaggacuagucccuguucccagagcccacuuuuuuuucuuuuuuugaaauaaaauagccugucuuucagaucucaaaggcucuuuucagagccaccaaaaaaaaaaaaaaaaaaaaaaaaaaaaaaaaaaaaaaaaaaaaaaaaaaaaaaaaaaaaaaaaagaauu

SEQ ID NO: 41874 - RNA, 1600 nt, Artificial Sequence
  mRNA product Design a-1 (hSL-A64-N5) comprising derived and/or modified sequence from LASV(Lassa virus/H.sapiens-wt/NGA/2018/ISTH_0959;Clade II)__AVV65099__GPCmut13 (opt5)
aggagagucccgcagucggcguccagcggcucugcuuguucgugugugugucguugcaggccuuauucaagcuuaccaugggccagaucauuaccuucuuucaagaggugccccacgucaucgaagagguuaugaacauugugcugaucgcccucagccugcuugcuauucugaaggggaucuacaauguggucacaugcggacucuucggccugguguccuuucuucugcucugugggagaucuugcagcacgaccuauaaaggaguuuacgaacugcagacacuggagcucgacauggccucccugaacaugaccaugccucuuucuuguacaaagaauaacagccaucacuauaucauggugggcaaugaaaccgggcuggagcucacacugaccaacacguccauuaucaaucauaaauucugcaaccuuucugaugcgcacaagaaaaaucuguacgaccaugcucucaugagcauuaucuccaccuuucaccugagcauuccgaacuucaaucaguaugaggccaugucuugugauuuuaacggaggcaagaucuccguccaguacaaucugagccacgccuaugcuauugacgccgcuaaccauugcggcacaaucgccaauggggugcuccaaaccuucaugcggauggcguggggaggcucuuacaucgcccuggauuccgggaagggaagcugggacuguauuaugacaucuuaccaguaucuuaucauucagaacaccacgugggaagaucacugccaguuuucccgccccagcccuaucggcuaccuggggcuccugucccaaagaacacgggacauuuauaucucucgcagacuucugggaaccuucacauggacccucagcgauuccgagggcaacgaaacccccggcggguacugucugacacgguggaugcugaucgaggcugagcucaaaugcuuuggaaauacggccguugcuaaguguaacgaaaaacaugacgaggaguucugcgauaugcugcgccuuuuugacuucaauaagcaggccauuagacggcugaaaaccgaagcgcagaugagcauccagcucauuaacaaggccgugaaugcucugaucaacgaucaacuuauuaugaagaaucaucugcgcgacaucaugggcaucccuuauugcaacuacucuaaauauugguaccucaaucacacagucaccgggaagacaucccugcccagauguuggcuggugagcaacggaucuuaccucaaugaaacccacuucagcgacgauauugagcagcaggccgacaacaugaucacggagcugcuucaaaaagaauauauugaucggcagggcaagacaccucuggggcucguggaccuguuugucuucuccaccucuuuuuaccugaucagcauuuuccuucaccucguuaaaaucccgugaggacuagucccuguucccagagcccacuuuuuuuucuuuuuuugaaauaaaauagccugucuuucagaucucaaaggcucuuuucagagccaccaaaaaaaaaaaaaaaaaaaaaaaaaaaaaaaaaaaaaaaaaaaaaaaaaaaaaaaaaaaaaaaaagaauu

SEQ ID NO: 41875 - RNA, 1600 nt, Artificial Sequence
  mRNA product Design a-1 (hSL-A64-N5) comprising derived and/or modified sequence from LASV(LASV003-NIG-2008;Clade II)__AIT17580__GPCmut13 (opt5)
aggagagucccgcagucggcguccagcggcucugcuuguucgugugugugucguugcaggccuuauucaagcuuaccaugggccagaucauuaccuucuuucaagaggugccccacgucaucgaagagguuaugaacauugugcugaucgcccucagccugcuugcuauucugaaggggaucuacaauguggccacaugcggacucuucggccuggucuccuuucuucugcucugugggagaucuugcagcacgaccuauaaaggaguguacgaacugcagacacuggagcucgacauggcgucccugaacaugaccaugccucuuucuuguacaaagaauaacagccaucacuauaucaugguuggcaaugaaaccgggcuggagcucacacugaccaacacguccauuaucaaucauaaauucugcaaccuuucugaugcucacaagaaaaaucuguacgaccaugcccucaugagcauuaucuccaccuuucaccugagcauuccgaacuucaaucaguaugaggccaugucuugugauuuuaacggaggcaagaucuccgugcaguacaaucugagccacacauaugcugucgacgccgcuaaccauugcggcaccauugccaauggggugcuccaaacauucaugcggauggcguggggaggcucuuacaucgcccuggauuccgggaagggaagcugggacuguaucaugaccucuuaccaguaucuuauuauccagaacacgacaugggaagaucacugccaguuuucccgccccagcccuauuggcuaccuggggcuccugucccaaagaacccgggacaucuauauuucucgcagacuucugggaacauucaccuggacccucagcgauuccgagagcaacgaaacacccggcggcuacugucugacgcgguggaugcugaucgaggcugagcucaaaugcuuugggaauaccgccguugcuaaguguaacgaaaaacaugacgaggaguucugcgauaugcugcgccuuuuugacuucaauaagcaggccaucagacggcugaaagcggaagcccagaugucuauucagcucaucaacaaggcugugaaugcccugauuaacgaucaacuuaucaugaagaaucaucugcgcgacauuaugggaaucccuuauugcaacuacuccaaauauugguaccucaaucacacagucaccggcagaacaagccugccccgguguuggcuggugucuaacgggagcuaccucaaugaaacccacuucuccgacgauaucgagcagcaggcugacaacaugauuacggagcugcuucaaaaggaauauauggaucgccagggaaaaacaccucugggccucguggaccuguuugucuucucuaccagcuuuuaccugaucuccauuuuccuucaccucguuaagaucccgugaggacuagucccuguucccagagcccacuuuuuuuucuuuuuuugaaauaaaauagccugucuuucagaucucaaaggcucuuuucagagccaccaaaaaaaaaaaaaaaaaaaaaaaaaaaaaaaaaaaaaaaaaaaaaaaaaaaaaaaaaaaaaaaaagaauu

SEQ ID NO: 41876 - RNA, 1600 nt, Artificial Sequence
  mRNA product Design a-1 (hSL-A64-N5) comprising derived and/or modified sequence from LASV(LASV035-NIG-2009;Clade II)__AIT17588__GPCmut13 (opt5)
aggagagucccgcagucggcguccagcggcucugcuuguucgugugugugucguugcaggccuuauucaagcuuaccaugggccagaucauuaccuucuuucaagaggugccccacgucaucgaagagguuaugaacauugugcugaucgcccucagccugcuugcuauucugaaggggaucuacaauguggccacaugcggacucuucggccuggucuccuuucuucugcucugugggagaucuugcagcacgaccuauaaaggaguguacgaacugcagacacuggagcucgacauggcgucccugaacaugaccaugccucuuucuuguacaaagaauaacagccaucacuauaucaugguuggcaaugaaaccgggcuggagcucacacugaccaacacguccauuaucaaucauaaauucugcaaccuuucugaugcucacaagaaaaaucuguacgaccaugcccucaugagcauuaucuccaccuuucaccugagcauuccgaacuucaaucaguaugaggccaugucuugugauuuuaacggaggcaagaucuccgugcaguacaaucugagccacgcuuaugccgucgacgcugccaaccauugcggcacaauugcgaauggggugcuccaaaccuucaugcggauggccuggggaggcucuuacaucgcucuggauuccgggaagggaagcugggacuguaucaugacaucuuaccaguaucuuauuauccagaacaccacgugggaagaucacugccaguuuucccgccccagcccuauuggcuaccuggggcuccugucccaaagaacacgggacaucuauauuucucgcagacuucugggaaccuucacauggacccucagcgauuccgagggcaacgaaacccccggcggguacugucugacacgguggaugcugaucgaggccgagcucaaaugcuuuggaaauacggcuguugccaaguguaacgaaaaacaugacgaggaguucugcgauaugcugcgccuuuuugacuucaauaagcaggcgaucagacggcugaaagccgaagcucagaugagcauucagcucaucaacaaggccgugaaugcucugauuaacgaucaacuuaucaugaagaaucaucugcgcgacauuaugggcaucccuuauugcaacuacucuaaauauugguaccucaaucacaccgucacagggaagaccucccugcccagauguuggcuggugagcaacggaucuuaccucaaugaaacacacuucagcgacgauaucgagcagcaggccgacaacaugauuaccgagcugcuucaaaaagaauauaucgaucggcagggcaagacgccucuggggcucguggaccuguuugucuucuccacaucuuuuuaccugauuagcaucuuccuucaccucguuaaaauuccgugaggacuagucccuguucccagagcccacuuuuuuuucuuuuuuugaaauaaaauagccugucuuucagaucucaaaggcucuuuucagagccaccaaaaaaaaaaaaaaaaaaaaaaaaaaaaaaaaaaaaaaaaaaaaaaaaaaaaaaaaaaaaaaaaagaauu

SEQ ID NO: 41877 - RNA, 1600 nt, Artificial Sequence
  mRNA product Design a-1 (hSL-A64-N5) comprising derived and/or modified sequence from LASV(LASV1000-NIG-2009;Clade II)__AIT17782__GPCmut13 (opt5)
aggagagucccgcagucggcguccagcggcucugcuuguucgugugugugucguugcaggccuuauucaagcuuaccaugggccagaucauuaccuucuuucaagaggugccccacgucaucgaagagguuaugaacauugugcugaucgcccucagccugcuugcuauucugaaggggaucuacaauguggccacaugcggacucuucggccuggucuccuuucuucugcucugugggagaucuugcagcacgaccuauaaaggaguguacgaacugcagacacuggagcucgacauggcgucccugaacaugaccaugccucuuucuuguacaaagaauaacagccaucacuauaucaugguuggcaaugaaaccgggcuggagcucacacugaccaacacguccauuaucaaucauaaauucugcaaccuuucugaugcucacaagaaaaaucuguacgaccaugcccucaugagcauuaucuccaccuuucaccugagcauuccgaacuucaaucaguaugaggccaugucuugugauuuuaacggaggcaagaucuccgugcaguacaaucugagccacacauaugcugucgacgccgcuaaccauugcggcaccauugccaauggggugcuccaaacauucaugcggauggcguggggaggcucuuacaucgcccuggauuccgggaagggaagcugggacuguaucaugaccucuuaccaguaucuuauuauccagaacacgacaugggaagaucacugccaguuuucccgccccagcccuauuggcuaccuggggcuccugucccaaagaacccgggacaucuauauuucucgcagacuucugggaacauucaccuggacccucagcgauuccgagggcaacgaaacacccggcggguacugucugacgcgguggaugcugaucgaggcugagcucaaaugcuuuggaaauaccgccguugcuaaguguaacgaaaaacaugacgaggaguucugcgauaugcugcgccuuuuugacuucaauaagcaggccaucaaaagacugaagacagaagcgcagaugagcauucagcucaucaacaaggccgugaaugcucugauuaacgaucaacuuaucaugaaaaaucaucugcgggacauuaugggcaucccuuauugcaacuacucuaaguauugguaccucaaucacaccgucacagggaaaaccucccugccccgcuguuggcuggugagcaacggaucuuaccucaaugaaacgcacuucagcgacgauaucgagcagcaggccgacaacaugauuacagagcugcuucaaaaggaauauaucgauagacagggcaaaaccccucuggggcucguggaccuguuugucuucuccaccucuuuuuaccugauuagcaucuuccuucaccucguuaagauuccgugaggacuagucccuguucccagagcccacuuuuuuuucuuuuuuugaaauaaaauagccugucuuucagaucucaaaggcucuuuucagagccaccaaaaaaaaaaaaaaaaaaaaaaaaaaaaaaaaaaaaaaaaaaaaaaaaaaaaaaaaaaaaaaaaagaauu

SEQ ID NO: 41878 - RNA, 1600 nt, Artificial Sequence
  mRNA product Design a-1 (hSL-A64-N5) comprising derived and/or modified sequence from LASV(LASV221-NIG-2010;Clade II)__AIT17624__GPCmut13 (opt5)
aggagagucccgcagucggcguccagcggcucugcuuguucgugugugugucguugcaggccuuauucaagcuuaccaugggccagaucauuaccuucuuucaagaggugccccacgucaucgaagagguuaugaacauugugcugaucgcccucagccugcuugcuauucugaaggggaucuacaauguggccacaugcggacucuucggccuggucuccuuucuucugcucugugggagaucuugcagcacgaccuauaaaggaguguacgaacugcagacacuggagcucgacauggcgucccugaacaugaccaugccucuuucuuguacaaagaauaacagccaucacuauaucaugguuggcaaugaaaccgggcuggagcucacacugaccaacacguccauuaucaaucauaaauucugcaaccuuucugaugcucacaagaaaaaucuguacgaccaugcccucaugagcauuaucuccaccuuucaccugagcauuccgaacuucaaucaguaugaggccaugucuugugauuuuaacggaggcaagaucuccgugcaguacaaucugagccacacauaugcuauugacgccgcuaaccauugcggcaccaucgccaaugggguccuccaaacauucaugcggauggcguggggaggcucuuacaucgcccuggauuccgggaagggaagcugggacuguauuaugaccucuuaccaguaucuuaucauucagaacacgacaugggaagaucacugccaguuuucccgccccagcccuaucggcuaccuggggcuccugucccaaagaacccgggacauuuauaucucucgcagacuucugggaacauucaccuggacccucagcgauuccgagggcaacgaaacacccggcggguacugucugacgcgguggaugcugaucgaggcugagcucaaaugcuuuggaaauaccgccguggcuaaguguaacgaaaaacaugacgaggaguucugcgauaugcugcgccuuuuugacuucaauaagcaggccauuagacggcugaaaacagaagcgcagaugagcauccagcucauuaacaaggccguuaaugcucugaucaacgaucaacuuauuaugaagaaucaucugcgcgacaucaugggcaucccuuauugcaacuacucuaaauauugguaccucaaucacaccgugacagggaagaccucccugcccagauguuggcuggucagcaacggaucuuaccucaaugaaacgcacuucagcgacgauauugagcagcaggccgacaacaugaucacagagaugcugcaaaaagaauauauggaucggcagggcaagaccccucuugggcugguggaccucuuuguguucuccaccucuuuuuaccugauuagcaucuuccugcaccuugucaaaauuccgugaggacuagucccuguucccagagcccacuuuuuuuucuuuuuuugaaauaaaauagccugucuuucagaucucaaaggcucuuuucagagccaccaaaaaaaaaaaaaaaaaaaaaaaaaaaaaaaaaaaaaaaaaaaaaaaaaaaaaaaaaaaaaaaaagaauu

SEQ ID NO: 41879 - RNA, 1600 nt, Artificial Sequence
  mRNA product Design a-1 (hSL-A64-N5) comprising derived and/or modified sequence from LASV(LASV237-NIG-2010;Clade II)__AIT17638__GPCmut13 (opt5)
aggagagucccgcagucggcguccagcggcucugcuuguucgugugugugucguugcaggccuuauucaagcuuaccaugggccagaucauuaccuucuuucaagaggugccccacgucaucgaagagguuaugaacauugugcugaucgcccucagccugcuugcuauucugaaggggaucuacaauguggccacaugcggacucuucggccuggucuccuuucuucugcucugugggagaucuugcagcacgaccuauaaaggaguguacgaacugcagacacuggagcucgacauggcgucccugaacaugaccaugccucuuucuuguacaaagaauaacagccaucacuauaucaugguuggcaaugaaaccgggcuggagcucacacugaccaacacguccauuaucaaucauaaauucugcaaccuuucugaugcucacaagaaagaccuguacgaucaugcccucaugagcauuaucuccaccuuucaccugagcauuccgaauuucaaccaguaugaggccaugucuugugacuuuaauggaggcaagaucuccgugcaguacaaccugagccacacauaugcugucgaugccgcuaaucauugcggcaccauugccaacggggugcuccaaacauucaugcggauggcguggggaggcucuuacaucgcccuggacuccgggaagggaagcugggauuguaucaugaccucuuaccaguaucuuauuauccagaauacgacaugggaagaccacugccaguuuucccgccccagcccuauuggcuaccuggggcuccugucccaaagaacccgggauaucuauauuucucgcagacuucugggaacauucaccuggacccucagcgacuccgagggcaacgaaacacccggcggguacugucugacgcgguggaugcugaucgaggcugagcucaaaugcuuuggaaacaccgccguugcuaaguguaaugaaaaacaugaugaggaguucugcgacaugcugcgccuuuuugauuucaacaagcaggccaucagacggcugaaaacagaagcgcagaugagcauucagcucaucaauaaggccgugaacgcucugauuaaugaccaacuuaucaugaagaaccaucugcgcgacauuaugggcaucccuuauugcaauuacucuaaauauugguaccucaaccacaccgucacagggaagaccucccugcccagauguuggcuggugagcaauggaucuuaccucaacgaaacgcacuucagcgaugacaucgagcagcaggccgauaauaugauuacagagcugcuucaaaaagaauauauggaccggcagggcaagaccccucuggggcucguggaucuguuugucuucuccaccucuuuuuaccugaucagcauuuuccuucaccucaucaaaauuccgugaggacuagucccuguucccagagcccacuuuuuuuucuuuuuuugaaauaaaauagccugucuuucagaucucaaaggcucuuuucagagccaccaaaaaaaaaaaaaaaaaaaaaaaaaaaaaaaaaaaaaaaaaaaaaaaaaaaaaaaaaaaaaaaaagaauu

SEQ ID NO: 41880 - RNA, 1600 nt, Artificial Sequence
  mRNA product Design a-1 (hSL-A64-N5) comprising derived and/or modified sequence from LASV(LASV253-NIG-2011;Clade II)__AIT17670__GPCmut13 (opt5)
aggagagucccgcagucggcguccagcggcucugcuuguucgugugugugucguugcaggccuuauucaagcuuaccaugggccagaucauuaccuucuuucaagaggugccccacgucaucgaagagguuaugaacauugugcugaucgcccucagccugcuugcuauucugaaggggaucuacaauguggccacaugcggacucuucggccuggucuccuuucuucugcucugugggagaucuugcagcacgaccuauaaaggaguguacgaacugcagacacuggagcucgacauggcgucccugaacaugaccaugccucuuucuuguacaaagaauaacagccaucacuauaucaugguuggcaaugaaaccgggcuggagcucacacugaccaacacguccauuaucaaucauaaauucugcaaccuuucugaugcucacaagaaaaaucuguacgaccaugcccucaugagcauuaucuccaccuuucaccugagcauuccgaacuucaaucaguaugaggccaugucuugugauuuuaacggaggcaagaucuccgugcaguacaaucugagccacacauaugcugucgacgccgcuaaccauugcggcaccauugccaauggggugcuccaaacauucaugcggauggcguggggaggcucuuacaucgcccuggauuccgggaagggaagcugggacuguaucaugaccucuuaccaguaucuuauuauccagaacacgacaugggaagaucacugccaguuuucccgccccagcccuauuggcuaccuggggcuccugucccaaagaacccgggacaucuauauuucucgcagacuucugggaacauucaccuggacccucagcgauuccgagggcaacgaaacacccggcggguacugucugacgcgguggaugcugaucgaggcugagcucaaaugcuuuggaaauaccgccguugcuaaguguaacgaaaaacaugacgaggaguucugcgauaugcugcgccuuuuugacuucaauaagcaggccaucagacggcugaaagcggaagcccagaugagcauucagcucaucaacaaggcugugaaugcccugauuaacgaucaacuuaucaugaagaaucaucugcgcgacauuaugggcaucccuuauugcaacuacucuaaauauugguaccucaaucacacagucaccgggagaacaucccugccccgguguuggcuggugagcaacggaucuuaccucaaugaaacccacuucagcgacgauaucgagcagcaggcugacaacaugauuacggagcugcuucaaaaggaauauaucgaucgccagggcaaaacaccucuggggcucguggaccuguuugucuucuccaccucuuuuuaccugauuagcaucuuccuucaccucguuaagauuccgugaggacuagucccuguucccagagcccacuuuuuuuucuuuuuuugaaauaaaauagccugucuuucagaucucaaaggcucuuuucagagccaccaaaaaaaaaaaaaaaaaaaaaaaaaaaaaaaaaaaaaaaaaaaaaaaaaaaaaaaaaaaaaaaaagaauu

SEQ ID NO: 41881 - RNA, 1600 nt, Artificial Sequence
  mRNA product Design a-1 (hSL-A64-N5) comprising derived and/or modified sequence from LASV(LASV254-NIG-2011;Clade II)__AIT17674__GPCmut13 (opt5)
aggagagucccgcagucggcguccagcggcucugcuuguucgugugugugucguugcaggccuuauucaagcuuaccaugggccagaucauuaccuucuuucaagaggugccccacgucaucgaagagguuaugaacauugugcugaucgcccucagccugcuugcuauucugaaggggaucuacaauguggccacaugcggacucuucggccuggucuccuuucuucugcucugugggagaucuugcagcacgaccuauaaaggaguguacgaacugcagacacuggagcucgacaugaccaaccugaauaugacaaugccucuuuccuguaccaagaacaauucucaucacuauaucaugguuggcaacgaaacagggcuggagcucacccugacgaauaccagcauuaucaaccauaaauucugcaaucuuuccgaugcgcacaagaaaaaccuguacaaucaugcucucaugucuauuaucagcacauuucaccuguccauuccgaacuucaaucaguaugaggccaugagcugugacuuuaacggaggcaagaucucugugcaguacaaucugucccacagcuaugccgucgaugcugccaaccauugcggcaccauugcuaacggggugcuccaaacauucaugcggauggccuggggaggcucuuacaucgcgcuggacuccgggaagggaaauugggauuguaucaugaccagcuaccaguaucuuauuauccagaacacgacaugggaagaccacugccaguuuucucgccccuccccuauuggcuaccuggggcuccugagccaaagaacccgggauaucuauauuucccgcagacuucugggaacauucaccuggacccucucugacagcgagggcaaugaaacacccggcggguacugucugacgcgguggaugcugaucgaggccgagcucaaaugcuuuggaaacaccgcuguugccaaguguaaugaaaaacaugaugaggaguucugcgacaugcugcgccuuuuugauuucaacaagcaggcuaucagacggcugaaaacagaagcccaggcgaauauucagcucaucaacaaggccgugaaugcucugauuaacgaccaacuuaucaugaagaaucaucugcgcgauauuaugggcaucccuuauugcaacuacuccaaauauugguaccucaaucacaccgucacagggaagaccagccugcccagauguuggcuggugucuaacggauccuaccucaaugaaacgcacuucagcgacgacaucgagcagcaggccgauaacaugauuacagagcugcuucaaaaagaauauauggaccggcagggcaagaccccucuggggcucguggaucuguuugucuucucuaccagcuuuuaccugaucuccauuuuccuucaccucguuaaaaucccgugaggacuagucccuguucccagagcccacuuuuuuuucuuuuuuugaaauaaaauagccugucuuucagaucucaaaggcucuuuucagagccaccaaaaaaaaaaaaaaaaaaaaaaaaaaaaaaaaaaaaaaaaaaaaaaaaaaaaaaaaaaaaaaaaagaauu

SEQ ID NO: 41882 - RNA, 1600 nt, Artificial Sequence
  mRNA product Design a-1 (hSL-A64-N5) comprising derived and/or modified sequence from LASV(Nig08-A19;Clade III)__ADU56618__GPCmut13 (opt5)
aggagagucccgcagucggcguccagcggcucugcuuguucgugugugugucguugcaggccuuauucaagcuuaccaugggccagaucgugaccuucuuucaagaggucccccacguuauugaagaggugaugaacaucgugcugauugcccucagcauccuggcuauucuuaaggggcuguacaauaucgccacaugcggacucaucggccuggucacguuccuucugcucuccgggagaucuuguagcaugaccuauaaaggaguguacgaacugcagacacuggagcucaacaugaauacccugaacaugacaaugccucuuuccugcaccaagaauaacucucaucacuauauuaugguuggcaaugaaacagggcuggagcucacccugacgaacaccagccuucugcaucacaaauuuuguaaucucuccgacgcgcauaagaaaaaccuguacgaucacacacugaugucuaucauuagcaccuuccaccucuccaucccgaauuuuaaccaguaugaggcuaugagcugcgacuucaauggaggcaagauuacagugcaguacaaccugucucauuccuaugccaucgaugccgcuaaucacuguggcaccgucgccaacggggugcuucaaacguuuaugcggauggcuuggggaggcagcuacauugcccuggacucugggcgcggaaagugggauugcaucaugacauccuaccaguaucucaucauucagaacaccacaugggaagaccauugucaguucagcagacccucuccuaucggcuaccuggggcuucugucccaacggacccgcgauauuuauaucagcagacggcuccugggaaccuuuacauggacgcuguccgacucugagggcaaugaaacccccggcggguacugccucacacgcuggaugcugauugaggcggagcuuaaauguuucggaaacaccgccguugcuaagugcaaugaaaaacacgaugaggaauuuugugacaugcugagacucuucgauuuuaacaagcaggccauccggcgccugaaagcugaggcccagaugagcauccagcuuauuaauaaggcggugaacgcccugaucaaugaccaacucauuaugaagaaccaccugagagauaucaugggcauuccuuauugcaauuacuccaaauauugguaccugaaccauacaagcaccgggcggacgucucucccccgcugcuggcuggucuccaauggaagcuaccuuaacgaaacacacuucucugacgacaucgagcagcaggcugauaauaugaucaccgagaugcugcaaaaggaauaucucgacagacagggcaaaaccccucuggggcugguggaucuuuucguguuuagcacauccuucuaccucauuucuaucuuucugcaucuggucaagauuccgugaggacuagucccuguucccagagcccacuuuuuuuucuuuuuuugaaauaaaauagccugucuuucagaucucaaaggcucuuuucagagccaccaaaaaaaaaaaaaaaaaaaaaaaaaaaaaaaaaaaaaaaaaaaaaaaaaaaaaaaaaaaaaaaaagaauu

SEQ ID NO: 41883 - RNA, 1603 nt, Artificial Sequence
  mRNA product Design a-1 (hSL-A64-N5) comprising derived and/or modified sequence from LASV(G1180-SLE-2010;Clade IV)__AIT17168__GPCmut13 (opt5)
aggagagucccgcagucggcguccagcggcucugcuuguucgugugugugucguugcaggccuuauucaagcuuaccaugggccagaucgugaccuucuuucaagaggucccccacguuauugaagaggugaugaacaucgugcugauugcccucagcauccuggcuguccuuaaggggcuguacaauuucgccacaugcggacucgugggccugcuuacguuucugcuccugugugggagauccugcaccgcgucucgguauaaaggaguuuacgaacugcagacacucgagcugaacauggaaacccuuaauaugacaaugccucugagcuguaccaagaacaauucccaucacuauauuauggugggcaacgagacagggcucgagcugacccuuacgaauaccucuaucaucaaccauaaauucugcaaucugagcgacgcucacaagaaaaaccucuacgaucaugcccugauguccauuaucucuacauuucaccugagcauuccgaauuucaaccaguaugaagccauguccugugacuuuaauggaggcaagaucagcguccaguacaaccucucucacuccuaugcuggcgaugccgcuaaucauugcgggaccguggccaacggaguucugcaaacauucaugcgcauggcguggggcgggagcuacauugcccuugacucuggacacggcuccugggauuguaucaugaccagcuaccaguaucugauuauccagaacacgacaugggaggaccauugccaguuuucuagacccuccccuaucggguaccucggacugcuuagccaacggacccgcgauauuuauaucuccagacggcugcucggcacauucaccuggacccugucugacagcgaaggcaaggauacacccgggggauacugucugacgcgcuggaugcucauugaggcugagcugaaaugcuuuggcaauaccgccguggcuaaguguaacgaaaaacacgacgaggaguucugcgauaugcuuagacuguuugacuucaauaagcaggccauccagcggcucaaagcggaagcccagauguccauucaacugaucaacaaggcugucaaugcccuuaucaacgaucagcugauuaugaagaaucaccuccgcgacaucauggggauuccuuauugcaacuacagcaaauauugguaccugaaucauacaaccacaggaaagaccucucugcccaaauguuggcucguguccaacggcagcuaccugaaugaaacgcacuucucugacgauaucgagcagcaagcugacaacaugauuacagagaugcuucagaaggaauauauggagagacaggggaaaaccccucugggacucguggaucuguuugucuucagcaccuccuuuuaccugaucucuaucuuccuucaucucguuaagauuccgugaggacuagucccuguucccagagcccacuuuuuuuucuuuuuuugaaauaaaauagccugucuuucagaucucaaaggcucuuuucagagccaccaaaaaaaaaaaaaaaaaaaaaaaaaaaaaaaaaaaaaaaaaaaaaaaaaaaaaaaaaaaaaaaaagaauu

SEQ ID NO: 41884 - RNA, 1603 nt, Artificial Sequence
  mRNA product Design a-1 (hSL-A64-N5) comprising derived and/or modified sequence from LASV(G1442-SLE-2011;Clade IV)__AIT17180__GPCmut13 (opt5)
aggagagucccgcagucggcguccagcggcucugcuuguucgugugugugucguugcaggccuuauucaagcuuaccaugggccagaucgugaccuucuuucaagaggucccccacguuauugaagaggugaugaacaucgugcugauugcccucagcauccuggcuguccuuaaggggcuguacaauguggccacaugcggacucauuggccugguuacguuccuucugcucugugggagauccugcaccacaacccuguauaaaggaguguacgaacugcagacacucgagcugaacauggaaacccuuaauaugacaaugccucugucuuguaccaagaacaauagccaucacuauauccgggucggcaacgagacggggcucgagcugacccuuacaaauaccuccaucauuaaccauaaauuuugcaaucugucugacgcgcacaagaaaaaccucuacgaucaugcucugaugagcaucauuuccacauuccaccugucuaucccgaauuuuaaccaguaugaagccaugagcugugacuucaauggaggcaagauuuccgugcaguacaaccucagccacucuuaugccggcgaugcugccaaucauugcgggaccguugcuaacggagugcugcaaacguuuaugcgcauggccuggggcggguccuacaucgcgcuugacagcggaagaggcaacugggauuguauuaugacaucuuaccaguaucugaucauccagaauaccacaugggacgaucacugccaguucucccggcccagcccuauuggguaccucggacugcuuucucaacgcaccagagacgucuauaucucccggcgccugcucggcaccuuuacauggacgcugagcgauuccgagggcaaggacacccccgggggauacugucugacaagauggaugcucauugaagccgagcugaaaugcuucggcaacaccgcuguggccaaguguaaugagaaacaugaugaagaguuuugcgacaugcuucggcuguucgauuuuaacaagcaggcuauccagcgccucaaagccgaagcgcagaugucuauucaacugaucaauaaggccgugaacgcucuuaucaaugaccagcugauuaugaagaaccaccucagagacaucauggggauuccuuauugcaauuacagcaaauauugguaccugaacaauacagccaccggaaagacgucccugcccaaauguuggcucaucagcaacggcucuuaccugaaugagacacacuucuccgaugacauugaacaggaggcugauaacaugaucaccgagaugcuucaaaaggaauauauggagcggcaggggaaaaccccucugggacucgucgaccuguucguuuuuagcacaucuuucuaccugaucagcauuuuucuucaucucgugaagaucccgugaggacuagucccuguucccagagcccacuuuuuuuucuuuuuuugaaauaaaauagccugucuuucagaucucaaaggcucuuuucagagccaccaaaaaaaaaaaaaaaaaaaaaaaaaaaaaaaaaaaaaaaaaaaaaaaaaaaaaaaaaaaaaaaaagaauu

SEQ ID NO: 41885 - RNA, 1603 nt, Artificial Sequence
  mRNA product Design a-1 (hSL-A64-N5) comprising derived and/or modified sequence from LASV(G3010-SLE-2013;Clade IV)__AIT17344__GPCmut13 (opt5)
aggagagucccgcagucggcguccagcggcucugcuuguucgugugugugucguugcaggccuuauucaagcuuaccaugggccagaucgugaccuucuuucaagaggucccccacguuauugaagaggugaugaacaucgugcugauugcccucagcauccuggcuguccuuaaggggcuguacaauuucgccacaugcggacucgugggccugguuacguuucuucugcucugugggagauccugcaccacaucucuguauaaaggaguguacgaacugcagacccucgagcugaacauggaaacacuuaauaugaccaugccucugagcuguacaaagaacaauucccaucacuauauuauggucggcaacgagaccgggcucgagcugacgcuuaccaauacaucuaucaucaaccauaaauucugcaaucugagcgacgcgcacaagaaaaaccucuacaaucaugcucugauguccauuaucucuaccuuucaccugagcauuccgaacuucaaucaguaugaagccauguccugugauuuuaacggaggcaagaucagcgugcaguacaaucucucucacuccuaugccggcgacgcugccagccauugcgggacaguugcuaacggagugcugcaaaccuucaugcggauggccuggggcgggucuuacauugcgcuugauuccggauacggcaagugggacuguaucaugacgagcuaucaguaccugauuauccagaacacaaccugggaggaucacugccaguuuucucgccccuccccuaucggguaucucggacugcuuagccaaagaacacgggacauuuacaucucccgcagacugcucggcaccuucaccuggacacugucugauagcgaaggcaaagacacgcccgggggauauugucugacccgguggaugcucauugaggccgagcugaagugcuuuggcaauacagcugucgccaaauguaacgaaaagcaugaugaggaguucugcgacaugcuucgccuguuugauuucaauaaacaggcuauccagagacucaagaccgaagcccagauguccauucaacugaucaacaaggcggugaaugcccuuaucaacgaccagcugauuaugaaaaaucaccuccgggauaucauggggauuccuuacugcaacuauagcaaguacugguaccugaaucacacaaccacgggaaaaacaucucugcccaaguguuggcucguguccaacggcagcuaucugaaugaaacccauuucucugacgacaucgagcagcaagcugauaacaugauuaccgagaugcuucagaaagaauacauggagcgccaggggaagacaccucugggacucgucgaccuguuuguuuucagcaccuccuuuuaucugaucucuaucuuccuucaccucgugaaaauuccgugaggacuagucccuguucccagagcccacuuuuuuuucuuuuuuugaaauaaaauagccugucuuucagaucucaaaggcucuuuucagagccaccaaaaaaaaaaaaaaaaaaaaaaaaaaaaaaaaaaaaaaaaaaaaaaaaaaaaaaaaaaaaaaaaagaauu

SEQ ID NO: 41886 - RNA, 1603 nt, Artificial Sequence
  mRNA product Design a-1 (hSL-A64-N5) comprising derived and/or modified sequence from LASV(G502-SLE-2009;Clade IV)__AIT17126__GPCmut13 (opt5)
aggagagucccgcagucggcguccagcggcucugcuuguucgugugugugucguugcaggccuuauucaagcuuaccaugggccagaucgugaccuucuuucaagaggucccccacguuauugaagaggugaugaacaucgugcugauugcccucagcauccuggcuguccuuaaggggcuguacaauuucgccacaugcggacucgugggccugcuuacguuucugcuccugugugggagauccugcaccacaggacuguauaaaggcguuuacgaacuccagacccuggagcuuaacauggaaacacugaauaugaccaugccucucucuuguacaaagaacaauagccaucacuauauuaugguggggaacgagaccggacuggagcuuacgcugaccaauacauccaucaucaaccauaaauucugcaaucucucugacgcgcacaagaaaaaccuguacgaucaugcucugaugagcauuaucuccaccuuucaccucucuauuccgaauuucaaccaguaugaagccaugagcugugacuuuaauggcggcaagaucuccguccaguacaaccugagccacucuuaugccggggaugcugccgaccauugcggaacaguggcuaauggcguucuucaaaccuucaugcggauggccuggggaggguccuacauugcgcuggauagcggccgcgggagaugggacuguaucaugacgucuuaccaguaucucauuauccagaacacaaccugggaggaucacugccaguuuucccggcccagcccuaucggauaccugggccuucugucucaacgcacaagagacauuuauaucucccggcgccuccugggcaccuucaccuggacacugagcgauuccgaagggaaggacacgcccggaggcuacugucucaccagauggaugcugauugaggccgagcuuaaaugcuuugggaacacagcuguggccaaguguaaugaaaaacaugaugaggaguucugcgacaugcugcggcucuuugauuucaacaagcaggcuauccagcgccugaaagccgaagcgcagaugucuauucaacuuaucaauaaggccgucaacgcucugaucaaugaccagcucgugaugaagaaccaccugagagacauuaugggaaucccuuauugcaauuacagccgguauugguaccugaaccacaccacaaccggccgcacgucccuccccaaauguuggcuggugagcaaugggucuuaccuuaacgaaacacauuucuccgaugacauugagcagcaagccgauaauaugaucaccgagaugcugcagaaggaauauauggagagacagggaaaaaccccucucggccuggucgaccuguuuguuuucagcacaucuuuuuaccuuauuagcaucuuccuccaccuggugaagaucccgugaggacuagucccuguucccagagcccacuuuuuuuucuuuuuuugaaauaaaauagccugucuuucagaucucaaaggcucuuuucagagccaccaaaaaaaaaaaaaaaaaaaaaaaaaaaaaaaaaaaaaaaaaaaaaaaaaaaaaaaaaaaaaaaaagaauu

SEQ ID NO: 41887 - RNA, 1603 nt, Artificial Sequence
  mRNA product Design a-1 (hSL-A64-N5) comprising derived and/or modified sequence from LASV(G733-SLE-2010;Clade IV)__AIT17154__GPCmut13 (opt5)
aggagagucccgcagucggcguccagcggcucugcuuguucgugugugugucguugcaggccuuauucaagcuuaccaugggccagaucgugaccuucuuucaagaggucccccacguuauugaagaggugaugaacaucgugcugauugcccucagcauccuggcuguccuuaaggggcuguacaauuucgccacaugcggaauugugggccucguuuccuuucugcuucugugugggagaucuugcacgaccagccucuauaaaggaguguacgaacugcagacacuggagcucaacauggaaacccugaauaugacaaugccucuuuccuguaccaagaacaauucucaucacuauaucauggucggcaacgagacagggcuggagcucacccugacgaauaccagcaucauuaaccauaaauucugcaaucuuuccgacgcgcacaagaaaaaccuguacgaucaugcucucaugucuaucauuagcacauuucaccuguccaucccgaauuucaaccaguaugaagccaugagcugugacuuuaauggaggcaagauuucugugcaguacaaccugucccacagcuaugccggcgaugcugccaaucauugcgggaccaucgcuaacggaguucuccaaacauucaugcggauggccuggggcgggucuuacauugcgcuggacuccggacgcgauagaugggacuguaucaugaccagcuaccaguaucuuaucauucagaacacgacaugggaggaucacugccaguuuucucggcccuccccuaucggcuaccuggggcuccugagccaacgcaccagagacauuuauaucucccggcgccuucugggaacauucaccuggacccucucugauagcgaaggcaaggacacacccggcggguacugucugacgagauggaugcugauugaggccgagcucaaaugcuuuggaaauaccgcuguggccaaguguaacgaaaaacaugaugaggaguucugcgacaugcugcggcuuuuugauuucaauaagcaggcuauccagcgccugaaagccgaagcgcagauguccauccaacucauuaacaaggccgucaaugcucugaucaacgaccagcuuauuaugaagaaucaccugagagacaucaugggcauuccuuauugcaacuacagcaaauauugguaccucaaucacacaaccacagggaagaccucucugcccaaauguuggcugguguccaacggaagcuaccucaaugaaacgcauuucucugaugacaucgagcagcaagccgauaacaugaucacagagaugcugcagaaggaauauauggagcggcagggcaaaaccccucuugggcugguggaccucuuugucuucagcaccuccuuuuaccugauuucuaucuuccugcaccuuguuaagauuccgugaggacuagucccuguucccagagcccacuuuuuuuucuuuuuuugaaauaaaauagccugucuuucagaucucaaaggcucuuuucagagccaccaaaaaaaaaaaaaaaaaaaaaaaaaaaaaaaaaaaaaaaaaaaaaaaaaaaaaaaaaaaaaaaaagaauu

SEQ ID NO: 41888 - RNA, 1603 nt, Artificial Sequence
  mRNA product Design a-1 (hSL-A64-N5) comprising derived and/or modified sequence from MOPV/LASV reassortant(IGS-1;Clade IV)__AFY05576__GPCmut13 (opt5)
aggagagucccgcagucggcguccagcggcucugcuuguucgugugugugucguugcaggccuuauucaagcuuaccaugggccagaucgugaccuucuuucaagaggucccccacguuauugaagaggugaugaacaucgugcugauugcccucagcguccuggcugugcuuaaggggcuguacaauuucgccacaugcggacucguuggccuggugacguuucuucugcucugugggagauccugcaccacaucucuguauaaaggagucuacgaacugcagacccucgagcugaacauggaaacacuuaauaugaccaugccucugagcuguacaaagaacaauucccaucacuauaucauggugggcaacgagaccgggcucgagcugacgcuuaccaauacaucuauuaucaaccauaaauucugcaaucugagcgacgcgcacaagaaaaaccucuacgaucaugcucugauguccaucauuucuaccuuucaccugagcaucccgaauuucaaccaguaugaagccauguccugugacuuuaauggaggcaagauuagcguucaguacaaccucucucacuccuaugccggcgaugcugccaaucauugcgggacaguggcuaacggaguccugcaaaccuucaugcggauggccuggggcgggagcuacaucgcgcuugacucuggacgcggcaacugggauuguauuaugacguccuaccaguaucugaucauucagaauacaaccugggaggaccacugccaguuuagcagacccucuccuaucggguaccucggacugcuuucccaacggacacgcgauaucuauauuagcagacggcugcucggcaccuucaccuggacacuguccgacucugaaggcgaggauacgcccgggggauacugucugacccgcuggaugcucaucgaggccgaacugaagugcuuuggcaacacagcuguggccaaauguaaugagaagcaugacgaagaguucugcgauaugcuuagacuguuugacuucaacaaacaggcuauucagcggcucaaggccgaagcgcagaugagcauccaacugauuaauaaagccgugaacgcucuuaucaaugaucagcugaucaugaagaaccaccuccgcgacauuauggggaucccuuauugcaauuacuccaaguauugguaccugaaccacaccacaaccggaagaacgagccugcccaaauguuggcucgucucuaauggcuccuaccugaacgagacacauuucagcgacgauauugagcagcaagccgacaauaugaucaccgaaaugcuucagaaggaguauauggaacggcaggggaaaaccccucugggacucguugaucuguuuguguucucuaccagcuuuuaccugauuuccaucuuccuucaccucgugaagaucccgugaggacuagucccuguucccagagcccacuuuuuuuucuuuuuuugaaauaaaauagccugucuuucagaucucaaaggcucuuuucagagccaccaaaaaaaaaaaaaaaaaaaaaaaaaaaaaaaaaaaaaaaaaaaaaaaaaaaaaaaaaaaaaaaaagaauu

SEQ ID NO: 41889 - RNA, 1603 nt, Artificial Sequence
  mRNA product Design a-1 (hSL-A64-N5) comprising derived and/or modified sequence from LASV(LM765-SLE-2012;Clade IV)__AIT17814__GPCmut13 (opt5)
aggagagucccgcagucggcguccagcggcucugcuuguucgugugugugucguugcaggccuuauucaagcuuaccaugggccagaucgugaccuucuuucaagaggucccccacguuauugaagaggugaugaacaucgugcugauugcccucagcauccuggcuguccuuaaggggcuguacaauuucgccacaugcggacucgugggccugguuacguuucuucugcucugugggagauccugcaccacaucucuguauaaaggaguguacgaacugcagacccucgagcugaacauggaaacacuuaauaugaccaugccucugagcuguacaaagaacaauucccaucacuauauuauggucggcaacgagaccgggcucgagcugacgcuuaccaauacaucuaucaucgaccauaaauucugcaaccugagcgaugcgcaccggaagaaucucuacgaccaugcucugauguccauuaucucuaccuuucaccugagcauuccgaacuucaaucaguaugaagccauguccugugauuuuaacggaggcaaaaucagcgugcaguacaaucucucucacuccuaugccaaggacgcugccgaucauugcggcacaguugcuaacggggugcugcaaaccuucaugcgcauggccuggggaggcagcuacauugcgcuugacucugggagaggacggugggauuguaucaugacguccuaccaguaucugauuauccagaauacaaccugggaggaccacugccaguuuagccgccccucuccuaucggcuaccucgggcugcuuucccaaagaacacgggauauuuauaucagccgcagacugcucggaaccuucaccuggacacuguccgacucugaaggcaaggauacgcccggcggguacugucugacccgguggaugcucauugaggccgagcugaaaugcuuuggaaacacagcugucgccaaguguaacgaaaaacaugacgaggaguucugcgauaugcuucgccuguuugacuucaauaagcaggcuauccagagacucaaagccgaagcgcagaugagcauucaacugaucaacaaggccgugaaugcucuuaucaacgaccagcugauuaugaagaaucaccuccgggauaucaugggcauuccuuauugcaacuacuccaaauauugguaccugaaucacaccacaaccgggaagacgagccugcccaaauguuggcucgugucuaacggauccuaccugaaugaaacacauuucagcgacgauaucgagcagcaagccgacaacaugauuaccgagaugcuucagaaggaauauauggagcgccagggcaaaaccccucuggggcucgucgaucuguuuguuuucucuaccagcuuuuaccugaucuccaucuuccuucaccucgugaagauuccgugaggacuagucccuguucccagagcccacuuuuuuuucuuuuuuugaaauaaaauagccugucuuucagaucucaaaggcucuuuucagagccaccaaaaaaaaaaaaaaaaaaaaaaaaaaaaaaaaaaaaaaaaaaaaaaaaaaaaaaaaaaaaaaaaagaauu

SEQ ID NO: 41890 - RNA, 1603 nt, Artificial Sequence
  mRNA product Design a-1 (hSL-A64-N5) comprising derived and/or modified sequence from LASV(LM776-SLE-2012;Clade IV)__AIT17824__GPCmut13 (opt5)
aggagagucccgcagucggcguccagcggcucugcuuguucgugugugugucguugcaggccuuauucaagcuuaccaugggccagaucgugaccuucuuucaagaggucccccacguuauugaagaggugaugaacaucgugcugauugcccucagcauccuggcuguccuuaaggggcuguacaauuucgccacaugcggacucgugggccugguuacguuucuucugcucugugggagauccugcaccacaucuguguauaaaggagucuacgaacugcagacccuggagcucaacauggaaacacugaauaugaccaugccucuuagcuguacaaagaacaauucccaucacuauauuauggugggcaacgagaccgggcuggagcucacgcugaccaauacaucuaucaucaaccauaaauucugcaaucuuagcgacgcgcacaagaaaaaccuguacgaucaugcucucauguccauuaucucuaccuuucaccugagcauuccgaauuucaaccaguaugaagccauguccugugacuuuaauggaggcaagaucagcguucaguacaaccugucucacuccuaugccggcgaugcugccaaucauugcgggacaguggcuaacggaguccuccaaaccuucaugcggauggccuggggcgggagcuacauugcgcuggacucuggacacggcaagugggauuguaucaugacguccuaccaguaucuuauuauccagaacacaaccugggaggaccauugccaguuuagccgccccucuccuaucggguaccugggacuccugucccaaagaacacgggauauuuauaucagccgcagacuucugggcaccuucaccuggacacucuccgacucugaaggcaaagauacgcccgggggauacugucugacccgguggaugcugauugaggccgagcucaagugcuuuggcaauacagcuguggccaaauguaacgaaaagcacgacgaggaguucugcgauaugcugcgccuuuuugacuucaauaaacaggcuauccagagacugaaggccgaagcgcagaugagcauucaacucaucaacaaggccgugaaugcucugaucaacgaucagcuuauuaugaaaaaucaucugcgggacaucauggggauuccuuauugcaacuacuccaaguauugguaccucaaucacaccacaaccggaaaaacgagccugcccaaguguuggcuggucucuaacggcuccuaccucaaugaaacacacuucagcgacgauaucgagcagcaagccgacaacaugauuaccgagaugcugcagaaagaauauauggagcgccaggggaagaccccucuuggacugguugaucucuuuguguucucuaccagcuuuuaccugaucuccaucuuccugcaucuugugaaaauuccgugaggacuagucccuguucccagagcccacuuuuuuuucuuuuuuugaaauaaaauagccugucuuucagaucucaaaggcucuuuucagagccaccaaaaaaaaaaaaaaaaaaaaaaaaaaaaaaaaaaaaaaaaaaaaaaaaaaaaaaaaaaaaaaaaagaauu

SEQ ID NO: 41891 - RNA, 1603 nt, Artificial Sequence
  mRNA product Design a-1 (hSL-A64-N5) comprising derived and/or modified sequence from LASV(Mad39;Clade IV)__ANH09722__GPCmut13 (opt5)
aggagagucccgcagucggcguccagcggcucugcuuguucgugugugugucguugcaggccuuauucaagcuuaccaugggccagaucgugaccuucuuucaagaggucccccacguuauugaagaggugaugaacaucgugcugauugcccucagcauccuggcuguccuuaaggggcuguacaauguggccacaugcggacucauuggccugguuacguuccuucugcucugugggagauccugcaccacaacccuguauaaaggaguguacgaacugcaggcgcucgagcugaacauggaaacacuuaauaugaccaugccucugucuuguacaaagaacaauagccaucacuauauccgggucggcaacgagaccgggcucgagcugacgcuuaccaauacaucccugaucaaccauaaauuuugcaaucucucugacgcucacaagaaaaaccuguacgaucaugcccugaugagcauuaucuccaccuuccaccucucuauuccgaauuuuaaccaguaugaagccaugagcugugacuucaaugauggaaagaucuccgugcaguacaaccugagccacacauaugcuggcgacaccgccaaucauugcggcacgguugcuaacggggugcuucaaacauuuaugcgcauggccuggggaggcucuuacauugcgcuggauuccgggagaggaggcugggacuguaucaugaccagcuaccaguaucucauuauccagaacacaaccugggaggaucacugccaguucucucggcccuccccuaucggguaccugggacuucugagccaacgcaccagagacauuuauaucucucggcgccuccugggcacauuuacguggacccuguccgauagcgaaggcaaggacacacccgggggauacugucucaccagauggaugcugauugaggccgagcuuaaaugcuucggcaauacagcugucgccaaguguaacgaaaaacaugaugaggaauuuugcgacaugcugcgccucuucgauuuuaauaagcaggcuauccagcggcugaaagccgaggcgcagauguccauucaacuuaucaacaaggccgugaaugcucugaucaacgaccagcucauuaugaagaaucaccugagagacaucauggggauuccuuauugcaacuacucuaaauauugguaccugaaucacaccgugacgggaaagacaagccuccccaaauguuggcuggucuccaacggcagcuaccuuaaugaaacccauuucucugaugacaucgagcagcaagccgauaacaugauuaccgagaugcugcagaaggaauauauggagcggcaggggaaaacaccucucggacugguugaccuguucguguuuuccaccagcuucuaccuuaucucuaucuuucuccaccuggugaagauuccgugaggacuagucccuguucccagagcccacuuuuuuuucuuuuuuugaaauaaaauagccugucuuucagaucucaaaggcucuuuucagagccaccaaaaaaaaaaaaaaaaaaaaaaaaaaaaaaaaaaaaaaaaaaaaaaaaaaaaaaaaaaaaaaaaagaauu

SEQ ID NO: 41892 - RNA, 1603 nt, Artificial Sequence
  mRNA product Design a-1 (hSL-A64-N5) comprising derived and/or modified sequence from LASV(Z0947-SLE-2011;Clade IV)__AIT17840__GPCmut13 (opt5)
aggagagucccgcagucggcguccagcggcucugcuuguucgugugugugucguugcaggccuuauucaagcuuaccaugggccagaucgugaccuucuuucaagaggucccccacguuauugaagaggugaugaacaucgugcugauugcccucagcauccuggcuguccuuaaggggcuguacaauuucgccacaugcggacucgugggccugguuacguuucuucugcucugugggagauccugcaccauuucucuguauaaaggaguguacgaacugcagacacucgagcugaacauggaaacccuuaauaugacaaugccucugagcuguaccaagaacaauucccaucacuauaucauggucggcaacgagacagggcucgagcugacccuuacgaauaccucuaucauuaaccauaaauucugcaaucugagcgacgcgcacaagaaaaaccucuacgaucaugcucugauguccaucauuucuacauuucaccugagcaucccgaauuucaaccaguaugaagccauguccugugacuuuaauggaggcaagauuagcgugcaguacaaccucucucacuccuaugccggcgaugcugccaaucauugcgggaccguugcuaacggagugcugcaaacauucaugcggauggccuggggcgggagcuacaucgcgcuugacucuggacgcgauagaugggacuguauuaugaccuccuaccaguaucugaucauccagaacacgacaugggaggaucacugccaguuuagccggcccucuccuauuggcuaccucgggcugcuuucccaacgcaccagagacaucuauauuagccggcgccugcucggaacauucaccuggacccuguccgauucugaaggcaaggacacacccggcggguacugucugacgagauggaugcucaucgaggccgagcugaaaugcuuuggaaauaccgcugucgccaaguguaacgaaaaacaugaugaggaguucugcgacaugcuucggcuguuugauuucaauaagcaggcuauucagcgccucaaagccgaagcgcagaugagcauccaacugaucaacaaggccgugaaugcucuuauuaacgaccagcugaucaugaagaaucaccucagagacauuaugggcaucccuuauugcaacuacuccaaauauugguaccugaaucacacaaccacagggaagaccagccugcccaaauguuggcucgugucuaacggauccuaccugaaugaaacgcauuucagcgaugacauugagcagcaagccgauaacaugaucacagagaugcuucagaaggaauauauggagcggcagggcaaaaccccucuggggcucgucgaccuguuuguuuucucuaccagcuuuuaccugaucuccauuuuccuucaccucgugaagaucccgugaggacuagucccuguucccagagcccacuuuuuuuucuuuuuuugaaauaaaauagccugucuuucagaucucaaaggcucuuuucagagccaccaaaaaaaaaaaaaaaaaaaaaaaaaaaaaaaaaaaaaaaaaaaaaaaaaaaaaaaaaaaaaaaaagaauu

SEQ ID NO: 41893 - RNA, 1634 nt, Artificial Sequence
  mRNA product Design a-1 (hSL-A100) comprising derived and/or modified sequence from LASV(Josiah;Clade IV)__NP_694870__GPCmut13 (opt1) R8480
aggagagucccgcagucggcguccagcggcucugcuuguucgugugugugucguugcaggccuuauucaagcuuaccaugggccagaucgugaccuucuuccaggaggucccccacgugaucgaggaggugaugaacaucguccugaucgcccucagcgugcuggccgugcugaaggggcucuacaacuucgcgaccugcggccuggucgggcuggugacguuccuccugcugugcggccgcuccugcaccaccagccucuacaaggggguguacgagcugcagacccuggagcucaacauggagacgcugaacaugaccaugccgcuguccugcaccaagaacaacagccaccacuacaucauggucggcaacgagaccggccucgagcugacgcugaccaacaccuccaucaucaaccacaaguucugcaaccucagcgacgcccacaagaagaaccuguacgaccacgcccugauguccaucaucagcaccuuccaccucuccauccccaacuucaaccaguacgaggccaugagcugcgacuucaacgggggcaagaucuccgugcaguacaaccugagccacuccuacgccggggacgcggccaaccacugcggcacgguggccaacgggguccugcagaccuucaugcggauggccuggggcggcagcuacaucgcgcucgacuccgggcgcggcaacugggacugcaucaugaccagcuaccaguaccugaucauccagaacaccacgugggaggaccacugccaguucucccggcccagccccaucggguaccugggccuccugucccagcgcacccgggacaucuacaucagccgccggcugcucggcaccuucaccuggacgcugagcgacuccgaggggaaggacaccccgggcggguacugccugacccgcuggaugcucaucgaggccgagcugaagugcuucggcaacaccgccguggccaagugcaacgagaagcacgacgaggaguucugcgacaugcugcggcuguucgacuucaacaagcaggccauccagcgccugaaggcggaggcccagaugagcauccagcugaucaacaaggccgugaacgcccucaucaacgaccagcugaucaugaagaaccaccuccgggacaucauggggauccccuacugcaacuacuccaaguacugguaccucaaccacacgaccaccggccgcaccagccugcccaagugcuggcuggucuccaacggcagcuaccucaacgagacgcacuucuccgacgacaucgagcagcaggccgacaacaugaucaccgagaugcugcagaaggaguacauggagcggcaggggaagacgccccugggccucguggaccuguucguguucagcaccuccuucuaccugaucagcaucuuccugcaccucgucaagaucccgugaggacuagucccuguucccagagcccacuuuuuuuucuuuuuuugaaauaaaauagccugucuuucagaucucaaaggcucuuuucagagccaccaaaaaaaaaaaaaaaaaaaaaaaaaaaaaaaaaaaaaaaaaaaaaaaaaaaaaaaaaaaaaaaaaaaaaaaaaaaaaaaaaaaaaaaaaaaaaaaaaaaaa

SEQ ID NO: 41894 - RNA, 1631 nt, Artificial Sequence
  mRNA product Design a-1 (hSL-A100) comprising derived and/or modified sequence from LASV(LP;Clade I)__AAF86701__GPCmut13 (opt1)
aggagagucccgcagucggcguccagcggcucugcuuguucgugugugugucguugcaggccuuauucaagcuuaccaugggccagaucaucaccuucuuccaggaggugccccacgucaucgaggaggugaugaacaucgugcugaucgcccucagccugcuggccauccucaaggggcuguacaacaucgcgaccugcggcaucaucgggcuggucgccuuccucuuccugugcggcaaguccugcagccugacgcucaagggcggguacgagcugcagacccuggagcucaacauggagacccugaacaugaccaugccgcuguccugcacgaagaacagcucccaccacuacauccgcgugggcaacgagaccgggcucgagcugacccugaccaacacgagcaucaucaaccacaaguucugcaaccucuccgacgcccacaagaagaaccuguacgaccacgcccugaugagcaucaucuccaccuuccaccucagcauccccaacuucaaccaguacgaggccauguccugcgacuucaacggcgggaagaucagcgugcaguacaaccugucccacagcuacgcgggcgacgccgccgagcacugcgggaccgucgccaacggcgugcugcagaccuucaugcggauggcguggggcgggcgcuacaucgcccucgacuccggcaaggggaacugggacugcaucaugacgagcuaccaguaccugaucauccagaacaccaccugggaggaccacugccaguucucccggcccagccccaucggcuaccugggccuccugucccagcgcacccgggacaucuacaucagccgccggcugcucgggacguucaccuggacccugagcgacuccgagggcaacgagacccccgggggcuacugccugacgcgcuggaugcucaucgaggccgagcugaagugcuucgggaacaccgccguggccaagugcaacgagaagcacgacgaggaguucugcgacaugcugcggcuguucgacuucaacaagcaggcgauccgccggcugaaggccgaggcccagaugagcauccagcugaucaacaaggccgucaacgcccucaucaacgaccagcugaucaugaagaaccaccuccgcgacaucaugggcauccccuacugcaacuacuccaaguacugguaccucaaccacaccagcuccggccggaccagccugcccaagugcuggcugaucuccaacgggagcuaccucaacgagacgcaguucuccgacgacaucgagcagcaggcggacaacaugaucaccgagaugcugcagaaggaguacaucgagcgccagggcaagaccccgcuggggcucguggacaucuucaucuucagcaccuccuucuaccugaucagcaucuuccugcaccugaucaagaucccgugaggacuagucccuguucccagagcccacuuuuuuuucuuuuuuugaaauaaaauagccugucuuucagaucucaaaggcucuuuucagagccaccaaaaaaaaaaaaaaaaaaaaaaaaaaaaaaaaaaaaaaaaaaaaaaaaaaaaaaaaaaaaaaaaaaaaaaaaaaaaaaaaaaaaaaaaaaaaaaaaaaaaa

SEQ ID NO: 41895 - RNA, 1631 nt, Artificial Sequence
  mRNA product Design a-1 (hSL-A100) comprising derived and/or modified sequence from LASV(803213;Clade II)__AAF86703__GPCmut13 (opt1)
aggagagucccgcagucggcguccagcggcucugcuuguucgugugugugucguugcaggccuuauucaagcuuaccaugggccagaucaucaccuucuuccaggaggugccccacgucaucgaggaggugaugaacaucgugcugaucgcccucagccugcuggccauccucaaggggaucuacaacgucgcgaccugcggccuguucgggcugaucuccuuccuccugcugugcggccgcagcugcuccgugacguacaaggggguguacgagcuccagacccuggagcugaacauggccaaccucaacaugaccaugccgcugagcugcaccaagaacaacucccaccacuacaucauggucggcaacgagacgggccuggagcucacccugaccaacaccagcaucaucaaccacaaguucugcaaccuguccgacgcccacaagaagaaccucuacgaccacgcccugaugagcaucaucuccacguuccaccugagcauccccaacuucaaccaguacgaggccauguccugcgacuucaacgggggcaagaucagcgugcaguacaaccucucccacagcuucgcgguggacgccgccaaccacugcgggaccaucgccaacggcguccugcagaccuucaugcggauggcguggggcggguccuacaucgcccuggacagcggcaaggggaacugggacugcaucaugaccuccuaccaguaccucaucauccagaacacgaccugggaggaccacugccaguucagccgccccucccccaucggcuaccuggggcugcucagccagcggacccgcgacaucuacaucagccggcgccugcugggcaccuucacguggacccucuccgacagcgagggcaacgaggcccccgggggcuacugccugacccgguggaugcugaucgaggccgagcucaagugcuucgggaacaccgccguggcgaagugcaacgagaagcacgacgaggaguucugcgacaugcugcgccuguucgacuucaacaagcaggccaucaagcggcucaagacggaggcccagauguccauccagcugaucaacaaggccgugaacgcccugaucaacgaccagcucaucaugaagaaccaccuccgcgacaucaugggcauccccuacugcaacuacagccgguacugguaccugaaccacaccgucaccgggaagaccucccugccccgcugcuggcuggugagcaacggcuccuaccugaacgagacgcacuucagcgacgacaucgagcagcaggcggacaacaugaucaccgagaugcuccagaaggaguacauggaccggcagggcaagaccccgcuggggcugguggaccucuucgucuucuccaccagcuucuaccugaucuccaucuuccugcaccuggugaagaucccgugaggacuagucccuguucccagagcccacuuuuuuuucuuuuuuugaaauaaaauagccugucuuucagaucucaaaggcucuuuucagagccaccaaaaaaaaaaaaaaaaaaaaaaaaaaaaaaaaaaaaaaaaaaaaaaaaaaaaaaaaaaaaaaaaaaaaaaaaaaaaaaaaaaaaaaaaaaaaaaaaaaaaa

SEQ ID NO: 41896 - RNA, 1631 nt, Artificial Sequence
  mRNA product Design a-1 (hSL-A100) comprising derived and/or modified sequence from LASV(GA391;Clade III)__CAA36645__GPCmut13 (opt1)
aggagagucccgcagucggcguccagcggcucugcuuguucgugugugugucguugcaggccuuauucaagcuuaccaugggccagaucgugaccuucuuccaggaggucccccacgugaucgaggaggugaugaacaucguccugaucgcccucagcauccuggccauccugaaggggcucuacaacguggcgaccugcggccugaucgggcuggugacguuccuccugcuguccggccgcagcugcucccucaucuacaaggggaccuacgagcugcagacccuggagcucaacauggagacccugaacaugacgaugccgcugagcugcaccaagaacaacucccaccacuacauccgggucggcaacgagaccggccucgagcugacccugacgaacaccagcauccucaaccacaaguucugcaaccuguccgacgcccacaagcgcaaccuguacgaccacagccucauguccaucaucagcaccuuccaccuguccauccccaacuucaaccaguacgaggccaugagcugcgacuucaacgggggcaagaucaccgugcaguacaaccugucccacagcuucgccguggacgccgcggggcacugcggcacgcucgccaacgggguccugcagaccuucaugcggauggccuggggcggcuccuacaucgcccuggacagcgggcgcggcaacugggacugcaucaugaccuccuaccaguaccucaucauccagaacaccacgugggacgaccacugccaguucagccggcccucccccaucggguaccugggccugcucagccagcgcacccgggacaucuacaucagccgccggcugcugggcaccuucaccuggacgcucuccgacagcgaggggaacgagaccccgggcggguacugccugacccgcuggaugcugaucgaggcggagcucaagugcuucggcaacaccgccguggccaagugcaacgagaagcacgacgaggaguucugcgacaugcugcggcuguucgacuucaacaagcaggccauccgccggcucaagacggaggcccagauguccauccagcugaucaacaaggcggugaacgcccugaucaacgaccagcucaucaugaagaaccaccuccgcgacaucauggggauccccuacugcaacuacagccgguacugguaccugaaccacaccuccaccggcaagaccagccugccccgcugcuggcugaucuccaacggcagcuaccugaacgagacgaaguucuccgacgacaucgagcagcaggccgacaacaugaucaccgagaugcuccagaaggaguacaucgaccggcaggggaagacgccccugggccuggucgaccuguucguguucagcaccuccuucuaccucaucagcaucuuccugcaccuggugaagaucccgugaggacuagucccuguucccagagcccacuuuuuuuucuuuuuuugaaauaaaauagccugucuuucagaucucaaaggcucuuuucagagccaccaaaaaaaaaaaaaaaaaaaaaaaaaaaaaaaaaaaaaaaaaaaaaaaaaaaaaaaaaaaaaaaaaaaaaaaaaaaaaaaaaaaaaaaaaaaaaaaaaaaaa

SEQ ID NO: 41897 - RNA, 1634 nt, Artificial Sequence
  mRNA product Design a-1 (hSL-A100) comprising derived and/or modified sequence from LASV(AV;Clade V)__CCA30314__GPCmut13 (opt1)
aggagagucccgcagucggcguccagcggcucugcuuguucgugugugugucguugcaggccuuauucaagcuuaccaugggccagaucgugaccuucuuccaggaggucccccacgugaucgaggaggugaugaacaucguccugaucgcccucagcauccuggccgugcugaaggggcucuacaacaucgcgaccugcggccugaucgggcugaucacguuccuccugcugugcggccgcuccugcagcuccaaccucuacaaggggguguacgagcugcagagccuggaccucaacauggagacccugaacaugaccaugccgcuguccugcaccaagaacaacagccaccacuacauccgggucggcaacgacacgggccucgagcugacccugaccaacaccuccauccucaaccacaaguucugcaaccugagcgacgcccacaagaaggaccuguacgaccacgcccucauguccaucaucagcacguuccaccuguccauccccaacuucaaccaguacgaggccaugagcugcgacuucaacgggggcaagaucuccgugcaguacaaccugagccacuccuacgccaucgacgcggccaaccacugcgggaccguggccaacggcauccuccagaccuucaugcgcauggccuggggcgggagcuacaucgcgcuggacuccggccgggggaacugggacugcaucaugaccagcuaccaguaccugaucauccagaacacgaccugggagaaccacugccaguucucccgccccagccccaucggcuaccucgggcugcugagccagcggacccgcgacaucuacaucucccggcgccuccugggcaccuucacguggacccugagcgacuccgagggcaacgccacccccgggggcuacugccucacccgguggaugcugaucgaggccgagcugaagugcuucgggaacacggccgucgccaagugcaacgagaagcacgacgaggaguucugcgacaugcuccgccuguucgacuucaacaagcaggcgaucagccggcugaaguccgaggcccagaugagcauccagcucaucaacaaggccgugaacgcccugaucaacgaccagcugaucaugaagaaccaccuccgcgacaucaugggcauccccuacugcaacuacuccaaguacugguaccugaaccacaccaucaccgggaagaccagccugcccaagugcuggcucguguccaacggcagcuaccugaacgagacgcacuucuccgacgacaucgagcagcaggccgacaacaugaucaccgagaugcugcagaaggaguacauggagcggcagggcaagaccccgcucgggcuggucgaccuguucguguucagcaccuccuucuaccugaucagcaucuuccuccgccuggugaagaucccgugaggacuagucccuguucccagagcccacuuuuuuuucuuuuuuugaaauaaaauagccugucuuucagaucucaaaggcucuuuucagagccaccaaaaaaaaaaaaaaaaaaaaaaaaaaaaaaaaaaaaaaaaaaaaaaaaaaaaaaaaaaaaaaaaaaaaaaaaaaaaaaaaaaaaaaaaaaaaaaaaaaaaa

SEQ ID NO: 41898 - RNA, 1631 nt, Artificial Sequence
  mRNA product Design a-1 (hSL-A100) comprising derived and/or modified sequence from LASV(Togo/2016/7082;Clade VI)__AMR44577__GPCmut13 (opt1)
aggagagucccgcagucggcguccagcggcucugcuuguucgugugugugucguugcaggccuuauucaagcuuaccaugggccagaucaucaccuucuuccaggaggugccccacgucaucgaggaggugaugaacaucgugcugaucgcccucagccugcuggccauccucaagggggucuacaacguggcgaccugcggcaucaucgggcuggugacguuccuguuccucugcggccgcuccugcagccugaucuacaagggguccuacgagcugcagacccucgagcugaacauggagacccugaacaugaccaugccgcucagcugcacgaagaacuccagccaccacuacauccgggucggcaacgagaccggccuggagcugacccucaccaacacguccaucaucaaccacaaguucugcaaccugagcgacgcccacaagcgcaaccuguacgaccacgcccucauguccauccugagcaccuuccaccuguccauccccaacuucaaccaguacgaggccaugagcugcgacuucaacgggggcaagaucuccgugcaguacaaccucagccacgccuacgcgguggacgccgccgagcacugcgggaccgucgccaacggcgugcugcagaccuucaugcggauggcguggggcggguccuacaucgcccuggacagcggccgcgggaacugggacugcaucaugacguccuaccaguaccucaucauccagaacaccaccugggaggaccacugccaguucagccggcccucccccaucggcuaccuggggcugcucagccagcgcacccgggacaucuacaucagccgccggcugcugggcacguucaccuggacccucuccgacagcgagggcaacgagacccccgggggcuacugccugacgcgcuggaugcugaucgaggccgagcucaagugcuucgggaacaccgccguggccaagugcaacgagaagcacgacgaggaguucugcgacaugcugcggcuguucgacuucaacaagcaggcgauccagcgccucaaguccgaggcccagaugagcauccagcugaucaacaaggccgucaacgcccugaucaacgaccagcucaucaugaagaaccaccuccgggacaugaugggcauccccuacugcaacuacuccaaguacugguaccugaaccacaccagcuccgggcgcaccagccugcccaagugcuggcugguguccaacggcagcuaccugaacgagacgcacuucuccgacgacaucgagcagcaggccgacaacaugaucaccgagaugcuccagaaggaguacaucgaccggcagggcaagaccccgcuggggcugguggaccucuucgucuucagcaccuccuucuaccugaucagcaucuuccugcaccugaucaagaucccgugaggacuagucccuguucccagagcccacuuuuuuuucuuuuuuugaaauaaaauagccugucuuucagaucucaaaggcucuuuucagagccaccaaaaaaaaaaaaaaaaaaaaaaaaaaaaaaaaaaaaaaaaaaaaaaaaaaaaaaaaaaaaaaaaaaaaaaaaaaaaaaaaaaaaaaaaaaaaaaaaaaaaa

SEQ ID NO: 41899 - RNA, 1631 nt, Artificial Sequence
  mRNA product Design a-1 (hSL-A100) comprising derived and/or modified sequence from LASV(KAK-428;Clade n.d. (VII))__ANH09740__GPCmut13 (opt1)
aggagagucccgcagucggcguccagcggcucugcuuguucgugugugugucguugcaggccuuauucaagcuuaccaugggccagaucgugaccuucuuccaggaggucccccacgugaucgaggaggugaugaacaucguccugaucgcccucagccugcuggccauccucaaggggcuguacaacuucgcgaccugcggcgugaucgggcugaucacguuccuccugcugugcggccgcuccugcagcgccaccuacaaggggcaguacgagcuccagacccuggagcugaacauggagucccucaacaugaccaugccgcugagcugcacgaagaacaacucccaccacuacauccgggccggcaacaacaccggccuggagcucacccugaccaacacgagcaucaucucccacaaguucugcaaccugagcgacgcccacaagaagaaccucuacgaccacacccugauguccaucaucaccaccuuccaccugagcauccccaacuucaaccaguacgaggccauguccugcgacuucaacgggggcaagaucagcauccaguacaaccucucccacagcuacgcgggggacgccgcccagcacugcggcacgguggccaacgggguccugcagaccuucaugcgcauggcguggggcggcuccuaccuggcccucgacagcgggcggcgcggcugggacugcaucaucuccagcuaccaguaccugaucauccagaacaccaccugggacgaccacugccaguucucccggcccagccccaucggguaccugggcuucgugagccagaagacgcgcgacaucuacaucucccggcgccuccugggcaccuucaccuggacccugagcgacuccgaggggcacgacaugccgggcggguacugccucacgcgguggaugcugaucgaggccgaccugaagugcuucggcaacaccgccguggccaagugcaacgagaagcacgacgaggaguucugcgacauguggcgccucuucgacuucaacaagcaggcgauccagcggcugaaggccgaggcccagaugaacauccagcugaucaacaaggccgucaacgcccucaucaacgaccagcugaugaugaagaaccaccuccgcgacaucauggggauccccuacugcaacuacagcaaguucugguaccugaacaacaccaccacgggccggaccucccugccccgcugcuggcugaucagcaacggcuccuaccucaacgagacccacuucagcgacgacaucgagcagcaggcggacaacaugaucaccgagaugcugcagaaggaguacauggaccggcaggggaagacgccccugggccucguggaccuguucguguucuccaccagcuucuaccugaucaccaucuuccuccaccuggucaagaucccgugaggacuagucccuguucccagagcccacuuuuuuuucuuuuuuugaaauaaaauagccugucuuucagaucucaaaggcucuuuucagagccaccaaaaaaaaaaaaaaaaaaaaaaaaaaaaaaaaaaaaaaaaaaaaaaaaaaaaaaaaaaaaaaaaaaaaaaaaaaaaaaaaaaaaaaaaaaaaaaaaaaaaa

SEQ ID NO: 41900 - RNA, 1631 nt, Artificial Sequence; identical to SEQ ID NO: 41894
  mRNA product Design a-1 (hSL-A100) comprising derived and/or modified sequence from LASV(Pinneo-NIG-1969;Clade I)__AIT17836__GPCmut13 (opt1)

SEQ ID NO: 41901 - RNA, 1631 nt, Artificial Sequence
  mRNA product Design a-1 (hSL-A100) comprising derived and/or modified sequence from LASV(ISTH0009-NIG-2011;Clade II)__AIT17404__GPCmut13 (opt1)
aggagagucccgcagucggcguccagcggcucugcuuguucgugugugugucguugcaggccuuauucaagcuuaccaugggccagaucaucaccuucuuccaggaggugccccacgucaucgaggaggugaugaacaucgugcugaucgcccucagccugcuggccauccucaaggggaucuacaacgucgcgaccugcggccuguucgggcugguguccuuccuccugcugugcggccgcagcugcuccacgaccuacaaggggguguacgagcuccagacccuggagcuggacauggccagccucaacaugaccaugccgcuguccugcacgaagaacaacagccaccacuacaucauggucggcaacgagaccggccuggagcucacccugaccaacacguccaucaucaaccacaaguucugcaaccugagcgacgcccacaagaagaaccucuacgaccacgcccugauguccaucaucagcaccuuccaccuguccauccccaacuucaaccaguacgaggccaugagcugcgacuucaacgggggcaagaucuccgugcaguacaaccucagccacgcguacgccguggacgccgccaaccacugcgggaccaucgcgaacggcguccugcagaccuucaugcggauggccuggggcggguccuacaucgcccuggacagcggcaagggguccugggacugcaucaugacgagcuaccaguaccucaucauccagaacaccaccugggaggaccacugccaguucucccgccccagccccaucggcuaccuggggcugcucagccagcggacccgcgacaucuacaucucccggcgccugcugggcacguucaccuggacccucagcgacuccgagggcaacgagacccccgggggcuacugccugacgcgguggaugcugaucgaggccgagcucaagugcuucgggaacaccgccguggcgaagugcaacgagaagcacgacgaggaguucugcgacaugcugcgccuguucgacuucaacaagcaggccauccggcgccucaagaccgaggcccagaugagcauccagcugaucaacaaggccgugaacgcccugaucaacgaccagcucaucaugaagaaccaccuccgggacaucaugggcaucccguacugcaacuacuccaaguacugguaccugaaccacaccgucacggggaagaccagccugccccgcugcuggcugguguccaacggcagcuaccugaacgagacccacuucuccgacgacaucgagcagcaggcggacaacaugaucaccgagcuccugcagaaggaguacauggaccggcagggcaagacgccccuggggcucguggaccuguucgucuucagcaccuccuucuaccugaucagcaucuuccugcaccucaucaagaucccgugaggacuagucccuguucccagagcccacuuuuuuuucuuuuuuugaaauaaaauagccugucuuucagaucucaaaggcucuuuucagagccaccaaaaaaaaaaaaaaaaaaaaaaaaaaaaaaaaaaaaaaaaaaaaaaaaaaaaaaaaaaaaaaaaaaaaaaaaaaaaaaaaaaaaaaaaaaaaaaaaaaaaa

SEQ ID NO: 41902 - RNA, 1631 nt, Artificial Sequence
  mRNA product Design a-1 (hSL-A100) comprising derived and/or modified sequence from LASV(ISTH2010-NIG-2012;Clade II)__AIT17482__GPCmut13 (opt1)
aggagagucccgcagucggcguccagcggcucugcuuguucgugugugugucguugcaggccuuauucaagcuuaccaugggccagaucaucaccuucuuccaggaggugccccacgucaucgaggaggugaugaacaucgugcugaucgcccucagccugcuggccauccucaaggggaucuacaacgucgcgaccugcggccuguucgggcugguguccuuccuccugcugugcggccgcagcugcuccacgaccuacaaggggguguacgagcuccagacccuggagcuggacauggccagccucaacaugaccaugccgcuguccugcacgaagaacaacagccaccacuacaucauggucggcaacgagaccggccuggagcucacccugaccaacacguccaucaucaaccacaaguucugcaaccugagcgacgcccacaagaagaaccucuacgaccacgcccugauguccaucaucagcaccuuccaccuguccauccccaacuucaaccaguacgaggccaugagcugcgacuucaacgggggcaagaucuccgugcaguacaaccucagccacgcguacgccguggacgccgccaaccacugcgggaccaucgcgaacggcguccugcagaccuucaugcggauggccuggggcggguccuacaucgcccuggacagcggcaagggguccugggacugcaucaugacgagcuaccaguaccucaucauccagaacaucaccugggaggaccacugccaguucucccgccccagccccaucggcuaccuggggcugcucagccagcggacccgcgacaucuacaucucccggcgccugcugggcaccuucacguggacccucagcgacuccgagggcaacgagacccccgggggcuacugccugacccgguggaugcugaucgaggccgagcucaagugcuucgggaacacggccguggcgaagugcaacgagaagcacgacgaggaguucugcgacaugcugcgccuguucgacuucaacaagcaggccauccggcgccucaagaccgaggcccagaugagcauccagcugaucaacaaggccgugaacgcccugaucaacgaccagcucaucaugaagaaccaccuccgggacaucaugggcauccccuacugcaacuacuccaaguacugguaccugaaccacaccgucaccgggaagacgagccugccccgcugcuggcugguguccaacggcagcuaccugaacgagacccacuucuccgacgacaucgagcagcaggcggacaacaugaucaccgagcuccugcagaaggaguacaucgaccggcagggcaagaccccgcuggggcucguggaccuguucgucuucagcacguccuucuaccugaucagcaucuuccugcaccucgugaagaucccgugaggacuagucccuguucccagagcccacuuuuuuuucuuuuuuugaaauaaaauagccugucuuucagaucucaaaggcucuuuucagagccaccaaaaaaaaaaaaaaaaaaaaaaaaaaaaaaaaaaaaaaaaaaaaaaaaaaaaaaaaaaaaaaaaaaaaaaaaaaaaaaaaaaaaaaaaaaaaaaaaaaaaa

SEQ ID NO: 41903 - RNA, 1631 nt, Artificial Sequence
  mRNA product Design a-1 (hSL-A100) comprising derived and/or modified sequence from LASV(Lassa virus/H.sapiens-wt/NGA/2015/ISTH_0543;Clade II)__AVO03639__GPCmut13 (opt1)
aggagagucccgcagucggcguccagcggcucugcuuguucgugugugugucguugcaggccuuauucaagcuuaccaugggccagaucaucaccuucuuccaggaggugccccacgucaucgaggaggugaugaacaucgugcugaucgcccucagccugcuggccauccucaaggggaucuacaacgucgcgaccugcggccuguucgggcugguguccuuccuccugcugugcggccgcagcugcuccacgaccuacaaggggguguacgagcuccagacccuggagcuggacauggccaaccucaacaugaccaugccgcugagcugcacgaagaacaacucccaccacuacaucauggucggcaacgagaccggccuggagcucacccugaccaacacgagcaucaucaaccacaaguucugcaaccuguccgacgcccacaagaagaaccucuacgaccacgcccugaugagcaucaucuccaccuuccaccugagcauccccaacuucaaccaguacgaggccauguccugcgacuucaacgggggcaagaucagcgugcaguacaaccucucccacaccuacgcgguggacgccgccaaccacugcgggaccaucgccaacggcguccugcagacguucaugcggauggcguggggcgggagcuacaucgcccuggacuccggcaaggggagcugggacugcaucaugaccuccuaccaguaccucgugauccagaacaccaccugggaggaccacugccaguucagccgccccucccccaucggcuaccuggggcugcucagccagcggacgcgcgacaucuacaucagccggcgccugcugggcaccuucaccuggacccucuccgacagcgagggcaacgagacgcccgggggcuacugccugacccgguggaugcugaucgaggccgagcucaagugcuucgggaacaccgccguggccaagugcaacgagaagcacgacgaggaguucugcgacaugcugcgccuguucgacuucaacaagcaggcgauccggcgccucaagaccgaggcccagauguccauccagcugaucaacaaggccgucaacgcccugaucaacgaccagcucaucaugaagaaccaccuccgggacaucaugggcauccccuacugcaacuacagcaaguacugguaccugaaccacacggugaccgggaagaccucccugccccgcugcuggcuggugagcaacggcuccuaccugaacgagacccacuucagcgacgacaucgagcagcaggccgacaacaugaucacggagcuccugcagaaggaguacaucgaccggcagggcaagaccccgcuggggcucgucgaccuguucguguucuccaccagcuucuaccugaucuccaucuuccugcaccucgugaagaucccgugaggacuagucccuguucccagagcccacuuuuuuuucuuuuuuugaaauaaaauagccugucuuucagaucucaaaggcucuuuucagagccaccaaaaaaaaaaaaaaaaaaaaaaaaaaaaaaaaaaaaaaaaaaaaaaaaaaaaaaaaaaaaaaaaaaaaaaaaaaaaaaaaaaaaaaaaaaaaaaaaaaaaa

SEQ ID NO: 41904 - RNA, 1631 nt, Artificial Sequence
  mRNA product Design a-1 (hSL-A100) comprising derived and/or modified sequence from LASV(Lassa virus/H.sapiens-wt/NGA/2016/ISTH_0009;Clade II)__AVO03571__GPCmut13 (opt1)
aggagagucccgcagucggcguccagcggcucugcuuguucgugugugugucguugcaggccuuauucaagcuuaccaugggccagaucaucaccuucuuccaggaggugccccacgucaucgaggaggugaugaacaucgugcugaucgcccucagccugcuggccauccucaaggggaucuacaacgucgcgaccugcggccugcuggggcucguguccuuccugcugcucugcggccgcagcugcuccacgaccuacaaggggguguacgagcugcagacccuggagcucgacauggccagccugaacaugaccaugccgcuguccugcacgaagaacaacagccaccacuacaucauggucggcaacgagaccggccucgagcugacccugaccaacacguccaucaucaaccacaaguucugcaaccucagcgacgcccacaagaagaaccuguacgaccacgcccugauguccaucaucagcaccuuccaccucuccauccccaacuucaaccaguacgaggccaugagcugcgacuucaacgggggccggaucuccgugcaguacaaccugagccacuccuacgcgguggacgccgccaaccacugcgggaccaucgccaacggcguccugcagaccuucaugcgcauggcguggggcgggagcuacaucgcccucgacuccggcaaggggagcugggacugcaucaugacguccuaccaguaccugaucauccagaacaccaccugggaggaccacugccaguucagccggcccagccccaucggcuaccuggggcuccugucccagcgcacccgggacaucuacaucagccgccggcugcucggcacguucaccuggacccuguccgacagcgagggcaacgagacccccgggggcuacugccugacgcgcuggaugcucaucgaggccgagcugaagugcuucgggaacaccgccguggccaagugcaacgagaagcacgacgaggaguucugcgacaugcugcggcuguucgacuucaacaagcaggcgauccgccggcugaagaccgaggcccagauguccauccagcugaucaacaaggccgugaacgcccucaucaacgaccagcugaucaugaagaaccaccuccgcgacaucaugggcaucccguacugcaacuacagcaaguacugguaccucaaccacaccgucacggggaagaccucccugccccggugcuggcuggugagcaacggcuccuaccucaacgagacccacuucagcgacgacaucgagcagcaggccgacaacaugaucaccgagcugcugcagaaggaguacaucgaccgccagggcaagacgccccucgggcugguggaccuguucgucuucuccaccagcuucuaccugaucuccaucuuccuccaccuggugaagaucccgugaggacuagucccuguucccagagcccacuuuuuuuucuuuuuuugaaauaaaauagccugucuuucagaucucaaaggcucuuuucagagccaccaaaaaaaaaaaaaaaaaaaaaaaaaaaaaaaaaaaaaaaaaaaaaaaaaaaaaaaaaaaaaaaaaaaaaaaaaaaaaaaaaaaaaaaaaaaaaaaaaaaaa

SEQ ID NO: 41905 - RNA, 1631 nt, Artificial Sequence
  mRNA product Design a-1 (hSL-A100) comprising derived and/or modified sequence from LASV(Lassa virus/H.sapiens-wt/NGA/2016/ISTH_0017;Clade II)__AVO03567__GPCmut13 (opt1)
aggagagucccgcagucggcguccagcggcucugcuuguucgugugugugucguugcaggccuuauucaagcuuaccaugggccagaucaucaccuucuuccaggaggugccccacgucaucgaggaggugaugaacaucgugcugaucgcccucagccugcuggccauccucaaggggaucuacaacgucgcgaccugcggccuguucgggcugguguccuuccuccugcugugcggccgcagcugcuccacgaccuacaaggggguguacgagcuccagacccuggagcuggacauggccagccucaacaugaccaugccgcuguccugcacgaagaacaacagccaccacuacaucauggucggcaacgagaccggccuggagcucacccugaccaacacguccaucaucaaccacaaguucugcaaccugagcgacgcccacaagaagaaccucuacgaccacgcccugauguccaucaucagcaccuuccaccuguccauccccaacuucaaccaguacgaggccaugagcugcgacuucaacgggggcaagaucuccgugcaguacaaccucagccacaccuacgcgaucgacgccgccaaccacugcgggaccaucgccaacggcgugcugcagacguucaugcggauggcguggggcggguccuacaucgcccuggacagcggcaagggguccugggacugcaucaugaccagcuaccaguaccucaucauccagaacaccaccugggaggaccacugccaguucucccgccccagccccaucggcuaccuggggcugcucagccagcggacgcgcgacaucuacaucucccggcgccugcugggcaccuucaccuggacccucagcgacuccgagggcaacgagacgcccgggggcuacugccugacccgguggaugcugaucgaggccgagcucaagugcuucgggaacaccgccgucgccaagugcaacgagaagcacgacgaggaguucugcgacaugcugcgccuguucgacuucaacaagcaggcgauccggcgccucaagaccgaggcccagaugagcauccagcugaucaacaaggccgugaacgcccugaucaacgaccagcucaucaugaagaaccaccuccgggacaucaugggcauccccuacugcaacuacuccaaguacugguaccugaaccacacggugaccgggaagaccagccugccccgcugcuggcuggucuccaacggcagcuaccugaacgagacccacuucuccgacgacaucgagcagcaggccgacaacaugaucacggagcuccugcagaaggaguacauggaccggcagggcaagaccccgcuggggcucguggaccuguucguguucagcaccuccuucuaccugaucagcaucuuccugcaccucguccgcaucccgugaggacuagucccuguucccagagcccacuuuuuuuucuuuuuuugaaauaaaauagccugucuuucagaucucaaaggcucuuuucagagccaccaaaaaaaaaaaaaaaaaaaaaaaaaaaaaaaaaaaaaaaaaaaaaaaaaaaaaaaaaaaaaaaaaaaaaaaaaaaaaaaaaaaaaaaaaaaaaaaaaaaaa

SEQ ID NO: 41906 - RNA, 1631 nt, Artificial Sequence
  mRNA product Design a-1 (hSL-A100) comprising derived and/or modified sequence from LASV(Lassa virus/H.sapiens-wt/NGA/2018/ISTH_0959;Clade II)__AVV65099__GPCmut13 (opt1)
aggagagucccgcagucggcguccagcggcucugcuuguucgugugugugucguugcaggccuuauucaagcuuaccaugggccagaucaucaccuucuuccaggaggugccccacgucaucgaggaggugaugaacaucgugcugaucgcccucagccugcuggccauccucaaggggaucuacaacgucgugaccugcggccuguucgggcugguguccuuccuccugcugugcggccgcagcugcuccacgaccuacaagggggucuacgagcuccagacccuggagcuggacauggcgagccucaacaugaccaugccgcuguccugcacgaagaacaacagccaccacuacaucauggugggcaacgagaccggccuggagcucacccugaccaacacguccaucaucaaccacaaguucugcaaccugagcgacgcccacaagaagaaccucuacgaccacgcccugauguccaucaucagcaccuuccaccuguccauccccaacuucaaccaguacgaggccaugagcugcgacuucaacgggggcaagaucuccgugcaguacaaccucagccacgccuacgcgaucgacgccgccaaccacugcgggaccaucgccaacggcguccugcagaccuucaugcggauggcguggggcggguccuacaucgcccuggacagcggcaagggguccugggacugcaucaugacgagcuaccaguaccucaucauccagaacaccaccugggaggaccacugccaguucucccgccccagccccaucggcuaccuggggcugcucagccagcggacccgcgacaucuacaucucccggcgccugcugggcacguucaccuggacccucagcgacuccgagggcaacgagacccccgggggcuacugccugacgcgguggaugcugaucgaggccgagcucaagugcuucgggaacaccgccguggccaagugcaacgagaagcacgacgaggaguucugcgacaugcugcgccuguucgacuucaacaagcaggcgauccggcgccucaagaccgaggcccagaugagcauccagcugaucaacaaggccgugaacgcccugaucaacgaccagcucaucaugaagaaccaccuccgggacaucaugggcaucccguacugcaacuacuccaaguacugguaccugaaccacaccgucacggggaagaccagccugccccgcugcuggcugguguccaacggcagcuaccugaacgagacccacuucuccgacgacaucgagcagcaggccgacaacaugaucaccgagcuccugcagaaggaguacaucgaccggcagggcaagacgccccuggggcucguggaccuguucgucuucagcaccuccuucuaccugaucagcaucuuccugcaccucgugaagaucccgugaggacuagucccuguucccagagcccacuuuuuuuucuuuuuuugaaauaaaauagccugucuuucagaucucaaaggcucuuuucagagccaccaaaaaaaaaaaaaaaaaaaaaaaaaaaaaaaaaaaaaaaaaaaaaaaaaaaaaaaaaaaaaaaaaaaaaaaaaaaaaaaaaaaaaaaaaaaaaaaaaaaaa

SEQ ID NO: 41907 - RNA, 1631 nt, Artificial Sequence
  mRNA product Design a-1 (hSL-A100) comprising derived and/or modified sequence from LASV(LASV003-NIG-2008;Clade II)__AIT17580__GPCmut13 (opt1)
aggagagucccgcagucggcguccagcggcucugcuuguucgugugugugucguugcaggccuuauucaagcuuaccaugggccagaucaucaccuucuuccaggaggugccccacgucaucgaggaggugaugaacaucgugcugaucgcccucagccugcuggccauccucaaggggaucuacaacgucgcgaccugcggccuguucgggcugguguccuuccuccugcugugcggccgcagcugcuccacgaccuacaaggggguguacgagcuccagacccuggagcuggacauggccagccucaacaugaccaugccgcuguccugcacgaagaacaacagccaccacuacaucauggucggcaacgagaccggccuggagcucacccugaccaacacguccaucaucaaccacaaguucugcaaccugagcgacgcccacaagaagaaccucuacgaccacgcccugauguccaucaucagcaccuuccaccuguccauccccaacuucaaccaguacgaggccaugagcugcgacuucaacgggggcaagaucuccgugcaguacaaccucagccacaccuacgcgguggacgccgccaaccacugcgggaccaucgccaacggcguccugcagacguucaugcggauggcguggggcggguccuacaucgcccuggacagcggcaagggguccugggacugcaucaugaccagcuaccaguaccucaucauccagaacaccaccugggaggaccacugccaguucucccgccccagccccaucggcuaccuggggcugcucagccagcggacgcgcgacaucuacaucucccggcgccugcugggcaccuucaccuggacccucagcgacuccgagagcaacgagacgccgggcggguacugccugacccgguggaugcugaucgaggccgagcucaagugcuucggcaacaccgccguggccaagugcaacgagaagcacgacgaggaguucugcgacaugcugcgccuguucgacuucaacaagcaggcgauccggcgccucaaggccgaggcccagauguccauccagcugaucaacaaggccgugaacgcccugaucaacgaccagcucaucaugaagaaccaccuccgggacaucauggggauccccuacugcaacuacagcaaguacugguaccugaaccacaccgucacgggccgcaccucccugccccggugcuggcuggugagcaacggguccuaccugaacgagacccacuucagcgacgacaucgagcagcaggcggacaacaugaucaccgagcuccugcagaaggaguacauggaccgccagggcaagacgccccugggccucguggaccuguucgucuucuccaccagcuucuaccugaucuccaucuuccugcaccucgugaagaucccgugaggacuagucccuguucccagagcccacuuuuuuuucuuuuuuugaaauaaaauagccugucuuucagaucucaaaggcucuuuucagagccaccaaaaaaaaaaaaaaaaaaaaaaaaaaaaaaaaaaaaaaaaaaaaaaaaaaaaaaaaaaaaaaaaaaaaaaaaaaaaaaaaaaaaaaaaaaaaaaaaaaaaa

SEQ ID NO: 41908 - RNA, 1631 nt, Artificial Sequence
  mRNA product Design a-1 (hSL-A100) comprising derived and/or modified sequence from LASV(LASV035-NIG-2009;Clade II)__AIT17588__GPCmut13 (opt1)
aggagagucccgcagucggcguccagcggcucugcuuguucgugugugugucguugcaggccuuauucaagcuuaccaugggccagaucaucaccuucuuccaggaggugccccacgucaucgaggaggugaugaacaucgugcugaucgcccucagccugcuggccauccucaaggggaucuacaacgucgcgaccugcggccuguucgggcugguguccuuccuccugcugugcggccgcagcugcuccacgaccuacaaggggguguacgagcuccagacccuggagcuggacauggccagccucaacaugaccaugccgcuguccugcacgaagaacaacagccaccacuacaucauggucggcaacgagaccggccuggagcucacccugaccaacacguccaucaucaaccacaaguucugcaaccugagcgacgcccacaagaagaaccucuacgaccacgcccugauguccaucaucagcaccuuccaccuguccauccccaacuucaaccaguacgaggccaugagcugcgacuucaacgggggcaagaucuccgugcaguacaaccucagccacgcguacgccguggacgccgccaaccacugcgggaccaucgcgaacggcguccugcagaccuucaugcggauggccuggggcggguccuacaucgcccuggacagcggcaagggguccugggacugcaucaugacgagcuaccaguaccucaucauccagaacaccaccugggaggaccacugccaguucucccgccccagccccaucggcuaccuggggcugcucagccagcggacccgcgacaucuacaucucccggcgccugcugggcacguucaccuggacccucagcgacuccgagggcaacgagacccccgggggcuacugccugacgcgguggaugcugaucgaggccgagcucaagugcuucgggaacaccgccguggcgaagugcaacgagaagcacgacgaggaguucugcgacaugcugcgccuguucgacuucaacaagcaggccauccggcgccucaaggccgaggcccagaugagcauccagcugaucaacaaggccgugaacgcgcugaucaacgaccagcucaucaugaagaaccaccuccgggacaucaugggcauccccuacugcaacuacuccaaguacugguaccugaaccacaccgucaccgggaagacgagccugccccgcugcuggcugguguccaacggcagcuaccugaacgagacccacuucuccgacgacaucgagcagcaggccgacaacaugaucaccgagcuccugcagaaggaguacaucgaccggcagggcaagaccccgcuggggcucguggaccuguucgucuucagcacguccuucuaccugaucagcaucuuccugcaccucgugaagaucccgugaggacuagucccuguucccagagcccacuuuuuuuucuuuuuuugaaauaaaauagccugucuuucagaucucaaaggcucuuuucagagccaccaaaaaaaaaaaaaaaaaaaaaaaaaaaaaaaaaaaaaaaaaaaaaaaaaaaaaaaaaaaaaaaaaaaaaaaaaaaaaaaaaaaaaaaaaaaaaaaaaaaaa

SEQ ID NO: 41909 - RNA, 1631 nt, Artificial Sequence
  mRNA product Design a-1 (hSL-A100) comprising derived and/or modified sequence from LASV(LASV1000-NIG-2009;Clade II)__AIT17782__GPCmut13 (opt1)
aggagagucccgcagucggcguccagcggcucugcuuguucgugugugugucguugcaggccuuauucaagcuuaccaugggccagaucaucaccuucuuccaggaggugccccacgucaucgaggaggugaugaacaucgugcugaucgcccucagccugcuggccauccucaaggggaucuacaacgucgcgaccugcggccuguucgggcugguguccuuccuccugcugugcggccgcagcugcuccacgaccuacaaggggguguacgagcuccagacccuggagcuggacauggccagccucaacaugaccaugccgcuguccugcacgaagaacaacagccaccacuacaucauggucggcaacgagaccggccuggagcucacccugaccaacacguccaucaucaaccacaaguucugcaaccugagcgacgcccacaagaagaaccucuacgaccacgcccugauguccaucaucagcaccuuccaccuguccauccccaacuucaaccaguacgaggccaugagcugcgacuucaacgggggcaagaucuccgugcaguacaaccucagccacaccuacgcgguggacgccgccaaccacugcgggaccaucgccaacggcguccugcagacguucaugcggauggcguggggcggguccuacaucgcccuggacagcggcaagggguccugggacugcaucaugaccagcuaccaguaccucaucauccagaacaccaccugggaggaccacugccaguucucccgccccagccccaucggcuaccuggggcugcucagccagcggacgcgcgacaucuacaucucccggcgccugcugggcaccuucaccuggacccucagcgacuccgagggcaacgagacgcccgggggcuacugccugacccgguggaugcugaucgaggccgagcucaagugcuucgggaacaccgccguggccaagugcaacgagaagcacgacgaggaguucugcgacaugcugcgccuguucgacuucaacaagcaggcgaucaagcggcucaagaccgaggcccagaugagcauccagcugaucaacaaggccgugaacgcccugaucaacgaccagcucaucaugaagaaccaccuccgcgacaucaugggcauccccuacugcaacuacuccaaguacugguaccugaaccacacggucaccgggaagaccagccugccccggugcuggcugguguccaacggcagcuaccugaacgagacccacuucuccgacgacaucgagcagcaggccgacaacaugaucacggagcuccugcagaaggaguacaucgaccgccagggcaagaccccgcuggggcucguggaccuguucgucuucagcaccuccuucuaccugaucagcaucuuccugcaccucgugaagaucccgugaggacuagucccuguucccagagcccacuuuuuuuucuuuuuuugaaauaaaauagccugucuuucagaucucaaaggcucuuuucagagccaccaaaaaaaaaaaaaaaaaaaaaaaaaaaaaaaaaaaaaaaaaaaaaaaaaaaaaaaaaaaaaaaaaaaaaaaaaaaaaaaaaaaaaaaaaaaaaaaaaaaaa

SEQ ID NO: 41910 - RNA, 1631 nt, Artificial Sequence
  mRNA product Design a-1 (hSL-A100) comprising derived and/or modified sequence from LASV(LASV221-NIG-2010;Clade II)__AIT17624__GPCmut13 (opt1)
aggagagucccgcagucggcguccagcggcucugcuuguucgugugugugucguugcaggccuuauucaagcuuaccaugggccagaucaucaccuucuuccaggaggugccccacgucaucgaggaggugaugaacaucgugcugaucgcccucagccugcuggccauccucaaggggaucuacaacgucgcgaccugcggccuguucgggcugguguccuuccuccugcugugcggccgcagcugcuccacgaccuacaaggggguguacgagcuccagacccuggagcuggacauggccagccucaacaugaccaugccgcuguccugcacgaagaacaacagccaccacuacaucauggucggcaacgagaccggccuggagcucacccugaccaacacguccaucaucaaccacaaguucugcaaccugagcgacgcccacaagaagaaccucuacgaccacgcccugauguccaucaucagcaccuuccaccuguccauccccaacuucaaccaguacgaggccaugagcugcgacuucaacgggggcaagaucuccgugcaguacaaccucagccacaccuacgcgaucgacgccgccaaccacugcgggaccaucgccaacggcgugcugcagacguucaugcggauggcguggggcggguccuacaucgcccuggacagcggcaagggguccugggacugcaucaugaccagcuaccaguaccucaucauccagaacaccaccugggaggaccacugccaguucucccgccccagccccaucggcuaccuggggcugcucagccagcggacgcgcgacaucuacaucucccggcgccugcugggcaccuucaccuggacccucagcgacuccgagggcaacgagacgcccgggggcuacugccugacccgguggaugcugaucgaggccgagcucaagugcuucgggaacaccgccgucgccaagugcaacgagaagcacgacgaggaguucugcgacaugcugcgccuguucgacuucaacaagcaggcgauccggcgccucaagaccgaggcccagaugagcauccagcugaucaacaaggccgugaacgcccugaucaacgaccagcucaucaugaagaaccaccuccgggacaucaugggcauccccuacugcaacuacuccaaguacugguaccugaaccacacggugaccgggaagaccagccugccccgcugcuggcuggucuccaacggcagcuaccugaacgagacccacuucuccgacgacaucgagcagcaggccgacaacaugaucacggagaugcuccagaaggaguacauggaccggcagggcaagaccccgcuggggcugguggaccucuucguguucagcaccuccuucuaccugaucagcaucuuccugcaccuggucaagaucccgugaggacuagucccuguucccagagcccacuuuuuuuucuuuuuuugaaauaaaauagccugucuuucagaucucaaaggcucuuuucagagccaccaaaaaaaaaaaaaaaaaaaaaaaaaaaaaaaaaaaaaaaaaaaaaaaaaaaaaaaaaaaaaaaaaaaaaaaaaaaaaaaaaaaaaaaaaaaaaaaaaaaaa

SEQ ID NO: 41911 - RNA, 1631 nt, Artificial Sequence
  mRNA product Design a-1 (hSL-A100) comprising derived and/or modified sequence from LASV(LASV237-NIG-2010;Clade II)__AIT17638__GPCmut13 (opt1)
aggagagucccgcagucggcguccagcggcucugcuuguucgugugugugucguugcaggccuuauucaagcuuaccaugggccagaucaucaccuucuuccaggaggugccccacgucaucgaggaggugaugaacaucgugcugaucgcccucagccugcuggccauccucaaggggaucuacaacgucgcgaccugcggccuguucgggcugguguccuuccuccugcugugcggccgcagcugcuccacgaccuacaaggggguguacgagcuccagacccuggagcuggacauggccagccucaacaugaccaugccgcuguccugcacgaagaacaacagccaccacuacaucauggucggcaacgagaccggccuggagcucacccugaccaacacguccaucaucaaccacaaguucugcaaccugagcgacgcccacaagaaggaccucuacgaccacgcccugauguccaucaucagcaccuuccaccuguccauccccaacuucaaccaguacgaggccaugagcugcgacuucaacgggggcaagaucuccgugcaguacaaccucagccacaccuacgcgguggacgccgccaaccacugcgggaccaucgccaacggcguccugcagacguucaugcggauggcguggggcggguccuacaucgcccuggacagcggcaagggguccugggacugcaucaugaccagcuaccaguaccucaucauccagaacaccaccugggaggaccacugccaguucucccgccccagccccaucggcuaccuggggcugcucagccagcggacgcgcgacaucuacaucucccggcgccugcugggcaccuucaccuggacccucagcgacuccgagggcaacgagacgcccgggggcuacugccugacccgguggaugcugaucgaggccgagcucaagugcuucgggaacaccgccguggccaagugcaacgagaagcacgacgaggaguucugcgacaugcugcgccuguucgacuucaacaagcaggcgauccggcgccucaagaccgaggcccagaugagcauccagcugaucaacaaggccgugaacgcccugaucaacgaccagcucaucaugaagaaccaccuccgggacaucaugggcauccccuacugcaacuacuccaaguacugguaccugaaccacacggucaccgggaagaccagccugccccgcugcuggcugguguccaacggcagcuaccugaacgagacccacuucuccgacgacaucgagcagcaggccgacaacaugaucacggagcuccugcagaaggaguacauggaccggcagggcaagaccccgcuggggcucguggaccuguucgucuucagcaccuccuucuaccugaucagcaucuuccugcaccucaucaagaucccgugaggacuagucccuguucccagagcccacuuuuuuuucuuuuuuugaaauaaaauagccugucuuucagaucucaaaggcucuuuucagagccaccaaaaaaaaaaaaaaaaaaaaaaaaaaaaaaaaaaaaaaaaaaaaaaaaaaaaaaaaaaaaaaaaaaaaaaaaaaaaaaaaaaaaaaaaaaaaaaaaaaaaa

SEQ ID NO: 41912 - RNA, 1631 nt, Artificial Sequence
  mRNA product Design a-1 (hSL-A100) comprising derived and/or modified sequence from LASV(LASV253-NIG-2011;Clade II)__AIT17670__GPCmut13 (opt1)
aggagagucccgcagucggcguccagcggcucugcuuguucgugugugugucguugcaggccuuauucaagcuuaccaugggccagaucaucaccuucuuccaggaggugccccacgucaucgaggaggugaugaacaucgugcugaucgcccucagccugcuggccauccucaaggggaucuacaacgucgcgaccugcggccuguucgggcugguguccuuccuccugcugugcggccgcagcugcuccacgaccuacaaggggguguacgagcuccagacccuggagcuggacauggccagccucaacaugaccaugccgcuguccugcacgaagaacaacagccaccacuacaucauggucggcaacgagaccggccuggagcucacccugaccaacacguccaucaucaaccacaaguucugcaaccugagcgacgcccacaagaagaaccucuacgaccacgcccugauguccaucaucagcaccuuccaccuguccauccccaacuucaaccaguacgaggccaugagcugcgacuucaacgggggcaagaucuccgugcaguacaaccucagccacaccuacgcgguggacgccgccaaccacugcgggaccaucgccaacggcguccugcagacguucaugcggauggcguggggcggguccuacaucgcccuggacagcggcaagggguccugggacugcaucaugaccagcuaccaguaccucaucauccagaacaccaccugggaggaccacugccaguucucccgccccagccccaucggcuaccuggggcugcucagccagcggacgcgcgacaucuacaucucccggcgccugcugggcaccuucaccuggacccucagcgacuccgagggcaacgagacgcccgggggcuacugccugacccgguggaugcugaucgaggccgagcucaagugcuucgggaacaccgccguggccaagugcaacgagaagcacgacgaggaguucugcgacaugcugcgccuguucgacuucaacaagcaggcgauccggcgccucaaggccgaggcccagaugagcauccagcugaucaacaaggccgugaacgcccugaucaacgaccagcucaucaugaagaaccaccuccgggacaucaugggcaucccguacugcaacuacuccaaguacugguaccugaaccacaccgucacggggcgcaccagccugccccggugcuggcugguguccaacggcagcuaccugaacgagacccacuucuccgacgacaucgagcagcaggcggacaacaugaucaccgagcuccugcagaaggaguacaucgaccgccagggcaagacgccccuggggcucguggaccuguucgucuucagcaccuccuucuaccugaucagcaucuuccugcaccucgugaagaucccgugaggacuagucccuguucccagagcccacuuuuuuuucuuuuuuugaaauaaaauagccugucuuucagaucucaaaggcucuuuucagagccaccaaaaaaaaaaaaaaaaaaaaaaaaaaaaaaaaaaaaaaaaaaaaaaaaaaaaaaaaaaaaaaaaaaaaaaaaaaaaaaaaaaaaaaaaaaaaaaaaaaaaa

SEQ ID NO: 41913 - RNA, 1631 nt, Artificial Sequence
  mRNA product Design a-1 (hSL-A100) comprising derived and/or modified sequence from LASV(LASV254-NIG-2011;Clade II)__AIT17674__GPCmut13 (opt1)
aggagagucccgcagucggcguccagcggcucugcuuguucgugugugugucguugcaggccuuauucaagcuuaccaugggccagaucaucaccuucuuccaggaggugccccacgucaucgaggaggugaugaacaucgugcugaucgcccucagccugcuggccauccucaaggggaucuacaacgucgcgaccugcggccuguucgggcugguguccuuccuccugcugugcggccgcagcugcuccacgaccuacaaggggguguacgagcuccagacccuggagcuggacaugaccaaccucaacaugacgaugccgcugagcugcaccaagaacaacucccaccacuacaucauggucggcaacgagaccggccuggagcucacccugacgaacaccagcaucaucaaccacaaguucugcaaccuguccgacgcccacaagaagaaccucuacaaccacgcccugaugagcaucaucuccaccuuccaccugagcauccccaacuucaaccaguacgaggccauguccugcgacuucaacgggggcaagaucagcgugcaguacaaccucucccacagcuacgccguggacgcggccaaccacugcgggaccaucgccaacggcguccugcagacguucaugcggauggccuggggcggguccuacaucgcgcuggacagcggcaaggggaacugggacugcaucaugaccuccuaccaguaccucaucauccagaacaccaccugggaggaccacugccaguucagccgccccucccccaucggcuaccuggggcugcucagccagcggacgcgcgacaucuacaucagccggcgccugcugggcaccuucaccuggacccucuccgacagcgagggcaacgagacgcccgggggcuacugccugacccgguggaugcugaucgaggccgagcucaagugcuucgggaacaccgccguggccaagugcaacgagaagcacgacgaggaguucugcgacaugcugcgccuguucgacuucaacaagcaggccauccggcgccucaagaccgaggcgcaggccaacauccagcugaucaacaaggccgugaacgcccugaucaacgaccagcucaucaugaagaaccaccuccgggacaucaugggcauccccuacugcaacuacuccaaguacugguaccugaaccacacggucaccgggaagaccagccugccccgcugcuggcugguguccaacggcagcuaccugaacgagacccacuucuccgacgacaucgagcagcaggccgacaacaugaucacggagcuccugcagaaggaguacauggaccggcagggcaagaccccgcuggggcucguggaccuguucgucuucagcaccuccuucuaccugaucagcaucuuccugcaccucgugaagaucccgugaggacuagucccuguucccagagcccacuuuuuuuucuuuuuuugaaauaaaauagccugucuuucagaucucaaaggcucuuuucagagccaccaaaaaaaaaaaaaaaaaaaaaaaaaaaaaaaaaaaaaaaaaaaaaaaaaaaaaaaaaaaaaaaaaaaaaaaaaaaaaaaaaaaaaaaaaaaaaaaaaaaaa

SEQ ID NO: 41914 - RNA, 1631 nt, Artificial Sequence
  mRNA product Design a-1 (hSL-A100) comprising derived and/or modified sequence from LASV(Nig08-A19;Clade III)__ADU56618__GPCmut13 (opt1)
aggagagucccgcagucggcguccagcggcucugcuuguucgugugugugucguugcaggccuuauucaagcuuaccaugggccagaucgugaccuucuuccaggaggucccccacgugaucgaggaggugaugaacaucguccugaucgcccucagcauccuggccauccugaaggggcucuacaacaucgcgaccugcggccugaucgggcuggugacguuccuccugcuguccggccgcagcugcuccaugaccuacaaggggguguacgagcuccagacccuggagcugaacaugaacacccucaacaugacgaugccgcugagcugcaccaagaacaacucccaccacuacaucauggucggcaacgagaccggccuggagcucacccugacgaacaccagccugcuccaccacaaguucugcaaccuguccgacgcccacaagaagaaccuguacgaccacacccucaugagcaucaucuccaccuuccaccugagcauccccaacuucaaccaguacgaggccauguccugcgacuucaacgggggcaagaucacggugcaguacaaccugagccacuccuacgccaucgacgccgcgaaccacugcgggaccguggccaacggcguccuccagaccuucaugcggauggccuggggcgggagcuacaucgcccuggacuccggccgcgggaagugggacugcaucaugaccagcuaccaguaccugaucauccagaacacgaccugggaggaccacugccaguucucccggcccagccccaucggcuaccucgggcugcugucccagcgcacccgggacaucuacaucagccgccggcuccugggcaccuucacguggacccugagcgacuccgagggcaacgagacccccgggggcuacugccucacccgcuggaugcugaucgaggcggagcugaagugcuucgggaacacggccguggccaagugcaacgagaagcacgacgaggaguucugcgacaugcuccggcuguucgacuucaacaagcaggccauccgccggcugaaggccgaggcgcagaugagcauccagcucaucaacaaggccgugaacgcccugaucaacgaccagcugaucaugaagaaccaccuccgcgacaucaugggcauccccuacugcaacuacuccaaguacugguaccugaaccacaccagcaccgggcggaccucccugccccgcugcuggcucgucagcaacggcuccuaccugaacgagacgcacuucagcgacgacaucgagcagcaggccgacaacaugaucaccgagaugcugcagaaggaguaccucgaccggcagggcaagaccccgcuggggcugguggaccuguucguguucuccaccagcuucuaccucaucuccaucuuccugcaccuggucaagaucccgugaggacuagucccuguucccagagcccacuuuuuuuucuuuuuuugaaauaaaauagccugucuuucagaucucaaaggcucuuuucagagccaccaaaaaaaaaaaaaaaaaaaaaaaaaaaaaaaaaaaaaaaaaaaaaaaaaaaaaaaaaaaaaaaaaaaaaaaaaaaaaaaaaaaaaaaaaaaaaaaaaaaaa

SEQ ID NO: 41915 - RNA, 1634 nt, Artificial Sequence
  mRNA product Design a-1 (hSL-A100) comprising derived and/or modified sequence from LASV(G1180-SLE-2010;Clade IV)__AIT17168__GPCmut13 (opt1)
aggagagucccgcagucggcguccagcggcucugcuuguucgugugugugucguugcaggccuuauucaagcuuaccaugggccagaucgugaccuucuuccaggaggucccccacgugaucgaggaggugaugaacaucguccugaucgcccucagcauccuggccgugcugaaggggcucuacaacuucgcgaccugcggccugguggggcugcucaccuuccugcugcucugcggccgcuccugcaccgccagccgguacaagggggucuacgagcugcagacccuggagcucaacauggagacccugaacaugacgaugccgcuguccugcaccaagaacaacagccaccacuacaucauggugggcaacgagaccggccucgagcugacccugacgaacaccuccaucaucaaccacaaguucugcaaccucagcgacgcccacaagaagaaccuguacgaccacgcccugauguccaucaucagcaccuuccaccucuccauccccaacuucaaccaguacgaggccaugagcugcgacuucaacgggggcaagaucuccgugcaguacaaccugagccacuccuacgcgggggacgccgccaaccacugcggcaccgucgccaacggggugcugcagacguucaugcgcauggcguggggcggcagcuacaucgcccucgacuccgggcacggcagcugggacugcaucaugaccuccuaccaguaccugaucauccagaacaccaccugggaggaccacugccaguucagccggcccucccccaucggguaccugggccuccugagccagcgcacgcgggacaucuacaucagccgccggcugcucggcaccuucaccuggacccuguccgacagcgaggggaaggacacgccgggcggguacugccugacccgcuggaugcucaucgaggccgagcugaagugcuucggcaacaccgccguggccaagugcaacgagaagcacgacgaggaguucugcgacaugcugcggcuguucgacuucaacaagcaggcgauccagcgccugaaggccgaggcccagauguccauccagcugaucaacaaggccgucaacgcccucaucaacgaccagcugaucaugaagaaccaccuccgggacaucauggggauccccuacugcaacuacagcaaguacugguaccucaaccacaccacgaccggcaagaccucccugcccaagugcuggcuggugagcaacggcuccuaccucaacgagacccacuucagcgacgacaucgagcagcaggcggacaacaugaucacggagaugcugcagaaggaguacauggagcgccaggggaagacgccccugggccucguggaccuguucgucuucuccaccagcuucuaccugaucuccaucuuccugcaccucgugaagaucccgugaggacuagucccuguucccagagcccacuuuuuuuucuuuuuuugaaauaaaauagccugucuuucagaucucaaaggcucuuuucagagccaccaaaaaaaaaaaaaaaaaaaaaaaaaaaaaaaaaaaaaaaaaaaaaaaaaaaaaaaaaaaaaaaaaaaaaaaaaaaaaaaaaaaaaaaaaaaaaaaaaaaaa

SEQ ID NO: 41916 - RNA, 1634 nt, Artificial Sequence
  mRNA product Design a-1 (hSL-A100) comprising derived and/or modified sequence from LASV(G1442-SLE-2011;Clade IV)__AIT17180__GPCmut13 (opt1)
aggagagucccgcagucggcguccagcggcucugcuuguucgugugugugucguugcaggccuuauucaagcuuaccaugggccagaucgugaccuucuuccaggaggucccccacgugaucgaggaggugaugaacaucguccugaucgcccucagcauccuggccgugcugaaggggcucuacaacguggcgaccugcggccugaucgggcuggucacguuccuccugcugugcggccgcuccugcaccaccacccucuacaaggggguguacgagcugcagacgcuggagcucaacauggagacccugaacaugaccaugccgcugagcugcaccaagaacaacucccaccacuacauccgggugggcaacgagacgggccucgagcugacccugaccaacaccagcaucaucaaccacaaguucugcaaccucuccgacgcccacaagaagaaccuguacgaccacgcccugaugagcaucaucuccacguuccaccucagcauccccaacuucaaccaguacgaggccauguccugcgacuucaacgggggcaagaucagcguccaguacaaccugucccacagcuacgccggggacgcggccaaccacugcggcaccguggccaacggggugcugcagaccuucaugcgcauggccuggggcggcuccuacaucgcgcucgacagcgggcggggcaacugggacugcaucaugaccuccuaccaguaccugaucauccagaacacgaccugggacgaccacugccaguucagccgccccucccccaucggguaccugggccuccugagccagcggacccgcgacgucuacaucucccggcgccugcucggcaccuucacguggacccugagcgacagcgaggggaaggacaccccgggcggguacugccugacccgguggaugcucaucgaggccgagcugaagugcuucggcaacacggccguggccaagugcaacgagaagcacgacgaggaguucugcgacaugcugcgccucuucgacuucaacaagcaggccauccagcggcugaaggcggaggcccagauguccauccagcugaucaacaaggccgugaacgcccucaucaacgaccagcugaucaugaagaaccaccuccgcgacaucauggggauccccuacugcaacuacagcaaguacugguaccugaacaacaccgccaccggcaagaccucccugcccaagugcuggcugaucagcaacggcuccuaccucaacgagacgcacuucagcgacgacaucgagcaggaggcggacaacaugaucaccgagaugcugcagaaggaguacauggagcggcaggggaagacgccccugggccucgucgaccuguucguguucuccaccagcuucuaccugaucuccaucuuccugcaccucgugaagaucccgugaggacuagucccuguucccagagcccacuuuuuuuucuuuuuuugaaauaaaauagccugucuuucagaucucaaaggcucuuuucagagccaccaaaaaaaaaaaaaaaaaaaaaaaaaaaaaaaaaaaaaaaaaaaaaaaaaaaaaaaaaaaaaaaaaaaaaaaaaaaaaaaaaaaaaaaaaaaaaaaaaaaaa

SEQ ID NO: 41917 - RNA, 1634 nt, Artificial Sequence
  mRNA product Design a-1 (hSL-A100) comprising derived and/or modified sequence from LASV(G3010-SLE-2013;Clade IV)__AIT17344__GPCmut13 (opt1)
aggagagucccgcagucggcguccagcggcucugcuuguucgugugugugucguugcaggccuuauucaagcuuaccaugggccagaucgugaccuucuuccaggaggucccccacgugaucgaggaggugaugaacaucguccugaucgcccucagcauccuggccgugcugaaggggcucuacaacuucgcgaccugcggccugguggggcuggucacguuccuccugcugugcggccgcuccugcaccaccagccucuacaaggggguguacgagcugcagacccuggagcucaacauggagacgcugaacaugaccaugccgcuguccugcaccaagaacaacagccaccacuacaucauggugggcaacgagaccggccucgagcugacgcugaccaacaccuccaucaucaaccacaaguucugcaaccucagcgacgcccacaagaagaaccuguacaaccacgcccugauguccaucaucagcaccuuccaccucuccauccccaacuucaaccaguacgaggccaugagcugcgacuucaacgggggcaagaucuccguccaguacaaccugagccacuccuacgccggggacgcggccagccacugcggcacgguggccaacggggugcugcagaccuucaugcggauggccuggggcggcuccuacaucgcgcucgacagcggguacggcaagugggacugcaucaugaccuccuaccaguaccugaucauccagaacaccacgugggaggaccacugccaguucagccgccccucccccaucggguaccugggccuccugagccagcggacccgcgacaucuacaucagccggcgccugcucggcaccuucaccuggacgcuguccgacagcgaggggaaggacaccccgggcggguacugccugacccgguggaugcucaucgaggccgagcugaagugcuucggcaacaccgccgucgccaagugcaacgagaagcacgacgaggaguucugcgacaugcugcgccucuucgacuucaacaagcaggccauccagcggcugaagacggaggcgcagauguccauccagcugaucaacaaggccgugaacgcccucaucaacgaccagcugaucaugaagaaccaccuccgcgacaucauggggauccccuacugcaacuacagcaaguacugguaccugaaccacaccaccaccggcaagacgucccugcccaagugcuggcuggugagcaacggcuccuaccucaacgagacccacuucagcgacgacaucgagcagcaggccgacaacaugaucaccgagaugcugcagaaggaguacauggagcggcaggggaagacgccccugggccucgucgaccuguucguguucuccaccagcuucuaccugaucuccaucuuccugcaccucgugaagaucccgugaggacuagucccuguucccagagcccacuuuuuuuucuuuuuuugaaauaaaauagccugucuuucagaucucaaaggcucuuuucagagccaccaaaaaaaaaaaaaaaaaaaaaaaaaaaaaaaaaaaaaaaaaaaaaaaaaaaaaaaaaaaaaaaaaaaaaaaaaaaaaaaaaaaaaaaaaaaaaaaaaaaaa

SEQ ID NO: 41918 - RNA, 1634 nt, Artificial Sequence
  mRNA product Design a-1 (hSL-A100) comprising derived and/or modified sequence from LASV(G502-SLE-2009;Clade IV)__AIT17126__GPCmut13 (opt1)
aggagagucccgcagucggcguccagcggcucugcuuguucgugugugugucguugcaggccuuauucaagcuuaccaugggccagaucgugaccuucuuccaggaggucccccacgugaucgaggaggugaugaacaucguccugaucgcccucagcauccuggccgugcugaaggggcucuacaacuucgcgaccugcggccugguggggcugcucacguuccugcugcucugcggccgcuccugcaccaccgggcuguacaagggcgucuacgagcugcagacccucgagcugaacauggagacgcugaacaugaccaugccgcucagcugcaccaagaacaacucccaccacuacaucauggugggcaacgagaccgggcuggagcugacgcucaccaacaccagcaucaucaaccacaaguucugcaaccuguccgacgcccacaagaagaaccuguacgaccacgcccucaugagcaucaucuccaccuuccaccugagcauccccaacuucaaccaguacgaggccauguccugcgacuucaacggcgggaagaucagcgugcaguacaaccugucccacagcuacgccggcgacgcggccgaccacugcgggacggucgccaacggcgugcuccagaccuucaugcggauggccuggggcggguccuacaucgcgcuggacagcggccgcgggcggugggacugcaucaugaccuccuaccaguaccugaucauccagaacaccacgugggaggaccacugccaguucagccgccccucccccaucggcuaccucggccugcugagccagcggacccgcgacaucuacaucucccggcgccuccuggggaccuucaccuggacgcugagcgacagcgagggcaaggacacccccgggggcuacugccucacccgguggaugcugaucgaggccgagcugaagugcuucgggaacaccgccguggccaagugcaacgagaagcacgacgaggaguucugcgacaugcuccgccuguucgacuucaacaagcaggccauccagcggcugaaggcggaggcccagauguccauccagcucaucaacaaggccgucaacgcccugaucaacgaccagcuggugaugaagaaccaccuccgcgacaucaugggcauccccuacugcaacuacagccgguacugguaccugaaccacacgaccaccggccgcaccucccugcccaagugcuggcucgugagcaacggguccuaccugaacgagacgcacuucagcgacgacaucgagcagcaggccgacaacaugaucaccgagaugcugcagaaggaguacauggagcggcagggcaagaccccgcucgggcuggucgaccuguucguguucuccaccagcuucuaccugaucuccaucuuccuccaccuggugaagaucccgugaggacuagucccuguucccagagcccacuuuuuuuucuuuuuuugaaauaaaauagccugucuuucagaucucaaaggcucuuuucagagccaccaaaaaaaaaaaaaaaaaaaaaaaaaaaaaaaaaaaaaaaaaaaaaaaaaaaaaaaaaaaaaaaaaaaaaaaaaaaaaaaaaaaaaaaaaaaaaaaaaaaaa

SEQ ID NO: 41919 - RNA, 1634 nt, Artificial Sequence
  mRNA product Design a-1 (hSL-A100) comprising derived and/or modified sequence from LASV(G733-SLE-2010;Clade IV)__AIT17154__GPCmut13 (opt1)
aggagagucccgcagucggcguccagcggcucugcuuguucgugugugugucguugcaggccuuauucaagcuuaccaugggccagaucgugaccuucuuccaggaggucccccacgugaucgaggaggugaugaacaucguccugaucgcccucagcauccuggccgugcugaaggggcucuacaacuucgcgaccugcggcaucguggggcuggucuccuuccugcuccugugcggccgcagcugcacgaccucccuguacaaggggguguacgagcuccagacccuggagcugaacauggagacccucaacaugacgaugccgcugagcugcaccaagaacaacucccaccacuacaucauggugggcaacgagaccggccuggagcucacccugacgaacaccagcaucaucaaccacaaguucugcaaccuguccgacgcccacaagaagaaccucuacgaccacgcccugaugagcaucaucuccaccuuccaccugagcauccccaacuucaaccaguacgaggccauguccugcgacuucaacgggggcaagaucagcguccaguacaaccucucccacagcuacgccggggacgcggccaaccacugcggcaccaucgccaacggggugcugcagacguucaugcggauggccuggggcggcuccuacaucgcgcuggacagcgggcgcgaccggugggacugcaucaugaccuccuaccaguaccucaucauccagaacaccaccugggaggaccacugccaguucagccgccccucccccaucggcuaccuggggcugcucagccagcggacgcgcgacaucuacaucagccggcgccugcugggcaccuucaccuggacccucuccgacagcgagggcaaggacacgcccgggggcuacugccugacccgguggaugcugaucgaggccgagcucaagugcuucgggaacaccgccguggccaagugcaacgagaagcacgacgaggaguucugcgacaugcugcgccuguucgacuucaacaagcaggccauccagcggcucaaggcggaggcccagauguccauccagcugaucaacaaggccgucaacgcccugaucaacgaccagcucaucaugaagaaccaccuccgcgacaucaugggcauccccuacugcaacuacagcaaguacugguaccugaaccacaccacgaccgggaagaccucccugcccaagugcuggcuggugagcaacggcuccuaccugaacgagacccacuucagcgacgacaucgagcagcaggccgacaacaugaucacggagaugcuccagaaggaguacauggagcggcagggcaagaccccgcuggggcugguggaccucuucgucuucuccaccagcuucuaccugaucuccaucuuccugcaccuggugaagaucccgugaggacuagucccuguucccagagcccacuuuuuuuucuuuuuuugaaauaaaauagccugucuuucagaucucaaaggcucuuuucagagccaccaaaaaaaaaaaaaaaaaaaaaaaaaaaaaaaaaaaaaaaaaaaaaaaaaaaaaaaaaaaaaaaaaaaaaaaaaaaaaaaaaaaaaaaaaaaaaaaaaaaaa

SEQ ID NO: 41920 - RNA, 1634 nt, Artificial Sequence
  mRNA product Design a-1 (hSL-A100) comprising derived and/or modified sequence from MOPV/LASV reassortant(IGS-1;Clade IV)__AFY05576__GPCmut13 (opt1)
aggagagucccgcagucggcguccagcggcucugcuuguucgugugugugucguugcaggccuuauucaagcuuaccaugggccagaucgugaccuucuuccaggaggucccccacgugaucgaggaggugaugaacaucguccugaucgcccucagcgugcuggccgugcugaaggggcucuacaacuucgcgaccugcggccuggucgggcuggugacguuccuccugcugugcggccgcuccugcaccaccagccucuacaaggggguguacgagcugcagacccuggagcucaacauggagacgcugaacaugaccaugccgcuguccugcaccaagaacaacagccaccacuacaucauggucggcaacgagaccggccucgagcugacgcugaccaacaccuccaucaucaaccacaaguucugcaaccucagcgacgcccacaagaagaaccuguacgaccacgcccugauguccaucaucagcaccuuccaccucuccauccccaacuucaaccaguacgaggccaugagcugcgacuucaacgggggcaagaucuccgugcaguacaaccugagccacuccuacgccggggacgcggccaaccacugcggcacgguggccaacgggguccugcagaccuucaugcggauggccuggggcggcagcuacaucgcgcucgacuccgggcgcggcaacugggacugcaucaugaccagcuaccaguaccugaucauccagaacaccacgugggaggaccacugccaguucucccggcccagccccaucggguaccugggccuccugucccagcgcacccgggacaucuacaucagccgccggcugcucggcaccuucaccuggacgcugagcgacuccgagggggaggacaccccgggcggguacugccugacccgcuggaugcucaucgaggccgagcugaagugcuucggcaacaccgccguggccaagugcaacgagaagcacgacgaggaguucugcgacaugcugcggcuguucgacuucaacaagcaggccauccagcgccugaaggcggaggcccagaugagcauccagcugaucaacaaggccgugaacgcccucaucaacgaccagcugaucaugaagaaccaccuccgggacaucauggggauccccuacugcaacuacuccaaguacugguaccucaaccacacgaccaccggccgcaccagccugcccaagugcuggcuggucuccaacggcagcuaccucaacgagacgcacuucuccgacgacaucgagcagcaggccgacaacaugaucaccgagaugcugcagaaggaguacauggagcggcaggggaagacgccccugggccucguggaccuguucguguucagcaccuccuucuaccugaucagcaucuuccugcaccucgucaagaucccgugaggacuagucccuguucccagagcccacuuuuuuuucuuuuuuugaaauaaaauagccugucuuucagaucucaaaggcucuuuucagagccaccaaaaaaaaaaaaaaaaaaaaaaaaaaaaaaaaaaaaaaaaaaaaaaaaaaaaaaaaaaaaaaaaaaaaaaaaaaaaaaaaaaaaaaaaaaaaaaaaaaaaa

SEQ ID NO: 41921 - RNA, 1634 nt, Artificial Sequence
  mRNA product Design a-1 (hSL-A100) comprising derived and/or modified sequence from LASV(LM765-SLE-2012;Clade IV)__AIT17814__GPCmut13 (opt1)
aggagagucccgcagucggcguccagcggcucugcuuguucgugugugugucguugcaggccuuauucaagcuuaccaugggccagaucgugaccuucuuccaggaggucccccacgugaucgaggaggugaugaacaucguccugaucgcccucagcauccuggccgugcugaaggggcucuacaacuucgcgaccugcggccugguggggcuggucacguuccuccugcugugcggccgcuccugcaccaccagccucuacaaggggguguacgagcugcagacccuggagcucaacauggagacgcugaacaugaccaugccgcuguccugcaccaagaacaacagccaccacuacaucauggugggcaacgagaccggccucgagcugacgcugaccaacaccuccaucaucgaccacaaguucugcaaccucagcgacgcccaccggaagaaccuguacgaccacgcccugauguccaucaucagcaccuuccaccucuccauccccaacuucaaccaguacgaggccaugagcugcgacuucaacgggggcaagaucuccguccaguacaaccugagccacuccuacgccaaggacgcggccgaccacugcgggacgguggccaacggcgugcugcagaccuucaugcgcauggccuggggcgggagcuacaucgcgcucgacuccggccgggggcgcugggacugcaucaugaccagcuaccaguaccugaucauccagaacaccacgugggaggaccacugccaguucucccggcccagccccaucggcuaccuggggcuccugucccagcgcacccgggacaucuacaucagccgccggcugcucggcaccuucaccuggacgcugagcgacuccgagggcaaggacacccccgggggcuacugccugacccgcuggaugcucaucgaggccgagcugaagugcuucgggaacaccgccgucgccaagugcaacgagaagcacgacgaggaguucugcgacaugcugcggcuguucgacuucaacaagcaggccauccagcgccugaaggcggaggcccagaugagcauccagcugaucaacaaggccgugaacgcccucaucaacgaccagcugaucaugaagaaccaccuccgggacaucaugggcauccccuacugcaacuacuccaaguacugguaccucaaccacacgaccaccgggaagaccagccugcccaagugcuggcugguguccaacggcagcuaccucaacgagacgcacuucuccgacgacaucgagcagcaggccgacaacaugaucaccgagaugcugcagaaggaguacauggagcgccagggcaagaccccgcuggggcucgucgaccuguucguguucagcaccuccuucuaccugaucagcaucuuccugcaccucgugaagaucccgugaggacuagucccuguucccagagcccacuuuuuuuucuuuuuuugaaauaaaauagccugucuuucagaucucaaaggcucuuuucagagccaccaaaaaaaaaaaaaaaaaaaaaaaaaaaaaaaaaaaaaaaaaaaaaaaaaaaaaaaaaaaaaaaaaaaaaaaaaaaaaaaaaaaaaaaaaaaaaaaaaaaaa

SEQ ID NO: 41922 - RNA, 1634 nt, Artificial Sequence
  mRNA product Design a-1 (hSL-A100) comprising derived and/or modified sequence from LASV(LM776-SLE-2012;Clade IV)__AIT17824__GPCmut13 (opt1)
aggagagucccgcagucggcguccagcggcucugcuuguucgugugugugucguugcaggccuuauucaagcuuaccaugggccagaucgugaccuucuuccaggaggucccccacgugaucgaggaggugaugaacaucguccugaucgcccucagcauccuggccgugcugaaggggcucuacaacuucgcgaccugcggccugguggggcuggucacguuccuccugcugugcggccgcuccugcaccaccagcguguacaaggggguguacgagcuccagacccuggagcugaacauggagacgcucaacaugaccaugccgcuguccugcaccaagaacaacagccaccacuacaucauggucggcaacgagaccggccuggagcucacgcugaccaacaccuccaucaucaaccacaaguucugcaaccugagcgacgcccacaagaagaaccucuacgaccacgcccugauguccaucaucagcaccuuccaccuguccauccccaacuucaaccaguacgaggccaugagcugcgacuucaacgggggcaagaucuccgugcaguacaaccucagccacuccuacgccggggacgcggccaaccacugcggcacgguggccaacgggguccugcagaccuucaugcggauggccuggggcggcagcuacaucgcgcuggacuccgggcacggcaagugggacugcaucaugaccagcuaccaguaccucaucauccagaacaccacgugggaggaccacugccaguucucccgccccagccccaucggguaccugggccugcucucccagcggacccgcgacaucuacaucagccggcgccugcugggcaccuucaccuggacgcucagcgacuccgaggggaaggacaccccgggcggguacugccugacccgguggaugcugaucgaggccgagcucaagugcuucggcaacaccgccguggccaagugcaacgagaagcacgacgaggaguucugcgacaugcugcgccuguucgacuucaacaagcaggccauccagcggcucaaggcggaggcccagaugagcauccagcugaucaacaaggccgugaacgcccugaucaacgaccagcucaucaugaagaaccaccuccgcgacaucauggggauccccuacugcaacuacuccaaguacugguaccugaaccacacgaccaccggcaagaccagccugcccaagugcuggcuggucuccaacggcagcuaccugaacgagacgcacuucuccgacgacaucgagcagcaggccgacaacaugaucaccgagaugcuccagaaggaguacauggagcggcaggggaagacgccccugggccugguggaccucuucguguucagcaccuccuucuaccugaucagcaucuuccugcaccuggucaagaucccgugaggacuagucccuguucccagagcccacuuuuuuuucuuuuuuugaaauaaaauagccugucuuucagaucucaaaggcucuuuucagagccaccaaaaaaaaaaaaaaaaaaaaaaaaaaaaaaaaaaaaaaaaaaaaaaaaaaaaaaaaaaaaaaaaaaaaaaaaaaaaaaaaaaaaaaaaaaaaaaaaaaaaa

SEQ ID NO: 41923 - RNA, 1634 nt, Artificial Sequence
  mRNA product Design a-1 (hSL-A100) comprising derived and/or modified sequence from LASV(Mad39;Clade IV)__ANH09722__GPCmut13 (opt1)
aggagagucccgcagucggcguccagcggcucugcuuguucgugugugugucguugcaggccuuauucaagcuuaccaugggccagaucgugaccuucuuccaggaggucccccacgugaucgaggaggugaugaacaucguccugaucgcccucagcauccuggccgugcugaaggggcucuacaacguggcgaccugcggccugaucgggcuggucacguuccuccugcugugcggccgcuccugcaccaccacccucuacaaggggguguacgagcugcaggcccuggagcucaacauggagacgcugaacaugaccaugccgcugagcugcaccaagaacaacucccaccacuacauccgggugggcaacgagaccggccucgagcugacgcugaccaacaccagccucaucaaccacaaguucugcaaccuguccgacgcccacaagaagaaccuguacgaccacgcccucaugagcaucaucuccaccuuccaccugagcauccccaacuucaaccaguacgaggccauguccugcgacuucaacgacgggaagaucagcguccaguacaaccugucccacacguacgcgggcgacaccgccaaccacugcgggaccguggccaacggcgugcuccagaccuucaugcgcauggccuggggcgggagcuacaucgcgcuggacuccggccgcgggggcugggacugcaucaugacgagcuaccaguaccugaucauccagaacaccaccugggaggaccacugccaguucucccggcccagccccaucggguaccucggccugcugucccagcggacccgcgacaucuacaucagccggcgccuccugggcacguucaccuggacccuguccgacagcgaggggaaggacaccccgggcggguacugccucacgcgguggaugcugaucgaggccgagcugaagugcuucggcaacaccgccgucgccaagugcaacgagaagcacgacgaggaguucugcgacaugcuccgccuguucgacuucaacaagcaggccauccagcggcugaaggcggaggcccagaugagcauccagcucaucaacaaggccgugaacgcccugaucaacgaccagcugaucaugaagaaccaccuccgcgacaucauggggauccccuacugcaacuacuccaaguacugguaccugaaccacaccgugaccggcaagacgagccugcccaagugcuggcucgucuccaacggcagcuaccugaacgagacccacuucuccgacgacaucgagcagcaggccgacaacaugaucaccgagaugcugcagaaggaguacauggagcggcaggggaagacgccccucggccugguggaccuguucguguucagcaccuccuucuaccugaucagcaucuuccuccaccuggucaagaucccgugaggacuagucccuguucccagagcccacuuuuuuuucuuuuuuugaaauaaaauagccugucuuucagaucucaaaggcucuuuucagagccaccaaaaaaaaaaaaaaaaaaaaaaaaaaaaaaaaaaaaaaaaaaaaaaaaaaaaaaaaaaaaaaaaaaaaaaaaaaaaaaaaaaaaaaaaaaaaaaaaaaaaa

SEQ ID NO: 41924 - RNA, 1634 nt, Artificial Sequence
  mRNA product Design a-1 (hSL-A100) comprising derived and/or modified sequence from LASV(Z0947-SLE-2011;Clade IV)__AIT17840__GPCmut13 (opt1)
aggagagucccgcagucggcguccagcggcucugcuuguucgugugugugucguugcaggccuuauucaagcuuaccaugggccagaucgugaccuucuuccaggaggucccccacgugaucgaggaggugaugaacaucguccugaucgcccucagcauccuggccgugcugaaggggcucuacaacuucgcgaccugcggccugguggggcuggucacguuccuccugcugugcggccgcuccugcaccaucagccucuacaaggggguguacgagcugcagacccuggagcucaacauggagacccugaacaugacgaugccgcuguccugcaccaagaacaacagccaccacuacaucauggugggcaacgagaccggccucgagcugacccugacgaacaccuccaucaucaaccacaaguucugcaaccucagcgacgcccacaagaagaaccuguacgaccacgcccugauguccaucaucagcaccuuccaccucuccauccccaacuucaaccaguacgaggccaugagcugcgacuucaacgggggcaagaucuccguccaguacaaccugagccacuccuacgccggggacgcggccaaccacugcggcaccguggccaacggggugcugcagacguucaugcggauggccuggggcggcagcuacaucgcgcucgacuccgggcgcgaccggugggacugcaucaugaccagcuaccaguaccugaucauccagaacaccaccugggaggaccacugccaguucucccgccccagccccaucggcuaccuggggcuccugucccagcggacgcgcgacaucuacaucagccggcgccugcucggcaccuucaccuggacccugagcgacuccgagggcaaggacacgcccgggggcuacugccugacccgguggaugcucaucgaggccgagcugaagugcuucgggaacaccgccgucgccaagugcaacgagaagcacgacgaggaguucugcgacaugcugcgccucuucgacuucaacaagcaggccauccagcggcugaaggcggaggcccagaugagcauccagcugaucaacaaggccgugaacgcccucaucaacgaccagcugaucaugaagaaccaccuccgcgacaucaugggcauccccuacugcaacuacuccaaguacugguaccugaaccacaccacgaccgggaagaccagccugcccaagugcuggcugguguccaacggcagcuaccucaacgagacccacuucuccgacgacaucgagcagcaggccgacaacaugaucacggagaugcugcagaaggaguacauggagcggcagggcaagaccccgcuggggcucgucgaccuguucguguucagcaccuccuucuaccugaucagcaucuuccugcaccucgugaagaucccgugaggacuagucccuguucccagagcccacuuuuuuuucuuuuuuugaaauaaaauagccugucuuucagaucucaaaggcucuuuucagagccaccaaaaaaaaaaaaaaaaaaaaaaaaaaaaaaaaaaaaaaaaaaaaaaaaaaaaaaaaaaaaaaaaaaaaaaaaaaaaaaaaaaaaaaaaaaaaaaaaaaaaa

SEQ ID NO: 41925 - RNA, 1634 nt, Artificial Sequence
  mRNA product Design a-1 (hSL-A100) comprising derived and/or modified sequence from LASV(Josiah;Clade IV)__NP_694870__GPCmut13 (opt1)
aggagagucccgcagucggcguccagcggcucugcuuguucgugugugugucguugcaggccuuauucaagcuuaccaugggccagaucgugaccuucuuccaggaggucccccacgugaucgaggaggugaugaacaucguccugaucgcccucagcgugcuggccgugcugaaggggcucuacaacuucgcgaccugcggccuggucgggcuggugacguuccuccugcugugcggccgcuccugcaccaccagccucuacaaggggguguacgagcugcagacccuggagcucaacauggagacgcugaacaugaccaugccgcuguccugcaccaagaacaacagccaccacuacaucauggucggcaacgagaccggccucgagcugacgcugaccaacaccuccaucaucaaccacaaguucugcaaccucagcgacgcccacaagaagaaccuguacgaccacgcccugauguccaucaucagcaccuuccaccucuccauccccaacuucaaccaguacgaggccaugagcugcgacuucaacgggggcaagaucuccgugcaguacaaccugagccacuccuacgccggggacgcggccaaccacugcggcacgguggccaacgggguccugcagaccuucaugcggauggccuggggcggcagcuacaucgcgcucgacuccgggcgcggcaacugggacugcaucaugaccagcuaccaguaccugaucauccagaacaccacgugggaggaccacugccaguucucccggcccagccccaucggguaccugggccuccugucccagcgcacccgggacaucuacaucagccgccggcugcucggcaccuucaccuggacgcugagcgacuccgaggggaaggacaccccgggcggguacugccugacccgcuggaugcucaucgaggccgagcugaagugcuucggcaacaccgccguggccaagugcaacgagaagcacgacgaggaguucugcgacaugcugcggcuguucgacuucaacaagcaggccauccagcgccugaaggcggaggcccagaugagcauccagcugaucaacaaggccgugaacgcccucaucaacgaccagcugaucaugaagaaccaccuccgggacaucauggggauccccuacugcaacuacuccaaguacugguaccucaaccacacgaccaccggccgcaccagccugcccaagugcuggcuggucuccaacggcagcuaccucaacgagacgcacuucuccgacgacaucgagcagcaggccgacaacaugaucaccgagaugcugcagaaggaguacauggagcggcaggggaagacgccccugggccugguggaccucuucguguucagcaccuccuucuaccugaucagcaucuuccugcaccucgucaagaucccgugaggacuagucccuguucccagagcccacuuuuuuuucuuuuuuugaaauaaaauagccugucuuucagaucucaaaggcucuuuucagagccaccaaaaaaaaaaaaaaaaaaaaaaaaaaaaaaaaaaaaaaaaaaaaaaaaaaaaaaaaaaaaaaaaaaaaaaaaaaaaaaaaaaaaaaaaaaaaaaaaaaaaa

SEQ ID NO: 41926 - RNA, 1631 nt, Artificial Sequence
  mRNA product Design a-1 (hSL-A100) comprising derived and/or modified sequence from LASV(LP;Clade I)__AAF86701__GPCmut13 (opt1)
aggagagucccgcagucggcguccagcggcucugcuuguucgugugugugucguugcaggccuuauucaagcuuaccaugggccagaucaucaccuucuuccaggaggugccccacgucaucgaggaggugaugaacaucgugcugaucgcccucagccugcuggccauccucaaggggcuguacaacaucgcgaccugcggcaucaucgggcuggucgccuuccucuuccugugcggcaaguccugcagccugacgcucaagggcggguacgagcugcagacccuggagcucaacauggagacccugaacaugaccaugccgcuguccugcacgaagaacagcucccaccacuacauccgcgugggcaacgagaccgggcucgagcugacccugaccaacacgagcaucaucaaccacaaguucugcaaccucuccgacgcccacaagaagaaccuguacgaccacgcccugaugagcaucaucuccaccuuccaccucagcauccccaacuucaaccaguacgaggccauguccugcgacuucaacggcgggaagaucagcgugcaguacaaccugucccacagcuacgcgggcgacgccgccgagcacugcgggaccgucgccaacggcgugcugcagaccuucaugcggauggcguggggcgggcgcuacaucgcccucgacuccggcaaggggaacugggacugcaucaugacgagcuaccaguaccugaucauccagaacaccaccugggaggaccacugccaguucucccggcccagccccaucggcuaccugggccuccugucccagcgcacccgggacaucuacaucagccgccggcugcucgggacguucaccuggacccugagcgacuccgagggcaacgagacccccgggggcuacugccugacgcgcuggaugcucaucgaggccgagcugaagugcuucgggaacaccgccguggccaagugcaacgagaagcacgacgaggaguucugcgacaugcugcggcuguucgacuucaacaagcaggcgauccgccggcugaaggccgaggcccagaugagcauccagcugaucaacaaggccgucaacgcccucaucaacgaccagcugaucaugaagaaccaccuccgcgacaucaugggcauccccuacugcaacuacuccaaguacugguaccucaaccacaccagcuccggccggaccagccugcccaagugcuggcugaucuccaacgggagcuaccucaacgagacgcaguucuccgacgacaucgagcagcaggcggacaacaugaucaccgagaugcugcagaaggaguacaucgagcgccagggcaagaccccgcuggggcugguggacaucuucaucuucagcaccuccuucuaccucaucagcaucuuccugcaccugaucaagaucccgugaggacuagucccuguucccagagcccacuuuuuuuucuuuuuuugaaauaaaauagccugucuuucagaucucaaaggcucuuuucagagccaccaaaaaaaaaaaaaaaaaaaaaaaaaaaaaaaaaaaaaaaaaaaaaaaaaaaaaaaaaaaaaaaaaaaaaaaaaaaaaaaaaaaaaaaaaaaaaaaaaaaaa

SEQ ID NO: 41927 - RNA, 1631 nt, Artificial Sequence
  mRNA product Design a-1 (hSL-A100) comprising derived and/or modified sequence from LASV(803213;Clade II)__AAF86703__GPCmut13 (opt1)
aggagagucccgcagucggcguccagcggcucugcuuguucgugugugugucguugcaggccuuauucaagcuuaccaugggccagaucaucaccuucuuccaggaggugccccacgucaucgaggaggugaugaacaucgugcugaucgcccucagccugcuggccauccucaaggggaucuacaacgucgcgaccugcggccuguucgggcugaucuccuuccuccugcugugcggccgcagcugcuccgugacguacaaggggguguacgagcuccagacccuggagcugaacauggccaaccucaacaugaccaugccgcugagcugcaccaagaacaacucccaccacuacaucauggucggcaacgagacgggccuggagcucacccugaccaacaccagcaucaucaaccacaaguucugcaaccuguccgacgcccacaagaagaaccucuacgaccacgcccugaugagcaucaucuccacguuccaccugagcauccccaacuucaaccaguacgaggccauguccugcgacuucaacgggggcaagaucagcgugcaguacaaccucucccacagcuucgcgguggacgccgccaaccacugcgggaccaucgccaacggcguccugcagaccuucaugcggauggcguggggcggguccuacaucgcccuggacagcggcaaggggaacugggacugcaucaugaccuccuaccaguaccucaucauccagaacacgaccugggaggaccacugccaguucagccgccccucccccaucggcuaccuggggcugcucagccagcggacccgcgacaucuacaucagccggcgccugcugggcaccuucacguggacccucuccgacagcgagggcaacgaggcccccgggggcuacugccugacccgguggaugcugaucgaggccgagcucaagugcuucgggaacaccgccguggcgaagugcaacgagaagcacgacgaggaguucugcgacaugcugcgccuguucgacuucaacaagcaggccaucaagcggcucaagacggaggcccagauguccauccagcugaucaacaaggccgugaacgcccugaucaacgaccagcucaucaugaagaaccaccuccgcgacaucaugggcauccccuacugcaacuacagccgguacugguaccugaaccacaccgucaccgggaagaccucccugccccgcugcuggcuggugagcaacggcuccuaccugaacgagacgcacuucagcgacgacaucgagcagcaggcggacaacaugaucaccgagaugcuccagaaggaguacauggaccggcagggcaagaccccgcuggggcugguggaccuguucgucuucuccaccagcuucuaccucaucuccaucuuccugcaccuggugaagaucccgugaggacuagucccuguucccagagcccacuuuuuuuucuuuuuuugaaauaaaauagccugucuuucagaucucaaaggcucuuuucagagccaccaaaaaaaaaaaaaaaaaaaaaaaaaaaaaaaaaaaaaaaaaaaaaaaaaaaaaaaaaaaaaaaaaaaaaaaaaaaaaaaaaaaaaaaaaaaaaaaaaaaaa

SEQ ID NO: 41928 - RNA, 1631 nt, Artificial Sequence
  mRNA product Design a-1 (hSL-A100) comprising derived and/or modified sequence from LASV(GA391;Clade III)__CAA36645__GPCmut13 (opt1)
aggagagucccgcagucggcguccagcggcucugcuuguucgugugugugucguugcaggccuuauucaagcuuaccaugggccagaucgugaccuucuuccaggaggucccccacgugaucgaggaggugaugaacaucguccugaucgcccucagcauccuggccauccugaaggggcucuacaacguggcgaccugcggccugaucgggcuggugacguuccuccugcuguccggccgcagcugcucccucaucuacaaggggaccuacgagcugcagacccuggagcucaacauggagacccugaacaugacgaugccgcugagcugcaccaagaacaacucccaccacuacauccgggucggcaacgagaccggccucgagcugacccugacgaacaccagcauccucaaccacaaguucugcaaccuguccgacgcccacaagcgcaaccuguacgaccacagccucauguccaucaucagcaccuuccaccuguccauccccaacuucaaccaguacgaggccaugagcugcgacuucaacgggggcaagaucaccgugcaguacaaccugucccacagcuucgccguggacgccgcggggcacugcggcacgcucgccaacgggguccugcagaccuucaugcggauggccuggggcggcuccuacaucgcccuggacagcgggcgcggcaacugggacugcaucaugaccuccuaccaguaccucaucauccagaacaccacgugggacgaccacugccaguucagccggcccucccccaucggguaccugggccugcucagccagcgcacccgggacaucuacaucagccgccggcugcugggcaccuucaccuggacgcucuccgacagcgaggggaacgagaccccgggcggguacugccugacccgcuggaugcugaucgaggcggagcucaagugcuucggcaacaccgccguggccaagugcaacgagaagcacgacgaggaguucugcgacaugcugcggcuguucgacuucaacaagcaggccauccgccggcucaagacggaggcccagauguccauccagcugaucaacaaggcggugaacgcccugaucaacgaccagcucaucaugaagaaccaccuccgcgacaucauggggauccccuacugcaacuacagccgguacugguaccugaaccacaccuccaccggcaagaccagccugccccgcugcuggcugaucuccaacggcagcuaccugaacgagacgaaguucuccgacgacaucgagcagcaggccgacaacaugaucaccgagaugcugcagaaggaguacaucgaccggcaggggaagacgccccucggccuggucgaccuguucguguucagcaccuccuucuaccucaucagcaucuuccugcaccuggugaagaucccgugaggacuagucccuguucccagagcccacuuuuuuuucuuuuuuugaaauaaaauagccugucuuucagaucucaaaggcucuuuucagagccaccaaaaaaaaaaaaaaaaaaaaaaaaaaaaaaaaaaaaaaaaaaaaaaaaaaaaaaaaaaaaaaaaaaaaaaaaaaaaaaaaaaaaaaaaaaaaaaaaaaaaa

SEQ ID NO: 41929 - RNA, 1634 nt, Artificial Sequence
  mRNA product Design a-1 (hSL-A100) comprising derived and/or modified sequence from LASV(AV;Clade V)__CCA30314__GPCmut13 (opt1)
aggagagucccgcagucggcguccagcggcucugcuuguucgugugugugucguugcaggccuuauucaagcuuaccaugggccagaucgugaccuucuuccaggaggucccccacgugaucgaggaggugaugaacaucguccugaucgcccucagcauccuggccgugcugaaggggcucuacaacaucgcgaccugcggccugaucgggcugaucacguuccuccugcugugcggccgcuccugcagcuccaaccucuacaaggggguguacgagcugcagagccuggaccucaacauggagacccugaacaugaccaugccgcuguccugcaccaagaacaacagccaccacuacauccgggucggcaacgacacgggccucgagcugacccugaccaacaccuccauccucaaccacaaguucugcaaccugagcgacgcccacaagaaggaccuguacgaccacgcccucauguccaucaucagcacguuccaccuguccauccccaacuucaaccaguacgaggccaugagcugcgacuucaacgggggcaagaucuccgugcaguacaaccugagccacuccuacgccaucgacgcggccaaccacugcgggaccguggccaacggcauccuccagaccuucaugcgcauggccuggggcgggagcuacaucgcgcuggacuccggccgggggaacugggacugcaucaugaccagcuaccaguaccugaucauccagaacacgaccugggagaaccacugccaguucucccgccccagccccaucggcuaccucgggcugcugagccagcggacccgcgacaucuacaucucccggcgccuccugggcaccuucacguggacccugagcgacuccgagggcaacgccacccccgggggcuacugccucacccgguggaugcugaucgaggccgagcugaagugcuucgggaacacggccgucgccaagugcaacgagaagcacgacgaggaguucugcgacaugcuccgccuguucgacuucaacaagcaggcgaucagccggcugaaguccgaggcccagaugagcauccagcucaucaacaaggccgugaacgcccugaucaacgaccagcugaucaugaagaaccaccuccgcgacaucaugggcauccccuacugcaacuacuccaaguacugguaccugaaccacaccaucaccgggaagaccagccugcccaagugcuggcucguguccaacggcagcuaccugaacgagacgcacuucuccgacgacaucgagcagcaggccgacaacaugaucaccgagaugcugcagaaggaguacauggagcggcagggcaagaccccgcuggggcucgucgaccuguucguguucagcaccuccuucuaccugaucagcaucuuccuccgccuggugaagaucccgugaggacuagucccuguucccagagcccacuuuuuuuucuuuuuuugaaauaaaauagccugucuuucagaucucaaaggcucuuuucagagccaccaaaaaaaaaaaaaaaaaaaaaaaaaaaaaaaaaaaaaaaaaaaaaaaaaaaaaaaaaaaaaaaaaaaaaaaaaaaaaaaaaaaaaaaaaaaaaaaaaaaaa

SEQ ID NO: 41930 - RNA, 1631 nt, Artificial Sequence
  mRNA product Design a-1 (hSL-A100) comprising derived and/or modified sequence from LASV(Togo/2016/7082;Clade VI)__AMR44577__GPCmut13 (opt1)
aggagagucccgcagucggcguccagcggcucugcuuguucgugugugugucguugcaggccuuauucaagcuuaccaugggccagaucaucaccuucuuccaggaggugccccacgucaucgaggaggugaugaacaucgugcugaucgcccucagccugcuggccauccucaagggggucuacaacguggcgaccugcggcaucaucgggcuggugacguuccuguuccucugcggccgcuccugcagccugaucuacaagggguccuacgagcugcagacccucgagcugaacauggagacccugaacaugaccaugccgcucagcugcacgaagaacuccagccaccacuacauccgggucggcaacgagaccggccuggagcugacccucaccaacacguccaucaucaaccacaaguucugcaaccugagcgacgcccacaagcgcaaccuguacgaccacgcccucauguccauccugagcaccuuccaccuguccauccccaacuucaaccaguacgaggccaugagcugcgacuucaacgggggcaagaucuccgugcaguacaaccucagccacgccuacgcgguggacgccgccgagcacugcgggaccgucgccaacggcgugcugcagaccuucaugcggauggcguggggcggguccuacaucgcccuggacagcggccgcgggaacugggacugcaucaugacguccuaccaguaccucaucauccagaacaccaccugggaggaccacugccaguucagccggcccucccccaucggcuaccuggggcugcucagccagcgcacccgggacaucuacaucagccgccggcugcugggcacguucaccuggacccucuccgacagcgagggcaacgagacccccgggggcuacugccugacgcgcuggaugcugaucgaggccgagcucaagugcuucgggaacaccgccguggccaagugcaacgagaagcacgacgaggaguucugcgacaugcugcggcuguucgacuucaacaagcaggcgauccagcgccucaaguccgaggcccagaugagcauccagcugaucaacaaggccgucaacgcccugaucaacgaccagcucaucaugaagaaccaccuccgggacaugaugggcauccccuacugcaacuacuccaaguacugguaccugaaccacaccagcuccgggcgcaccagccugcccaagugcuggcugguguccaacggcagcuaccugaacgagacgcacuucuccgacgacaucgagcagcaggccgacaacaugaucaccgagaugcuccagaaggaguacaucgaccggcagggcaagaccccgcuggggcugguggaccuguucgucuucagcaccuccuucuaccucaucagcaucuuccugcaccugaucaagaucccgugaggacuagucccuguucccagagcccacuuuuuuuucuuuuuuugaaauaaaauagccugucuuucagaucucaaaggcucuuuucagagccaccaaaaaaaaaaaaaaaaaaaaaaaaaaaaaaaaaaaaaaaaaaaaaaaaaaaaaaaaaaaaaaaaaaaaaaaaaaaaaaaaaaaaaaaaaaaaaaaaaaaaa

SEQ ID NO: 41931 - RNA, 1631 nt, Artificial Sequence
  mRNA product Design a-1 (hSL-A100) comprising derived and/or modified sequence from LASV(KAK-428;Clade n.d. (VII))__ANH09740__GPCmut13 (opt1)
aggagagucccgcagucggcguccagcggcucugcuuguucgugugugugucguugcaggccuuauucaagcuuaccaugggccagaucgugaccuucuuccaggaggucccccacgugaucgaggaggugaugaacaucguccugaucgcccucagccugcuggccauccucaaggggcuguacaacuucgcgaccugcggcgugaucgggcugaucacguuccuccugcugugcggccgcuccugcagcgccaccuacaaggggcaguacgagcuccagacccuggagcugaacauggagucccucaacaugaccaugccgcugagcugcacgaagaacaacucccaccacuacauccgggccggcaacaacaccggccuggagcucacccugaccaacacgagcaucaucucccacaaguucugcaaccugagcgacgcccacaagaagaaccucuacgaccacacccugauguccaucaucaccaccuuccaccugagcauccccaacuucaaccaguacgaggccauguccugcgacuucaacgggggcaagaucagcauccaguacaaccucucccacagcuacgcgggggacgccgcccagcacugcggcacgguggccaacgggguccugcagaccuucaugcgcauggcguggggcggcuccuaccuggcccucgacagcgggcggcgcggcugggacugcaucaucuccagcuaccaguaccugaucauccagaacaccaccugggacgaccacugccaguucucccggcccagccccaucggguaccugggcuucgugagccagaagacgcgcgacaucuacaucucccggcgccuccugggcaccuucaccuggacccugagcgacuccgaggggcacgacaugccgggcggguacugccucacgcgguggaugcugaucgaggccgaccugaagugcuucggcaacaccgccguggccaagugcaacgagaagcacgacgaggaguucugcgacauguggcgccucuucgacuucaacaagcaggcgauccagcggcugaaggccgaggcccagaugaacauccagcugaucaacaaggccgucaacgcccucaucaacgaccagcugaugaugaagaaccaccuccgcgacaucauggggauccccuacugcaacuacagcaaguucugguaccugaacaacaccaccacgggccggaccucccugccccgcugcuggcugaucagcaacggcuccuaccucaacgagacccacuucagcgacgacaucgagcagcaggcggacaacaugaucaccgagaugcugcagaaggaguacauggaccggcaggggaagacgccccugggccucguggaccuguucguguucuccaccagcuucuaccugaucaccaucuuccugcaccucgucaagaucccgugaggacuagucccuguucccagagcccacuuuuuuuucuuuuuuugaaauaaaauagccugucuuucagaucucaaaggcucuuuucagagccaccaaaaaaaaaaaaaaaaaaaaaaaaaaaaaaaaaaaaaaaaaaaaaaaaaaaaaaaaaaaaaaaaaaaaaaaaaaaaaaaaaaaaaaaaaaaaaaaaaaaaa

SEQ ID NO: 41932 - RNA, 1631 nt, Artificial Sequence; identical to SEQ ID NO: 41926
  mRNA product Design a-1 (hSL-A100) comprising derived and/or modified sequence from LASV(Pinneo-NIG-1969;Clade I)__AIT17836__GPCmut13 (opt1)

SEQ ID NO: 41933 - RNA, 1631 nt, Artificial Sequence
  mRNA product Design a-1 (hSL-A100) comprising derived and/or modified sequence from LASV(ISTH0009-NIG-2011;Clade II)__AIT17404__GPCmut13 (opt1)
aggagagucccgcagucggcguccagcggcucugcuuguucgugugugugucguugcaggccuuauucaagcuuaccaugggccagaucaucaccuucuuccaggaggugccccacgucaucgaggaggugaugaacaucgugcugaucgcccucagccugcuggccauccucaaggggaucuacaacgucgcgaccugcggccuguucgggcugguguccuuccuccugcugugcggccgcagcugcuccacgaccuacaaggggguguacgagcuccagacccuggagcuggacauggccagccucaacaugaccaugccgcuguccugcacgaagaacaacagccaccacuacaucauggucggcaacgagaccggccuggagcucacccugaccaacacguccaucaucaaccacaaguucugcaaccugagcgacgcccacaagaagaaccucuacgaccacgcccugauguccaucaucagcaccuuccaccuguccauccccaacuucaaccaguacgaggccaugagcugcgacuucaacgggggcaagaucuccgugcaguacaaccucagccacgcguacgccguggacgccgccaaccacugcgggaccaucgcgaacggcguccugcagaccuucaugcggauggccuggggcggguccuacaucgcccuggacagcggcaagggguccugggacugcaucaugacgagcuaccaguaccucaucauccagaacaccaccugggaggaccacugccaguucucccgccccagccccaucggcuaccuggggcugcucagccagcggacccgcgacaucuacaucucccggcgccugcugggcacguucaccuggacccucagcgacuccgagggcaacgagacccccgggggcuacugccugacgcgguggaugcugaucgaggccgagcucaagugcuucgggaacaccgccguggcgaagugcaacgagaagcacgacgaggaguucugcgacaugcugcgccuguucgacuucaacaagcaggccauccggcgccucaagaccgaggcccagaugagcauccagcugaucaacaaggccgugaacgcccugaucaacgaccagcucaucaugaagaaccaccuccgggacaucaugggcaucccguacugcaacuacuccaaguacugguaccugaaccacaccgucacggggaagaccagccugccccgcugcuggcugguguccaacggcagcuaccugaacgagacccacuucuccgacgacaucgagcagcaggcggacaacaugaucaccgagcuccugcagaaggaguacauggaccggcagggcaagacgccccuggggcugguggaccucuucgucuucagcaccuccuucuaccugaucagcaucuuccugcaccucaucaagaucccgugaggacuagucccuguucccagagcccacuuuuuuuucuuuuuuugaaauaaaauagccugucuuucagaucucaaaggcucuuuucagagccaccaaaaaaaaaaaaaaaaaaaaaaaaaaaaaaaaaaaaaaaaaaaaaaaaaaaaaaaaaaaaaaaaaaaaaaaaaaaaaaaaaaaaaaaaaaaaaaaaaaaaa

SEQ ID NO: 41934 - RNA, 1631 nt, Artificial Sequence
  mRNA product Design a-1 (hSL-A100) comprising derived and/or modified sequence from LASV(ISTH2010-NIG-2012;Clade II)__AIT17482__GPCmut13 (opt1)
aggagagucccgcagucggcguccagcggcucugcuuguucgugugugugucguugcaggccuuauucaagcuuaccaugggccagaucaucaccuucuuccaggaggugccccacgucaucgaggaggugaugaacaucgugcugaucgcccucagccugcuggccauccucaaggggaucuacaacgucgcgaccugcggccuguucgggcugguguccuuccuccugcugugcggccgcagcugcuccacgaccuacaaggggguguacgagcuccagacccuggagcuggacauggccagccucaacaugaccaugccgcuguccugcacgaagaacaacagccaccacuacaucauggucggcaacgagaccggccuggagcucacccugaccaacacguccaucaucaaccacaaguucugcaaccugagcgacgcccacaagaagaaccucuacgaccacgcccugauguccaucaucagcaccuuccaccuguccauccccaacuucaaccaguacgaggccaugagcugcgacuucaacgggggcaagaucuccgugcaguacaaccucagccacgcguacgccguggacgccgccaaccacugcgggaccaucgcgaacggcguccugcagaccuucaugcggauggccuggggcggguccuacaucgcccuggacagcggcaagggguccugggacugcaucaugacgagcuaccaguaccucaucauccagaacaucaccugggaggaccacugccaguucucccgccccagccccaucggcuaccuggggcugcucagccagcggacccgcgacaucuacaucucccggcgccugcugggcaccuucacguggacccucagcgacuccgagggcaacgagacccccgggggcuacugccugacccgguggaugcugaucgaggccgagcucaagugcuucgggaacacggccguggcgaagugcaacgagaagcacgacgaggaguucugcgacaugcugcgccuguucgacuucaacaagcaggccauccggcgccucaagaccgaggcccagaugagcauccagcugaucaacaaggccgugaacgcccugaucaacgaccagcucaucaugaagaaccaccuccgggacaucaugggcauccccuacugcaacuacuccaaguacugguaccugaaccacaccgucaccgggaagacgagccugccccgcugcuggcugguguccaacggcagcuaccugaacgagacccacuucuccgacgacaucgagcagcaggcggacaacaugaucaccgagcuccugcagaaggaguacaucgaccggcagggcaagaccccgcuggggcugguggaccucuucgucuucagcacguccuucuaccugaucagcaucuuccugcaccucgugaagaucccgugaggacuagucccuguucccagagcccacuuuuuuuucuuuuuuugaaauaaaauagccugucuuucagaucucaaaggcucuuuucagagccaccaaaaaaaaaaaaaaaaaaaaaaaaaaaaaaaaaaaaaaaaaaaaaaaaaaaaaaaaaaaaaaaaaaaaaaaaaaaaaaaaaaaaaaaaaaaaaaaaaaaaa

SEQ ID NO: 41935 - RNA, 1631 nt, Artificial Sequence
  mRNA product Design a-1 (hSL-A100) comprising derived and/or modified sequence from LASV(Lassa virus/H.sapiens-wt/NGA/2015/ISTH_0543;Clade II)__AVO03639__GPCmut13 (opt1)
aggagagucccgcagucggcguccagcggcucugcuuguucgugugugugucguugcaggccuuauucaagcuuaccaugggccagaucaucaccuucuuccaggaggugccccacgucaucgaggaggugaugaacaucgugcugaucgcccucagccugcuggccauccucaaggggaucuacaacgucgcgaccugcggccuguucgggcugguguccuuccuccugcugugcggccgcagcugcuccacgaccuacaaggggguguacgagcuccagacccuggagcuggacauggccaaccucaacaugaccaugccgcugagcugcacgaagaacaacucccaccacuacaucauggucggcaacgagaccggccuggagcucacccugaccaacacgagcaucaucaaccacaaguucugcaaccuguccgacgcccacaagaagaaccucuacgaccacgcccugaugagcaucaucuccaccuuccaccugagcauccccaacuucaaccaguacgaggccauguccugcgacuucaacgggggcaagaucagcgugcaguacaaccucucccacaccuacgcgguggacgccgccaaccacugcgggaccaucgccaacggcguccugcagacguucaugcggauggcguggggcgggagcuacaucgcccuggacuccggcaaggggagcugggacugcaucaugaccuccuaccaguaccucgugauccagaacaccaccugggaggaccacugccaguucagccgccccucccccaucggcuaccuggggcugcucagccagcggacgcgcgacaucuacaucagccggcgccugcugggcaccuucaccuggacccucuccgacagcgagggcaacgagacgcccgggggcuacugccugacccgguggaugcugaucgaggccgagcucaagugcuucgggaacaccgccguggccaagugcaacgagaagcacgacgaggaguucugcgacaugcugcgccuguucgacuucaacaagcaggcgauccggcgccucaagaccgaggcccagauguccauccagcugaucaacaaggccgucaacgcccugaucaacgaccagcucaucaugaagaaccaccuccgggacaucaugggcauccccuacugcaacuacagcaaguacugguaccugaaccacacggugaccgggaagaccucccugccccgcugcuggcuggugagcaacggcuccuaccugaacgagacccacuucagcgacgacaucgagcagcaggccgacaacaugaucacggagcuccugcagaaggaguacaucgaccggcagggcaagaccccgcuggggcuggucgaccucuucguguucuccaccagcuucuaccugaucuccaucuuccugcaccucgugaagaucccgugaggacuagucccuguucccagagcccacuuuuuuuucuuuuuuugaaauaaaauagccugucuuucagaucucaaaggcucuuuucagagccaccaaaaaaaaaaaaaaaaaaaaaaaaaaaaaaaaaaaaaaaaaaaaaaaaaaaaaaaaaaaaaaaaaaaaaaaaaaaaaaaaaaaaaaaaaaaaaaaaaaaaa

SEQ ID NO: 41936 - RNA, 1631 nt, Artificial Sequence
  mRNA product Design a-1 (hSL-A100) comprising derived and/or modified sequence from LASV(Lassa virus/H.sapiens-wt/NGA/2016/ISTH_0009;Clade II)__AVO03571__GPCmut13 (opt1)
aggagagucccgcagucggcguccagcggcucugcuuguucgugugugugucguugcaggccuuauucaagcuuaccaugggccagaucaucaccuucuuccaggaggugccccacgucaucgaggaggugaugaacaucgugcugaucgcccucagccugcuggccauccucaaggggaucuacaacgucgcgaccugcggccugcuggggcucguguccuuccugcugcucugcggccgcagcugcuccacgaccuacaaggggguguacgagcugcagacccuggagcucgacauggccagccugaacaugaccaugccgcuguccugcacgaagaacaacagccaccacuacaucauggucggcaacgagaccggccucgagcugacccugaccaacacguccaucaucaaccacaaguucugcaaccucagcgacgcccacaagaagaaccuguacgaccacgcccugauguccaucaucagcaccuuccaccucuccauccccaacuucaaccaguacgaggccaugagcugcgacuucaacgggggccggaucuccgugcaguacaaccugagccacuccuacgcgguggacgccgccaaccacugcgggaccaucgccaacggcguccugcagaccuucaugcgcauggcguggggcgggagcuacaucgcccucgacuccggcaaggggagcugggacugcaucaugacguccuaccaguaccugaucauccagaacaccaccugggaggaccacugccaguucagccggcccagccccaucggcuaccuggggcuccugucccagcgcacccgggacaucuacaucagccgccggcugcucggcacguucaccuggacccuguccgacagcgagggcaacgagacccccgggggcuacugccugacgcgcuggaugcucaucgaggccgagcugaagugcuucgggaacaccgccguggccaagugcaacgagaagcacgacgaggaguucugcgacaugcugcggcuguucgacuucaacaagcaggcgauccgccggcugaagaccgaggcccagauguccauccagcugaucaacaaggccgugaacgcccucaucaacgaccagcugaucaugaagaaccaccuccgcgacaucaugggcaucccguacugcaacuacagcaaguacugguaccucaaccacaccgucacggggaagaccucccugccccggugcuggcuggugagcaacggcuccuaccucaacgagacccacuucagcgacgacaucgagcagcaggccgacaacaugaucaccgagcugcugcagaaggaguacaucgaccgccagggcaagacgccccuggggcucguggaccuguucgucuucuccaccagcuucuaccugaucuccaucuuccuccaccuggugaagaucccgugaggacuagucccuguucccagagcccacuuuuuuuucuuuuuuugaaauaaaauagccugucuuucagaucucaaaggcucuuuucagagccaccaaaaaaaaaaaaaaaaaaaaaaaaaaaaaaaaaaaaaaaaaaaaaaaaaaaaaaaaaaaaaaaaaaaaaaaaaaaaaaaaaaaaaaaaaaaaaaaaaaaaa

SEQ ID NO: 41937 - RNA, 1631 nt, Artificial Sequence
  mRNA product Design a-1 (hSL-A100) comprising derived and/or modified sequence from LASV(Lassa virus/H.sapiens-wt/NGA/2016/ISTH_0017;Clade II)__AVO03567__GPCmut13 (opt1)
aggagagucccgcagucggcguccagcggcucugcuuguucgugugugugucguugcaggccuuauucaagcuuaccaugggccagaucaucaccuucuuccaggaggugccccacgucaucgaggaggugaugaacaucgugcugaucgcccucagccugcuggccauccucaaggggaucuacaacgucgcgaccugcggccuguucgggcugguguccuuccuccugcugugcggccgcagcugcuccacgaccuacaaggggguguacgagcuccagacccuggagcuggacauggccagccucaacaugaccaugccgcuguccugcacgaagaacaacagccaccacuacaucauggucggcaacgagaccggccuggagcucacccugaccaacacguccaucaucaaccacaaguucugcaaccugagcgacgcccacaagaagaaccucuacgaccacgcccugauguccaucaucagcaccuuccaccuguccauccccaacuucaaccaguacgaggccaugagcugcgacuucaacgggggcaagaucuccgugcaguacaaccucagccacaccuacgcgaucgacgccgccaaccacugcgggaccaucgccaacggcgugcugcagacguucaugcggauggcguggggcggguccuacaucgcccuggacagcggcaagggguccugggacugcaucaugaccagcuaccaguaccucaucauccagaacaccaccugggaggaccacugccaguucucccgccccagccccaucggcuaccuggggcugcucagccagcggacgcgcgacaucuacaucucccggcgccugcugggcaccuucaccuggacccucagcgacuccgagggcaacgagacgcccgggggcuacugccugacccgguggaugcugaucgaggccgagcucaagugcuucgggaacaccgccgucgccaagugcaacgagaagcacgacgaggaguucugcgacaugcugcgccuguucgacuucaacaagcaggcgauccggcgccucaagaccgaggcccagaugagcauccagcugaucaacaaggccgugaacgcccugaucaacgaccagcucaucaugaagaaccaccuccgggacaucaugggcauccccuacugcaacuacuccaaguacugguaccugaaccacacggugaccgggaagaccagccugccccgcugcuggcuggucuccaacggcagcuaccugaacgagacccacuucuccgacgacaucgagcagcaggccgacaacaugaucacggagcuccugcagaaggaguacauggaccggcagggcaagaccccgcuggggcugguggaccucuucguguucagcaccuccuucuaccugaucagcaucuuccugcaccucguccgcaucccgugaggacuagucccuguucccagagcccacuuuuuuuucuuuuuuugaaauaaaauagccugucuuucagaucucaaaggcucuuuucagagccaccaaaaaaaaaaaaaaaaaaaaaaaaaaaaaaaaaaaaaaaaaaaaaaaaaaaaaaaaaaaaaaaaaaaaaaaaaaaaaaaaaaaaaaaaaaaaaaaaaaaaa

SEQ ID NO: 41938 - RNA, 1631 nt, Artificial Sequence
  mRNA product Design a-1 (hSL-A100) comprising derived and/or modified sequence from LASV(Lassa virus/H.sapiens-wt/NGA/2018/ISTH_0959;Clade II)__AVV65099__GPCmut13 (opt1)
aggagagucccgcagucggcguccagcggcucugcuuguucgugugugugucguugcaggccuuauucaagcuuaccaugggccagaucaucaccuucuuccaggaggugccccacgucaucgaggaggugaugaacaucgugcugaucgcccucagccugcuggccauccucaaggggaucuacaacgucgugaccugcggccuguucgggcugguguccuuccuccugcugugcggccgcagcugcuccacgaccuacaagggggucuacgagcuccagacccuggagcuggacauggcgagccucaacaugaccaugccgcuguccugcacgaagaacaacagccaccacuacaucauggugggcaacgagaccggccuggagcucacccugaccaacacguccaucaucaaccacaaguucugcaaccugagcgacgcccacaagaagaaccucuacgaccacgcccugauguccaucaucagcaccuuccaccuguccauccccaacuucaaccaguacgaggccaugagcugcgacuucaacgggggcaagaucuccgugcaguacaaccucagccacgccuacgcgaucgacgccgccaaccacugcgggaccaucgccaacggcguccugcagaccuucaugcggauggcguggggcggguccuacaucgcccuggacagcggcaagggguccugggacugcaucaugacgagcuaccaguaccucaucauccagaacaccaccugggaggaccacugccaguucucccgccccagccccaucggcuaccuggggcugcucagccagcggacccgcgacaucuacaucucccggcgccugcugggcacguucaccuggacccucagcgacuccgagggcaacgagacccccgggggcuacugccugacgcgguggaugcugaucgaggccgagcucaagugcuucgggaacaccgccguggccaagugcaacgagaagcacgacgaggaguucugcgacaugcugcgccuguucgacuucaacaagcaggcgauccggcgccucaagaccgaggcccagaugagcauccagcugaucaacaaggccgugaacgcccugaucaacgaccagcucaucaugaagaaccaccuccgggacaucaugggcaucccguacugcaacuacuccaaguacugguaccugaaccacaccgucacggggaagaccagccugccccgcugcuggcugguguccaacggcagcuaccugaacgagacccacuucuccgacgacaucgagcagcaggccgacaacaugaucaccgagcuccugcagaaggaguacaucgaccggcagggcaagacgccccuggggcugguggaccucuucgucuucagcaccuccuucuaccugaucagcaucuuccugcaccucgugaagaucccgugaggacuagucccuguucccagagcccacuuuuuuuucuuuuuuugaaauaaaauagccugucuuucagaucucaaaggcucuuuucagagccaccaaaaaaaaaaaaaaaaaaaaaaaaaaaaaaaaaaaaaaaaaaaaaaaaaaaaaaaaaaaaaaaaaaaaaaaaaaaaaaaaaaaaaaaaaaaaaaaaaaaaa

SEQ ID NO: 41939 - RNA, 1631 nt, Artificial Sequence
  mRNA product Design a-1 (hSL-A100) comprising derived and/or modified sequence from LASV(LASV003-NIG-2008;Clade II)__AIT17580__GPCmut13 (opt1)
aggagagucccgcagucggcguccagcggcucugcuuguucgugugugugucguugcaggccuuauucaagcuuaccaugggccagaucaucaccuucuuccaggaggugccccacgucaucgaggaggugaugaacaucgugcugaucgcccucagccugcuggccauccucaaggggaucuacaacgucgcgaccugcggccuguucgggcugguguccuuccuccugcugugcggccgcagcugcuccacgaccuacaaggggguguacgagcuccagacccuggagcuggacauggccagccucaacaugaccaugccgcuguccugcacgaagaacaacagccaccacuacaucauggucggcaacgagaccggccuggagcucacccugaccaacacguccaucaucaaccacaaguucugcaaccugagcgacgcccacaagaagaaccucuacgaccacgcccugauguccaucaucagcaccuuccaccuguccauccccaacuucaaccaguacgaggccaugagcugcgacuucaacgggggcaagaucuccgugcaguacaaccucagccacaccuacgcgguggacgccgccaaccacugcgggaccaucgccaacggcguccugcagacguucaugcggauggcguggggcggguccuacaucgcccuggacagcggcaagggguccugggacugcaucaugaccagcuaccaguaccucaucauccagaacaccaccugggaggaccacugccaguucucccgccccagccccaucggcuaccuggggcugcucagccagcggacgcgcgacaucuacaucucccggcgccugcugggcaccuucaccuggacccucagcgacuccgagagcaacgagacgccgggcggguacugccugacccgguggaugcugaucgaggccgagcucaagugcuucggcaacaccgccguggccaagugcaacgagaagcacgacgaggaguucugcgacaugcugcgccuguucgacuucaacaagcaggcgauccggcgccucaaggccgaggcccagauguccauccagcugaucaacaaggccgugaacgcccugaucaacgaccagcucaucaugaagaaccaccuccgggacaucauggggauccccuacugcaacuacagcaaguacugguaccugaaccacaccgucacgggccgcaccucccugccccggugcuggcuggugagcaacggguccuaccugaacgagacccacuucagcgacgacaucgagcagcaggcggacaacaugaucaccgagcuccugcagaaggaguacauggaccgccagggcaagacgccccugggccugguggaccucuucgucuucuccaccagcuucuaccugaucuccaucuuccugcaccucgugaagaucccgugaggacuagucccuguucccagagcccacuuuuuuuucuuuuuuugaaauaaaauagccugucuuucagaucucaaaggcucuuuucagagccaccaaaaaaaaaaaaaaaaaaaaaaaaaaaaaaaaaaaaaaaaaaaaaaaaaaaaaaaaaaaaaaaaaaaaaaaaaaaaaaaaaaaaaaaaaaaaaaaaaaaaa

SEQ ID NO: 41940 - RNA, 1631 nt, Artificial Sequence
  mRNA product Design a-1 (hSL-A100) comprising derived and/or modified sequence from LASV(LASV035-NIG-2009;Clade II)__AIT17588__GPCmut13 (opt1)
aggagagucccgcagucggcguccagcggcucugcuuguucgugugugugucguugcaggccuuauucaagcuuaccaugggccagaucaucaccuucuuccaggaggugccccacgucaucgaggaggugaugaacaucgugcugaucgcccucagccugcuggccauccucaaggggaucuacaacgucgcgaccugcggccuguucgggcugguguccuuccuccugcugugcggccgcagcugcuccacgaccuacaaggggguguacgagcuccagacccuggagcuggacauggccagccucaacaugaccaugccgcuguccugcacgaagaacaacagccaccacuacaucauggucggcaacgagaccggccuggagcucacccugaccaacacguccaucaucaaccacaaguucugcaaccugagcgacgcccacaagaagaaccucuacgaccacgcccugauguccaucaucagcaccuuccaccuguccauccccaacuucaaccaguacgaggccaugagcugcgacuucaacgggggcaagaucuccgugcaguacaaccucagccacgcguacgccguggacgccgccaaccacugcgggaccaucgcgaacggcguccugcagaccuucaugcggauggccuggggcggguccuacaucgcccuggacagcggcaagggguccugggacugcaucaugacgagcuaccaguaccucaucauccagaacaccaccugggaggaccacugccaguucucccgccccagccccaucggcuaccuggggcugcucagccagcggacccgcgacaucuacaucucccggcgccugcugggcacguucaccuggacccucagcgacuccgagggcaacgagacccccgggggcuacugccugacgcgguggaugcugaucgaggccgagcucaagugcuucgggaacaccgccguggcgaagugcaacgagaagcacgacgaggaguucugcgacaugcugcgccuguucgacuucaacaagcaggccauccggcgccucaaggccgaggcccagaugagcauccagcugaucaacaaggccgugaacgcgcugaucaacgaccagcucaucaugaagaaccaccuccgggacaucaugggcauccccuacugcaacuacuccaaguacugguaccugaaccacaccgucaccgggaagacgagccugccccgcugcuggcugguguccaacggcagcuaccugaacgagacccacuucuccgacgacaucgagcagcaggccgacaacaugaucaccgagcuccugcagaaggaguacaucgaccggcagggcaagaccccgcuggggcugguggaccucuucgucuucagcacguccuucuaccugaucagcaucuuccugcaccucgugaagaucccgugaggacuagucccuguucccagagcccacuuuuuuuucuuuuuuugaaauaaaauagccugucuuucagaucucaaaggcucuuuucagagccaccaaaaaaaaaaaaaaaaaaaaaaaaaaaaaaaaaaaaaaaaaaaaaaaaaaaaaaaaaaaaaaaaaaaaaaaaaaaaaaaaaaaaaaaaaaaaaaaaaaaaa

SEQ ID NO: 41941 - RNA, 1631 nt, Artificial Sequence
  mRNA product Design a-1 (hSL-A100) comprising derived and/or modified sequence from LASV(LASV1000-NIG-2009;Clade II)__AIT17782__GPCmut13 (opt1)
aggagagucccgcagucggcguccagcggcucugcuuguucgugugugugucguugcaggccuuauucaagcuuaccaugggccagaucaucaccuucuuccaggaggugccccacgucaucgaggaggugaugaacaucgugcugaucgcccucagccugcuggccauccucaaggggaucuacaacgucgcgaccugcggccuguucgggcugguguccuuccuccugcugugcggccgcagcugcuccacgaccuacaaggggguguacgagcuccagacccuggagcuggacauggccagccucaacaugaccaugccgcuguccugcacgaagaacaacagccaccacuacaucauggucggcaacgagaccggccuggagcucacccugaccaacacguccaucaucaaccacaaguucugcaaccugagcgacgcccacaagaagaaccucuacgaccacgcccugauguccaucaucagcaccuuccaccuguccauccccaacuucaaccaguacgaggccaugagcugcgacuucaacgggggcaagaucuccgugcaguacaaccucagccacaccuacgcgguggacgccgccaaccacugcgggaccaucgccaacggcguccugcagacguucaugcggauggcguggggcggguccuacaucgcccuggacagcggcaagggguccugggacugcaucaugaccagcuaccaguaccucaucauccagaacaccaccugggaggaccacugccaguucucccgccccagccccaucggcuaccuggggcugcucagccagcggacgcgcgacaucuacaucucccggcgccugcugggcaccuucaccuggacccucagcgacuccgagggcaacgagacgcccgggggcuacugccugacccgguggaugcugaucgaggccgagcucaagugcuucgggaacaccgccguggccaagugcaacgagaagcacgacgaggaguucugcgacaugcugcgccuguucgacuucaacaagcaggcgaucaagcggcucaagaccgaggcccagaugagcauccagcugaucaacaaggccgugaacgcccugaucaacgaccagcucaucaugaagaaccaccuccgcgacaucaugggcauccccuacugcaacuacuccaaguacugguaccugaaccacacggucaccgggaagaccagccugccccggugcuggcugguguccaacggcagcuaccugaacgagacccacuucuccgacgacaucgagcagcaggccgacaacaugaucacggagcuccugcagaaggaguacaucgaccgccagggcaagaccccgcuggggcugguggaccucuucgucuucagcaccuccuucuaccugaucagcaucuuccugcaccucgugaagaucccgugaggacuagucccuguucccagagcccacuuuuuuuucuuuuuuugaaauaaaauagccugucuuucagaucucaaaggcucuuuucagagccaccaaaaaaaaaaaaaaaaaaaaaaaaaaaaaaaaaaaaaaaaaaaaaaaaaaaaaaaaaaaaaaaaaaaaaaaaaaaaaaaaaaaaaaaaaaaaaaaaaaaaa

SEQ ID NO: 41942 - RNA, 1631 nt, Artificial Sequence
  mRNA product Design a-1 (hSL-A100) comprising derived and/or modified sequence from LASV(LASV221-NIG-2010;Clade II)__AIT17624__GPCmut13 (opt1)
aggagagucccgcagucggcguccagcggcucugcuuguucgugugugugucguugcaggccuuauucaagcuuaccaugggccagaucaucaccuucuuccaggaggugccccacgucaucgaggaggugaugaacaucgugcugaucgcccucagccugcuggccauccucaaggggaucuacaacgucgcgaccugcggccuguucgggcugguguccuuccuccugcugugcggccgcagcugcuccacgaccuacaaggggguguacgagcuccagacccuggagcuggacauggccagccucaacaugaccaugccgcuguccugcacgaagaacaacagccaccacuacaucauggucggcaacgagaccggccuggagcucacccugaccaacacguccaucaucaaccacaaguucugcaaccugagcgacgcccacaagaagaaccucuacgaccacgcccugauguccaucaucagcaccuuccaccuguccauccccaacuucaaccaguacgaggccaugagcugcgacuucaacgggggcaagaucuccgugcaguacaaccucagccacaccuacgcgaucgacgccgccaaccacugcgggaccaucgccaacggcgugcugcagacguucaugcggauggcguggggcggguccuacaucgcccuggacagcggcaagggguccugggacugcaucaugaccagcuaccaguaccucaucauccagaacaccaccugggaggaccacugccaguucucccgccccagccccaucggcuaccuggggcugcucagccagcggacgcgcgacaucuacaucucccggcgccugcugggcaccuucaccuggacccucagcgacuccgagggcaacgagacgcccgggggcuacugccugacccgguggaugcugaucgaggccgagcucaagugcuucgggaacaccgccgucgccaagugcaacgagaagcacgacgaggaguucugcgacaugcugcgccuguucgacuucaacaagcaggcgauccggcgccucaagaccgaggcccagaugagcauccagcugaucaacaaggccgugaacgcccugaucaacgaccagcucaucaugaagaaccaccuccgggacaucaugggcauccccuacugcaacuacuccaaguacugguaccugaaccacacggugaccgggaagaccagccugccccgcugcuggcuggucuccaacggcagcuaccugaacgagacccacuucuccgacgacaucgagcagcaggccgacaacaugaucacggagaugcuccagaaggaguacauggaccggcagggcaagaccccgcuggggcugguggaccuguucguguucagcaccuccuucuaccucaucagcaucuuccugcaccuggucaagaucccgugaggacuagucccuguucccagagcccacuuuuuuuucuuuuuuugaaauaaaauagccugucuuucagaucucaaaggcucuuuucagagccaccaaaaaaaaaaaaaaaaaaaaaaaaaaaaaaaaaaaaaaaaaaaaaaaaaaaaaaaaaaaaaaaaaaaaaaaaaaaaaaaaaaaaaaaaaaaaaaaaaaaaa

SEQ ID NO: 41943 - RNA, 1631 nt, Artificial Sequence
  mRNA product Design a-1 (hSL-A100) comprising derived and/or modified sequence from LASV(LASV237-NIG-2010;Clade II)__AIT17638__GPCmut13 (opt1)
aggagagucccgcagucggcguccagcggcucugcuuguucgugugugugucguugcaggccuuauucaagcuuaccaugggccagaucaucaccuucuuccaggaggugccccacgucaucgaggaggugaugaacaucgugcugaucgcccucagccugcuggccauccucaaggggaucuacaacgucgcgaccugcggccuguucgggcugguguccuuccuccugcugugcggccgcagcugcuccacgaccuacaaggggguguacgagcuccagacccuggagcuggacauggccagccucaacaugaccaugccgcuguccugcacgaagaacaacagccaccacuacaucauggucggcaacgagaccggccuggagcucacccugaccaacacguccaucaucaaccacaaguucugcaaccugagcgacgcccacaagaaggaccucuacgaccacgcccugauguccaucaucagcaccuuccaccuguccauccccaacuucaaccaguacgaggccaugagcugcgacuucaacgggggcaagaucuccgugcaguacaaccucagccacaccuacgcgguggacgccgccaaccacugcgggaccaucgccaacggcguccugcagacguucaugcggauggcguggggcggguccuacaucgcccuggacagcggcaagggguccugggacugcaucaugaccagcuaccaguaccucaucauccagaacaccaccugggaggaccacugccaguucucccgccccagccccaucggcuaccuggggcugcucagccagcggacgcgcgacaucuacaucucccggcgccugcugggcaccuucaccuggacccucagcgacuccgagggcaacgagacgcccgggggcuacugccugacccgguggaugcugaucgaggccgagcucaagugcuucgggaacaccgccguggccaagugcaacgagaagcacgacgaggaguucugcgacaugcugcgccuguucgacuucaacaagcaggcgauccggcgccucaagaccgaggcccagaugagcauccagcugaucaacaaggccgugaacgcccugaucaacgaccagcucaucaugaagaaccaccuccgggacaucaugggcauccccuacugcaacuacuccaaguacugguaccugaaccacacggucaccgggaagaccagccugccccgcugcuggcugguguccaacggcagcuaccugaacgagacccacuucuccgacgacaucgagcagcaggccgacaacaugaucacggagcuccugcagaaggaguacauggaccggcagggcaagaccccgcuggggcugguggaccucuucgucuucagcaccuccuucuaccugaucagcaucuuccugcaccucaucaagaucccgugaggacuagucccuguucccagagcccacuuuuuuuucuuuuuuugaaauaaaauagccugucuuucagaucucaaaggcucuuuucagagccaccaaaaaaaaaaaaaaaaaaaaaaaaaaaaaaaaaaaaaaaaaaaaaaaaaaaaaaaaaaaaaaaaaaaaaaaaaaaaaaaaaaaaaaaaaaaaaaaaaaaaa

SEQ ID NO: 41944 - RNA, 1631 nt, Artificial Sequence
  mRNA product Design a-1 (hSL-A100) comprising derived and/or modified sequence from LASV(LASV253-NIG-2011;Clade II)__AIT17670__GPCmut13 (opt1)
aggagagucccgcagucggcguccagcggcucugcuuguucgugugugugucguugcaggccuuauucaagcuuaccaugggccagaucaucaccuucuuccaggaggugccccacgucaucgaggaggugaugaacaucgugcugaucgcccucagccugcuggccauccucaaggggaucuacaacgucgcgaccugcggccuguucgggcugguguccuuccuccugcugugcggccgcagcugcuccacgaccuacaaggggguguacgagcuccagacccuggagcuggacauggccagccucaacaugaccaugccgcuguccugcacgaagaacaacagccaccacuacaucauggucggcaacgagaccggccuggagcucacccugaccaacacguccaucaucaaccacaaguucugcaaccugagcgacgcccacaagaagaaccucuacgaccacgcccugauguccaucaucagcaccuuccaccuguccauccccaacuucaaccaguacgaggccaugagcugcgacuucaacgggggcaagaucuccgugcaguacaaccucagccacaccuacgcgguggacgccgccaaccacugcgggaccaucgccaacggcguccugcagacguucaugcggauggcguggggcggguccuacaucgcccuggacagcggcaagggguccugggacugcaucaugaccagcuaccaguaccucaucauccagaacaccaccugggaggaccacugccaguucucccgccccagccccaucggcuaccuggggcugcucagccagcggacgcgcgacaucuacaucucccggcgccugcugggcaccuucaccuggacccucagcgacuccgagggcaacgagacgcccgggggcuacugccugacccgguggaugcugaucgaggccgagcucaagugcuucgggaacaccgccguggccaagugcaacgagaagcacgacgaggaguucugcgacaugcugcgccuguucgacuucaacaagcaggcgauccggcgccucaaggccgaggcccagaugagcauccagcugaucaacaaggccgugaacgcccugaucaacgaccagcucaucaugaagaaccaccuccgggacaucaugggcaucccguacugcaacuacuccaaguacugguaccugaaccacaccgucacggggcgcaccagccugccccggugcuggcugguguccaacggcagcuaccugaacgagacccacuucuccgacgacaucgagcagcaggcggacaacaugaucaccgagcuccugcagaaggaguacaucgaccgccagggcaagacgccccuggggcugguggaccucuucgucuucagcaccuccuucuaccugaucagcaucuuccugcaccucgugaagaucccgugaggacuagucccuguucccagagcccacuuuuuuuucuuuuuuugaaauaaaauagccugucuuucagaucucaaaggcucuuuucagagccaccaaaaaaaaaaaaaaaaaaaaaaaaaaaaaaaaaaaaaaaaaaaaaaaaaaaaaaaaaaaaaaaaaaaaaaaaaaaaaaaaaaaaaaaaaaaaaaaaaaaaa

SEQ ID NO: 41945 - RNA, 1631 nt, Artificial Sequence
  mRNA product Design a-1 (hSL-A100) comprising derived and/or modified sequence from LASV(LASV254-NIG-2011;Clade II)__AIT17674__GPCmut13 (opt1)
aggagagucccgcagucggcguccagcggcucugcuuguucgugugugugucguugcaggccuuauucaagcuuaccaugggccagaucaucaccuucuuccaggaggugccccacgucaucgaggaggugaugaacaucgugcugaucgcccucagccugcuggccauccucaaggggaucuacaacgucgcgaccugcggccuguucgggcugguguccuuccuccugcugugcggccgcagcugcuccacgaccuacaaggggguguacgagcuccagacccuggagcuggacaugaccaaccucaacaugacgaugccgcugagcugcaccaagaacaacucccaccacuacaucauggucggcaacgagaccggccuggagcucacccugacgaacaccagcaucaucaaccacaaguucugcaaccuguccgacgcccacaagaagaaccucuacaaccacgcccugaugagcaucaucuccaccuuccaccugagcauccccaacuucaaccaguacgaggccauguccugcgacuucaacgggggcaagaucagcgugcaguacaaccucucccacagcuacgccguggacgcggccaaccacugcgggaccaucgccaacggcguccugcagacguucaugcggauggccuggggcggguccuacaucgcgcuggacagcggcaaggggaacugggacugcaucaugaccuccuaccaguaccucaucauccagaacaccaccugggaggaccacugccaguucagccgccccucccccaucggcuaccuggggcugcucagccagcggacgcgcgacaucuacaucagccggcgccugcugggcaccuucaccuggacccucuccgacagcgagggcaacgagacgcccgggggcuacugccugacccgguggaugcugaucgaggccgagcucaagugcuucgggaacaccgccguggccaagugcaacgagaagcacgacgaggaguucugcgacaugcugcgccuguucgacuucaacaagcaggccauccggcgccucaagaccgaggcgcaggccaacauccagcugaucaacaaggccgugaacgcccugaucaacgaccagcucaucaugaagaaccaccuccgggacaucaugggcauccccuacugcaacuacuccaaguacugguaccugaaccacacggucaccgggaagaccagccugccccgcugcuggcugguguccaacggcagcuaccugaacgagacccacuucuccgacgacaucgagcagcaggccgacaacaugaucacggagcuccugcagaaggaguacauggaccggcagggcaagaccccgcuggggcugguggaccucuucgucuucagcaccuccuucuaccugaucagcaucuuccugcaccucgugaagaucccgugaggacuagucccuguucccagagcccacuuuuuuuucuuuuuuugaaauaaaauagccugucuuucagaucucaaaggcucuuuucagagccaccaaaaaaaaaaaaaaaaaaaaaaaaaaaaaaaaaaaaaaaaaaaaaaaaaaaaaaaaaaaaaaaaaaaaaaaaaaaaaaaaaaaaaaaaaaaaaaaaaaaaa

SEQ ID NO: 41946 - RNA, 1631 nt, Artificial Sequence
  mRNA product Design a-1 (hSL-A100) comprising derived and/or modified sequence from LASV(Nig08-A19;Clade III)__ADU56618__GPCmut13 (opt1)
aggagagucccgcagucggcguccagcggcucugcuuguucgugugugugucguugcaggccuuauucaagcuuaccaugggccagaucgugaccuucuuccaggaggucccccacgugaucgaggaggugaugaacaucguccugaucgcccucagcauccuggccauccugaaggggcucuacaacaucgcgaccugcggccugaucgggcuggugacguuccuccugcuguccggccgcagcugcuccaugaccuacaaggggguguacgagcuccagacccuggagcugaacaugaacacccucaacaugacgaugccgcugagcugcaccaagaacaacucccaccacuacaucauggucggcaacgagaccggccuggagcucacccugacgaacaccagccugcuccaccacaaguucugcaaccuguccgacgcccacaagaagaaccuguacgaccacacccucaugagcaucaucuccaccuuccaccugagcauccccaacuucaaccaguacgaggccauguccugcgacuucaacgggggcaagaucacggugcaguacaaccugagccacuccuacgccaucgacgccgcgaaccacugcgggaccguggccaacggcguccuccagaccuucaugcggauggccuggggcgggagcuacaucgcccuggacuccggccgcgggaagugggacugcaucaugaccagcuaccaguaccugaucauccagaacacgaccugggaggaccacugccaguucucccggcccagccccaucggcuaccucgggcugcugucccagcgcacccgggacaucuacaucagccgccggcuccugggcaccuucacguggacccugagcgacuccgagggcaacgagacccccgggggcuacugccucacccgcuggaugcugaucgaggcggagcugaagugcuucgggaacacggccguggccaagugcaacgagaagcacgacgaggaguucugcgacaugcuccggcuguucgacuucaacaagcaggccauccgccggcugaaggccgaggcgcagaugagcauccagcucaucaacaaggccgugaacgcccugaucaacgaccagcugaucaugaagaaccaccuccgcgacaucaugggcauccccuacugcaacuacuccaaguacugguaccugaaccacaccagcaccgggcggaccucccugccccgcugcuggcucgucagcaacggcuccuaccugaacgagacgcacuucagcgacgacaucgagcagcaggccgacaacaugaucaccgagaugcugcagaaggaguaccuggaccggcagggcaagaccccgcucgggcugguggaccuguucguguucuccaccagcuucuaccucaucuccaucuuccugcaccuggucaagaucccgugaggacuagucccuguucccagagcccacuuuuuuuucuuuuuuugaaauaaaauagccugucuuucagaucucaaaggcucuuuucagagccaccaaaaaaaaaaaaaaaaaaaaaaaaaaaaaaaaaaaaaaaaaaaaaaaaaaaaaaaaaaaaaaaaaaaaaaaaaaaaaaaaaaaaaaaaaaaaaaaaaaaaa

SEQ ID NO: 41947 - RNA, 1634 nt, Artificial Sequence
  mRNA product Design a-1 (hSL-A100) comprising derived and/or modified sequence from LASV(G1180-SLE-2010;Clade IV)__AIT17168__GPCmut13 (opt1)
aggagagucccgcagucggcguccagcggcucugcuuguucgugugugugucguugcaggccuuauucaagcuuaccaugggccagaucgugaccuucuuccaggaggucccccacgugaucgaggaggugaugaacaucguccugaucgcccucagcauccuggccgugcugaaggggcucuacaacuucgcgaccugcggccugguggggcugcucaccuuccugcugcucugcggccgcuccugcaccgccagccgguacaagggggucuacgagcugcagacccuggagcucaacauggagacccugaacaugacgaugccgcuguccugcaccaagaacaacagccaccacuacaucauggugggcaacgagaccggccucgagcugacccugacgaacaccuccaucaucaaccacaaguucugcaaccucagcgacgcccacaagaagaaccuguacgaccacgcccugauguccaucaucagcaccuuccaccucuccauccccaacuucaaccaguacgaggccaugagcugcgacuucaacgggggcaagaucuccgugcaguacaaccugagccacuccuacgcgggggacgccgccaaccacugcggcaccgucgccaacggggugcugcagacguucaugcgcauggcguggggcggcagcuacaucgcccucgacuccgggcacggcagcugggacugcaucaugaccuccuaccaguaccugaucauccagaacaccaccugggaggaccacugccaguucagccggcccucccccaucggguaccugggccuccugagccagcgcacgcgggacaucuacaucagccgccggcugcucggcaccuucaccuggacccuguccgacagcgaggggaaggacacgccgggcggguacugccugacccgcuggaugcucaucgaggccgagcugaagugcuucggcaacaccgccguggccaagugcaacgagaagcacgacgaggaguucugcgacaugcugcggcuguucgacuucaacaagcaggcgauccagcgccugaaggccgaggcccagauguccauccagcugaucaacaaggccgucaacgcccucaucaacgaccagcugaucaugaagaaccaccuccgggacaucauggggauccccuacugcaacuacagcaaguacugguaccucaaccacaccacgaccggcaagaccucccugcccaagugcuggcuggugagcaacggcuccuaccucaacgagacccacuucagcgacgacaucgagcagcaggcggacaacaugaucacggagaugcugcagaaggaguacauggagcgccaggggaagacgccccugggccugguggaccucuucgucuucuccaccagcuucuaccugaucuccaucuuccugcaccucgugaagaucccgugaggacuagucccuguucccagagcccacuuuuuuuucuuuuuuugaaauaaaauagccugucuuucagaucucaaaggcucuuuucagagccaccaaaaaaaaaaaaaaaaaaaaaaaaaaaaaaaaaaaaaaaaaaaaaaaaaaaaaaaaaaaaaaaaaaaaaaaaaaaaaaaaaaaaaaaaaaaaaaaaaaaaa

SEQ ID NO: 41948 - RNA, 1634 nt, Artificial Sequence
  mRNA product Design a-1 (hSL-A100) comprising derived and/or modified sequence from LASV(G1442-SLE-2011;Clade IV)__AIT17180__GPCmut13 (opt1)
aggagagucccgcagucggcguccagcggcucugcuuguucgugugugugucguugcaggccuuauucaagcuuaccaugggccagaucgugaccuucuuccaggaggucccccacgugaucgaggaggugaugaacaucguccugaucgcccucagcauccuggccgugcugaaggggcucuacaacguggcgaccugcggccugaucgggcuggucacguuccuccugcugugcggccgcuccugcaccaccacccucuacaaggggguguacgagcugcagacgcuggagcucaacauggagacccugaacaugaccaugccgcugagcugcaccaagaacaacucccaccacuacauccgggugggcaacgagacgggccucgagcugacccugaccaacaccagcaucaucaaccacaaguucugcaaccucuccgacgcccacaagaagaaccuguacgaccacgcccugaugagcaucaucuccacguuccaccucagcauccccaacuucaaccaguacgaggccauguccugcgacuucaacgggggcaagaucagcguccaguacaaccugucccacagcuacgccggggacgcggccaaccacugcggcaccguggccaacggggugcugcagaccuucaugcgcauggccuggggcggcuccuacaucgcgcucgacagcgggcggggcaacugggacugcaucaugaccuccuaccaguaccugaucauccagaacacgaccugggacgaccacugccaguucagccgccccucccccaucggguaccugggccuccugagccagcggacccgcgacgucuacaucucccggcgccugcucggcaccuucacguggacccugagcgacagcgaggggaaggacaccccgggcggguacugccugacccgguggaugcucaucgaggccgagcugaagugcuucggcaacacggccguggccaagugcaacgagaagcacgacgaggaguucugcgacaugcugcgccucuucgacuucaacaagcaggccauccagcggcugaaggcggaggcccagauguccauccagcugaucaacaaggccgugaacgcccucaucaacgaccagcugaucaugaagaaccaccuccgcgacaucauggggauccccuacugcaacuacagcaaguacugguaccugaacaacaccgccaccggcaagaccucccugcccaagugcuggcugaucagcaacggcuccuaccucaacgagacgcacuucagcgacgacaucgagcaggaggcggacaacaugaucaccgagaugcugcagaaggaguacauggagcggcaggggaagacgccccugggccuggucgaccucuucguguucuccaccagcuucuaccugaucuccaucuuccugcaccucgugaagaucccgugaggacuagucccuguucccagagcccacuuuuuuuucuuuuuuugaaauaaaauagccugucuuucagaucucaaaggcucuuuucagagccaccaaaaaaaaaaaaaaaaaaaaaaaaaaaaaaaaaaaaaaaaaaaaaaaaaaaaaaaaaaaaaaaaaaaaaaaaaaaaaaaaaaaaaaaaaaaaaaaaaaaaa

SEQ ID NO: 41949 - RNA, 1634 nt, Artificial Sequence
  mRNA product Design a-1 (hSL-A100) comprising derived and/or modified sequence from LASV(G3010-SLE-2013;Clade IV)__AIT17344__GPCmut13 (opt1)
aggagagucccgcagucggcguccagcggcucugcuuguucgugugugugucguugcaggccuuauucaagcuuaccaugggccagaucgugaccuucuuccaggaggucccccacgugaucgaggaggugaugaacaucguccugaucgcccucagcauccuggccgugcugaaggggcucuacaacuucgcgaccugcggccugguggggcuggucacguuccuccugcugugcggccgcuccugcaccaccagccucuacaaggggguguacgagcugcagacccuggagcucaacauggagacgcugaacaugaccaugccgcuguccugcaccaagaacaacagccaccacuacaucauggugggcaacgagaccggccucgagcugacgcugaccaacaccuccaucaucaaccacaaguucugcaaccucagcgacgcccacaagaagaaccuguacaaccacgcccugauguccaucaucagcaccuuccaccucuccauccccaacuucaaccaguacgaggccaugagcugcgacuucaacgggggcaagaucuccguccaguacaaccugagccacuccuacgccggggacgcggccagccacugcggcacgguggccaacggggugcugcagaccuucaugcggauggccuggggcggcuccuacaucgcgcucgacagcggguacggcaagugggacugcaucaugaccuccuaccaguaccugaucauccagaacaccacgugggaggaccacugccaguucagccgccccucccccaucggguaccugggccuccugagccagcggacccgcgacaucuacaucagccggcgccugcucggcaccuucaccuggacgcuguccgacagcgaggggaaggacaccccgggcggguacugccugacccgguggaugcucaucgaggccgagcugaagugcuucggcaacaccgccgucgccaagugcaacgagaagcacgacgaggaguucugcgacaugcugcgccucuucgacuucaacaagcaggccauccagcggcugaagacggaggcgcagauguccauccagcugaucaacaaggccgugaacgcccucaucaacgaccagcugaucaugaagaaccaccuccgcgacaucauggggauccccuacugcaacuacagcaaguacugguaccugaaccacaccaccaccggcaagacgucccugcccaagugcuggcuggugagcaacggcuccuaccucaacgagacccacuucagcgacgacaucgagcagcaggccgacaacaugaucaccgagaugcugcagaaggaguacauggagcggcaggggaagacgccccugggccuggucgaccucuucguguucuccaccagcuucuaccugaucuccaucuuccugcaccucgugaagaucccgugaggacuagucccuguucccagagcccacuuuuuuuucuuuuuuugaaauaaaauagccugucuuucagaucucaaaggcucuuuucagagccaccaaaaaaaaaaaaaaaaaaaaaaaaaaaaaaaaaaaaaaaaaaaaaaaaaaaaaaaaaaaaaaaaaaaaaaaaaaaaaaaaaaaaaaaaaaaaaaaaaaaaa

SEQ ID NO: 41950 - RNA, 1634 nt, Artificial Sequence
  mRNA product Design a-1 (hSL-A100) comprising derived and/or modified sequence from LASV(G502-SLE-2009;Clade IV)__AIT17126__GPCmut13 (opt1)
aggagagucccgcagucggcguccagcggcucugcuuguucgugugugugucguugcaggccuuauucaagcuuaccaugggccagaucgugaccuucuuccaggaggucccccacgugaucgaggaggugaugaacaucguccugaucgcccucagcauccuggccgugcugaaggggcucuacaacuucgcgaccugcggccugguggggcugcucacguuccugcugcucugcggccgcuccugcaccaccgggcuguacaagggcgucuacgagcugcagacccucgagcugaacauggagacgcugaacaugaccaugccgcucagcugcaccaagaacaacucccaccacuacaucauggugggcaacgagaccgggcuggagcugacgcucaccaacaccagcaucaucaaccacaaguucugcaaccuguccgacgcccacaagaagaaccuguacgaccacgcccucaugagcaucaucuccaccuuccaccugagcauccccaacuucaaccaguacgaggccauguccugcgacuucaacggcgggaagaucagcgugcaguacaaccugucccacagcuacgccggcgacgcggccgaccacugcgggacggucgccaacggcgugcuccagaccuucaugcggauggccuggggcggguccuacaucgcgcuggacagcggccgcgggcggugggacugcaucaugaccuccuaccaguaccugaucauccagaacaccacgugggaggaccacugccaguucagccgccccucccccaucggcuaccucggccugcugagccagcggacccgcgacaucuacaucucccggcgccuccuggggaccuucaccuggacgcugagcgacagcgagggcaaggacacccccgggggcuacugccucacccgguggaugcugaucgaggccgagcugaagugcuucgggaacaccgccguggccaagugcaacgagaagcacgacgaggaguucugcgacaugcuccgccuguucgacuucaacaagcaggccauccagcggcugaaggcggaggcccagauguccauccagcucaucaacaaggccgucaacgcccugaucaacgaccagcuggugaugaagaaccaccuccgcgacaucaugggcauccccuacugcaacuacagccgguacugguaccugaaccacacgaccaccggccgcaccucccugcccaagugcuggcucgugagcaacggguccuaccugaacgagacgcacuucagcgacgacaucgagcagcaggccgacaacaugaucaccgagaugcugcagaaggaguacauggagcggcagggcaagaccccgcuggggcucgucgaccuguucguguucuccaccagcuucuaccugaucuccaucuuccuccaccuggugaagaucccgugaggacuagucccuguucccagagcccacuuuuuuuucuuuuuuugaaauaaaauagccugucuuucagaucucaaaggcucuuuucagagccaccaaaaaaaaaaaaaaaaaaaaaaaaaaaaaaaaaaaaaaaaaaaaaaaaaaaaaaaaaaaaaaaaaaaaaaaaaaaaaaaaaaaaaaaaaaaaaaaaaaaaa

SEQ ID NO: 41951 - RNA, 1634 nt, Artificial Sequence
  mRNA product Design a-1 (hSL-A100) comprising derived and/or modified sequence from LASV(G733-SLE-2010;Clade IV)__AIT17154__GPCmut13 (opt1)
aggagagucccgcagucggcguccagcggcucugcuuguucgugugugugucguugcaggccuuauucaagcuuaccaugggccagaucgugaccuucuuccaggaggucccccacgugaucgaggaggugaugaacaucguccugaucgcccucagcauccuggccgugcugaaggggcucuacaacuucgcgaccugcggcaucguggggcuggucuccuuccugcuccugugcggccgcagcugcacgaccucccuguacaaggggguguacgagcuccagacccuggagcugaacauggagacccucaacaugacgaugccgcugagcugcaccaagaacaacucccaccacuacaucauggugggcaacgagaccggccuggagcucacccugacgaacaccagcaucaucaaccacaaguucugcaaccuguccgacgcccacaagaagaaccucuacgaccacgcccugaugagcaucaucuccaccuuccaccugagcauccccaacuucaaccaguacgaggccauguccugcgacuucaacgggggcaagaucagcguccaguacaaccucucccacagcuacgccggggacgcggccaaccacugcggcaccaucgccaacggggugcugcagacguucaugcggauggccuggggcggcuccuacaucgcgcuggacagcgggcgcgaccggugggacugcaucaugaccuccuaccaguaccucaucauccagaacaccaccugggaggaccacugccaguucagccgccccucccccaucggcuaccuggggcugcucagccagcggacgcgcgacaucuacaucagccggcgccugcugggcaccuucaccuggacccucuccgacagcgagggcaaggacacgcccgggggcuacugccugacccgguggaugcugaucgaggccgagcucaagugcuucgggaacaccgccguggccaagugcaacgagaagcacgacgaggaguucugcgacaugcugcgccuguucgacuucaacaagcaggccauccagcggcucaaggcggaggcccagauguccauccagcugaucaacaaggccgucaacgcccugaucaacgaccagcucaucaugaagaaccaccuccgcgacaucaugggcauccccuacugcaacuacagcaaguacugguaccugaaccacaccacgaccgggaagaccucccugcccaagugcuggcuggugagcaacggcuccuaccugaacgagacccacuucagcgacgacaucgagcagcaggccgacaacaugaucacggagaugcuccagaaggaguacauggagcggcagggcaagaccccgcuggggcugguggaccuguucgucuucuccaccagcuucuaccucaucuccaucuuccugcaccuggugaagaucccgugaggacuagucccuguucccagagcccacuuuuuuuucuuuuuuugaaauaaaauagccugucuuucagaucucaaaggcucuuuucagagccaccaaaaaaaaaaaaaaaaaaaaaaaaaaaaaaaaaaaaaaaaaaaaaaaaaaaaaaaaaaaaaaaaaaaaaaaaaaaaaaaaaaaaaaaaaaaaaaaaaaaaa

SEQ ID NO: 41952 - RNA, 1634 nt, Artificial Sequence
  mRNA product Design a-1 (hSL-A100) comprising derived and/or modified sequence from MOPV/LASV reassortant(IGS-1;Clade IV)__AFY05576__GPCmut13 (opt1)
aggagagucccgcagucggcguccagcggcucugcuuguucgugugugugucguugcaggccuuauucaagcuuaccaugggccagaucgugaccuucuuccaggaggucccccacgugaucgaggaggugaugaacaucguccugaucgcccucagcgugcuggccgugcugaaggggcucuacaacuucgcgaccugcggccuggucgggcuggugacguuccuccugcugugcggccgcuccugcaccaccagccucuacaaggggguguacgagcugcagacccuggagcucaacauggagacgcugaacaugaccaugccgcuguccugcaccaagaacaacagccaccacuacaucauggucggcaacgagaccggccucgagcugacgcugaccaacaccuccaucaucaaccacaaguucugcaaccucagcgacgcccacaagaagaaccuguacgaccacgcccugauguccaucaucagcaccuuccaccucuccauccccaacuucaaccaguacgaggccaugagcugcgacuucaacgggggcaagaucuccgugcaguacaaccugagccacuccuacgccggggacgcggccaaccacugcggcacgguggccaacgggguccugcagaccuucaugcggauggccuggggcggcagcuacaucgcgcucgacuccgggcgcggcaacugggacugcaucaugaccagcuaccaguaccugaucauccagaacaccacgugggaggaccacugccaguucucccggcccagccccaucggguaccugggccuccugucccagcgcacccgggacaucuacaucagccgccggcugcucggcaccuucaccuggacgcugagcgacuccgagggggaggacaccccgggcggguacugccugacccgcuggaugcucaucgaggccgagcugaagugcuucggcaacaccgccguggccaagugcaacgagaagcacgacgaggaguucugcgacaugcugcggcuguucgacuucaacaagcaggccauccagcgccugaaggcggaggcccagaugagcauccagcugaucaacaaggccgugaacgcccucaucaacgaccagcugaucaugaagaaccaccuccgggacaucauggggauccccuacugcaacuacuccaaguacugguaccucaaccacacgaccaccggccgcaccagccugcccaagugcuggcuggucuccaacggcagcuaccucaacgagacgcacuucuccgacgacaucgagcagcaggccgacaacaugaucaccgagaugcugcagaaggaguacauggagcggcaggggaagacgccccugggccugguggaccucuucguguucagcaccuccuucuaccugaucagcaucuuccugcaccucgucaagaucccgugaggacuagucccuguucccagagcccacuuuuuuuucuuuuuuugaaauaaaauagccugucuuucagaucucaaaggcucuuuucagagccaccaaaaaaaaaaaaaaaaaaaaaaaaaaaaaaaaaaaaaaaaaaaaaaaaaaaaaaaaaaaaaaaaaaaaaaaaaaaaaaaaaaaaaaaaaaaaaaaaaaaaa

SEQ ID NO: 41953 - RNA, 1634 nt, Artificial Sequence
  mRNA product Design a-1 (hSL-A100) comprising derived and/or modified sequence from LASV(LM765-SLE-2012;Clade IV)__AIT17814__GPCmut13 (opt1)
aggagagucccgcagucggcguccagcggcucugcuuguucgugugugugucguugcaggccuuauucaagcuuaccaugggccagaucgugaccuucuuccaggaggucccccacgugaucgaggaggugaugaacaucguccugaucgcccucagcauccuggccgugcugaaggggcucuacaacuucgcgaccugcggccugguggggcuggucacguuccuccugcugugcggccgcuccugcaccaccagccucuacaaggggguguacgagcugcagacccuggagcucaacauggagacgcugaacaugaccaugccgcuguccugcaccaagaacaacagccaccacuacaucauggugggcaacgagaccggccucgagcugacgcugaccaacaccuccaucaucgaccacaaguucugcaaccucagcgacgcccaccggaagaaccuguacgaccacgcccugauguccaucaucagcaccuuccaccucuccauccccaacuucaaccaguacgaggccaugagcugcgacuucaacgggggcaagaucuccguccaguacaaccugagccacuccuacgccaaggacgcggccgaccacugcgggacgguggccaacggcgugcugcagaccuucaugcgcauggccuggggcgggagcuacaucgcgcucgacuccggccgggggcgcugggacugcaucaugaccagcuaccaguaccugaucauccagaacaccacgugggaggaccacugccaguucucccggcccagccccaucggcuaccuggggcuccugucccagcgcacccgggacaucuacaucagccgccggcugcucggcaccuucaccuggacgcugagcgacuccgagggcaaggacacccccgggggcuacugccugacccgcuggaugcucaucgaggccgagcugaagugcuucgggaacaccgccgucgccaagugcaacgagaagcacgacgaggaguucugcgacaugcugcggcuguucgacuucaacaagcaggccauccagcgccugaaggcggaggcccagaugagcauccagcugaucaacaaggccgugaacgcccucaucaacgaccagcugaucaugaagaaccaccuccgggacaucaugggcauccccuacugcaacuacuccaaguacugguaccucaaccacacgaccaccgggaagaccagccugcccaagugcuggcugguguccaacggcagcuaccucaacgagacgcacuucuccgacgacaucgagcagcaggccgacaacaugaucaccgagaugcugcagaaggaguacauggagcgccagggcaagaccccgcuggggcuggucgaccucuucguguucagcaccuccuucuaccugaucagcaucuuccugcaccucgugaagaucccgugaggacuagucccuguucccagagcccacuuuuuuuucuuuuuuugaaauaaaauagccugucuuucagaucucaaaggcucuuuucagagccaccaaaaaaaaaaaaaaaaaaaaaaaaaaaaaaaaaaaaaaaaaaaaaaaaaaaaaaaaaaaaaaaaaaaaaaaaaaaaaaaaaaaaaaaaaaaaaaaaaaaaa

SEQ ID NO: 41954 - RNA, 1634 nt, Artificial Sequence
  mRNA product Design a-1 (hSL-A100) comprising derived and/or modified sequence from LASV(LM776-SLE-2012;Clade IV)__AIT17824__GPCmut13 (opt1)
aggagagucccgcagucggcguccagcggcucugcuuguucgugugugugucguugcaggccuuauucaagcuuaccaugggccagaucgugaccuucuuccaggaggucccccacgugaucgaggaggugaugaacaucguccugaucgcccucagcauccuggccgugcugaaggggcucuacaacuucgcgaccugcggccugguggggcuggucacguuccuccugcugugcggccgcuccugcaccaccagcguguacaaggggguguacgagcuccagacccuggagcugaacauggagacgcucaacaugaccaugccgcuguccugcaccaagaacaacagccaccacuacaucauggucggcaacgagaccggccuggagcucacgcugaccaacaccuccaucaucaaccacaaguucugcaaccugagcgacgcccacaagaagaaccucuacgaccacgcccugauguccaucaucagcaccuuccaccuguccauccccaacuucaaccaguacgaggccaugagcugcgacuucaacgggggcaagaucuccgugcaguacaaccucagccacuccuacgccggggacgcggccaaccacugcggcacgguggccaacgggguccugcagaccuucaugcggauggccuggggcggcagcuacaucgcgcuggacuccgggcacggcaagugggacugcaucaugaccagcuaccaguaccucaucauccagaacaccacgugggaggaccacugccaguucucccgccccagccccaucggguaccugggccugcucucccagcggacccgcgacaucuacaucagccggcgccugcugggcaccuucaccuggacgcucagcgacuccgaggggaaggacaccccgggcggguacugccugacccgguggaugcugaucgaggccgagcucaagugcuucggcaacaccgccguggccaagugcaacgagaagcacgacgaggaguucugcgacaugcugcgccuguucgacuucaacaagcaggccauccagcggcucaaggcggaggcccagaugagcauccagcugaucaacaaggccgugaacgcccugaucaacgaccagcucaucaugaagaaccaccuccgcgacaucauggggauccccuacugcaacuacuccaaguacugguaccugaaccacacgaccaccggcaagaccagccugcccaagugcuggcuggucuccaacggcagcuaccugaacgagacgcacuucuccgacgacaucgagcagcaggccgacaacaugaucaccgagaugcuccagaaggaguacauggagcggcaggggaagacgccccugggccugguggaccuguucguguucagcaccuccuucuaccucaucagcaucuuccugcaccuggucaagaucccgugaggacuagucccuguucccagagcccacuuuuuuuucuuuuuuugaaauaaaauagccugucuuucagaucucaaaggcucuuuucagagccaccaaaaaaaaaaaaaaaaaaaaaaaaaaaaaaaaaaaaaaaaaaaaaaaaaaaaaaaaaaaaaaaaaaaaaaaaaaaaaaaaaaaaaaaaaaaaaaaaaaaaa

SEQ ID NO: 41955 - RNA, 1634 nt, Artificial Sequence
  mRNA product Design a-1 (hSL-A100) comprising derived and/or modified sequence from LASV(Mad39;Clade IV)__ANH09722__GPCmut13 (opt1)
aggagagucccgcagucggcguccagcggcucugcuuguucgugugugugucguugcaggccuuauucaagcuuaccaugggccagaucgugaccuucuuccaggaggucccccacgugaucgaggaggugaugaacaucguccugaucgcccucagcauccuggccgugcugaaggggcucuacaacguggcgaccugcggccugaucgggcuggucacguuccuccugcugugcggccgcuccugcaccaccacccucuacaaggggguguacgagcugcaggcccuggagcucaacauggagacgcugaacaugaccaugccgcugagcugcaccaagaacaacucccaccacuacauccgggugggcaacgagaccggccucgagcugacgcugaccaacaccagccucaucaaccacaaguucugcaaccuguccgacgcccacaagaagaaccuguacgaccacgcccucaugagcaucaucuccaccuuccaccugagcauccccaacuucaaccaguacgaggccauguccugcgacuucaacgacgggaagaucagcguccaguacaaccugucccacacguacgcgggcgacaccgccaaccacugcgggaccguggccaacggcgugcuccagaccuucaugcgcauggccuggggcgggagcuacaucgcgcuggacuccggccgcgggggcugggacugcaucaugacgagcuaccaguaccugaucauccagaacaccaccugggaggaccacugccaguucucccggcccagccccaucggguaccucggccugcugucccagcggacccgcgacaucuacaucagccggcgccuccugggcacguucaccuggacccuguccgacagcgaggggaaggacaccccgggcggguacugccucacgcgguggaugcugaucgaggccgagcugaagugcuucggcaacaccgccgucgccaagugcaacgagaagcacgacgaggaguucugcgacaugcuccgccuguucgacuucaacaagcaggccauccagcggcugaaggcggaggcccagaugagcauccagcucaucaacaaggccgugaacgcccugaucaacgaccagcugaucaugaagaaccaccuccgcgacaucauggggauccccuacugcaacuacuccaaguacugguaccugaaccacaccgugaccggcaagacgagccugcccaagugcuggcucgucuccaacggcagcuaccugaacgagacccacuucuccgacgacaucgagcagcaggccgacaacaugaucaccgagaugcugcagaaggaguacauggagcggcaggggaagacgccccugggccucguggaccuguucguguucagcaccuccuucuaccugaucagcaucuuccuccaccuggucaagaucccgugaggacuagucccuguucccagagcccacuuuuuuuucuuuuuuugaaauaaaauagccugucuuucagaucucaaaggcucuuuucagagccaccaaaaaaaaaaaaaaaaaaaaaaaaaaaaaaaaaaaaaaaaaaaaaaaaaaaaaaaaaaaaaaaaaaaaaaaaaaaaaaaaaaaaaaaaaaaaaaaaaaaaa

SEQ ID NO: 41956 - RNA, 1634 nt, Artificial Sequence
  mRNA product Design a-1 (hSL-A100) comprising derived and/or modified sequence from LASV(Z0947-SLE-2011;Clade IV)__AIT17840__GPCmut13 (opt1)
aggagagucccgcagucggcguccagcggcucugcuuguucgugugugugucguugcaggccuuauucaagcuuaccaugggccagaucgugaccuucuuccaggaggucccccacgugaucgaggaggugaugaacaucguccugaucgcccucagcauccuggccgugcugaaggggcucuacaacuucgcgaccugcggccugguggggcuggucacguuccuccugcugugcggccgcuccugcaccaucagccucuacaaggggguguacgagcugcagacccuggagcucaacauggagacccugaacaugacgaugccgcuguccugcaccaagaacaacagccaccacuacaucauggugggcaacgagaccggccucgagcugacccugacgaacaccuccaucaucaaccacaaguucugcaaccucagcgacgcccacaagaagaaccuguacgaccacgcccugauguccaucaucagcaccuuccaccucuccauccccaacuucaaccaguacgaggccaugagcugcgacuucaacgggggcaagaucuccguccaguacaaccugagccacuccuacgccggggacgcggccaaccacugcggcaccguggccaacggggugcugcagacguucaugcggauggccuggggcggcagcuacaucgcgcucgacuccgggcgcgaccggugggacugcaucaugaccagcuaccaguaccugaucauccagaacaccaccugggaggaccacugccaguucucccgccccagccccaucggcuaccuggggcuccugucccagcggacgcgcgacaucuacaucagccggcgccugcucggcaccuucaccuggacccugagcgacuccgagggcaaggacacgcccgggggcuacugccugacccgguggaugcucaucgaggccgagcugaagugcuucgggaacaccgccgucgccaagugcaacgagaagcacgacgaggaguucugcgacaugcugcgccucuucgacuucaacaagcaggccauccagcggcugaaggcggaggcccagaugagcauccagcugaucaacaaggccgugaacgcccucaucaacgaccagcugaucaugaagaaccaccuccgcgacaucaugggcauccccuacugcaacuacuccaaguacugguaccugaaccacaccacgaccgggaagaccagccugcccaagugcuggcugguguccaacggcagcuaccucaacgagacccacuucuccgacgacaucgagcagcaggccgacaacaugaucacggagaugcugcagaaggaguacauggagcggcagggcaagaccccgcuggggcuggucgaccucuucguguucagcaccuccuucuaccugaucagcaucuuccugcaccucgugaagaucccgugaggacuagucccuguucccagagcccacuuuuuuuucuuuuuuugaaauaaaauagccugucuuucagaucucaaaggcucuuuucagagccaccaaaaaaaaaaaaaaaaaaaaaaaaaaaaaaaaaaaaaaaaaaaaaaaaaaaaaaaaaaaaaaaaaaaaaaaaaaaaaaaaaaaaaaaaaaaaaaaaaaaaa

SEQ ID NO: 41957 - RNA, 1634 nt, Artificial Sequence
  mRNA product Design a-1 (hSL-A100) comprising derived and/or modified sequence from LASV(Josiah;Clade IV)__NP_694870__GPCmut13 (opt4)
aggagagucccgcagucggcguccagcggcucugcuuguucgugugugugucguugcaggccuuauucaagcuuaccaugggccagaucgugaccuucuuccaggaggugccccacgugaucgaggaggugaugaacaucgugcugaucgcccugagcgugcuggccgugcugaagggccuguacaacuucgccaccugcggccuggugggccuggugaccuuccugcugcugugcggcagaagcugcaccaccagccuguacaagggcguguacgagcugcagacccuggagcugaacauggagacccugaacaugaccaugccccugagcugcaccaagaacaacagccaccacuacaucauggugggcaacgagaccggccuggagcugacccugaccaacaccagcaucaucaaccacaaguucugcaaccugagcgacgcccacaagaagaaccuguacgaccacgcccugaugagcaucaucagcaccuuccaccugagcauccccaacuucaaccaguacgaggccaugagcugcgacuucaacggcggcaagaucagcgugcaguacaaccugagccacagcuacgccggcgacgccgccaaccacugcggcaccguggccaacggcgugcugcagaccuucaugagaauggccuggggcggcagcuacaucgcccuggacagcggcagaggcaacugggacugcaucaugaccagcuaccaguaccugaucauccagaacaccaccugggaggaccacugccaguucagcagacccagccccaucggcuaccugggccugcugagccagagaaccagagacaucuacaucagcagaagacugcugggcaccuucaccuggacccugagcgacagcgagggcaaggacacccccggcggcuacugccugaccagauggaugcugaucgaggccgagcugaagugcuucggcaacaccgccguggccaagugcaacgagaagcacgacgaggaguucugcgacaugcugagacuguucgacuucaacaagcaggccauccagagacugaaggccgaggcccagaugagcauccagcugaucaacaaggccgugaacgcccugaucaacgaccagcugaucaugaagaaccaccugagagacaucaugggcauccccuacugcaacuacagcaaguacugguaccugaaccacaccaccaccggcagaaccagccugcccaagugcuggcuggugagcaacggcagcuaccugaacgagacccacuucagcgacgacaucgagcagcaggccgacaacaugaucaccgagaugcugcagaaggaguacauggagagacagggcaagaccccccugggccugguggaccuguucguguucagcaccagcuucuaccugaucagcaucuuccugcaccuggugaagauccccugaggacuagucccuguucccagagcccacuuuuuuuucuuuuuuugaaauaaaauagccugucuuucagaucucaaaggcucuuuucagagccaccaaaaaaaaaaaaaaaaaaaaaaaaaaaaaaaaaaaaaaaaaaaaaaaaaaaaaaaaaaaaaaaaaaaaaaaaaaaaaaaaaaaaaaaaaaaaaaaaaaaaa

SEQ ID NO: 41958 - RNA, 1631 nt, Artificial Sequence
  mRNA product Design a-1 (hSL-A100) comprising derived and/or modified sequence from LASV(LP;Clade I)__AAF86701__GPCmut13 (opt4)
aggagagucccgcagucggcguccagcggcucugcuuguucgugugugugucguugcaggccuuauucaagcuuaccaugggccagaucaucaccuucuuccaggaggugccccacgugaucgaggaggugaugaacaucgugcugaucgcccugagccugcuggccauccugaagggccuguacaacaucgccaccugcggcaucaucggccugguggccuuccuguuccugugcggcaagagcugcagccugacccugaagggcggcuacgagcugcagacccuggagcugaacauggagacccugaacaugaccaugccccugagcugcaccaagaacagcagccaccacuacaucagagugggcaacgagaccggccuggagcugacccugaccaacaccagcaucaucaaccacaaguucugcaaccugagcgacgcccacaagaagaaccuguacgaccacgcccugaugagcaucaucagcaccuuccaccugagcauccccaacuucaaccaguacgaggccaugagcugcgacuucaacggcggcaagaucagcgugcaguacaaccugagccacagcuacgccggcgacgccgccgagcacugcggcaccguggccaacggcgugcugcagaccuucaugagaauggccuggggcggcagauacaucgcccuggacagcggcaagggcaacugggacugcaucaugaccagcuaccaguaccugaucauccagaacaccaccugggaggaccacugccaguucagcagacccagccccaucggcuaccugggccugcugagccagagaaccagagacaucuacaucagcagaagacugcugggcaccuucaccuggacccugagcgacagcgagggcaacgagacccccggcggcuacugccugaccagauggaugcugaucgaggccgagcugaagugcuucggcaacaccgccguggccaagugcaacgagaagcacgacgaggaguucugcgacaugcugagacuguucgacuucaacaagcaggccaucagaagacugaaggccgaggcccagaugagcauccagcugaucaacaaggccgugaacgcccugaucaacgaccagcugaucaugaagaaccaccugagagacaucaugggcauccccuacugcaacuacagcaaguacugguaccugaaccacaccagcagcggcagaaccagccugcccaagugcuggcugaucagcaacggcagcuaccugaacgagacccaguucagcgacgacaucgagcagcaggccgacaacaugaucaccgagaugcugcagaaggaguacaucgagagacagggcaagaccccccugggccugguggacaucuucaucuucagcaccagcuucuaccugaucagcaucuuccugcaccugaucaagauccccugaggacuagucccuguucccagagcccacuuuuuuuucuuuuuuugaaauaaaauagccugucuuucagaucucaaaggcucuuuucagagccaccaaaaaaaaaaaaaaaaaaaaaaaaaaaaaaaaaaaaaaaaaaaaaaaaaaaaaaaaaaaaaaaaaaaaaaaaaaaaaaaaaaaaaaaaaaaaaaaaaaaaa

SEQ ID NO: 41959 - RNA, 1631 nt, Artificial Sequence
  mRNA product Design a-1 (hSL-A100) comprising derived and/or modified sequence from LASV(803213;Clade II)__AAF86703__GPCmut13 (opt4)
aggagagucccgcagucggcguccagcggcucugcuuguucgugugugugucguugcaggccuuauucaagcuuaccaugggccagaucaucaccuucuuccaggaggugccccacgugaucgaggaggugaugaacaucgugcugaucgcccugagccugcuggccauccugaagggcaucuacaacguggccaccugcggccuguucggccugaucagcuuccugcugcugugcggcagaagcugcagcgugaccuacaagggcguguacgagcugcagacccuggagcugaacauggccaaccugaacaugaccaugccccugagcugcaccaagaacaacagccaccacuacaucauggugggcaacgagaccggccuggagcugacccugaccaacaccagcaucaucaaccacaaguucugcaaccugagcgacgcccacaagaagaaccuguacgaccacgcccugaugagcaucaucagcaccuuccaccugagcauccccaacuucaaccaguacgaggccaugagcugcgacuucaacggcggcaagaucagcgugcaguacaaccugagccacagcuucgccguggacgccgccaaccacugcggcaccaucgccaacggcgugcugcagaccuucaugagaauggccuggggcggcagcuacaucgcccuggacagcggcaagggcaacugggacugcaucaugaccagcuaccaguaccugaucauccagaacaccaccugggaggaccacugccaguucagcagacccagccccaucggcuaccugggccugcugagccagagaaccagagacaucuacaucagcagaagacugcugggcaccuucaccuggacccugagcgacagcgagggcaacgaggcccccggcggcuacugccugaccagauggaugcugaucgaggccgagcugaagugcuucggcaacaccgccguggccaagugcaacgagaagcacgacgaggaguucugcgacaugcugagacuguucgacuucaacaagcaggccaucaagagacugaagaccgaggcccagaugagcauccagcugaucaacaaggccgugaacgcccugaucaacgaccagcugaucaugaagaaccaccugagagacaucaugggcauccccuacugcaacuacagcagauacugguaccugaaccacaccgugaccggcaagaccagccugcccagaugcuggcuggugagcaacggcagcuaccugaacgagacccacuucagcgacgacaucgagcagcaggccgacaacaugaucaccgagaugcugcagaaggaguacauggacagacagggcaagaccccccugggccugguggaccuguucguguucagcaccagcuucuaccugaucagcaucuuccugcaccuggugaagauccccugaggacuagucccuguucccagagcccacuuuuuuuucuuuuuuugaaauaaaauagccugucuuucagaucucaaaggcucuuuucagagccaccaaaaaaaaaaaaaaaaaaaaaaaaaaaaaaaaaaaaaaaaaaaaaaaaaaaaaaaaaaaaaaaaaaaaaaaaaaaaaaaaaaaaaaaaaaaaaaaaaaaaa

SEQ ID NO: 41960 - RNA, 1631 nt, Artificial Sequence
  mRNA product Design a-1 (hSL-A100) comprising derived and/or modified sequence from LASV(GA391;Clade III)__CAA36645__GPCmut13 (opt4)
aggagagucccgcagucggcguccagcggcucugcuuguucgugugugugucguugcaggccuuauucaagcuuaccaugggccagaucgugaccuucuuccaggaggugccccacgugaucgaggaggugaugaacaucgugcugaucgcccugagcauccuggccauccugaagggccuguacaacguggccaccugcggccugaucggccuggugaccuuccugcugcugagcggcagaagcugcagccugaucuacaagggcaccuacgagcugcagacccuggagcugaacauggagacccugaacaugaccaugccccugagcugcaccaagaacaacagccaccacuacaucagagugggcaacgagaccggccuggagcugacccugaccaacaccagcauccugaaccacaaguucugcaaccugagcgacgcccacaagagaaaccuguacgaccacagccugaugagcaucaucagcaccuuccaccugagcauccccaacuucaaccaguacgaggccaugagcugcgacuucaacggcggcaagaucaccgugcaguacaaccugagccacagcuucgccguggacgccgccggccacugcggcacccuggccaacggcgugcugcagaccuucaugagaauggccuggggcggcagcuacaucgcccuggacagcggcagaggcaacugggacugcaucaugaccagcuaccaguaccugaucauccagaacaccaccugggacgaccacugccaguucagcagacccagccccaucggcuaccugggccugcugagccagagaaccagagacaucuacaucagcagaagacugcugggcaccuucaccuggacccugagcgacagcgagggcaacgagacccccggcggcuacugccugaccagauggaugcugaucgaggccgagcugaagugcuucggcaacaccgccguggccaagugcaacgagaagcacgacgaggaguucugcgacaugcugagacuguucgacuucaacaagcaggccaucagaagacugaagaccgaggcccagaugagcauccagcugaucaacaaggccgugaacgcccugaucaacgaccagcugaucaugaagaaccaccugagagacaucaugggcauccccuacugcaacuacagcagauacugguaccugaaccacaccagcaccggcaagaccagccugcccagaugcuggcugaucagcaacggcagcuaccugaacgagaccaaguucagcgacgacaucgagcagcaggccgacaacaugaucaccgagaugcugcagaaggaguacaucgacagacagggcaagaccccccugggccugguggaccuguucguguucagcaccagcuucuaccugaucagcaucuuccugcaccuggugaagauccccugaggacuagucccuguucccagagcccacuuuuuuuucuuuuuuugaaauaaaauagccugucuuucagaucucaaaggcucuuuucagagccaccaaaaaaaaaaaaaaaaaaaaaaaaaaaaaaaaaaaaaaaaaaaaaaaaaaaaaaaaaaaaaaaaaaaaaaaaaaaaaaaaaaaaaaaaaaaaaaaaaaaaa

SEQ ID NO: 41961 - RNA, 1634 nt, Artificial Sequence
  mRNA product Design a-1 (hSL-A100) comprising derived and/or modified sequence from LASV(AV;Clade V)__CCA30314__GPCmut13 (opt4)
aggagagucccgcagucggcguccagcggcucugcuuguucgugugugugucguugcaggccuuauucaagcuuaccaugggccagaucgugaccuucuuccaggaggugccccacgugaucgaggaggugaugaacaucgugcugaucgcccugagcauccuggccgugcugaagggccuguacaacaucgccaccugcggccugaucggccugaucaccuuccugcugcugugcggcagaagcugcagcagcaaccuguacaagggcguguacgagcugcagagccuggaccugaacauggagacccugaacaugaccaugccccugagcugcaccaagaacaacagccaccacuacaucagagugggcaacgacaccggccuggagcugacccugaccaacaccagcauccugaaccacaaguucugcaaccugagcgacgcccacaagaaggaccuguacgaccacgcccugaugagcaucaucagcaccuuccaccugagcauccccaacuucaaccaguacgaggccaugagcugcgacuucaacggcggcaagaucagcgugcaguacaaccugagccacagcuacgccaucgacgccgccaaccacugcggcaccguggccaacggcauccugcagaccuucaugagaauggccuggggcggcagcuacaucgcccuggacagcggcagaggcaacugggacugcaucaugaccagcuaccaguaccugaucauccagaacaccaccugggagaaccacugccaguucagcagacccagccccaucggcuaccugggccugcugagccagagaaccagagacaucuacaucagcagaagacugcugggcaccuucaccuggacccugagcgacagcgagggcaacgccacccccggcggcuacugccugaccagauggaugcugaucgaggccgagcugaagugcuucggcaacaccgccguggccaagugcaacgagaagcacgacgaggaguucugcgacaugcugagacuguucgacuucaacaagcaggccaucagcagacugaagagcgaggcccagaugagcauccagcugaucaacaaggccgugaacgcccugaucaacgaccagcugaucaugaagaaccaccugagagacaucaugggcauccccuacugcaacuacagcaaguacugguaccugaaccacaccaucaccggcaagaccagccugcccaagugcuggcuggugagcaacggcagcuaccugaacgagacccacuucagcgacgacaucgagcagcaggccgacaacaugaucaccgagaugcugcagaaggaguacauggagagacagggcaagaccccccugggccugguggaccuguucguguucagcaccagcuucuaccugaucagcaucuuccugagacuggugaagauccccugaggacuagucccuguucccagagcccacuuuuuuuucuuuuuuugaaauaaaauagccugucuuucagaucucaaaggcucuuuucagagccaccaaaaaaaaaaaaaaaaaaaaaaaaaaaaaaaaaaaaaaaaaaaaaaaaaaaaaaaaaaaaaaaaaaaaaaaaaaaaaaaaaaaaaaaaaaaaaaaaaaaaa

SEQ ID NO: 41962 - RNA, 1631 nt, Artificial Sequence
  mRNA product Design a-1 (hSL-A100) comprising derived and/or modified sequence from LASV(Togo/2016/7082;Clade VI)__AMR44577__GPCmut13 (opt4)
aggagagucccgcagucggcguccagcggcucugcuuguucgugugugugucguugcaggccuuauucaagcuuaccaugggccagaucaucaccuucuuccaggaggugccccacgugaucgaggaggugaugaacaucgugcugaucgcccugagccugcuggccauccugaagggcguguacaacguggccaccugcggcaucaucggccuggugaccuuccuguuccugugcggcagaagcugcagccugaucuacaagggcagcuacgagcugcagacccuggagcugaacauggagacccugaacaugaccaugccccugagcugcaccaagaacagcagccaccacuacaucagagugggcaacgagaccggccuggagcugacccugaccaacaccagcaucaucaaccacaaguucugcaaccugagcgacgcccacaagagaaaccuguacgaccacgcccugaugagcauccugagcaccuuccaccugagcauccccaacuucaaccaguacgaggccaugagcugcgacuucaacggcggcaagaucagcgugcaguacaaccugagccacgccuacgccguggacgccgccgagcacugcggcaccguggccaacggcgugcugcagaccuucaugagaauggccuggggcggcagcuacaucgcccuggacagcggcagaggcaacugggacugcaucaugaccagcuaccaguaccugaucauccagaacaccaccugggaggaccacugccaguucagcagacccagccccaucggcuaccugggccugcugagccagagaaccagagacaucuacaucagcagaagacugcugggcaccuucaccuggacccugagcgacagcgagggcaacgagacccccggcggcuacugccugaccagauggaugcugaucgaggccgagcugaagugcuucggcaacaccgccguggccaagugcaacgagaagcacgacgaggaguucugcgacaugcugagacuguucgacuucaacaagcaggccauccagagacugaagagcgaggcccagaugagcauccagcugaucaacaaggccgugaacgcccugaucaacgaccagcugaucaugaagaaccaccugagagacaugaugggcauccccuacugcaacuacagcaaguacugguaccugaaccacaccagcagcggcagaaccagccugcccaagugcuggcuggugagcaacggcagcuaccugaacgagacccacuucagcgacgacaucgagcagcaggccgacaacaugaucaccgagaugcugcagaaggaguacaucgacagacagggcaagaccccccugggccugguggaccuguucguguucagcaccagcuucuaccugaucagcaucuuccugcaccugaucaagauccccugaggacuagucccuguucccagagcccacuuuuuuuucuuuuuuugaaauaaaauagccugucuuucagaucucaaaggcucuuuucagagccaccaaaaaaaaaaaaaaaaaaaaaaaaaaaaaaaaaaaaaaaaaaaaaaaaaaaaaaaaaaaaaaaaaaaaaaaaaaaaaaaaaaaaaaaaaaaaaaaaaaaaa

SEQ ID NO: 41963 - RNA, 1631 nt, Artificial Sequence
  mRNA product Design a-1 (hSL-A100) comprising derived and/or modified sequence from LASV(KAK-428;Clade n.d. (VII))__ANH09740__GPCmut13 (opt4)
aggagagucccgcagucggcguccagcggcucugcuuguucgugugugugucguugcaggccuuauucaagcuuaccaugggccagaucgugaccuucuuccaggaggugccccacgugaucgaggaggugaugaacaucgugcugaucgcccugagccugcuggccauccugaagggccuguacaacuucgccaccugcggcgugaucggccugaucaccuuccugcugcugugcggcagaagcugcagcgccaccuacaagggccaguacgagcugcagacccuggagcugaacauggagagccugaacaugaccaugccccugagcugcaccaagaacaacagccaccacuacaucagagccggcaacaacaccggccuggagcugacccugaccaacaccagcaucaucagccacaaguucugcaaccugagcgacgcccacaagaagaaccuguacgaccacacccugaugagcaucaucaccaccuuccaccugagcauccccaacuucaaccaguacgaggccaugagcugcgacuucaacggcggcaagaucagcauccaguacaaccugagccacagcuacgccggcgacgccgcccagcacugcggcaccguggccaacggcgugcugcagaccuucaugagaauggccuggggcggcagcuaccuggcccuggacagcggcagaagaggcugggacugcaucaucagcagcuaccaguaccugaucauccagaacaccaccugggacgaccacugccaguucagcagacccagccccaucggcuaccugggcuucgugagccagaagaccagagacaucuacaucagcagaagacugcugggcaccuucaccuggacccugagcgacagcgagggccacgacaugcccggcggcuacugccugaccagauggaugcugaucgaggccgaccugaagugcuucggcaacaccgccguggccaagugcaacgagaagcacgacgaggaguucugcgacauguggagacuguucgacuucaacaagcaggccauccagagacugaaggccgaggcccagaugaacauccagcugaucaacaaggccgugaacgcccugaucaacgaccagcugaugaugaagaaccaccugagagacaucaugggcauccccuacugcaacuacagcaaguucugguaccugaacaacaccaccaccggcagaaccagccugcccagaugcuggcugaucagcaacggcagcuaccugaacgagacccacuucagcgacgacaucgagcagcaggccgacaacaugaucaccgagaugcugcagaaggaguacauggacagacagggcaagaccccccugggccugguggaccuguucguguucagcaccagcuucuaccugaucaccaucuuccugcaccuggugaagauccccugaggacuagucccuguucccagagcccacuuuuuuuucuuuuuuugaaauaaaauagccugucuuucagaucucaaaggcucuuuucagagccaccaaaaaaaaaaaaaaaaaaaaaaaaaaaaaaaaaaaaaaaaaaaaaaaaaaaaaaaaaaaaaaaaaaaaaaaaaaaaaaaaaaaaaaaaaaaaaaaaaaaaa

SEQ ID NO: 41964 - RNA, 1631 nt, Artificial Sequence; identical to SEQ ID NO: 41958
  mRNA product Design a-1 (hSL-A100) comprising derived and/or modified sequence from LASV(Pinneo-NIG-1969;Clade I)__AIT17836__GPCmut13 (opt4)

SEQ ID NO: 41965 - RNA, 1631 nt, Artificial Sequence
  mRNA product Design a-1 (hSL-A100) comprising derived and/or modified sequence from LASV(ISTH0009-NIG-2011;Clade II)__AIT17404__GPCmut13 (opt4)
aggagagucccgcagucggcguccagcggcucugcuuguucgugugugugucguugcaggccuuauucaagcuuaccaugggccagaucaucaccuucuuccaggaggugccccacgugaucgaggaggugaugaacaucgugcugaucgcccugagccugcuggccauccugaagggcaucuacaacguggccaccugcggccuguucggccuggugagcuuccugcugcugugcggcagaagcugcagcaccaccuacaagggcguguacgagcugcagacccuggagcuggacauggccagccugaacaugaccaugccccugagcugcaccaagaacaacagccaccacuacaucauggugggcaacgagaccggccuggagcugacccugaccaacaccagcaucaucaaccacaaguucugcaaccugagcgacgcccacaagaagaaccuguacgaccacgcccugaugagcaucaucagcaccuuccaccugagcauccccaacuucaaccaguacgaggccaugagcugcgacuucaacggcggcaagaucagcgugcaguacaaccugagccacgccuacgccguggacgccgccaaccacugcggcaccaucgccaacggcgugcugcagaccuucaugagaauggccuggggcggcagcuacaucgcccuggacagcggcaagggcagcugggacugcaucaugaccagcuaccaguaccugaucauccagaacaccaccugggaggaccacugccaguucagcagacccagccccaucggcuaccugggccugcugagccagagaaccagagacaucuacaucagcagaagacugcugggcaccuucaccuggacccugagcgacagcgagggcaacgagacccccggcggcuacugccugaccagauggaugcugaucgaggccgagcugaagugcuucggcaacaccgccguggccaagugcaacgagaagcacgacgaggaguucugcgacaugcugagacuguucgacuucaacaagcaggccaucagaagacugaagaccgaggcccagaugagcauccagcugaucaacaaggccgugaacgcccugaucaacgaccagcugaucaugaagaaccaccugagagacaucaugggcauccccuacugcaacuacagcaaguacugguaccugaaccacaccgugaccggcaagaccagccugcccagaugcuggcuggugagcaacggcagcuaccugaacgagacccacuucagcgacgacaucgagcagcaggccgacaacaugaucaccgagcugcugcagaaggaguacauggacagacagggcaagaccccccugggccugguggaccuguucguguucagcaccagcuucuaccugaucagcaucuuccugcaccugaucaagauccccugaggacuagucccuguucccagagcccacuuuuuuuucuuuuuuugaaauaaaauagccugucuuucagaucucaaaggcucuuuucagagccaccaaaaaaaaaaaaaaaaaaaaaaaaaaaaaaaaaaaaaaaaaaaaaaaaaaaaaaaaaaaaaaaaaaaaaaaaaaaaaaaaaaaaaaaaaaaaaaaaaaaaa

SEQ ID NO: 41966 - RNA, 1631 nt, Artificial Sequence
  mRNA product Design a-1 (hSL-A100) comprising derived and/or modified sequence from LASV(ISTH2010-NIG-2012;Clade II)__AIT17482__GPCmut13 (opt4)
aggagagucccgcagucggcguccagcggcucugcuuguucgugugugugucguugcaggccuuauucaagcuuaccaugggccagaucaucaccuucuuccaggaggugccccacgugaucgaggaggugaugaacaucgugcugaucgcccugagccugcuggccauccugaagggcaucuacaacguggccaccugcggccuguucggccuggugagcuuccugcugcugugcggcagaagcugcagcaccaccuacaagggcguguacgagcugcagacccuggagcuggacauggccagccugaacaugaccaugccccugagcugcaccaagaacaacagccaccacuacaucauggugggcaacgagaccggccuggagcugacccugaccaacaccagcaucaucaaccacaaguucugcaaccugagcgacgcccacaagaagaaccuguacgaccacgcccugaugagcaucaucagcaccuuccaccugagcauccccaacuucaaccaguacgaggccaugagcugcgacuucaacggcggcaagaucagcgugcaguacaaccugagccacgccuacgccguggacgccgccaaccacugcggcaccaucgccaacggcgugcugcagaccuucaugagaauggccuggggcggcagcuacaucgcccuggacagcggcaagggcagcugggacugcaucaugaccagcuaccaguaccugaucauccagaacaucaccugggaggaccacugccaguucagcagacccagccccaucggcuaccugggccugcugagccagagaaccagagacaucuacaucagcagaagacugcugggcaccuucaccuggacccugagcgacagcgagggcaacgagacccccggcggcuacugccugaccagauggaugcugaucgaggccgagcugaagugcuucggcaacaccgccguggccaagugcaacgagaagcacgacgaggaguucugcgacaugcugagacuguucgacuucaacaagcaggccaucagaagacugaagaccgaggcccagaugagcauccagcugaucaacaaggccgugaacgcccugaucaacgaccagcugaucaugaagaaccaccugagagacaucaugggcauccccuacugcaacuacagcaaguacugguaccugaaccacaccgugaccggcaagaccagccugcccagaugcuggcuggugagcaacggcagcuaccugaacgagacccacuucagcgacgacaucgagcagcaggccgacaacaugaucaccgagcugcugcagaaggaguacaucgacagacagggcaagaccccccugggccugguggaccuguucguguucagcaccagcuucuaccugaucagcaucuuccugcaccuggugaagauccccugaggacuagucccuguucccagagcccacuuuuuuuucuuuuuuugaaauaaaauagccugucuuucagaucucaaaggcucuuuucagagccaccaaaaaaaaaaaaaaaaaaaaaaaaaaaaaaaaaaaaaaaaaaaaaaaaaaaaaaaaaaaaaaaaaaaaaaaaaaaaaaaaaaaaaaaaaaaaaaaaaaaaa

SEQ ID NO: 41967 - RNA, 1631 nt, Artificial Sequence
  mRNA product Design a-1 (hSL-A100) comprising derived and/or modified sequence from LASV(Lassa virus/H.sapiens-wt/NGA/2015/ISTH_0543;Clade II)__AVO03639__GPCmut13 (opt4)
aggagagucccgcagucggcguccagcggcucugcuuguucgugugugugucguugcaggccuuauucaagcuuaccaugggccagaucaucaccuucuuccaggaggugccccacgugaucgaggaggugaugaacaucgugcugaucgcccugagccugcuggccauccugaagggcaucuacaacguggccaccugcggccuguucggccuggugagcuuccugcugcugugcggcagaagcugcagcaccaccuacaagggcguguacgagcugcagacccuggagcuggacauggccaaccugaacaugaccaugccccugagcugcaccaagaacaacagccaccacuacaucauggugggcaacgagaccggccuggagcugacccugaccaacaccagcaucaucaaccacaaguucugcaaccugagcgacgcccacaagaagaaccuguacgaccacgcccugaugagcaucaucagcaccuuccaccugagcauccccaacuucaaccaguacgaggccaugagcugcgacuucaacggcggcaagaucagcgugcaguacaaccugagccacaccuacgccguggacgccgccaaccacugcggcaccaucgccaacggcgugcugcagaccuucaugagaauggccuggggcggcagcuacaucgcccuggacagcggcaagggcagcugggacugcaucaugaccagcuaccaguaccuggugauccagaacaccaccugggaggaccacugccaguucagcagacccagccccaucggcuaccugggccugcugagccagagaaccagagacaucuacaucagcagaagacugcugggcaccuucaccuggacccugagcgacagcgagggcaacgagacccccggcggcuacugccugaccagauggaugcugaucgaggccgagcugaagugcuucggcaacaccgccguggccaagugcaacgagaagcacgacgaggaguucugcgacaugcugagacuguucgacuucaacaagcaggccaucagaagacugaagaccgaggcccagaugagcauccagcugaucaacaaggccgugaacgcccugaucaacgaccagcugaucaugaagaaccaccugagagacaucaugggcauccccuacugcaacuacagcaaguacugguaccugaaccacaccgugaccggcaagaccagccugcccagaugcuggcuggugagcaacggcagcuaccugaacgagacccacuucagcgacgacaucgagcagcaggccgacaacaugaucaccgagcugcugcagaaggaguacaucgacagacagggcaagaccccccugggccugguggaccuguucguguucagcaccagcuucuaccugaucagcaucuuccugcaccuggugaagauccccugaggacuagucccuguucccagagcccacuuuuuuuucuuuuuuugaaauaaaauagccugucuuucagaucucaaaggcucuuuucagagccaccaaaaaaaaaaaaaaaaaaaaaaaaaaaaaaaaaaaaaaaaaaaaaaaaaaaaaaaaaaaaaaaaaaaaaaaaaaaaaaaaaaaaaaaaaaaaaaaaaaaaa

SEQ ID NO: 41968 - RNA, 1631 nt, Artificial Sequence
  mRNA product Design a-1 (hSL-A100) comprising derived and/or modified sequence from LASV(Lassa virus/H.sapiens-wt/NGA/2016/ISTH_0009;Clade II)__AVO03571__GPCmut13 (opt4)
aggagagucccgcagucggcguccagcggcucugcuuguucgugugugugucguugcaggccuuauucaagcuuaccaugggccagaucaucaccuucuuccaggaggugccccacgugaucgaggaggugaugaacaucgugcugaucgcccugagccugcuggccauccugaagggcaucuacaacguggccaccugcggccugcugggccuggugagcuuccugcugcugugcggcagaagcugcagcaccaccuacaagggcguguacgagcugcagacccuggagcuggacauggccagccugaacaugaccaugccccugagcugcaccaagaacaacagccaccacuacaucauggugggcaacgagaccggccuggagcugacccugaccaacaccagcaucaucaaccacaaguucugcaaccugagcgacgcccacaagaagaaccuguacgaccacgcccugaugagcaucaucagcaccuuccaccugagcauccccaacuucaaccaguacgaggccaugagcugcgacuucaacggcggcagaaucagcgugcaguacaaccugagccacagcuacgccguggacgccgccaaccacugcggcaccaucgccaacggcgugcugcagaccuucaugagaauggccuggggcggcagcuacaucgcccuggacagcggcaagggcagcugggacugcaucaugaccagcuaccaguaccugaucauccagaacaccaccugggaggaccacugccaguucagcagacccagccccaucggcuaccugggccugcugagccagagaaccagagacaucuacaucagcagaagacugcugggcaccuucaccuggacccugagcgacagcgagggcaacgagacccccggcggcuacugccugaccagauggaugcugaucgaggccgagcugaagugcuucggcaacaccgccguggccaagugcaacgagaagcacgacgaggaguucugcgacaugcugagacuguucgacuucaacaagcaggccaucagaagacugaagaccgaggcccagaugagcauccagcugaucaacaaggccgugaacgcccugaucaacgaccagcugaucaugaagaaccaccugagagacaucaugggcauccccuacugcaacuacagcaaguacugguaccugaaccacaccgugaccggcaagaccagccugcccagaugcuggcuggugagcaacggcagcuaccugaacgagacccacuucagcgacgacaucgagcagcaggccgacaacaugaucaccgagcugcugcagaaggaguacaucgacagacagggcaagaccccccugggccugguggaccuguucguguucagcaccagcuucuaccugaucagcaucuuccugcaccuggugaagauccccugaggacuagucccuguucccagagcccacuuuuuuuucuuuuuuugaaauaaaauagccugucuuucagaucucaaaggcucuuuucagagccaccaaaaaaaaaaaaaaaaaaaaaaaaaaaaaaaaaaaaaaaaaaaaaaaaaaaaaaaaaaaaaaaaaaaaaaaaaaaaaaaaaaaaaaaaaaaaaaaaaaaaa

SEQ ID NO: 41969 - RNA, 1631 nt, Artificial Sequence
  mRNA product Design a-1 (hSL-A100) comprising derived and/or modified sequence from LASV(Lassa virus/H.sapiens-wt/NGA/2016/ISTH_0017;Clade II)__AVO03567__GPCmut13 (opt4)
aggagagucccgcagucggcguccagcggcucugcuuguucgugugugugucguugcaggccuuauucaagcuuaccaugggccagaucaucaccuucuuccaggaggugccccacgugaucgaggaggugaugaacaucgugcugaucgcccugagccugcuggccauccugaagggcaucuacaacguggccaccugcggccuguucggccuggugagcuuccugcugcugugcggcagaagcugcagcaccaccuacaagggcguguacgagcugcagacccuggagcuggacauggccagccugaacaugaccaugccccugagcugcaccaagaacaacagccaccacuacaucauggugggcaacgagaccggccuggagcugacccugaccaacaccagcaucaucaaccacaaguucugcaaccugagcgacgcccacaagaagaaccuguacgaccacgcccugaugagcaucaucagcaccuuccaccugagcauccccaacuucaaccaguacgaggccaugagcugcgacuucaacggcggcaagaucagcgugcaguacaaccugagccacaccuacgccaucgacgccgccaaccacugcggcaccaucgccaacggcgugcugcagaccuucaugagaauggccuggggcggcagcuacaucgcccuggacagcggcaagggcagcugggacugcaucaugaccagcuaccaguaccugaucauccagaacaccaccugggaggaccacugccaguucagcagacccagccccaucggcuaccugggccugcugagccagagaaccagagacaucuacaucagcagaagacugcugggcaccuucaccuggacccugagcgacagcgagggcaacgagacccccggcggcuacugccugaccagauggaugcugaucgaggccgagcugaagugcuucggcaacaccgccguggccaagugcaacgagaagcacgacgaggaguucugcgacaugcugagacuguucgacuucaacaagcaggccaucagaagacugaagaccgaggcccagaugagcauccagcugaucaacaaggccgugaacgcccugaucaacgaccagcugaucaugaagaaccaccugagagacaucaugggcauccccuacugcaacuacagcaaguacugguaccugaaccacaccgugaccggcaagaccagccugcccagaugcuggcuggugagcaacggcagcuaccugaacgagacccacuucagcgacgacaucgagcagcaggccgacaacaugaucaccgagcugcugcagaaggaguacauggacagacagggcaagaccccccugggccugguggaccuguucguguucagcaccagcuucuaccugaucagcaucuuccugcaccuggugagaauccccugaggacuagucccuguucccagagcccacuuuuuuuucuuuuuuugaaauaaaauagccugucuuucagaucucaaaggcucuuuucagagccaccaaaaaaaaaaaaaaaaaaaaaaaaaaaaaaaaaaaaaaaaaaaaaaaaaaaaaaaaaaaaaaaaaaaaaaaaaaaaaaaaaaaaaaaaaaaaaaaaaaaaa

SEQ ID NO: 41970 - RNA, 1631 nt, Artificial Sequence
  mRNA product Design a-1 (hSL-A100) comprising derived and/or modified sequence from LASV(Lassa virus/H.sapiens-wt/NGA/2018/ISTH_0959;Clade II)__AVV65099__GPCmut13 (opt4)
aggagagucccgcagucggcguccagcggcucugcuuguucgugugugugucguugcaggccuuauucaagcuuaccaugggccagaucaucaccuucuuccaggaggugccccacgugaucgaggaggugaugaacaucgugcugaucgcccugagccugcuggccauccugaagggcaucuacaacguggugaccugcggccuguucggccuggugagcuuccugcugcugugcggcagaagcugcagcaccaccuacaagggcguguacgagcugcagacccuggagcuggacauggccagccugaacaugaccaugccccugagcugcaccaagaacaacagccaccacuacaucauggugggcaacgagaccggccuggagcugacccugaccaacaccagcaucaucaaccacaaguucugcaaccugagcgacgcccacaagaagaaccuguacgaccacgcccugaugagcaucaucagcaccuuccaccugagcauccccaacuucaaccaguacgaggccaugagcugcgacuucaacggcggcaagaucagcgugcaguacaaccugagccacgccuacgccaucgacgccgccaaccacugcggcaccaucgccaacggcgugcugcagaccuucaugagaauggccuggggcggcagcuacaucgcccuggacagcggcaagggcagcugggacugcaucaugaccagcuaccaguaccugaucauccagaacaccaccugggaggaccacugccaguucagcagacccagccccaucggcuaccugggccugcugagccagagaaccagagacaucuacaucagcagaagacugcugggcaccuucaccuggacccugagcgacagcgagggcaacgagacccccggcggcuacugccugaccagauggaugcugaucgaggccgagcugaagugcuucggcaacaccgccguggccaagugcaacgagaagcacgacgaggaguucugcgacaugcugagacuguucgacuucaacaagcaggccaucagaagacugaagaccgaggcccagaugagcauccagcugaucaacaaggccgugaacgcccugaucaacgaccagcugaucaugaagaaccaccugagagacaucaugggcauccccuacugcaacuacagcaaguacugguaccugaaccacaccgugaccggcaagaccagccugcccagaugcuggcuggugagcaacggcagcuaccugaacgagacccacuucagcgacgacaucgagcagcaggccgacaacaugaucaccgagcugcugcagaaggaguacaucgacagacagggcaagaccccccugggccugguggaccuguucguguucagcaccagcuucuaccugaucagcaucuuccugcaccuggugaagauccccugaggacuagucccuguucccagagcccacuuuuuuuucuuuuuuugaaauaaaauagccugucuuucagaucucaaaggcucuuuucagagccaccaaaaaaaaaaaaaaaaaaaaaaaaaaaaaaaaaaaaaaaaaaaaaaaaaaaaaaaaaaaaaaaaaaaaaaaaaaaaaaaaaaaaaaaaaaaaaaaaaaaaa

SEQ ID NO: 41971 - RNA, 1631 nt, Artificial Sequence
  mRNA product Design a-1 (hSL-A100) comprising derived and/or modified sequence from LASV(LASV003-NIG-2008;Clade II)__AIT17580__GPCmut13 (opt4)
aggagagucccgcagucggcguccagcggcucugcuuguucgugugugugucguugcaggccuuauucaagcuuaccaugggccagaucaucaccuucuuccaggaggugccccacgugaucgaggaggugaugaacaucgugcugaucgcccugagccugcuggccauccugaagggcaucuacaacguggccaccugcggccuguucggccuggugagcuuccugcugcugugcggcagaagcugcagcaccaccuacaagggcguguacgagcugcagacccuggagcuggacauggccagccugaacaugaccaugccccugagcugcaccaagaacaacagccaccacuacaucauggugggcaacgagaccggccuggagcugacccugaccaacaccagcaucaucaaccacaaguucugcaaccugagcgacgcccacaagaagaaccuguacgaccacgcccugaugagcaucaucagcaccuuccaccugagcauccccaacuucaaccaguacgaggccaugagcugcgacuucaacggcggcaagaucagcgugcaguacaaccugagccacaccuacgccguggacgccgccaaccacugcggcaccaucgccaacggcgugcugcagaccuucaugagaauggccuggggcggcagcuacaucgcccuggacagcggcaagggcagcugggacugcaucaugaccagcuaccaguaccugaucauccagaacaccaccugggaggaccacugccaguucagcagacccagccccaucggcuaccugggccugcugagccagagaaccagagacaucuacaucagcagaagacugcugggcaccuucaccuggacccugagcgacagcgagagcaacgagacccccggcggcuacugccugaccagauggaugcugaucgaggccgagcugaagugcuucggcaacaccgccguggccaagugcaacgagaagcacgacgaggaguucugcgacaugcugagacuguucgacuucaacaagcaggccaucagaagacugaaggccgaggcccagaugagcauccagcugaucaacaaggccgugaacgcccugaucaacgaccagcugaucaugaagaaccaccugagagacaucaugggcauccccuacugcaacuacagcaaguacugguaccugaaccacaccgugaccggcagaaccagccugcccagaugcuggcuggugagcaacggcagcuaccugaacgagacccacuucagcgacgacaucgagcagcaggccgacaacaugaucaccgagcugcugcagaaggaguacauggacagacagggcaagaccccccugggccugguggaccuguucguguucagcaccagcuucuaccugaucagcaucuuccugcaccuggugaagauccccugaggacuagucccuguucccagagcccacuuuuuuuucuuuuuuugaaauaaaauagccugucuuucagaucucaaaggcucuuuucagagccaccaaaaaaaaaaaaaaaaaaaaaaaaaaaaaaaaaaaaaaaaaaaaaaaaaaaaaaaaaaaaaaaaaaaaaaaaaaaaaaaaaaaaaaaaaaaaaaaaaaaaa

SEQ ID NO: 41972 - RNA, 1631 nt, Artificial Sequence
  mRNA product Design a-1 (hSL-A100) comprising derived and/or modified sequence from LASV(LASV035-NIG-2009;Clade II)__AIT17588__GPCmut13 (opt4)
aggagagucccgcagucggcguccagcggcucugcuuguucgugugugugucguugcaggccuuauucaagcuuaccaugggccagaucaucaccuucuuccaggaggugccccacgugaucgaggaggugaugaacaucgugcugaucgcccugagccugcuggccauccugaagggcaucuacaacguggccaccugcggccuguucggccuggugagcuuccugcugcugugcggcagaagcugcagcaccaccuacaagggcguguacgagcugcagacccuggagcuggacauggccagccugaacaugaccaugccccugagcugcaccaagaacaacagccaccacuacaucauggugggcaacgagaccggccuggagcugacccugaccaacaccagcaucaucaaccacaaguucugcaaccugagcgacgcccacaagaagaaccuguacgaccacgcccugaugagcaucaucagcaccuuccaccugagcauccccaacuucaaccaguacgaggccaugagcugcgacuucaacggcggcaagaucagcgugcaguacaaccugagccacgccuacgccguggacgccgccaaccacugcggcaccaucgccaacggcgugcugcagaccuucaugagaauggccuggggcggcagcuacaucgcccuggacagcggcaagggcagcugggacugcaucaugaccagcuaccaguaccugaucauccagaacaccaccugggaggaccacugccaguucagcagacccagccccaucggcuaccugggccugcugagccagagaaccagagacaucuacaucagcagaagacugcugggcaccuucaccuggacccugagcgacagcgagggcaacgagacccccggcggcuacugccugaccagauggaugcugaucgaggccgagcugaagugcuucggcaacaccgccguggccaagugcaacgagaagcacgacgaggaguucugcgacaugcugagacuguucgacuucaacaagcaggccaucagaagacugaaggccgaggcccagaugagcauccagcugaucaacaaggccgugaacgcccugaucaacgaccagcugaucaugaagaaccaccugagagacaucaugggcauccccuacugcaacuacagcaaguacugguaccugaaccacaccgugaccggcaagaccagccugcccagaugcuggcuggugagcaacggcagcuaccugaacgagacccacuucagcgacgacaucgagcagcaggccgacaacaugaucaccgagcugcugcagaaggaguacaucgacagacagggcaagaccccccugggccugguggaccuguucguguucagcaccagcuucuaccugaucagcaucuuccugcaccuggugaagauccccugaggacuagucccuguucccagagcccacuuuuuuuucuuuuuuugaaauaaaauagccugucuuucagaucucaaaggcucuuuucagagccaccaaaaaaaaaaaaaaaaaaaaaaaaaaaaaaaaaaaaaaaaaaaaaaaaaaaaaaaaaaaaaaaaaaaaaaaaaaaaaaaaaaaaaaaaaaaaaaaaaaaaa

SEQ ID NO: 41973 - RNA, 1631 nt, Artificial Sequence
  mRNA product Design a-1 (hSL-A100) comprising derived and/or modified sequence from LASV(LASV1000-NIG-2009;Clade II)__AIT17782__GPCmut13 (opt4)
aggagagucccgcagucggcguccagcggcucugcuuguucgugugugugucguugcaggccuuauucaagcuuaccaugggccagaucaucaccuucuuccaggaggugccccacgugaucgaggaggugaugaacaucgugcugaucgcccugagccugcuggccauccugaagggcaucuacaacguggccaccugcggccuguucggccuggugagcuuccugcugcugugcggcagaagcugcagcaccaccuacaagggcguguacgagcugcagacccuggagcuggacauggccagccugaacaugaccaugccccugagcugcaccaagaacaacagccaccacuacaucauggugggcaacgagaccggccuggagcugacccugaccaacaccagcaucaucaaccacaaguucugcaaccugagcgacgcccacaagaagaaccuguacgaccacgcccugaugagcaucaucagcaccuuccaccugagcauccccaacuucaaccaguacgaggccaugagcugcgacuucaacggcggcaagaucagcgugcaguacaaccugagccacaccuacgccguggacgccgccaaccacugcggcaccaucgccaacggcgugcugcagaccuucaugagaauggccuggggcggcagcuacaucgcccuggacagcggcaagggcagcugggacugcaucaugaccagcuaccaguaccugaucauccagaacaccaccugggaggaccacugccaguucagcagacccagccccaucggcuaccugggccugcugagccagagaaccagagacaucuacaucagcagaagacugcugggcaccuucaccuggacccugagcgacagcgagggcaacgagacccccggcggcuacugccugaccagauggaugcugaucgaggccgagcugaagugcuucggcaacaccgccguggccaagugcaacgagaagcacgacgaggaguucugcgacaugcugagacuguucgacuucaacaagcaggccaucaagagacugaagaccgaggcccagaugagcauccagcugaucaacaaggccgugaacgcccugaucaacgaccagcugaucaugaagaaccaccugagagacaucaugggcauccccuacugcaacuacagcaaguacugguaccugaaccacaccgugaccggcaagaccagccugcccagaugcuggcuggugagcaacggcagcuaccugaacgagacccacuucagcgacgacaucgagcagcaggccgacaacaugaucaccgagcugcugcagaaggaguacaucgacagacagggcaagaccccccugggccugguggaccuguucguguucagcaccagcuucuaccugaucagcaucuuccugcaccuggugaagauccccugaggacuagucccuguucccagagcccacuuuuuuuucuuuuuuugaaauaaaauagccugucuuucagaucucaaaggcucuuuucagagccaccaaaaaaaaaaaaaaaaaaaaaaaaaaaaaaaaaaaaaaaaaaaaaaaaaaaaaaaaaaaaaaaaaaaaaaaaaaaaaaaaaaaaaaaaaaaaaaaaaaaaa

SEQ ID NO: 41974 - RNA, 1631 nt, Artificial Sequence
  mRNA product Design a-1 (hSL-A100) comprising derived and/or modified sequence from LASV(LASV221-NIG-2010;Clade II)__AIT17624__GPCmut13 (opt4)
aggagagucccgcagucggcguccagcggcucugcuuguucgugugugugucguugcaggccuuauucaagcuuaccaugggccagaucaucaccuucuuccaggaggugccccacgugaucgaggaggugaugaacaucgugcugaucgcccugagccugcuggccauccugaagggcaucuacaacguggccaccugcggccuguucggccuggugagcuuccugcugcugugcggcagaagcugcagcaccaccuacaagggcguguacgagcugcagacccuggagcuggacauggccagccugaacaugaccaugccccugagcugcaccaagaacaacagccaccacuacaucauggugggcaacgagaccggccuggagcugacccugaccaacaccagcaucaucaaccacaaguucugcaaccugagcgacgcccacaagaagaaccuguacgaccacgcccugaugagcaucaucagcaccuuccaccugagcauccccaacuucaaccaguacgaggccaugagcugcgacuucaacggcggcaagaucagcgugcaguacaaccugagccacaccuacgccaucgacgccgccaaccacugcggcaccaucgccaacggcgugcugcagaccuucaugagaauggccuggggcggcagcuacaucgcccuggacagcggcaagggcagcugggacugcaucaugaccagcuaccaguaccugaucauccagaacaccaccugggaggaccacugccaguucagcagacccagccccaucggcuaccugggccugcugagccagagaaccagagacaucuacaucagcagaagacugcugggcaccuucaccuggacccugagcgacagcgagggcaacgagacccccggcggcuacugccugaccagauggaugcugaucgaggccgagcugaagugcuucggcaacaccgccguggccaagugcaacgagaagcacgacgaggaguucugcgacaugcugagacuguucgacuucaacaagcaggccaucagaagacugaagaccgaggcccagaugagcauccagcugaucaacaaggccgugaacgcccugaucaacgaccagcugaucaugaagaaccaccugagagacaucaugggcauccccuacugcaacuacagcaaguacugguaccugaaccacaccgugaccggcaagaccagccugcccagaugcuggcuggugagcaacggcagcuaccugaacgagacccacuucagcgacgacaucgagcagcaggccgacaacaugaucaccgagaugcugcagaaggaguacauggacagacagggcaagaccccccugggccugguggaccuguucguguucagcaccagcuucuaccugaucagcaucuuccugcaccuggugaagauccccugaggacuagucccuguucccagagcccacuuuuuuuucuuuuuuugaaauaaaauagccugucuuucagaucucaaaggcucuuuucagagccaccaaaaaaaaaaaaaaaaaaaaaaaaaaaaaaaaaaaaaaaaaaaaaaaaaaaaaaaaaaaaaaaaaaaaaaaaaaaaaaaaaaaaaaaaaaaaaaaaaaaaa

SEQ ID NO: 41975 - RNA, 1631 nt, Artificial Sequence
  mRNA product Design a-1 (hSL-A100) comprising derived and/or modified sequence from LASV(LASV237-NIG-2010;Clade II)__AIT17638__GPCmut13 (opt4)
aggagagucccgcagucggcguccagcggcucugcuuguucgugugugugucguugcaggccuuauucaagcuuaccaugggccagaucaucaccuucuuccaggaggugccccacgugaucgaggaggugaugaacaucgugcugaucgcccugagccugcuggccauccugaagggcaucuacaacguggccaccugcggccuguucggccuggugagcuuccugcugcugugcggcagaagcugcagcaccaccuacaagggcguguacgagcugcagacccuggagcuggacauggccagccugaacaugaccaugccccugagcugcaccaagaacaacagccaccacuacaucauggugggcaacgagaccggccuggagcugacccugaccaacaccagcaucaucaaccacaaguucugcaaccugagcgacgcccacaagaaggaccuguacgaccacgcccugaugagcaucaucagcaccuuccaccugagcauccccaacuucaaccaguacgaggccaugagcugcgacuucaacggcggcaagaucagcgugcaguacaaccugagccacaccuacgccguggacgccgccaaccacugcggcaccaucgccaacggcgugcugcagaccuucaugagaauggccuggggcggcagcuacaucgcccuggacagcggcaagggcagcugggacugcaucaugaccagcuaccaguaccugaucauccagaacaccaccugggaggaccacugccaguucagcagacccagccccaucggcuaccugggccugcugagccagagaaccagagacaucuacaucagcagaagacugcugggcaccuucaccuggacccugagcgacagcgagggcaacgagacccccggcggcuacugccugaccagauggaugcugaucgaggccgagcugaagugcuucggcaacaccgccguggccaagugcaacgagaagcacgacgaggaguucugcgacaugcugagacuguucgacuucaacaagcaggccaucagaagacugaagaccgaggcccagaugagcauccagcugaucaacaaggccgugaacgcccugaucaacgaccagcugaucaugaagaaccaccugagagacaucaugggcauccccuacugcaacuacagcaaguacugguaccugaaccacaccgugaccggcaagaccagccugcccagaugcuggcuggugagcaacggcagcuaccugaacgagacccacuucagcgacgacaucgagcagcaggccgacaacaugaucaccgagcugcugcagaaggaguacauggacagacagggcaagaccccccugggccugguggaccuguucguguucagcaccagcuucuaccugaucagcaucuuccugcaccugaucaagauccccugaggacuagucccuguucccagagcccacuuuuuuuucuuuuuuugaaauaaaauagccugucuuucagaucucaaaggcucuuuucagagccaccaaaaaaaaaaaaaaaaaaaaaaaaaaaaaaaaaaaaaaaaaaaaaaaaaaaaaaaaaaaaaaaaaaaaaaaaaaaaaaaaaaaaaaaaaaaaaaaaaaaaa

SEQ ID NO: 41976 - RNA, 1631 nt, Artificial Sequence
  mRNA product Design a-1 (hSL-A100) comprising derived and/or modified sequence from LASV(LASV253-NIG-2011;Clade II)__AIT17670__GPCmut13 (opt4)
aggagagucccgcagucggcguccagcggcucugcuuguucgugugugugucguugcaggccuuauucaagcuuaccaugggccagaucaucaccuucuuccaggaggugccccacgugaucgaggaggugaugaacaucgugcugaucgcccugagccugcuggccauccugaagggcaucuacaacguggccaccugcggccuguucggccuggugagcuuccugcugcugugcggcagaagcugcagcaccaccuacaagggcguguacgagcugcagacccuggagcuggacauggccagccugaacaugaccaugccccugagcugcaccaagaacaacagccaccacuacaucauggugggcaacgagaccggccuggagcugacccugaccaacaccagcaucaucaaccacaaguucugcaaccugagcgacgcccacaagaagaaccuguacgaccacgcccugaugagcaucaucagcaccuuccaccugagcauccccaacuucaaccaguacgaggccaugagcugcgacuucaacggcggcaagaucagcgugcaguacaaccugagccacaccuacgccguggacgccgccaaccacugcggcaccaucgccaacggcgugcugcagaccuucaugagaauggccuggggcggcagcuacaucgcccuggacagcggcaagggcagcugggacugcaucaugaccagcuaccaguaccugaucauccagaacaccaccugggaggaccacugccaguucagcagacccagccccaucggcuaccugggccugcugagccagagaaccagagacaucuacaucagcagaagacugcugggcaccuucaccuggacccugagcgacagcgagggcaacgagacccccggcggcuacugccugaccagauggaugcugaucgaggccgagcugaagugcuucggcaacaccgccguggccaagugcaacgagaagcacgacgaggaguucugcgacaugcugagacuguucgacuucaacaagcaggccaucagaagacugaaggccgaggcccagaugagcauccagcugaucaacaaggccgugaacgcccugaucaacgaccagcugaucaugaagaaccaccugagagacaucaugggcauccccuacugcaacuacagcaaguacugguaccugaaccacaccgugaccggcagaaccagccugcccagaugcuggcuggugagcaacggcagcuaccugaacgagacccacuucagcgacgacaucgagcagcaggccgacaacaugaucaccgagcugcugcagaaggaguacaucgacagacagggcaagaccccccugggccugguggaccuguucguguucagcaccagcuucuaccugaucagcaucuuccugcaccuggugaagauccccugaggacuagucccuguucccagagcccacuuuuuuuucuuuuuuugaaauaaaauagccugucuuucagaucucaaaggcucuuuucagagccaccaaaaaaaaaaaaaaaaaaaaaaaaaaaaaaaaaaaaaaaaaaaaaaaaaaaaaaaaaaaaaaaaaaaaaaaaaaaaaaaaaaaaaaaaaaaaaaaaaaaaa

SEQ ID NO: 41977 - RNA, 1631 nt, Artificial Sequence
  mRNA product Design a-1 (hSL-A100) comprising derived and/or modified sequence from LASV(LASV254-NIG-2011;Clade II)__AIT17674__GPCmut13 (opt4)
aggagagucccgcagucggcguccagcggcucugcuuguucgugugugugucguugcaggccuuauucaagcuuaccaugggccagaucaucaccuucuuccaggaggugccccacgugaucgaggaggugaugaacaucgugcugaucgcccugagccugcuggccauccugaagggcaucuacaacguggccaccugcggccuguucggccuggugagcuuccugcugcugugcggcagaagcugcagcaccaccuacaagggcguguacgagcugcagacccuggagcuggacaugaccaaccugaacaugaccaugccccugagcugcaccaagaacaacagccaccacuacaucauggugggcaacgagaccggccuggagcugacccugaccaacaccagcaucaucaaccacaaguucugcaaccugagcgacgcccacaagaagaaccuguacaaccacgcccugaugagcaucaucagcaccuuccaccugagcauccccaacuucaaccaguacgaggccaugagcugcgacuucaacggcggcaagaucagcgugcaguacaaccugagccacagcuacgccguggacgccgccaaccacugcggcaccaucgccaacggcgugcugcagaccuucaugagaauggccuggggcggcagcuacaucgcccuggacagcggcaagggcaacugggacugcaucaugaccagcuaccaguaccugaucauccagaacaccaccugggaggaccacugccaguucagcagacccagccccaucggcuaccugggccugcugagccagagaaccagagacaucuacaucagcagaagacugcugggcaccuucaccuggacccugagcgacagcgagggcaacgagacccccggcggcuacugccugaccagauggaugcugaucgaggccgagcugaagugcuucggcaacaccgccguggccaagugcaacgagaagcacgacgaggaguucugcgacaugcugagacuguucgacuucaacaagcaggccaucagaagacugaagaccgaggcccaggccaacauccagcugaucaacaaggccgugaacgcccugaucaacgaccagcugaucaugaagaaccaccugagagacaucaugggcauccccuacugcaacuacagcaaguacugguaccugaaccacaccgugaccggcaagaccagccugcccagaugcuggcuggugagcaacggcagcuaccugaacgagacccacuucagcgacgacaucgagcagcaggccgacaacaugaucaccgagcugcugcagaaggaguacauggacagacagggcaagaccccccugggccugguggaccuguucguguucagcaccagcuucuaccugaucagcaucuuccugcaccuggugaagauccccugaggacuagucccuguucccagagcccacuuuuuuuucuuuuuuugaaauaaaauagccugucuuucagaucucaaaggcucuuuucagagccaccaaaaaaaaaaaaaaaaaaaaaaaaaaaaaaaaaaaaaaaaaaaaaaaaaaaaaaaaaaaaaaaaaaaaaaaaaaaaaaaaaaaaaaaaaaaaaaaaaaaaa

SEQ ID NO: 41978 - RNA, 1631 nt, Artificial Sequence
  mRNA product Design a-1 (hSL-A100) comprising derived and/or modified sequence from LASV(Nig08-A19;Clade III)__ADU56618__GPCmut13 (opt4)
aggagagucccgcagucggcguccagcggcucugcuuguucgugugugugucguugcaggccuuauucaagcuuaccaugggccagaucgugaccuucuuccaggaggugccccacgugaucgaggaggugaugaacaucgugcugaucgcccugagcauccuggccauccugaagggccuguacaacaucgccaccugcggccugaucggccuggugaccuuccugcugcugagcggcagaagcugcagcaugaccuacaagggcguguacgagcugcagacccuggagcugaacaugaacacccugaacaugaccaugccccugagcugcaccaagaacaacagccaccacuacaucauggugggcaacgagaccggccuggagcugacccugaccaacaccagccugcugcaccacaaguucugcaaccugagcgacgcccacaagaagaaccuguacgaccacacccugaugagcaucaucagcaccuuccaccugagcauccccaacuucaaccaguacgaggccaugagcugcgacuucaacggcggcaagaucaccgugcaguacaaccugagccacagcuacgccaucgacgccgccaaccacugcggcaccguggccaacggcgugcugcagaccuucaugagaauggccuggggcggcagcuacaucgcccuggacagcggcagaggcaagugggacugcaucaugaccagcuaccaguaccugaucauccagaacaccaccugggaggaccacugccaguucagcagacccagccccaucggcuaccugggccugcugagccagagaaccagagacaucuacaucagcagaagacugcugggcaccuucaccuggacccugagcgacagcgagggcaacgagacccccggcggcuacugccugaccagauggaugcugaucgaggccgagcugaagugcuucggcaacaccgccguggccaagugcaacgagaagcacgacgaggaguucugcgacaugcugagacuguucgacuucaacaagcaggccaucagaagacugaaggccgaggcccagaugagcauccagcugaucaacaaggccgugaacgcccugaucaacgaccagcugaucaugaagaaccaccugagagacaucaugggcauccccuacugcaacuacagcaaguacugguaccugaaccacaccagcaccggcagaaccagccugcccagaugcuggcuggugagcaacggcagcuaccugaacgagacccacuucagcgacgacaucgagcagcaggccgacaacaugaucaccgagaugcugcagaaggaguaccuggacagacagggcaagaccccccugggccugguggaccuguucguguucagcaccagcuucuaccugaucagcaucuuccugcaccuggugaagauccccugaggacuagucccuguucccagagcccacuuuuuuuucuuuuuuugaaauaaaauagccugucuuucagaucucaaaggcucuuuucagagccaccaaaaaaaaaaaaaaaaaaaaaaaaaaaaaaaaaaaaaaaaaaaaaaaaaaaaaaaaaaaaaaaaaaaaaaaaaaaaaaaaaaaaaaaaaaaaaaaaaaaaa

SEQ ID NO: 41979 - RNA, 1634 nt, Artificial Sequence
  mRNA product Design a-1 (hSL-A100) comprising derived and/or modified sequence from LASV(G1180-SLE-2010;Clade IV)__AIT17168__GPCmut13 (opt4)
aggagagucccgcagucggcguccagcggcucugcuuguucgugugugugucguugcaggccuuauucaagcuuaccaugggccagaucgugaccuucuuccaggaggugccccacgugaucgaggaggugaugaacaucgugcugaucgcccugagcauccuggccgugcugaagggccuguacaacuucgccaccugcggccuggugggccugcugaccuuccugcugcugugcggcagaagcugcaccgccagcagauacaagggcguguacgagcugcagacccuggagcugaacauggagacccugaacaugaccaugccccugagcugcaccaagaacaacagccaccacuacaucauggugggcaacgagaccggccuggagcugacccugaccaacaccagcaucaucaaccacaaguucugcaaccugagcgacgcccacaagaagaaccuguacgaccacgcccugaugagcaucaucagcaccuuccaccugagcauccccaacuucaaccaguacgaggccaugagcugcgacuucaacggcggcaagaucagcgugcaguacaaccugagccacagcuacgccggcgacgccgccaaccacugcggcaccguggccaacggcgugcugcagaccuucaugagaauggccuggggcggcagcuacaucgcccuggacagcggccacggcagcugggacugcaucaugaccagcuaccaguaccugaucauccagaacaccaccugggaggaccacugccaguucagcagacccagccccaucggcuaccugggccugcugagccagagaaccagagacaucuacaucagcagaagacugcugggcaccuucaccuggacccugagcgacagcgagggcaaggacacccccggcggcuacugccugaccagauggaugcugaucgaggccgagcugaagugcuucggcaacaccgccguggccaagugcaacgagaagcacgacgaggaguucugcgacaugcugagacuguucgacuucaacaagcaggccauccagagacugaaggccgaggcccagaugagcauccagcugaucaacaaggccgugaacgcccugaucaacgaccagcugaucaugaagaaccaccugagagacaucaugggcauccccuacugcaacuacagcaaguacugguaccugaaccacaccaccaccggcaagaccagccugcccaagugcuggcuggugagcaacggcagcuaccugaacgagacccacuucagcgacgacaucgagcagcaggccgacaacaugaucaccgagaugcugcagaaggaguacauggagagacagggcaagaccccccugggccugguggaccuguucguguucagcaccagcuucuaccugaucagcaucuuccugcaccuggugaagauccccugaggacuagucccuguucccagagcccacuuuuuuuucuuuuuuugaaauaaaauagccugucuuucagaucucaaaggcucuuuucagagccaccaaaaaaaaaaaaaaaaaaaaaaaaaaaaaaaaaaaaaaaaaaaaaaaaaaaaaaaaaaaaaaaaaaaaaaaaaaaaaaaaaaaaaaaaaaaaaaaaaaaaa

SEQ ID NO: 41980 - RNA, 1634 nt, Artificial Sequence
  mRNA product Design a-1 (hSL-A100) comprising derived and/or modified sequence from LASV(G1442-SLE-2011;Clade IV)__AIT17180__GPCmut13 (opt4)
aggagagucccgcagucggcguccagcggcucugcuuguucgugugugugucguugcaggccuuauucaagcuuaccaugggccagaucgugaccuucuuccaggaggugccccacgugaucgaggaggugaugaacaucgugcugaucgcccugagcauccuggccgugcugaagggccuguacaacguggccaccugcggccugaucggccuggugaccuuccugcugcugugcggcagaagcugcaccaccacccuguacaagggcguguacgagcugcagacccuggagcugaacauggagacccugaacaugaccaugccccugagcugcaccaagaacaacagccaccacuacaucagagugggcaacgagaccggccuggagcugacccugaccaacaccagcaucaucaaccacaaguucugcaaccugagcgacgcccacaagaagaaccuguacgaccacgcccugaugagcaucaucagcaccuuccaccugagcauccccaacuucaaccaguacgaggccaugagcugcgacuucaacggcggcaagaucagcgugcaguacaaccugagccacagcuacgccggcgacgccgccaaccacugcggcaccguggccaacggcgugcugcagaccuucaugagaauggccuggggcggcagcuacaucgcccuggacagcggcagaggcaacugggacugcaucaugaccagcuaccaguaccugaucauccagaacaccaccugggacgaccacugccaguucagcagacccagccccaucggcuaccugggccugcugagccagagaaccagagacguguacaucagcagaagacugcugggcaccuucaccuggacccugagcgacagcgagggcaaggacacccccggcggcuacugccugaccagauggaugcugaucgaggccgagcugaagugcuucggcaacaccgccguggccaagugcaacgagaagcacgacgaggaguucugcgacaugcugagacuguucgacuucaacaagcaggccauccagagacugaaggccgaggcccagaugagcauccagcugaucaacaaggccgugaacgcccugaucaacgaccagcugaucaugaagaaccaccugagagacaucaugggcauccccuacugcaacuacagcaaguacugguaccugaacaacaccgccaccggcaagaccagccugcccaagugcuggcugaucagcaacggcagcuaccugaacgagacccacuucagcgacgacaucgagcaggaggccgacaacaugaucaccgagaugcugcagaaggaguacauggagagacagggcaagaccccccugggccugguggaccuguucguguucagcaccagcuucuaccugaucagcaucuuccugcaccuggugaagauccccugaggacuagucccuguucccagagcccacuuuuuuuucuuuuuuugaaauaaaauagccugucuuucagaucucaaaggcucuuuucagagccaccaaaaaaaaaaaaaaaaaaaaaaaaaaaaaaaaaaaaaaaaaaaaaaaaaaaaaaaaaaaaaaaaaaaaaaaaaaaaaaaaaaaaaaaaaaaaaaaaaaaaa

SEQ ID NO: 41981 - RNA, 1634 nt, Artificial Sequence
  mRNA product Design a-1 (hSL-A100) comprising derived and/or modified sequence from LASV(G3010-SLE-2013;Clade IV)__AIT17344__GPCmut13 (opt4)
aggagagucccgcagucggcguccagcggcucugcuuguucgugugugugucguugcaggccuuauucaagcuuaccaugggccagaucgugaccuucuuccaggaggugccccacgugaucgaggaggugaugaacaucgugcugaucgcccugagcauccuggccgugcugaagggccuguacaacuucgccaccugcggccuggugggccuggugaccuuccugcugcugugcggcagaagcugcaccaccagccuguacaagggcguguacgagcugcagacccuggagcugaacauggagacccugaacaugaccaugccccugagcugcaccaagaacaacagccaccacuacaucauggugggcaacgagaccggccuggagcugacccugaccaacaccagcaucaucaaccacaaguucugcaaccugagcgacgcccacaagaagaaccuguacaaccacgcccugaugagcaucaucagcaccuuccaccugagcauccccaacuucaaccaguacgaggccaugagcugcgacuucaacggcggcaagaucagcgugcaguacaaccugagccacagcuacgccggcgacgccgccagccacugcggcaccguggccaacggcgugcugcagaccuucaugagaauggccuggggcggcagcuacaucgcccuggacagcggcuacggcaagugggacugcaucaugaccagcuaccaguaccugaucauccagaacaccaccugggaggaccacugccaguucagcagacccagccccaucggcuaccugggccugcugagccagagaaccagagacaucuacaucagcagaagacugcugggcaccuucaccuggacccugagcgacagcgagggcaaggacacccccggcggcuacugccugaccagauggaugcugaucgaggccgagcugaagugcuucggcaacaccgccguggccaagugcaacgagaagcacgacgaggaguucugcgacaugcugagacuguucgacuucaacaagcaggccauccagagacugaagaccgaggcccagaugagcauccagcugaucaacaaggccgugaacgcccugaucaacgaccagcugaucaugaagaaccaccugagagacaucaugggcauccccuacugcaacuacagcaaguacugguaccugaaccacaccaccaccggcaagaccagccugcccaagugcuggcuggugagcaacggcagcuaccugaacgagacccacuucagcgacgacaucgagcagcaggccgacaacaugaucaccgagaugcugcagaaggaguacauggagagacagggcaagaccccccugggccugguggaccuguucguguucagcaccagcuucuaccugaucagcaucuuccugcaccuggugaagauccccugaggacuagucccuguucccagagcccacuuuuuuuucuuuuuuugaaauaaaauagccugucuuucagaucucaaaggcucuuuucagagccaccaaaaaaaaaaaaaaaaaaaaaaaaaaaaaaaaaaaaaaaaaaaaaaaaaaaaaaaaaaaaaaaaaaaaaaaaaaaaaaaaaaaaaaaaaaaaaaaaaaaaa

SEQ ID NO: 41982 - RNA, 1634 nt, Artificial Sequence
  mRNA product Design a-1 (hSL-A100) comprising derived and/or modified sequence from LASV(G502-SLE-2009;Clade IV)__AIT17126__GPCmut13 (opt4)
aggagagucccgcagucggcguccagcggcucugcuuguucgugugugugucguugcaggccuuauucaagcuuaccaugggccagaucgugaccuucuuccaggaggugccccacgugaucgaggaggugaugaacaucgugcugaucgcccugagcauccuggccgugcugaagggccuguacaacuucgccaccugcggccuggugggccugcugaccuuccugcugcugugcggcagaagcugcaccaccggccuguacaagggcguguacgagcugcagacccuggagcugaacauggagacccugaacaugaccaugccccugagcugcaccaagaacaacagccaccacuacaucauggugggcaacgagaccggccuggagcugacccugaccaacaccagcaucaucaaccacaaguucugcaaccugagcgacgcccacaagaagaaccuguacgaccacgcccugaugagcaucaucagcaccuuccaccugagcauccccaacuucaaccaguacgaggccaugagcugcgacuucaacggcggcaagaucagcgugcaguacaaccugagccacagcuacgccggcgacgccgccgaccacugcggcaccguggccaacggcgugcugcagaccuucaugagaauggccuggggcggcagcuacaucgcccuggacagcggcagaggcagaugggacugcaucaugaccagcuaccaguaccugaucauccagaacaccaccugggaggaccacugccaguucagcagacccagccccaucggcuaccugggccugcugagccagagaaccagagacaucuacaucagcagaagacugcugggcaccuucaccuggacccugagcgacagcgagggcaaggacacccccggcggcuacugccugaccagauggaugcugaucgaggccgagcugaagugcuucggcaacaccgccguggccaagugcaacgagaagcacgacgaggaguucugcgacaugcugagacuguucgacuucaacaagcaggccauccagagacugaaggccgaggcccagaugagcauccagcugaucaacaaggccgugaacgcccugaucaacgaccagcuggugaugaagaaccaccugagagacaucaugggcauccccuacugcaacuacagcagauacugguaccugaaccacaccaccaccggcagaaccagccugcccaagugcuggcuggugagcaacggcagcuaccugaacgagacccacuucagcgacgacaucgagcagcaggccgacaacaugaucaccgagaugcugcagaaggaguacauggagagacagggcaagaccccccugggccugguggaccuguucguguucagcaccagcuucuaccugaucagcaucuuccugcaccuggugaagauccccugaggacuagucccuguucccagagcccacuuuuuuuucuuuuuuugaaauaaaauagccugucuuucagaucucaaaggcucuuuucagagccaccaaaaaaaaaaaaaaaaaaaaaaaaaaaaaaaaaaaaaaaaaaaaaaaaaaaaaaaaaaaaaaaaaaaaaaaaaaaaaaaaaaaaaaaaaaaaaaaaaaaaa

SEQ ID NO: 41983 - RNA, 1634 nt, Artificial Sequence
  mRNA product Design a-1 (hSL-A100) comprising derived and/or modified sequence from LASV(G733-SLE-2010;Clade IV)__AIT17154__GPCmut13 (opt4)
aggagagucccgcagucggcguccagcggcucugcuuguucgugugugugucguugcaggccuuauucaagcuuaccaugggccagaucgugaccuucuuccaggaggugccccacgugaucgaggaggugaugaacaucgugcugaucgcccugagcauccuggccgugcugaagggccuguacaacuucgccaccugcggcaucgugggccuggugagcuuccugcugcugugcggcagaagcugcaccaccagccuguacaagggcguguacgagcugcagacccuggagcugaacauggagacccugaacaugaccaugccccugagcugcaccaagaacaacagccaccacuacaucauggugggcaacgagaccggccuggagcugacccugaccaacaccagcaucaucaaccacaaguucugcaaccugagcgacgcccacaagaagaaccuguacgaccacgcccugaugagcaucaucagcaccuuccaccugagcauccccaacuucaaccaguacgaggccaugagcugcgacuucaacggcggcaagaucagcgugcaguacaaccugagccacagcuacgccggcgacgccgccaaccacugcggcaccaucgccaacggcgugcugcagaccuucaugagaauggccuggggcggcagcuacaucgcccuggacagcggcagagacagaugggacugcaucaugaccagcuaccaguaccugaucauccagaacaccaccugggaggaccacugccaguucagcagacccagccccaucggcuaccugggccugcugagccagagaaccagagacaucuacaucagcagaagacugcugggcaccuucaccuggacccugagcgacagcgagggcaaggacacccccggcggcuacugccugaccagauggaugcugaucgaggccgagcugaagugcuucggcaacaccgccguggccaagugcaacgagaagcacgacgaggaguucugcgacaugcugagacuguucgacuucaacaagcaggccauccagagacugaaggccgaggcccagaugagcauccagcugaucaacaaggccgugaacgcccugaucaacgaccagcugaucaugaagaaccaccugagagacaucaugggcauccccuacugcaacuacagcaaguacugguaccugaaccacaccaccaccggcaagaccagccugcccaagugcuggcuggugagcaacggcagcuaccugaacgagacccacuucagcgacgacaucgagcagcaggccgacaacaugaucaccgagaugcugcagaaggaguacauggagagacagggcaagaccccccugggccugguggaccuguucguguucagcaccagcuucuaccugaucagcaucuuccugcaccuggugaagauccccugaggacuagucccuguucccagagcccacuuuuuuuucuuuuuuugaaauaaaauagccugucuuucagaucucaaaggcucuuuucagagccaccaaaaaaaaaaaaaaaaaaaaaaaaaaaaaaaaaaaaaaaaaaaaaaaaaaaaaaaaaaaaaaaaaaaaaaaaaaaaaaaaaaaaaaaaaaaaaaaaaaaaa

SEQ ID NO: 41984 - RNA, 1634 nt, Artificial Sequence
  mRNA product Design a-1 (hSL-A100) comprising derived and/or modified sequence from MOPV/LASV reassortant(IGS-1;Clade IV)__AFY05576__GPCmut13 (opt4)
aggagagucccgcagucggcguccagcggcucugcuuguucgugugugugucguugcaggccuuauucaagcuuaccaugggccagaucgugaccuucuuccaggaggugccccacgugaucgaggaggugaugaacaucgugcugaucgcccugagcgugcuggccgugcugaagggccuguacaacuucgccaccugcggccuggugggccuggugaccuuccugcugcugugcggcagaagcugcaccaccagccuguacaagggcguguacgagcugcagacccuggagcugaacauggagacccugaacaugaccaugccccugagcugcaccaagaacaacagccaccacuacaucauggugggcaacgagaccggccuggagcugacccugaccaacaccagcaucaucaaccacaaguucugcaaccugagcgacgcccacaagaagaaccuguacgaccacgcccugaugagcaucaucagcaccuuccaccugagcauccccaacuucaaccaguacgaggccaugagcugcgacuucaacggcggcaagaucagcgugcaguacaaccugagccacagcuacgccggcgacgccgccaaccacugcggcaccguggccaacggcgugcugcagaccuucaugagaauggccuggggcggcagcuacaucgcccuggacagcggcagaggcaacugggacugcaucaugaccagcuaccaguaccugaucauccagaacaccaccugggaggaccacugccaguucagcagacccagccccaucggcuaccugggccugcugagccagagaaccagagacaucuacaucagcagaagacugcugggcaccuucaccuggacccugagcgacagcgagggcgaggacacccccggcggcuacugccugaccagauggaugcugaucgaggccgagcugaagugcuucggcaacaccgccguggccaagugcaacgagaagcacgacgaggaguucugcgacaugcugagacuguucgacuucaacaagcaggccauccagagacugaaggccgaggcccagaugagcauccagcugaucaacaaggccgugaacgcccugaucaacgaccagcugaucaugaagaaccaccugagagacaucaugggcauccccuacugcaacuacagcaaguacugguaccugaaccacaccaccaccggcagaaccagccugcccaagugcuggcuggugagcaacggcagcuaccugaacgagacccacuucagcgacgacaucgagcagcaggccgacaacaugaucaccgagaugcugcagaaggaguacauggagagacagggcaagaccccccugggccugguggaccuguucguguucagcaccagcuucuaccugaucagcaucuuccugcaccuggugaagauccccugaggacuagucccuguucccagagcccacuuuuuuuucuuuuuuugaaauaaaauagccugucuuucagaucucaaaggcucuuuucagagccaccaaaaaaaaaaaaaaaaaaaaaaaaaaaaaaaaaaaaaaaaaaaaaaaaaaaaaaaaaaaaaaaaaaaaaaaaaaaaaaaaaaaaaaaaaaaaaaaaaaaaa

SEQ ID NO: 41985 - RNA, 1634 nt, Artificial Sequence
  mRNA product Design a-1 (hSL-A100) comprising derived and/or modified sequence from LASV(LM765-SLE-2012;Clade IV)__AIT17814__GPCmut13 (opt4)
aggagagucccgcagucggcguccagcggcucugcuuguucgugugugugucguugcaggccuuauucaagcuuaccaugggccagaucgugaccuucuuccaggaggugccccacgugaucgaggaggugaugaacaucgugcugaucgcccugagcauccuggccgugcugaagggccuguacaacuucgccaccugcggccuggugggccuggugaccuuccugcugcugugcggcagaagcugcaccaccagccuguacaagggcguguacgagcugcagacccuggagcugaacauggagacccugaacaugaccaugccccugagcugcaccaagaacaacagccaccacuacaucauggugggcaacgagaccggccuggagcugacccugaccaacaccagcaucaucgaccacaaguucugcaaccugagcgacgcccacagaaagaaccuguacgaccacgcccugaugagcaucaucagcaccuuccaccugagcauccccaacuucaaccaguacgaggccaugagcugcgacuucaacggcggcaagaucagcgugcaguacaaccugagccacagcuacgccaaggacgccgccgaccacugcggcaccguggccaacggcgugcugcagaccuucaugagaauggccuggggcggcagcuacaucgcccuggacagcggcagaggcagaugggacugcaucaugaccagcuaccaguaccugaucauccagaacaccaccugggaggaccacugccaguucagcagacccagccccaucggcuaccugggccugcugagccagagaaccagagacaucuacaucagcagaagacugcugggcaccuucaccuggacccugagcgacagcgagggcaaggacacccccggcggcuacugccugaccagauggaugcugaucgaggccgagcugaagugcuucggcaacaccgccguggccaagugcaacgagaagcacgacgaggaguucugcgacaugcugagacuguucgacuucaacaagcaggccauccagagacugaaggccgaggcccagaugagcauccagcugaucaacaaggccgugaacgcccugaucaacgaccagcugaucaugaagaaccaccugagagacaucaugggcauccccuacugcaacuacagcaaguacugguaccugaaccacaccaccaccggcaagaccagccugcccaagugcuggcuggugagcaacggcagcuaccugaacgagacccacuucagcgacgacaucgagcagcaggccgacaacaugaucaccgagaugcugcagaaggaguacauggagagacagggcaagaccccccugggccugguggaccuguucguguucagcaccagcuucuaccugaucagcaucuuccugcaccuggugaagauccccugaggacuagucccuguucccagagcccacuuuuuuuucuuuuuuugaaauaaaauagccugucuuucagaucucaaaggcucuuuucagagccaccaaaaaaaaaaaaaaaaaaaaaaaaaaaaaaaaaaaaaaaaaaaaaaaaaaaaaaaaaaaaaaaaaaaaaaaaaaaaaaaaaaaaaaaaaaaaaaaaaaaaa

SEQ ID NO: 41986 - RNA, 1634 nt, Artificial Sequence
  mRNA product Design a-1 (hSL-A100) comprising derived and/or modified sequence from LASV(LM776-SLE-2012;Clade IV)__AIT17824__GPCmut13 (opt4)
aggagagucccgcagucggcguccagcggcucugcuuguucgugugugugucguugcaggccuuauucaagcuuaccaugggccagaucgugaccuucuuccaggaggugccccacgugaucgaggaggugaugaacaucgugcugaucgcccugagcauccuggccgugcugaagggccuguacaacuucgccaccugcggccuggugggccuggugaccuuccugcugcugugcggcagaagcugcaccaccagcguguacaagggcguguacgagcugcagacccuggagcugaacauggagacccugaacaugaccaugccccugagcugcaccaagaacaacagccaccacuacaucauggugggcaacgagaccggccuggagcugacccugaccaacaccagcaucaucaaccacaaguucugcaaccugagcgacgcccacaagaagaaccuguacgaccacgcccugaugagcaucaucagcaccuuccaccugagcauccccaacuucaaccaguacgaggccaugagcugcgacuucaacggcggcaagaucagcgugcaguacaaccugagccacagcuacgccggcgacgccgccaaccacugcggcaccguggccaacggcgugcugcagaccuucaugagaauggccuggggcggcagcuacaucgcccuggacagcggccacggcaagugggacugcaucaugaccagcuaccaguaccugaucauccagaacaccaccugggaggaccacugccaguucagcagacccagccccaucggcuaccugggccugcugagccagagaaccagagacaucuacaucagcagaagacugcugggcaccuucaccuggacccugagcgacagcgagggcaaggacacccccggcggcuacugccugaccagauggaugcugaucgaggccgagcugaagugcuucggcaacaccgccguggccaagugcaacgagaagcacgacgaggaguucugcgacaugcugagacuguucgacuucaacaagcaggccauccagagacugaaggccgaggcccagaugagcauccagcugaucaacaaggccgugaacgcccugaucaacgaccagcugaucaugaagaaccaccugagagacaucaugggcauccccuacugcaacuacagcaaguacugguaccugaaccacaccaccaccggcaagaccagccugcccaagugcuggcuggugagcaacggcagcuaccugaacgagacccacuucagcgacgacaucgagcagcaggccgacaacaugaucaccgagaugcugcagaaggaguacauggagagacagggcaagaccccccugggccugguggaccuguucguguucagcaccagcuucuaccugaucagcaucuuccugcaccuggugaagauccccugaggacuagucccuguucccagagcccacuuuuuuuucuuuuuuugaaauaaaauagccugucuuucagaucucaaaggcucuuuucagagccaccaaaaaaaaaaaaaaaaaaaaaaaaaaaaaaaaaaaaaaaaaaaaaaaaaaaaaaaaaaaaaaaaaaaaaaaaaaaaaaaaaaaaaaaaaaaaaaaaaaaaa

SEQ ID NO: 41987 - RNA, 1634 nt, Artificial Sequence
  mRNA product Design a-1 (hSL-A100) comprising derived and/or modified sequence from LASV(Mad39;Clade IV)__ANH09722__GPCmut13 (opt4)
aggagagucccgcagucggcguccagcggcucugcuuguucgugugugugucguugcaggccuuauucaagcuuaccaugggccagaucgugaccuucuuccaggaggugccccacgugaucgaggaggugaugaacaucgugcugaucgcccugagcauccuggccgugcugaagggccuguacaacguggccaccugcggccugaucggccuggugaccuuccugcugcugugcggcagaagcugcaccaccacccuguacaagggcguguacgagcugcaggcccuggagcugaacauggagacccugaacaugaccaugccccugagcugcaccaagaacaacagccaccacuacaucagagugggcaacgagaccggccuggagcugacccugaccaacaccagccugaucaaccacaaguucugcaaccugagcgacgcccacaagaagaaccuguacgaccacgcccugaugagcaucaucagcaccuuccaccugagcauccccaacuucaaccaguacgaggccaugagcugcgacuucaacgacggcaagaucagcgugcaguacaaccugagccacaccuacgccggcgacaccgccaaccacugcggcaccguggccaacggcgugcugcagaccuucaugagaauggccuggggcggcagcuacaucgcccuggacagcggcagaggcggcugggacugcaucaugaccagcuaccaguaccugaucauccagaacaccaccugggaggaccacugccaguucagcagacccagccccaucggcuaccugggccugcugagccagagaaccagagacaucuacaucagcagaagacugcugggcaccuucaccuggacccugagcgacagcgagggcaaggacacccccggcggcuacugccugaccagauggaugcugaucgaggccgagcugaagugcuucggcaacaccgccguggccaagugcaacgagaagcacgacgaggaguucugcgacaugcugagacuguucgacuucaacaagcaggccauccagagacugaaggccgaggcccagaugagcauccagcugaucaacaaggccgugaacgcccugaucaacgaccagcugaucaugaagaaccaccugagagacaucaugggcauccccuacugcaacuacagcaaguacugguaccugaaccacaccgugaccggcaagaccagccugcccaagugcuggcuggugagcaacggcagcuaccugaacgagacccacuucagcgacgacaucgagcagcaggccgacaacaugaucaccgagaugcugcagaaggaguacauggagagacagggcaagaccccccugggccugguggaccuguucguguucagcaccagcuucuaccugaucagcaucuuccugcaccuggugaagauccccugaggacuagucccuguucccagagcccacuuuuuuuucuuuuuuugaaauaaaauagccugucuuucagaucucaaaggcucuuuucagagccaccaaaaaaaaaaaaaaaaaaaaaaaaaaaaaaaaaaaaaaaaaaaaaaaaaaaaaaaaaaaaaaaaaaaaaaaaaaaaaaaaaaaaaaaaaaaaaaaaaaaaa

SEQ ID NO: 41988 - RNA, 1634 nt, Artificial Sequence
  mRNA product Design a-1 (hSL-A100) comprising derived and/or modified sequence from LASV(Z0947-SLE-2011;Clade IV)__AIT17840__GPCmut13 (opt4)
aggagagucccgcagucggcguccagcggcucugcuuguucgugugugugucguugcaggccuuauucaagcuuaccaugggccagaucgugaccuucuuccaggaggugccccacgugaucgaggaggugaugaacaucgugcugaucgcccugagcauccuggccgugcugaagggccuguacaacuucgccaccugcggccuggugggccuggugaccuuccugcugcugugcggcagaagcugcaccaucagccuguacaagggcguguacgagcugcagacccuggagcugaacauggagacccugaacaugaccaugccccugagcugcaccaagaacaacagccaccacuacaucauggugggcaacgagaccggccuggagcugacccugaccaacaccagcaucaucaaccacaaguucugcaaccugagcgacgcccacaagaagaaccuguacgaccacgcccugaugagcaucaucagcaccuuccaccugagcauccccaacuucaaccaguacgaggccaugagcugcgacuucaacggcggcaagaucagcgugcaguacaaccugagccacagcuacgccggcgacgccgccaaccacugcggcaccguggccaacggcgugcugcagaccuucaugagaauggccuggggcggcagcuacaucgcccuggacagcggcagagacagaugggacugcaucaugaccagcuaccaguaccugaucauccagaacaccaccugggaggaccacugccaguucagcagacccagccccaucggcuaccugggccugcugagccagagaaccagagacaucuacaucagcagaagacugcugggcaccuucaccuggacccugagcgacagcgagggcaaggacacccccggcggcuacugccugaccagauggaugcugaucgaggccgagcugaagugcuucggcaacaccgccguggccaagugcaacgagaagcacgacgaggaguucugcgacaugcugagacuguucgacuucaacaagcaggccauccagagacugaaggccgaggcccagaugagcauccagcugaucaacaaggccgugaacgcccugaucaacgaccagcugaucaugaagaaccaccugagagacaucaugggcauccccuacugcaacuacagcaaguacugguaccugaaccacaccaccaccggcaagaccagccugcccaagugcuggcuggugagcaacggcagcuaccugaacgagacccacuucagcgacgacaucgagcagcaggccgacaacaugaucaccgagaugcugcagaaggaguacauggagagacagggcaagaccccccugggccugguggaccuguucguguucagcaccagcuucuaccugaucagcaucuuccugcaccuggugaagauccccugaggacuagucccuguucccagagcccacuuuuuuuucuuuuuuugaaauaaaauagccugucuuucagaucucaaaggcucuuuucagagccaccaaaaaaaaaaaaaaaaaaaaaaaaaaaaaaaaaaaaaaaaaaaaaaaaaaaaaaaaaaaaaaaaaaaaaaaaaaaaaaaaaaaaaaaaaaaaaaaaaaaaa

SEQ ID NO: 41989 - RNA, 1634 nt, Artificial Sequence
  mRNA product Design a-1 (hSL-A100) comprising derived and/or modified sequence from LASV(Josiah;Clade IV)__NP_694870__GPCmut13 (opt5)
aggagagucccgcagucggcguccagcggcucugcuuguucgugugugugucguugcaggccuuauucaagcuuaccaugggccagaucgugaccuucuuucaagaggucccccacguuauugaagaggugaugaacaucgugcugauugcccucagcguccuggcugugcuuaaggggcuguacaauuucgccacaugcggacucguuggccuggugacguuucuucugcucugugggagauccugcaccacaucucuguauaaaggagucuacgaacugcagacccucgagcugaacauggaaacacuuaauaugaccaugccucugagcuguacaaagaacaauucccaucacuauaucauggugggcaacgagaccgggcucgagcugacgcuuaccaauacaucuauuaucaaccauaaauucugcaaucugagcgacgcgcacaagaaaaaccucuacgaucaugcucugauguccaucauuucuaccuuucaccugagcaucccgaauuucaaccaguaugaagccauguccugugacuuuaauggaggcaagauuagcguucaguacaaccucucucacuccuaugccggcgaugcugccaaucauugcgggacaguggcuaacggaguccugcaaaccuucaugcggauggccuggggcgggagcuacaucgcgcuugacucuggacgcggcaacugggauuguauuaugacguccuaccaguaucugaucauucagaauacaaccugggaggaccacugccaguuuagcagacccucuccuaucggguaccucggacugcuuucccaacggacacgcgauaucuauauuagcagacggcugcucggcaccuucaccuggacacuguccgacucugaaggcaaggauacgcccgggggauacugucugacccgcuggaugcucaucgaggccgagcugaaaugcuuuggcaacacagcuguggccaaguguaaugaaaaacaugacgaggaguucugcgauaugcuuagacuguuugacuucaacaagcaggcuauucagcggcucaaagccgaagcgcagaugagcauccaacugauuaauaaggccgugaacgcucuuaucaaugaucagcugaucaugaagaaccaccuccgcgacauuauggggaucccuuauugcaauuacuccaaauauugguaccugaaccacaccacaaccggaagaacgagccugcccaaguguuggcucgucucuaauggcuccuaccugaacgaaacacauuucagcgacgauauugagcagcaagccgacaauaugaucaccgagaugcuucagaaagaauauauggagcggcaggggaagaccccucugggacucguugaucuguuuguguucucuaccagcuuuuaccugauuuccaucuuccuucaccucgugaaaaucccgugaggacuagucccuguucccagagcccacuuuuuuuucuuuuuuugaaauaaaauagccugucuuucagaucucaaaggcucuuuucagagccaccaaaaaaaaaaaaaaaaaaaaaaaaaaaaaaaaaaaaaaaaaaaaaaaaaaaaaaaaaaaaaaaaaaaaaaaaaaaaaaaaaaaaaaaaaaaaaaaaaaaaa

SEQ ID NO: 41990 - RNA, 1631 nt, Artificial Sequence
  mRNA product Design a-1 (hSL-A100) comprising derived and/or modified sequence from LASV(LP;Clade I)__AAF86701__GPCmut13 (opt5)
aggagagucccgcagucggcguccagcggcucugcuuguucgugugugugucguugcaggccuuauucaagcuuaccaugggccagaucauuaccuucuuucaagaggugccccacgucaucgaagagguuaugaacauugugcugaucgcccucagccugcuugcuauucugaaggggcucuacaauaucgccacaugcggaaucauuggccugguggcguuccuuuuucugugugggaaauccugcucucucacgcugaagggaggcuaugaacugcagacccucgagcugaacauggaaacacuuaauaugaccaugccucugagcuguaccaaaaacuccucucaucacuacaucagagucgggaaugagacaggacucgagcugacacuuaccaacacgagcauuaucaaucauaaguucugcaaccuguccgacgcucacaaaaagaaucucuaugaucaugcccugaugucuauuaucagcaccuuucaccuguccauuccgaacuucaaucaguacgaagccaugagcugugacuuuaacggcggcaagaucucugugcaguauaaucucucccacagcuacgcuggggaugccgcugagcauugcggaacaguugccaacggcgugcugcaaaccuucaugcggauggcguggggagggcgcuauaucgcccuugacucuggcaaagggaauugggauuguauuaugacauccuaccaguaccugaucauucagaacaccacgugggaagaccacugccaguuuagcagacccucuccuaucggauaucucggccugcuuucccaacggacacgcgauauuuacaucagcagacggcugcucggcaccuucacauggacccuguccgacucugaggggaacgagacccccggaggcuauugucugacacgcuggaugcucaucgaagcugagcugaagugcuuugggaauacggccgucgcuaaauguaacgaaaagcaugaugaggaguucugcgacaugcuuagacuguuugauuucaauaaacaggccauucggcgccucaaggcggaagcccagaugagcauccagcugauuaacaaggcugugaaugcccuuaucaacgaccaacugauuaugaaaaaucaccucagagauaucaugggaaucccuuacugcaacuauuccaaguacugguaucugaaucacaccagcucuggccggacaucccugcccaaauguuggcucauuagcaacgggucuuaccugaaugagacccaguucagcgacgacaucgaacagcaagcugauaacaugauuacagagaugcuucagaaggaauacaucgagcgccagggaaaaaccccucugggccucguugacauuuuuaucuucuccacgucuuuuuaucugauuagcaucuuccugcaucuuaucaagauuccgugaggacuagucccuguucccagagcccacuuuuuuuucuuuuuuugaaauaaaauagccugucuuucagaucucaaaggcucuuuucagagccaccaaaaaaaaaaaaaaaaaaaaaaaaaaaaaaaaaaaaaaaaaaaaaaaaaaaaaaaaaaaaaaaaaaaaaaaaaaaaaaaaaaaaaaaaaaaaaaaaaaaaa

SEQ ID NO: 41991 - RNA, 1631 nt, Artificial Sequence
  mRNA product Design a-1 (hSL-A100) comprising derived and/or modified sequence from LASV(803213;Clade II)__AAF86703__GPCmut13 (opt5)
aggagagucccgcagucggcguccagcggcucugcuuguucgugugugugucguugcaggccuuauucaagcuuaccaugggccagaucauuaccuucuuucaagaggugccccacgucaucgaagagguuaugaacauugugcugaucgcccucagccugcuugcuauucugaaggggaucuacaauguggccacaugcggacucuucggccugaucuccuuucuucugcucugugggagaucuugcagcgucacguauaaaggaguguacgaacugcagacccuggagcucaacauggcgaaucugaacaugacaaugccucuuuccuguaccaagaauaacucucaucacuauauuaugguuggcaaugaaacagggcuggagcucacccugacaaacaccagcaucauuaaucauaaauucugcaaccuuuccgacgcucacaagaaaaaucuguacgaucaugcccucaugucuaucauuagcacguuucaccuguccaucccgaacuucaaucaguaugaggccaugagcugugacuuuaacggaggcaagauuucugugcaguacaaucugucccacagcuucgcugucgaugccgcuaaccauugcggcaccaucgccaacggggugcuccaaacauuuaugcggauggcguggggaggcucuuauaucgcccuggacuccgggaagggaaauugggauuguauuaugaccagcuaccaguaccuuaucauucagaacacaaccugggaagaccacugccaguucucucgccccuccccuaucggcuaucuggggcuccugagccaaagaacgcgggauauuuacaucucccgcagacuucugggaacauuuaccuggacacucucugacagcgagggcaaugaagcucccggcggguauugucugacccgguggaugcugaucgaggccgagcucaaaugcuucggaaacaccgcuguugccaaguguaaugaaaaacaugaugaggaauuuugcgacaugcugcgccuuuucgauuucaacaagcaggcgauuaaaagacugaagacagaggcccagauguccauccagcucauuaauaaggcugugaacgcccugaucaaugaccaacuuauuaugaaaaaccaucugcgggauaucaugggcaucccuuacugcaauuauagccgcuacugguaucucaaccacacggucaccgggaagacaucucugcccagauguuggcugguguccaauggaagcuaccucaacgaaacccacuuuucugacgacauugagcagcaggcugauaauaugaucacagagaugcugcaaaaagaauacauggaccggcagggcaagaccccucuugggcugguggaucucuucgucuuuagcacguccuucuaucugauuucuaucuuucugcaccuuguuaaaauuccgugaggacuagucccuguucccagagcccacuuuuuuuucuuuuuuugaaauaaaauagccugucuuucagaucucaaaggcucuuuucagagccaccaaaaaaaaaaaaaaaaaaaaaaaaaaaaaaaaaaaaaaaaaaaaaaaaaaaaaaaaaaaaaaaaaaaaaaaaaaaaaaaaaaaaaaaaaaaaaaaaaaaaa

SEQ ID NO: 41992 - RNA, 1631 nt, Artificial Sequence
  mRNA product Design a-1 (hSL-A100) comprising derived and/or modified sequence from LASV(GA391;Clade III)__CAA36645__GPCmut13 (opt5)
aggagagucccgcagucggcguccagcggcucugcuuguucgugugugugucguugcaggccuuauucaagcuuaccaugggccagaucgugaccuucuuucaagaggucccccacguuauugaagaggugaugaacaucgugcugauugcccucagcauccuggcuauucuuaaggggcuguacaaugucgccacaugcggacucaucggccuggugacguuccuucugcucuccgggagaucuuguagccugaucuauaaaggaaccuacgaacugcagacacucgagcugaacauggaaacccuuaauaugacaaugccucuguccugcaccaagaacaauucucaucacuauauucggguuggcaacgagacagggcucgagcugacccuuacgaauaccagcauccugaaccauaaauuuuguaaucucuccgacgcgcacaagcgcaaccuguacgaucauucucugaugagcauuaucuccacauuccaccucagcauuccgaauuuuaaccaguaugaagcuaugucuugcgacuucaauggaggcaaaaucaccgugcaguacaaccugucccacagcuuugccgucgaugccgcuggccauugugggacacuugccaauggagugcugcaaaccuucaugagaauggcuuggggcgggucuuauauugcccucgacuccggacggggcaacugggauugcaucaugacgagcuaccaguaccugaucauucagaacacaaccugggacgaucacugucaguuuucucgccccuccccuaucggguaucuuggacugcucagccaaagaacacgggacauuuacaucucccgcagacugcugggcaccuucaccuggacacucucugauagcgagggcaaugaaacgcccgggggauauugccugacccgguggaugcuuauugaggcggagcugaaguguuuuggcaacacagccguugcuaagugcaaugaaaaacaugacgaggaguucugugauaugcuccgccuguuugacuucaacaagcaggccaucagacggcuuaaaaccgaagcucagauguccauccagcugauuaauaaggccgugaacgcgcucaucaaugaucaacugauuaugaaaaaccaucugcgcgacaucauggggauuccuuacugcaauuauagcagauacugguaucucaaccacacaucuaccggaaagacgucccugccccggugcuggcuuaucagcaauggcucuuaccugaacgaaacaaaguucagcgacgauaucgagcagcaggccgacaauaugauuaccgagaugcuccaaaaagaauacaucgaucgccaggggaagaccccucugggacuggucgaccuuuuuguguucuccacaucuuuuuaucucauuagcaucuuccugcaccuggugaaaauuccgugaggacuagucccuguucccagagcccacuuuuuuuucuuuuuuugaaauaaaauagccugucuuucagaucucaaaggcucuuuucagagccaccaaaaaaaaaaaaaaaaaaaaaaaaaaaaaaaaaaaaaaaaaaaaaaaaaaaaaaaaaaaaaaaaaaaaaaaaaaaaaaaaaaaaaaaaaaaaaaaaaaaaa

SEQ ID NO: 41993 - RNA, 1634 nt, Artificial Sequence
  mRNA product Design a-1 (hSL-A100) comprising derived and/or modified sequence from LASV(AV;Clade V)__CCA30314__GPCmut13 (opt5)
aggagagucccgcagucggcguccagcggcucugcuuguucgugugugugucguugcaggccuuauucaagcuuaccaugggccagaucgugaccuucuuucaagaggucccccacguuauugaagaggugaugaacaucgugcugauugcccucagcauccuggcuguccuuaaggggcuguacaauauugccacaugcggacucaucggccugaucacguuccuucugcucugugggagauccugcucuagcaaccuguauaaaggaguguacgaacugcagucccucgaccugaauauggagacccuuaacaugacaaugccucugucuuguaccaagaauaacagccaucacuauauucggguuggcaaugauacagggcucgaacugacccuuacaaacaccuccauccugaaucauaaauuuugcaaccucucugacgcgcacaagaaagaucuguacgaccaugcucugaugagcauuaucuccacguuccaccucagcauuccgaauuuuaaccaguaugaggccaugucuugugauuucaauggaggcaagaucuccgugcaguacaaccugagccacucuuaugccauugacgcugccaaucauugcggcaccgucgcuaacgggauccuucaaacauuuaugcgcauggccuggggaggcuccuacaucgcgcuggauagcgggagaggaaacugggacuguauuaugaccucuuaccaguaucucaucauucagaauacaaccugggagaaccacugccaguucucccggcccagcccuaucggcuaccuggggcuucugucccaacgcacgagagauauuuauaucucucggcgccuccugggaacauuuaccuggacacugagcgacuccgaaggcaaugccacccccggcggguacugucucaccagauggaugcugaucgaggcugaacuuaagugcuucggaaacacagccguggcuaaauguaaugagaagcaugaugaggaauuuugcgacaugcugcgccucuucgauuuuaacaaacaggccauuagccggcugaagucugaggcgcagauguccauccagcuuauuaauaaagccguuaacgcucugaucaaugaccaacucauuaugaagaaccaccugagagacaucaugggcaucccuuauugcaauuacagcaaguauugguaccugaaccacacgauuaccgggaaaacaucucuccccaaguguuggcuggugagcaauggauccuaccuuaacgaaacccauuucucugaugacaucgagcagcaggccgauaauaugauuacagaaaugcugcaaaaagaguauauggagcggcagggcaagaccccucucgggcuggucgaccuguucguguuuagcacguccuucuaccuuaucagcauuuuucuccgccuggugaaaaucccgugaggacuagucccuguucccagagcccacuuuuuuuucuuuuuuugaaauaaaauagccugucuuucagaucucaaaggcucuuuucagagccaccaaaaaaaaaaaaaaaaaaaaaaaaaaaaaaaaaaaaaaaaaaaaaaaaaaaaaaaaaaaaaaaaaaaaaaaaaaaaaaaaaaaaaaaaaaaaaaaaaaaaa

SEQ ID NO: 41994 - RNA, 1631 nt, Artificial Sequence
  mRNA product Design a-1 (hSL-A100) comprising derived and/or modified sequence from LASV(Togo/2016/7082;Clade VI)__AMR44577__GPCmut13 (opt5)
aggagagucccgcagucggcguccagcggcucugcuuguucgugugugugucguugcaggccuuauucaagcuuaccaugggccagaucauuaccuucuuucaagaggugccccacgucaucgaagagguuaugaacauugugcugaucgcccucagccugcuugcuauucugaaggggguguacaaugucgccacaugcggaaucaucggccucgugacguuccuguuucuuugugggagauccugcucucugauuuauaaaggaagcuacgaacuccagacccuggagcugaacauggaaacacucaauaugaccaugccucuguccuguacaaagaacucuagccaucacuauauccggguuggcaaugagaccgggcuugagcugacacucaccaacacguccauuaucaaucauaaauucugcaaccugucugacgcgcacaagcgcaaucuuuacgaucaugcucugaugagcauucucuccaccuuucaccugagcaucccgaacuucaaucaguaugaagccaugucuugugacuuuaacggaggcaaaauuuccgugcaguacaaucugagccacgccuaugcugucgaugccgcugagcauugcggcacaguggccaacgggguucuccaaaccuucaugagaauggcguggggaggcucuuacaucgcccuggacuccgggcggggaaauugggauuguaucaugacaagcuaccaguaucuuauuauccagaacaccacgugggaagaccacugccaguuuucucgccccuccccuauuggcuaccuggggcuccugagccaaagaacacgggauaucuauauuucccgcagacuucugggaaccuucacauggacccucucugacagcgagggcaacgagacccccggcggguacugucugacacgguggaugcugaucgaagcugagcucaagugcuuuggaaauacggccguggcuaaguguaacgaaaaacaugaugaggaguucugcgacaugcugcgccuuuuugauuucaauaagcaggccauccagagacugaaauccgaagcgcagaugagcauucaacucaucaacaaggccgucaaugcucugauuaacgaccagcuuaucaugaaaaaucaucugcgggauaugaugggcauuccuuauugcaacuacucuaaguauugguaccucaaucacaccuccagcgggcgcacaucucugcccaaguguuggcuggugagcaacggauccuaccucaaugagacccacuucucugacgacaucgaacagcaagccgauaacaugaucacagagaugcugcagaaagaauauauugacagacagggcaagaccccucuugggcugguggaucucuuugucuucagcacguccuuuuaccugaucagcauuuuccugcaccuuaucaaaauuccgugaggacuagucccuguucccagagcccacuuuuuuuucuuuuuuugaaauaaaauagccugucuuucagaucucaaaggcucuuuucagagccaccaaaaaaaaaaaaaaaaaaaaaaaaaaaaaaaaaaaaaaaaaaaaaaaaaaaaaaaaaaaaaaaaaaaaaaaaaaaaaaaaaaaaaaaaaaaaaaaaaaaaa

SEQ ID NO: 41995 - RNA, 1631 nt, Artificial Sequence
  mRNA product Design a-1 (hSL-A100) comprising derived and/or modified sequence from LASV(KAK-428;Clade n.d. (VII))__ANH09740__GPCmut13 (opt5)
aggagagucccgcagucggcguccagcggcucugcuuguucgugugugugucguugcaggccuuauucaagcuuaccaugggccagaucgugaccuucuuucaagaggucccccacguuauugaagaggugaugaacaucgugcugauugcccucagccugcuugcuauccugaaggggcucuacaauuucgccacaugcggagucauuggccugaucacguuucuucugcucugugggagauccugcucugcgaccuauaaaggacaguacgaacugcagacacuggagcucaacauggaaagccugaauaugaccaugccucuuuccuguacaaagaacaauucucaucacuauauccgggcuggcaacaauaccgggcuggagcucacacugaccaacacgagcauuaucucccauaaauucugcaaucuuucugacgcccacaagaaaaaccuguacgaucauacccucaugagcauuaucacaaccuuucaccuguccauuccgaauuucaaccaguaugaggccaugagcugugacuuuaauggaggcaagaucucuauucaauacaaccugucccacagcuaugcuggcgaugccgcucagcauugcgggacaguggccaauggaguucuccagaccuucaugcgcauggcguggggcgggucuuaccuggcccuugacuccggaagacggggcugggauuguaucaucagcucuuaccaguaucugauuauccaaaacacgacaugggacgaucacugccaguuuucccgccccagcccuauuggguaccucggauucgugucccagaagaccagagacaucuauauuucucggcgccugcuuggcacauuuaccuggacccugagcgauuccgaaggccaugacaugcccgggggauacugucucacaagauggaugcugaucgaggcugaucugaaaugcuucggcaacacggccgucgcuaaguguaaugaaaaacacgacgaggaguuuugcgauauguggcgccucuucgacuucaacaagcaggccauccaacggcugaaagcggaagcccagaugaauauucagcuuaucaacaaggcugugaaugcccugauuaacgaccaacucaugaugaagaaucaccugagagauaucauggggauuccuuauugcaacuacagcaaauuuugguaucuuaauaacaccacaaccggacggacaucucugccccgcuguuggcucaucuccaauggcagcuaccugaacgagacccauuucucugacgauaucgaacagcaggcugacaauaugauuacggagaugcugcagaaggaauacauggauagacaagggaaaacaccucucggacugguugaccuuuuuguguucagcaccuccuuuuaucugaucaccauuuuccuccaccuggucaagaucccgugaggacuagucccuguucccagagcccacuuuuuuuucuuuuuuugaaauaaaauagccugucuuucagaucucaaaggcucuuuucagagccaccaaaaaaaaaaaaaaaaaaaaaaaaaaaaaaaaaaaaaaaaaaaaaaaaaaaaaaaaaaaaaaaaaaaaaaaaaaaaaaaaaaaaaaaaaaaaaaaaaaaaa

SEQ ID NO: 41996 - RNA, 1631 nt, Artificial Sequence; identical to SEQ ID NO: 41990
  mRNA product Design a-1 (hSL-A100) comprising derived and/or modified sequence from LASV(Pinneo-NIG-1969;Clade I)__AIT17836__GPCmut13 (opt5)

SEQ ID NO: 41997 - RNA, 1631 nt, Artificial Sequence
  mRNA product Design a-1 (hSL-A100) comprising derived and/or modified sequence from LASV(ISTH0009-NIG-2011;Clade II)__AIT17404__GPCmut13 (opt5)
aggagagucccgcagucggcguccagcggcucugcuuguucgugugugugucguugcaggccuuauucaagcuuaccaugggccagaucauuaccuucuuucaagaggugccccacgucaucgaagagguuaugaacauugugcugaucgcccucagccugcuugcuauucugaaggggaucuacaauguggccacaugcggacucuucggccuggucuccuuucuucugcucugugggagaucuugcagcacgaccuauaaaggaguguacgaacugcagacacuggagcucgacauggcgucccugaacaugaccaugccucuuucuuguacaaagaauaacagccaucacuauaucaugguuggcaaugaaaccgggcuggagcucacacugaccaacacguccauuaucaaucauaaauucugcaaccuuucugaugcucacaagaaaaaucuguacgaccaugcccucaugagcauuaucuccaccuuucaccugagcauuccgaacuucaaucaguaugaggccaugucuugugauuuuaacggaggcaagaucuccgugcaguacaaucugagccacgcuuaugccgucgacgcugccaaccauugcggcacaauugcgaauggggugcuccaaaccuucaugcggauggccuggggaggcucuuacaucgcucuggauuccgggaagggaagcugggacuguaucaugacaucuuaccaguaucuuauuauccagaacaccacgugggaagaucacugccaguuuucccgccccagcccuauuggcuaccuggggcuccugucccaaagaacacgggacaucuauauuucucgcagacuucugggaaccuucacauggacccucagcgauuccgagggcaacgaaacccccggcggguacugucugacacgguggaugcugaucgaggccgagcucaaaugcuuuggaaauacggcuguugccaaguguaacgaaaaacaugacgaggaguucugcgauaugcugcgccuuuuugacuucaauaagcaggcgaucagacggcugaaaaccgaagcccagaugagcauucagcucaucaacaaggcugugaaugcccugauuaacgaucaacuuaucaugaagaaucaucugcgcgacauuaugggcaucccuuauugcaacuacucuaaauauugguaccucaaucacacagucaccgggaagacaucccugcccagauguuggcuggugagcaacggaucuuaccucaaugaaacccacuucagcgacgauaucgagcagcaggcugacaacaugauuacggagcugcuucaaaaagaauauauggaucggcagggcaagacaccucuggggcucguggaccuguuugucuucuccaccucuuuuuaccugaucagcauuuuccuucaccucaucaaaauuccgugaggacuagucccuguucccagagcccacuuuuuuuucuuuuuuugaaauaaaauagccugucuuucagaucucaaaggcucuuuucagagccaccaaaaaaaaaaaaaaaaaaaaaaaaaaaaaaaaaaaaaaaaaaaaaaaaaaaaaaaaaaaaaaaaaaaaaaaaaaaaaaaaaaaaaaaaaaaaaaaaaaaaa

SEQ ID NO: 41998 - RNA, 1631 nt, Artificial Sequence
  mRNA product Design a-1 (hSL-A100) comprising derived and/or modified sequence from LASV(ISTH2010-NIG-2012;Clade II)__AIT17482__GPCmut13 (opt5)
aggagagucccgcagucggcguccagcggcucugcuuguucgugugugugucguugcaggccuuauucaagcuuaccaugggccagaucauuaccuucuuucaagaggugccccacgucaucgaagagguuaugaacauugugcugaucgcccucagccugcuugcuauucugaaggggaucuacaauguggccacaugcggacucuucggccuggucuccuuucuucugcucugugggagaucuugcagcacgaccuauaaaggaguguacgaacugcagacacuggagcucgacauggcgucccugaacaugaccaugccucuuucuuguacaaagaauaacagccaucacuauaucaugguuggcaaugaaaccgggcuggagcucacacugaccaacacguccauuaucaaucauaaauucugcaaccuuucugaugcucacaagaaaaaucuguacgaccaugcccucaugagcauuaucuccaccuuucaccugagcauuccgaacuucaaucaguaugaggccaugucuugugauuuuaacggaggcaagaucuccgugcaguacaaucugagccacgcuuaugccgucgacgcugccaaccauugcggcacaauugcgaauggggugcuccaaaccuucaugcggauggccuggggaggcucuuacaucgcucuggauuccgggaagggaagcugggacuguaucaugacaucuuaccaguaucuuauuauccagaacauuaccugggaagaucacugccaguuuucccgccccagcccuaucggcuaccuggggcuccugucccaaagaacgcgggacauuuauaucucucgcagacuucugggaacauucaccuggacacucagcgauuccgagggcaacgaaacccccggcggguacugucugacccgguggaugcugaucgaggccgagcucaaaugcuuuggaaauacagcuguugccaaguguaacgaaaaacaugacgaggaguucugcgauaugcugcgccuuuuugacuucaauaagcaggcgauuagacggcugaaaacggaagcccagaugagcauccagcucauuaacaaggcugugaaugcccugaucaacgaucaacuuauuaugaagaaucaucugcgcgacaucaugggcaucccuuauugcaacuacucuaaauauugguaccucaaucacaccgucacagggaagaccucccugcccagauguuggcuggugagcaacggaucuuaccucaaugaaacacacuucagcgacgauauugagcagcaggcugacaacaugaucaccgagcugcuucaaaaagaauauauugaucggcagggcaagacgccucuggggcucguggaccuguuugucuucuccacaucuuuuuaccugaucagcauuuuccuucaccucguuaaaaucccgugaggacuagucccuguucccagagcccacuuuuuuuucuuuuuuugaaauaaaauagccugucuuucagaucucaaaggcucuuuucagagccaccaaaaaaaaaaaaaaaaaaaaaaaaaaaaaaaaaaaaaaaaaaaaaaaaaaaaaaaaaaaaaaaaaaaaaaaaaaaaaaaaaaaaaaaaaaaaaaaaaaaaa

SEQ ID NO: 41999 - RNA, 1631 nt, Artificial Sequence
  mRNA product Design a-1 (hSL-A100) comprising derived and/or modified sequence from LASV(Lassa virus/H.sapiens-wt/NGA/2015/ISTH_0543;Clade II)__AVO03639__GPCmut13 (opt5)
aggagagucccgcagucggcguccagcggcucugcuuguucgugugugugucguugcaggccuuauucaagcuuaccaugggccagaucauuaccuucuuucaagaggugccccacgucaucgaagagguuaugaacauugugcugaucgcccucagccugcuugcuauucugaaggggaucuacaauguggccacaugcggacucuucggccuggucuccuuucuucugcucugugggagaucuugcagcacgaccuauaaaggaguguacgaacugcagacacuggagcucgacauggcgaaccugaauaugaccaugccucuuuccuguacaaagaacaauucucaucacuauaucaugguuggcaacgaaaccgggcuggagcucacacugaccaauacgagcauuaucaaccauaaauucugcaaucuuuccgaugcucacaagaaaaaccuguacgaccaugcccucaugucuauuaucagcaccuuucaccuguccauuccgaauuucaaccaguaugaggccaugagcugugauuuuaauggaggcaagaucucugugcaguacaaccugucccacacauaugcugucgacgccgcuaaucauugcggcaccauugccaacggggugcuccaaacauucaugcggauggcguggggaggcagcuacaucgcccuggauucugggaagggauccugggacuguaucaugaccagcuaccaguaucuuguuauucagaacacgacaugggaagaucacugccaguuuucucgccccuccccuaucggcuaccuggggcuccugagccaaagaacccgggacauuuauaucucccgcagacuucugggaacauucaccuggacccucucugauagcgagggcaaugaaacacccggcggguacugucugacgcgguggaugcugauugaggcugagcucaaaugcuuuggaaacaccgccguggcuaaguguaaugaaaaacaugacgaggaguucugcgauaugcugcgccuuuuugacuucaacaagcaggccaucagacggcugaaaacagaagcgcagauguccauccagcucauuaauaaggccgucaacgcucugaucaaugaucaacuuauuaugaagaaccaucugcgcgacaucaugggcauuccuuauugcaauuacagcaaauauugguaccucaaccacaccgugacagggaagaccucucugcccagauguuggcugguguccaauggaagcuaccucaacgaaacgcacuucucugacgauaucgagcagcaggccgacaauaugaucacagagcugcuucaaaaagaauauauugaucggcagggcaagaccccucuggggcucgucgaccuguuuguuuucagcaccuccuuuuaccugaucucuauuuuccuucaccucgugaaaaucccgugaggacuagucccuguucccagagcccacuuuuuuuucuuuuuuugaaauaaaauagccugucuuucagaucucaaaggcucuuuucagagccaccaaaaaaaaaaaaaaaaaaaaaaaaaaaaaaaaaaaaaaaaaaaaaaaaaaaaaaaaaaaaaaaaaaaaaaaaaaaaaaaaaaaaaaaaaaaaaaaaaaaaa

SEQ ID NO: 42000 - RNA, 1631 nt, Artificial Sequence
  mRNA product Design a-1 (hSL-A100) comprising derived and/or modified sequence from LASV(Lassa virus/H.sapiens-wt/NGA/2016/ISTH_0009;Clade II)__AVO03571__GPCmut13 (opt5)
aggagagucccgcagucggcguccagcggcucugcuuguucgugugugugucguugcaggccuuauucaagcuuaccaugggccagaucauuaccuucuuucaagaggugccccacgucaucgaagagguuaugaacauugugcugaucgcccucagccugcuugcuauucugaaggggaucuacaauguggccacaugcggacuccugggccuugucuccuuccugcuccugugugggagaucuugcagcacgaccuauaaaggaguguacgaacugcagacacucgagcuggacauggcgucccuuaacaugaccaugccucugucuuguacaaagaauaacagccaucacuauaucaugguuggcaaugaaaccgggcucgagcugacacuuaccaacacguccauuaucaaucauaaauuuugcaaccugucugaugcucacaagaaaaaucucuacgaccaugcccugaugagcauuaucuccaccuuccaccugagcauuccgaacuuuaaucaguaugaggccaugucuugugauuucaacggaggccggaucuccgugcaguacaaucucagccacucuuaugcugucgacgccgcuaaccauugcggcacaauugccaauggggugcugcaaaccuuuaugcgcauggcguggggaggcuccuacaucgcccuugauagcgggaagggaucuugggacuguaucaugacauccuaccaguaucugauuauccagaacaccacgugggaagaucacugccaguucagcagacccuccccuauuggcuaccucgggcugcuuucucaacggacacgcgacaucuauauuagcagacggcugcucggaaccuuuacauggacccuguccgauagcgagggcaacgaaacccccggcggguacugucugacacgcuggaugcucaucgaggcugagcugaagugcuucggaaauacggccguugcuaaauguaacgaaaagcaugacgaggaauuuugcgauaugcuuagacuguucgacuuuaauaaacaggccauccggcgccucaagaccgaggcgcagaugucuauucagcugaucaacaaagccgugaaugcucuuauuaacgaucaacugaucaugaagaaucaccucagagacauuaugggcaucccuuauugcaacuacuccaaguauugguaccugaaucacacagucaccgggaaaacaagccugccccgguguuggcucgugucuaacggaagcuaccugaaugaaacccauuucuccgacgauaucgagcagcaggccgacaacaugauuacggagcuucugcaaaaggaauauaucgaucgccagggcaaaacaccucucgggcugguggaccuguucgucuuuucuaccagcuucuaccuuauuuccaucuuucuccaccugguuaagauuccgugaggacuagucccuguucccagagcccacuuuuuuuucuuuuuuugaaauaaaauagccugucuuucagaucucaaaggcucuuuucagagccaccaaaaaaaaaaaaaaaaaaaaaaaaaaaaaaaaaaaaaaaaaaaaaaaaaaaaaaaaaaaaaaaaaaaaaaaaaaaaaaaaaaaaaaaaaaaaaaaaaaaaa

SEQ ID NO: 42001 - RNA, 1631 nt, Artificial Sequence
  mRNA product Design a-1 (hSL-A100) comprising derived and/or modified sequence from LASV(Lassa virus/H.sapiens-wt/NGA/2016/ISTH_0017;Clade II)__AVO03567__GPCmut13 (opt5)
aggagagucccgcagucggcguccagcggcucugcuuguucgugugugugucguugcaggccuuauucaagcuuaccaugggccagaucauuaccuucuuucaagaggugccccacgucaucgaagagguuaugaacauugugcugaucgcccucagccugcuugcuauucugaaggggaucuacaauguggccacaugcggacucuucggccuggucuccuuucuucugcucugugggagaucuugcagcacgaccuauaaaggaguguacgaacugcagacacuggagcucgacauggcgucccugaacaugaccaugccucuuucuuguacaaagaauaacagccaucacuauaucaugguuggcaaugaaaccgggcuggagcucacacugaccaacacguccauuaucaaucauaaauucugcaaccuuucugaugcucacaagaaaaaucuguacgaccaugcccucaugagcauuaucuccaccuuucaccugagcauuccgaacuucaaucaguaugaggccaugucuugugauuuuaacggaggcaagaucuccgugcaguacaaucugagccacacauaugcuauugacgccgcuaaccauugcggcaccaucgccaaugggguccuccaaacauucaugcggauggcguggggaggcucuuacaucgcccuggauuccgggaagggaagcugggacuguauuaugaccucuuaccaguaucuuaucauucagaacacgacaugggaagaucacugccaguuuucccgccccagcccuaucggcuaccuggggcuccugucccaaagaacccgggacauuuauaucucucgcagacuucugggaacauucaccuggacccucagcgauuccgagggcaacgaaacacccggcggguacugucugacgcgguggaugcugaucgaggcugagcucaaaugcuuuggaaauaccgccguggcuaaguguaacgaaaaacaugacgaggaguucugcgauaugcugcgccuuuuugacuucaauaagcaggccauuagacggcugaaaacagaagcgcagaugagcauccagcucauuaacaaggccguuaaugcucugaucaacgaucaacuuauuaugaagaaucaucugcgcgacaucaugggcaucccuuauugcaacuacucuaaauauugguaccucaaucacaccgugacagggaagaccucccugcccagauguuggcuggucagcaacggaucuuaccucaaugaaacgcacuucagcgacgauauugagcagcaggccgacaacaugaucacagagcugcuucaaaaagaauauauggaucggcagggcaagaccccucuggggcucguggaccuguuuguguucuccaccucuuuuuaccugauuagcaucuuccuucaccucguccgcauuccgugaggacuagucccuguucccagagcccacuuuuuuuucuuuuuuugaaauaaaauagccugucuuucagaucucaaaggcucuuuucagagccaccaaaaaaaaaaaaaaaaaaaaaaaaaaaaaaaaaaaaaaaaaaaaaaaaaaaaaaaaaaaaaaaaaaaaaaaaaaaaaaaaaaaaaaaaaaaaaaaaaaaaa

SEQ ID NO: 42002 - RNA, 1631 nt, Artificial Sequence
  mRNA product Design a-1 (hSL-A100) comprising derived and/or modified sequence from LASV(Lassa virus/H.sapiens-wt/NGA/2018/ISTH_0959;Clade II)__AVV65099__GPCmut13 (opt5)
aggagagucccgcagucggcguccagcggcucugcuuguucgugugugugucguugcaggccuuauucaagcuuaccaugggccagaucauuaccuucuuucaagaggugccccacgucaucgaagagguuaugaacauugugcugaucgcccucagccugcuugcuauucugaaggggaucuacaauguggucacaugcggacucuucggccugguguccuuucuucugcucugugggagaucuugcagcacgaccuauaaaggaguuuacgaacugcagacacuggagcucgacauggccucccugaacaugaccaugccucuuucuuguacaaagaauaacagccaucacuauaucauggugggcaaugaaaccgggcuggagcucacacugaccaacacguccauuaucaaucauaaauucugcaaccuuucugaugcgcacaagaaaaaucuguacgaccaugcucucaugagcauuaucuccaccuuucaccugagcauuccgaacuucaaucaguaugaggccaugucuugugauuuuaacggaggcaagaucuccguccaguacaaucugagccacgccuaugcuauugacgccgcuaaccauugcggcacaaucgccaauggggugcuccaaaccuucaugcggauggcguggggaggcucuuacaucgcccuggauuccgggaagggaagcugggacuguauuaugacaucuuaccaguaucuuaucauucagaacaccacgugggaagaucacugccaguuuucccgccccagcccuaucggcuaccuggggcuccugucccaaagaacacgggacauuuauaucucucgcagacuucugggaaccuucacauggacccucagcgauuccgagggcaacgaaacccccggcggguacugucugacacgguggaugcugaucgaggcugagcucaaaugcuuuggaaauacggccguugcuaaguguaacgaaaaacaugacgaggaguucugcgauaugcugcgccuuuuugacuucaauaagcaggccauuagacggcugaaaaccgaagcgcagaugagcauccagcucauuaacaaggccgugaaugcucugaucaacgaucaacuuauuaugaagaaucaucugcgcgacaucaugggcaucccuuauugcaacuacucuaaauauugguaccucaaucacacagucaccgggaagacaucccugcccagauguuggcuggugagcaacggaucuuaccucaaugaaacccacuucagcgacgauauugagcagcaggccgacaacaugaucacggagcugcuucaaaaagaauauauugaucggcagggcaagacaccucuggggcucguggaccuguuugucuucuccaccucuuuuuaccugaucagcauuuuccuucaccucguuaaaaucccgugaggacuagucccuguucccagagcccacuuuuuuuucuuuuuuugaaauaaaauagccugucuuucagaucucaaaggcucuuuucagagccaccaaaaaaaaaaaaaaaaaaaaaaaaaaaaaaaaaaaaaaaaaaaaaaaaaaaaaaaaaaaaaaaaaaaaaaaaaaaaaaaaaaaaaaaaaaaaaaaaaaaaa

SEQ ID NO: 42003 - RNA, 1631 nt, Artificial Sequence
  mRNA product Design a-1 (hSL-A100) comprising derived and/or modified sequence from LASV(LASV003-NIG-2008;Clade II)__AIT17580__GPCmut13 (opt5)
aggagagucccgcagucggcguccagcggcucugcuuguucgugugugugucguugcaggccuuauucaagcuuaccaugggccagaucauuaccuucuuucaagaggugccccacgucaucgaagagguuaugaacauugugcugaucgcccucagccugcuugcuauucugaaggggaucuacaauguggccacaugcggacucuucggccuggucuccuuucuucugcucugugggagaucuugcagcacgaccuauaaaggaguguacgaacugcagacacuggagcucgacauggcgucccugaacaugaccaugccucuuucuuguacaaagaauaacagccaucacuauaucaugguuggcaaugaaaccgggcuggagcucacacugaccaacacguccauuaucaaucauaaauucugcaaccuuucugaugcucacaagaaaaaucuguacgaccaugcccucaugagcauuaucuccaccuuucaccugagcauuccgaacuucaaucaguaugaggccaugucuugugauuuuaacggaggcaagaucuccgugcaguacaaucugagccacacauaugcugucgacgccgcuaaccauugcggcaccauugccaauggggugcuccaaacauucaugcggauggcguggggaggcucuuacaucgcccuggauuccgggaagggaagcugggacuguaucaugaccucuuaccaguaucuuauuauccagaacacgacaugggaagaucacugccaguuuucccgccccagcccuauuggcuaccuggggcuccugucccaaagaacccgggacaucuauauuucucgcagacuucugggaacauucaccuggacccucagcgauuccgagagcaacgaaacacccggcggcuacugucugacgcgguggaugcugaucgaggcugagcucaaaugcuuugggaauaccgccguugcuaaguguaacgaaaaacaugacgaggaguucugcgauaugcugcgccuuuuugacuucaauaagcaggccaucagacggcugaaagcggaagcccagaugucuauucagcucaucaacaaggcugugaaugcccugauuaacgaucaacuuaucaugaagaaucaucugcgcgacauuaugggaaucccuuauugcaacuacuccaaauauugguaccucaaucacacagucaccggcagaacaagccugccccgguguuggcuggugucuaacgggagcuaccucaaugaaacccacuucuccgacgauaucgagcagcaggcugacaacaugauuacggagcugcuucaaaaggaauauauggaucgccagggaaaaacaccucugggccucguggaccuguuugucuucucuaccagcuuuuaccugaucuccauuuuccuucaccucguuaagaucccgugaggacuagucccuguucccagagcccacuuuuuuuucuuuuuuugaaauaaaauagccugucuuucagaucucaaaggcucuuuucagagccaccaaaaaaaaaaaaaaaaaaaaaaaaaaaaaaaaaaaaaaaaaaaaaaaaaaaaaaaaaaaaaaaaaaaaaaaaaaaaaaaaaaaaaaaaaaaaaaaaaaaaa

SEQ ID NO: 42004 - RNA, 1631 nt, Artificial Sequence
  mRNA product Design a-1 (hSL-A100) comprising derived and/or modified sequence from LASV(LASV035-NIG-2009;Clade II)__AIT17588__GPCmut13 (opt5)
aggagagucccgcagucggcguccagcggcucugcuuguucgugugugugucguugcaggccuuauucaagcuuaccaugggccagaucauuaccuucuuucaagaggugccccacgucaucgaagagguuaugaacauugugcugaucgcccucagccugcuugcuauucugaaggggaucuacaauguggccacaugcggacucuucggccuggucuccuuucuucugcucugugggagaucuugcagcacgaccuauaaaggaguguacgaacugcagacacuggagcucgacauggcgucccugaacaugaccaugccucuuucuuguacaaagaauaacagccaucacuauaucaugguuggcaaugaaaccgggcuggagcucacacugaccaacacguccauuaucaaucauaaauucugcaaccuuucugaugcucacaagaaaaaucuguacgaccaugcccucaugagcauuaucuccaccuuucaccugagcauuccgaacuucaaucaguaugaggccaugucuugugauuuuaacggaggcaagaucuccgugcaguacaaucugagccacgcuuaugccgucgacgcugccaaccauugcggcacaauugcgaauggggugcuccaaaccuucaugcggauggccuggggaggcucuuacaucgcucuggauuccgggaagggaagcugggacuguaucaugacaucuuaccaguaucuuauuauccagaacaccacgugggaagaucacugccaguuuucccgccccagcccuauuggcuaccuggggcuccugucccaaagaacacgggacaucuauauuucucgcagacuucugggaaccuucacauggacccucagcgauuccgagggcaacgaaacccccggcggguacugucugacacgguggaugcugaucgaggccgagcucaaaugcuuuggaaauacggcuguugccaaguguaacgaaaaacaugacgaggaguucugcgauaugcugcgccuuuuugacuucaauaagcaggcgaucagacggcugaaagccgaagcucagaugagcauucagcucaucaacaaggccgugaaugcucugauuaacgaucaacuuaucaugaagaaucaucugcgcgacauuaugggcaucccuuauugcaacuacucuaaauauugguaccucaaucacaccgucacagggaagaccucccugcccagauguuggcuggugagcaacggaucuuaccucaaugaaacacacuucagcgacgauaucgagcagcaggccgacaacaugauuaccgagcugcuucaaaaagaauauaucgaucggcagggcaagacgccucuggggcucguggaccuguuugucuucuccacaucuuuuuaccugauuagcaucuuccuucaccucguuaaaauuccgugaggacuagucccuguucccagagcccacuuuuuuuucuuuuuuugaaauaaaauagccugucuuucagaucucaaaggcucuuuucagagccaccaaaaaaaaaaaaaaaaaaaaaaaaaaaaaaaaaaaaaaaaaaaaaaaaaaaaaaaaaaaaaaaaaaaaaaaaaaaaaaaaaaaaaaaaaaaaaaaaaaaaa

SEQ ID NO: 42005 - RNA, 1631 nt, Artificial Sequence
  mRNA product Design a-1 (hSL-A100) comprising derived and/or modified sequence from LASV(LASV1000-NIG-2009;Clade II)__AIT17782__GPCmut13 (opt5)
aggagagucccgcagucggcguccagcggcucugcuuguucgugugugugucguugcaggccuuauucaagcuuaccaugggccagaucauuaccuucuuucaagaggugccccacgucaucgaagagguuaugaacauugugcugaucgcccucagccugcuugcuauucugaaggggaucuacaauguggccacaugcggacucuucggccuggucuccuuucuucugcucugugggagaucuugcagcacgaccuauaaaggaguguacgaacugcagacacuggagcucgacauggcgucccugaacaugaccaugccucuuucuuguacaaagaauaacagccaucacuauaucaugguuggcaaugaaaccgggcuggagcucacacugaccaacacguccauuaucaaucauaaauucugcaaccuuucugaugcucacaagaaaaaucuguacgaccaugcccucaugagcauuaucuccaccuuucaccugagcauuccgaacuucaaucaguaugaggccaugucuugugauuuuaacggaggcaagaucuccgugcaguacaaucugagccacacauaugcugucgacgccgcuaaccauugcggcaccauugccaauggggugcuccaaacauucaugcggauggcguggggaggcucuuacaucgcccuggauuccgggaagggaagcugggacuguaucaugaccucuuaccaguaucuuauuauccagaacacgacaugggaagaucacugccaguuuucccgccccagcccuauuggcuaccuggggcuccugucccaaagaacccgggacaucuauauuucucgcagacuucugggaacauucaccuggacccucagcgauuccgagggcaacgaaacacccggcggguacugucugacgcgguggaugcugaucgaggcugagcucaaaugcuuuggaaauaccgccguugcuaaguguaacgaaaaacaugacgaggaguucugcgauaugcugcgccuuuuugacuucaauaagcaggccaucaaaagacugaagacagaagcgcagaugagcauucagcucaucaacaaggccgugaaugcucugauuaacgaucaacuuaucaugaaaaaucaucugcgggacauuaugggcaucccuuauugcaacuacucuaaguauugguaccucaaucacaccgucacagggaaaaccucccugccccgcuguuggcuggugagcaacggaucuuaccucaaugaaacgcacuucagcgacgauaucgagcagcaggccgacaacaugauuacagagcugcuucaaaaggaauauaucgauagacagggcaaaaccccucuggggcucguggaccuguuugucuucuccaccucuuuuuaccugauuagcaucuuccuucaccucguuaagauuccgugaggacuagucccuguucccagagcccacuuuuuuuucuuuuuuugaaauaaaauagccugucuuucagaucucaaaggcucuuuucagagccaccaaaaaaaaaaaaaaaaaaaaaaaaaaaaaaaaaaaaaaaaaaaaaaaaaaaaaaaaaaaaaaaaaaaaaaaaaaaaaaaaaaaaaaaaaaaaaaaaaaaaa

SEQ ID NO: 42006 - RNA, 1631 nt, Artificial Sequence
  mRNA product Design a-1 (hSL-A100) comprising derived and/or modified sequence from LASV(LASV221-NIG-2010;Clade II)__AIT17624__GPCmut13 (opt5)
aggagagucccgcagucggcguccagcggcucugcuuguucgugugugugucguugcaggccuuauucaagcuuaccaugggccagaucauuaccuucuuucaagaggugccccacgucaucgaagagguuaugaacauugugcugaucgcccucagccugcuugcuauucugaaggggaucuacaauguggccacaugcggacucuucggccuggucuccuuucuucugcucugugggagaucuugcagcacgaccuauaaaggaguguacgaacugcagacacuggagcucgacauggcgucccugaacaugaccaugccucuuucuuguacaaagaauaacagccaucacuauaucaugguuggcaaugaaaccgggcuggagcucacacugaccaacacguccauuaucaaucauaaauucugcaaccuuucugaugcucacaagaaaaaucuguacgaccaugcccucaugagcauuaucuccaccuuucaccugagcauuccgaacuucaaucaguaugaggccaugucuugugauuuuaacggaggcaagaucuccgugcaguacaaucugagccacacauaugcuauugacgccgcuaaccauugcggcaccaucgccaaugggguccuccaaacauucaugcggauggcguggggaggcucuuacaucgcccuggauuccgggaagggaagcugggacuguauuaugaccucuuaccaguaucuuaucauucagaacacgacaugggaagaucacugccaguuuucccgccccagcccuaucggcuaccuggggcuccugucccaaagaacccgggacauuuauaucucucgcagacuucugggaacauucaccuggacccucagcgauuccgagggcaacgaaacacccggcggguacugucugacgcgguggaugcugaucgaggcugagcucaaaugcuuuggaaauaccgccguggcuaaguguaacgaaaaacaugacgaggaguucugcgauaugcugcgccuuuuugacuucaauaagcaggccauuagacggcugaaaacagaagcgcagaugagcauccagcucauuaacaaggccguuaaugcucugaucaacgaucaacuuauuaugaagaaucaucugcgcgacaucaugggcaucccuuauugcaacuacucuaaauauugguaccucaaucacaccgugacagggaagaccucccugcccagauguuggcuggucagcaacggaucuuaccucaaugaaacgcacuucagcgacgauauugagcagcaggccgacaacaugaucacagagaugcugcaaaaagaauauauggaucggcagggcaagaccccucuugggcugguggaccucuuuguguucuccaccucuuuuuaccugauuagcaucuuccugcaccuugucaaaauuccgugaggacuagucccuguucccagagcccacuuuuuuuucuuuuuuugaaauaaaauagccugucuuucagaucucaaaggcucuuuucagagccaccaaaaaaaaaaaaaaaaaaaaaaaaaaaaaaaaaaaaaaaaaaaaaaaaaaaaaaaaaaaaaaaaaaaaaaaaaaaaaaaaaaaaaaaaaaaaaaaaaaaaa

SEQ ID NO: 42007 - RNA, 1631 nt, Artificial Sequence
  mRNA product Design a-1 (hSL-A100) comprising derived and/or modified sequence from LASV(LASV237-NIG-2010;Clade II)__AIT17638__GPCmut13 (opt5)
aggagagucccgcagucggcguccagcggcucugcuuguucgugugugugucguugcaggccuuauucaagcuuaccaugggccagaucauuaccuucuuucaagaggugccccacgucaucgaagagguuaugaacauugugcugaucgcccucagccugcuugcuauucugaaggggaucuacaauguggccacaugcggacucuucggccuggucuccuuucuucugcucugugggagaucuugcagcacgaccuauaaaggaguguacgaacugcagacacuggagcucgacauggcgucccugaacaugaccaugccucuuucuuguacaaagaauaacagccaucacuauaucaugguuggcaaugaaaccgggcuggagcucacacugaccaacacguccauuaucaaucauaaauucugcaaccuuucugaugcucacaagaaagaccuguacgaucaugcccucaugagcauuaucuccaccuuucaccugagcauuccgaauuucaaccaguaugaggccaugucuugugacuuuaauggaggcaagaucuccgugcaguacaaccugagccacacauaugcugucgaugccgcuaaucauugcggcaccauugccaacggggugcuccaaacauucaugcggauggcguggggaggcucuuacaucgcccuggacuccgggaagggaagcugggauuguaucaugaccucuuaccaguaucuuauuauccagaauacgacaugggaagaccacugccaguuuucccgccccagcccuauuggcuaccuggggcuccugucccaaagaacccgggauaucuauauuucucgcagacuucugggaacauucaccuggacccucagcgacuccgagggcaacgaaacacccggcggguacugucugacgcgguggaugcugaucgaggcugagcucaaaugcuuuggaaacaccgccguugcuaaguguaaugaaaaacaugaugaggaguucugcgacaugcugcgccuuuuugauuucaacaagcaggccaucagacggcugaaaacagaagcgcagaugagcauucagcucaucaauaaggccgugaacgcucugauuaaugaccaacuuaucaugaagaaccaucugcgcgacauuaugggcaucccuuauugcaauuacucuaaauauugguaccucaaccacaccgucacagggaagaccucccugcccagauguuggcuggugagcaauggaucuuaccucaacgaaacgcacuucagcgaugacaucgagcagcaggccgauaauaugauuacagagcugcuucaaaaagaauauauggaccggcagggcaagaccccucuggggcucguggaucuguuugucuucuccaccucuuuuuaccugaucagcauuuuccuucaccucaucaaaauuccgugaggacuagucccuguucccagagcccacuuuuuuuucuuuuuuugaaauaaaauagccugucuuucagaucucaaaggcucuuuucagagccaccaaaaaaaaaaaaaaaaaaaaaaaaaaaaaaaaaaaaaaaaaaaaaaaaaaaaaaaaaaaaaaaaaaaaaaaaaaaaaaaaaaaaaaaaaaaaaaaaaaaaa

SEQ ID NO: 42008 - RNA, 1631 nt, Artificial Sequence
  mRNA product Design a-1 (hSL-A100) comprising derived and/or modified sequence from LASV(LASV253-NIG-2011;Clade II)__AIT17670__GPCmut13 (opt5)
aggagagucccgcagucggcguccagcggcucugcuuguucgugugugugucguugcaggccuuauucaagcuuaccaugggccagaucauuaccuucuuucaagaggugccccacgucaucgaagagguuaugaacauugugcugaucgcccucagccugcuugcuauucugaaggggaucuacaauguggccacaugcggacucuucggccuggucuccuuucuucugcucugugggagaucuugcagcacgaccuauaaaggaguguacgaacugcagacacuggagcucgacauggcgucccugaacaugaccaugccucuuucuuguacaaagaauaacagccaucacuauaucaugguuggcaaugaaaccgggcuggagcucacacugaccaacacguccauuaucaaucauaaauucugcaaccuuucugaugcucacaagaaaaaucuguacgaccaugcccucaugagcauuaucuccaccuuucaccugagcauuccgaacuucaaucaguaugaggccaugucuugugauuuuaacggaggcaagaucuccgugcaguacaaucugagccacacauaugcugucgacgccgcuaaccauugcggcaccauugccaauggggugcuccaaacauucaugcggauggcguggggaggcucuuacaucgcccuggauuccgggaagggaagcugggacuguaucaugaccucuuaccaguaucuuauuauccagaacacgacaugggaagaucacugccaguuuucccgccccagcccuauuggcuaccuggggcuccugucccaaagaacccgggacaucuauauuucucgcagacuucugggaacauucaccuggacccucagcgauuccgagggcaacgaaacacccggcggguacugucugacgcgguggaugcugaucgaggcugagcucaaaugcuuuggaaauaccgccguugcuaaguguaacgaaaaacaugacgaggaguucugcgauaugcugcgccuuuuugacuucaauaagcaggccaucagacggcugaaagcggaagcccagaugagcauucagcucaucaacaaggcugugaaugcccugauuaacgaucaacuuaucaugaagaaucaucugcgcgacauuaugggcaucccuuauugcaacuacucuaaauauugguaccucaaucacacagucaccgggagaacaucccugccccgguguuggcuggugagcaacggaucuuaccucaaugaaacccacuucagcgacgauaucgagcagcaggcugacaacaugauuacggagcugcuucaaaaggaauauaucgaucgccagggcaaaacaccucuggggcucguggaccuguuugucuucuccaccucuuuuuaccugauuagcaucuuccuucaccucguuaagauuccgugaggacuagucccuguucccagagcccacuuuuuuuucuuuuuuugaaauaaaauagccugucuuucagaucucaaaggcucuuuucagagccaccaaaaaaaaaaaaaaaaaaaaaaaaaaaaaaaaaaaaaaaaaaaaaaaaaaaaaaaaaaaaaaaaaaaaaaaaaaaaaaaaaaaaaaaaaaaaaaaaaaaaa

SEQ ID NO: 42009 - RNA, 1631 nt, Artificial Sequence
  mRNA product Design a-1 (hSL-A100) comprising derived and/or modified sequence from LASV(LASV254-NIG-2011;Clade II)__AIT17674__GPCmut13 (opt5)
aggagagucccgcagucggcguccagcggcucugcuuguucgugugugugucguugcaggccuuauucaagcuuaccaugggccagaucauuaccuucuuucaagaggugccccacgucaucgaagagguuaugaacauugugcugaucgcccucagccugcuugcuauucugaaggggaucuacaauguggccacaugcggacucuucggccuggucuccuuucuucugcucugugggagaucuugcagcacgaccuauaaaggaguguacgaacugcagacacuggagcucgacaugaccaaccugaauaugacaaugccucuuuccuguaccaagaacaauucucaucacuauaucaugguuggcaacgaaacagggcuggagcucacccugacgaauaccagcauuaucaaccauaaauucugcaaucuuuccgaugcgcacaagaaaaaccuguacaaucaugcucucaugucuauuaucagcacauuucaccuguccauuccgaacuucaaucaguaugaggccaugagcugugacuuuaacggaggcaagaucucugugcaguacaaucugucccacagcuaugccgucgaugcugccaaccauugcggcaccauugcuaacggggugcuccaaacauucaugcggauggccuggggaggcucuuacaucgcgcuggacuccgggaagggaaauugggauuguaucaugaccagcuaccaguaucuuauuauccagaacacgacaugggaagaccacugccaguuuucucgccccuccccuauuggcuaccuggggcuccugagccaaagaacccgggauaucuauauuucccgcagacuucugggaacauucaccuggacccucucugacagcgagggcaaugaaacacccggcggguacugucugacgcgguggaugcugaucgaggccgagcucaaaugcuuuggaaacaccgcuguugccaaguguaaugaaaaacaugaugaggaguucugcgacaugcugcgccuuuuugauuucaacaagcaggcuaucagacggcugaaaacagaagcccaggcgaauauucagcucaucaacaaggccgugaaugcucugauuaacgaccaacuuaucaugaagaaucaucugcgcgauauuaugggcaucccuuauugcaacuacuccaaauauugguaccucaaucacaccgucacagggaagaccagccugcccagauguuggcuggugucuaacggauccuaccucaaugaaacgcacuucagcgacgacaucgagcagcaggccgauaacaugauuacagagcugcuucaaaaagaauauauggaccggcagggcaagaccccucuggggcucguggaucuguuugucuucucuaccagcuuuuaccugaucuccauuuuccuucaccucguuaaaaucccgugaggacuagucccuguucccagagcccacuuuuuuuucuuuuuuugaaauaaaauagccugucuuucagaucucaaaggcucuuuucagagccaccaaaaaaaaaaaaaaaaaaaaaaaaaaaaaaaaaaaaaaaaaaaaaaaaaaaaaaaaaaaaaaaaaaaaaaaaaaaaaaaaaaaaaaaaaaaaaaaaaaaaa

SEQ ID NO: 42010 - RNA, 1631 nt, Artificial Sequence
  mRNA product Design a-1 (hSL-A100) comprising derived and/or modified sequence from LASV(Nig08-A19;Clade III)__ADU56618__GPCmut13 (opt5)
aggagagucccgcagucggcguccagcggcucugcuuguucgugugugugucguugcaggccuuauucaagcuuaccaugggccagaucgugaccuucuuucaagaggucccccacguuauugaagaggugaugaacaucgugcugauugcccucagcauccuggcuauucuuaaggggcuguacaauaucgccacaugcggacucaucggccuggucacguuccuucugcucuccgggagaucuuguagcaugaccuauaaaggaguguacgaacugcagacacuggagcucaacaugaauacccugaacaugacaaugccucuuuccugcaccaagaauaacucucaucacuauauuaugguuggcaaugaaacagggcuggagcucacccugacgaacaccagccuucugcaucacaaauuuuguaaucucuccgacgcgcauaagaaaaaccuguacgaucacacacugaugucuaucauuagcaccuuccaccucuccaucccgaauuuuaaccaguaugaggcuaugagcugcgacuucaauggaggcaagauuacagugcaguacaaccugucucauuccuaugccaucgaugccgcuaaucacuguggcaccgucgccaacggggugcuucaaacguuuaugcggauggcuuggggaggcagcuacauugcccuggacucugggcgcggaaagugggauugcaucaugacauccuaccaguaucucaucauucagaacaccacaugggaagaccauugucaguucagcagacccucuccuaucggcuaccuggggcuucugucccaacggacccgcgauauuuauaucagcagacggcuccugggaaccuuuacauggacgcuguccgacucugagggcaaugaaacccccggcggguacugccucacacgcuggaugcugauugaggcggagcuuaaauguuucggaaacaccgccguugcuaagugcaaugaaaaacacgaugaggaauuuugugacaugcugagacucuucgauuuuaacaagcaggccauccggcgccugaaagcugaggcccagaugagcauccagcuuauuaauaaggcggugaacgcccugaucaaugaccaacucauuaugaagaaccaccugagagauaucaugggcauuccuuauugcaauuacuccaaauauugguaccugaaccauacaagcaccgggcggacgucucucccccgcugcuggcuggucuccaauggaagcuaccuuaacgaaacacacuucucugacgacaucgagcagcaggcugauaauaugaucaccgagaugcugcaaaaggaauaucucgacagacagggcaaaaccccucuggggcugguggaucuuuucguguuuagcacauccuucuaccucauuucuaucuuucugcaucuggucaagauuccgugaggacuagucccuguucccagagcccacuuuuuuuucuuuuuuugaaauaaaauagccugucuuucagaucucaaaggcucuuuucagagccaccaaaaaaaaaaaaaaaaaaaaaaaaaaaaaaaaaaaaaaaaaaaaaaaaaaaaaaaaaaaaaaaaaaaaaaaaaaaaaaaaaaaaaaaaaaaaaaaaaaaaa

SEQ ID NO: 42011 - RNA, 1634 nt, Artificial Sequence
  mRNA product Design a-1 (hSL-A100) comprising derived and/or modified sequence from LASV(G1180-SLE-2010;Clade IV)__AIT17168__GPCmut13 (opt5)
aggagagucccgcagucggcguccagcggcucugcuuguucgugugugugucguugcaggccuuauucaagcuuaccaugggccagaucgugaccuucuuucaagaggucccccacguuauugaagaggugaugaacaucgugcugauugcccucagcauccuggcuguccuuaaggggcuguacaauuucgccacaugcggacucgugggccugcuuacguuucugcuccugugugggagauccugcaccgcgucucgguauaaaggaguuuacgaacugcagacacucgagcugaacauggaaacccuuaauaugacaaugccucugagcuguaccaagaacaauucccaucacuauauuauggugggcaacgagacagggcucgagcugacccuuacgaauaccucuaucaucaaccauaaauucugcaaucugagcgacgcucacaagaaaaaccucuacgaucaugcccugauguccauuaucucuacauuucaccugagcauuccgaauuucaaccaguaugaagccauguccugugacuuuaauggaggcaagaucagcguccaguacaaccucucucacuccuaugcuggcgaugccgcuaaucauugcgggaccguggccaacggaguucugcaaacauucaugcgcauggcguggggcgggagcuacauugcccuugacucuggacacggcuccugggauuguaucaugaccagcuaccaguaucugauuauccagaacacgacaugggaggaccauugccaguuuucuagacccuccccuaucggguaccucggacugcuuagccaacggacccgcgauauuuauaucuccagacggcugcucggcacauucaccuggacccugucugacagcgaaggcaaggauacacccgggggauacugucugacgcgcuggaugcucauugaggcugagcugaaaugcuuuggcaauaccgccguggcuaaguguaacgaaaaacacgacgaggaguucugcgauaugcuuagacuguuugacuucaauaagcaggccauccagcggcucaaagcggaagcccagauguccauucaacugaucaacaaggcugucaaugcccuuaucaacgaucagcugauuaugaagaaucaccuccgcgacaucauggggauuccuuauugcaacuacagcaaauauugguaccugaaucauacaaccacaggaaagaccucucugcccaaauguuggcucguguccaacggcagcuaccugaaugaaacgcacuucucugacgauaucgagcagcaagcugacaacaugauuacagagaugcuucagaaggaauauauggagagacaggggaaaaccccucugggacucguggaucuguuugucuucagcaccuccuuuuaccugaucucuaucuuccuucaucucguuaagauuccgugaggacuagucccuguucccagagcccacuuuuuuuucuuuuuuugaaauaaaauagccugucuuucagaucucaaaggcucuuuucagagccaccaaaaaaaaaaaaaaaaaaaaaaaaaaaaaaaaaaaaaaaaaaaaaaaaaaaaaaaaaaaaaaaaaaaaaaaaaaaaaaaaaaaaaaaaaaaaaaaaaaaaa

SEQ ID NO: 42012 - RNA, 1634 nt, Artificial Sequence
  mRNA product Design a-1 (hSL-A100) comprising derived and/or modified sequence from LASV(G1442-SLE-2011;Clade IV)__AIT17180__GPCmut13 (opt5)
aggagagucccgcagucggcguccagcggcucugcuuguucgugugugugucguugcaggccuuauucaagcuuaccaugggccagaucgugaccuucuuucaagaggucccccacguuauugaagaggugaugaacaucgugcugauugcccucagcauccuggcuguccuuaaggggcuguacaauguggccacaugcggacucauuggccugguuacguuccuucugcucugugggagauccugcaccacaacccuguauaaaggaguguacgaacugcagacacucgagcugaacauggaaacccuuaauaugacaaugccucugucuuguaccaagaacaauagccaucacuauauccgggucggcaacgagacggggcucgagcugacccuuacaaauaccuccaucauuaaccauaaauuuugcaaucugucugacgcgcacaagaaaaaccucuacgaucaugcucugaugagcaucauuuccacauuccaccugucuaucccgaauuuuaaccaguaugaagccaugagcugugacuucaauggaggcaagauuuccgugcaguacaaccucagccacucuuaugccggcgaugcugccaaucauugcgggaccguugcuaacggagugcugcaaacguuuaugcgcauggccuggggcggguccuacaucgcgcuugacagcggaagaggcaacugggauuguauuaugacaucuuaccaguaucugaucauccagaauaccacaugggacgaucacugccaguucucccggcccagcccuauuggguaccucggacugcuuucucaacgcaccagagacgucuauaucucccggcgccugcucggcaccuuuacauggacgcugagcgauuccgagggcaaggacacccccgggggauacugucugacaagauggaugcucauugaagccgagcugaaaugcuucggcaacaccgcuguggccaaguguaaugagaaacaugaugaagaguuuugcgacaugcuucggcuguucgauuuuaacaagcaggcuauccagcgccucaaagccgaagcgcagaugucuauucaacugaucaauaaggccgugaacgcucuuaucaaugaccagcugauuaugaagaaccaccucagagacaucauggggauuccuuauugcaauuacagcaaauauugguaccugaacaauacagccaccggaaagacgucccugcccaaauguuggcucaucagcaacggcucuuaccugaaugagacacacuucuccgaugacauugaacaggaggcugauaacaugaucaccgagaugcuucaaaaggaauauauggagcggcaggggaaaaccccucugggacucgucgaccuguucguuuuuagcacaucuuucuaccugaucagcauuuuucuucaucucgugaagaucccgugaggacuagucccuguucccagagcccacuuuuuuuucuuuuuuugaaauaaaauagccugucuuucagaucucaaaggcucuuuucagagccaccaaaaaaaaaaaaaaaaaaaaaaaaaaaaaaaaaaaaaaaaaaaaaaaaaaaaaaaaaaaaaaaaaaaaaaaaaaaaaaaaaaaaaaaaaaaaaaaaaaaaa

SEQ ID NO: 42013 - RNA, 1634 nt, Artificial Sequence
  mRNA product Design a-1 (hSL-A100) comprising derived and/or modified sequence from LASV(G3010-SLE-2013;Clade IV)__AIT17344__GPCmut13 (opt5)
aggagagucccgcagucggcguccagcggcucugcuuguucgugugugugucguugcaggccuuauucaagcuuaccaugggccagaucgugaccuucuuucaagaggucccccacguuauugaagaggugaugaacaucgugcugauugcccucagcauccuggcuguccuuaaggggcuguacaauuucgccacaugcggacucgugggccugguuacguuucuucugcucugugggagauccugcaccacaucucuguauaaaggaguguacgaacugcagacccucgagcugaacauggaaacacuuaauaugaccaugccucugagcuguacaaagaacaauucccaucacuauauuauggucggcaacgagaccgggcucgagcugacgcuuaccaauacaucuaucaucaaccauaaauucugcaaucugagcgacgcgcacaagaaaaaccucuacaaucaugcucugauguccauuaucucuaccuuucaccugagcauuccgaacuucaaucaguaugaagccauguccugugauuuuaacggaggcaagaucagcgugcaguacaaucucucucacuccuaugccggcgacgcugccagccauugcgggacaguugcuaacggagugcugcaaaccuucaugcggauggccuggggcgggucuuacauugcgcuugauuccggauacggcaagugggacuguaucaugacgagcuaucaguaccugauuauccagaacacaaccugggaggaucacugccaguuuucucgccccuccccuaucggguaucucggacugcuuagccaaagaacacgggacauuuacaucucccgcagacugcucggcaccuucaccuggacacugucugauagcgaaggcaaagacacgcccgggggauauugucugacccgguggaugcucauugaggccgagcugaagugcuuuggcaauacagcugucgccaaauguaacgaaaagcaugaugaggaguucugcgacaugcuucgccuguuugauuucaauaaacaggcuauccagagacucaagaccgaagcccagauguccauucaacugaucaacaaggcggugaaugcccuuaucaacgaccagcugauuaugaaaaaucaccuccgggauaucauggggauuccuuacugcaacuauagcaaguacugguaccugaaucacacaaccacgggaaaaacaucucugcccaaguguuggcucguguccaacggcagcuaucugaaugaaacccauuucucugacgacaucgagcagcaagcugauaacaugauuaccgagaugcuucagaaagaauacauggagcgccaggggaagacaccucugggacucgucgaccuguuuguuuucagcaccuccuuuuaucugaucucuaucuuccuucaccucgugaaaauuccgugaggacuagucccuguucccagagcccacuuuuuuuucuuuuuuugaaauaaaauagccugucuuucagaucucaaaggcucuuuucagagccaccaaaaaaaaaaaaaaaaaaaaaaaaaaaaaaaaaaaaaaaaaaaaaaaaaaaaaaaaaaaaaaaaaaaaaaaaaaaaaaaaaaaaaaaaaaaaaaaaaaaaa

SEQ ID NO: 42014 - RNA, 1634 nt, Artificial Sequence
  mRNA product Design a-1 (hSL-A100) comprising derived and/or modified sequence from LASV(G502-SLE-2009;Clade IV)__AIT17126__GPCmut13 (opt5)
aggagagucccgcagucggcguccagcggcucugcuuguucgugugugugucguugcaggccuuauucaagcuuaccaugggccagaucgugaccuucuuucaagaggucccccacguuauugaagaggugaugaacaucgugcugauugcccucagcauccuggcuguccuuaaggggcuguacaauuucgccacaugcggacucgugggccugcuuacguuucugcuccugugugggagauccugcaccacaggacuguauaaaggcguuuacgaacuccagacccuggagcuuaacauggaaacacugaauaugaccaugccucucucuuguacaaagaacaauagccaucacuauauuaugguggggaacgagaccggacuggagcuuacgcugaccaauacauccaucaucaaccauaaauucugcaaucucucugacgcgcacaagaaaaaccuguacgaucaugcucugaugagcauuaucuccaccuuucaccucucuauuccgaauuucaaccaguaugaagccaugagcugugacuuuaauggcggcaagaucuccguccaguacaaccugagccacucuuaugccggggaugcugccgaccauugcggaacaguggcuaauggcguucuucaaaccuucaugcggauggccuggggaggguccuacauugcgcuggauagcggccgcgggagaugggacuguaucaugacgucuuaccaguaucucauuauccagaacacaaccugggaggaucacugccaguuuucccggcccagcccuaucggauaccugggccuucugucucaacgcacaagagacauuuauaucucccggcgccuccugggcaccuucaccuggacacugagcgauuccgaagggaaggacacgcccggaggcuacugucucaccagauggaugcugauugaggccgagcuuaaaugcuuugggaacacagcuguggccaaguguaaugaaaaacaugaugaggaguucugcgacaugcugcggcucuuugauuucaacaagcaggcuauccagcgccugaaagccgaagcgcagaugucuauucaacuuaucaauaaggccgucaacgcucugaucaaugaccagcucgugaugaagaaccaccugagagacauuaugggaaucccuuauugcaauuacagccgguauugguaccugaaccacaccacaaccggccgcacgucccuccccaaauguuggcuggugagcaaugggucuuaccuuaacgaaacacauuucuccgaugacauugagcagcaagccgauaauaugaucaccgagaugcugcagaaggaauauauggagagacagggaaaaaccccucucggccuggucgaccuguuuguuuucagcacaucuuuuuaccuuauuagcaucuuccuccaccuggugaagaucccgugaggacuagucccuguucccagagcccacuuuuuuuucuuuuuuugaaauaaaauagccugucuuucagaucucaaaggcucuuuucagagccaccaaaaaaaaaaaaaaaaaaaaaaaaaaaaaaaaaaaaaaaaaaaaaaaaaaaaaaaaaaaaaaaaaaaaaaaaaaaaaaaaaaaaaaaaaaaaaaaaaaaaa

SEQ ID NO: 42015 - RNA, 1634 nt, Artificial Sequence
  mRNA product Design a-1 (hSL-A100) comprising derived and/or modified sequence from LASV(G733-SLE-2010;Clade IV)__AIT17154__GPCmut13 (opt5)
aggagagucccgcagucggcguccagcggcucugcuuguucgugugugugucguugcaggccuuauucaagcuuaccaugggccagaucgugaccuucuuucaagaggucccccacguuauugaagaggugaugaacaucgugcugauugcccucagcauccuggcuguccuuaaggggcuguacaauuucgccacaugcggaauugugggccucguuuccuuucugcuucugugugggagaucuugcacgaccagccucuauaaaggaguguacgaacugcagacacuggagcucaacauggaaacccugaauaugacaaugccucuuuccuguaccaagaacaauucucaucacuauaucauggucggcaacgagacagggcuggagcucacccugacgaauaccagcaucauuaaccauaaauucugcaaucuuuccgacgcgcacaagaaaaaccuguacgaucaugcucucaugucuaucauuagcacauuucaccuguccaucccgaauuucaaccaguaugaagccaugagcugugacuuuaauggaggcaagauuucugugcaguacaaccugucccacagcuaugccggcgaugcugccaaucauugcgggaccaucgcuaacggaguucuccaaacauucaugcggauggccuggggcgggucuuacauugcgcuggacuccggacgcgauagaugggacuguaucaugaccagcuaccaguaucuuaucauucagaacacgacaugggaggaucacugccaguuuucucggcccuccccuaucggcuaccuggggcuccugagccaacgcaccagagacauuuauaucucccggcgccuucugggaacauucaccuggacccucucugauagcgaaggcaaggacacacccggcggguacugucugacgagauggaugcugauugaggccgagcucaaaugcuuuggaaauaccgcuguggccaaguguaacgaaaaacaugaugaggaguucugcgacaugcugcggcuuuuugauuucaauaagcaggcuauccagcgccugaaagccgaagcgcagauguccauccaacucauuaacaaggccgucaaugcucugaucaacgaccagcuuauuaugaagaaucaccugagagacaucaugggcauuccuuauugcaacuacagcaaauauugguaccucaaucacacaaccacagggaagaccucucugcccaaauguuggcugguguccaacggaagcuaccucaaugaaacgcauuucucugaugacaucgagcagcaagccgauaacaugaucacagagaugcugcagaaggaauauauggagcggcagggcaaaaccccucuugggcugguggaccucuuugucuucagcaccuccuuuuaccugauuucuaucuuccugcaccuuguuaagauuccgugaggacuagucccuguucccagagcccacuuuuuuuucuuuuuuugaaauaaaauagccugucuuucagaucucaaaggcucuuuucagagccaccaaaaaaaaaaaaaaaaaaaaaaaaaaaaaaaaaaaaaaaaaaaaaaaaaaaaaaaaaaaaaaaaaaaaaaaaaaaaaaaaaaaaaaaaaaaaaaaaaaaaa

SEQ ID NO: 42016 - RNA, 1634 nt, Artificial Sequence
  mRNA product Design a-1 (hSL-A100) comprising derived and/or modified sequence from MOPV/LASV reassortant(IGS-1;Clade IV)__AFY05576__GPCmut13 (opt5)
aggagagucccgcagucggcguccagcggcucugcuuguucgugugugugucguugcaggccuuauucaagcuuaccaugggccagaucgugaccuucuuucaagaggucccccacguuauugaagaggugaugaacaucgugcugauugcccucagcguccuggcugugcuuaaggggcuguacaauuucgccacaugcggacucguuggccuggugacguuucuucugcucugugggagauccugcaccacaucucuguauaaaggagucuacgaacugcagacccucgagcugaacauggaaacacuuaauaugaccaugccucugagcuguacaaagaacaauucccaucacuauaucauggugggcaacgagaccgggcucgagcugacgcuuaccaauacaucuauuaucaaccauaaauucugcaaucugagcgacgcgcacaagaaaaaccucuacgaucaugcucugauguccaucauuucuaccuuucaccugagcaucccgaauuucaaccaguaugaagccauguccugugacuuuaauggaggcaagauuagcguucaguacaaccucucucacuccuaugccggcgaugcugccaaucauugcgggacaguggcuaacggaguccugcaaaccuucaugcggauggccuggggcgggagcuacaucgcgcuugacucuggacgcggcaacugggauuguauuaugacguccuaccaguaucugaucauucagaauacaaccugggaggaccacugccaguuuagcagacccucuccuaucggguaccucggacugcuuucccaacggacacgcgauaucuauauuagcagacggcugcucggcaccuucaccuggacacuguccgacucugaaggcgaggauacgcccgggggauacugucugacccgcuggaugcucaucgaggccgaacugaagugcuuuggcaacacagcuguggccaaauguaaugagaagcaugacgaagaguucugcgauaugcuuagacuguuugacuucaacaaacaggcuauucagcggcucaaggccgaagcgcagaugagcauccaacugauuaauaaagccgugaacgcucuuaucaaugaucagcugaucaugaagaaccaccuccgcgacauuauggggaucccuuauugcaauuacuccaaguauugguaccugaaccacaccacaaccggaagaacgagccugcccaaauguuggcucgucucuaauggcuccuaccugaacgagacacauuucagcgacgauauugagcagcaagccgacaauaugaucaccgaaaugcuucagaaggaguauauggaacggcaggggaaaaccccucugggacucguugaucuguuuguguucucuaccagcuuuuaccugauuuccaucuuccuucaccucgugaagaucccgugaggacuagucccuguucccagagcccacuuuuuuuucuuuuuuugaaauaaaauagccugucuuucagaucucaaaggcucuuuucagagccaccaaaaaaaaaaaaaaaaaaaaaaaaaaaaaaaaaaaaaaaaaaaaaaaaaaaaaaaaaaaaaaaaaaaaaaaaaaaaaaaaaaaaaaaaaaaaaaaaaaaaa

SEQ ID NO: 42017 - RNA, 1634 nt, Artificial Sequence
  mRNA product Design a-1 (hSL-A100) comprising derived and/or modified sequence from LASV(LM765-SLE-2012;Clade IV)__AIT17814__GPCmut13 (opt5)
aggagagucccgcagucggcguccagcggcucugcuuguucgugugugugucguugcaggccuuauucaagcuuaccaugggccagaucgugaccuucuuucaagaggucccccacguuauugaagaggugaugaacaucgugcugauugcccucagcauccuggcuguccuuaaggggcuguacaauuucgccacaugcggacucgugggccugguuacguuucuucugcucugugggagauccugcaccacaucucuguauaaaggaguguacgaacugcagacccucgagcugaacauggaaacacuuaauaugaccaugccucugagcuguacaaagaacaauucccaucacuauauuauggucggcaacgagaccgggcucgagcugacgcuuaccaauacaucuaucaucgaccauaaauucugcaaccugagcgaugcgcaccggaagaaucucuacgaccaugcucugauguccauuaucucuaccuuucaccugagcauuccgaacuucaaucaguaugaagccauguccugugauuuuaacggaggcaaaaucagcgugcaguacaaucucucucacuccuaugccaaggacgcugccgaucauugcggcacaguugcuaacggggugcugcaaaccuucaugcgcauggccuggggaggcagcuacauugcgcuugacucugggagaggacggugggauuguaucaugacguccuaccaguaucugauuauccagaauacaaccugggaggaccacugccaguuuagccgccccucuccuaucggcuaccucgggcugcuuucccaaagaacacgggauauuuauaucagccgcagacugcucggaaccuucaccuggacacuguccgacucugaaggcaaggauacgcccggcggguacugucugacccgguggaugcucauugaggccgagcugaaaugcuuuggaaacacagcugucgccaaguguaacgaaaaacaugacgaggaguucugcgauaugcuucgccuguuugacuucaauaagcaggcuauccagagacucaaagccgaagcgcagaugagcauucaacugaucaacaaggccgugaaugcucuuaucaacgaccagcugauuaugaagaaucaccuccgggauaucaugggcauuccuuauugcaacuacuccaaauauugguaccugaaucacaccacaaccgggaagacgagccugcccaaauguuggcucgugucuaacggauccuaccugaaugaaacacauuucagcgacgauaucgagcagcaagccgacaacaugauuaccgagaugcuucagaaggaauauauggagcgccagggcaaaaccccucuggggcucgucgaucuguuuguuuucucuaccagcuuuuaccugaucuccaucuuccuucaccucgugaagauuccgugaggacuagucccuguucccagagcccacuuuuuuuucuuuuuuugaaauaaaauagccugucuuucagaucucaaaggcucuuuucagagccaccaaaaaaaaaaaaaaaaaaaaaaaaaaaaaaaaaaaaaaaaaaaaaaaaaaaaaaaaaaaaaaaaaaaaaaaaaaaaaaaaaaaaaaaaaaaaaaaaaaaaa

SEQ ID NO: 42018 - RNA, 1634 nt, Artificial Sequence
  mRNA product Design a-1 (hSL-A100) comprising derived and/or modified sequence from LASV(LM776-SLE-2012;Clade IV)__AIT17824__GPCmut13 (opt5)
aggagagucccgcagucggcguccagcggcucugcuuguucgugugugugucguugcaggccuuauucaagcuuaccaugggccagaucgugaccuucuuucaagaggucccccacguuauugaagaggugaugaacaucgugcugauugcccucagcauccuggcuguccuuaaggggcuguacaauuucgccacaugcggacucgugggccugguuacguuucuucugcucugugggagauccugcaccacaucuguguauaaaggagucuacgaacugcagacccuggagcucaacauggaaacacugaauaugaccaugccucuuagcuguacaaagaacaauucccaucacuauauuauggugggcaacgagaccgggcuggagcucacgcugaccaauacaucuaucaucaaccauaaauucugcaaucuuagcgacgcgcacaagaaaaaccuguacgaucaugcucucauguccauuaucucuaccuuucaccugagcauuccgaauuucaaccaguaugaagccauguccugugacuuuaauggaggcaagaucagcguucaguacaaccugucucacuccuaugccggcgaugcugccaaucauugcgggacaguggcuaacggaguccuccaaaccuucaugcggauggccuggggcgggagcuacauugcgcuggacucuggacacggcaagugggauuguaucaugacguccuaccaguaucuuauuauccagaacacaaccugggaggaccauugccaguuuagccgccccucuccuaucggguaccugggacuccugucccaaagaacacgggauauuuauaucagccgcagacuucugggcaccuucaccuggacacucuccgacucugaaggcaaagauacgcccgggggauacugucugacccgguggaugcugauugaggccgagcucaagugcuuuggcaauacagcuguggccaaauguaacgaaaagcacgacgaggaguucugcgauaugcugcgccuuuuugacuucaauaaacaggcuauccagagacugaaggccgaagcgcagaugagcauucaacucaucaacaaggccgugaaugcucugaucaacgaucagcuuauuaugaaaaaucaucugcgggacaucauggggauuccuuauugcaacuacuccaaguauugguaccucaaucacaccacaaccggaaaaacgagccugcccaaguguuggcuggucucuaacggcuccuaccucaaugaaacacacuucagcgacgauaucgagcagcaagccgacaacaugauuaccgagaugcugcagaaagaauauauggagcgccaggggaagaccccucuuggacugguugaucucuuuguguucucuaccagcuuuuaccugaucuccaucuuccugcaucuugugaaaauuccgugaggacuagucccuguucccagagcccacuuuuuuuucuuuuuuugaaauaaaauagccugucuuucagaucucaaaggcucuuuucagagccaccaaaaaaaaaaaaaaaaaaaaaaaaaaaaaaaaaaaaaaaaaaaaaaaaaaaaaaaaaaaaaaaaaaaaaaaaaaaaaaaaaaaaaaaaaaaaaaaaaaaaa

SEQ ID NO: 42019 - RNA, 1634 nt, Artificial Sequence
  mRNA product Design a-1 (hSL-A100) comprising derived and/or modified sequence from LASV(Mad39;Clade IV)__ANH09722__GPCmut13 (opt5)
aggagagucccgcagucggcguccagcggcucugcuuguucgugugugugucguugcaggccuuauucaagcuuaccaugggccagaucgugaccuucuuucaagaggucccccacguuauugaagaggugaugaacaucgugcugauugcccucagcauccuggcuguccuuaaggggcuguacaauguggccacaugcggacucauuggccugguuacguuccuucugcucugugggagauccugcaccacaacccuguauaaaggaguguacgaacugcaggcgcucgagcugaacauggaaacacuuaauaugaccaugccucugucuuguacaaagaacaauagccaucacuauauccgggucggcaacgagaccgggcucgagcugacgcuuaccaauacaucccugaucaaccauaaauuuugcaaucucucugacgcucacaagaaaaaccuguacgaucaugcccugaugagcauuaucuccaccuuccaccucucuauuccgaauuuuaaccaguaugaagccaugagcugugacuucaaugauggaaagaucuccgugcaguacaaccugagccacacauaugcuggcgacaccgccaaucauugcggcacgguugcuaacggggugcuucaaacauuuaugcgcauggccuggggaggcucuuacauugcgcuggauuccgggagaggaggcugggacuguaucaugaccagcuaccaguaucucauuauccagaacacaaccugggaggaucacugccaguucucucggcccuccccuaucggguaccugggacuucugagccaacgcaccagagacauuuauaucucucggcgccuccugggcacauuuacguggacccuguccgauagcgaaggcaaggacacacccgggggauacugucucaccagauggaugcugauugaggccgagcuuaaaugcuucggcaauacagcugucgccaaguguaacgaaaaacaugaugaggaauuuugcgacaugcugcgccucuucgauuuuaauaagcaggcuauccagcggcugaaagccgaggcgcagauguccauucaacuuaucaacaaggccgugaaugcucugaucaacgaccagcucauuaugaagaaucaccugagagacaucauggggauuccuuauugcaacuacucuaaauauugguaccugaaucacaccgugacgggaaagacaagccuccccaaauguuggcuggucuccaacggcagcuaccuuaaugaaacccauuucucugaugacaucgagcagcaagccgauaacaugauuaccgagaugcugcagaaggaauauauggagcggcaggggaaaacaccucucggacugguugaccuguucguguuuuccaccagcuucuaccuuaucucuaucuuucuccaccuggugaagauuccgugaggacuagucccuguucccagagcccacuuuuuuuucuuuuuuugaaauaaaauagccugucuuucagaucucaaaggcucuuuucagagccaccaaaaaaaaaaaaaaaaaaaaaaaaaaaaaaaaaaaaaaaaaaaaaaaaaaaaaaaaaaaaaaaaaaaaaaaaaaaaaaaaaaaaaaaaaaaaaaaaaaaaa

SEQ ID NO: 42020 - RNA, 1634 nt, Artificial Sequence
  mRNA product Design a-1 (hSL-A100) comprising derived and/or modified sequence from LASV(Z0947-SLE-2011;Clade IV)__AIT17840__GPCmut13 (opt5)
aggagagucccgcagucggcguccagcggcucugcuuguucgugugugugucguugcaggccuuauucaagcuuaccaugggccagaucgugaccuucuuucaagaggucccccacguuauugaagaggugaugaacaucgugcugauugcccucagcauccuggcuguccuuaaggggcuguacaauuucgccacaugcggacucgugggccugguuacguuucuucugcucugugggagauccugcaccauuucucuguauaaaggaguguacgaacugcagacacucgagcugaacauggaaacccuuaauaugacaaugccucugagcuguaccaagaacaauucccaucacuauaucauggucggcaacgagacagggcucgagcugacccuuacgaauaccucuaucauuaaccauaaauucugcaaucugagcgacgcgcacaagaaaaaccucuacgaucaugcucugauguccaucauuucuacauuucaccugagcaucccgaauuucaaccaguaugaagccauguccugugacuuuaauggaggcaagauuagcgugcaguacaaccucucucacuccuaugccggcgaugcugccaaucauugcgggaccguugcuaacggagugcugcaaacauucaugcggauggccuggggcgggagcuacaucgcgcuugacucuggacgcgauagaugggacuguauuaugaccuccuaccaguaucugaucauccagaacacgacaugggaggaucacugccaguuuagccggcccucuccuauuggcuaccucgggcugcuuucccaacgcaccagagacaucuauauuagccggcgccugcucggaacauucaccuggacccuguccgauucugaaggcaaggacacacccggcggguacugucugacgagauggaugcucaucgaggccgagcugaaaugcuuuggaaauaccgcugucgccaaguguaacgaaaaacaugaugaggaguucugcgacaugcuucggcuguuugauuucaauaagcaggcuauucagcgccucaaagccgaagcgcagaugagcauccaacugaucaacaaggccgugaaugcucuuauuaacgaccagcugaucaugaagaaucaccucagagacauuaugggcaucccuuauugcaacuacuccaaauauugguaccugaaucacacaaccacagggaagaccagccugcccaaauguuggcucgugucuaacggauccuaccugaaugaaacgcauuucagcgaugacauugagcagcaagccgauaacaugaucacagagaugcuucagaaggaauauauggagcggcagggcaaaaccccucuggggcucgucgaccuguuuguuuucucuaccagcuuuuaccugaucuccauuuuccuucaccucgugaagaucccgugaggacuagucccuguucccagagcccacuuuuuuuucuuuuuuugaaauaaaauagccugucuuucagaucucaaaggcucuuuucagagccaccaaaaaaaaaaaaaaaaaaaaaaaaaaaaaaaaaaaaaaaaaaaaaaaaaaaaaaaaaaaaaaaaaaaaaaaaaaaaaaaaaaaaaaaaaaaaaaaaaaaaa

SEQ ID NO: 42021 - RNA, 1610 nt, Artificial Sequence
  mRNA product Design a-1 (A100) comprising derived and/or modified sequence from LASV(Josiah;Clade IV)__NP_694870__GPCmut13 (opt1)
aggagagucccgcagucggcguccagcggcucugcuuguucgugugugugucguugcaggccuuauucaagcuuaccaugggccagaucgugaccuucuuccaggaggucccccacgugaucgaggaggugaugaacaucguccugaucgcccucagcgugcuggccgugcugaaggggcucuacaacuucgcgaccugcggccuggucgggcuggugacguuccuccugcugugcggccgcuccugcaccaccagccucuacaaggggguguacgagcugcagacccuggagcucaacauggagacgcugaacaugaccaugccgcuguccugcaccaagaacaacagccaccacuacaucauggucggcaacgagaccggccucgagcugacgcugaccaacaccuccaucaucaaccacaaguucugcaaccucagcgacgcccacaagaagaaccuguacgaccacgcccugauguccaucaucagcaccuuccaccucuccauccccaacuucaaccaguacgaggccaugagcugcgacuucaacgggggcaagaucuccgugcaguacaaccugagccacuccuacgccggggacgcggccaaccacugcggcacgguggccaacgggguccugcagaccuucaugcggauggccuggggcggcagcuacaucgcgcucgacuccgggcgcggcaacugggacugcaucaugaccagcuaccaguaccugaucauccagaacaccacgugggaggaccacugccaguucucccggcccagccccaucggguaccugggccuccugucccagcgcacccgggacaucuacaucagccgccggcugcucggcaccuucaccuggacgcugagcgacuccgaggggaaggacaccccgggcggguacugccugacccgcuggaugcucaucgaggccgagcugaagugcuucggcaacaccgccguggccaagugcaacgagaagcacgacgaggaguucugcgacaugcugcggcuguucgacuucaacaagcaggccauccagcgccugaaggcggaggcccagaugagcauccagcugaucaacaaggccgugaacgcccucaucaacgaccagcugaucaugaagaaccaccuccgggacaucauggggauccccuacugcaacuacuccaaguacugguaccucaaccacacgaccaccggccgcaccagccugcccaagugcuggcuggucuccaacggcagcuaccucaacgagacgcacuucuccgacgacaucgagcagcaggccgacaacaugaucaccgagaugcugcagaaggaguacauggagcggcaggggaagacgccccugggccucguggaccuguucguguucagcaccuccuucuaccugaucagcaucuuccugcaccucgucaagaucccgugaggacuagucccuguucccagagcccacuuuuuuuucuuuuuuugaaauaaaauagccugucuuucagaucuaaaaaaaaaaaaaaaaaaaaaaaaaaaaaaaaaaaaaaaaaaaaaaaaaaaaaaaaaaaaaaaaaaaaaaaaaaaaaaaaaaaaaaaaaaaaaaaaaaaa

SEQ ID NO: 42022 - RNA, 1607 nt, Artificial Sequence
  mRNA product Design a-1 (A100) comprising derived and/or modified sequence from LASV(LP;Clade I)__AAF86701__GPCmut13 (opt1)
aggagagucccgcagucggcguccagcggcucugcuuguucgugugugugucguugcaggccuuauucaagcuuaccaugggccagaucaucaccuucuuccaggaggugccccacgucaucgaggaggugaugaacaucgugcugaucgcccucagccugcuggccauccucaaggggcuguacaacaucgcgaccugcggcaucaucgggcuggucgccuuccucuuccugugcggcaaguccugcagccugacgcucaagggcggguacgagcugcagacccuggagcucaacauggagacccugaacaugaccaugccgcuguccugcacgaagaacagcucccaccacuacauccgcgugggcaacgagaccgggcucgagcugacccugaccaacacgagcaucaucaaccacaaguucugcaaccucuccgacgcccacaagaagaaccuguacgaccacgcccugaugagcaucaucuccaccuuccaccucagcauccccaacuucaaccaguacgaggccauguccugcgacuucaacggcgggaagaucagcgugcaguacaaccugucccacagcuacgcgggcgacgccgccgagcacugcgggaccgucgccaacggcgugcugcagaccuucaugcggauggcguggggcgggcgcuacaucgcccucgacuccggcaaggggaacugggacugcaucaugacgagcuaccaguaccugaucauccagaacaccaccugggaggaccacugccaguucucccggcccagccccaucggcuaccugggccuccugucccagcgcacccgggacaucuacaucagccgccggcugcucgggacguucaccuggacccugagcgacuccgagggcaacgagacccccgggggcuacugccugacgcgcuggaugcucaucgaggccgagcugaagugcuucgggaacaccgccguggccaagugcaacgagaagcacgacgaggaguucugcgacaugcugcggcuguucgacuucaacaagcaggcgauccgccggcugaaggccgaggcccagaugagcauccagcugaucaacaaggccgucaacgcccucaucaacgaccagcugaucaugaagaaccaccuccgcgacaucaugggcauccccuacugcaacuacuccaaguacugguaccucaaccacaccagcuccggccggaccagccugcccaagugcuggcugaucuccaacgggagcuaccucaacgagacgcaguucuccgacgacaucgagcagcaggcggacaacaugaucaccgagaugcugcagaaggaguacaucgagcgccagggcaagaccccgcuggggcucguggacaucuucaucuucagcaccuccuucuaccugaucagcaucuuccugcaccugaucaagaucccgugaggacuagucccuguucccagagcccacuuuuuuuucuuuuuuugaaauaaaauagccugucuuucagaucuaaaaaaaaaaaaaaaaaaaaaaaaaaaaaaaaaaaaaaaaaaaaaaaaaaaaaaaaaaaaaaaaaaaaaaaaaaaaaaaaaaaaaaaaaaaaaaaaaaaa

SEQ ID NO: 42023 - RNA, 1607 nt, Artificial Sequence
  mRNA product Design a-1 (A100) comprising derived and/or modified sequence from LASV(803213;Clade II)__AAF86703__GPCmut13 (opt1)
aggagagucccgcagucggcguccagcggcucugcuuguucgugugugugucguugcaggccuuauucaagcuuaccaugggccagaucaucaccuucuuccaggaggugccccacgucaucgaggaggugaugaacaucgugcugaucgcccucagccugcuggccauccucaaggggaucuacaacgucgcgaccugcggccuguucgggcugaucuccuuccuccugcugugcggccgcagcugcuccgugacguacaaggggguguacgagcuccagacccuggagcugaacauggccaaccucaacaugaccaugccgcugagcugcaccaagaacaacucccaccacuacaucauggucggcaacgagacgggccuggagcucacccugaccaacaccagcaucaucaaccacaaguucugcaaccuguccgacgcccacaagaagaaccucuacgaccacgcccugaugagcaucaucuccacguuccaccugagcauccccaacuucaaccaguacgaggccauguccugcgacuucaacgggggcaagaucagcgugcaguacaaccucucccacagcuucgcgguggacgccgccaaccacugcgggaccaucgccaacggcguccugcagaccuucaugcggauggcguggggcggguccuacaucgcccuggacagcggcaaggggaacugggacugcaucaugaccuccuaccaguaccucaucauccagaacacgaccugggaggaccacugccaguucagccgccccucccccaucggcuaccuggggcugcucagccagcggacccgcgacaucuacaucagccggcgccugcugggcaccuucacguggacccucuccgacagcgagggcaacgaggcccccgggggcuacugccugacccgguggaugcugaucgaggccgagcucaagugcuucgggaacaccgccguggcgaagugcaacgagaagcacgacgaggaguucugcgacaugcugcgccuguucgacuucaacaagcaggccaucaagcggcucaagacggaggcccagauguccauccagcugaucaacaaggccgugaacgcccugaucaacgaccagcucaucaugaagaaccaccuccgcgacaucaugggcauccccuacugcaacuacagccgguacugguaccugaaccacaccgucaccgggaagaccucccugccccgcugcuggcuggugagcaacggcuccuaccugaacgagacgcacuucagcgacgacaucgagcagcaggcggacaacaugaucaccgagaugcuccagaaggaguacauggaccggcagggcaagaccccgcuggggcugguggaccucuucgucuucuccaccagcuucuaccugaucuccaucuuccugcaccuggugaagaucccgugaggacuagucccuguucccagagcccacuuuuuuuucuuuuuuugaaauaaaauagccugucuuucagaucuaaaaaaaaaaaaaaaaaaaaaaaaaaaaaaaaaaaaaaaaaaaaaaaaaaaaaaaaaaaaaaaaaaaaaaaaaaaaaaaaaaaaaaaaaaaaaaaaaaaa

SEQ ID NO: 42024 - RNA, 1607 nt, Artificial Sequence
  mRNA product Design a-1 (A100) comprising derived and/or modified sequence from LASV(GA391;Clade III)__CAA36645__GPCmut13 (opt1)
aggagagucccgcagucggcguccagcggcucugcuuguucgugugugugucguugcaggccuuauucaagcuuaccaugggccagaucgugaccuucuuccaggaggucccccacgugaucgaggaggugaugaacaucguccugaucgcccucagcauccuggccauccugaaggggcucuacaacguggcgaccugcggccugaucgggcuggugacguuccuccugcuguccggccgcagcugcucccucaucuacaaggggaccuacgagcugcagacccuggagcucaacauggagacccugaacaugacgaugccgcugagcugcaccaagaacaacucccaccacuacauccgggucggcaacgagaccggccucgagcugacccugacgaacaccagcauccucaaccacaaguucugcaaccuguccgacgcccacaagcgcaaccuguacgaccacagccucauguccaucaucagcaccuuccaccuguccauccccaacuucaaccaguacgaggccaugagcugcgacuucaacgggggcaagaucaccgugcaguacaaccugucccacagcuucgccguggacgccgcggggcacugcggcacgcucgccaacgggguccugcagaccuucaugcggauggccuggggcggcuccuacaucgcccuggacagcgggcgcggcaacugggacugcaucaugaccuccuaccaguaccucaucauccagaacaccacgugggacgaccacugccaguucagccggcccucccccaucggguaccugggccugcucagccagcgcacccgggacaucuacaucagccgccggcugcugggcaccuucaccuggacgcucuccgacagcgaggggaacgagaccccgggcggguacugccugacccgcuggaugcugaucgaggcggagcucaagugcuucggcaacaccgccguggccaagugcaacgagaagcacgacgaggaguucugcgacaugcugcggcuguucgacuucaacaagcaggccauccgccggcucaagacggaggcccagauguccauccagcugaucaacaaggcggugaacgcccugaucaacgaccagcucaucaugaagaaccaccuccgcgacaucauggggauccccuacugcaacuacagccgguacugguaccugaaccacaccuccaccggcaagaccagccugccccgcugcuggcugaucuccaacggcagcuaccugaacgagacgaaguucuccgacgacaucgagcagcaggccgacaacaugaucaccgagaugcuccagaaggaguacaucgaccggcaggggaagacgccccugggccuggucgaccuguucguguucagcaccuccuucuaccucaucagcaucuuccugcaccuggugaagaucccgugaggacuagucccuguucccagagcccacuuuuuuuucuuuuuuugaaauaaaauagccugucuuucagaucuaaaaaaaaaaaaaaaaaaaaaaaaaaaaaaaaaaaaaaaaaaaaaaaaaaaaaaaaaaaaaaaaaaaaaaaaaaaaaaaaaaaaaaaaaaaaaaaaaaaa

SEQ ID NO: 42025 - RNA, 1610 nt, Artificial Sequence
  mRNA product Design a-1 (A100) comprising derived and/or modified sequence from LASV(AV;Clade V)__CCA30314__GPCmut13 (opt1)
aggagagucccgcagucggcguccagcggcucugcuuguucgugugugugucguugcaggccuuauucaagcuuaccaugggccagaucgugaccuucuuccaggaggucccccacgugaucgaggaggugaugaacaucguccugaucgcccucagcauccuggccgugcugaaggggcucuacaacaucgcgaccugcggccugaucgggcugaucacguuccuccugcugugcggccgcuccugcagcuccaaccucuacaaggggguguacgagcugcagagccuggaccucaacauggagacccugaacaugaccaugccgcuguccugcaccaagaacaacagccaccacuacauccgggucggcaacgacacgggccucgagcugacccugaccaacaccuccauccucaaccacaaguucugcaaccugagcgacgcccacaagaaggaccuguacgaccacgcccucauguccaucaucagcacguuccaccuguccauccccaacuucaaccaguacgaggccaugagcugcgacuucaacgggggcaagaucuccgugcaguacaaccugagccacuccuacgccaucgacgcggccaaccacugcgggaccguggccaacggcauccuccagaccuucaugcgcauggccuggggcgggagcuacaucgcgcuggacuccggccgggggaacugggacugcaucaugaccagcuaccaguaccugaucauccagaacacgaccugggagaaccacugccaguucucccgccccagccccaucggcuaccucgggcugcugagccagcggacccgcgacaucuacaucucccggcgccuccugggcaccuucacguggacccugagcgacuccgagggcaacgccacccccgggggcuacugccucacccgguggaugcugaucgaggccgagcugaagugcuucgggaacacggccgucgccaagugcaacgagaagcacgacgaggaguucugcgacaugcuccgccuguucgacuucaacaagcaggcgaucagccggcugaaguccgaggcccagaugagcauccagcucaucaacaaggccgugaacgcccugaucaacgaccagcugaucaugaagaaccaccuccgcgacaucaugggcauccccuacugcaacuacuccaaguacugguaccugaaccacaccaucaccgggaagaccagccugcccaagugcuggcucguguccaacggcagcuaccugaacgagacgcacuucuccgacgacaucgagcagcaggccgacaacaugaucaccgagaugcugcagaaggaguacauggagcggcagggcaagaccccgcucgggcuggucgaccuguucguguucagcaccuccuucuaccugaucagcaucuuccuccgccuggugaagaucccgugaggacuagucccuguucccagagcccacuuuuuuuucuuuuuuugaaauaaaauagccugucuuucagaucuaaaaaaaaaaaaaaaaaaaaaaaaaaaaaaaaaaaaaaaaaaaaaaaaaaaaaaaaaaaaaaaaaaaaaaaaaaaaaaaaaaaaaaaaaaaaaaaaaaaa

SEQ ID NO: 42026 - RNA, 1607 nt, Artificial Sequence
  mRNA product Design a-1 (A100) comprising derived and/or modified sequence from LASV(Togo/2016/7082;Clade VI)__AMR44577__GPCmut13 (opt1)
aggagagucccgcagucggcguccagcggcucugcuuguucgugugugugucguugcaggccuuauucaagcuuaccaugggccagaucaucaccuucuuccaggaggugccccacgucaucgaggaggugaugaacaucgugcugaucgcccucagccugcuggccauccucaagggggucuacaacguggcgaccugcggcaucaucgggcuggugacguuccuguuccucugcggccgcuccugcagccugaucuacaagggguccuacgagcugcagacccucgagcugaacauggagacccugaacaugaccaugccgcucagcugcacgaagaacuccagccaccacuacauccgggucggcaacgagaccggccuggagcugacccucaccaacacguccaucaucaaccacaaguucugcaaccugagcgacgcccacaagcgcaaccuguacgaccacgcccucauguccauccugagcaccuuccaccuguccauccccaacuucaaccaguacgaggccaugagcugcgacuucaacgggggcaagaucuccgugcaguacaaccucagccacgccuacgcgguggacgccgccgagcacugcgggaccgucgccaacggcgugcugcagaccuucaugcggauggcguggggcggguccuacaucgcccuggacagcggccgcgggaacugggacugcaucaugacguccuaccaguaccucaucauccagaacaccaccugggaggaccacugccaguucagccggcccucccccaucggcuaccuggggcugcucagccagcgcacccgggacaucuacaucagccgccggcugcugggcacguucaccuggacccucuccgacagcgagggcaacgagacccccgggggcuacugccugacgcgcuggaugcugaucgaggccgagcucaagugcuucgggaacaccgccguggccaagugcaacgagaagcacgacgaggaguucugcgacaugcugcggcuguucgacuucaacaagcaggcgauccagcgccucaaguccgaggcccagaugagcauccagcugaucaacaaggccgucaacgcccugaucaacgaccagcucaucaugaagaaccaccuccgggacaugaugggcauccccuacugcaacuacuccaaguacugguaccugaaccacaccagcuccgggcgcaccagccugcccaagugcuggcugguguccaacggcagcuaccugaacgagacgcacuucuccgacgacaucgagcagcaggccgacaacaugaucaccgagaugcuccagaaggaguacaucgaccggcagggcaagaccccgcuggggcugguggaccucuucgucuucagcaccuccuucuaccugaucagcaucuuccugcaccugaucaagaucccgugaggacuagucccuguucccagagcccacuuuuuuuucuuuuuuugaaauaaaauagccugucuuucagaucuaaaaaaaaaaaaaaaaaaaaaaaaaaaaaaaaaaaaaaaaaaaaaaaaaaaaaaaaaaaaaaaaaaaaaaaaaaaaaaaaaaaaaaaaaaaaaaaaaaaa

SEQ ID NO: 42027 - RNA, 1607 nt, Artificial Sequence
  mRNA product Design a-1 (A100) comprising derived and/or modified sequence from LASV(KAK-428;Clade n.d. (VII))__ANH09740__GPCmut13 (opt1)
aggagagucccgcagucggcguccagcggcucugcuuguucgugugugugucguugcaggccuuauucaagcuuaccaugggccagaucgugaccuucuuccaggaggucccccacgugaucgaggaggugaugaacaucguccugaucgcccucagccugcuggccauccucaaggggcuguacaacuucgcgaccugcggcgugaucgggcugaucacguuccuccugcugugcggccgcuccugcagcgccaccuacaaggggcaguacgagcuccagacccuggagcugaacauggagucccucaacaugaccaugccgcugagcugcacgaagaacaacucccaccacuacauccgggccggcaacaacaccggccuggagcucacccugaccaacacgagcaucaucucccacaaguucugcaaccugagcgacgcccacaagaagaaccucuacgaccacacccugauguccaucaucaccaccuuccaccugagcauccccaacuucaaccaguacgaggccauguccugcgacuucaacgggggcaagaucagcauccaguacaaccucucccacagcuacgcgggggacgccgcccagcacugcggcacgguggccaacgggguccugcagaccuucaugcgcauggcguggggcggcuccuaccuggcccucgacagcgggcggcgcggcugggacugcaucaucuccagcuaccaguaccugaucauccagaacaccaccugggacgaccacugccaguucucccggcccagccccaucggguaccugggcuucgugagccagaagacgcgcgacaucuacaucucccggcgccuccugggcaccuucaccuggacccugagcgacuccgaggggcacgacaugccgggcggguacugccucacgcgguggaugcugaucgaggccgaccugaagugcuucggcaacaccgccguggccaagugcaacgagaagcacgacgaggaguucugcgacauguggcgccucuucgacuucaacaagcaggcgauccagcggcugaaggccgaggcccagaugaacauccagcugaucaacaaggccgucaacgcccucaucaacgaccagcugaugaugaagaaccaccuccgcgacaucauggggauccccuacugcaacuacagcaaguucugguaccugaacaacaccaccacgggccggaccucccugccccgcugcuggcugaucagcaacggcuccuaccucaacgagacccacuucagcgacgacaucgagcagcaggcggacaacaugaucaccgagaugcugcagaaggaguacauggaccggcaggggaagacgccccugggccucguggaccuguucguguucuccaccagcuucuaccugaucaccaucuuccuccaccuggucaagaucccgugaggacuagucccuguucccagagcccacuuuuuuuucuuuuuuugaaauaaaauagccugucuuucagaucuaaaaaaaaaaaaaaaaaaaaaaaaaaaaaaaaaaaaaaaaaaaaaaaaaaaaaaaaaaaaaaaaaaaaaaaaaaaaaaaaaaaaaaaaaaaaaaaaaaaa

SEQ ID NO: 42028 - RNA, 1607 nt, Artificial Sequence; identical to SEQ ID NO: 42022
  mRNA product Design a-1 (A100) comprising derived and/or modified sequence from LASV(Pinneo-NIG-1969;Clade I)__AIT17836__GPCmut13 (opt1)

SEQ ID NO: 42029 - RNA, 1607 nt, Artificial Sequence
  mRNA product Design a-1 (A100) comprising derived and/or modified sequence from LASV(ISTH0009-NIG-2011;Clade II)__AIT17404__GPCmut13 (opt1)
aggagagucccgcagucggcguccagcggcucugcuuguucgugugugugucguugcaggccuuauucaagcuuaccaugggccagaucaucaccuucuuccaggaggugccccacgucaucgaggaggugaugaacaucgugcugaucgcccucagccugcuggccauccucaaggggaucuacaacgucgcgaccugcggccuguucgggcugguguccuuccuccugcugugcggccgcagcugcuccacgaccuacaaggggguguacgagcuccagacccuggagcuggacauggccagccucaacaugaccaugccgcuguccugcacgaagaacaacagccaccacuacaucauggucggcaacgagaccggccuggagcucacccugaccaacacguccaucaucaaccacaaguucugcaaccugagcgacgcccacaagaagaaccucuacgaccacgcccugauguccaucaucagcaccuuccaccuguccauccccaacuucaaccaguacgaggccaugagcugcgacuucaacgggggcaagaucuccgugcaguacaaccucagccacgcguacgccguggacgccgccaaccacugcgggaccaucgcgaacggcguccugcagaccuucaugcggauggccuggggcggguccuacaucgcccuggacagcggcaagggguccugggacugcaucaugacgagcuaccaguaccucaucauccagaacaccaccugggaggaccacugccaguucucccgccccagccccaucggcuaccuggggcugcucagccagcggacccgcgacaucuacaucucccggcgccugcugggcacguucaccuggacccucagcgacuccgagggcaacgagacccccgggggcuacugccugacgcgguggaugcugaucgaggccgagcucaagugcuucgggaacaccgccguggcgaagugcaacgagaagcacgacgaggaguucugcgacaugcugcgccuguucgacuucaacaagcaggccauccggcgccucaagaccgaggcccagaugagcauccagcugaucaacaaggccgugaacgcccugaucaacgaccagcucaucaugaagaaccaccuccgggacaucaugggcaucccguacugcaacuacuccaaguacugguaccugaaccacaccgucacggggaagaccagccugccccgcugcuggcugguguccaacggcagcuaccugaacgagacccacuucuccgacgacaucgagcagcaggcggacaacaugaucaccgagcuccugcagaaggaguacauggaccggcagggcaagacgccccuggggcucguggaccuguucgucuucagcaccuccuucuaccugaucagcaucuuccugcaccucaucaagaucccgugaggacuagucccuguucccagagcccacuuuuuuuucuuuuuuugaaauaaaauagccugucuuucagaucuaaaaaaaaaaaaaaaaaaaaaaaaaaaaaaaaaaaaaaaaaaaaaaaaaaaaaaaaaaaaaaaaaaaaaaaaaaaaaaaaaaaaaaaaaaaaaaaaaaaa

SEQ ID NO: 42030 - RNA, 1607 nt, Artificial Sequence
  mRNA product Design a-1 (A100) comprising derived and/or modified sequence from LASV(ISTH2010-NIG-2012;Clade II)__AIT17482__GPCmut13 (opt1)
aggagagucccgcagucggcguccagcggcucugcuuguucgugugugugucguugcaggccuuauucaagcuuaccaugggccagaucaucaccuucuuccaggaggugccccacgucaucgaggaggugaugaacaucgugcugaucgcccucagccugcuggccauccucaaggggaucuacaacgucgcgaccugcggccuguucgggcugguguccuuccuccugcugugcggccgcagcugcuccacgaccuacaaggggguguacgagcuccagacccuggagcuggacauggccagccucaacaugaccaugccgcuguccugcacgaagaacaacagccaccacuacaucauggucggcaacgagaccggccuggagcucacccugaccaacacguccaucaucaaccacaaguucugcaaccugagcgacgcccacaagaagaaccucuacgaccacgcccugauguccaucaucagcaccuuccaccuguccauccccaacuucaaccaguacgaggccaugagcugcgacuucaacgggggcaagaucuccgugcaguacaaccucagccacgcguacgccguggacgccgccaaccacugcgggaccaucgcgaacggcguccugcagaccuucaugcggauggccuggggcggguccuacaucgcccuggacagcggcaagggguccugggacugcaucaugacgagcuaccaguaccucaucauccagaacaucaccugggaggaccacugccaguucucccgccccagccccaucggcuaccuggggcugcucagccagcggacccgcgacaucuacaucucccggcgccugcugggcaccuucacguggacccucagcgacuccgagggcaacgagacccccgggggcuacugccugacccgguggaugcugaucgaggccgagcucaagugcuucgggaacacggccguggcgaagugcaacgagaagcacgacgaggaguucugcgacaugcugcgccuguucgacuucaacaagcaggccauccggcgccucaagaccgaggcccagaugagcauccagcugaucaacaaggccgugaacgcccugaucaacgaccagcucaucaugaagaaccaccuccgggacaucaugggcauccccuacugcaacuacuccaaguacugguaccugaaccacaccgucaccgggaagacgagccugccccgcugcuggcugguguccaacggcagcuaccugaacgagacccacuucuccgacgacaucgagcagcaggcggacaacaugaucaccgagcuccugcagaaggaguacaucgaccggcagggcaagaccccgcuggggcucguggaccuguucgucuucagcacguccuucuaccugaucagcaucuuccugcaccucgugaagaucccgugaggacuagucccuguucccagagcccacuuuuuuuucuuuuuuugaaauaaaauagccugucuuucagaucuaaaaaaaaaaaaaaaaaaaaaaaaaaaaaaaaaaaaaaaaaaaaaaaaaaaaaaaaaaaaaaaaaaaaaaaaaaaaaaaaaaaaaaaaaaaaaaaaaaaa

SEQ ID NO: 42031 - RNA, 1607 nt, Artificial Sequence
  mRNA product Design a-1 (A100) comprising derived and/or modified sequence from LASV(Lassa virus/H.sapiens-wt/NGA/2015/ISTH_0543;Clade II)__AVO03639__GPCmut13 (opt1)
aggagagucccgcagucggcguccagcggcucugcuuguucgugugugugucguugcaggccuuauucaagcuuaccaugggccagaucaucaccuucuuccaggaggugccccacgucaucgaggaggugaugaacaucgugcugaucgcccucagccugcuggccauccucaaggggaucuacaacgucgcgaccugcggccuguucgggcugguguccuuccuccugcugugcggccgcagcugcuccacgaccuacaaggggguguacgagcuccagacccuggagcuggacauggccaaccucaacaugaccaugccgcugagcugcacgaagaacaacucccaccacuacaucauggucggcaacgagaccggccuggagcucacccugaccaacacgagcaucaucaaccacaaguucugcaaccuguccgacgcccacaagaagaaccucuacgaccacgcccugaugagcaucaucuccaccuuccaccugagcauccccaacuucaaccaguacgaggccauguccugcgacuucaacgggggcaagaucagcgugcaguacaaccucucccacaccuacgcgguggacgccgccaaccacugcgggaccaucgccaacggcguccugcagacguucaugcggauggcguggggcgggagcuacaucgcccuggacuccggcaaggggagcugggacugcaucaugaccuccuaccaguaccucgugauccagaacaccaccugggaggaccacugccaguucagccgccccucccccaucggcuaccuggggcugcucagccagcggacgcgcgacaucuacaucagccggcgccugcugggcaccuucaccuggacccucuccgacagcgagggcaacgagacgcccgggggcuacugccugacccgguggaugcugaucgaggccgagcucaagugcuucgggaacaccgccguggccaagugcaacgagaagcacgacgaggaguucugcgacaugcugcgccuguucgacuucaacaagcaggcgauccggcgccucaagaccgaggcccagauguccauccagcugaucaacaaggccgucaacgcccugaucaacgaccagcucaucaugaagaaccaccuccgggacaucaugggcauccccuacugcaacuacagcaaguacugguaccugaaccacacggugaccgggaagaccucccugccccgcugcuggcuggugagcaacggcuccuaccugaacgagacccacuucagcgacgacaucgagcagcaggccgacaacaugaucacggagcuccugcagaaggaguacaucgaccggcagggcaagaccccgcuggggcucgucgaccuguucguguucuccaccagcuucuaccugaucuccaucuuccugcaccucgugaagaucccgugaggacuagucccuguucccagagcccacuuuuuuuucuuuuuuugaaauaaaauagccugucuuucagaucuaaaaaaaaaaaaaaaaaaaaaaaaaaaaaaaaaaaaaaaaaaaaaaaaaaaaaaaaaaaaaaaaaaaaaaaaaaaaaaaaaaaaaaaaaaaaaaaaaaaa

SEQ ID NO: 42032 - RNA, 1607 nt, Artificial Sequence
  mRNA product Design a-1 (A100) comprising derived and/or modified sequence from LASV(Lassa virus/H.sapiens-wt/NGA/2016/ISTH_0009;Clade II)__AVO03571__GPCmut13 (opt1)
aggagagucccgcagucggcguccagcggcucugcuuguucgugugugugucguugcaggccuuauucaagcuuaccaugggccagaucaucaccuucuuccaggaggugccccacgucaucgaggaggugaugaacaucgugcugaucgcccucagccugcuggccauccucaaggggaucuacaacgucgcgaccugcggccugcuggggcucguguccuuccugcugcucugcggccgcagcugcuccacgaccuacaaggggguguacgagcugcagacccuggagcucgacauggccagccugaacaugaccaugccgcuguccugcacgaagaacaacagccaccacuacaucauggucggcaacgagaccggccucgagcugacccugaccaacacguccaucaucaaccacaaguucugcaaccucagcgacgcccacaagaagaaccuguacgaccacgcccugauguccaucaucagcaccuuccaccucuccauccccaacuucaaccaguacgaggccaugagcugcgacuucaacgggggccggaucuccgugcaguacaaccugagccacuccuacgcgguggacgccgccaaccacugcgggaccaucgccaacggcguccugcagaccuucaugcgcauggcguggggcgggagcuacaucgcccucgacuccggcaaggggagcugggacugcaucaugacguccuaccaguaccugaucauccagaacaccaccugggaggaccacugccaguucagccggcccagccccaucggcuaccuggggcuccugucccagcgcacccgggacaucuacaucagccgccggcugcucggcacguucaccuggacccuguccgacagcgagggcaacgagacccccgggggcuacugccugacgcgcuggaugcucaucgaggccgagcugaagugcuucgggaacaccgccguggccaagugcaacgagaagcacgacgaggaguucugcgacaugcugcggcuguucgacuucaacaagcaggcgauccgccggcugaagaccgaggcccagauguccauccagcugaucaacaaggccgugaacgcccucaucaacgaccagcugaucaugaagaaccaccuccgcgacaucaugggcaucccguacugcaacuacagcaaguacugguaccucaaccacaccgucacggggaagaccucccugccccggugcuggcuggugagcaacggcuccuaccucaacgagacccacuucagcgacgacaucgagcagcaggccgacaacaugaucaccgagcugcugcagaaggaguacaucgaccgccagggcaagacgccccucgggcugguggaccuguucgucuucuccaccagcuucuaccugaucuccaucuuccuccaccuggugaagaucccgugaggacuagucccuguucccagagcccacuuuuuuuucuuuuuuugaaauaaaauagccugucuuucagaucuaaaaaaaaaaaaaaaaaaaaaaaaaaaaaaaaaaaaaaaaaaaaaaaaaaaaaaaaaaaaaaaaaaaaaaaaaaaaaaaaaaaaaaaaaaaaaaaaaaaa

SEQ ID NO: 42033 - RNA, 1607 nt, Artificial Sequence
  mRNA product Design a-1 (A100) comprising derived and/or modified sequence from LASV(Lassa virus/H.sapiens-wt/NGA/2016/ISTH_0017;Clade II)__AVO03567__GPCmut13 (opt1)
aggagagucccgcagucggcguccagcggcucugcuuguucgugugugugucguugcaggccuuauucaagcuuaccaugggccagaucaucaccuucuuccaggaggugccccacgucaucgaggaggugaugaacaucgugcugaucgcccucagccugcuggccauccucaaggggaucuacaacgucgcgaccugcggccuguucgggcugguguccuuccuccugcugugcggccgcagcugcuccacgaccuacaaggggguguacgagcuccagacccuggagcuggacauggccagccucaacaugaccaugccgcuguccugcacgaagaacaacagccaccacuacaucauggucggcaacgagaccggccuggagcucacccugaccaacacguccaucaucaaccacaaguucugcaaccugagcgacgcccacaagaagaaccucuacgaccacgcccugauguccaucaucagcaccuuccaccuguccauccccaacuucaaccaguacgaggccaugagcugcgacuucaacgggggcaagaucuccgugcaguacaaccucagccacaccuacgcgaucgacgccgccaaccacugcgggaccaucgccaacggcgugcugcagacguucaugcggauggcguggggcggguccuacaucgcccuggacagcggcaagggguccugggacugcaucaugaccagcuaccaguaccucaucauccagaacaccaccugggaggaccacugccaguucucccgccccagccccaucggcuaccuggggcugcucagccagcggacgcgcgacaucuacaucucccggcgccugcugggcaccuucaccuggacccucagcgacuccgagggcaacgagacgcccgggggcuacugccugacccgguggaugcugaucgaggccgagcucaagugcuucgggaacaccgccgucgccaagugcaacgagaagcacgacgaggaguucugcgacaugcugcgccuguucgacuucaacaagcaggcgauccggcgccucaagaccgaggcccagaugagcauccagcugaucaacaaggccgugaacgcccugaucaacgaccagcucaucaugaagaaccaccuccgggacaucaugggcauccccuacugcaacuacuccaaguacugguaccugaaccacacggugaccgggaagaccagccugccccgcugcuggcuggucuccaacggcagcuaccugaacgagacccacuucuccgacgacaucgagcagcaggccgacaacaugaucacggagcuccugcagaaggaguacauggaccggcagggcaagaccccgcuggggcucguggaccuguucguguucagcaccuccuucuaccugaucagcaucuuccugcaccucguccgcaucccgugaggacuagucccuguucccagagcccacuuuuuuuucuuuuuuugaaauaaaauagccugucuuucagaucuaaaaaaaaaaaaaaaaaaaaaaaaaaaaaaaaaaaaaaaaaaaaaaaaaaaaaaaaaaaaaaaaaaaaaaaaaaaaaaaaaaaaaaaaaaaaaaaaaaaa

SEQ ID NO: 42034 - RNA, 1607 nt, Artificial Sequence
  mRNA product Design a-1 (A100) comprising derived and/or modified sequence from LASV(Lassa virus/H.sapiens-wt/NGA/2018/ISTH_0959;Clade II)__AVV65099__GPCmut13 (opt1)
aggagagucccgcagucggcguccagcggcucugcuuguucgugugugugucguugcaggccuuauucaagcuuaccaugggccagaucaucaccuucuuccaggaggugccccacgucaucgaggaggugaugaacaucgugcugaucgcccucagccugcuggccauccucaaggggaucuacaacgucgugaccugcggccuguucgggcugguguccuuccuccugcugugcggccgcagcugcuccacgaccuacaagggggucuacgagcuccagacccuggagcuggacauggcgagccucaacaugaccaugccgcuguccugcacgaagaacaacagccaccacuacaucauggugggcaacgagaccggccuggagcucacccugaccaacacguccaucaucaaccacaaguucugcaaccugagcgacgcccacaagaagaaccucuacgaccacgcccugauguccaucaucagcaccuuccaccuguccauccccaacuucaaccaguacgaggccaugagcugcgacuucaacgggggcaagaucuccgugcaguacaaccucagccacgccuacgcgaucgacgccgccaaccacugcgggaccaucgccaacggcguccugcagaccuucaugcggauggcguggggcggguccuacaucgcccuggacagcggcaagggguccugggacugcaucaugacgagcuaccaguaccucaucauccagaacaccaccugggaggaccacugccaguucucccgccccagccccaucggcuaccuggggcugcucagccagcggacccgcgacaucuacaucucccggcgccugcugggcacguucaccuggacccucagcgacuccgagggcaacgagacccccgggggcuacugccugacgcgguggaugcugaucgaggccgagcucaagugcuucgggaacaccgccguggccaagugcaacgagaagcacgacgaggaguucugcgacaugcugcgccuguucgacuucaacaagcaggcgauccggcgccucaagaccgaggcccagaugagcauccagcugaucaacaaggccgugaacgcccugaucaacgaccagcucaucaugaagaaccaccuccgggacaucaugggcaucccguacugcaacuacuccaaguacugguaccugaaccacaccgucacggggaagaccagccugccccgcugcuggcugguguccaacggcagcuaccugaacgagacccacuucuccgacgacaucgagcagcaggccgacaacaugaucaccgagcuccugcagaaggaguacaucgaccggcagggcaagacgccccuggggcucguggaccuguucgucuucagcaccuccuucuaccugaucagcaucuuccugcaccucgugaagaucccgugaggacuagucccuguucccagagcccacuuuuuuuucuuuuuuugaaauaaaauagccugucuuucagaucuaaaaaaaaaaaaaaaaaaaaaaaaaaaaaaaaaaaaaaaaaaaaaaaaaaaaaaaaaaaaaaaaaaaaaaaaaaaaaaaaaaaaaaaaaaaaaaaaaaaa

SEQ ID NO: 42035 - RNA, 1607 nt, Artificial Sequence
  mRNA product Design a-1 (A100) comprising derived and/or modified sequence from LASV(LASV003-NIG-2008;Clade II)__AIT17580__GPCmut13 (opt1)
aggagagucccgcagucggcguccagcggcucugcuuguucgugugugugucguugcaggccuuauucaagcuuaccaugggccagaucaucaccuucuuccaggaggugccccacgucaucgaggaggugaugaacaucgugcugaucgcccucagccugcuggccauccucaaggggaucuacaacgucgcgaccugcggccuguucgggcugguguccuuccuccugcugugcggccgcagcugcuccacgaccuacaaggggguguacgagcuccagacccuggagcuggacauggccagccucaacaugaccaugccgcuguccugcacgaagaacaacagccaccacuacaucauggucggcaacgagaccggccuggagcucacccugaccaacacguccaucaucaaccacaaguucugcaaccugagcgacgcccacaagaagaaccucuacgaccacgcccugauguccaucaucagcaccuuccaccuguccauccccaacuucaaccaguacgaggccaugagcugcgacuucaacgggggcaagaucuccgugcaguacaaccucagccacaccuacgcgguggacgccgccaaccacugcgggaccaucgccaacggcguccugcagacguucaugcggauggcguggggcggguccuacaucgcccuggacagcggcaagggguccugggacugcaucaugaccagcuaccaguaccucaucauccagaacaccaccugggaggaccacugccaguucucccgccccagccccaucggcuaccuggggcugcucagccagcggacgcgcgacaucuacaucucccggcgccugcugggcaccuucaccuggacccucagcgacuccgagagcaacgagacgccgggcggguacugccugacccgguggaugcugaucgaggccgagcucaagugcuucggcaacaccgccguggccaagugcaacgagaagcacgacgaggaguucugcgacaugcugcgccuguucgacuucaacaagcaggcgauccggcgccucaaggccgaggcccagauguccauccagcugaucaacaaggccgugaacgcccugaucaacgaccagcucaucaugaagaaccaccuccgggacaucauggggauccccuacugcaacuacagcaaguacugguaccugaaccacaccgucacgggccgcaccucccugccccggugcuggcuggugagcaacggguccuaccugaacgagacccacuucagcgacgacaucgagcagcaggcggacaacaugaucaccgagcuccugcagaaggaguacauggaccgccagggcaagacgccccugggccucguggaccuguucgucuucuccaccagcuucuaccugaucuccaucuuccugcaccucgugaagaucccgugaggacuagucccuguucccagagcccacuuuuuuuucuuuuuuugaaauaaaauagccugucuuucagaucuaaaaaaaaaaaaaaaaaaaaaaaaaaaaaaaaaaaaaaaaaaaaaaaaaaaaaaaaaaaaaaaaaaaaaaaaaaaaaaaaaaaaaaaaaaaaaaaaaaaa

SEQ ID NO: 42036 - RNA, 1607 nt, Artificial Sequence
  mRNA product Design a-1 (A100) comprising derived and/or modified sequence from LASV(LASV035-NIG-2009;Clade II)__AIT17588__GPCmut13 (opt1)
aggagagucccgcagucggcguccagcggcucugcuuguucgugugugugucguugcaggccuuauucaagcuuaccaugggccagaucaucaccuucuuccaggaggugccccacgucaucgaggaggugaugaacaucgugcugaucgcccucagccugcuggccauccucaaggggaucuacaacgucgcgaccugcggccuguucgggcugguguccuuccuccugcugugcggccgcagcugcuccacgaccuacaaggggguguacgagcuccagacccuggagcuggacauggccagccucaacaugaccaugccgcuguccugcacgaagaacaacagccaccacuacaucauggucggcaacgagaccggccuggagcucacccugaccaacacguccaucaucaaccacaaguucugcaaccugagcgacgcccacaagaagaaccucuacgaccacgcccugauguccaucaucagcaccuuccaccuguccauccccaacuucaaccaguacgaggccaugagcugcgacuucaacgggggcaagaucuccgugcaguacaaccucagccacgcguacgccguggacgccgccaaccacugcgggaccaucgcgaacggcguccugcagaccuucaugcggauggccuggggcggguccuacaucgcccuggacagcggcaagggguccugggacugcaucaugacgagcuaccaguaccucaucauccagaacaccaccugggaggaccacugccaguucucccgccccagccccaucggcuaccuggggcugcucagccagcggacccgcgacaucuacaucucccggcgccugcugggcacguucaccuggacccucagcgacuccgagggcaacgagacccccgggggcuacugccugacgcgguggaugcugaucgaggccgagcucaagugcuucgggaacaccgccguggcgaagugcaacgagaagcacgacgaggaguucugcgacaugcugcgccuguucgacuucaacaagcaggccauccggcgccucaaggccgaggcccagaugagcauccagcugaucaacaaggccgugaacgcgcugaucaacgaccagcucaucaugaagaaccaccuccgggacaucaugggcauccccuacugcaacuacuccaaguacugguaccugaaccacaccgucaccgggaagacgagccugccccgcugcuggcugguguccaacggcagcuaccugaacgagacccacuucuccgacgacaucgagcagcaggccgacaacaugaucaccgagcuccugcagaaggaguacaucgaccggcagggcaagaccccgcuggggcucguggaccuguucgucuucagcacguccuucuaccugaucagcaucuuccugcaccucgugaagaucccgugaggacuagucccuguucccagagcccacuuuuuuuucuuuuuuugaaauaaaauagccugucuuucagaucuaaaaaaaaaaaaaaaaaaaaaaaaaaaaaaaaaaaaaaaaaaaaaaaaaaaaaaaaaaaaaaaaaaaaaaaaaaaaaaaaaaaaaaaaaaaaaaaaaaaa

SEQ ID NO: 42037 - RNA, 1607 nt, Artificial Sequence
  mRNA product Design a-1 (A100) comprising derived and/or modified sequence from LASV(LASV1000-NIG-2009;Clade II)__AIT17782__GPCmut13 (opt1)
aggagagucccgcagucggcguccagcggcucugcuuguucgugugugugucguugcaggccuuauucaagcuuaccaugggccagaucaucaccuucuuccaggaggugccccacgucaucgaggaggugaugaacaucgugcugaucgcccucagccugcuggccauccucaaggggaucuacaacgucgcgaccugcggccuguucgggcugguguccuuccuccugcugugcggccgcagcugcuccacgaccuacaaggggguguacgagcuccagacccuggagcuggacauggccagccucaacaugaccaugccgcuguccugcacgaagaacaacagccaccacuacaucauggucggcaacgagaccggccuggagcucacccugaccaacacguccaucaucaaccacaaguucugcaaccugagcgacgcccacaagaagaaccucuacgaccacgcccugauguccaucaucagcaccuuccaccuguccauccccaacuucaaccaguacgaggccaugagcugcgacuucaacgggggcaagaucuccgugcaguacaaccucagccacaccuacgcgguggacgccgccaaccacugcgggaccaucgccaacggcguccugcagacguucaugcggauggcguggggcggguccuacaucgcccuggacagcggcaagggguccugggacugcaucaugaccagcuaccaguaccucaucauccagaacaccaccugggaggaccacugccaguucucccgccccagccccaucggcuaccuggggcugcucagccagcggacgcgcgacaucuacaucucccggcgccugcugggcaccuucaccuggacccucagcgacuccgagggcaacgagacgcccgggggcuacugccugacccgguggaugcugaucgaggccgagcucaagugcuucgggaacaccgccguggccaagugcaacgagaagcacgacgaggaguucugcgacaugcugcgccuguucgacuucaacaagcaggcgaucaagcggcucaagaccgaggcccagaugagcauccagcugaucaacaaggccgugaacgcccugaucaacgaccagcucaucaugaagaaccaccuccgcgacaucaugggcauccccuacugcaacuacuccaaguacugguaccugaaccacacggucaccgggaagaccagccugccccggugcuggcugguguccaacggcagcuaccugaacgagacccacuucuccgacgacaucgagcagcaggccgacaacaugaucacggagcuccugcagaaggaguacaucgaccgccagggcaagaccccgcuggggcucguggaccuguucgucuucagcaccuccuucuaccugaucagcaucuuccugcaccucgugaagaucccgugaggacuagucccuguucccagagcccacuuuuuuuucuuuuuuugaaauaaaauagccugucuuucagaucuaaaaaaaaaaaaaaaaaaaaaaaaaaaaaaaaaaaaaaaaaaaaaaaaaaaaaaaaaaaaaaaaaaaaaaaaaaaaaaaaaaaaaaaaaaaaaaaaaaaa

SEQ ID NO: 42038 - RNA, 1607 nt, Artificial Sequence
  mRNA product Design a-1 (A100) comprising derived and/or modified sequence from LASV(LASV221-NIG-2010;Clade II)__AIT17624__GPCmut13 (opt1)
aggagagucccgcagucggcguccagcggcucugcuuguucgugugugugucguugcaggccuuauucaagcuuaccaugggccagaucaucaccuucuuccaggaggugccccacgucaucgaggaggugaugaacaucgugcugaucgcccucagccugcuggccauccucaaggggaucuacaacgucgcgaccugcggccuguucgggcugguguccuuccuccugcugugcggccgcagcugcuccacgaccuacaaggggguguacgagcuccagacccuggagcuggacauggccagccucaacaugaccaugccgcuguccugcacgaagaacaacagccaccacuacaucauggucggcaacgagaccggccuggagcucacccugaccaacacguccaucaucaaccacaaguucugcaaccugagcgacgcccacaagaagaaccucuacgaccacgcccugauguccaucaucagcaccuuccaccuguccauccccaacuucaaccaguacgaggccaugagcugcgacuucaacgggggcaagaucuccgugcaguacaaccucagccacaccuacgcgaucgacgccgccaaccacugcgggaccaucgccaacggcgugcugcagacguucaugcggauggcguggggcggguccuacaucgcccuggacagcggcaagggguccugggacugcaucaugaccagcuaccaguaccucaucauccagaacaccaccugggaggaccacugccaguucucccgccccagccccaucggcuaccuggggcugcucagccagcggacgcgcgacaucuacaucucccggcgccugcugggcaccuucaccuggacccucagcgacuccgagggcaacgagacgcccgggggcuacugccugacccgguggaugcugaucgaggccgagcucaagugcuucgggaacaccgccgucgccaagugcaacgagaagcacgacgaggaguucugcgacaugcugcgccuguucgacuucaacaagcaggcgauccggcgccucaagaccgaggcccagaugagcauccagcugaucaacaaggccgugaacgcccugaucaacgaccagcucaucaugaagaaccaccuccgggacaucaugggcauccccuacugcaacuacuccaaguacugguaccugaaccacacggugaccgggaagaccagccugccccgcugcuggcuggucuccaacggcagcuaccugaacgagacccacuucuccgacgacaucgagcagcaggccgacaacaugaucacggagaugcuccagaaggaguacauggaccggcagggcaagaccccgcuggggcugguggaccucuucguguucagcaccuccuucuaccugaucagcaucuuccugcaccuggucaagaucccgugaggacuagucccuguucccagagcccacuuuuuuuucuuuuuuugaaauaaaauagccugucuuucagaucuaaaaaaaaaaaaaaaaaaaaaaaaaaaaaaaaaaaaaaaaaaaaaaaaaaaaaaaaaaaaaaaaaaaaaaaaaaaaaaaaaaaaaaaaaaaaaaaaaaaa

SEQ ID NO: 42039 - RNA, 1607 nt, Artificial Sequence
  mRNA product Design a-1 (A100) comprising derived and/or modified sequence from LASV(LASV237-NIG-2010;Clade II)__AIT17638__GPCmut13 (opt1)
aggagagucccgcagucggcguccagcggcucugcuuguucgugugugugucguugcaggccuuauucaagcuuaccaugggccagaucaucaccuucuuccaggaggugccccacgucaucgaggaggugaugaacaucgugcugaucgcccucagccugcuggccauccucaaggggaucuacaacgucgcgaccugcggccuguucgggcugguguccuuccuccugcugugcggccgcagcugcuccacgaccuacaaggggguguacgagcuccagacccuggagcuggacauggccagccucaacaugaccaugccgcuguccugcacgaagaacaacagccaccacuacaucauggucggcaacgagaccggccuggagcucacccugaccaacacguccaucaucaaccacaaguucugcaaccugagcgacgcccacaagaaggaccucuacgaccacgcccugauguccaucaucagcaccuuccaccuguccauccccaacuucaaccaguacgaggccaugagcugcgacuucaacgggggcaagaucuccgugcaguacaaccucagccacaccuacgcgguggacgccgccaaccacugcgggaccaucgccaacggcguccugcagacguucaugcggauggcguggggcggguccuacaucgcccuggacagcggcaagggguccugggacugcaucaugaccagcuaccaguaccucaucauccagaacaccaccugggaggaccacugccaguucucccgccccagccccaucggcuaccuggggcugcucagccagcggacgcgcgacaucuacaucucccggcgccugcugggcaccuucaccuggacccucagcgacuccgagggcaacgagacgcccgggggcuacugccugacccgguggaugcugaucgaggccgagcucaagugcuucgggaacaccgccguggccaagugcaacgagaagcacgacgaggaguucugcgacaugcugcgccuguucgacuucaacaagcaggcgauccggcgccucaagaccgaggcccagaugagcauccagcugaucaacaaggccgugaacgcccugaucaacgaccagcucaucaugaagaaccaccuccgggacaucaugggcauccccuacugcaacuacuccaaguacugguaccugaaccacacggucaccgggaagaccagccugccccgcugcuggcugguguccaacggcagcuaccugaacgagacccacuucuccgacgacaucgagcagcaggccgacaacaugaucacggagcuccugcagaaggaguacauggaccggcagggcaagaccccgcuggggcucguggaccuguucgucuucagcaccuccuucuaccugaucagcaucuuccugcaccucaucaagaucccgugaggacuagucccuguucccagagcccacuuuuuuuucuuuuuuugaaauaaaauagccugucuuucagaucuaaaaaaaaaaaaaaaaaaaaaaaaaaaaaaaaaaaaaaaaaaaaaaaaaaaaaaaaaaaaaaaaaaaaaaaaaaaaaaaaaaaaaaaaaaaaaaaaaaaa

SEQ ID NO: 42040 - RNA, 1607 nt, Artificial Sequence
  mRNA product Design a-1 (A100) comprising derived and/or modified sequence from LASV(LASV253-NIG-2011;Clade II)__AIT17670__GPCmut13 (opt1)
aggagagucccgcagucggcguccagcggcucugcuuguucgugugugugucguugcaggccuuauucaagcuuaccaugggccagaucaucaccuucuuccaggaggugccccacgucaucgaggaggugaugaacaucgugcugaucgcccucagccugcuggccauccucaaggggaucuacaacgucgcgaccugcggccuguucgggcugguguccuuccuccugcugugcggccgcagcugcuccacgaccuacaaggggguguacgagcuccagacccuggagcuggacauggccagccucaacaugaccaugccgcuguccugcacgaagaacaacagccaccacuacaucauggucggcaacgagaccggccuggagcucacccugaccaacacguccaucaucaaccacaaguucugcaaccugagcgacgcccacaagaagaaccucuacgaccacgcccugauguccaucaucagcaccuuccaccuguccauccccaacuucaaccaguacgaggccaugagcugcgacuucaacgggggcaagaucuccgugcaguacaaccucagccacaccuacgcgguggacgccgccaaccacugcgggaccaucgccaacggcguccugcagacguucaugcggauggcguggggcggguccuacaucgcccuggacagcggcaagggguccugggacugcaucaugaccagcuaccaguaccucaucauccagaacaccaccugggaggaccacugccaguucucccgccccagccccaucggcuaccuggggcugcucagccagcggacgcgcgacaucuacaucucccggcgccugcugggcaccuucaccuggacccucagcgacuccgagggcaacgagacgcccgggggcuacugccugacccgguggaugcugaucgaggccgagcucaagugcuucgggaacaccgccguggccaagugcaacgagaagcacgacgaggaguucugcgacaugcugcgccuguucgacuucaacaagcaggcgauccggcgccucaaggccgaggcccagaugagcauccagcugaucaacaaggccgugaacgcccugaucaacgaccagcucaucaugaagaaccaccuccgggacaucaugggcaucccguacugcaacuacuccaaguacugguaccugaaccacaccgucacggggcgcaccagccugccccggugcuggcugguguccaacggcagcuaccugaacgagacccacuucuccgacgacaucgagcagcaggcggacaacaugaucaccgagcuccugcagaaggaguacaucgaccgccagggcaagacgccccuggggcucguggaccuguucgucuucagcaccuccuucuaccugaucagcaucuuccugcaccucgugaagaucccgugaggacuagucccuguucccagagcccacuuuuuuuucuuuuuuugaaauaaaauagccugucuuucagaucuaaaaaaaaaaaaaaaaaaaaaaaaaaaaaaaaaaaaaaaaaaaaaaaaaaaaaaaaaaaaaaaaaaaaaaaaaaaaaaaaaaaaaaaaaaaaaaaaaaaa

SEQ ID NO: 42041 - RNA, 1607 nt, Artificial Sequence
  mRNA product Design a-1 (A100) comprising derived and/or modified sequence from LASV(LASV254-NIG-2011;Clade II)__AIT17674__GPCmut13 (opt1)
aggagagucccgcagucggcguccagcggcucugcuuguucgugugugugucguugcaggccuuauucaagcuuaccaugggccagaucaucaccuucuuccaggaggugccccacgucaucgaggaggugaugaacaucgugcugaucgcccucagccugcuggccauccucaaggggaucuacaacgucgcgaccugcggccuguucgggcugguguccuuccuccugcugugcggccgcagcugcuccacgaccuacaaggggguguacgagcuccagacccuggagcuggacaugaccaaccucaacaugacgaugccgcugagcugcaccaagaacaacucccaccacuacaucauggucggcaacgagaccggccuggagcucacccugacgaacaccagcaucaucaaccacaaguucugcaaccuguccgacgcccacaagaagaaccucuacaaccacgcccugaugagcaucaucuccaccuuccaccugagcauccccaacuucaaccaguacgaggccauguccugcgacuucaacgggggcaagaucagcgugcaguacaaccucucccacagcuacgccguggacgcggccaaccacugcgggaccaucgccaacggcguccugcagacguucaugcggauggccuggggcggguccuacaucgcgcuggacagcggcaaggggaacugggacugcaucaugaccuccuaccaguaccucaucauccagaacaccaccugggaggaccacugccaguucagccgccccucccccaucggcuaccuggggcugcucagccagcggacgcgcgacaucuacaucagccggcgccugcugggcaccuucaccuggacccucuccgacagcgagggcaacgagacgcccgggggcuacugccugacccgguggaugcugaucgaggccgagcucaagugcuucgggaacaccgccguggccaagugcaacgagaagcacgacgaggaguucugcgacaugcugcgccuguucgacuucaacaagcaggccauccggcgccucaagaccgaggcgcaggccaacauccagcugaucaacaaggccgugaacgcccugaucaacgaccagcucaucaugaagaaccaccuccgggacaucaugggcauccccuacugcaacuacuccaaguacugguaccugaaccacacggucaccgggaagaccagccugccccgcugcuggcugguguccaacggcagcuaccugaacgagacccacuucuccgacgacaucgagcagcaggccgacaacaugaucacggagcuccugcagaaggaguacauggaccggcagggcaagaccccgcuggggcucguggaccuguucgucuucagcaccuccuucuaccugaucagcaucuuccugcaccucgugaagaucccgugaggacuagucccuguucccagagcccacuuuuuuuucuuuuuuugaaauaaaauagccugucuuucagaucuaaaaaaaaaaaaaaaaaaaaaaaaaaaaaaaaaaaaaaaaaaaaaaaaaaaaaaaaaaaaaaaaaaaaaaaaaaaaaaaaaaaaaaaaaaaaaaaaaaaa

SEQ ID NO: 42042 - RNA, 1607 nt, Artificial Sequence
  mRNA product Design a-1 (A100) comprising derived and/or modified sequence from LASV(Nig08-A19;Clade III)__ADU56618__GPCmut13 (opt1)
aggagagucccgcagucggcguccagcggcucugcuuguucgugugugugucguugcaggccuuauucaagcuuaccaugggccagaucgugaccuucuuccaggaggucccccacgugaucgaggaggugaugaacaucguccugaucgcccucagcauccuggccauccugaaggggcucuacaacaucgcgaccugcggccugaucgggcuggugacguuccuccugcuguccggccgcagcugcuccaugaccuacaaggggguguacgagcuccagacccuggagcugaacaugaacacccucaacaugacgaugccgcugagcugcaccaagaacaacucccaccacuacaucauggucggcaacgagaccggccuggagcucacccugacgaacaccagccugcuccaccacaaguucugcaaccuguccgacgcccacaagaagaaccuguacgaccacacccucaugagcaucaucuccaccuuccaccugagcauccccaacuucaaccaguacgaggccauguccugcgacuucaacgggggcaagaucacggugcaguacaaccugagccacuccuacgccaucgacgccgcgaaccacugcgggaccguggccaacggcguccuccagaccuucaugcggauggccuggggcgggagcuacaucgcccuggacuccggccgcgggaagugggacugcaucaugaccagcuaccaguaccugaucauccagaacacgaccugggaggaccacugccaguucucccggcccagccccaucggcuaccucgggcugcugucccagcgcacccgggacaucuacaucagccgccggcuccugggcaccuucacguggacccugagcgacuccgagggcaacgagacccccgggggcuacugccucacccgcuggaugcugaucgaggcggagcugaagugcuucgggaacacggccguggccaagugcaacgagaagcacgacgaggaguucugcgacaugcuccggcuguucgacuucaacaagcaggccauccgccggcugaaggccgaggcgcagaugagcauccagcucaucaacaaggccgugaacgcccugaucaacgaccagcugaucaugaagaaccaccuccgcgacaucaugggcauccccuacugcaacuacuccaaguacugguaccugaaccacaccagcaccgggcggaccucccugccccgcugcuggcucgucagcaacggcuccuaccugaacgagacgcacuucagcgacgacaucgagcagcaggccgacaacaugaucaccgagaugcugcagaaggaguaccucgaccggcagggcaagaccccgcuggggcugguggaccuguucguguucuccaccagcuucuaccucaucuccaucuuccugcaccuggucaagaucccgugaggacuagucccuguucccagagcccacuuuuuuuucuuuuuuugaaauaaaauagccugucuuucagaucuaaaaaaaaaaaaaaaaaaaaaaaaaaaaaaaaaaaaaaaaaaaaaaaaaaaaaaaaaaaaaaaaaaaaaaaaaaaaaaaaaaaaaaaaaaaaaaaaaaaa

SEQ ID NO: 42043 - RNA, 1610 nt, Artificial Sequence
  mRNA product Design a-1 (A100) comprising derived and/or modified sequence from LASV(G1180-SLE-2010;Clade IV)__AIT17168__GPCmut13 (opt1)
aggagagucccgcagucggcguccagcggcucugcuuguucgugugugugucguugcaggccuuauucaagcuuaccaugggccagaucgugaccuucuuccaggaggucccccacgugaucgaggaggugaugaacaucguccugaucgcccucagcauccuggccgugcugaaggggcucuacaacuucgcgaccugcggccugguggggcugcucaccuuccugcugcucugcggccgcuccugcaccgccagccgguacaagggggucuacgagcugcagacccuggagcucaacauggagacccugaacaugacgaugccgcuguccugcaccaagaacaacagccaccacuacaucauggugggcaacgagaccggccucgagcugacccugacgaacaccuccaucaucaaccacaaguucugcaaccucagcgacgcccacaagaagaaccuguacgaccacgcccugauguccaucaucagcaccuuccaccucuccauccccaacuucaaccaguacgaggccaugagcugcgacuucaacgggggcaagaucuccgugcaguacaaccugagccacuccuacgcgggggacgccgccaaccacugcggcaccgucgccaacggggugcugcagacguucaugcgcauggcguggggcggcagcuacaucgcccucgacuccgggcacggcagcugggacugcaucaugaccuccuaccaguaccugaucauccagaacaccaccugggaggaccacugccaguucagccggcccucccccaucggguaccugggccuccugagccagcgcacgcgggacaucuacaucagccgccggcugcucggcaccuucaccuggacccuguccgacagcgaggggaaggacacgccgggcggguacugccugacccgcuggaugcucaucgaggccgagcugaagugcuucggcaacaccgccguggccaagugcaacgagaagcacgacgaggaguucugcgacaugcugcggcuguucgacuucaacaagcaggcgauccagcgccugaaggccgaggcccagauguccauccagcugaucaacaaggccgucaacgcccucaucaacgaccagcugaucaugaagaaccaccuccgggacaucauggggauccccuacugcaacuacagcaaguacugguaccucaaccacaccacgaccggcaagaccucccugcccaagugcuggcuggugagcaacggcuccuaccucaacgagacccacuucagcgacgacaucgagcagcaggcggacaacaugaucacggagaugcugcagaaggaguacauggagcgccaggggaagacgccccugggccucguggaccuguucgucuucuccaccagcuucuaccugaucuccaucuuccugcaccucgugaagaucccgugaggacuagucccuguucccagagcccacuuuuuuuucuuuuuuugaaauaaaauagccugucuuucagaucuaaaaaaaaaaaaaaaaaaaaaaaaaaaaaaaaaaaaaaaaaaaaaaaaaaaaaaaaaaaaaaaaaaaaaaaaaaaaaaaaaaaaaaaaaaaaaaaaaaaa

SEQ ID NO: 42044 - RNA, 1610 nt, Artificial Sequence
  mRNA product Design a-1 (A100) comprising derived and/or modified sequence from LASV(G1442-SLE-2011;Clade IV)__AIT17180__GPCmut13 (opt1)
aggagagucccgcagucggcguccagcggcucugcuuguucgugugugugucguugcaggccuuauucaagcuuaccaugggccagaucgugaccuucuuccaggaggucccccacgugaucgaggaggugaugaacaucguccugaucgcccucagcauccuggccgugcugaaggggcucuacaacguggcgaccugcggccugaucgggcuggucacguuccuccugcugugcggccgcuccugcaccaccacccucuacaaggggguguacgagcugcagacgcuggagcucaacauggagacccugaacaugaccaugccgcugagcugcaccaagaacaacucccaccacuacauccgggugggcaacgagacgggccucgagcugacccugaccaacaccagcaucaucaaccacaaguucugcaaccucuccgacgcccacaagaagaaccuguacgaccacgcccugaugagcaucaucuccacguuccaccucagcauccccaacuucaaccaguacgaggccauguccugcgacuucaacgggggcaagaucagcguccaguacaaccugucccacagcuacgccggggacgcggccaaccacugcggcaccguggccaacggggugcugcagaccuucaugcgcauggccuggggcggcuccuacaucgcgcucgacagcgggcggggcaacugggacugcaucaugaccuccuaccaguaccugaucauccagaacacgaccugggacgaccacugccaguucagccgccccucccccaucggguaccugggccuccugagccagcggacccgcgacgucuacaucucccggcgccugcucggcaccuucacguggacccugagcgacagcgaggggaaggacaccccgggcggguacugccugacccgguggaugcucaucgaggccgagcugaagugcuucggcaacacggccguggccaagugcaacgagaagcacgacgaggaguucugcgacaugcugcgccucuucgacuucaacaagcaggccauccagcggcugaaggcggaggcccagauguccauccagcugaucaacaaggccgugaacgcccucaucaacgaccagcugaucaugaagaaccaccuccgcgacaucauggggauccccuacugcaacuacagcaaguacugguaccugaacaacaccgccaccggcaagaccucccugcccaagugcuggcugaucagcaacggcuccuaccucaacgagacgcacuucagcgacgacaucgagcaggaggcggacaacaugaucaccgagaugcugcagaaggaguacauggagcggcaggggaagacgccccugggccucgucgaccuguucguguucuccaccagcuucuaccugaucuccaucuuccugcaccucgugaagaucccgugaggacuagucccuguucccagagcccacuuuuuuuucuuuuuuugaaauaaaauagccugucuuucagaucuaaaaaaaaaaaaaaaaaaaaaaaaaaaaaaaaaaaaaaaaaaaaaaaaaaaaaaaaaaaaaaaaaaaaaaaaaaaaaaaaaaaaaaaaaaaaaaaaaaaa

SEQ ID NO: 42045 - RNA, 1610 nt, Artificial Sequence
  mRNA product Design a-1 (A100) comprising derived and/or modified sequence from LASV(G3010-SLE-2013;Clade IV)__AIT17344__GPCmut13 (opt1)
aggagagucccgcagucggcguccagcggcucugcuuguucgugugugugucguugcaggccuuauucaagcuuaccaugggccagaucgugaccuucuuccaggaggucccccacgugaucgaggaggugaugaacaucguccugaucgcccucagcauccuggccgugcugaaggggcucuacaacuucgcgaccugcggccugguggggcuggucacguuccuccugcugugcggccgcuccugcaccaccagccucuacaaggggguguacgagcugcagacccuggagcucaacauggagacgcugaacaugaccaugccgcuguccugcaccaagaacaacagccaccacuacaucauggugggcaacgagaccggccucgagcugacgcugaccaacaccuccaucaucaaccacaaguucugcaaccucagcgacgcccacaagaagaaccuguacaaccacgcccugauguccaucaucagcaccuuccaccucuccauccccaacuucaaccaguacgaggccaugagcugcgacuucaacgggggcaagaucuccguccaguacaaccugagccacuccuacgccggggacgcggccagccacugcggcacgguggccaacggggugcugcagaccuucaugcggauggccuggggcggcuccuacaucgcgcucgacagcggguacggcaagugggacugcaucaugaccuccuaccaguaccugaucauccagaacaccacgugggaggaccacugccaguucagccgccccucccccaucggguaccugggccuccugagccagcggacccgcgacaucuacaucagccggcgccugcucggcaccuucaccuggacgcuguccgacagcgaggggaaggacaccccgggcggguacugccugacccgguggaugcucaucgaggccgagcugaagugcuucggcaacaccgccgucgccaagugcaacgagaagcacgacgaggaguucugcgacaugcugcgccucuucgacuucaacaagcaggccauccagcggcugaagacggaggcgcagauguccauccagcugaucaacaaggccgugaacgcccucaucaacgaccagcugaucaugaagaaccaccuccgcgacaucauggggauccccuacugcaacuacagcaaguacugguaccugaaccacaccaccaccggcaagacgucccugcccaagugcuggcuggugagcaacggcuccuaccucaacgagacccacuucagcgacgacaucgagcagcaggccgacaacaugaucaccgagaugcugcagaaggaguacauggagcggcaggggaagacgccccugggccucgucgaccuguucguguucuccaccagcuucuaccugaucuccaucuuccugcaccucgugaagaucccgugaggacuagucccuguucccagagcccacuuuuuuuucuuuuuuugaaauaaaauagccugucuuucagaucuaaaaaaaaaaaaaaaaaaaaaaaaaaaaaaaaaaaaaaaaaaaaaaaaaaaaaaaaaaaaaaaaaaaaaaaaaaaaaaaaaaaaaaaaaaaaaaaaaaaa

SEQ ID NO: 42046 - RNA, 1610 nt, Artificial Sequence
  mRNA product Design a-1 (A100) comprising derived and/or modified sequence from LASV(G502-SLE-2009;Clade IV)__AIT17126__GPCmut13 (opt1)
aggagagucccgcagucggcguccagcggcucugcuuguucgugugugugucguugcaggccuuauucaagcuuaccaugggccagaucgugaccuucuuccaggaggucccccacgugaucgaggaggugaugaacaucguccugaucgcccucagcauccuggccgugcugaaggggcucuacaacuucgcgaccugcggccugguggggcugcucacguuccugcugcucugcggccgcuccugcaccaccgggcuguacaagggcgucuacgagcugcagacccucgagcugaacauggagacgcugaacaugaccaugccgcucagcugcaccaagaacaacucccaccacuacaucauggugggcaacgagaccgggcuggagcugacgcucaccaacaccagcaucaucaaccacaaguucugcaaccuguccgacgcccacaagaagaaccuguacgaccacgcccucaugagcaucaucuccaccuuccaccugagcauccccaacuucaaccaguacgaggccauguccugcgacuucaacggcgggaagaucagcgugcaguacaaccugucccacagcuacgccggcgacgcggccgaccacugcgggacggucgccaacggcgugcuccagaccuucaugcggauggccuggggcggguccuacaucgcgcuggacagcggccgcgggcggugggacugcaucaugaccuccuaccaguaccugaucauccagaacaccacgugggaggaccacugccaguucagccgccccucccccaucggcuaccucggccugcugagccagcggacccgcgacaucuacaucucccggcgccuccuggggaccuucaccuggacgcugagcgacagcgagggcaaggacacccccgggggcuacugccucacccgguggaugcugaucgaggccgagcugaagugcuucgggaacaccgccguggccaagugcaacgagaagcacgacgaggaguucugcgacaugcuccgccuguucgacuucaacaagcaggccauccagcggcugaaggcggaggcccagauguccauccagcucaucaacaaggccgucaacgcccugaucaacgaccagcuggugaugaagaaccaccuccgcgacaucaugggcauccccuacugcaacuacagccgguacugguaccugaaccacacgaccaccggccgcaccucccugcccaagugcuggcucgugagcaacggguccuaccugaacgagacgcacuucagcgacgacaucgagcagcaggccgacaacaugaucaccgagaugcugcagaaggaguacauggagcggcagggcaagaccccgcucgggcuggucgaccuguucguguucuccaccagcuucuaccugaucuccaucuuccuccaccuggugaagaucccgugaggacuagucccuguucccagagcccacuuuuuuuucuuuuuuugaaauaaaauagccugucuuucagaucuaaaaaaaaaaaaaaaaaaaaaaaaaaaaaaaaaaaaaaaaaaaaaaaaaaaaaaaaaaaaaaaaaaaaaaaaaaaaaaaaaaaaaaaaaaaaaaaaaaaa

SEQ ID NO: 42047 - RNA, 1610 nt, Artificial Sequence
  mRNA product Design a-1 (A100) comprising derived and/or modified sequence from LASV(G733-SLE-2010;Clade IV)__AIT17154__GPCmut13 (opt1)
aggagagucccgcagucggcguccagcggcucugcuuguucgugugugugucguugcaggccuuauucaagcuuaccaugggccagaucgugaccuucuuccaggaggucccccacgugaucgaggaggugaugaacaucguccugaucgcccucagcauccuggccgugcugaaggggcucuacaacuucgcgaccugcggcaucguggggcuggucuccuuccugcuccugugcggccgcagcugcacgaccucccuguacaaggggguguacgagcuccagacccuggagcugaacauggagacccucaacaugacgaugccgcugagcugcaccaagaacaacucccaccacuacaucauggugggcaacgagaccggccuggagcucacccugacgaacaccagcaucaucaaccacaaguucugcaaccuguccgacgcccacaagaagaaccucuacgaccacgcccugaugagcaucaucuccaccuuccaccugagcauccccaacuucaaccaguacgaggccauguccugcgacuucaacgggggcaagaucagcguccaguacaaccucucccacagcuacgccggggacgcggccaaccacugcggcaccaucgccaacggggugcugcagacguucaugcggauggccuggggcggcuccuacaucgcgcuggacagcgggcgcgaccggugggacugcaucaugaccuccuaccaguaccucaucauccagaacaccaccugggaggaccacugccaguucagccgccccucccccaucggcuaccuggggcugcucagccagcggacgcgcgacaucuacaucagccggcgccugcugggcaccuucaccuggacccucuccgacagcgagggcaaggacacgcccgggggcuacugccugacccgguggaugcugaucgaggccgagcucaagugcuucgggaacaccgccguggccaagugcaacgagaagcacgacgaggaguucugcgacaugcugcgccuguucgacuucaacaagcaggccauccagcggcucaaggcggaggcccagauguccauccagcugaucaacaaggccgucaacgcccugaucaacgaccagcucaucaugaagaaccaccuccgcgacaucaugggcauccccuacugcaacuacagcaaguacugguaccugaaccacaccacgaccgggaagaccucccugcccaagugcuggcuggugagcaacggcuccuaccugaacgagacccacuucagcgacgacaucgagcagcaggccgacaacaugaucacggagaugcuccagaaggaguacauggagcggcagggcaagaccccgcuggggcugguggaccucuucgucuucuccaccagcuucuaccugaucuccaucuuccugcaccuggugaagaucccgugaggacuagucccuguucccagagcccacuuuuuuuucuuuuuuugaaauaaaauagccugucuuucagaucuaaaaaaaaaaaaaaaaaaaaaaaaaaaaaaaaaaaaaaaaaaaaaaaaaaaaaaaaaaaaaaaaaaaaaaaaaaaaaaaaaaaaaaaaaaaaaaaaaaaa

SEQ ID NO: 42048 - RNA, 1610 nt, Artificial Sequence
  mRNA product Design a-1 (A100) comprising derived and/or modified sequence from MOPV/LASV reassortant(IGS-1;Clade IV)__AFY05576__GPCmut13 (opt1)
aggagagucccgcagucggcguccagcggcucugcuuguucgugugugugucguugcaggccuuauucaagcuuaccaugggccagaucgugaccuucuuccaggaggucccccacgugaucgaggaggugaugaacaucguccugaucgcccucagcgugcuggccgugcugaaggggcucuacaacuucgcgaccugcggccuggucgggcuggugacguuccuccugcugugcggccgcuccugcaccaccagccucuacaaggggguguacgagcugcagacccuggagcucaacauggagacgcugaacaugaccaugccgcuguccugcaccaagaacaacagccaccacuacaucauggucggcaacgagaccggccucgagcugacgcugaccaacaccuccaucaucaaccacaaguucugcaaccucagcgacgcccacaagaagaaccuguacgaccacgcccugauguccaucaucagcaccuuccaccucuccauccccaacuucaaccaguacgaggccaugagcugcgacuucaacgggggcaagaucuccgugcaguacaaccugagccacuccuacgccggggacgcggccaaccacugcggcacgguggccaacgggguccugcagaccuucaugcggauggccuggggcggcagcuacaucgcgcucgacuccgggcgcggcaacugggacugcaucaugaccagcuaccaguaccugaucauccagaacaccacgugggaggaccacugccaguucucccggcccagccccaucggguaccugggccuccugucccagcgcacccgggacaucuacaucagccgccggcugcucggcaccuucaccuggacgcugagcgacuccgagggggaggacaccccgggcggguacugccugacccgcuggaugcucaucgaggccgagcugaagugcuucggcaacaccgccguggccaagugcaacgagaagcacgacgaggaguucugcgacaugcugcggcuguucgacuucaacaagcaggccauccagcgccugaaggcggaggcccagaugagcauccagcugaucaacaaggccgugaacgcccucaucaacgaccagcugaucaugaagaaccaccuccgggacaucauggggauccccuacugcaacuacuccaaguacugguaccucaaccacacgaccaccggccgcaccagccugcccaagugcuggcuggucuccaacggcagcuaccucaacgagacgcacuucuccgacgacaucgagcagcaggccgacaacaugaucaccgagaugcugcagaaggaguacauggagcggcaggggaagacgccccugggccucguggaccuguucguguucagcaccuccuucuaccugaucagcaucuuccugcaccucgucaagaucccgugaggacuagucccuguucccagagcccacuuuuuuuucuuuuuuugaaauaaaauagccugucuuucagaucuaaaaaaaaaaaaaaaaaaaaaaaaaaaaaaaaaaaaaaaaaaaaaaaaaaaaaaaaaaaaaaaaaaaaaaaaaaaaaaaaaaaaaaaaaaaaaaaaaaaa

SEQ ID NO: 42049 - RNA, 1610 nt, Artificial Sequence
  mRNA product Design a-1 (A100) comprising derived and/or modified sequence from LASV(LM765-SLE-2012;Clade IV)__AIT17814__GPCmut13 (opt1)
aggagagucccgcagucggcguccagcggcucugcuuguucgugugugugucguugcaggccuuauucaagcuuaccaugggccagaucgugaccuucuuccaggaggucccccacgugaucgaggaggugaugaacaucguccugaucgcccucagcauccuggccgugcugaaggggcucuacaacuucgcgaccugcggccugguggggcuggucacguuccuccugcugugcggccgcuccugcaccaccagccucuacaaggggguguacgagcugcagacccuggagcucaacauggagacgcugaacaugaccaugccgcuguccugcaccaagaacaacagccaccacuacaucauggugggcaacgagaccggccucgagcugacgcugaccaacaccuccaucaucgaccacaaguucugcaaccucagcgacgcccaccggaagaaccuguacgaccacgcccugauguccaucaucagcaccuuccaccucuccauccccaacuucaaccaguacgaggccaugagcugcgacuucaacgggggcaagaucuccguccaguacaaccugagccacuccuacgccaaggacgcggccgaccacugcgggacgguggccaacggcgugcugcagaccuucaugcgcauggccuggggcgggagcuacaucgcgcucgacuccggccgggggcgcugggacugcaucaugaccagcuaccaguaccugaucauccagaacaccacgugggaggaccacugccaguucucccggcccagccccaucggcuaccuggggcuccugucccagcgcacccgggacaucuacaucagccgccggcugcucggcaccuucaccuggacgcugagcgacuccgagggcaaggacacccccgggggcuacugccugacccgcuggaugcucaucgaggccgagcugaagugcuucgggaacaccgccgucgccaagugcaacgagaagcacgacgaggaguucugcgacaugcugcggcuguucgacuucaacaagcaggccauccagcgccugaaggcggaggcccagaugagcauccagcugaucaacaaggccgugaacgcccucaucaacgaccagcugaucaugaagaaccaccuccgggacaucaugggcauccccuacugcaacuacuccaaguacugguaccucaaccacacgaccaccgggaagaccagccugcccaagugcuggcugguguccaacggcagcuaccucaacgagacgcacuucuccgacgacaucgagcagcaggccgacaacaugaucaccgagaugcugcagaaggaguacauggagcgccagggcaagaccccgcuggggcucgucgaccuguucguguucagcaccuccuucuaccugaucagcaucuuccugcaccucgugaagaucccgugaggacuagucccuguucccagagcccacuuuuuuuucuuuuuuugaaauaaaauagccugucuuucagaucuaaaaaaaaaaaaaaaaaaaaaaaaaaaaaaaaaaaaaaaaaaaaaaaaaaaaaaaaaaaaaaaaaaaaaaaaaaaaaaaaaaaaaaaaaaaaaaaaaaaa

SEQ ID NO: 42050 - RNA, 1610 nt, Artificial Sequence
  mRNA product Design a-1 (A100) comprising derived and/or modified sequence from LASV(LM776-SLE-2012;Clade IV)__AIT17824__GPCmut13 (opt1)
aggagagucccgcagucggcguccagcggcucugcuuguucgugugugugucguugcaggccuuauucaagcuuaccaugggccagaucgugaccuucuuccaggaggucccccacgugaucgaggaggugaugaacaucguccugaucgcccucagcauccuggccgugcugaaggggcucuacaacuucgcgaccugcggccugguggggcuggucacguuccuccugcugugcggccgcuccugcaccaccagcguguacaaggggguguacgagcuccagacccuggagcugaacauggagacgcucaacaugaccaugccgcuguccugcaccaagaacaacagccaccacuacaucauggucggcaacgagaccggccuggagcucacgcugaccaacaccuccaucaucaaccacaaguucugcaaccugagcgacgcccacaagaagaaccucuacgaccacgcccugauguccaucaucagcaccuuccaccuguccauccccaacuucaaccaguacgaggccaugagcugcgacuucaacgggggcaagaucuccgugcaguacaaccucagccacuccuacgccggggacgcggccaaccacugcggcacgguggccaacgggguccugcagaccuucaugcggauggccuggggcggcagcuacaucgcgcuggacuccgggcacggcaagugggacugcaucaugaccagcuaccaguaccucaucauccagaacaccacgugggaggaccacugccaguucucccgccccagccccaucggguaccugggccugcucucccagcggacccgcgacaucuacaucagccggcgccugcugggcaccuucaccuggacgcucagcgacuccgaggggaaggacaccccgggcggguacugccugacccgguggaugcugaucgaggccgagcucaagugcuucggcaacaccgccguggccaagugcaacgagaagcacgacgaggaguucugcgacaugcugcgccuguucgacuucaacaagcaggccauccagcggcucaaggcggaggcccagaugagcauccagcugaucaacaaggccgugaacgcccugaucaacgaccagcucaucaugaagaaccaccuccgcgacaucauggggauccccuacugcaacuacuccaaguacugguaccugaaccacacgaccaccggcaagaccagccugcccaagugcuggcuggucuccaacggcagcuaccugaacgagacgcacuucuccgacgacaucgagcagcaggccgacaacaugaucaccgagaugcuccagaaggaguacauggagcggcaggggaagacgccccugggccugguggaccucuucguguucagcaccuccuucuaccugaucagcaucuuccugcaccuggucaagaucccgugaggacuagucccuguucccagagcccacuuuuuuuucuuuuuuugaaauaaaauagccugucuuucagaucuaaaaaaaaaaaaaaaaaaaaaaaaaaaaaaaaaaaaaaaaaaaaaaaaaaaaaaaaaaaaaaaaaaaaaaaaaaaaaaaaaaaaaaaaaaaaaaaaaaaa

SEQ ID NO: 42051 - RNA, 1610 nt, Artificial Sequence
  mRNA product Design a-1 (A100) comprising derived and/or modified sequence from LASV(Mad39;Clade IV)__ANH09722__GPCmut13 (opt1)
aggagagucccgcagucggcguccagcggcucugcuuguucgugugugugucguugcaggccuuauucaagcuuaccaugggccagaucgugaccuucuuccaggaggucccccacgugaucgaggaggugaugaacaucguccugaucgcccucagcauccuggccgugcugaaggggcucuacaacguggcgaccugcggccugaucgggcuggucacguuccuccugcugugcggccgcuccugcaccaccacccucuacaaggggguguacgagcugcaggcccuggagcucaacauggagacgcugaacaugaccaugccgcugagcugcaccaagaacaacucccaccacuacauccgggugggcaacgagaccggccucgagcugacgcugaccaacaccagccucaucaaccacaaguucugcaaccuguccgacgcccacaagaagaaccuguacgaccacgcccucaugagcaucaucuccaccuuccaccugagcauccccaacuucaaccaguacgaggccauguccugcgacuucaacgacgggaagaucagcguccaguacaaccugucccacacguacgcgggcgacaccgccaaccacugcgggaccguggccaacggcgugcuccagaccuucaugcgcauggccuggggcgggagcuacaucgcgcuggacuccggccgcgggggcugggacugcaucaugacgagcuaccaguaccugaucauccagaacaccaccugggaggaccacugccaguucucccggcccagccccaucggguaccucggccugcugucccagcggacccgcgacaucuacaucagccggcgccuccugggcacguucaccuggacccuguccgacagcgaggggaaggacaccccgggcggguacugccucacgcgguggaugcugaucgaggccgagcugaagugcuucggcaacaccgccgucgccaagugcaacgagaagcacgacgaggaguucugcgacaugcuccgccuguucgacuucaacaagcaggccauccagcggcugaaggcggaggcccagaugagcauccagcucaucaacaaggccgugaacgcccugaucaacgaccagcugaucaugaagaaccaccuccgcgacaucauggggauccccuacugcaacuacuccaaguacugguaccugaaccacaccgugaccggcaagacgagccugcccaagugcuggcucgucuccaacggcagcuaccugaacgagacccacuucuccgacgacaucgagcagcaggccgacaacaugaucaccgagaugcugcagaaggaguacauggagcggcaggggaagacgccccucggccugguggaccuguucguguucagcaccuccuucuaccugaucagcaucuuccuccaccuggucaagaucccgugaggacuagucccuguucccagagcccacuuuuuuuucuuuuuuugaaauaaaauagccugucuuucagaucuaaaaaaaaaaaaaaaaaaaaaaaaaaaaaaaaaaaaaaaaaaaaaaaaaaaaaaaaaaaaaaaaaaaaaaaaaaaaaaaaaaaaaaaaaaaaaaaaaaaa

SEQ ID NO: 42052 - RNA, 1610 nt, Artificial Sequence
  mRNA product Design a-1 (A100) comprising derived and/or modified sequence from LASV(Z0947-SLE-2011;Clade IV)__AIT17840__GPCmut13 (opt1)
aggagagucccgcagucggcguccagcggcucugcuuguucgugugugugucguugcaggccuuauucaagcuuaccaugggccagaucgugaccuucuuccaggaggucccccacgugaucgaggaggugaugaacaucguccugaucgcccucagcauccuggccgugcugaaggggcucuacaacuucgcgaccugcggccugguggggcuggucacguuccuccugcugugcggccgcuccugcaccaucagccucuacaaggggguguacgagcugcagacccuggagcucaacauggagacccugaacaugacgaugccgcuguccugcaccaagaacaacagccaccacuacaucauggugggcaacgagaccggccucgagcugacccugacgaacaccuccaucaucaaccacaaguucugcaaccucagcgacgcccacaagaagaaccuguacgaccacgcccugauguccaucaucagcaccuuccaccucuccauccccaacuucaaccaguacgaggccaugagcugcgacuucaacgggggcaagaucuccguccaguacaaccugagccacuccuacgccggggacgcggccaaccacugcggcaccguggccaacggggugcugcagacguucaugcggauggccuggggcggcagcuacaucgcgcucgacuccgggcgcgaccggugggacugcaucaugaccagcuaccaguaccugaucauccagaacaccaccugggaggaccacugccaguucucccgccccagccccaucggcuaccuggggcuccugucccagcggacgcgcgacaucuacaucagccggcgccugcucggcaccuucaccuggacccugagcgacuccgagggcaaggacacgcccgggggcuacugccugacccgguggaugcucaucgaggccgagcugaagugcuucgggaacaccgccgucgccaagugcaacgagaagcacgacgaggaguucugcgacaugcugcgccucuucgacuucaacaagcaggccauccagcggcugaaggcggaggcccagaugagcauccagcugaucaacaaggccgugaacgcccucaucaacgaccagcugaucaugaagaaccaccuccgcgacaucaugggcauccccuacugcaacuacuccaaguacugguaccugaaccacaccacgaccgggaagaccagccugcccaagugcuggcugguguccaacggcagcuaccucaacgagacccacuucuccgacgacaucgagcagcaggccgacaacaugaucacggagaugcugcagaaggaguacauggagcggcagggcaagaccccgcuggggcucgucgaccuguucguguucagcaccuccuucuaccugaucagcaucuuccugcaccucgugaagaucccgugaggacuagucccuguucccagagcccacuuuuuuuucuuuuuuugaaauaaaauagccugucuuucagaucuaaaaaaaaaaaaaaaaaaaaaaaaaaaaaaaaaaaaaaaaaaaaaaaaaaaaaaaaaaaaaaaaaaaaaaaaaaaaaaaaaaaaaaaaaaaaaaaaaaaa

SEQ ID NO: 42053 - RNA, 1610 nt, Artificial Sequence
  mRNA product Design a-1 (A100) comprising derived and/or modified sequence from LASV(Josiah;Clade IV)__NP_694870__GPCmut13 (opt1)
aggagagucccgcagucggcguccagcggcucugcuuguucgugugugugucguugcaggccuuauucaagcuuaccaugggccagaucgugaccuucuuccaggaggucccccacgugaucgaggaggugaugaacaucguccugaucgcccucagcgugcuggccgugcugaaggggcucuacaacuucgcgaccugcggccuggucgggcuggugacguuccuccugcugugcggccgcuccugcaccaccagccucuacaaggggguguacgagcugcagacccuggagcucaacauggagacgcugaacaugaccaugccgcuguccugcaccaagaacaacagccaccacuacaucauggucggcaacgagaccggccucgagcugacgcugaccaacaccuccaucaucaaccacaaguucugcaaccucagcgacgcccacaagaagaaccuguacgaccacgcccugauguccaucaucagcaccuuccaccucuccauccccaacuucaaccaguacgaggccaugagcugcgacuucaacgggggcaagaucuccgugcaguacaaccugagccacuccuacgccggggacgcggccaaccacugcggcacgguggccaacgggguccugcagaccuucaugcggauggccuggggcggcagcuacaucgcgcucgacuccgggcgcggcaacugggacugcaucaugaccagcuaccaguaccugaucauccagaacaccacgugggaggaccacugccaguucucccggcccagccccaucggguaccugggccuccugucccagcgcacccgggacaucuacaucagccgccggcugcucggcaccuucaccuggacgcugagcgacuccgaggggaaggacaccccgggcggguacugccugacccgcuggaugcucaucgaggccgagcugaagugcuucggcaacaccgccguggccaagugcaacgagaagcacgacgaggaguucugcgacaugcugcggcuguucgacuucaacaagcaggccauccagcgccugaaggcggaggcccagaugagcauccagcugaucaacaaggccgugaacgcccucaucaacgaccagcugaucaugaagaaccaccuccgggacaucauggggauccccuacugcaacuacuccaaguacugguaccucaaccacacgaccaccggccgcaccagccugcccaagugcuggcuggucuccaacggcagcuaccucaacgagacgcacuucuccgacgacaucgagcagcaggccgacaacaugaucaccgagaugcugcagaaggaguacauggagcggcaggggaagacgccccugggccugguggaccucuucguguucagcaccuccuucuaccugaucagcaucuuccugcaccucgucaagaucccgugaggacuagucccuguucccagagcccacuuuuuuuucuuuuuuugaaauaaaauagccugucuuucagaucuaaaaaaaaaaaaaaaaaaaaaaaaaaaaaaaaaaaaaaaaaaaaaaaaaaaaaaaaaaaaaaaaaaaaaaaaaaaaaaaaaaaaaaaaaaaaaaaaaaaa

SEQ ID NO: 42054 - RNA, 1607 nt, Artificial Sequence
  mRNA product Design a-1 (A100) comprising derived and/or modified sequence from LASV(LP;Clade I)__AAF86701__GPCmut13 (opt1)
aggagagucccgcagucggcguccagcggcucugcuuguucgugugugugucguugcaggccuuauucaagcuuaccaugggccagaucaucaccuucuuccaggaggugccccacgucaucgaggaggugaugaacaucgugcugaucgcccucagccugcuggccauccucaaggggcuguacaacaucgcgaccugcggcaucaucgggcuggucgccuuccucuuccugugcggcaaguccugcagccugacgcucaagggcggguacgagcugcagacccuggagcucaacauggagacccugaacaugaccaugccgcuguccugcacgaagaacagcucccaccacuacauccgcgugggcaacgagaccgggcucgagcugacccugaccaacacgagcaucaucaaccacaaguucugcaaccucuccgacgcccacaagaagaaccuguacgaccacgcccugaugagcaucaucuccaccuuccaccucagcauccccaacuucaaccaguacgaggccauguccugcgacuucaacggcgggaagaucagcgugcaguacaaccugucccacagcuacgcgggcgacgccgccgagcacugcgggaccgucgccaacggcgugcugcagaccuucaugcggauggcguggggcgggcgcuacaucgcccucgacuccggcaaggggaacugggacugcaucaugacgagcuaccaguaccugaucauccagaacaccaccugggaggaccacugccaguucucccggcccagccccaucggcuaccugggccuccugucccagcgcacccgggacaucuacaucagccgccggcugcucgggacguucaccuggacccugagcgacuccgagggcaacgagacccccgggggcuacugccugacgcgcuggaugcucaucgaggccgagcugaagugcuucgggaacaccgccguggccaagugcaacgagaagcacgacgaggaguucugcgacaugcugcggcuguucgacuucaacaagcaggcgauccgccggcugaaggccgaggcccagaugagcauccagcugaucaacaaggccgucaacgcccucaucaacgaccagcugaucaugaagaaccaccuccgcgacaucaugggcauccccuacugcaacuacuccaaguacugguaccucaaccacaccagcuccggccggaccagccugcccaagugcuggcugaucuccaacgggagcuaccucaacgagacgcaguucuccgacgacaucgagcagcaggcggacaacaugaucaccgagaugcugcagaaggaguacaucgagcgccagggcaagaccccgcuggggcugguggacaucuucaucuucagcaccuccuucuaccucaucagcaucuuccugcaccugaucaagaucccgugaggacuagucccuguucccagagcccacuuuuuuuucuuuuuuugaaauaaaauagccugucuuucagaucuaaaaaaaaaaaaaaaaaaaaaaaaaaaaaaaaaaaaaaaaaaaaaaaaaaaaaaaaaaaaaaaaaaaaaaaaaaaaaaaaaaaaaaaaaaaaaaaaaaaa

SEQ ID NO: 42055 - RNA, 1607 nt, Artificial Sequence
  mRNA product Design a-1 (A100) comprising derived and/or modified sequence from LASV(803213;Clade II)__AAF86703__GPCmut13 (opt1)
aggagagucccgcagucggcguccagcggcucugcuuguucgugugugugucguugcaggccuuauucaagcuuaccaugggccagaucaucaccuucuuccaggaggugccccacgucaucgaggaggugaugaacaucgugcugaucgcccucagccugcuggccauccucaaggggaucuacaacgucgcgaccugcggccuguucgggcugaucuccuuccuccugcugugcggccgcagcugcuccgugacguacaaggggguguacgagcuccagacccuggagcugaacauggccaaccucaacaugaccaugccgcugagcugcaccaagaacaacucccaccacuacaucauggucggcaacgagacgggccuggagcucacccugaccaacaccagcaucaucaaccacaaguucugcaaccuguccgacgcccacaagaagaaccucuacgaccacgcccugaugagcaucaucuccacguuccaccugagcauccccaacuucaaccaguacgaggccauguccugcgacuucaacgggggcaagaucagcgugcaguacaaccucucccacagcuucgcgguggacgccgccaaccacugcgggaccaucgccaacggcguccugcagaccuucaugcggauggcguggggcggguccuacaucgcccuggacagcggcaaggggaacugggacugcaucaugaccuccuaccaguaccucaucauccagaacacgaccugggaggaccacugccaguucagccgccccucccccaucggcuaccuggggcugcucagccagcggacccgcgacaucuacaucagccggcgccugcugggcaccuucacguggacccucuccgacagcgagggcaacgaggcccccgggggcuacugccugacccgguggaugcugaucgaggccgagcucaagugcuucgggaacaccgccguggcgaagugcaacgagaagcacgacgaggaguucugcgacaugcugcgccuguucgacuucaacaagcaggccaucaagcggcucaagacggaggcccagauguccauccagcugaucaacaaggccgugaacgcccugaucaacgaccagcucaucaugaagaaccaccuccgcgacaucaugggcauccccuacugcaacuacagccgguacugguaccugaaccacaccgucaccgggaagaccucccugccccgcugcuggcuggugagcaacggcuccuaccugaacgagacgcacuucagcgacgacaucgagcagcaggcggacaacaugaucaccgagaugcuccagaaggaguacauggaccggcagggcaagaccccgcuggggcugguggaccuguucgucuucuccaccagcuucuaccucaucuccaucuuccugcaccuggugaagaucccgugaggacuagucccuguucccagagcccacuuuuuuuucuuuuuuugaaauaaaauagccugucuuucagaucuaaaaaaaaaaaaaaaaaaaaaaaaaaaaaaaaaaaaaaaaaaaaaaaaaaaaaaaaaaaaaaaaaaaaaaaaaaaaaaaaaaaaaaaaaaaaaaaaaaaa

SEQ ID NO: 42056 - RNA, 1607 nt, Artificial Sequence
  mRNA product Design a-1 (A100) comprising derived and/or modified sequence from LASV(GA391;Clade III)__CAA36645__GPCmut13 (opt1)
aggagagucccgcagucggcguccagcggcucugcuuguucgugugugugucguugcaggccuuauucaagcuuaccaugggccagaucgugaccuucuuccaggaggucccccacgugaucgaggaggugaugaacaucguccugaucgcccucagcauccuggccauccugaaggggcucuacaacguggcgaccugcggccugaucgggcuggugacguuccuccugcuguccggccgcagcugcucccucaucuacaaggggaccuacgagcugcagacccuggagcucaacauggagacccugaacaugacgaugccgcugagcugcaccaagaacaacucccaccacuacauccgggucggcaacgagaccggccucgagcugacccugacgaacaccagcauccucaaccacaaguucugcaaccuguccgacgcccacaagcgcaaccuguacgaccacagccucauguccaucaucagcaccuuccaccuguccauccccaacuucaaccaguacgaggccaugagcugcgacuucaacgggggcaagaucaccgugcaguacaaccugucccacagcuucgccguggacgccgcggggcacugcggcacgcucgccaacgggguccugcagaccuucaugcggauggccuggggcggcuccuacaucgcccuggacagcgggcgcggcaacugggacugcaucaugaccuccuaccaguaccucaucauccagaacaccacgugggacgaccacugccaguucagccggcccucccccaucggguaccugggccugcucagccagcgcacccgggacaucuacaucagccgccggcugcugggcaccuucaccuggacgcucuccgacagcgaggggaacgagaccccgggcggguacugccugacccgcuggaugcugaucgaggcggagcucaagugcuucggcaacaccgccguggccaagugcaacgagaagcacgacgaggaguucugcgacaugcugcggcuguucgacuucaacaagcaggccauccgccggcucaagacggaggcccagauguccauccagcugaucaacaaggcggugaacgcccugaucaacgaccagcucaucaugaagaaccaccuccgcgacaucauggggauccccuacugcaacuacagccgguacugguaccugaaccacaccuccaccggcaagaccagccugccccgcugcuggcugaucuccaacggcagcuaccugaacgagacgaaguucuccgacgacaucgagcagcaggccgacaacaugaucaccgagaugcugcagaaggaguacaucgaccggcaggggaagacgccccucggccuggucgaccuguucguguucagcaccuccuucuaccucaucagcaucuuccugcaccuggugaagaucccgugaggacuagucccuguucccagagcccacuuuuuuuucuuuuuuugaaauaaaauagccugucuuucagaucuaaaaaaaaaaaaaaaaaaaaaaaaaaaaaaaaaaaaaaaaaaaaaaaaaaaaaaaaaaaaaaaaaaaaaaaaaaaaaaaaaaaaaaaaaaaaaaaaaaaa

SEQ ID NO: 42057 - RNA, 1610 nt, Artificial Sequence
  mRNA product Design a-1 (A100) comprising derived and/or modified sequence from LASV(AV;Clade V)__CCA30314__GPCmut13 (opt1)
aggagagucccgcagucggcguccagcggcucugcuuguucgugugugugucguugcaggccuuauucaagcuuaccaugggccagaucgugaccuucuuccaggaggucccccacgugaucgaggaggugaugaacaucguccugaucgcccucagcauccuggccgugcugaaggggcucuacaacaucgcgaccugcggccugaucgggcugaucacguuccuccugcugugcggccgcuccugcagcuccaaccucuacaaggggguguacgagcugcagagccuggaccucaacauggagacccugaacaugaccaugccgcuguccugcaccaagaacaacagccaccacuacauccgggucggcaacgacacgggccucgagcugacccugaccaacaccuccauccucaaccacaaguucugcaaccugagcgacgcccacaagaaggaccuguacgaccacgcccucauguccaucaucagcacguuccaccuguccauccccaacuucaaccaguacgaggccaugagcugcgacuucaacgggggcaagaucuccgugcaguacaaccugagccacuccuacgccaucgacgcggccaaccacugcgggaccguggccaacggcauccuccagaccuucaugcgcauggccuggggcgggagcuacaucgcgcuggacuccggccgggggaacugggacugcaucaugaccagcuaccaguaccugaucauccagaacacgaccugggagaaccacugccaguucucccgccccagccccaucggcuaccucgggcugcugagccagcggacccgcgacaucuacaucucccggcgccuccugggcaccuucacguggacccugagcgacuccgagggcaacgccacccccgggggcuacugccucacccgguggaugcugaucgaggccgagcugaagugcuucgggaacacggccgucgccaagugcaacgagaagcacgacgaggaguucugcgacaugcuccgccuguucgacuucaacaagcaggcgaucagccggcugaaguccgaggcccagaugagcauccagcucaucaacaaggccgugaacgcccugaucaacgaccagcugaucaugaagaaccaccuccgcgacaucaugggcauccccuacugcaacuacuccaaguacugguaccugaaccacaccaucaccgggaagaccagccugcccaagugcuggcucguguccaacggcagcuaccugaacgagacgcacuucuccgacgacaucgagcagcaggccgacaacaugaucaccgagaugcugcagaaggaguacauggagcggcagggcaagaccccgcuggggcucgucgaccuguucguguucagcaccuccuucuaccugaucagcaucuuccuccgccuggugaagaucccgugaggacuagucccuguucccagagcccacuuuuuuuucuuuuuuugaaauaaaauagccugucuuucagaucuaaaaaaaaaaaaaaaaaaaaaaaaaaaaaaaaaaaaaaaaaaaaaaaaaaaaaaaaaaaaaaaaaaaaaaaaaaaaaaaaaaaaaaaaaaaaaaaaaaaa

SEQ ID NO: 42058 - RNA, 1607 nt, Artificial Sequence
  mRNA product Design a-1 (A100) comprising derived and/or modified sequence from LASV(Togo/2016/7082;Clade VI)__AMR44577__GPCmut13 (opt1)
aggagagucccgcagucggcguccagcggcucugcuuguucgugugugugucguugcaggccuuauucaagcuuaccaugggccagaucaucaccuucuuccaggaggugccccacgucaucgaggaggugaugaacaucgugcugaucgcccucagccugcuggccauccucaagggggucuacaacguggcgaccugcggcaucaucgggcuggugacguuccuguuccucugcggccgcuccugcagccugaucuacaagggguccuacgagcugcagacccucgagcugaacauggagacccugaacaugaccaugccgcucagcugcacgaagaacuccagccaccacuacauccgggucggcaacgagaccggccuggagcugacccucaccaacacguccaucaucaaccacaaguucugcaaccugagcgacgcccacaagcgcaaccuguacgaccacgcccucauguccauccugagcaccuuccaccuguccauccccaacuucaaccaguacgaggccaugagcugcgacuucaacgggggcaagaucuccgugcaguacaaccucagccacgccuacgcgguggacgccgccgagcacugcgggaccgucgccaacggcgugcugcagaccuucaugcggauggcguggggcggguccuacaucgcccuggacagcggccgcgggaacugggacugcaucaugacguccuaccaguaccucaucauccagaacaccaccugggaggaccacugccaguucagccggcccucccccaucggcuaccuggggcugcucagccagcgcacccgggacaucuacaucagccgccggcugcugggcacguucaccuggacccucuccgacagcgagggcaacgagacccccgggggcuacugccugacgcgcuggaugcugaucgaggccgagcucaagugcuucgggaacaccgccguggccaagugcaacgagaagcacgacgaggaguucugcgacaugcugcggcuguucgacuucaacaagcaggcgauccagcgccucaaguccgaggcccagaugagcauccagcugaucaacaaggccgucaacgcccugaucaacgaccagcucaucaugaagaaccaccuccgggacaugaugggcauccccuacugcaacuacuccaaguacugguaccugaaccacaccagcuccgggcgcaccagccugcccaagugcuggcugguguccaacggcagcuaccugaacgagacgcacuucuccgacgacaucgagcagcaggccgacaacaugaucaccgagaugcuccagaaggaguacaucgaccggcagggcaagaccccgcuggggcugguggaccuguucgucuucagcaccuccuucuaccucaucagcaucuuccugcaccugaucaagaucccgugaggacuagucccuguucccagagcccacuuuuuuuucuuuuuuugaaauaaaauagccugucuuucagaucuaaaaaaaaaaaaaaaaaaaaaaaaaaaaaaaaaaaaaaaaaaaaaaaaaaaaaaaaaaaaaaaaaaaaaaaaaaaaaaaaaaaaaaaaaaaaaaaaaaaa

SEQ ID NO: 42059 - RNA, 1607 nt, Artificial Sequence
  mRNA product Design a-1 (A100) comprising derived and/or modified sequence from LASV(KAK-428;Clade n.d. (VII))__ANH09740__GPCmut13 (opt1)
aggagagucccgcagucggcguccagcggcucugcuuguucgugugugugucguugcaggccuuauucaagcuuaccaugggccagaucgugaccuucuuccaggaggucccccacgugaucgaggaggugaugaacaucguccugaucgcccucagccugcuggccauccucaaggggcuguacaacuucgcgaccugcggcgugaucgggcugaucacguuccuccugcugugcggccgcuccugcagcgccaccuacaaggggcaguacgagcuccagacccuggagcugaacauggagucccucaacaugaccaugccgcugagcugcacgaagaacaacucccaccacuacauccgggccggcaacaacaccggccuggagcucacccugaccaacacgagcaucaucucccacaaguucugcaaccugagcgacgcccacaagaagaaccucuacgaccacacccugauguccaucaucaccaccuuccaccugagcauccccaacuucaaccaguacgaggccauguccugcgacuucaacgggggcaagaucagcauccaguacaaccucucccacagcuacgcgggggacgccgcccagcacugcggcacgguggccaacgggguccugcagaccuucaugcgcauggcguggggcggcuccuaccuggcccucgacagcgggcggcgcggcugggacugcaucaucuccagcuaccaguaccugaucauccagaacaccaccugggacgaccacugccaguucucccggcccagccccaucggguaccugggcuucgugagccagaagacgcgcgacaucuacaucucccggcgccuccugggcaccuucaccuggacccugagcgacuccgaggggcacgacaugccgggcggguacugccucacgcgguggaugcugaucgaggccgaccugaagugcuucggcaacaccgccguggccaagugcaacgagaagcacgacgaggaguucugcgacauguggcgccucuucgacuucaacaagcaggcgauccagcggcugaaggccgaggcccagaugaacauccagcugaucaacaaggccgucaacgcccucaucaacgaccagcugaugaugaagaaccaccuccgcgacaucauggggauccccuacugcaacuacagcaaguucugguaccugaacaacaccaccacgggccggaccucccugccccgcugcuggcugaucagcaacggcuccuaccucaacgagacccacuucagcgacgacaucgagcagcaggcggacaacaugaucaccgagaugcugcagaaggaguacauggaccggcaggggaagacgccccugggccucguggaccuguucguguucuccaccagcuucuaccugaucaccaucuuccugcaccucgucaagaucccgugaggacuagucccuguucccagagcccacuuuuuuuucuuuuuuugaaauaaaauagccugucuuucagaucuaaaaaaaaaaaaaaaaaaaaaaaaaaaaaaaaaaaaaaaaaaaaaaaaaaaaaaaaaaaaaaaaaaaaaaaaaaaaaaaaaaaaaaaaaaaaaaaaaaaa

SEQ ID NO: 42060 - RNA, 1607 nt, Artificial Sequence; identical to SEQ ID NO: 42054
  mRNA product Design a-1 (A100) comprising derived and/or modified sequence from LASV(Pinneo-NIG-1969;Clade I)__AIT17836__GPCmut13 (opt1)

SEQ ID NO: 42061 - RNA, 1607 nt, Artificial Sequence
  mRNA product Design a-1 (A100) comprising derived and/or modified sequence from LASV(ISTH0009-NIG-2011;Clade II)__AIT17404__GPCmut13 (opt1)
aggagagucccgcagucggcguccagcggcucugcuuguucgugugugugucguugcaggccuuauucaagcuuaccaugggccagaucaucaccuucuuccaggaggugccccacgucaucgaggaggugaugaacaucgugcugaucgcccucagccugcuggccauccucaaggggaucuacaacgucgcgaccugcggccuguucgggcugguguccuuccuccugcugugcggccgcagcugcuccacgaccuacaaggggguguacgagcuccagacccuggagcuggacauggccagccucaacaugaccaugccgcuguccugcacgaagaacaacagccaccacuacaucauggucggcaacgagaccggccuggagcucacccugaccaacacguccaucaucaaccacaaguucugcaaccugagcgacgcccacaagaagaaccucuacgaccacgcccugauguccaucaucagcaccuuccaccuguccauccccaacuucaaccaguacgaggccaugagcugcgacuucaacgggggcaagaucuccgugcaguacaaccucagccacgcguacgccguggacgccgccaaccacugcgggaccaucgcgaacggcguccugcagaccuucaugcggauggccuggggcggguccuacaucgcccuggacagcggcaagggguccugggacugcaucaugacgagcuaccaguaccucaucauccagaacaccaccugggaggaccacugccaguucucccgccccagccccaucggcuaccuggggcugcucagccagcggacccgcgacaucuacaucucccggcgccugcugggcacguucaccuggacccucagcgacuccgagggcaacgagacccccgggggcuacugccugacgcgguggaugcugaucgaggccgagcucaagugcuucgggaacaccgccguggcgaagugcaacgagaagcacgacgaggaguucugcgacaugcugcgccuguucgacuucaacaagcaggccauccggcgccucaagaccgaggcccagaugagcauccagcugaucaacaaggccgugaacgcccugaucaacgaccagcucaucaugaagaaccaccuccgggacaucaugggcaucccguacugcaacuacuccaaguacugguaccugaaccacaccgucacggggaagaccagccugccccgcugcuggcugguguccaacggcagcuaccugaacgagacccacuucuccgacgacaucgagcagcaggcggacaacaugaucaccgagcuccugcagaaggaguacauggaccggcagggcaagacgccccuggggcugguggaccucuucgucuucagcaccuccuucuaccugaucagcaucuuccugcaccucaucaagaucccgugaggacuagucccuguucccagagcccacuuuuuuuucuuuuuuugaaauaaaauagccugucuuucagaucuaaaaaaaaaaaaaaaaaaaaaaaaaaaaaaaaaaaaaaaaaaaaaaaaaaaaaaaaaaaaaaaaaaaaaaaaaaaaaaaaaaaaaaaaaaaaaaaaaaaa

SEQ ID NO: 42062 - RNA, 1607 nt, Artificial Sequence
  mRNA product Design a-1 (A100) comprising derived and/or modified sequence from LASV(ISTH2010-NIG-2012;Clade II)__AIT17482__GPCmut13 (opt1)
aggagagucccgcagucggcguccagcggcucugcuuguucgugugugugucguugcaggccuuauucaagcuuaccaugggccagaucaucaccuucuuccaggaggugccccacgucaucgaggaggugaugaacaucgugcugaucgcccucagccugcuggccauccucaaggggaucuacaacgucgcgaccugcggccuguucgggcugguguccuuccuccugcugugcggccgcagcugcuccacgaccuacaaggggguguacgagcuccagacccuggagcuggacauggccagccucaacaugaccaugccgcuguccugcacgaagaacaacagccaccacuacaucauggucggcaacgagaccggccuggagcucacccugaccaacacguccaucaucaaccacaaguucugcaaccugagcgacgcccacaagaagaaccucuacgaccacgcccugauguccaucaucagcaccuuccaccuguccauccccaacuucaaccaguacgaggccaugagcugcgacuucaacgggggcaagaucuccgugcaguacaaccucagccacgcguacgccguggacgccgccaaccacugcgggaccaucgcgaacggcguccugcagaccuucaugcggauggccuggggcggguccuacaucgcccuggacagcggcaagggguccugggacugcaucaugacgagcuaccaguaccucaucauccagaacaucaccugggaggaccacugccaguucucccgccccagccccaucggcuaccuggggcugcucagccagcggacccgcgacaucuacaucucccggcgccugcugggcaccuucacguggacccucagcgacuccgagggcaacgagacccccgggggcuacugccugacccgguggaugcugaucgaggccgagcucaagugcuucgggaacacggccguggcgaagugcaacgagaagcacgacgaggaguucugcgacaugcugcgccuguucgacuucaacaagcaggccauccggcgccucaagaccgaggcccagaugagcauccagcugaucaacaaggccgugaacgcccugaucaacgaccagcucaucaugaagaaccaccuccgggacaucaugggcauccccuacugcaacuacuccaaguacugguaccugaaccacaccgucaccgggaagacgagccugccccgcugcuggcugguguccaacggcagcuaccugaacgagacccacuucuccgacgacaucgagcagcaggcggacaacaugaucaccgagcuccugcagaaggaguacaucgaccggcagggcaagaccccgcuggggcugguggaccucuucgucuucagcacguccuucuaccugaucagcaucuuccugcaccucgugaagaucccgugaggacuagucccuguucccagagcccacuuuuuuuucuuuuuuugaaauaaaauagccugucuuucagaucuaaaaaaaaaaaaaaaaaaaaaaaaaaaaaaaaaaaaaaaaaaaaaaaaaaaaaaaaaaaaaaaaaaaaaaaaaaaaaaaaaaaaaaaaaaaaaaaaaaaa

SEQ ID NO: 42063 - RNA, 1607 nt, Artificial Sequence
  mRNA product Design a-1 (A100) comprising derived and/or modified sequence from LASV(Lassa virus/H.sapiens-wt/NGA/2015/ISTH_0543;Clade II)__AVO03639__GPCmut13 (opt1)
aggagagucccgcagucggcguccagcggcucugcuuguucgugugugugucguugcaggccuuauucaagcuuaccaugggccagaucaucaccuucuuccaggaggugccccacgucaucgaggaggugaugaacaucgugcugaucgcccucagccugcuggccauccucaaggggaucuacaacgucgcgaccugcggccuguucgggcugguguccuuccuccugcugugcggccgcagcugcuccacgaccuacaaggggguguacgagcuccagacccuggagcuggacauggccaaccucaacaugaccaugccgcugagcugcacgaagaacaacucccaccacuacaucauggucggcaacgagaccggccuggagcucacccugaccaacacgagcaucaucaaccacaaguucugcaaccuguccgacgcccacaagaagaaccucuacgaccacgcccugaugagcaucaucuccaccuuccaccugagcauccccaacuucaaccaguacgaggccauguccugcgacuucaacgggggcaagaucagcgugcaguacaaccucucccacaccuacgcgguggacgccgccaaccacugcgggaccaucgccaacggcguccugcagacguucaugcggauggcguggggcgggagcuacaucgcccuggacuccggcaaggggagcugggacugcaucaugaccuccuaccaguaccucgugauccagaacaccaccugggaggaccacugccaguucagccgccccucccccaucggcuaccuggggcugcucagccagcggacgcgcgacaucuacaucagccggcgccugcugggcaccuucaccuggacccucuccgacagcgagggcaacgagacgcccgggggcuacugccugacccgguggaugcugaucgaggccgagcucaagugcuucgggaacaccgccguggccaagugcaacgagaagcacgacgaggaguucugcgacaugcugcgccuguucgacuucaacaagcaggcgauccggcgccucaagaccgaggcccagauguccauccagcugaucaacaaggccgucaacgcccugaucaacgaccagcucaucaugaagaaccaccuccgggacaucaugggcauccccuacugcaacuacagcaaguacugguaccugaaccacacggugaccgggaagaccucccugccccgcugcuggcuggugagcaacggcuccuaccugaacgagacccacuucagcgacgacaucgagcagcaggccgacaacaugaucacggagcuccugcagaaggaguacaucgaccggcagggcaagaccccgcuggggcuggucgaccucuucguguucuccaccagcuucuaccugaucuccaucuuccugcaccucgugaagaucccgugaggacuagucccuguucccagagcccacuuuuuuuucuuuuuuugaaauaaaauagccugucuuucagaucuaaaaaaaaaaaaaaaaaaaaaaaaaaaaaaaaaaaaaaaaaaaaaaaaaaaaaaaaaaaaaaaaaaaaaaaaaaaaaaaaaaaaaaaaaaaaaaaaaaaa

SEQ ID NO: 42064 - RNA, 1607 nt, Artificial Sequence
  mRNA product Design a-1 (A100) comprising derived and/or modified sequence from LASV(Lassa virus/H.sapiens-wt/NGA/2016/ISTH_0009;Clade II)__AVO03571__GPCmut13 (opt1)
aggagagucccgcagucggcguccagcggcucugcuuguucgugugugugucguugcaggccuuauucaagcuuaccaugggccagaucaucaccuucuuccaggaggugccccacgucaucgaggaggugaugaacaucgugcugaucgcccucagccugcuggccauccucaaggggaucuacaacgucgcgaccugcggccugcuggggcucguguccuuccugcugcucugcggccgcagcugcuccacgaccuacaaggggguguacgagcugcagacccuggagcucgacauggccagccugaacaugaccaugccgcuguccugcacgaagaacaacagccaccacuacaucauggucggcaacgagaccggccucgagcugacccugaccaacacguccaucaucaaccacaaguucugcaaccucagcgacgcccacaagaagaaccuguacgaccacgcccugauguccaucaucagcaccuuccaccucuccauccccaacuucaaccaguacgaggccaugagcugcgacuucaacgggggccggaucuccgugcaguacaaccugagccacuccuacgcgguggacgccgccaaccacugcgggaccaucgccaacggcguccugcagaccuucaugcgcauggcguggggcgggagcuacaucgcccucgacuccggcaaggggagcugggacugcaucaugacguccuaccaguaccugaucauccagaacaccaccugggaggaccacugccaguucagccggcccagccccaucggcuaccuggggcuccugucccagcgcacccgggacaucuacaucagccgccggcugcucggcacguucaccuggacccuguccgacagcgagggcaacgagacccccgggggcuacugccugacgcgcuggaugcucaucgaggccgagcugaagugcuucgggaacaccgccguggccaagugcaacgagaagcacgacgaggaguucugcgacaugcugcggcuguucgacuucaacaagcaggcgauccgccggcugaagaccgaggcccagauguccauccagcugaucaacaaggccgugaacgcccucaucaacgaccagcugaucaugaagaaccaccuccgcgacaucaugggcaucccguacugcaacuacagcaaguacugguaccucaaccacaccgucacggggaagaccucccugccccggugcuggcuggugagcaacggcuccuaccucaacgagacccacuucagcgacgacaucgagcagcaggccgacaacaugaucaccgagcugcugcagaaggaguacaucgaccgccagggcaagacgccccuggggcucguggaccuguucgucuucuccaccagcuucuaccugaucuccaucuuccuccaccuggugaagaucccgugaggacuagucccuguucccagagcccacuuuuuuuucuuuuuuugaaauaaaauagccugucuuucagaucuaaaaaaaaaaaaaaaaaaaaaaaaaaaaaaaaaaaaaaaaaaaaaaaaaaaaaaaaaaaaaaaaaaaaaaaaaaaaaaaaaaaaaaaaaaaaaaaaaaaa

SEQ ID NO: 42065 - RNA, 1607 nt, Artificial Sequence
  mRNA product Design a-1 (A100) comprising derived and/or modified sequence from LASV(Lassa virus/H.sapiens-wt/NGA/2016/ISTH_0017;Clade II)__AVO03567__GPCmut13 (opt1)
aggagagucccgcagucggcguccagcggcucugcuuguucgugugugugucguugcaggccuuauucaagcuuaccaugggccagaucaucaccuucuuccaggaggugccccacgucaucgaggaggugaugaacaucgugcugaucgcccucagccugcuggccauccucaaggggaucuacaacgucgcgaccugcggccuguucgggcugguguccuuccuccugcugugcggccgcagcugcuccacgaccuacaaggggguguacgagcuccagacccuggagcuggacauggccagccucaacaugaccaugccgcuguccugcacgaagaacaacagccaccacuacaucauggucggcaacgagaccggccuggagcucacccugaccaacacguccaucaucaaccacaaguucugcaaccugagcgacgcccacaagaagaaccucuacgaccacgcccugauguccaucaucagcaccuuccaccuguccauccccaacuucaaccaguacgaggccaugagcugcgacuucaacgggggcaagaucuccgugcaguacaaccucagccacaccuacgcgaucgacgccgccaaccacugcgggaccaucgccaacggcgugcugcagacguucaugcggauggcguggggcggguccuacaucgcccuggacagcggcaagggguccugggacugcaucaugaccagcuaccaguaccucaucauccagaacaccaccugggaggaccacugccaguucucccgccccagccccaucggcuaccuggggcugcucagccagcggacgcgcgacaucuacaucucccggcgccugcugggcaccuucaccuggacccucagcgacuccgagggcaacgagacgcccgggggcuacugccugacccgguggaugcugaucgaggccgagcucaagugcuucgggaacaccgccgucgccaagugcaacgagaagcacgacgaggaguucugcgacaugcugcgccuguucgacuucaacaagcaggcgauccggcgccucaagaccgaggcccagaugagcauccagcugaucaacaaggccgugaacgcccugaucaacgaccagcucaucaugaagaaccaccuccgggacaucaugggcauccccuacugcaacuacuccaaguacugguaccugaaccacacggugaccgggaagaccagccugccccgcugcuggcuggucuccaacggcagcuaccugaacgagacccacuucuccgacgacaucgagcagcaggccgacaacaugaucacggagcuccugcagaaggaguacauggaccggcagggcaagaccccgcuggggcugguggaccucuucguguucagcaccuccuucuaccugaucagcaucuuccugcaccucguccgcaucccgugaggacuagucccuguucccagagcccacuuuuuuuucuuuuuuugaaauaaaauagccugucuuucagaucuaaaaaaaaaaaaaaaaaaaaaaaaaaaaaaaaaaaaaaaaaaaaaaaaaaaaaaaaaaaaaaaaaaaaaaaaaaaaaaaaaaaaaaaaaaaaaaaaaaaa

SEQ ID NO: 42066 - RNA, 1607 nt, Artificial Sequence
  mRNA product Design a-1 (A100) comprising derived and/or modified sequence from LASV(Lassa virus/H.sapiens-wt/NGA/2018/ISTH_0959;Clade II)__AVV65099__GPCmut13 (opt1)
aggagagucccgcagucggcguccagcggcucugcuuguucgugugugugucguugcaggccuuauucaagcuuaccaugggccagaucaucaccuucuuccaggaggugccccacgucaucgaggaggugaugaacaucgugcugaucgcccucagccugcuggccauccucaaggggaucuacaacgucgugaccugcggccuguucgggcugguguccuuccuccugcugugcggccgcagcugcuccacgaccuacaagggggucuacgagcuccagacccuggagcuggacauggcgagccucaacaugaccaugccgcuguccugcacgaagaacaacagccaccacuacaucauggugggcaacgagaccggccuggagcucacccugaccaacacguccaucaucaaccacaaguucugcaaccugagcgacgcccacaagaagaaccucuacgaccacgcccugauguccaucaucagcaccuuccaccuguccauccccaacuucaaccaguacgaggccaugagcugcgacuucaacgggggcaagaucuccgugcaguacaaccucagccacgccuacgcgaucgacgccgccaaccacugcgggaccaucgccaacggcguccugcagaccuucaugcggauggcguggggcggguccuacaucgcccuggacagcggcaagggguccugggacugcaucaugacgagcuaccaguaccucaucauccagaacaccaccugggaggaccacugccaguucucccgccccagccccaucggcuaccuggggcugcucagccagcggacccgcgacaucuacaucucccggcgccugcugggcacguucaccuggacccucagcgacuccgagggcaacgagacccccgggggcuacugccugacgcgguggaugcugaucgaggccgagcucaagugcuucgggaacaccgccguggccaagugcaacgagaagcacgacgaggaguucugcgacaugcugcgccuguucgacuucaacaagcaggcgauccggcgccucaagaccgaggcccagaugagcauccagcugaucaacaaggccgugaacgcccugaucaacgaccagcucaucaugaagaaccaccuccgggacaucaugggcaucccguacugcaacuacuccaaguacugguaccugaaccacaccgucacggggaagaccagccugccccgcugcuggcugguguccaacggcagcuaccugaacgagacccacuucuccgacgacaucgagcagcaggccgacaacaugaucaccgagcuccugcagaaggaguacaucgaccggcagggcaagacgccccuggggcugguggaccucuucgucuucagcaccuccuucuaccugaucagcaucuuccugcaccucgugaagaucccgugaggacuagucccuguucccagagcccacuuuuuuuucuuuuuuugaaauaaaauagccugucuuucagaucuaaaaaaaaaaaaaaaaaaaaaaaaaaaaaaaaaaaaaaaaaaaaaaaaaaaaaaaaaaaaaaaaaaaaaaaaaaaaaaaaaaaaaaaaaaaaaaaaaaaa

SEQ ID NO: 42067 - RNA, 1607 nt, Artificial Sequence
  mRNA product Design a-1 (A100) comprising derived and/or modified sequence from LASV(LASV003-NIG-2008;Clade II)__AIT17580__GPCmut13 (opt1)
aggagagucccgcagucggcguccagcggcucugcuuguucgugugugugucguugcaggccuuauucaagcuuaccaugggccagaucaucaccuucuuccaggaggugccccacgucaucgaggaggugaugaacaucgugcugaucgcccucagccugcuggccauccucaaggggaucuacaacgucgcgaccugcggccuguucgggcugguguccuuccuccugcugugcggccgcagcugcuccacgaccuacaaggggguguacgagcuccagacccuggagcuggacauggccagccucaacaugaccaugccgcuguccugcacgaagaacaacagccaccacuacaucauggucggcaacgagaccggccuggagcucacccugaccaacacguccaucaucaaccacaaguucugcaaccugagcgacgcccacaagaagaaccucuacgaccacgcccugauguccaucaucagcaccuuccaccuguccauccccaacuucaaccaguacgaggccaugagcugcgacuucaacgggggcaagaucuccgugcaguacaaccucagccacaccuacgcgguggacgccgccaaccacugcgggaccaucgccaacggcguccugcagacguucaugcggauggcguggggcggguccuacaucgcccuggacagcggcaagggguccugggacugcaucaugaccagcuaccaguaccucaucauccagaacaccaccugggaggaccacugccaguucucccgccccagccccaucggcuaccuggggcugcucagccagcggacgcgcgacaucuacaucucccggcgccugcugggcaccuucaccuggacccucagcgacuccgagagcaacgagacgccgggcggguacugccugacccgguggaugcugaucgaggccgagcucaagugcuucggcaacaccgccguggccaagugcaacgagaagcacgacgaggaguucugcgacaugcugcgccuguucgacuucaacaagcaggcgauccggcgccucaaggccgaggcccagauguccauccagcugaucaacaaggccgugaacgcccugaucaacgaccagcucaucaugaagaaccaccuccgggacaucauggggauccccuacugcaacuacagcaaguacugguaccugaaccacaccgucacgggccgcaccucccugccccggugcuggcuggugagcaacggguccuaccugaacgagacccacuucagcgacgacaucgagcagcaggcggacaacaugaucaccgagcuccugcagaaggaguacauggaccgccagggcaagacgccccugggccugguggaccucuucgucuucuccaccagcuucuaccugaucuccaucuuccugcaccucgugaagaucccgugaggacuagucccuguucccagagcccacuuuuuuuucuuuuuuugaaauaaaauagccugucuuucagaucuaaaaaaaaaaaaaaaaaaaaaaaaaaaaaaaaaaaaaaaaaaaaaaaaaaaaaaaaaaaaaaaaaaaaaaaaaaaaaaaaaaaaaaaaaaaaaaaaaaaa

SEQ ID NO: 42068 - RNA, 1607 nt, Artificial Sequence
  mRNA product Design a-1 (A100) comprising derived and/or modified sequence from LASV(LASV035-NIG-2009;Clade II)__AIT17588__GPCmut13 (opt1)
aggagagucccgcagucggcguccagcggcucugcuuguucgugugugugucguugcaggccuuauucaagcuuaccaugggccagaucaucaccuucuuccaggaggugccccacgucaucgaggaggugaugaacaucgugcugaucgcccucagccugcuggccauccucaaggggaucuacaacgucgcgaccugcggccuguucgggcugguguccuuccuccugcugugcggccgcagcugcuccacgaccuacaaggggguguacgagcuccagacccuggagcuggacauggccagccucaacaugaccaugccgcuguccugcacgaagaacaacagccaccacuacaucauggucggcaacgagaccggccuggagcucacccugaccaacacguccaucaucaaccacaaguucugcaaccugagcgacgcccacaagaagaaccucuacgaccacgcccugauguccaucaucagcaccuuccaccuguccauccccaacuucaaccaguacgaggccaugagcugcgacuucaacgggggcaagaucuccgugcaguacaaccucagccacgcguacgccguggacgccgccaaccacugcgggaccaucgcgaacggcguccugcagaccuucaugcggauggccuggggcggguccuacaucgcccuggacagcggcaagggguccugggacugcaucaugacgagcuaccaguaccucaucauccagaacaccaccugggaggaccacugccaguucucccgccccagccccaucggcuaccuggggcugcucagccagcggacccgcgacaucuacaucucccggcgccugcugggcacguucaccuggacccucagcgacuccgagggcaacgagacccccgggggcuacugccugacgcgguggaugcugaucgaggccgagcucaagugcuucgggaacaccgccguggcgaagugcaacgagaagcacgacgaggaguucugcgacaugcugcgccuguucgacuucaacaagcaggccauccggcgccucaaggccgaggcccagaugagcauccagcugaucaacaaggccgugaacgcgcugaucaacgaccagcucaucaugaagaaccaccuccgggacaucaugggcauccccuacugcaacuacuccaaguacugguaccugaaccacaccgucaccgggaagacgagccugccccgcugcuggcugguguccaacggcagcuaccugaacgagacccacuucuccgacgacaucgagcagcaggccgacaacaugaucaccgagcuccugcagaaggaguacaucgaccggcagggcaagaccccgcuggggcugguggaccucuucgucuucagcacguccuucuaccugaucagcaucuuccugcaccucgugaagaucccgugaggacuagucccuguucccagagcccacuuuuuuuucuuuuuuugaaauaaaauagccugucuuucagaucuaaaaaaaaaaaaaaaaaaaaaaaaaaaaaaaaaaaaaaaaaaaaaaaaaaaaaaaaaaaaaaaaaaaaaaaaaaaaaaaaaaaaaaaaaaaaaaaaaaaa

SEQ ID NO: 42069 - RNA, 1607 nt, Artificial Sequence
  mRNA product Design a-1 (A100) comprising derived and/or modified sequence from LASV(LASV1000-NIG-2009;Clade II)__AIT17782__GPCmut13 (opt1)
aggagagucccgcagucggcguccagcggcucugcuuguucgugugugugucguugcaggccuuauucaagcuuaccaugggccagaucaucaccuucuuccaggaggugccccacgucaucgaggaggugaugaacaucgugcugaucgcccucagccugcuggccauccucaaggggaucuacaacgucgcgaccugcggccuguucgggcugguguccuuccuccugcugugcggccgcagcugcuccacgaccuacaaggggguguacgagcuccagacccuggagcuggacauggccagccucaacaugaccaugccgcuguccugcacgaagaacaacagccaccacuacaucauggucggcaacgagaccggccuggagcucacccugaccaacacguccaucaucaaccacaaguucugcaaccugagcgacgcccacaagaagaaccucuacgaccacgcccugauguccaucaucagcaccuuccaccuguccauccccaacuucaaccaguacgaggccaugagcugcgacuucaacgggggcaagaucuccgugcaguacaaccucagccacaccuacgcgguggacgccgccaaccacugcgggaccaucgccaacggcguccugcagacguucaugcggauggcguggggcggguccuacaucgcccuggacagcggcaagggguccugggacugcaucaugaccagcuaccaguaccucaucauccagaacaccaccugggaggaccacugccaguucucccgccccagccccaucggcuaccuggggcugcucagccagcggacgcgcgacaucuacaucucccggcgccugcugggcaccuucaccuggacccucagcgacuccgagggcaacgagacgcccgggggcuacugccugacccgguggaugcugaucgaggccgagcucaagugcuucgggaacaccgccguggccaagugcaacgagaagcacgacgaggaguucugcgacaugcugcgccuguucgacuucaacaagcaggcgaucaagcggcucaagaccgaggcccagaugagcauccagcugaucaacaaggccgugaacgcccugaucaacgaccagcucaucaugaagaaccaccuccgcgacaucaugggcauccccuacugcaacuacuccaaguacugguaccugaaccacacggucaccgggaagaccagccugccccggugcuggcugguguccaacggcagcuaccugaacgagacccacuucuccgacgacaucgagcagcaggccgacaacaugaucacggagcuccugcagaaggaguacaucgaccgccagggcaagaccccgcuggggcugguggaccucuucgucuucagcaccuccuucuaccugaucagcaucuuccugcaccucgugaagaucccgugaggacuagucccuguucccagagcccacuuuuuuuucuuuuuuugaaauaaaauagccugucuuucagaucuaaaaaaaaaaaaaaaaaaaaaaaaaaaaaaaaaaaaaaaaaaaaaaaaaaaaaaaaaaaaaaaaaaaaaaaaaaaaaaaaaaaaaaaaaaaaaaaaaaaa

SEQ ID NO: 42070 - RNA, 1607 nt, Artificial Sequence
  mRNA product Design a-1 (A100) comprising derived and/or modified sequence from LASV(LASV221-NIG-2010;Clade II)__AIT17624__GPCmut13 (opt1)
aggagagucccgcagucggcguccagcggcucugcuuguucgugugugugucguugcaggccuuauucaagcuuaccaugggccagaucaucaccuucuuccaggaggugccccacgucaucgaggaggugaugaacaucgugcugaucgcccucagccugcuggccauccucaaggggaucuacaacgucgcgaccugcggccuguucgggcugguguccuuccuccugcugugcggccgcagcugcuccacgaccuacaaggggguguacgagcuccagacccuggagcuggacauggccagccucaacaugaccaugccgcuguccugcacgaagaacaacagccaccacuacaucauggucggcaacgagaccggccuggagcucacccugaccaacacguccaucaucaaccacaaguucugcaaccugagcgacgcccacaagaagaaccucuacgaccacgcccugauguccaucaucagcaccuuccaccuguccauccccaacuucaaccaguacgaggccaugagcugcgacuucaacgggggcaagaucuccgugcaguacaaccucagccacaccuacgcgaucgacgccgccaaccacugcgggaccaucgccaacggcgugcugcagacguucaugcggauggcguggggcggguccuacaucgcccuggacagcggcaagggguccugggacugcaucaugaccagcuaccaguaccucaucauccagaacaccaccugggaggaccacugccaguucucccgccccagccccaucggcuaccuggggcugcucagccagcggacgcgcgacaucuacaucucccggcgccugcugggcaccuucaccuggacccucagcgacuccgagggcaacgagacgcccgggggcuacugccugacccgguggaugcugaucgaggccgagcucaagugcuucgggaacaccgccgucgccaagugcaacgagaagcacgacgaggaguucugcgacaugcugcgccuguucgacuucaacaagcaggcgauccggcgccucaagaccgaggcccagaugagcauccagcugaucaacaaggccgugaacgcccugaucaacgaccagcucaucaugaagaaccaccuccgggacaucaugggcauccccuacugcaacuacuccaaguacugguaccugaaccacacggugaccgggaagaccagccugccccgcugcuggcuggucuccaacggcagcuaccugaacgagacccacuucuccgacgacaucgagcagcaggccgacaacaugaucacggagaugcuccagaaggaguacauggaccggcagggcaagaccccgcuggggcugguggaccuguucguguucagcaccuccuucuaccucaucagcaucuuccugcaccuggucaagaucccgugaggacuagucccuguucccagagcccacuuuuuuuucuuuuuuugaaauaaaauagccugucuuucagaucuaaaaaaaaaaaaaaaaaaaaaaaaaaaaaaaaaaaaaaaaaaaaaaaaaaaaaaaaaaaaaaaaaaaaaaaaaaaaaaaaaaaaaaaaaaaaaaaaaaaa

SEQ ID NO: 42071 - RNA, 1607 nt, Artificial Sequence
  mRNA product Design a-1 (A100) comprising derived and/or modified sequence from LASV(LASV237-NIG-2010;Clade II)__AIT17638__GPCmut13 (opt1)
aggagagucccgcagucggcguccagcggcucugcuuguucgugugugugucguugcaggccuuauucaagcuuaccaugggccagaucaucaccuucuuccaggaggugccccacgucaucgaggaggugaugaacaucgugcugaucgcccucagccugcuggccauccucaaggggaucuacaacgucgcgaccugcggccuguucgggcugguguccuuccuccugcugugcggccgcagcugcuccacgaccuacaaggggguguacgagcuccagacccuggagcuggacauggccagccucaacaugaccaugccgcuguccugcacgaagaacaacagccaccacuacaucauggucggcaacgagaccggccuggagcucacccugaccaacacguccaucaucaaccacaaguucugcaaccugagcgacgcccacaagaaggaccucuacgaccacgcccugauguccaucaucagcaccuuccaccuguccauccccaacuucaaccaguacgaggccaugagcugcgacuucaacgggggcaagaucuccgugcaguacaaccucagccacaccuacgcgguggacgccgccaaccacugcgggaccaucgccaacggcguccugcagacguucaugcggauggcguggggcggguccuacaucgcccuggacagcggcaagggguccugggacugcaucaugaccagcuaccaguaccucaucauccagaacaccaccugggaggaccacugccaguucucccgccccagccccaucggcuaccuggggcugcucagccagcggacgcgcgacaucuacaucucccggcgccugcugggcaccuucaccuggacccucagcgacuccgagggcaacgagacgcccgggggcuacugccugacccgguggaugcugaucgaggccgagcucaagugcuucgggaacaccgccguggccaagugcaacgagaagcacgacgaggaguucugcgacaugcugcgccuguucgacuucaacaagcaggcgauccggcgccucaagaccgaggcccagaugagcauccagcugaucaacaaggccgugaacgcccugaucaacgaccagcucaucaugaagaaccaccuccgggacaucaugggcauccccuacugcaacuacuccaaguacugguaccugaaccacacggucaccgggaagaccagccugccccgcugcuggcugguguccaacggcagcuaccugaacgagacccacuucuccgacgacaucgagcagcaggccgacaacaugaucacggagcuccugcagaaggaguacauggaccggcagggcaagaccccgcuggggcugguggaccucuucgucuucagcaccuccuucuaccugaucagcaucuuccugcaccucaucaagaucccgugaggacuagucccuguucccagagcccacuuuuuuuucuuuuuuugaaauaaaauagccugucuuucagaucuaaaaaaaaaaaaaaaaaaaaaaaaaaaaaaaaaaaaaaaaaaaaaaaaaaaaaaaaaaaaaaaaaaaaaaaaaaaaaaaaaaaaaaaaaaaaaaaaaaaa

SEQ ID NO: 42072 - RNA, 1607 nt, Artificial Sequence
  mRNA product Design a-1 (A100) comprising derived and/or modified sequence from LASV(LASV253-NIG-2011;Clade II)__AIT17670__GPCmut13 (opt1)
aggagagucccgcagucggcguccagcggcucugcuuguucgugugugugucguugcaggccuuauucaagcuuaccaugggccagaucaucaccuucuuccaggaggugccccacgucaucgaggaggugaugaacaucgugcugaucgcccucagccugcuggccauccucaaggggaucuacaacgucgcgaccugcggccuguucgggcugguguccuuccuccugcugugcggccgcagcugcuccacgaccuacaaggggguguacgagcuccagacccuggagcuggacauggccagccucaacaugaccaugccgcuguccugcacgaagaacaacagccaccacuacaucauggucggcaacgagaccggccuggagcucacccugaccaacacguccaucaucaaccacaaguucugcaaccugagcgacgcccacaagaagaaccucuacgaccacgcccugauguccaucaucagcaccuuccaccuguccauccccaacuucaaccaguacgaggccaugagcugcgacuucaacgggggcaagaucuccgugcaguacaaccucagccacaccuacgcgguggacgccgccaaccacugcgggaccaucgccaacggcguccugcagacguucaugcggauggcguggggcggguccuacaucgcccuggacagcggcaagggguccugggacugcaucaugaccagcuaccaguaccucaucauccagaacaccaccugggaggaccacugccaguucucccgccccagccccaucggcuaccuggggcugcucagccagcggacgcgcgacaucuacaucucccggcgccugcugggcaccuucaccuggacccucagcgacuccgagggcaacgagacgcccgggggcuacugccugacccgguggaugcugaucgaggccgagcucaagugcuucgggaacaccgccguggccaagugcaacgagaagcacgacgaggaguucugcgacaugcugcgccuguucgacuucaacaagcaggcgauccggcgccucaaggccgaggcccagaugagcauccagcugaucaacaaggccgugaacgcccugaucaacgaccagcucaucaugaagaaccaccuccgggacaucaugggcaucccguacugcaacuacuccaaguacugguaccugaaccacaccgucacggggcgcaccagccugccccggugcuggcugguguccaacggcagcuaccugaacgagacccacuucuccgacgacaucgagcagcaggcggacaacaugaucaccgagcuccugcagaaggaguacaucgaccgccagggcaagacgccccuggggcugguggaccucuucgucuucagcaccuccuucuaccugaucagcaucuuccugcaccucgugaagaucccgugaggacuagucccuguucccagagcccacuuuuuuuucuuuuuuugaaauaaaauagccugucuuucagaucuaaaaaaaaaaaaaaaaaaaaaaaaaaaaaaaaaaaaaaaaaaaaaaaaaaaaaaaaaaaaaaaaaaaaaaaaaaaaaaaaaaaaaaaaaaaaaaaaaaaa

SEQ ID NO: 42073 - RNA, 1607 nt, Artificial Sequence
  mRNA product Design a-1 (A100) comprising derived and/or modified sequence from LASV(LASV254-NIG-2011;Clade II)__AIT17674__GPCmut13 (opt1)
aggagagucccgcagucggcguccagcggcucugcuuguucgugugugugucguugcaggccuuauucaagcuuaccaugggccagaucaucaccuucuuccaggaggugccccacgucaucgaggaggugaugaacaucgugcugaucgcccucagccugcuggccauccucaaggggaucuacaacgucgcgaccugcggccuguucgggcugguguccuuccuccugcugugcggccgcagcugcuccacgaccuacaaggggguguacgagcuccagacccuggagcuggacaugaccaaccucaacaugacgaugccgcugagcugcaccaagaacaacucccaccacuacaucauggucggcaacgagaccggccuggagcucacccugacgaacaccagcaucaucaaccacaaguucugcaaccuguccgacgcccacaagaagaaccucuacaaccacgcccugaugagcaucaucuccaccuuccaccugagcauccccaacuucaaccaguacgaggccauguccugcgacuucaacgggggcaagaucagcgugcaguacaaccucucccacagcuacgccguggacgcggccaaccacugcgggaccaucgccaacggcguccugcagacguucaugcggauggccuggggcggguccuacaucgcgcuggacagcggcaaggggaacugggacugcaucaugaccuccuaccaguaccucaucauccagaacaccaccugggaggaccacugccaguucagccgccccucccccaucggcuaccuggggcugcucagccagcggacgcgcgacaucuacaucagccggcgccugcugggcaccuucaccuggacccucuccgacagcgagggcaacgagacgcccgggggcuacugccugacccgguggaugcugaucgaggccgagcucaagugcuucgggaacaccgccguggccaagugcaacgagaagcacgacgaggaguucugcgacaugcugcgccuguucgacuucaacaagcaggccauccggcgccucaagaccgaggcgcaggccaacauccagcugaucaacaaggccgugaacgcccugaucaacgaccagcucaucaugaagaaccaccuccgggacaucaugggcauccccuacugcaacuacuccaaguacugguaccugaaccacacggucaccgggaagaccagccugccccgcugcuggcugguguccaacggcagcuaccugaacgagacccacuucuccgacgacaucgagcagcaggccgacaacaugaucacggagcuccugcagaaggaguacauggaccggcagggcaagaccccgcuggggcugguggaccucuucgucuucagcaccuccuucuaccugaucagcaucuuccugcaccucgugaagaucccgugaggacuagucccuguucccagagcccacuuuuuuuucuuuuuuugaaauaaaauagccugucuuucagaucuaaaaaaaaaaaaaaaaaaaaaaaaaaaaaaaaaaaaaaaaaaaaaaaaaaaaaaaaaaaaaaaaaaaaaaaaaaaaaaaaaaaaaaaaaaaaaaaaaaaa

SEQ ID NO: 42074 - RNA, 1607 nt, Artificial Sequence
  mRNA product Design a-1 (A100) comprising derived and/or modified sequence from LASV(Nig08-A19;Clade III)__ADU56618__GPCmut13 (opt1)
aggagagucccgcagucggcguccagcggcucugcuuguucgugugugugucguugcaggccuuauucaagcuuaccaugggccagaucgugaccuucuuccaggaggucccccacgugaucgaggaggugaugaacaucguccugaucgcccucagcauccuggccauccugaaggggcucuacaacaucgcgaccugcggccugaucgggcuggugacguuccuccugcuguccggccgcagcugcuccaugaccuacaaggggguguacgagcuccagacccuggagcugaacaugaacacccucaacaugacgaugccgcugagcugcaccaagaacaacucccaccacuacaucauggucggcaacgagaccggccuggagcucacccugacgaacaccagccugcuccaccacaaguucugcaaccuguccgacgcccacaagaagaaccuguacgaccacacccucaugagcaucaucuccaccuuccaccugagcauccccaacuucaaccaguacgaggccauguccugcgacuucaacgggggcaagaucacggugcaguacaaccugagccacuccuacgccaucgacgccgcgaaccacugcgggaccguggccaacggcguccuccagaccuucaugcggauggccuggggcgggagcuacaucgcccuggacuccggccgcgggaagugggacugcaucaugaccagcuaccaguaccugaucauccagaacacgaccugggaggaccacugccaguucucccggcccagccccaucggcuaccucgggcugcugucccagcgcacccgggacaucuacaucagccgccggcuccugggcaccuucacguggacccugagcgacuccgagggcaacgagacccccgggggcuacugccucacccgcuggaugcugaucgaggcggagcugaagugcuucgggaacacggccguggccaagugcaacgagaagcacgacgaggaguucugcgacaugcuccggcuguucgacuucaacaagcaggccauccgccggcugaaggccgaggcgcagaugagcauccagcucaucaacaaggccgugaacgcccugaucaacgaccagcugaucaugaagaaccaccuccgcgacaucaugggcauccccuacugcaacuacuccaaguacugguaccugaaccacaccagcaccgggcggaccucccugccccgcugcuggcucgucagcaacggcuccuaccugaacgagacgcacuucagcgacgacaucgagcagcaggccgacaacaugaucaccgagaugcugcagaaggaguaccuggaccggcagggcaagaccccgcucgggcugguggaccuguucguguucuccaccagcuucuaccucaucuccaucuuccugcaccuggucaagaucccgugaggacuagucccuguucccagagcccacuuuuuuuucuuuuuuugaaauaaaauagccugucuuucagaucuaaaaaaaaaaaaaaaaaaaaaaaaaaaaaaaaaaaaaaaaaaaaaaaaaaaaaaaaaaaaaaaaaaaaaaaaaaaaaaaaaaaaaaaaaaaaaaaaaaaa

SEQ ID NO: 42075 - RNA, 1610 nt, Artificial Sequence
  mRNA product Design a-1 (A100) comprising derived and/or modified sequence from LASV(G1180-SLE-2010;Clade IV)__AIT17168__GPCmut13 (opt1)
aggagagucccgcagucggcguccagcggcucugcuuguucgugugugugucguugcaggccuuauucaagcuuaccaugggccagaucgugaccuucuuccaggaggucccccacgugaucgaggaggugaugaacaucguccugaucgcccucagcauccuggccgugcugaaggggcucuacaacuucgcgaccugcggccugguggggcugcucaccuuccugcugcucugcggccgcuccugcaccgccagccgguacaagggggucuacgagcugcagacccuggagcucaacauggagacccugaacaugacgaugccgcuguccugcaccaagaacaacagccaccacuacaucauggugggcaacgagaccggccucgagcugacccugacgaacaccuccaucaucaaccacaaguucugcaaccucagcgacgcccacaagaagaaccuguacgaccacgcccugauguccaucaucagcaccuuccaccucuccauccccaacuucaaccaguacgaggccaugagcugcgacuucaacgggggcaagaucuccgugcaguacaaccugagccacuccuacgcgggggacgccgccaaccacugcggcaccgucgccaacggggugcugcagacguucaugcgcauggcguggggcggcagcuacaucgcccucgacuccgggcacggcagcugggacugcaucaugaccuccuaccaguaccugaucauccagaacaccaccugggaggaccacugccaguucagccggcccucccccaucggguaccugggccuccugagccagcgcacgcgggacaucuacaucagccgccggcugcucggcaccuucaccuggacccuguccgacagcgaggggaaggacacgccgggcggguacugccugacccgcuggaugcucaucgaggccgagcugaagugcuucggcaacaccgccguggccaagugcaacgagaagcacgacgaggaguucugcgacaugcugcggcuguucgacuucaacaagcaggcgauccagcgccugaaggccgaggcccagauguccauccagcugaucaacaaggccgucaacgcccucaucaacgaccagcugaucaugaagaaccaccuccgggacaucauggggauccccuacugcaacuacagcaaguacugguaccucaaccacaccacgaccggcaagaccucccugcccaagugcuggcuggugagcaacggcuccuaccucaacgagacccacuucagcgacgacaucgagcagcaggcggacaacaugaucacggagaugcugcagaaggaguacauggagcgccaggggaagacgccccugggccugguggaccucuucgucuucuccaccagcuucuaccugaucuccaucuuccugcaccucgugaagaucccgugaggacuagucccuguucccagagcccacuuuuuuuucuuuuuuugaaauaaaauagccugucuuucagaucuaaaaaaaaaaaaaaaaaaaaaaaaaaaaaaaaaaaaaaaaaaaaaaaaaaaaaaaaaaaaaaaaaaaaaaaaaaaaaaaaaaaaaaaaaaaaaaaaaaaa

SEQ ID NO: 42076 - RNA, 1610 nt, Artificial Sequence
  mRNA product Design a-1 (A100) comprising derived and/or modified sequence from LASV(G1442-SLE-2011;Clade IV)__AIT17180__GPCmut13 (opt1)
aggagagucccgcagucggcguccagcggcucugcuuguucgugugugugucguugcaggccuuauucaagcuuaccaugggccagaucgugaccuucuuccaggaggucccccacgugaucgaggaggugaugaacaucguccugaucgcccucagcauccuggccgugcugaaggggcucuacaacguggcgaccugcggccugaucgggcuggucacguuccuccugcugugcggccgcuccugcaccaccacccucuacaaggggguguacgagcugcagacgcuggagcucaacauggagacccugaacaugaccaugccgcugagcugcaccaagaacaacucccaccacuacauccgggugggcaacgagacgggccucgagcugacccugaccaacaccagcaucaucaaccacaaguucugcaaccucuccgacgcccacaagaagaaccuguacgaccacgcccugaugagcaucaucuccacguuccaccucagcauccccaacuucaaccaguacgaggccauguccugcgacuucaacgggggcaagaucagcguccaguacaaccugucccacagcuacgccggggacgcggccaaccacugcggcaccguggccaacggggugcugcagaccuucaugcgcauggccuggggcggcuccuacaucgcgcucgacagcgggcggggcaacugggacugcaucaugaccuccuaccaguaccugaucauccagaacacgaccugggacgaccacugccaguucagccgccccucccccaucggguaccugggccuccugagccagcggacccgcgacgucuacaucucccggcgccugcucggcaccuucacguggacccugagcgacagcgaggggaaggacaccccgggcggguacugccugacccgguggaugcucaucgaggccgagcugaagugcuucggcaacacggccguggccaagugcaacgagaagcacgacgaggaguucugcgacaugcugcgccucuucgacuucaacaagcaggccauccagcggcugaaggcggaggcccagauguccauccagcugaucaacaaggccgugaacgcccucaucaacgaccagcugaucaugaagaaccaccuccgcgacaucauggggauccccuacugcaacuacagcaaguacugguaccugaacaacaccgccaccggcaagaccucccugcccaagugcuggcugaucagcaacggcuccuaccucaacgagacgcacuucagcgacgacaucgagcaggaggcggacaacaugaucaccgagaugcugcagaaggaguacauggagcggcaggggaagacgccccugggccuggucgaccucuucguguucuccaccagcuucuaccugaucuccaucuuccugcaccucgugaagaucccgugaggacuagucccuguucccagagcccacuuuuuuuucuuuuuuugaaauaaaauagccugucuuucagaucuaaaaaaaaaaaaaaaaaaaaaaaaaaaaaaaaaaaaaaaaaaaaaaaaaaaaaaaaaaaaaaaaaaaaaaaaaaaaaaaaaaaaaaaaaaaaaaaaaaaa

SEQ ID NO: 42077 - RNA, 1610 nt, Artificial Sequence
  mRNA product Design a-1 (A100) comprising derived and/or modified sequence from LASV(G3010-SLE-2013;Clade IV)__AIT17344__GPCmut13 (opt1)
aggagagucccgcagucggcguccagcggcucugcuuguucgugugugugucguugcaggccuuauucaagcuuaccaugggccagaucgugaccuucuuccaggaggucccccacgugaucgaggaggugaugaacaucguccugaucgcccucagcauccuggccgugcugaaggggcucuacaacuucgcgaccugcggccugguggggcuggucacguuccuccugcugugcggccgcuccugcaccaccagccucuacaaggggguguacgagcugcagacccuggagcucaacauggagacgcugaacaugaccaugccgcuguccugcaccaagaacaacagccaccacuacaucauggugggcaacgagaccggccucgagcugacgcugaccaacaccuccaucaucaaccacaaguucugcaaccucagcgacgcccacaagaagaaccuguacaaccacgcccugauguccaucaucagcaccuuccaccucuccauccccaacuucaaccaguacgaggccaugagcugcgacuucaacgggggcaagaucuccguccaguacaaccugagccacuccuacgccggggacgcggccagccacugcggcacgguggccaacggggugcugcagaccuucaugcggauggccuggggcggcuccuacaucgcgcucgacagcggguacggcaagugggacugcaucaugaccuccuaccaguaccugaucauccagaacaccacgugggaggaccacugccaguucagccgccccucccccaucggguaccugggccuccugagccagcggacccgcgacaucuacaucagccggcgccugcucggcaccuucaccuggacgcuguccgacagcgaggggaaggacaccccgggcggguacugccugacccgguggaugcucaucgaggccgagcugaagugcuucggcaacaccgccgucgccaagugcaacgagaagcacgacgaggaguucugcgacaugcugcgccucuucgacuucaacaagcaggccauccagcggcugaagacggaggcgcagauguccauccagcugaucaacaaggccgugaacgcccucaucaacgaccagcugaucaugaagaaccaccuccgcgacaucauggggauccccuacugcaacuacagcaaguacugguaccugaaccacaccaccaccggcaagacgucccugcccaagugcuggcuggugagcaacggcuccuaccucaacgagacccacuucagcgacgacaucgagcagcaggccgacaacaugaucaccgagaugcugcagaaggaguacauggagcggcaggggaagacgccccugggccuggucgaccucuucguguucuccaccagcuucuaccugaucuccaucuuccugcaccucgugaagaucccgugaggacuagucccuguucccagagcccacuuuuuuuucuuuuuuugaaauaaaauagccugucuuucagaucuaaaaaaaaaaaaaaaaaaaaaaaaaaaaaaaaaaaaaaaaaaaaaaaaaaaaaaaaaaaaaaaaaaaaaaaaaaaaaaaaaaaaaaaaaaaaaaaaaaaa

SEQ ID NO: 42078 - RNA, 1610 nt, Artificial Sequence
  mRNA product Design a-1 (A100) comprising derived and/or modified sequence from LASV(G502-SLE-2009;Clade IV)__AIT17126__GPCmut13 (opt1)
aggagagucccgcagucggcguccagcggcucugcuuguucgugugugugucguugcaggccuuauucaagcuuaccaugggccagaucgugaccuucuuccaggaggucccccacgugaucgaggaggugaugaacaucguccugaucgcccucagcauccuggccgugcugaaggggcucuacaacuucgcgaccugcggccugguggggcugcucacguuccugcugcucugcggccgcuccugcaccaccgggcuguacaagggcgucuacgagcugcagacccucgagcugaacauggagacgcugaacaugaccaugccgcucagcugcaccaagaacaacucccaccacuacaucauggugggcaacgagaccgggcuggagcugacgcucaccaacaccagcaucaucaaccacaaguucugcaaccuguccgacgcccacaagaagaaccuguacgaccacgcccucaugagcaucaucuccaccuuccaccugagcauccccaacuucaaccaguacgaggccauguccugcgacuucaacggcgggaagaucagcgugcaguacaaccugucccacagcuacgccggcgacgcggccgaccacugcgggacggucgccaacggcgugcuccagaccuucaugcggauggccuggggcggguccuacaucgcgcuggacagcggccgcgggcggugggacugcaucaugaccuccuaccaguaccugaucauccagaacaccacgugggaggaccacugccaguucagccgccccucccccaucggcuaccucggccugcugagccagcggacccgcgacaucuacaucucccggcgccuccuggggaccuucaccuggacgcugagcgacagcgagggcaaggacacccccgggggcuacugccucacccgguggaugcugaucgaggccgagcugaagugcuucgggaacaccgccguggccaagugcaacgagaagcacgacgaggaguucugcgacaugcuccgccuguucgacuucaacaagcaggccauccagcggcugaaggcggaggcccagauguccauccagcucaucaacaaggccgucaacgcccugaucaacgaccagcuggugaugaagaaccaccuccgcgacaucaugggcauccccuacugcaacuacagccgguacugguaccugaaccacacgaccaccggccgcaccucccugcccaagugcuggcucgugagcaacggguccuaccugaacgagacgcacuucagcgacgacaucgagcagcaggccgacaacaugaucaccgagaugcugcagaaggaguacauggagcggcagggcaagaccccgcuggggcucgucgaccuguucguguucuccaccagcuucuaccugaucuccaucuuccuccaccuggugaagaucccgugaggacuagucccuguucccagagcccacuuuuuuuucuuuuuuugaaauaaaauagccugucuuucagaucuaaaaaaaaaaaaaaaaaaaaaaaaaaaaaaaaaaaaaaaaaaaaaaaaaaaaaaaaaaaaaaaaaaaaaaaaaaaaaaaaaaaaaaaaaaaaaaaaaaaa

SEQ ID NO: 42079 - RNA, 1610 nt, Artificial Sequence
  mRNA product Design a-1 (A100) comprising derived and/or modified sequence from LASV(G733-SLE-2010;Clade IV)__AIT17154__GPCmut13 (opt1)
aggagagucccgcagucggcguccagcggcucugcuuguucgugugugugucguugcaggccuuauucaagcuuaccaugggccagaucgugaccuucuuccaggaggucccccacgugaucgaggaggugaugaacaucguccugaucgcccucagcauccuggccgugcugaaggggcucuacaacuucgcgaccugcggcaucguggggcuggucuccuuccugcuccugugcggccgcagcugcacgaccucccuguacaaggggguguacgagcuccagacccuggagcugaacauggagacccucaacaugacgaugccgcugagcugcaccaagaacaacucccaccacuacaucauggugggcaacgagaccggccuggagcucacccugacgaacaccagcaucaucaaccacaaguucugcaaccuguccgacgcccacaagaagaaccucuacgaccacgcccugaugagcaucaucuccaccuuccaccugagcauccccaacuucaaccaguacgaggccauguccugcgacuucaacgggggcaagaucagcguccaguacaaccucucccacagcuacgccggggacgcggccaaccacugcggcaccaucgccaacggggugcugcagacguucaugcggauggccuggggcggcuccuacaucgcgcuggacagcgggcgcgaccggugggacugcaucaugaccuccuaccaguaccucaucauccagaacaccaccugggaggaccacugccaguucagccgccccucccccaucggcuaccuggggcugcucagccagcggacgcgcgacaucuacaucagccggcgccugcugggcaccuucaccuggacccucuccgacagcgagggcaaggacacgcccgggggcuacugccugacccgguggaugcugaucgaggccgagcucaagugcuucgggaacaccgccguggccaagugcaacgagaagcacgacgaggaguucugcgacaugcugcgccuguucgacuucaacaagcaggccauccagcggcucaaggcggaggcccagauguccauccagcugaucaacaaggccgucaacgcccugaucaacgaccagcucaucaugaagaaccaccuccgcgacaucaugggcauccccuacugcaacuacagcaaguacugguaccugaaccacaccacgaccgggaagaccucccugcccaagugcuggcuggugagcaacggcuccuaccugaacgagacccacuucagcgacgacaucgagcagcaggccgacaacaugaucacggagaugcuccagaaggaguacauggagcggcagggcaagaccccgcuggggcugguggaccuguucgucuucuccaccagcuucuaccucaucuccaucuuccugcaccuggugaagaucccgugaggacuagucccuguucccagagcccacuuuuuuuucuuuuuuugaaauaaaauagccugucuuucagaucuaaaaaaaaaaaaaaaaaaaaaaaaaaaaaaaaaaaaaaaaaaaaaaaaaaaaaaaaaaaaaaaaaaaaaaaaaaaaaaaaaaaaaaaaaaaaaaaaaaaa

SEQ ID NO: 42080 - RNA, 1610 nt, Artificial Sequence
  mRNA product Design a-1 (A100) comprising derived and/or modified sequence from MOPV/LASV reassortant(IGS-1;Clade IV)__AFY05576__GPCmut13 (opt1)
aggagagucccgcagucggcguccagcggcucugcuuguucgugugugugucguugcaggccuuauucaagcuuaccaugggccagaucgugaccuucuuccaggaggucccccacgugaucgaggaggugaugaacaucguccugaucgcccucagcgugcuggccgugcugaaggggcucuacaacuucgcgaccugcggccuggucgggcuggugacguuccuccugcugugcggccgcuccugcaccaccagccucuacaaggggguguacgagcugcagacccuggagcucaacauggagacgcugaacaugaccaugccgcuguccugcaccaagaacaacagccaccacuacaucauggucggcaacgagaccggccucgagcugacgcugaccaacaccuccaucaucaaccacaaguucugcaaccucagcgacgcccacaagaagaaccuguacgaccacgcccugauguccaucaucagcaccuuccaccucuccauccccaacuucaaccaguacgaggccaugagcugcgacuucaacgggggcaagaucuccgugcaguacaaccugagccacuccuacgccggggacgcggccaaccacugcggcacgguggccaacgggguccugcagaccuucaugcggauggccuggggcggcagcuacaucgcgcucgacuccgggcgcggcaacugggacugcaucaugaccagcuaccaguaccugaucauccagaacaccacgugggaggaccacugccaguucucccggcccagccccaucggguaccugggccuccugucccagcgcacccgggacaucuacaucagccgccggcugcucggcaccuucaccuggacgcugagcgacuccgagggggaggacaccccgggcggguacugccugacccgcuggaugcucaucgaggccgagcugaagugcuucggcaacaccgccguggccaagugcaacgagaagcacgacgaggaguucugcgacaugcugcggcuguucgacuucaacaagcaggccauccagcgccugaaggcggaggcccagaugagcauccagcugaucaacaaggccgugaacgcccucaucaacgaccagcugaucaugaagaaccaccuccgggacaucauggggauccccuacugcaacuacuccaaguacugguaccucaaccacacgaccaccggccgcaccagccugcccaagugcuggcuggucuccaacggcagcuaccucaacgagacgcacuucuccgacgacaucgagcagcaggccgacaacaugaucaccgagaugcugcagaaggaguacauggagcggcaggggaagacgccccugggccugguggaccucuucguguucagcaccuccuucuaccugaucagcaucuuccugcaccucgucaagaucccgugaggacuagucccuguucccagagcccacuuuuuuuucuuuuuuugaaauaaaauagccugucuuucagaucuaaaaaaaaaaaaaaaaaaaaaaaaaaaaaaaaaaaaaaaaaaaaaaaaaaaaaaaaaaaaaaaaaaaaaaaaaaaaaaaaaaaaaaaaaaaaaaaaaaaa

SEQ ID NO: 42081 - RNA, 1610 nt, Artificial Sequence
  mRNA product Design a-1 (A100) comprising derived and/or modified sequence from LASV(LM765-SLE-2012;Clade IV)__AIT17814__GPCmut13 (opt1)
aggagagucccgcagucggcguccagcggcucugcuuguucgugugugugucguugcaggccuuauucaagcuuaccaugggccagaucgugaccuucuuccaggaggucccccacgugaucgaggaggugaugaacaucguccugaucgcccucagcauccuggccgugcugaaggggcucuacaacuucgcgaccugcggccugguggggcuggucacguuccuccugcugugcggccgcuccugcaccaccagccucuacaaggggguguacgagcugcagacccuggagcucaacauggagacgcugaacaugaccaugccgcuguccugcaccaagaacaacagccaccacuacaucauggugggcaacgagaccggccucgagcugacgcugaccaacaccuccaucaucgaccacaaguucugcaaccucagcgacgcccaccggaagaaccuguacgaccacgcccugauguccaucaucagcaccuuccaccucuccauccccaacuucaaccaguacgaggccaugagcugcgacuucaacgggggcaagaucuccguccaguacaaccugagccacuccuacgccaaggacgcggccgaccacugcgggacgguggccaacggcgugcugcagaccuucaugcgcauggccuggggcgggagcuacaucgcgcucgacuccggccgggggcgcugggacugcaucaugaccagcuaccaguaccugaucauccagaacaccacgugggaggaccacugccaguucucccggcccagccccaucggcuaccuggggcuccugucccagcgcacccgggacaucuacaucagccgccggcugcucggcaccuucaccuggacgcugagcgacuccgagggcaaggacacccccgggggcuacugccugacccgcuggaugcucaucgaggccgagcugaagugcuucgggaacaccgccgucgccaagugcaacgagaagcacgacgaggaguucugcgacaugcugcggcuguucgacuucaacaagcaggccauccagcgccugaaggcggaggcccagaugagcauccagcugaucaacaaggccgugaacgcccucaucaacgaccagcugaucaugaagaaccaccuccgggacaucaugggcauccccuacugcaacuacuccaaguacugguaccucaaccacacgaccaccgggaagaccagccugcccaagugcuggcugguguccaacggcagcuaccucaacgagacgcacuucuccgacgacaucgagcagcaggccgacaacaugaucaccgagaugcugcagaaggaguacauggagcgccagggcaagaccccgcuggggcuggucgaccucuucguguucagcaccuccuucuaccugaucagcaucuuccugcaccucgugaagaucccgugaggacuagucccuguucccagagcccacuuuuuuuucuuuuuuugaaauaaaauagccugucuuucagaucuaaaaaaaaaaaaaaaaaaaaaaaaaaaaaaaaaaaaaaaaaaaaaaaaaaaaaaaaaaaaaaaaaaaaaaaaaaaaaaaaaaaaaaaaaaaaaaaaaaaa

SEQ ID NO: 42082 - RNA, 1610 nt, Artificial Sequence
  mRNA product Design a-1 (A100) comprising derived and/or modified sequence from LASV(LM776-SLE-2012;Clade IV)__AIT17824__GPCmut13 (opt1)
aggagagucccgcagucggcguccagcggcucugcuuguucgugugugugucguugcaggccuuauucaagcuuaccaugggccagaucgugaccuucuuccaggaggucccccacgugaucgaggaggugaugaacaucguccugaucgcccucagcauccuggccgugcugaaggggcucuacaacuucgcgaccugcggccugguggggcuggucacguuccuccugcugugcggccgcuccugcaccaccagcguguacaaggggguguacgagcuccagacccuggagcugaacauggagacgcucaacaugaccaugccgcuguccugcaccaagaacaacagccaccacuacaucauggucggcaacgagaccggccuggagcucacgcugaccaacaccuccaucaucaaccacaaguucugcaaccugagcgacgcccacaagaagaaccucuacgaccacgcccugauguccaucaucagcaccuuccaccuguccauccccaacuucaaccaguacgaggccaugagcugcgacuucaacgggggcaagaucuccgugcaguacaaccucagccacuccuacgccggggacgcggccaaccacugcggcacgguggccaacgggguccugcagaccuucaugcggauggccuggggcggcagcuacaucgcgcuggacuccgggcacggcaagugggacugcaucaugaccagcuaccaguaccucaucauccagaacaccacgugggaggaccacugccaguucucccgccccagccccaucggguaccugggccugcucucccagcggacccgcgacaucuacaucagccggcgccugcugggcaccuucaccuggacgcucagcgacuccgaggggaaggacaccccgggcggguacugccugacccgguggaugcugaucgaggccgagcucaagugcuucggcaacaccgccguggccaagugcaacgagaagcacgacgaggaguucugcgacaugcugcgccuguucgacuucaacaagcaggccauccagcggcucaaggcggaggcccagaugagcauccagcugaucaacaaggccgugaacgcccugaucaacgaccagcucaucaugaagaaccaccuccgcgacaucauggggauccccuacugcaacuacuccaaguacugguaccugaaccacacgaccaccggcaagaccagccugcccaagugcuggcuggucuccaacggcagcuaccugaacgagacgcacuucuccgacgacaucgagcagcaggccgacaacaugaucaccgagaugcuccagaaggaguacauggagcggcaggggaagacgccccugggccugguggaccuguucguguucagcaccuccuucuaccucaucagcaucuuccugcaccuggucaagaucccgugaggacuagucccuguucccagagcccacuuuuuuuucuuuuuuugaaauaaaauagccugucuuucagaucuaaaaaaaaaaaaaaaaaaaaaaaaaaaaaaaaaaaaaaaaaaaaaaaaaaaaaaaaaaaaaaaaaaaaaaaaaaaaaaaaaaaaaaaaaaaaaaaaaaaa

SEQ ID NO: 42083 - RNA, 1610 nt, Artificial Sequence
  mRNA product Design a-1 (A100) comprising derived and/or modified sequence from LASV(Mad39;Clade IV)__ANH09722__GPCmut13 (opt1)
aggagagucccgcagucggcguccagcggcucugcuuguucgugugugugucguugcaggccuuauucaagcuuaccaugggccagaucgugaccuucuuccaggaggucccccacgugaucgaggaggugaugaacaucguccugaucgcccucagcauccuggccgugcugaaggggcucuacaacguggcgaccugcggccugaucgggcuggucacguuccuccugcugugcggccgcuccugcaccaccacccucuacaaggggguguacgagcugcaggcccuggagcucaacauggagacgcugaacaugaccaugccgcugagcugcaccaagaacaacucccaccacuacauccgggugggcaacgagaccggccucgagcugacgcugaccaacaccagccucaucaaccacaaguucugcaaccuguccgacgcccacaagaagaaccuguacgaccacgcccucaugagcaucaucuccaccuuccaccugagcauccccaacuucaaccaguacgaggccauguccugcgacuucaacgacgggaagaucagcguccaguacaaccugucccacacguacgcgggcgacaccgccaaccacugcgggaccguggccaacggcgugcuccagaccuucaugcgcauggccuggggcgggagcuacaucgcgcuggacuccggccgcgggggcugggacugcaucaugacgagcuaccaguaccugaucauccagaacaccaccugggaggaccacugccaguucucccggcccagccccaucggguaccucggccugcugucccagcggacccgcgacaucuacaucagccggcgccuccugggcacguucaccuggacccuguccgacagcgaggggaaggacaccccgggcggguacugccucacgcgguggaugcugaucgaggccgagcugaagugcuucggcaacaccgccgucgccaagugcaacgagaagcacgacgaggaguucugcgacaugcuccgccuguucgacuucaacaagcaggccauccagcggcugaaggcggaggcccagaugagcauccagcucaucaacaaggccgugaacgcccugaucaacgaccagcugaucaugaagaaccaccuccgcgacaucauggggauccccuacugcaacuacuccaaguacugguaccugaaccacaccgugaccggcaagacgagccugcccaagugcuggcucgucuccaacggcagcuaccugaacgagacccacuucuccgacgacaucgagcagcaggccgacaacaugaucaccgagaugcugcagaaggaguacauggagcggcaggggaagacgccccugggccucguggaccuguucguguucagcaccuccuucuaccugaucagcaucuuccuccaccuggucaagaucccgugaggacuagucccuguucccagagcccacuuuuuuuucuuuuuuugaaauaaaauagccugucuuucagaucuaaaaaaaaaaaaaaaaaaaaaaaaaaaaaaaaaaaaaaaaaaaaaaaaaaaaaaaaaaaaaaaaaaaaaaaaaaaaaaaaaaaaaaaaaaaaaaaaaaaa

SEQ ID NO: 42084 - RNA, 1610 nt, Artificial Sequence
  mRNA product Design a-1 (A100) comprising derived and/or modified sequence from LASV(Z0947-SLE-2011;Clade IV)__AIT17840__GPCmut13 (opt1)
aggagagucccgcagucggcguccagcggcucugcuuguucgugugugugucguugcaggccuuauucaagcuuaccaugggccagaucgugaccuucuuccaggaggucccccacgugaucgaggaggugaugaacaucguccugaucgcccucagcauccuggccgugcugaaggggcucuacaacuucgcgaccugcggccugguggggcuggucacguuccuccugcugugcggccgcuccugcaccaucagccucuacaaggggguguacgagcugcagacccuggagcucaacauggagacccugaacaugacgaugccgcuguccugcaccaagaacaacagccaccacuacaucauggugggcaacgagaccggccucgagcugacccugacgaacaccuccaucaucaaccacaaguucugcaaccucagcgacgcccacaagaagaaccuguacgaccacgcccugauguccaucaucagcaccuuccaccucuccauccccaacuucaaccaguacgaggccaugagcugcgacuucaacgggggcaagaucuccguccaguacaaccugagccacuccuacgccggggacgcggccaaccacugcggcaccguggccaacggggugcugcagacguucaugcggauggccuggggcggcagcuacaucgcgcucgacuccgggcgcgaccggugggacugcaucaugaccagcuaccaguaccugaucauccagaacaccaccugggaggaccacugccaguucucccgccccagccccaucggcuaccuggggcuccugucccagcggacgcgcgacaucuacaucagccggcgccugcucggcaccuucaccuggacccugagcgacuccgagggcaaggacacgcccgggggcuacugccugacccgguggaugcucaucgaggccgagcugaagugcuucgggaacaccgccgucgccaagugcaacgagaagcacgacgaggaguucugcgacaugcugcgccucuucgacuucaacaagcaggccauccagcggcugaaggcggaggcccagaugagcauccagcugaucaacaaggccgugaacgcccucaucaacgaccagcugaucaugaagaaccaccuccgcgacaucaugggcauccccuacugcaacuacuccaaguacugguaccugaaccacaccacgaccgggaagaccagccugcccaagugcuggcugguguccaacggcagcuaccucaacgagacccacuucuccgacgacaucgagcagcaggccgacaacaugaucacggagaugcugcagaaggaguacauggagcggcagggcaagaccccgcuggggcuggucgaccucuucguguucagcaccuccuucuaccugaucagcaucuuccugcaccucgugaagaucccgugaggacuagucccuguucccagagcccacuuuuuuuucuuuuuuugaaauaaaauagccugucuuucagaucuaaaaaaaaaaaaaaaaaaaaaaaaaaaaaaaaaaaaaaaaaaaaaaaaaaaaaaaaaaaaaaaaaaaaaaaaaaaaaaaaaaaaaaaaaaaaaaaaaaaa

SEQ ID NO: 42085 - RNA, 1610 nt, Artificial Sequence
  mRNA product Design a-1 (A100) comprising derived and/or modified sequence from LASV(Josiah;Clade IV)__NP_694870__GPCmut13 (opt4)
aggagagucccgcagucggcguccagcggcucugcuuguucgugugugugucguugcaggccuuauucaagcuuaccaugggccagaucgugaccuucuuccaggaggugccccacgugaucgaggaggugaugaacaucgugcugaucgcccugagcgugcuggccgugcugaagggccuguacaacuucgccaccugcggccuggugggccuggugaccuuccugcugcugugcggcagaagcugcaccaccagccuguacaagggcguguacgagcugcagacccuggagcugaacauggagacccugaacaugaccaugccccugagcugcaccaagaacaacagccaccacuacaucauggugggcaacgagaccggccuggagcugacccugaccaacaccagcaucaucaaccacaaguucugcaaccugagcgacgcccacaagaagaaccuguacgaccacgcccugaugagcaucaucagcaccuuccaccugagcauccccaacuucaaccaguacgaggccaugagcugcgacuucaacggcggcaagaucagcgugcaguacaaccugagccacagcuacgccggcgacgccgccaaccacugcggcaccguggccaacggcgugcugcagaccuucaugagaauggccuggggcggcagcuacaucgcccuggacagcggcagaggcaacugggacugcaucaugaccagcuaccaguaccugaucauccagaacaccaccugggaggaccacugccaguucagcagacccagccccaucggcuaccugggccugcugagccagagaaccagagacaucuacaucagcagaagacugcugggcaccuucaccuggacccugagcgacagcgagggcaaggacacccccggcggcuacugccugaccagauggaugcugaucgaggccgagcugaagugcuucggcaacaccgccguggccaagugcaacgagaagcacgacgaggaguucugcgacaugcugagacuguucgacuucaacaagcaggccauccagagacugaaggccgaggcccagaugagcauccagcugaucaacaaggccgugaacgcccugaucaacgaccagcugaucaugaagaaccaccugagagacaucaugggcauccccuacugcaacuacagcaaguacugguaccugaaccacaccaccaccggcagaaccagccugcccaagugcuggcuggugagcaacggcagcuaccugaacgagacccacuucagcgacgacaucgagcagcaggccgacaacaugaucaccgagaugcugcagaaggaguacauggagagacagggcaagaccccccugggccugguggaccuguucguguucagcaccagcuucuaccugaucagcaucuuccugcaccuggugaagauccccugaggacuagucccuguucccagagcccacuuuuuuuucuuuuuuugaaauaaaauagccugucuuucagaucuaaaaaaaaaaaaaaaaaaaaaaaaaaaaaaaaaaaaaaaaaaaaaaaaaaaaaaaaaaaaaaaaaaaaaaaaaaaaaaaaaaaaaaaaaaaaaaaaaaaa

SEQ ID NO: 42086 - RNA, 1607 nt, Artificial Sequence
  mRNA product Design a-1 (A100) comprising derived and/or modified sequence from LASV(LP;Clade I)__AAF86701__GPCmut13 (opt4)
aggagagucccgcagucggcguccagcggcucugcuuguucgugugugugucguugcaggccuuauucaagcuuaccaugggccagaucaucaccuucuuccaggaggugccccacgugaucgaggaggugaugaacaucgugcugaucgcccugagccugcuggccauccugaagggccuguacaacaucgccaccugcggcaucaucggccugguggccuuccuguuccugugcggcaagagcugcagccugacccugaagggcggcuacgagcugcagacccuggagcugaacauggagacccugaacaugaccaugccccugagcugcaccaagaacagcagccaccacuacaucagagugggcaacgagaccggccuggagcugacccugaccaacaccagcaucaucaaccacaaguucugcaaccugagcgacgcccacaagaagaaccuguacgaccacgcccugaugagcaucaucagcaccuuccaccugagcauccccaacuucaaccaguacgaggccaugagcugcgacuucaacggcggcaagaucagcgugcaguacaaccugagccacagcuacgccggcgacgccgccgagcacugcggcaccguggccaacggcgugcugcagaccuucaugagaauggccuggggcggcagauacaucgcccuggacagcggcaagggcaacugggacugcaucaugaccagcuaccaguaccugaucauccagaacaccaccugggaggaccacugccaguucagcagacccagccccaucggcuaccugggccugcugagccagagaaccagagacaucuacaucagcagaagacugcugggcaccuucaccuggacccugagcgacagcgagggcaacgagacccccggcggcuacugccugaccagauggaugcugaucgaggccgagcugaagugcuucggcaacaccgccguggccaagugcaacgagaagcacgacgaggaguucugcgacaugcugagacuguucgacuucaacaagcaggccaucagaagacugaaggccgaggcccagaugagcauccagcugaucaacaaggccgugaacgcccugaucaacgaccagcugaucaugaagaaccaccugagagacaucaugggcauccccuacugcaacuacagcaaguacugguaccugaaccacaccagcagcggcagaaccagccugcccaagugcuggcugaucagcaacggcagcuaccugaacgagacccaguucagcgacgacaucgagcagcaggccgacaacaugaucaccgagaugcugcagaaggaguacaucgagagacagggcaagaccccccugggccugguggacaucuucaucuucagcaccagcuucuaccugaucagcaucuuccugcaccugaucaagauccccugaggacuagucccuguucccagagcccacuuuuuuuucuuuuuuugaaauaaaauagccugucuuucagaucuaaaaaaaaaaaaaaaaaaaaaaaaaaaaaaaaaaaaaaaaaaaaaaaaaaaaaaaaaaaaaaaaaaaaaaaaaaaaaaaaaaaaaaaaaaaaaaaaaaaa

SEQ ID NO: 42087 - RNA, 1607 nt, Artificial Sequence
  mRNA product Design a-1 (A100) comprising derived and/or modified sequence from LASV(803213;Clade II)__AAF86703__GPCmut13 (opt4)
aggagagucccgcagucggcguccagcggcucugcuuguucgugugugugucguugcaggccuuauucaagcuuaccaugggccagaucaucaccuucuuccaggaggugccccacgugaucgaggaggugaugaacaucgugcugaucgcccugagccugcuggccauccugaagggcaucuacaacguggccaccugcggccuguucggccugaucagcuuccugcugcugugcggcagaagcugcagcgugaccuacaagggcguguacgagcugcagacccuggagcugaacauggccaaccugaacaugaccaugccccugagcugcaccaagaacaacagccaccacuacaucauggugggcaacgagaccggccuggagcugacccugaccaacaccagcaucaucaaccacaaguucugcaaccugagcgacgcccacaagaagaaccuguacgaccacgcccugaugagcaucaucagcaccuuccaccugagcauccccaacuucaaccaguacgaggccaugagcugcgacuucaacggcggcaagaucagcgugcaguacaaccugagccacagcuucgccguggacgccgccaaccacugcggcaccaucgccaacggcgugcugcagaccuucaugagaauggccuggggcggcagcuacaucgcccuggacagcggcaagggcaacugggacugcaucaugaccagcuaccaguaccugaucauccagaacaccaccugggaggaccacugccaguucagcagacccagccccaucggcuaccugggccugcugagccagagaaccagagacaucuacaucagcagaagacugcugggcaccuucaccuggacccugagcgacagcgagggcaacgaggcccccggcggcuacugccugaccagauggaugcugaucgaggccgagcugaagugcuucggcaacaccgccguggccaagugcaacgagaagcacgacgaggaguucugcgacaugcugagacuguucgacuucaacaagcaggccaucaagagacugaagaccgaggcccagaugagcauccagcugaucaacaaggccgugaacgcccugaucaacgaccagcugaucaugaagaaccaccugagagacaucaugggcauccccuacugcaacuacagcagauacugguaccugaaccacaccgugaccggcaagaccagccugcccagaugcuggcuggugagcaacggcagcuaccugaacgagacccacuucagcgacgacaucgagcagcaggccgacaacaugaucaccgagaugcugcagaaggaguacauggacagacagggcaagaccccccugggccugguggaccuguucguguucagcaccagcuucuaccugaucagcaucuuccugcaccuggugaagauccccugaggacuagucccuguucccagagcccacuuuuuuuucuuuuuuugaaauaaaauagccugucuuucagaucuaaaaaaaaaaaaaaaaaaaaaaaaaaaaaaaaaaaaaaaaaaaaaaaaaaaaaaaaaaaaaaaaaaaaaaaaaaaaaaaaaaaaaaaaaaaaaaaaaaaa

SEQ ID NO: 42088 - RNA, 1607 nt, Artificial Sequence
  mRNA product Design a-1 (A100) comprising derived and/or modified sequence from LASV(GA391;Clade III)__CAA36645__GPCmut13 (opt4)
aggagagucccgcagucggcguccagcggcucugcuuguucgugugugugucguugcaggccuuauucaagcuuaccaugggccagaucgugaccuucuuccaggaggugccccacgugaucgaggaggugaugaacaucgugcugaucgcccugagcauccuggccauccugaagggccuguacaacguggccaccugcggccugaucggccuggugaccuuccugcugcugagcggcagaagcugcagccugaucuacaagggcaccuacgagcugcagacccuggagcugaacauggagacccugaacaugaccaugccccugagcugcaccaagaacaacagccaccacuacaucagagugggcaacgagaccggccuggagcugacccugaccaacaccagcauccugaaccacaaguucugcaaccugagcgacgcccacaagagaaaccuguacgaccacagccugaugagcaucaucagcaccuuccaccugagcauccccaacuucaaccaguacgaggccaugagcugcgacuucaacggcggcaagaucaccgugcaguacaaccugagccacagcuucgccguggacgccgccggccacugcggcacccuggccaacggcgugcugcagaccuucaugagaauggccuggggcggcagcuacaucgcccuggacagcggcagaggcaacugggacugcaucaugaccagcuaccaguaccugaucauccagaacaccaccugggacgaccacugccaguucagcagacccagccccaucggcuaccugggccugcugagccagagaaccagagacaucuacaucagcagaagacugcugggcaccuucaccuggacccugagcgacagcgagggcaacgagacccccggcggcuacugccugaccagauggaugcugaucgaggccgagcugaagugcuucggcaacaccgccguggccaagugcaacgagaagcacgacgaggaguucugcgacaugcugagacuguucgacuucaacaagcaggccaucagaagacugaagaccgaggcccagaugagcauccagcugaucaacaaggccgugaacgcccugaucaacgaccagcugaucaugaagaaccaccugagagacaucaugggcauccccuacugcaacuacagcagauacugguaccugaaccacaccagcaccggcaagaccagccugcccagaugcuggcugaucagcaacggcagcuaccugaacgagaccaaguucagcgacgacaucgagcagcaggccgacaacaugaucaccgagaugcugcagaaggaguacaucgacagacagggcaagaccccccugggccugguggaccuguucguguucagcaccagcuucuaccugaucagcaucuuccugcaccuggugaagauccccugaggacuagucccuguucccagagcccacuuuuuuuucuuuuuuugaaauaaaauagccugucuuucagaucuaaaaaaaaaaaaaaaaaaaaaaaaaaaaaaaaaaaaaaaaaaaaaaaaaaaaaaaaaaaaaaaaaaaaaaaaaaaaaaaaaaaaaaaaaaaaaaaaaaaa

SEQ ID NO: 42089 - RNA, 1610 nt, Artificial Sequence
  mRNA product Design a-1 (A100) comprising derived and/or modified sequence from LASV(AV;Clade V)__CCA30314__GPCmut13 (opt4)
aggagagucccgcagucggcguccagcggcucugcuuguucgugugugugucguugcaggccuuauucaagcuuaccaugggccagaucgugaccuucuuccaggaggugccccacgugaucgaggaggugaugaacaucgugcugaucgcccugagcauccuggccgugcugaagggccuguacaacaucgccaccugcggccugaucggccugaucaccuuccugcugcugugcggcagaagcugcagcagcaaccuguacaagggcguguacgagcugcagagccuggaccugaacauggagacccugaacaugaccaugccccugagcugcaccaagaacaacagccaccacuacaucagagugggcaacgacaccggccuggagcugacccugaccaacaccagcauccugaaccacaaguucugcaaccugagcgacgcccacaagaaggaccuguacgaccacgcccugaugagcaucaucagcaccuuccaccugagcauccccaacuucaaccaguacgaggccaugagcugcgacuucaacggcggcaagaucagcgugcaguacaaccugagccacagcuacgccaucgacgccgccaaccacugcggcaccguggccaacggcauccugcagaccuucaugagaauggccuggggcggcagcuacaucgcccuggacagcggcagaggcaacugggacugcaucaugaccagcuaccaguaccugaucauccagaacaccaccugggagaaccacugccaguucagcagacccagccccaucggcuaccugggccugcugagccagagaaccagagacaucuacaucagcagaagacugcugggcaccuucaccuggacccugagcgacagcgagggcaacgccacccccggcggcuacugccugaccagauggaugcugaucgaggccgagcugaagugcuucggcaacaccgccguggccaagugcaacgagaagcacgacgaggaguucugcgacaugcugagacuguucgacuucaacaagcaggccaucagcagacugaagagcgaggcccagaugagcauccagcugaucaacaaggccgugaacgcccugaucaacgaccagcugaucaugaagaaccaccugagagacaucaugggcauccccuacugcaacuacagcaaguacugguaccugaaccacaccaucaccggcaagaccagccugcccaagugcuggcuggugagcaacggcagcuaccugaacgagacccacuucagcgacgacaucgagcagcaggccgacaacaugaucaccgagaugcugcagaaggaguacauggagagacagggcaagaccccccugggccugguggaccuguucguguucagcaccagcuucuaccugaucagcaucuuccugagacuggugaagauccccugaggacuagucccuguucccagagcccacuuuuuuuucuuuuuuugaaauaaaauagccugucuuucagaucuaaaaaaaaaaaaaaaaaaaaaaaaaaaaaaaaaaaaaaaaaaaaaaaaaaaaaaaaaaaaaaaaaaaaaaaaaaaaaaaaaaaaaaaaaaaaaaaaaaaa

SEQ ID NO: 42090 - RNA, 1607 nt, Artificial Sequence
  mRNA product Design a-1 (A100) comprising derived and/or modified sequence from LASV(Togo/2016/7082;Clade VI)__AMR44577__GPCmut13 (opt4)
aggagagucccgcagucggcguccagcggcucugcuuguucgugugugugucguugcaggccuuauucaagcuuaccaugggccagaucaucaccuucuuccaggaggugccccacgugaucgaggaggugaugaacaucgugcugaucgcccugagccugcuggccauccugaagggcguguacaacguggccaccugcggcaucaucggccuggugaccuuccuguuccugugcggcagaagcugcagccugaucuacaagggcagcuacgagcugcagacccuggagcugaacauggagacccugaacaugaccaugccccugagcugcaccaagaacagcagccaccacuacaucagagugggcaacgagaccggccuggagcugacccugaccaacaccagcaucaucaaccacaaguucugcaaccugagcgacgcccacaagagaaaccuguacgaccacgcccugaugagcauccugagcaccuuccaccugagcauccccaacuucaaccaguacgaggccaugagcugcgacuucaacggcggcaagaucagcgugcaguacaaccugagccacgccuacgccguggacgccgccgagcacugcggcaccguggccaacggcgugcugcagaccuucaugagaauggccuggggcggcagcuacaucgcccuggacagcggcagaggcaacugggacugcaucaugaccagcuaccaguaccugaucauccagaacaccaccugggaggaccacugccaguucagcagacccagccccaucggcuaccugggccugcugagccagagaaccagagacaucuacaucagcagaagacugcugggcaccuucaccuggacccugagcgacagcgagggcaacgagacccccggcggcuacugccugaccagauggaugcugaucgaggccgagcugaagugcuucggcaacaccgccguggccaagugcaacgagaagcacgacgaggaguucugcgacaugcugagacuguucgacuucaacaagcaggccauccagagacugaagagcgaggcccagaugagcauccagcugaucaacaaggccgugaacgcccugaucaacgaccagcugaucaugaagaaccaccugagagacaugaugggcauccccuacugcaacuacagcaaguacugguaccugaaccacaccagcagcggcagaaccagccugcccaagugcuggcuggugagcaacggcagcuaccugaacgagacccacuucagcgacgacaucgagcagcaggccgacaacaugaucaccgagaugcugcagaaggaguacaucgacagacagggcaagaccccccugggccugguggaccuguucguguucagcaccagcuucuaccugaucagcaucuuccugcaccugaucaagauccccugaggacuagucccuguucccagagcccacuuuuuuuucuuuuuuugaaauaaaauagccugucuuucagaucuaaaaaaaaaaaaaaaaaaaaaaaaaaaaaaaaaaaaaaaaaaaaaaaaaaaaaaaaaaaaaaaaaaaaaaaaaaaaaaaaaaaaaaaaaaaaaaaaaaaa

SEQ ID NO: 42091 - RNA, 1607 nt, Artificial Sequence
  mRNA product Design a-1 (A100) comprising derived and/or modified sequence from LASV(KAK-428;Clade n.d. (VII))__ANH09740__GPCmut13 (opt4)
aggagagucccgcagucggcguccagcggcucugcuuguucgugugugugucguugcaggccuuauucaagcuuaccaugggccagaucgugaccuucuuccaggaggugccccacgugaucgaggaggugaugaacaucgugcugaucgcccugagccugcuggccauccugaagggccuguacaacuucgccaccugcggcgugaucggccugaucaccuuccugcugcugugcggcagaagcugcagcgccaccuacaagggccaguacgagcugcagacccuggagcugaacauggagagccugaacaugaccaugccccugagcugcaccaagaacaacagccaccacuacaucagagccggcaacaacaccggccuggagcugacccugaccaacaccagcaucaucagccacaaguucugcaaccugagcgacgcccacaagaagaaccuguacgaccacacccugaugagcaucaucaccaccuuccaccugagcauccccaacuucaaccaguacgaggccaugagcugcgacuucaacggcggcaagaucagcauccaguacaaccugagccacagcuacgccggcgacgccgcccagcacugcggcaccguggccaacggcgugcugcagaccuucaugagaauggccuggggcggcagcuaccuggcccuggacagcggcagaagaggcugggacugcaucaucagcagcuaccaguaccugaucauccagaacaccaccugggacgaccacugccaguucagcagacccagccccaucggcuaccugggcuucgugagccagaagaccagagacaucuacaucagcagaagacugcugggcaccuucaccuggacccugagcgacagcgagggccacgacaugcccggcggcuacugccugaccagauggaugcugaucgaggccgaccugaagugcuucggcaacaccgccguggccaagugcaacgagaagcacgacgaggaguucugcgacauguggagacuguucgacuucaacaagcaggccauccagagacugaaggccgaggcccagaugaacauccagcugaucaacaaggccgugaacgcccugaucaacgaccagcugaugaugaagaaccaccugagagacaucaugggcauccccuacugcaacuacagcaaguucugguaccugaacaacaccaccaccggcagaaccagccugcccagaugcuggcugaucagcaacggcagcuaccugaacgagacccacuucagcgacgacaucgagcagcaggccgacaacaugaucaccgagaugcugcagaaggaguacauggacagacagggcaagaccccccugggccugguggaccuguucguguucagcaccagcuucuaccugaucaccaucuuccugcaccuggugaagauccccugaggacuagucccuguucccagagcccacuuuuuuuucuuuuuuugaaauaaaauagccugucuuucagaucuaaaaaaaaaaaaaaaaaaaaaaaaaaaaaaaaaaaaaaaaaaaaaaaaaaaaaaaaaaaaaaaaaaaaaaaaaaaaaaaaaaaaaaaaaaaaaaaaaaaa

SEQ ID NO: 42092 - RNA, 1607 nt, Artificial Sequence; identical to SEQ ID NO: 42086
  mRNA product Design a-1 (A100) comprising derived and/or modified sequence from LASV(Pinneo-NIG-1969;Clade I)__AIT17836__GPCmut13 (opt4)

SEQ ID NO: 42093 - RNA, 1607 nt, Artificial Sequence
  mRNA product Design a-1 (A100) comprising derived and/or modified sequence from LASV(ISTH0009-NIG-2011;Clade II)__AIT17404__GPCmut13 (opt4)
aggagagucccgcagucggcguccagcggcucugcuuguucgugugugugucguugcaggccuuauucaagcuuaccaugggccagaucaucaccuucuuccaggaggugccccacgugaucgaggaggugaugaacaucgugcugaucgcccugagccugcuggccauccugaagggcaucuacaacguggccaccugcggccuguucggccuggugagcuuccugcugcugugcggcagaagcugcagcaccaccuacaagggcguguacgagcugcagacccuggagcuggacauggccagccugaacaugaccaugccccugagcugcaccaagaacaacagccaccacuacaucauggugggcaacgagaccggccuggagcugacccugaccaacaccagcaucaucaaccacaaguucugcaaccugagcgacgcccacaagaagaaccuguacgaccacgcccugaugagcaucaucagcaccuuccaccugagcauccccaacuucaaccaguacgaggccaugagcugcgacuucaacggcggcaagaucagcgugcaguacaaccugagccacgccuacgccguggacgccgccaaccacugcggcaccaucgccaacggcgugcugcagaccuucaugagaauggccuggggcggcagcuacaucgcccuggacagcggcaagggcagcugggacugcaucaugaccagcuaccaguaccugaucauccagaacaccaccugggaggaccacugccaguucagcagacccagccccaucggcuaccugggccugcugagccagagaaccagagacaucuacaucagcagaagacugcugggcaccuucaccuggacccugagcgacagcgagggcaacgagacccccggcggcuacugccugaccagauggaugcugaucgaggccgagcugaagugcuucggcaacaccgccguggccaagugcaacgagaagcacgacgaggaguucugcgacaugcugagacuguucgacuucaacaagcaggccaucagaagacugaagaccgaggcccagaugagcauccagcugaucaacaaggccgugaacgcccugaucaacgaccagcugaucaugaagaaccaccugagagacaucaugggcauccccuacugcaacuacagcaaguacugguaccugaaccacaccgugaccggcaagaccagccugcccagaugcuggcuggugagcaacggcagcuaccugaacgagacccacuucagcgacgacaucgagcagcaggccgacaacaugaucaccgagcugcugcagaaggaguacauggacagacagggcaagaccccccugggccugguggaccuguucguguucagcaccagcuucuaccugaucagcaucuuccugcaccugaucaagauccccugaggacuagucccuguucccagagcccacuuuuuuuucuuuuuuugaaauaaaauagccugucuuucagaucuaaaaaaaaaaaaaaaaaaaaaaaaaaaaaaaaaaaaaaaaaaaaaaaaaaaaaaaaaaaaaaaaaaaaaaaaaaaaaaaaaaaaaaaaaaaaaaaaaaaa

SEQ ID NO: 42094 - RNA, 1607 nt, Artificial Sequence
  mRNA product Design a-1 (A100) comprising derived and/or modified sequence from LASV(ISTH2010-NIG-2012;Clade II)__AIT17482__GPCmut13 (opt4)
aggagagucccgcagucggcguccagcggcucugcuuguucgugugugugucguugcaggccuuauucaagcuuaccaugggccagaucaucaccuucuuccaggaggugccccacgugaucgaggaggugaugaacaucgugcugaucgcccugagccugcuggccauccugaagggcaucuacaacguggccaccugcggccuguucggccuggugagcuuccugcugcugugcggcagaagcugcagcaccaccuacaagggcguguacgagcugcagacccuggagcuggacauggccagccugaacaugaccaugccccugagcugcaccaagaacaacagccaccacuacaucauggugggcaacgagaccggccuggagcugacccugaccaacaccagcaucaucaaccacaaguucugcaaccugagcgacgcccacaagaagaaccuguacgaccacgcccugaugagcaucaucagcaccuuccaccugagcauccccaacuucaaccaguacgaggccaugagcugcgacuucaacggcggcaagaucagcgugcaguacaaccugagccacgccuacgccguggacgccgccaaccacugcggcaccaucgccaacggcgugcugcagaccuucaugagaauggccuggggcggcagcuacaucgcccuggacagcggcaagggcagcugggacugcaucaugaccagcuaccaguaccugaucauccagaacaucaccugggaggaccacugccaguucagcagacccagccccaucggcuaccugggccugcugagccagagaaccagagacaucuacaucagcagaagacugcugggcaccuucaccuggacccugagcgacagcgagggcaacgagacccccggcggcuacugccugaccagauggaugcugaucgaggccgagcugaagugcuucggcaacaccgccguggccaagugcaacgagaagcacgacgaggaguucugcgacaugcugagacuguucgacuucaacaagcaggccaucagaagacugaagaccgaggcccagaugagcauccagcugaucaacaaggccgugaacgcccugaucaacgaccagcugaucaugaagaaccaccugagagacaucaugggcauccccuacugcaacuacagcaaguacugguaccugaaccacaccgugaccggcaagaccagccugcccagaugcuggcuggugagcaacggcagcuaccugaacgagacccacuucagcgacgacaucgagcagcaggccgacaacaugaucaccgagcugcugcagaaggaguacaucgacagacagggcaagaccccccugggccugguggaccuguucguguucagcaccagcuucuaccugaucagcaucuuccugcaccuggugaagauccccugaggacuagucccuguucccagagcccacuuuuuuuucuuuuuuugaaauaaaauagccugucuuucagaucuaaaaaaaaaaaaaaaaaaaaaaaaaaaaaaaaaaaaaaaaaaaaaaaaaaaaaaaaaaaaaaaaaaaaaaaaaaaaaaaaaaaaaaaaaaaaaaaaaaaa

SEQ ID NO: 42095 - RNA, 1607 nt, Artificial Sequence
  mRNA product Design a-1 (A100) comprising derived and/or modified sequence from LASV(Lassa virus/H.sapiens-wt/NGA/2015/ISTH_0543;Clade II)__AVO03639__GPCmut13 (opt4)
aggagagucccgcagucggcguccagcggcucugcuuguucgugugugugucguugcaggccuuauucaagcuuaccaugggccagaucaucaccuucuuccaggaggugccccacgugaucgaggaggugaugaacaucgugcugaucgcccugagccugcuggccauccugaagggcaucuacaacguggccaccugcggccuguucggccuggugagcuuccugcugcugugcggcagaagcugcagcaccaccuacaagggcguguacgagcugcagacccuggagcuggacauggccaaccugaacaugaccaugccccugagcugcaccaagaacaacagccaccacuacaucauggugggcaacgagaccggccuggagcugacccugaccaacaccagcaucaucaaccacaaguucugcaaccugagcgacgcccacaagaagaaccuguacgaccacgcccugaugagcaucaucagcaccuuccaccugagcauccccaacuucaaccaguacgaggccaugagcugcgacuucaacggcggcaagaucagcgugcaguacaaccugagccacaccuacgccguggacgccgccaaccacugcggcaccaucgccaacggcgugcugcagaccuucaugagaauggccuggggcggcagcuacaucgcccuggacagcggcaagggcagcugggacugcaucaugaccagcuaccaguaccuggugauccagaacaccaccugggaggaccacugccaguucagcagacccagccccaucggcuaccugggccugcugagccagagaaccagagacaucuacaucagcagaagacugcugggcaccuucaccuggacccugagcgacagcgagggcaacgagacccccggcggcuacugccugaccagauggaugcugaucgaggccgagcugaagugcuucggcaacaccgccguggccaagugcaacgagaagcacgacgaggaguucugcgacaugcugagacuguucgacuucaacaagcaggccaucagaagacugaagaccgaggcccagaugagcauccagcugaucaacaaggccgugaacgcccugaucaacgaccagcugaucaugaagaaccaccugagagacaucaugggcauccccuacugcaacuacagcaaguacugguaccugaaccacaccgugaccggcaagaccagccugcccagaugcuggcuggugagcaacggcagcuaccugaacgagacccacuucagcgacgacaucgagcagcaggccgacaacaugaucaccgagcugcugcagaaggaguacaucgacagacagggcaagaccccccugggccugguggaccuguucguguucagcaccagcuucuaccugaucagcaucuuccugcaccuggugaagauccccugaggacuagucccuguucccagagcccacuuuuuuuucuuuuuuugaaauaaaauagccugucuuucagaucuaaaaaaaaaaaaaaaaaaaaaaaaaaaaaaaaaaaaaaaaaaaaaaaaaaaaaaaaaaaaaaaaaaaaaaaaaaaaaaaaaaaaaaaaaaaaaaaaaaaa

SEQ ID NO: 42096 - RNA, 1607 nt, Artificial Sequence
  mRNA product Design a-1 (A100) comprising derived and/or modified sequence from LASV(Lassa virus/H.sapiens-wt/NGA/2016/ISTH_0009;Clade II)__AVO03571__GPCmut13 (opt4)
aggagagucccgcagucggcguccagcggcucugcuuguucgugugugugucguugcaggccuuauucaagcuuaccaugggccagaucaucaccuucuuccaggaggugccccacgugaucgaggaggugaugaacaucgugcugaucgcccugagccugcuggccauccugaagggcaucuacaacguggccaccugcggccugcugggccuggugagcuuccugcugcugugcggcagaagcugcagcaccaccuacaagggcguguacgagcugcagacccuggagcuggacauggccagccugaacaugaccaugccccugagcugcaccaagaacaacagccaccacuacaucauggugggcaacgagaccggccuggagcugacccugaccaacaccagcaucaucaaccacaaguucugcaaccugagcgacgcccacaagaagaaccuguacgaccacgcccugaugagcaucaucagcaccuuccaccugagcauccccaacuucaaccaguacgaggccaugagcugcgacuucaacggcggcagaaucagcgugcaguacaaccugagccacagcuacgccguggacgccgccaaccacugcggcaccaucgccaacggcgugcugcagaccuucaugagaauggccuggggcggcagcuacaucgcccuggacagcggcaagggcagcugggacugcaucaugaccagcuaccaguaccugaucauccagaacaccaccugggaggaccacugccaguucagcagacccagccccaucggcuaccugggccugcugagccagagaaccagagacaucuacaucagcagaagacugcugggcaccuucaccuggacccugagcgacagcgagggcaacgagacccccggcggcuacugccugaccagauggaugcugaucgaggccgagcugaagugcuucggcaacaccgccguggccaagugcaacgagaagcacgacgaggaguucugcgacaugcugagacuguucgacuucaacaagcaggccaucagaagacugaagaccgaggcccagaugagcauccagcugaucaacaaggccgugaacgcccugaucaacgaccagcugaucaugaagaaccaccugagagacaucaugggcauccccuacugcaacuacagcaaguacugguaccugaaccacaccgugaccggcaagaccagccugcccagaugcuggcuggugagcaacggcagcuaccugaacgagacccacuucagcgacgacaucgagcagcaggccgacaacaugaucaccgagcugcugcagaaggaguacaucgacagacagggcaagaccccccugggccugguggaccuguucguguucagcaccagcuucuaccugaucagcaucuuccugcaccuggugaagauccccugaggacuagucccuguucccagagcccacuuuuuuuucuuuuuuugaaauaaaauagccugucuuucagaucuaaaaaaaaaaaaaaaaaaaaaaaaaaaaaaaaaaaaaaaaaaaaaaaaaaaaaaaaaaaaaaaaaaaaaaaaaaaaaaaaaaaaaaaaaaaaaaaaaaaa

SEQ ID NO: 42097 - RNA, 1607 nt, Artificial Sequence
  mRNA product Design a-1 (A100) comprising derived and/or modified sequence from LASV(Lassa virus/H.sapiens-wt/NGA/2016/ISTH_0017;Clade II)__AVO03567__GPCmut13 (opt4)
aggagagucccgcagucggcguccagcggcucugcuuguucgugugugugucguugcaggccuuauucaagcuuaccaugggccagaucaucaccuucuuccaggaggugccccacgugaucgaggaggugaugaacaucgugcugaucgcccugagccugcuggccauccugaagggcaucuacaacguggccaccugcggccuguucggccuggugagcuuccugcugcugugcggcagaagcugcagcaccaccuacaagggcguguacgagcugcagacccuggagcuggacauggccagccugaacaugaccaugccccugagcugcaccaagaacaacagccaccacuacaucauggugggcaacgagaccggccuggagcugacccugaccaacaccagcaucaucaaccacaaguucugcaaccugagcgacgcccacaagaagaaccuguacgaccacgcccugaugagcaucaucagcaccuuccaccugagcauccccaacuucaaccaguacgaggccaugagcugcgacuucaacggcggcaagaucagcgugcaguacaaccugagccacaccuacgccaucgacgccgccaaccacugcggcaccaucgccaacggcgugcugcagaccuucaugagaauggccuggggcggcagcuacaucgcccuggacagcggcaagggcagcugggacugcaucaugaccagcuaccaguaccugaucauccagaacaccaccugggaggaccacugccaguucagcagacccagccccaucggcuaccugggccugcugagccagagaaccagagacaucuacaucagcagaagacugcugggcaccuucaccuggacccugagcgacagcgagggcaacgagacccccggcggcuacugccugaccagauggaugcugaucgaggccgagcugaagugcuucggcaacaccgccguggccaagugcaacgagaagcacgacgaggaguucugcgacaugcugagacuguucgacuucaacaagcaggccaucagaagacugaagaccgaggcccagaugagcauccagcugaucaacaaggccgugaacgcccugaucaacgaccagcugaucaugaagaaccaccugagagacaucaugggcauccccuacugcaacuacagcaaguacugguaccugaaccacaccgugaccggcaagaccagccugcccagaugcuggcuggugagcaacggcagcuaccugaacgagacccacuucagcgacgacaucgagcagcaggccgacaacaugaucaccgagcugcugcagaaggaguacauggacagacagggcaagaccccccugggccugguggaccuguucguguucagcaccagcuucuaccugaucagcaucuuccugcaccuggugagaauccccugaggacuagucccuguucccagagcccacuuuuuuuucuuuuuuugaaauaaaauagccugucuuucagaucuaaaaaaaaaaaaaaaaaaaaaaaaaaaaaaaaaaaaaaaaaaaaaaaaaaaaaaaaaaaaaaaaaaaaaaaaaaaaaaaaaaaaaaaaaaaaaaaaaaaa

SEQ ID NO: 42098 - RNA, 1607 nt, Artificial Sequence
  mRNA product Design a-1 (A100) comprising derived and/or modified sequence from LASV(Lassa virus/H.sapiens-wt/NGA/2018/ISTH_0959;Clade II)__AVV65099__GPCmut13 (opt4)
aggagagucccgcagucggcguccagcggcucugcuuguucgugugugugucguugcaggccuuauucaagcuuaccaugggccagaucaucaccuucuuccaggaggugccccacgugaucgaggaggugaugaacaucgugcugaucgcccugagccugcuggccauccugaagggcaucuacaacguggugaccugcggccuguucggccuggugagcuuccugcugcugugcggcagaagcugcagcaccaccuacaagggcguguacgagcugcagacccuggagcuggacauggccagccugaacaugaccaugccccugagcugcaccaagaacaacagccaccacuacaucauggugggcaacgagaccggccuggagcugacccugaccaacaccagcaucaucaaccacaaguucugcaaccugagcgacgcccacaagaagaaccuguacgaccacgcccugaugagcaucaucagcaccuuccaccugagcauccccaacuucaaccaguacgaggccaugagcugcgacuucaacggcggcaagaucagcgugcaguacaaccugagccacgccuacgccaucgacgccgccaaccacugcggcaccaucgccaacggcgugcugcagaccuucaugagaauggccuggggcggcagcuacaucgcccuggacagcggcaagggcagcugggacugcaucaugaccagcuaccaguaccugaucauccagaacaccaccugggaggaccacugccaguucagcagacccagccccaucggcuaccugggccugcugagccagagaaccagagacaucuacaucagcagaagacugcugggcaccuucaccuggacccugagcgacagcgagggcaacgagacccccggcggcuacugccugaccagauggaugcugaucgaggccgagcugaagugcuucggcaacaccgccguggccaagugcaacgagaagcacgacgaggaguucugcgacaugcugagacuguucgacuucaacaagcaggccaucagaagacugaagaccgaggcccagaugagcauccagcugaucaacaaggccgugaacgcccugaucaacgaccagcugaucaugaagaaccaccugagagacaucaugggcauccccuacugcaacuacagcaaguacugguaccugaaccacaccgugaccggcaagaccagccugcccagaugcuggcuggugagcaacggcagcuaccugaacgagacccacuucagcgacgacaucgagcagcaggccgacaacaugaucaccgagcugcugcagaaggaguacaucgacagacagggcaagaccccccugggccugguggaccuguucguguucagcaccagcuucuaccugaucagcaucuuccugcaccuggugaagauccccugaggacuagucccuguucccagagcccacuuuuuuuucuuuuuuugaaauaaaauagccugucuuucagaucuaaaaaaaaaaaaaaaaaaaaaaaaaaaaaaaaaaaaaaaaaaaaaaaaaaaaaaaaaaaaaaaaaaaaaaaaaaaaaaaaaaaaaaaaaaaaaaaaaaaa

SEQ ID NO: 42099 - RNA, 1607 nt, Artificial Sequence
  mRNA product Design a-1 (A100) comprising derived and/or modified sequence from LASV(LASV003-NIG-2008;Clade II)__AIT17580__GPCmut13 (opt4)
aggagagucccgcagucggcguccagcggcucugcuuguucgugugugugucguugcaggccuuauucaagcuuaccaugggccagaucaucaccuucuuccaggaggugccccacgugaucgaggaggugaugaacaucgugcugaucgcccugagccugcuggccauccugaagggcaucuacaacguggccaccugcggccuguucggccuggugagcuuccugcugcugugcggcagaagcugcagcaccaccuacaagggcguguacgagcugcagacccuggagcuggacauggccagccugaacaugaccaugccccugagcugcaccaagaacaacagccaccacuacaucauggugggcaacgagaccggccuggagcugacccugaccaacaccagcaucaucaaccacaaguucugcaaccugagcgacgcccacaagaagaaccuguacgaccacgcccugaugagcaucaucagcaccuuccaccugagcauccccaacuucaaccaguacgaggccaugagcugcgacuucaacggcggcaagaucagcgugcaguacaaccugagccacaccuacgccguggacgccgccaaccacugcggcaccaucgccaacggcgugcugcagaccuucaugagaauggccuggggcggcagcuacaucgcccuggacagcggcaagggcagcugggacugcaucaugaccagcuaccaguaccugaucauccagaacaccaccugggaggaccacugccaguucagcagacccagccccaucggcuaccugggccugcugagccagagaaccagagacaucuacaucagcagaagacugcugggcaccuucaccuggacccugagcgacagcgagagcaacgagacccccggcggcuacugccugaccagauggaugcugaucgaggccgagcugaagugcuucggcaacaccgccguggccaagugcaacgagaagcacgacgaggaguucugcgacaugcugagacuguucgacuucaacaagcaggccaucagaagacugaaggccgaggcccagaugagcauccagcugaucaacaaggccgugaacgcccugaucaacgaccagcugaucaugaagaaccaccugagagacaucaugggcauccccuacugcaacuacagcaaguacugguaccugaaccacaccgugaccggcagaaccagccugcccagaugcuggcuggugagcaacggcagcuaccugaacgagacccacuucagcgacgacaucgagcagcaggccgacaacaugaucaccgagcugcugcagaaggaguacauggacagacagggcaagaccccccugggccugguggaccuguucguguucagcaccagcuucuaccugaucagcaucuuccugcaccuggugaagauccccugaggacuagucccuguucccagagcccacuuuuuuuucuuuuuuugaaauaaaauagccugucuuucagaucuaaaaaaaaaaaaaaaaaaaaaaaaaaaaaaaaaaaaaaaaaaaaaaaaaaaaaaaaaaaaaaaaaaaaaaaaaaaaaaaaaaaaaaaaaaaaaaaaaaaa

SEQ ID NO: 42100 - RNA, 1607 nt, Artificial Sequence
  mRNA product Design a-1 (A100) comprising derived and/or modified sequence from LASV(LASV035-NIG-2009;Clade II)__AIT17588__GPCmut13 (opt4)
aggagagucccgcagucggcguccagcggcucugcuuguucgugugugugucguugcaggccuuauucaagcuuaccaugggccagaucaucaccuucuuccaggaggugccccacgugaucgaggaggugaugaacaucgugcugaucgcccugagccugcuggccauccugaagggcaucuacaacguggccaccugcggccuguucggccuggugagcuuccugcugcugugcggcagaagcugcagcaccaccuacaagggcguguacgagcugcagacccuggagcuggacauggccagccugaacaugaccaugccccugagcugcaccaagaacaacagccaccacuacaucauggugggcaacgagaccggccuggagcugacccugaccaacaccagcaucaucaaccacaaguucugcaaccugagcgacgcccacaagaagaaccuguacgaccacgcccugaugagcaucaucagcaccuuccaccugagcauccccaacuucaaccaguacgaggccaugagcugcgacuucaacggcggcaagaucagcgugcaguacaaccugagccacgccuacgccguggacgccgccaaccacugcggcaccaucgccaacggcgugcugcagaccuucaugagaauggccuggggcggcagcuacaucgcccuggacagcggcaagggcagcugggacugcaucaugaccagcuaccaguaccugaucauccagaacaccaccugggaggaccacugccaguucagcagacccagccccaucggcuaccugggccugcugagccagagaaccagagacaucuacaucagcagaagacugcugggcaccuucaccuggacccugagcgacagcgagggcaacgagacccccggcggcuacugccugaccagauggaugcugaucgaggccgagcugaagugcuucggcaacaccgccguggccaagugcaacgagaagcacgacgaggaguucugcgacaugcugagacuguucgacuucaacaagcaggccaucagaagacugaaggccgaggcccagaugagcauccagcugaucaacaaggccgugaacgcccugaucaacgaccagcugaucaugaagaaccaccugagagacaucaugggcauccccuacugcaacuacagcaaguacugguaccugaaccacaccgugaccggcaagaccagccugcccagaugcuggcuggugagcaacggcagcuaccugaacgagacccacuucagcgacgacaucgagcagcaggccgacaacaugaucaccgagcugcugcagaaggaguacaucgacagacagggcaagaccccccugggccugguggaccuguucguguucagcaccagcuucuaccugaucagcaucuuccugcaccuggugaagauccccugaggacuagucccuguucccagagcccacuuuuuuuucuuuuuuugaaauaaaauagccugucuuucagaucuaaaaaaaaaaaaaaaaaaaaaaaaaaaaaaaaaaaaaaaaaaaaaaaaaaaaaaaaaaaaaaaaaaaaaaaaaaaaaaaaaaaaaaaaaaaaaaaaaaaa

SEQ ID NO: 42101 - RNA, 1607 nt, Artificial Sequence
  mRNA product Design a-1 (A100) comprising derived and/or modified sequence from LASV(LASV1000-NIG-2009;Clade II)__AIT17782__GPCmut13 (opt4)
aggagagucccgcagucggcguccagcggcucugcuuguucgugugugugucguugcaggccuuauucaagcuuaccaugggccagaucaucaccuucuuccaggaggugccccacgugaucgaggaggugaugaacaucgugcugaucgcccugagccugcuggccauccugaagggcaucuacaacguggccaccugcggccuguucggccuggugagcuuccugcugcugugcggcagaagcugcagcaccaccuacaagggcguguacgagcugcagacccuggagcuggacauggccagccugaacaugaccaugccccugagcugcaccaagaacaacagccaccacuacaucauggugggcaacgagaccggccuggagcugacccugaccaacaccagcaucaucaaccacaaguucugcaaccugagcgacgcccacaagaagaaccuguacgaccacgcccugaugagcaucaucagcaccuuccaccugagcauccccaacuucaaccaguacgaggccaugagcugcgacuucaacggcggcaagaucagcgugcaguacaaccugagccacaccuacgccguggacgccgccaaccacugcggcaccaucgccaacggcgugcugcagaccuucaugagaauggccuggggcggcagcuacaucgcccuggacagcggcaagggcagcugggacugcaucaugaccagcuaccaguaccugaucauccagaacaccaccugggaggaccacugccaguucagcagacccagccccaucggcuaccugggccugcugagccagagaaccagagacaucuacaucagcagaagacugcugggcaccuucaccuggacccugagcgacagcgagggcaacgagacccccggcggcuacugccugaccagauggaugcugaucgaggccgagcugaagugcuucggcaacaccgccguggccaagugcaacgagaagcacgacgaggaguucugcgacaugcugagacuguucgacuucaacaagcaggccaucaagagacugaagaccgaggcccagaugagcauccagcugaucaacaaggccgugaacgcccugaucaacgaccagcugaucaugaagaaccaccugagagacaucaugggcauccccuacugcaacuacagcaaguacugguaccugaaccacaccgugaccggcaagaccagccugcccagaugcuggcuggugagcaacggcagcuaccugaacgagacccacuucagcgacgacaucgagcagcaggccgacaacaugaucaccgagcugcugcagaaggaguacaucgacagacagggcaagaccccccugggccugguggaccuguucguguucagcaccagcuucuaccugaucagcaucuuccugcaccuggugaagauccccugaggacuagucccuguucccagagcccacuuuuuuuucuuuuuuugaaauaaaauagccugucuuucagaucuaaaaaaaaaaaaaaaaaaaaaaaaaaaaaaaaaaaaaaaaaaaaaaaaaaaaaaaaaaaaaaaaaaaaaaaaaaaaaaaaaaaaaaaaaaaaaaaaaaaa

SEQ ID NO: 42102 - RNA, 1607 nt, Artificial Sequence
  mRNA product Design a-1 (A100) comprising derived and/or modified sequence from LASV(LASV221-NIG-2010;Clade II)__AIT17624__GPCmut13 (opt4)
aggagagucccgcagucggcguccagcggcucugcuuguucgugugugugucguugcaggccuuauucaagcuuaccaugggccagaucaucaccuucuuccaggaggugccccacgugaucgaggaggugaugaacaucgugcugaucgcccugagccugcuggccauccugaagggcaucuacaacguggccaccugcggccuguucggccuggugagcuuccugcugcugugcggcagaagcugcagcaccaccuacaagggcguguacgagcugcagacccuggagcuggacauggccagccugaacaugaccaugccccugagcugcaccaagaacaacagccaccacuacaucauggugggcaacgagaccggccuggagcugacccugaccaacaccagcaucaucaaccacaaguucugcaaccugagcgacgcccacaagaagaaccuguacgaccacgcccugaugagcaucaucagcaccuuccaccugagcauccccaacuucaaccaguacgaggccaugagcugcgacuucaacggcggcaagaucagcgugcaguacaaccugagccacaccuacgccaucgacgccgccaaccacugcggcaccaucgccaacggcgugcugcagaccuucaugagaauggccuggggcggcagcuacaucgcccuggacagcggcaagggcagcugggacugcaucaugaccagcuaccaguaccugaucauccagaacaccaccugggaggaccacugccaguucagcagacccagccccaucggcuaccugggccugcugagccagagaaccagagacaucuacaucagcagaagacugcugggcaccuucaccuggacccugagcgacagcgagggcaacgagacccccggcggcuacugccugaccagauggaugcugaucgaggccgagcugaagugcuucggcaacaccgccguggccaagugcaacgagaagcacgacgaggaguucugcgacaugcugagacuguucgacuucaacaagcaggccaucagaagacugaagaccgaggcccagaugagcauccagcugaucaacaaggccgugaacgcccugaucaacgaccagcugaucaugaagaaccaccugagagacaucaugggcauccccuacugcaacuacagcaaguacugguaccugaaccacaccgugaccggcaagaccagccugcccagaugcuggcuggugagcaacggcagcuaccugaacgagacccacuucagcgacgacaucgagcagcaggccgacaacaugaucaccgagaugcugcagaaggaguacauggacagacagggcaagaccccccugggccugguggaccuguucguguucagcaccagcuucuaccugaucagcaucuuccugcaccuggugaagauccccugaggacuagucccuguucccagagcccacuuuuuuuucuuuuuuugaaauaaaauagccugucuuucagaucuaaaaaaaaaaaaaaaaaaaaaaaaaaaaaaaaaaaaaaaaaaaaaaaaaaaaaaaaaaaaaaaaaaaaaaaaaaaaaaaaaaaaaaaaaaaaaaaaaaaa

SEQ ID NO: 42103 - RNA, 1607 nt, Artificial Sequence
  mRNA product Design a-1 (A100) comprising derived and/or modified sequence from LASV(LASV237-NIG-2010;Clade II)__AIT17638__GPCmut13 (opt4)
aggagagucccgcagucggcguccagcggcucugcuuguucgugugugugucguugcaggccuuauucaagcuuaccaugggccagaucaucaccuucuuccaggaggugccccacgugaucgaggaggugaugaacaucgugcugaucgcccugagccugcuggccauccugaagggcaucuacaacguggccaccugcggccuguucggccuggugagcuuccugcugcugugcggcagaagcugcagcaccaccuacaagggcguguacgagcugcagacccuggagcuggacauggccagccugaacaugaccaugccccugagcugcaccaagaacaacagccaccacuacaucauggugggcaacgagaccggccuggagcugacccugaccaacaccagcaucaucaaccacaaguucugcaaccugagcgacgcccacaagaaggaccuguacgaccacgcccugaugagcaucaucagcaccuuccaccugagcauccccaacuucaaccaguacgaggccaugagcugcgacuucaacggcggcaagaucagcgugcaguacaaccugagccacaccuacgccguggacgccgccaaccacugcggcaccaucgccaacggcgugcugcagaccuucaugagaauggccuggggcggcagcuacaucgcccuggacagcggcaagggcagcugggacugcaucaugaccagcuaccaguaccugaucauccagaacaccaccugggaggaccacugccaguucagcagacccagccccaucggcuaccugggccugcugagccagagaaccagagacaucuacaucagcagaagacugcugggcaccuucaccuggacccugagcgacagcgagggcaacgagacccccggcggcuacugccugaccagauggaugcugaucgaggccgagcugaagugcuucggcaacaccgccguggccaagugcaacgagaagcacgacgaggaguucugcgacaugcugagacuguucgacuucaacaagcaggccaucagaagacugaagaccgaggcccagaugagcauccagcugaucaacaaggccgugaacgcccugaucaacgaccagcugaucaugaagaaccaccugagagacaucaugggcauccccuacugcaacuacagcaaguacugguaccugaaccacaccgugaccggcaagaccagccugcccagaugcuggcuggugagcaacggcagcuaccugaacgagacccacuucagcgacgacaucgagcagcaggccgacaacaugaucaccgagcugcugcagaaggaguacauggacagacagggcaagaccccccugggccugguggaccuguucguguucagcaccagcuucuaccugaucagcaucuuccugcaccugaucaagauccccugaggacuagucccuguucccagagcccacuuuuuuuucuuuuuuugaaauaaaauagccugucuuucagaucuaaaaaaaaaaaaaaaaaaaaaaaaaaaaaaaaaaaaaaaaaaaaaaaaaaaaaaaaaaaaaaaaaaaaaaaaaaaaaaaaaaaaaaaaaaaaaaaaaaaa

SEQ ID NO: 42104 - RNA, 1607 nt, Artificial Sequence
  mRNA product Design a-1 (A100) comprising derived and/or modified sequence from LASV(LASV253-NIG-2011;Clade II)__AIT17670__GPCmut13 (opt4)
aggagagucccgcagucggcguccagcggcucugcuuguucgugugugugucguugcaggccuuauucaagcuuaccaugggccagaucaucaccuucuuccaggaggugccccacgugaucgaggaggugaugaacaucgugcugaucgcccugagccugcuggccauccugaagggcaucuacaacguggccaccugcggccuguucggccuggugagcuuccugcugcugugcggcagaagcugcagcaccaccuacaagggcguguacgagcugcagacccuggagcuggacauggccagccugaacaugaccaugccccugagcugcaccaagaacaacagccaccacuacaucauggugggcaacgagaccggccuggagcugacccugaccaacaccagcaucaucaaccacaaguucugcaaccugagcgacgcccacaagaagaaccuguacgaccacgcccugaugagcaucaucagcaccuuccaccugagcauccccaacuucaaccaguacgaggccaugagcugcgacuucaacggcggcaagaucagcgugcaguacaaccugagccacaccuacgccguggacgccgccaaccacugcggcaccaucgccaacggcgugcugcagaccuucaugagaauggccuggggcggcagcuacaucgcccuggacagcggcaagggcagcugggacugcaucaugaccagcuaccaguaccugaucauccagaacaccaccugggaggaccacugccaguucagcagacccagccccaucggcuaccugggccugcugagccagagaaccagagacaucuacaucagcagaagacugcugggcaccuucaccuggacccugagcgacagcgagggcaacgagacccccggcggcuacugccugaccagauggaugcugaucgaggccgagcugaagugcuucggcaacaccgccguggccaagugcaacgagaagcacgacgaggaguucugcgacaugcugagacuguucgacuucaacaagcaggccaucagaagacugaaggccgaggcccagaugagcauccagcugaucaacaaggccgugaacgcccugaucaacgaccagcugaucaugaagaaccaccugagagacaucaugggcauccccuacugcaacuacagcaaguacugguaccugaaccacaccgugaccggcagaaccagccugcccagaugcuggcuggugagcaacggcagcuaccugaacgagacccacuucagcgacgacaucgagcagcaggccgacaacaugaucaccgagcugcugcagaaggaguacaucgacagacagggcaagaccccccugggccugguggaccuguucguguucagcaccagcuucuaccugaucagcaucuuccugcaccuggugaagauccccugaggacuagucccuguucccagagcccacuuuuuuuucuuuuuuugaaauaaaauagccugucuuucagaucuaaaaaaaaaaaaaaaaaaaaaaaaaaaaaaaaaaaaaaaaaaaaaaaaaaaaaaaaaaaaaaaaaaaaaaaaaaaaaaaaaaaaaaaaaaaaaaaaaaaa

SEQ ID NO: 42105 - RNA, 1607 nt, Artificial Sequence
  mRNA product Design a-1 (A100) comprising derived and/or modified sequence from LASV(LASV254-NIG-2011;Clade II)__AIT17674__GPCmut13 (opt4)
aggagagucccgcagucggcguccagcggcucugcuuguucgugugugugucguugcaggccuuauucaagcuuaccaugggccagaucaucaccuucuuccaggaggugccccacgugaucgaggaggugaugaacaucgugcugaucgcccugagccugcuggccauccugaagggcaucuacaacguggccaccugcggccuguucggccuggugagcuuccugcugcugugcggcagaagcugcagcaccaccuacaagggcguguacgagcugcagacccuggagcuggacaugaccaaccugaacaugaccaugccccugagcugcaccaagaacaacagccaccacuacaucauggugggcaacgagaccggccuggagcugacccugaccaacaccagcaucaucaaccacaaguucugcaaccugagcgacgcccacaagaagaaccuguacaaccacgcccugaugagcaucaucagcaccuuccaccugagcauccccaacuucaaccaguacgaggccaugagcugcgacuucaacggcggcaagaucagcgugcaguacaaccugagccacagcuacgccguggacgccgccaaccacugcggcaccaucgccaacggcgugcugcagaccuucaugagaauggccuggggcggcagcuacaucgcccuggacagcggcaagggcaacugggacugcaucaugaccagcuaccaguaccugaucauccagaacaccaccugggaggaccacugccaguucagcagacccagccccaucggcuaccugggccugcugagccagagaaccagagacaucuacaucagcagaagacugcugggcaccuucaccuggacccugagcgacagcgagggcaacgagacccccggcggcuacugccugaccagauggaugcugaucgaggccgagcugaagugcuucggcaacaccgccguggccaagugcaacgagaagcacgacgaggaguucugcgacaugcugagacuguucgacuucaacaagcaggccaucagaagacugaagaccgaggcccaggccaacauccagcugaucaacaaggccgugaacgcccugaucaacgaccagcugaucaugaagaaccaccugagagacaucaugggcauccccuacugcaacuacagcaaguacugguaccugaaccacaccgugaccggcaagaccagccugcccagaugcuggcuggugagcaacggcagcuaccugaacgagacccacuucagcgacgacaucgagcagcaggccgacaacaugaucaccgagcugcugcagaaggaguacauggacagacagggcaagaccccccugggccugguggaccuguucguguucagcaccagcuucuaccugaucagcaucuuccugcaccuggugaagauccccugaggacuagucccuguucccagagcccacuuuuuuuucuuuuuuugaaauaaaauagccugucuuucagaucuaaaaaaaaaaaaaaaaaaaaaaaaaaaaaaaaaaaaaaaaaaaaaaaaaaaaaaaaaaaaaaaaaaaaaaaaaaaaaaaaaaaaaaaaaaaaaaaaaaaa

SEQ ID NO: 42106 - RNA, 1607 nt, Artificial Sequence
  mRNA product Design a-1 (A100) comprising derived and/or modified sequence from LASV(Nig08-A19;Clade III)__ADU56618__GPCmut13 (opt4)
aggagagucccgcagucggcguccagcggcucugcuuguucgugugugugucguugcaggccuuauucaagcuuaccaugggccagaucgugaccuucuuccaggaggugccccacgugaucgaggaggugaugaacaucgugcugaucgcccugagcauccuggccauccugaagggccuguacaacaucgccaccugcggccugaucggccuggugaccuuccugcugcugagcggcagaagcugcagcaugaccuacaagggcguguacgagcugcagacccuggagcugaacaugaacacccugaacaugaccaugccccugagcugcaccaagaacaacagccaccacuacaucauggugggcaacgagaccggccuggagcugacccugaccaacaccagccugcugcaccacaaguucugcaaccugagcgacgcccacaagaagaaccuguacgaccacacccugaugagcaucaucagcaccuuccaccugagcauccccaacuucaaccaguacgaggccaugagcugcgacuucaacggcggcaagaucaccgugcaguacaaccugagccacagcuacgccaucgacgccgccaaccacugcggcaccguggccaacggcgugcugcagaccuucaugagaauggccuggggcggcagcuacaucgcccuggacagcggcagaggcaagugggacugcaucaugaccagcuaccaguaccugaucauccagaacaccaccugggaggaccacugccaguucagcagacccagccccaucggcuaccugggccugcugagccagagaaccagagacaucuacaucagcagaagacugcugggcaccuucaccuggacccugagcgacagcgagggcaacgagacccccggcggcuacugccugaccagauggaugcugaucgaggccgagcugaagugcuucggcaacaccgccguggccaagugcaacgagaagcacgacgaggaguucugcgacaugcugagacuguucgacuucaacaagcaggccaucagaagacugaaggccgaggcccagaugagcauccagcugaucaacaaggccgugaacgcccugaucaacgaccagcugaucaugaagaaccaccugagagacaucaugggcauccccuacugcaacuacagcaaguacugguaccugaaccacaccagcaccggcagaaccagccugcccagaugcuggcuggugagcaacggcagcuaccugaacgagacccacuucagcgacgacaucgagcagcaggccgacaacaugaucaccgagaugcugcagaaggaguaccuggacagacagggcaagaccccccugggccugguggaccuguucguguucagcaccagcuucuaccugaucagcaucuuccugcaccuggugaagauccccugaggacuagucccuguucccagagcccacuuuuuuuucuuuuuuugaaauaaaauagccugucuuucagaucuaaaaaaaaaaaaaaaaaaaaaaaaaaaaaaaaaaaaaaaaaaaaaaaaaaaaaaaaaaaaaaaaaaaaaaaaaaaaaaaaaaaaaaaaaaaaaaaaaaaa

SEQ ID NO: 42107 - RNA, 1610 nt, Artificial Sequence
  mRNA product Design a-1 (A100) comprising derived and/or modified sequence from LASV(G1180-SLE-2010;Clade IV)__AIT17168__GPCmut13 (opt4)
aggagagucccgcagucggcguccagcggcucugcuuguucgugugugugucguugcaggccuuauucaagcuuaccaugggccagaucgugaccuucuuccaggaggugccccacgugaucgaggaggugaugaacaucgugcugaucgcccugagcauccuggccgugcugaagggccuguacaacuucgccaccugcggccuggugggccugcugaccuuccugcugcugugcggcagaagcugcaccgccagcagauacaagggcguguacgagcugcagacccuggagcugaacauggagacccugaacaugaccaugccccugagcugcaccaagaacaacagccaccacuacaucauggugggcaacgagaccggccuggagcugacccugaccaacaccagcaucaucaaccacaaguucugcaaccugagcgacgcccacaagaagaaccuguacgaccacgcccugaugagcaucaucagcaccuuccaccugagcauccccaacuucaaccaguacgaggccaugagcugcgacuucaacggcggcaagaucagcgugcaguacaaccugagccacagcuacgccggcgacgccgccaaccacugcggcaccguggccaacggcgugcugcagaccuucaugagaauggccuggggcggcagcuacaucgcccuggacagcggccacggcagcugggacugcaucaugaccagcuaccaguaccugaucauccagaacaccaccugggaggaccacugccaguucagcagacccagccccaucggcuaccugggccugcugagccagagaaccagagacaucuacaucagcagaagacugcugggcaccuucaccuggacccugagcgacagcgagggcaaggacacccccggcggcuacugccugaccagauggaugcugaucgaggccgagcugaagugcuucggcaacaccgccguggccaagugcaacgagaagcacgacgaggaguucugcgacaugcugagacuguucgacuucaacaagcaggccauccagagacugaaggccgaggcccagaugagcauccagcugaucaacaaggccgugaacgcccugaucaacgaccagcugaucaugaagaaccaccugagagacaucaugggcauccccuacugcaacuacagcaaguacugguaccugaaccacaccaccaccggcaagaccagccugcccaagugcuggcuggugagcaacggcagcuaccugaacgagacccacuucagcgacgacaucgagcagcaggccgacaacaugaucaccgagaugcugcagaaggaguacauggagagacagggcaagaccccccugggccugguggaccuguucguguucagcaccagcuucuaccugaucagcaucuuccugcaccuggugaagauccccugaggacuagucccuguucccagagcccacuuuuuuuucuuuuuuugaaauaaaauagccugucuuucagaucuaaaaaaaaaaaaaaaaaaaaaaaaaaaaaaaaaaaaaaaaaaaaaaaaaaaaaaaaaaaaaaaaaaaaaaaaaaaaaaaaaaaaaaaaaaaaaaaaaaaa

SEQ ID NO: 42108 - RNA, 1610 nt, Artificial Sequence
  mRNA product Design a-1 (A100) comprising derived and/or modified sequence from LASV(G1442-SLE-2011;Clade IV)__AIT17180__GPCmut13 (opt4)
aggagagucccgcagucggcguccagcggcucugcuuguucgugugugugucguugcaggccuuauucaagcuuaccaugggccagaucgugaccuucuuccaggaggugccccacgugaucgaggaggugaugaacaucgugcugaucgcccugagcauccuggccgugcugaagggccuguacaacguggccaccugcggccugaucggccuggugaccuuccugcugcugugcggcagaagcugcaccaccacccuguacaagggcguguacgagcugcagacccuggagcugaacauggagacccugaacaugaccaugccccugagcugcaccaagaacaacagccaccacuacaucagagugggcaacgagaccggccuggagcugacccugaccaacaccagcaucaucaaccacaaguucugcaaccugagcgacgcccacaagaagaaccuguacgaccacgcccugaugagcaucaucagcaccuuccaccugagcauccccaacuucaaccaguacgaggccaugagcugcgacuucaacggcggcaagaucagcgugcaguacaaccugagccacagcuacgccggcgacgccgccaaccacugcggcaccguggccaacggcgugcugcagaccuucaugagaauggccuggggcggcagcuacaucgcccuggacagcggcagaggcaacugggacugcaucaugaccagcuaccaguaccugaucauccagaacaccaccugggacgaccacugccaguucagcagacccagccccaucggcuaccugggccugcugagccagagaaccagagacguguacaucagcagaagacugcugggcaccuucaccuggacccugagcgacagcgagggcaaggacacccccggcggcuacugccugaccagauggaugcugaucgaggccgagcugaagugcuucggcaacaccgccguggccaagugcaacgagaagcacgacgaggaguucugcgacaugcugagacuguucgacuucaacaagcaggccauccagagacugaaggccgaggcccagaugagcauccagcugaucaacaaggccgugaacgcccugaucaacgaccagcugaucaugaagaaccaccugagagacaucaugggcauccccuacugcaacuacagcaaguacugguaccugaacaacaccgccaccggcaagaccagccugcccaagugcuggcugaucagcaacggcagcuaccugaacgagacccacuucagcgacgacaucgagcaggaggccgacaacaugaucaccgagaugcugcagaaggaguacauggagagacagggcaagaccccccugggccugguggaccuguucguguucagcaccagcuucuaccugaucagcaucuuccugcaccuggugaagauccccugaggacuagucccuguucccagagcccacuuuuuuuucuuuuuuugaaauaaaauagccugucuuucagaucuaaaaaaaaaaaaaaaaaaaaaaaaaaaaaaaaaaaaaaaaaaaaaaaaaaaaaaaaaaaaaaaaaaaaaaaaaaaaaaaaaaaaaaaaaaaaaaaaaaaa

SEQ ID NO: 42109 - RNA, 1610 nt, Artificial Sequence
  mRNA product Design a-1 (A100) comprising derived and/or modified sequence from LASV(G3010-SLE-2013;Clade IV)__AIT17344__GPCmut13 (opt4)
aggagagucccgcagucggcguccagcggcucugcuuguucgugugugugucguugcaggccuuauucaagcuuaccaugggccagaucgugaccuucuuccaggaggugccccacgugaucgaggaggugaugaacaucgugcugaucgcccugagcauccuggccgugcugaagggccuguacaacuucgccaccugcggccuggugggccuggugaccuuccugcugcugugcggcagaagcugcaccaccagccuguacaagggcguguacgagcugcagacccuggagcugaacauggagacccugaacaugaccaugccccugagcugcaccaagaacaacagccaccacuacaucauggugggcaacgagaccggccuggagcugacccugaccaacaccagcaucaucaaccacaaguucugcaaccugagcgacgcccacaagaagaaccuguacaaccacgcccugaugagcaucaucagcaccuuccaccugagcauccccaacuucaaccaguacgaggccaugagcugcgacuucaacggcggcaagaucagcgugcaguacaaccugagccacagcuacgccggcgacgccgccagccacugcggcaccguggccaacggcgugcugcagaccuucaugagaauggccuggggcggcagcuacaucgcccuggacagcggcuacggcaagugggacugcaucaugaccagcuaccaguaccugaucauccagaacaccaccugggaggaccacugccaguucagcagacccagccccaucggcuaccugggccugcugagccagagaaccagagacaucuacaucagcagaagacugcugggcaccuucaccuggacccugagcgacagcgagggcaaggacacccccggcggcuacugccugaccagauggaugcugaucgaggccgagcugaagugcuucggcaacaccgccguggccaagugcaacgagaagcacgacgaggaguucugcgacaugcugagacuguucgacuucaacaagcaggccauccagagacugaagaccgaggcccagaugagcauccagcugaucaacaaggccgugaacgcccugaucaacgaccagcugaucaugaagaaccaccugagagacaucaugggcauccccuacugcaacuacagcaaguacugguaccugaaccacaccaccaccggcaagaccagccugcccaagugcuggcuggugagcaacggcagcuaccugaacgagacccacuucagcgacgacaucgagcagcaggccgacaacaugaucaccgagaugcugcagaaggaguacauggagagacagggcaagaccccccugggccugguggaccuguucguguucagcaccagcuucuaccugaucagcaucuuccugcaccuggugaagauccccugaggacuagucccuguucccagagcccacuuuuuuuucuuuuuuugaaauaaaauagccugucuuucagaucuaaaaaaaaaaaaaaaaaaaaaaaaaaaaaaaaaaaaaaaaaaaaaaaaaaaaaaaaaaaaaaaaaaaaaaaaaaaaaaaaaaaaaaaaaaaaaaaaaaaa

SEQ ID NO: 42110 - RNA, 1610 nt, Artificial Sequence
  mRNA product Design a-1 (A100) comprising derived and/or modified sequence from LASV(G502-SLE-2009;Clade IV)__AIT17126__GPCmut13 (opt4)
aggagagucccgcagucggcguccagcggcucugcuuguucgugugugugucguugcaggccuuauucaagcuuaccaugggccagaucgugaccuucuuccaggaggugccccacgugaucgaggaggugaugaacaucgugcugaucgcccugagcauccuggccgugcugaagggccuguacaacuucgccaccugcggccuggugggccugcugaccuuccugcugcugugcggcagaagcugcaccaccggccuguacaagggcguguacgagcugcagacccuggagcugaacauggagacccugaacaugaccaugccccugagcugcaccaagaacaacagccaccacuacaucauggugggcaacgagaccggccuggagcugacccugaccaacaccagcaucaucaaccacaaguucugcaaccugagcgacgcccacaagaagaaccuguacgaccacgcccugaugagcaucaucagcaccuuccaccugagcauccccaacuucaaccaguacgaggccaugagcugcgacuucaacggcggcaagaucagcgugcaguacaaccugagccacagcuacgccggcgacgccgccgaccacugcggcaccguggccaacggcgugcugcagaccuucaugagaauggccuggggcggcagcuacaucgcccuggacagcggcagaggcagaugggacugcaucaugaccagcuaccaguaccugaucauccagaacaccaccugggaggaccacugccaguucagcagacccagccccaucggcuaccugggccugcugagccagagaaccagagacaucuacaucagcagaagacugcugggcaccuucaccuggacccugagcgacagcgagggcaaggacacccccggcggcuacugccugaccagauggaugcugaucgaggccgagcugaagugcuucggcaacaccgccguggccaagugcaacgagaagcacgacgaggaguucugcgacaugcugagacuguucgacuucaacaagcaggccauccagagacugaaggccgaggcccagaugagcauccagcugaucaacaaggccgugaacgcccugaucaacgaccagcuggugaugaagaaccaccugagagacaucaugggcauccccuacugcaacuacagcagauacugguaccugaaccacaccaccaccggcagaaccagccugcccaagugcuggcuggugagcaacggcagcuaccugaacgagacccacuucagcgacgacaucgagcagcaggccgacaacaugaucaccgagaugcugcagaaggaguacauggagagacagggcaagaccccccugggccugguggaccuguucguguucagcaccagcuucuaccugaucagcaucuuccugcaccuggugaagauccccugaggacuagucccuguucccagagcccacuuuuuuuucuuuuuuugaaauaaaauagccugucuuucagaucuaaaaaaaaaaaaaaaaaaaaaaaaaaaaaaaaaaaaaaaaaaaaaaaaaaaaaaaaaaaaaaaaaaaaaaaaaaaaaaaaaaaaaaaaaaaaaaaaaaaa

SEQ ID NO: 42111 - RNA, 1610 nt, Artificial Sequence
  mRNA product Design a-1 (A100) comprising derived and/or modified sequence from LASV(G733-SLE-2010;Clade IV)__AIT17154__GPCmut13 (opt4)
aggagagucccgcagucggcguccagcggcucugcuuguucgugugugugucguugcaggccuuauucaagcuuaccaugggccagaucgugaccuucuuccaggaggugccccacgugaucgaggaggugaugaacaucgugcugaucgcccugagcauccuggccgugcugaagggccuguacaacuucgccaccugcggcaucgugggccuggugagcuuccugcugcugugcggcagaagcugcaccaccagccuguacaagggcguguacgagcugcagacccuggagcugaacauggagacccugaacaugaccaugccccugagcugcaccaagaacaacagccaccacuacaucauggugggcaacgagaccggccuggagcugacccugaccaacaccagcaucaucaaccacaaguucugcaaccugagcgacgcccacaagaagaaccuguacgaccacgcccugaugagcaucaucagcaccuuccaccugagcauccccaacuucaaccaguacgaggccaugagcugcgacuucaacggcggcaagaucagcgugcaguacaaccugagccacagcuacgccggcgacgccgccaaccacugcggcaccaucgccaacggcgugcugcagaccuucaugagaauggccuggggcggcagcuacaucgcccuggacagcggcagagacagaugggacugcaucaugaccagcuaccaguaccugaucauccagaacaccaccugggaggaccacugccaguucagcagacccagccccaucggcuaccugggccugcugagccagagaaccagagacaucuacaucagcagaagacugcugggcaccuucaccuggacccugagcgacagcgagggcaaggacacccccggcggcuacugccugaccagauggaugcugaucgaggccgagcugaagugcuucggcaacaccgccguggccaagugcaacgagaagcacgacgaggaguucugcgacaugcugagacuguucgacuucaacaagcaggccauccagagacugaaggccgaggcccagaugagcauccagcugaucaacaaggccgugaacgcccugaucaacgaccagcugaucaugaagaaccaccugagagacaucaugggcauccccuacugcaacuacagcaaguacugguaccugaaccacaccaccaccggcaagaccagccugcccaagugcuggcuggugagcaacggcagcuaccugaacgagacccacuucagcgacgacaucgagcagcaggccgacaacaugaucaccgagaugcugcagaaggaguacauggagagacagggcaagaccccccugggccugguggaccuguucguguucagcaccagcuucuaccugaucagcaucuuccugcaccuggugaagauccccugaggacuagucccuguucccagagcccacuuuuuuuucuuuuuuugaaauaaaauagccugucuuucagaucuaaaaaaaaaaaaaaaaaaaaaaaaaaaaaaaaaaaaaaaaaaaaaaaaaaaaaaaaaaaaaaaaaaaaaaaaaaaaaaaaaaaaaaaaaaaaaaaaaaaa

SEQ ID NO: 42112 - RNA, 1610 nt, Artificial Sequence
  mRNA product Design a-1 (A100) comprising derived and/or modified sequence from MOPV/LASV reassortant(IGS-1;Clade IV)__AFY05576__GPCmut13 (opt4)
aggagagucccgcagucggcguccagcggcucugcuuguucgugugugugucguugcaggccuuauucaagcuuaccaugggccagaucgugaccuucuuccaggaggugccccacgugaucgaggaggugaugaacaucgugcugaucgcccugagcgugcuggccgugcugaagggccuguacaacuucgccaccugcggccuggugggccuggugaccuuccugcugcugugcggcagaagcugcaccaccagccuguacaagggcguguacgagcugcagacccuggagcugaacauggagacccugaacaugaccaugccccugagcugcaccaagaacaacagccaccacuacaucauggugggcaacgagaccggccuggagcugacccugaccaacaccagcaucaucaaccacaaguucugcaaccugagcgacgcccacaagaagaaccuguacgaccacgcccugaugagcaucaucagcaccuuccaccugagcauccccaacuucaaccaguacgaggccaugagcugcgacuucaacggcggcaagaucagcgugcaguacaaccugagccacagcuacgccggcgacgccgccaaccacugcggcaccguggccaacggcgugcugcagaccuucaugagaauggccuggggcggcagcuacaucgcccuggacagcggcagaggcaacugggacugcaucaugaccagcuaccaguaccugaucauccagaacaccaccugggaggaccacugccaguucagcagacccagccccaucggcuaccugggccugcugagccagagaaccagagacaucuacaucagcagaagacugcugggcaccuucaccuggacccugagcgacagcgagggcgaggacacccccggcggcuacugccugaccagauggaugcugaucgaggccgagcugaagugcuucggcaacaccgccguggccaagugcaacgagaagcacgacgaggaguucugcgacaugcugagacuguucgacuucaacaagcaggccauccagagacugaaggccgaggcccagaugagcauccagcugaucaacaaggccgugaacgcccugaucaacgaccagcugaucaugaagaaccaccugagagacaucaugggcauccccuacugcaacuacagcaaguacugguaccugaaccacaccaccaccggcagaaccagccugcccaagugcuggcuggugagcaacggcagcuaccugaacgagacccacuucagcgacgacaucgagcagcaggccgacaacaugaucaccgagaugcugcagaaggaguacauggagagacagggcaagaccccccugggccugguggaccuguucguguucagcaccagcuucuaccugaucagcaucuuccugcaccuggugaagauccccugaggacuagucccuguucccagagcccacuuuuuuuucuuuuuuugaaauaaaauagccugucuuucagaucuaaaaaaaaaaaaaaaaaaaaaaaaaaaaaaaaaaaaaaaaaaaaaaaaaaaaaaaaaaaaaaaaaaaaaaaaaaaaaaaaaaaaaaaaaaaaaaaaaaaa

SEQ ID NO: 42113 - RNA, 1610 nt, Artificial Sequence
  mRNA product Design a-1 (A100) comprising derived and/or modified sequence from LASV(LM765-SLE-2012;Clade IV)__AIT17814__GPCmut13 (opt4)
aggagagucccgcagucggcguccagcggcucugcuuguucgugugugugucguugcaggccuuauucaagcuuaccaugggccagaucgugaccuucuuccaggaggugccccacgugaucgaggaggugaugaacaucgugcugaucgcccugagcauccuggccgugcugaagggccuguacaacuucgccaccugcggccuggugggccuggugaccuuccugcugcugugcggcagaagcugcaccaccagccuguacaagggcguguacgagcugcagacccuggagcugaacauggagacccugaacaugaccaugccccugagcugcaccaagaacaacagccaccacuacaucauggugggcaacgagaccggccuggagcugacccugaccaacaccagcaucaucgaccacaaguucugcaaccugagcgacgcccacagaaagaaccuguacgaccacgcccugaugagcaucaucagcaccuuccaccugagcauccccaacuucaaccaguacgaggccaugagcugcgacuucaacggcggcaagaucagcgugcaguacaaccugagccacagcuacgccaaggacgccgccgaccacugcggcaccguggccaacggcgugcugcagaccuucaugagaauggccuggggcggcagcuacaucgcccuggacagcggcagaggcagaugggacugcaucaugaccagcuaccaguaccugaucauccagaacaccaccugggaggaccacugccaguucagcagacccagccccaucggcuaccugggccugcugagccagagaaccagagacaucuacaucagcagaagacugcugggcaccuucaccuggacccugagcgacagcgagggcaaggacacccccggcggcuacugccugaccagauggaugcugaucgaggccgagcugaagugcuucggcaacaccgccguggccaagugcaacgagaagcacgacgaggaguucugcgacaugcugagacuguucgacuucaacaagcaggccauccagagacugaaggccgaggcccagaugagcauccagcugaucaacaaggccgugaacgcccugaucaacgaccagcugaucaugaagaaccaccugagagacaucaugggcauccccuacugcaacuacagcaaguacugguaccugaaccacaccaccaccggcaagaccagccugcccaagugcuggcuggugagcaacggcagcuaccugaacgagacccacuucagcgacgacaucgagcagcaggccgacaacaugaucaccgagaugcugcagaaggaguacauggagagacagggcaagaccccccugggccugguggaccuguucguguucagcaccagcuucuaccugaucagcaucuuccugcaccuggugaagauccccugaggacuagucccuguucccagagcccacuuuuuuuucuuuuuuugaaauaaaauagccugucuuucagaucuaaaaaaaaaaaaaaaaaaaaaaaaaaaaaaaaaaaaaaaaaaaaaaaaaaaaaaaaaaaaaaaaaaaaaaaaaaaaaaaaaaaaaaaaaaaaaaaaaaaa

SEQ ID NO: 42114 - RNA, 1610 nt, Artificial Sequence
  mRNA product Design a-1 (A100) comprising derived and/or modified sequence from LASV(LM776-SLE-2012;Clade IV)__AIT17824__GPCmut13 (opt4)
aggagagucccgcagucggcguccagcggcucugcuuguucgugugugugucguugcaggccuuauucaagcuuaccaugggccagaucgugaccuucuuccaggaggugccccacgugaucgaggaggugaugaacaucgugcugaucgcccugagcauccuggccgugcugaagggccuguacaacuucgccaccugcggccuggugggccuggugaccuuccugcugcugugcggcagaagcugcaccaccagcguguacaagggcguguacgagcugcagacccuggagcugaacauggagacccugaacaugaccaugccccugagcugcaccaagaacaacagccaccacuacaucauggugggcaacgagaccggccuggagcugacccugaccaacaccagcaucaucaaccacaaguucugcaaccugagcgacgcccacaagaagaaccuguacgaccacgcccugaugagcaucaucagcaccuuccaccugagcauccccaacuucaaccaguacgaggccaugagcugcgacuucaacggcggcaagaucagcgugcaguacaaccugagccacagcuacgccggcgacgccgccaaccacugcggcaccguggccaacggcgugcugcagaccuucaugagaauggccuggggcggcagcuacaucgcccuggacagcggccacggcaagugggacugcaucaugaccagcuaccaguaccugaucauccagaacaccaccugggaggaccacugccaguucagcagacccagccccaucggcuaccugggccugcugagccagagaaccagagacaucuacaucagcagaagacugcugggcaccuucaccuggacccugagcgacagcgagggcaaggacacccccggcggcuacugccugaccagauggaugcugaucgaggccgagcugaagugcuucggcaacaccgccguggccaagugcaacgagaagcacgacgaggaguucugcgacaugcugagacuguucgacuucaacaagcaggccauccagagacugaaggccgaggcccagaugagcauccagcugaucaacaaggccgugaacgcccugaucaacgaccagcugaucaugaagaaccaccugagagacaucaugggcauccccuacugcaacuacagcaaguacugguaccugaaccacaccaccaccggcaagaccagccugcccaagugcuggcuggugagcaacggcagcuaccugaacgagacccacuucagcgacgacaucgagcagcaggccgacaacaugaucaccgagaugcugcagaaggaguacauggagagacagggcaagaccccccugggccugguggaccuguucguguucagcaccagcuucuaccugaucagcaucuuccugcaccuggugaagauccccugaggacuagucccuguucccagagcccacuuuuuuuucuuuuuuugaaauaaaauagccugucuuucagaucuaaaaaaaaaaaaaaaaaaaaaaaaaaaaaaaaaaaaaaaaaaaaaaaaaaaaaaaaaaaaaaaaaaaaaaaaaaaaaaaaaaaaaaaaaaaaaaaaaaaa

SEQ ID NO: 42115 - RNA, 1610 nt, Artificial Sequence
  mRNA product Design a-1 (A100) comprising derived and/or modified sequence from LASV(Mad39;Clade IV)__ANH09722__GPCmut13 (opt4)
aggagagucccgcagucggcguccagcggcucugcuuguucgugugugugucguugcaggccuuauucaagcuuaccaugggccagaucgugaccuucuuccaggaggugccccacgugaucgaggaggugaugaacaucgugcugaucgcccugagcauccuggccgugcugaagggccuguacaacguggccaccugcggccugaucggccuggugaccuuccugcugcugugcggcagaagcugcaccaccacccuguacaagggcguguacgagcugcaggcccuggagcugaacauggagacccugaacaugaccaugccccugagcugcaccaagaacaacagccaccacuacaucagagugggcaacgagaccggccuggagcugacccugaccaacaccagccugaucaaccacaaguucugcaaccugagcgacgcccacaagaagaaccuguacgaccacgcccugaugagcaucaucagcaccuuccaccugagcauccccaacuucaaccaguacgaggccaugagcugcgacuucaacgacggcaagaucagcgugcaguacaaccugagccacaccuacgccggcgacaccgccaaccacugcggcaccguggccaacggcgugcugcagaccuucaugagaauggccuggggcggcagcuacaucgcccuggacagcggcagaggcggcugggacugcaucaugaccagcuaccaguaccugaucauccagaacaccaccugggaggaccacugccaguucagcagacccagccccaucggcuaccugggccugcugagccagagaaccagagacaucuacaucagcagaagacugcugggcaccuucaccuggacccugagcgacagcgagggcaaggacacccccggcggcuacugccugaccagauggaugcugaucgaggccgagcugaagugcuucggcaacaccgccguggccaagugcaacgagaagcacgacgaggaguucugcgacaugcugagacuguucgacuucaacaagcaggccauccagagacugaaggccgaggcccagaugagcauccagcugaucaacaaggccgugaacgcccugaucaacgaccagcugaucaugaagaaccaccugagagacaucaugggcauccccuacugcaacuacagcaaguacugguaccugaaccacaccgugaccggcaagaccagccugcccaagugcuggcuggugagcaacggcagcuaccugaacgagacccacuucagcgacgacaucgagcagcaggccgacaacaugaucaccgagaugcugcagaaggaguacauggagagacagggcaagaccccccugggccugguggaccuguucguguucagcaccagcuucuaccugaucagcaucuuccugcaccuggugaagauccccugaggacuagucccuguucccagagcccacuuuuuuuucuuuuuuugaaauaaaauagccugucuuucagaucuaaaaaaaaaaaaaaaaaaaaaaaaaaaaaaaaaaaaaaaaaaaaaaaaaaaaaaaaaaaaaaaaaaaaaaaaaaaaaaaaaaaaaaaaaaaaaaaaaaaa

SEQ ID NO: 42116 - RNA, 1610 nt, Artificial Sequence
  mRNA product Design a-1 (A100) comprising derived and/or modified sequence from LASV(Z0947-SLE-2011;Clade IV)__AIT17840__GPCmut13 (opt4)
aggagagucccgcagucggcguccagcggcucugcuuguucgugugugugucguugcaggccuuauucaagcuuaccaugggccagaucgugaccuucuuccaggaggugccccacgugaucgaggaggugaugaacaucgugcugaucgcccugagcauccuggccgugcugaagggccuguacaacuucgccaccugcggccuggugggccuggugaccuuccugcugcugugcggcagaagcugcaccaucagccuguacaagggcguguacgagcugcagacccuggagcugaacauggagacccugaacaugaccaugccccugagcugcaccaagaacaacagccaccacuacaucauggugggcaacgagaccggccuggagcugacccugaccaacaccagcaucaucaaccacaaguucugcaaccugagcgacgcccacaagaagaaccuguacgaccacgcccugaugagcaucaucagcaccuuccaccugagcauccccaacuucaaccaguacgaggccaugagcugcgacuucaacggcggcaagaucagcgugcaguacaaccugagccacagcuacgccggcgacgccgccaaccacugcggcaccguggccaacggcgugcugcagaccuucaugagaauggccuggggcggcagcuacaucgcccuggacagcggcagagacagaugggacugcaucaugaccagcuaccaguaccugaucauccagaacaccaccugggaggaccacugccaguucagcagacccagccccaucggcuaccugggccugcugagccagagaaccagagacaucuacaucagcagaagacugcugggcaccuucaccuggacccugagcgacagcgagggcaaggacacccccggcggcuacugccugaccagauggaugcugaucgaggccgagcugaagugcuucggcaacaccgccguggccaagugcaacgagaagcacgacgaggaguucugcgacaugcugagacuguucgacuucaacaagcaggccauccagagacugaaggccgaggcccagaugagcauccagcugaucaacaaggccgugaacgcccugaucaacgaccagcugaucaugaagaaccaccugagagacaucaugggcauccccuacugcaacuacagcaaguacugguaccugaaccacaccaccaccggcaagaccagccugcccaagugcuggcuggugagcaacggcagcuaccugaacgagacccacuucagcgacgacaucgagcagcaggccgacaacaugaucaccgagaugcugcagaaggaguacauggagagacagggcaagaccccccugggccugguggaccuguucguguucagcaccagcuucuaccugaucagcaucuuccugcaccuggugaagauccccugaggacuagucccuguucccagagcccacuuuuuuuucuuuuuuugaaauaaaauagccugucuuucagaucuaaaaaaaaaaaaaaaaaaaaaaaaaaaaaaaaaaaaaaaaaaaaaaaaaaaaaaaaaaaaaaaaaaaaaaaaaaaaaaaaaaaaaaaaaaaaaaaaaaaa

SEQ ID NO: 42117 - RNA, 1610 nt, Artificial Sequence
  mRNA product Design a-1 (A100) comprising derived and/or modified sequence from LASV(Josiah;Clade IV)__NP_694870__GPCmut13 (opt5)
aggagagucccgcagucggcguccagcggcucugcuuguucgugugugugucguugcaggccuuauucaagcuuaccaugggccagaucgugaccuucuuucaagaggucccccacguuauugaagaggugaugaacaucgugcugauugcccucagcguccuggcugugcuuaaggggcuguacaauuucgccacaugcggacucguuggccuggugacguuucuucugcucugugggagauccugcaccacaucucuguauaaaggagucuacgaacugcagacccucgagcugaacauggaaacacuuaauaugaccaugccucugagcuguacaaagaacaauucccaucacuauaucauggugggcaacgagaccgggcucgagcugacgcuuaccaauacaucuauuaucaaccauaaauucugcaaucugagcgacgcgcacaagaaaaaccucuacgaucaugcucugauguccaucauuucuaccuuucaccugagcaucccgaauuucaaccaguaugaagccauguccugugacuuuaauggaggcaagauuagcguucaguacaaccucucucacuccuaugccggcgaugcugccaaucauugcgggacaguggcuaacggaguccugcaaaccuucaugcggauggccuggggcgggagcuacaucgcgcuugacucuggacgcggcaacugggauuguauuaugacguccuaccaguaucugaucauucagaauacaaccugggaggaccacugccaguuuagcagacccucuccuaucggguaccucggacugcuuucccaacggacacgcgauaucuauauuagcagacggcugcucggcaccuucaccuggacacuguccgacucugaaggcaaggauacgcccgggggauacugucugacccgcuggaugcucaucgaggccgagcugaaaugcuuuggcaacacagcuguggccaaguguaaugaaaaacaugacgaggaguucugcgauaugcuuagacuguuugacuucaacaagcaggcuauucagcggcucaaagccgaagcgcagaugagcauccaacugauuaauaaggccgugaacgcucuuaucaaugaucagcugaucaugaagaaccaccuccgcgacauuauggggaucccuuauugcaauuacuccaaauauugguaccugaaccacaccacaaccggaagaacgagccugcccaaguguuggcucgucucuaauggcuccuaccugaacgaaacacauuucagcgacgauauugagcagcaagccgacaauaugaucaccgagaugcuucagaaagaauauauggagcggcaggggaagaccccucugggacucguugaucuguuuguguucucuaccagcuuuuaccugauuuccaucuuccuucaccucgugaaaaucccgugaggacuagucccuguucccagagcccacuuuuuuuucuuuuuuugaaauaaaauagccugucuuucagaucuaaaaaaaaaaaaaaaaaaaaaaaaaaaaaaaaaaaaaaaaaaaaaaaaaaaaaaaaaaaaaaaaaaaaaaaaaaaaaaaaaaaaaaaaaaaaaaaaaaaa

SEQ ID NO: 42118 - RNA, 1607 nt, Artificial Sequence
  mRNA product Design a-1 (A100) comprising derived and/or modified sequence from LASV(LP;Clade I)__AAF86701__GPCmut13 (opt5)
aggagagucccgcagucggcguccagcggcucugcuuguucgugugugugucguugcaggccuuauucaagcuuaccaugggccagaucauuaccuucuuucaagaggugccccacgucaucgaagagguuaugaacauugugcugaucgcccucagccugcuugcuauucugaaggggcucuacaauaucgccacaugcggaaucauuggccugguggcguuccuuuuucugugugggaaauccugcucucucacgcugaagggaggcuaugaacugcagacccucgagcugaacauggaaacacuuaauaugaccaugccucugagcuguaccaaaaacuccucucaucacuacaucagagucgggaaugagacaggacucgagcugacacuuaccaacacgagcauuaucaaucauaaguucugcaaccuguccgacgcucacaaaaagaaucucuaugaucaugcccugaugucuauuaucagcaccuuucaccuguccauuccgaacuucaaucaguacgaagccaugagcugugacuuuaacggcggcaagaucucugugcaguauaaucucucccacagcuacgcuggggaugccgcugagcauugcggaacaguugccaacggcgugcugcaaaccuucaugcggauggcguggggagggcgcuauaucgcccuugacucuggcaaagggaauugggauuguauuaugacauccuaccaguaccugaucauucagaacaccacgugggaagaccacugccaguuuagcagacccucuccuaucggauaucucggccugcuuucccaacggacacgcgauauuuacaucagcagacggcugcucggcaccuucacauggacccuguccgacucugaggggaacgagacccccggaggcuauugucugacacgcuggaugcucaucgaagcugagcugaagugcuuugggaauacggccgucgcuaaauguaacgaaaagcaugaugaggaguucugcgacaugcuuagacuguuugauuucaauaaacaggccauucggcgccucaaggcggaagcccagaugagcauccagcugauuaacaaggcugugaaugcccuuaucaacgaccaacugauuaugaaaaaucaccucagagauaucaugggaaucccuuacugcaacuauuccaaguacugguaucugaaucacaccagcucuggccggacaucccugcccaaauguuggcucauuagcaacgggucuuaccugaaugagacccaguucagcgacgacaucgaacagcaagcugauaacaugauuacagagaugcuucagaaggaauacaucgagcgccagggaaaaaccccucugggccucguugacauuuuuaucuucuccacgucuuuuuaucugauuagcaucuuccugcaucuuaucaagauuccgugaggacuagucccuguucccagagcccacuuuuuuuucuuuuuuugaaauaaaauagccugucuuucagaucuaaaaaaaaaaaaaaaaaaaaaaaaaaaaaaaaaaaaaaaaaaaaaaaaaaaaaaaaaaaaaaaaaaaaaaaaaaaaaaaaaaaaaaaaaaaaaaaaaaaa

SEQ ID NO: 42119 - RNA, 1607 nt, Artificial Sequence
  mRNA product Design a-1 (A100) comprising derived and/or modified sequence from LASV(803213;Clade II)__AAF86703__GPCmut13 (opt5)
aggagagucccgcagucggcguccagcggcucugcuuguucgugugugugucguugcaggccuuauucaagcuuaccaugggccagaucauuaccuucuuucaagaggugccccacgucaucgaagagguuaugaacauugugcugaucgcccucagccugcuugcuauucugaaggggaucuacaauguggccacaugcggacucuucggccugaucuccuuucuucugcucugugggagaucuugcagcgucacguauaaaggaguguacgaacugcagacccuggagcucaacauggcgaaucugaacaugacaaugccucuuuccuguaccaagaauaacucucaucacuauauuaugguuggcaaugaaacagggcuggagcucacccugacaaacaccagcaucauuaaucauaaauucugcaaccuuuccgacgcucacaagaaaaaucuguacgaucaugcccucaugucuaucauuagcacguuucaccuguccaucccgaacuucaaucaguaugaggccaugagcugugacuuuaacggaggcaagauuucugugcaguacaaucugucccacagcuucgcugucgaugccgcuaaccauugcggcaccaucgccaacggggugcuccaaacauuuaugcggauggcguggggaggcucuuauaucgcccuggacuccgggaagggaaauugggauuguauuaugaccagcuaccaguaccuuaucauucagaacacaaccugggaagaccacugccaguucucucgccccuccccuaucggcuaucuggggcuccugagccaaagaacgcgggauauuuacaucucccgcagacuucugggaacauuuaccuggacacucucugacagcgagggcaaugaagcucccggcggguauugucugacccgguggaugcugaucgaggccgagcucaaaugcuucggaaacaccgcuguugccaaguguaaugaaaaacaugaugaggaauuuugcgacaugcugcgccuuuucgauuucaacaagcaggcgauuaaaagacugaagacagaggcccagauguccauccagcucauuaauaaggcugugaacgcccugaucaaugaccaacuuauuaugaaaaaccaucugcgggauaucaugggcaucccuuacugcaauuauagccgcuacugguaucucaaccacacggucaccgggaagacaucucugcccagauguuggcugguguccaauggaagcuaccucaacgaaacccacuuuucugacgacauugagcagcaggcugauaauaugaucacagagaugcugcaaaaagaauacauggaccggcagggcaagaccccucuugggcugguggaucucuucgucuuuagcacguccuucuaucugauuucuaucuuucugcaccuuguuaaaauuccgugaggacuagucccuguucccagagcccacuuuuuuuucuuuuuuugaaauaaaauagccugucuuucagaucuaaaaaaaaaaaaaaaaaaaaaaaaaaaaaaaaaaaaaaaaaaaaaaaaaaaaaaaaaaaaaaaaaaaaaaaaaaaaaaaaaaaaaaaaaaaaaaaaaaaa

SEQ ID NO: 42120 - RNA, 1607 nt, Artificial Sequence
  mRNA product Design a-1 (A100) comprising derived and/or modified sequence from LASV(GA391;Clade III)__CAA36645__GPCmut13 (opt5)
aggagagucccgcagucggcguccagcggcucugcuuguucgugugugugucguugcaggccuuauucaagcuuaccaugggccagaucgugaccuucuuucaagaggucccccacguuauugaagaggugaugaacaucgugcugauugcccucagcauccuggcuauucuuaaggggcuguacaaugucgccacaugcggacucaucggccuggugacguuccuucugcucuccgggagaucuuguagccugaucuauaaaggaaccuacgaacugcagacacucgagcugaacauggaaacccuuaauaugacaaugccucuguccugcaccaagaacaauucucaucacuauauucggguuggcaacgagacagggcucgagcugacccuuacgaauaccagcauccugaaccauaaauuuuguaaucucuccgacgcgcacaagcgcaaccuguacgaucauucucugaugagcauuaucuccacauuccaccucagcauuccgaauuuuaaccaguaugaagcuaugucuugcgacuucaauggaggcaaaaucaccgugcaguacaaccugucccacagcuuugccgucgaugccgcuggccauugugggacacuugccaauggagugcugcaaaccuucaugagaauggcuuggggcgggucuuauauugcccucgacuccggacggggcaacugggauugcaucaugacgagcuaccaguaccugaucauucagaacacaaccugggacgaucacugucaguuuucucgccccuccccuaucggguaucuuggacugcucagccaaagaacacgggacauuuacaucucccgcagacugcugggcaccuucaccuggacacucucugauagcgagggcaaugaaacgcccgggggauauugccugacccgguggaugcuuauugaggcggagcugaaguguuuuggcaacacagccguugcuaagugcaaugaaaaacaugacgaggaguucugugauaugcuccgccuguuugacuucaacaagcaggccaucagacggcuuaaaaccgaagcucagauguccauccagcugauuaauaaggccgugaacgcgcucaucaaugaucaacugauuaugaaaaaccaucugcgcgacaucauggggauuccuuacugcaauuauagcagauacugguaucucaaccacacaucuaccggaaagacgucccugccccggugcuggcuuaucagcaauggcucuuaccugaacgaaacaaaguucagcgacgauaucgagcagcaggccgacaauaugauuaccgagaugcuccaaaaagaauacaucgaucgccaggggaagaccccucugggacuggucgaccuuuuuguguucuccacaucuuuuuaucucauuagcaucuuccugcaccuggugaaaauuccgugaggacuagucccuguucccagagcccacuuuuuuuucuuuuuuugaaauaaaauagccugucuuucagaucuaaaaaaaaaaaaaaaaaaaaaaaaaaaaaaaaaaaaaaaaaaaaaaaaaaaaaaaaaaaaaaaaaaaaaaaaaaaaaaaaaaaaaaaaaaaaaaaaaaaa

SEQ ID NO: 42121 - RNA, 1610 nt, Artificial Sequence
  mRNA product Design a-1 (A100) comprising derived and/or modified sequence from LASV(AV;Clade V)__CCA30314__GPCmut13 (opt5)
aggagagucccgcagucggcguccagcggcucugcuuguucgugugugugucguugcaggccuuauucaagcuuaccaugggccagaucgugaccuucuuucaagaggucccccacguuauugaagaggugaugaacaucgugcugauugcccucagcauccuggcuguccuuaaggggcuguacaauauugccacaugcggacucaucggccugaucacguuccuucugcucugugggagauccugcucuagcaaccuguauaaaggaguguacgaacugcagucccucgaccugaauauggagacccuuaacaugacaaugccucugucuuguaccaagaauaacagccaucacuauauucggguuggcaaugauacagggcucgaacugacccuuacaaacaccuccauccugaaucauaaauuuugcaaccucucugacgcgcacaagaaagaucuguacgaccaugcucugaugagcauuaucuccacguuccaccucagcauuccgaauuuuaaccaguaugaggccaugucuugugauuucaauggaggcaagaucuccgugcaguacaaccugagccacucuuaugccauugacgcugccaaucauugcggcaccgucgcuaacgggauccuucaaacauuuaugcgcauggccuggggaggcuccuacaucgcgcuggauagcgggagaggaaacugggacuguauuaugaccucuuaccaguaucucaucauucagaauacaaccugggagaaccacugccaguucucccggcccagcccuaucggcuaccuggggcuucugucccaacgcacgagagauauuuauaucucucggcgccuccugggaacauuuaccuggacacugagcgacuccgaaggcaaugccacccccggcggguacugucucaccagauggaugcugaucgaggcugaacuuaagugcuucggaaacacagccguggcuaaauguaaugagaagcaugaugaggaauuuugcgacaugcugcgccucuucgauuuuaacaaacaggccauuagccggcugaagucugaggcgcagauguccauccagcuuauuaauaaagccguuaacgcucugaucaaugaccaacucauuaugaagaaccaccugagagacaucaugggcaucccuuauugcaauuacagcaaguauugguaccugaaccacacgauuaccgggaaaacaucucuccccaaguguuggcuggugagcaauggauccuaccuuaacgaaacccauuucucugaugacaucgagcagcaggccgauaauaugauuacagaaaugcugcaaaaagaguauauggagcggcagggcaagaccccucucgggcuggucgaccuguucguguuuagcacguccuucuaccuuaucagcauuuuucuccgccuggugaaaaucccgugaggacuagucccuguucccagagcccacuuuuuuuucuuuuuuugaaauaaaauagccugucuuucagaucuaaaaaaaaaaaaaaaaaaaaaaaaaaaaaaaaaaaaaaaaaaaaaaaaaaaaaaaaaaaaaaaaaaaaaaaaaaaaaaaaaaaaaaaaaaaaaaaaaaaa

SEQ ID NO: 42122 - RNA, 1607 nt, Artificial Sequence
  mRNA product Design a-1 (A100) comprising derived and/or modified sequence from LASV(Togo/2016/7082;Clade VI)__AMR44577__GPCmut13 (opt5)
aggagagucccgcagucggcguccagcggcucugcuuguucgugugugugucguugcaggccuuauucaagcuuaccaugggccagaucauuaccuucuuucaagaggugccccacgucaucgaagagguuaugaacauugugcugaucgcccucagccugcuugcuauucugaaggggguguacaaugucgccacaugcggaaucaucggccucgugacguuccuguuucuuugugggagauccugcucucugauuuauaaaggaagcuacgaacuccagacccuggagcugaacauggaaacacucaauaugaccaugccucuguccuguacaaagaacucuagccaucacuauauccggguuggcaaugagaccgggcuugagcugacacucaccaacacguccauuaucaaucauaaauucugcaaccugucugacgcgcacaagcgcaaucuuuacgaucaugcucugaugagcauucucuccaccuuucaccugagcaucccgaacuucaaucaguaugaagccaugucuugugacuuuaacggaggcaaaauuuccgugcaguacaaucugagccacgccuaugcugucgaugccgcugagcauugcggcacaguggccaacgggguucuccaaaccuucaugagaauggcguggggaggcucuuacaucgcccuggacuccgggcggggaaauugggauuguaucaugacaagcuaccaguaucuuauuauccagaacaccacgugggaagaccacugccaguuuucucgccccuccccuauuggcuaccuggggcuccugagccaaagaacacgggauaucuauauuucccgcagacuucugggaaccuucacauggacccucucugacagcgagggcaacgagacccccggcggguacugucugacacgguggaugcugaucgaagcugagcucaagugcuuuggaaauacggccguggcuaaguguaacgaaaaacaugaugaggaguucugcgacaugcugcgccuuuuugauuucaauaagcaggccauccagagacugaaauccgaagcgcagaugagcauucaacucaucaacaaggccgucaaugcucugauuaacgaccagcuuaucaugaaaaaucaucugcgggauaugaugggcauuccuuauugcaacuacucuaaguauugguaccucaaucacaccuccagcgggcgcacaucucugcccaaguguuggcuggugagcaacggauccuaccucaaugagacccacuucucugacgacaucgaacagcaagccgauaacaugaucacagagaugcugcagaaagaauauauugacagacagggcaagaccccucuugggcugguggaucucuuugucuucagcacguccuuuuaccugaucagcauuuuccugcaccuuaucaaaauuccgugaggacuagucccuguucccagagcccacuuuuuuuucuuuuuuugaaauaaaauagccugucuuucagaucuaaaaaaaaaaaaaaaaaaaaaaaaaaaaaaaaaaaaaaaaaaaaaaaaaaaaaaaaaaaaaaaaaaaaaaaaaaaaaaaaaaaaaaaaaaaaaaaaaaaa

SEQ ID NO: 42123 - RNA, 1607 nt, Artificial Sequence
  mRNA product Design a-1 (A100) comprising derived and/or modified sequence from LASV(KAK-428;Clade n.d. (VII))__ANH09740__GPCmut13 (opt5)
aggagagucccgcagucggcguccagcggcucugcuuguucgugugugugucguugcaggccuuauucaagcuuaccaugggccagaucgugaccuucuuucaagaggucccccacguuauugaagaggugaugaacaucgugcugauugcccucagccugcuugcuauccugaaggggcucuacaauuucgccacaugcggagucauuggccugaucacguuucuucugcucugugggagauccugcucugcgaccuauaaaggacaguacgaacugcagacacuggagcucaacauggaaagccugaauaugaccaugccucuuuccuguacaaagaacaauucucaucacuauauccgggcuggcaacaauaccgggcuggagcucacacugaccaacacgagcauuaucucccauaaauucugcaaucuuucugacgcccacaagaaaaaccuguacgaucauacccucaugagcauuaucacaaccuuucaccuguccauuccgaauuucaaccaguaugaggccaugagcugugacuuuaauggaggcaagaucucuauucaauacaaccugucccacagcuaugcuggcgaugccgcucagcauugcgggacaguggccaauggaguucuccagaccuucaugcgcauggcguggggcgggucuuaccuggcccuugacuccggaagacggggcugggauuguaucaucagcucuuaccaguaucugauuauccaaaacacgacaugggacgaucacugccaguuuucccgccccagcccuauuggguaccucggauucgugucccagaagaccagagacaucuauauuucucggcgccugcuuggcacauuuaccuggacccugagcgauuccgaaggccaugacaugcccgggggauacugucucacaagauggaugcugaucgaggcugaucugaaaugcuucggcaacacggccgucgcuaaguguaaugaaaaacacgacgaggaguuuugcgauauguggcgccucuucgacuucaacaagcaggccauccaacggcugaaagcggaagcccagaugaauauucagcuuaucaacaaggcugugaaugcccugauuaacgaccaacucaugaugaagaaucaccugagagauaucauggggauuccuuauugcaacuacagcaaauuuugguaucuuaauaacaccacaaccggacggacaucucugccccgcuguuggcucaucuccaauggcagcuaccugaacgagacccauuucucugacgauaucgaacagcaggcugacaauaugauuacggagaugcugcagaaggaauacauggauagacaagggaaaacaccucucggacugguugaccuuuuuguguucagcaccuccuuuuaucugaucaccauuuuccuccaccuggucaagaucccgugaggacuagucccuguucccagagcccacuuuuuuuucuuuuuuugaaauaaaauagccugucuuucagaucuaaaaaaaaaaaaaaaaaaaaaaaaaaaaaaaaaaaaaaaaaaaaaaaaaaaaaaaaaaaaaaaaaaaaaaaaaaaaaaaaaaaaaaaaaaaaaaaaaaaa

SEQ ID NO: 42124 - RNA, 1607 nt, Artificial Sequence; identical to SEQ ID NO: 42118
  mRNA product Design a-1 (A100) comprising derived and/or modified sequence from LASV(Pinneo-NIG-1969;Clade I)__AIT17836__GPCmut13 (opt5)

SEQ ID NO: 42125 - RNA, 1607 nt, Artificial Sequence
  mRNA product Design a-1 (A100) comprising derived and/or modified sequence from LASV(ISTH0009-NIG-2011;Clade II)__AIT17404__GPCmut13 (opt5)
aggagagucccgcagucggcguccagcggcucugcuuguucgugugugugucguugcaggccuuauucaagcuuaccaugggccagaucauuaccuucuuucaagaggugccccacgucaucgaagagguuaugaacauugugcugaucgcccucagccugcuugcuauucugaaggggaucuacaauguggccacaugcggacucuucggccuggucuccuuucuucugcucugugggagaucuugcagcacgaccuauaaaggaguguacgaacugcagacacuggagcucgacauggcgucccugaacaugaccaugccucuuucuuguacaaagaauaacagccaucacuauaucaugguuggcaaugaaaccgggcuggagcucacacugaccaacacguccauuaucaaucauaaauucugcaaccuuucugaugcucacaagaaaaaucuguacgaccaugcccucaugagcauuaucuccaccuuucaccugagcauuccgaacuucaaucaguaugaggccaugucuugugauuuuaacggaggcaagaucuccgugcaguacaaucugagccacgcuuaugccgucgacgcugccaaccauugcggcacaauugcgaauggggugcuccaaaccuucaugcggauggccuggggaggcucuuacaucgcucuggauuccgggaagggaagcugggacuguaucaugacaucuuaccaguaucuuauuauccagaacaccacgugggaagaucacugccaguuuucccgccccagcccuauuggcuaccuggggcuccugucccaaagaacacgggacaucuauauuucucgcagacuucugggaaccuucacauggacccucagcgauuccgagggcaacgaaacccccggcggguacugucugacacgguggaugcugaucgaggccgagcucaaaugcuuuggaaauacggcuguugccaaguguaacgaaaaacaugacgaggaguucugcgauaugcugcgccuuuuugacuucaauaagcaggcgaucagacggcugaaaaccgaagcccagaugagcauucagcucaucaacaaggcugugaaugcccugauuaacgaucaacuuaucaugaagaaucaucugcgcgacauuaugggcaucccuuauugcaacuacucuaaauauugguaccucaaucacacagucaccgggaagacaucccugcccagauguuggcuggugagcaacggaucuuaccucaaugaaacccacuucagcgacgauaucgagcagcaggcugacaacaugauuacggagcugcuucaaaaagaauauauggaucggcagggcaagacaccucuggggcucguggaccuguuugucuucuccaccucuuuuuaccugaucagcauuuuccuucaccucaucaaaauuccgugaggacuagucccuguucccagagcccacuuuuuuuucuuuuuuugaaauaaaauagccugucuuucagaucuaaaaaaaaaaaaaaaaaaaaaaaaaaaaaaaaaaaaaaaaaaaaaaaaaaaaaaaaaaaaaaaaaaaaaaaaaaaaaaaaaaaaaaaaaaaaaaaaaaaa

SEQ ID NO: 42126 - RNA, 1607 nt, Artificial Sequence
  mRNA product Design a-1 (A100) comprising derived and/or modified sequence from LASV(ISTH2010-NIG-2012;Clade II)__AIT17482__GPCmut13 (opt5)
aggagagucccgcagucggcguccagcggcucugcuuguucgugugugugucguugcaggccuuauucaagcuuaccaugggccagaucauuaccuucuuucaagaggugccccacgucaucgaagagguuaugaacauugugcugaucgcccucagccugcuugcuauucugaaggggaucuacaauguggccacaugcggacucuucggccuggucuccuuucuucugcucugugggagaucuugcagcacgaccuauaaaggaguguacgaacugcagacacuggagcucgacauggcgucccugaacaugaccaugccucuuucuuguacaaagaauaacagccaucacuauaucaugguuggcaaugaaaccgggcuggagcucacacugaccaacacguccauuaucaaucauaaauucugcaaccuuucugaugcucacaagaaaaaucuguacgaccaugcccucaugagcauuaucuccaccuuucaccugagcauuccgaacuucaaucaguaugaggccaugucuugugauuuuaacggaggcaagaucuccgugcaguacaaucugagccacgcuuaugccgucgacgcugccaaccauugcggcacaauugcgaauggggugcuccaaaccuucaugcggauggccuggggaggcucuuacaucgcucuggauuccgggaagggaagcugggacuguaucaugacaucuuaccaguaucuuauuauccagaacauuaccugggaagaucacugccaguuuucccgccccagcccuaucggcuaccuggggcuccugucccaaagaacgcgggacauuuauaucucucgcagacuucugggaacauucaccuggacacucagcgauuccgagggcaacgaaacccccggcggguacugucugacccgguggaugcugaucgaggccgagcucaaaugcuuuggaaauacagcuguugccaaguguaacgaaaaacaugacgaggaguucugcgauaugcugcgccuuuuugacuucaauaagcaggcgauuagacggcugaaaacggaagcccagaugagcauccagcucauuaacaaggcugugaaugcccugaucaacgaucaacuuauuaugaagaaucaucugcgcgacaucaugggcaucccuuauugcaacuacucuaaauauugguaccucaaucacaccgucacagggaagaccucccugcccagauguuggcuggugagcaacggaucuuaccucaaugaaacacacuucagcgacgauauugagcagcaggcugacaacaugaucaccgagcugcuucaaaaagaauauauugaucggcagggcaagacgccucuggggcucguggaccuguuugucuucuccacaucuuuuuaccugaucagcauuuuccuucaccucguuaaaaucccgugaggacuagucccuguucccagagcccacuuuuuuuucuuuuuuugaaauaaaauagccugucuuucagaucuaaaaaaaaaaaaaaaaaaaaaaaaaaaaaaaaaaaaaaaaaaaaaaaaaaaaaaaaaaaaaaaaaaaaaaaaaaaaaaaaaaaaaaaaaaaaaaaaaaaa

SEQ ID NO: 42127 - RNA, 1607 nt, Artificial Sequence
  mRNA product Design a-1 (A100) comprising derived and/or modified sequence from LASV(Lassa virus/H.sapiens-wt/NGA/2015/ISTH_0543;Clade II)__AVO03639__GPCmut13 (opt5)
aggagagucccgcagucggcguccagcggcucugcuuguucgugugugugucguugcaggccuuauucaagcuuaccaugggccagaucauuaccuucuuucaagaggugccccacgucaucgaagagguuaugaacauugugcugaucgcccucagccugcuugcuauucugaaggggaucuacaauguggccacaugcggacucuucggccuggucuccuuucuucugcucugugggagaucuugcagcacgaccuauaaaggaguguacgaacugcagacacuggagcucgacauggcgaaccugaauaugaccaugccucuuuccuguacaaagaacaauucucaucacuauaucaugguuggcaacgaaaccgggcuggagcucacacugaccaauacgagcauuaucaaccauaaauucugcaaucuuuccgaugcucacaagaaaaaccuguacgaccaugcccucaugucuauuaucagcaccuuucaccuguccauuccgaauuucaaccaguaugaggccaugagcugugauuuuaauggaggcaagaucucugugcaguacaaccugucccacacauaugcugucgacgccgcuaaucauugcggcaccauugccaacggggugcuccaaacauucaugcggauggcguggggaggcagcuacaucgcccuggauucugggaagggauccugggacuguaucaugaccagcuaccaguaucuuguuauucagaacacgacaugggaagaucacugccaguuuucucgccccuccccuaucggcuaccuggggcuccugagccaaagaacccgggacauuuauaucucccgcagacuucugggaacauucaccuggacccucucugauagcgagggcaaugaaacacccggcggguacugucugacgcgguggaugcugauugaggcugagcucaaaugcuuuggaaacaccgccguggcuaaguguaaugaaaaacaugacgaggaguucugcgauaugcugcgccuuuuugacuucaacaagcaggccaucagacggcugaaaacagaagcgcagauguccauccagcucauuaauaaggccgucaacgcucugaucaaugaucaacuuauuaugaagaaccaucugcgcgacaucaugggcauuccuuauugcaauuacagcaaauauugguaccucaaccacaccgugacagggaagaccucucugcccagauguuggcugguguccaauggaagcuaccucaacgaaacgcacuucucugacgauaucgagcagcaggccgacaauaugaucacagagcugcuucaaaaagaauauauugaucggcagggcaagaccccucuggggcucgucgaccuguuuguuuucagcaccuccuuuuaccugaucucuauuuuccuucaccucgugaaaaucccgugaggacuagucccuguucccagagcccacuuuuuuuucuuuuuuugaaauaaaauagccugucuuucagaucuaaaaaaaaaaaaaaaaaaaaaaaaaaaaaaaaaaaaaaaaaaaaaaaaaaaaaaaaaaaaaaaaaaaaaaaaaaaaaaaaaaaaaaaaaaaaaaaaaaaa

SEQ ID NO: 42128 - RNA, 1607 nt, Artificial Sequence
  mRNA product Design a-1 (A100) comprising derived and/or modified sequence from LASV(Lassa virus/H.sapiens-wt/NGA/2016/ISTH_0009;Clade II)__AVO03571__GPCmut13 (opt5)
aggagagucccgcagucggcguccagcggcucugcuuguucgugugugugucguugcaggccuuauucaagcuuaccaugggccagaucauuaccuucuuucaagaggugccccacgucaucgaagagguuaugaacauugugcugaucgcccucagccugcuugcuauucugaaggggaucuacaauguggccacaugcggacuccugggccuugucuccuuccugcuccugugugggagaucuugcagcacgaccuauaaaggaguguacgaacugcagacacucgagcuggacauggcgucccuuaacaugaccaugccucugucuuguacaaagaauaacagccaucacuauaucaugguuggcaaugaaaccgggcucgagcugacacuuaccaacacguccauuaucaaucauaaauuuugcaaccugucugaugcucacaagaaaaaucucuacgaccaugcccugaugagcauuaucuccaccuuccaccugagcauuccgaacuuuaaucaguaugaggccaugucuugugauuucaacggaggccggaucuccgugcaguacaaucucagccacucuuaugcugucgacgccgcuaaccauugcggcacaauugccaauggggugcugcaaaccuuuaugcgcauggcguggggaggcuccuacaucgcccuugauagcgggaagggaucuugggacuguaucaugacauccuaccaguaucugauuauccagaacaccacgugggaagaucacugccaguucagcagacccuccccuauuggcuaccucgggcugcuuucucaacggacacgcgacaucuauauuagcagacggcugcucggaaccuuuacauggacccuguccgauagcgagggcaacgaaacccccggcggguacugucugacacgcuggaugcucaucgaggcugagcugaagugcuucggaaauacggccguugcuaaauguaacgaaaagcaugacgaggaauuuugcgauaugcuuagacuguucgacuuuaauaaacaggccauccggcgccucaagaccgaggcgcagaugucuauucagcugaucaacaaagccgugaaugcucuuauuaacgaucaacugaucaugaagaaucaccucagagacauuaugggcaucccuuauugcaacuacuccaaguauugguaccugaaucacacagucaccgggaaaacaagccugccccgguguuggcucgugucuaacggaagcuaccugaaugaaacccauuucuccgacgauaucgagcagcaggccgacaacaugauuacggagcuucugcaaaaggaauauaucgaucgccagggcaaaacaccucucgggcugguggaccuguucgucuuuucuaccagcuucuaccuuauuuccaucuuucuccaccugguuaagauuccgugaggacuagucccuguucccagagcccacuuuuuuuucuuuuuuugaaauaaaauagccugucuuucagaucuaaaaaaaaaaaaaaaaaaaaaaaaaaaaaaaaaaaaaaaaaaaaaaaaaaaaaaaaaaaaaaaaaaaaaaaaaaaaaaaaaaaaaaaaaaaaaaaaaaaa

SEQ ID NO: 42129 - RNA, 1607 nt, Artificial Sequence
  mRNA product Design a-1 (A100) comprising derived and/or modified sequence from LASV(Lassa virus/H.sapiens-wt/NGA/2016/ISTH_0017;Clade II)__AVO03567__GPCmut13 (opt5)
aggagagucccgcagucggcguccagcggcucugcuuguucgugugugugucguugcaggccuuauucaagcuuaccaugggccagaucauuaccuucuuucaagaggugccccacgucaucgaagagguuaugaacauugugcugaucgcccucagccugcuugcuauucugaaggggaucuacaauguggccacaugcggacucuucggccuggucuccuuucuucugcucugugggagaucuugcagcacgaccuauaaaggaguguacgaacugcagacacuggagcucgacauggcgucccugaacaugaccaugccucuuucuuguacaaagaauaacagccaucacuauaucaugguuggcaaugaaaccgggcuggagcucacacugaccaacacguccauuaucaaucauaaauucugcaaccuuucugaugcucacaagaaaaaucuguacgaccaugcccucaugagcauuaucuccaccuuucaccugagcauuccgaacuucaaucaguaugaggccaugucuugugauuuuaacggaggcaagaucuccgugcaguacaaucugagccacacauaugcuauugacgccgcuaaccauugcggcaccaucgccaaugggguccuccaaacauucaugcggauggcguggggaggcucuuacaucgcccuggauuccgggaagggaagcugggacuguauuaugaccucuuaccaguaucuuaucauucagaacacgacaugggaagaucacugccaguuuucccgccccagcccuaucggcuaccuggggcuccugucccaaagaacccgggacauuuauaucucucgcagacuucugggaacauucaccuggacccucagcgauuccgagggcaacgaaacacccggcggguacugucugacgcgguggaugcugaucgaggcugagcucaaaugcuuuggaaauaccgccguggcuaaguguaacgaaaaacaugacgaggaguucugcgauaugcugcgccuuuuugacuucaauaagcaggccauuagacggcugaaaacagaagcgcagaugagcauccagcucauuaacaaggccguuaaugcucugaucaacgaucaacuuauuaugaagaaucaucugcgcgacaucaugggcaucccuuauugcaacuacucuaaauauugguaccucaaucacaccgugacagggaagaccucccugcccagauguuggcuggucagcaacggaucuuaccucaaugaaacgcacuucagcgacgauauugagcagcaggccgacaacaugaucacagagcugcuucaaaaagaauauauggaucggcagggcaagaccccucuggggcucguggaccuguuuguguucuccaccucuuuuuaccugauuagcaucuuccuucaccucguccgcauuccgugaggacuagucccuguucccagagcccacuuuuuuuucuuuuuuugaaauaaaauagccugucuuucagaucuaaaaaaaaaaaaaaaaaaaaaaaaaaaaaaaaaaaaaaaaaaaaaaaaaaaaaaaaaaaaaaaaaaaaaaaaaaaaaaaaaaaaaaaaaaaaaaaaaaaa

SEQ ID NO: 42130 - RNA, 1607 nt, Artificial Sequence
  mRNA product Design a-1 (A100) comprising derived and/or modified sequence from LASV(Lassa virus/H.sapiens-wt/NGA/2018/ISTH_0959;Clade II)__AVV65099__GPCmut13 (opt5)
aggagagucccgcagucggcguccagcggcucugcuuguucgugugugugucguugcaggccuuauucaagcuuaccaugggccagaucauuaccuucuuucaagaggugccccacgucaucgaagagguuaugaacauugugcugaucgcccucagccugcuugcuauucugaaggggaucuacaauguggucacaugcggacucuucggccugguguccuuucuucugcucugugggagaucuugcagcacgaccuauaaaggaguuuacgaacugcagacacuggagcucgacauggccucccugaacaugaccaugccucuuucuuguacaaagaauaacagccaucacuauaucauggugggcaaugaaaccgggcuggagcucacacugaccaacacguccauuaucaaucauaaauucugcaaccuuucugaugcgcacaagaaaaaucuguacgaccaugcucucaugagcauuaucuccaccuuucaccugagcauuccgaacuucaaucaguaugaggccaugucuugugauuuuaacggaggcaagaucuccguccaguacaaucugagccacgccuaugcuauugacgccgcuaaccauugcggcacaaucgccaauggggugcuccaaaccuucaugcggauggcguggggaggcucuuacaucgcccuggauuccgggaagggaagcugggacuguauuaugacaucuuaccaguaucuuaucauucagaacaccacgugggaagaucacugccaguuuucccgccccagcccuaucggcuaccuggggcuccugucccaaagaacacgggacauuuauaucucucgcagacuucugggaaccuucacauggacccucagcgauuccgagggcaacgaaacccccggcggguacugucugacacgguggaugcugaucgaggcugagcucaaaugcuuuggaaauacggccguugcuaaguguaacgaaaaacaugacgaggaguucugcgauaugcugcgccuuuuugacuucaauaagcaggccauuagacggcugaaaaccgaagcgcagaugagcauccagcucauuaacaaggccgugaaugcucugaucaacgaucaacuuauuaugaagaaucaucugcgcgacaucaugggcaucccuuauugcaacuacucuaaauauugguaccucaaucacacagucaccgggaagacaucccugcccagauguuggcuggugagcaacggaucuuaccucaaugaaacccacuucagcgacgauauugagcagcaggccgacaacaugaucacggagcugcuucaaaaagaauauauugaucggcagggcaagacaccucuggggcucguggaccuguuugucuucuccaccucuuuuuaccugaucagcauuuuccuucaccucguuaaaaucccgugaggacuagucccuguucccagagcccacuuuuuuuucuuuuuuugaaauaaaauagccugucuuucagaucuaaaaaaaaaaaaaaaaaaaaaaaaaaaaaaaaaaaaaaaaaaaaaaaaaaaaaaaaaaaaaaaaaaaaaaaaaaaaaaaaaaaaaaaaaaaaaaaaaaaa

SEQ ID NO: 42131 - RNA, 1607 nt, Artificial Sequence
  mRNA product Design a-1 (A100) comprising derived and/or modified sequence from LASV(LASV003-NIG-2008;Clade II)__AIT17580__GPCmut13 (opt5)
aggagagucccgcagucggcguccagcggcucugcuuguucgugugugugucguugcaggccuuauucaagcuuaccaugggccagaucauuaccuucuuucaagaggugccccacgucaucgaagagguuaugaacauugugcugaucgcccucagccugcuugcuauucugaaggggaucuacaauguggccacaugcggacucuucggccuggucuccuuucuucugcucugugggagaucuugcagcacgaccuauaaaggaguguacgaacugcagacacuggagcucgacauggcgucccugaacaugaccaugccucuuucuuguacaaagaauaacagccaucacuauaucaugguuggcaaugaaaccgggcuggagcucacacugaccaacacguccauuaucaaucauaaauucugcaaccuuucugaugcucacaagaaaaaucuguacgaccaugcccucaugagcauuaucuccaccuuucaccugagcauuccgaacuucaaucaguaugaggccaugucuugugauuuuaacggaggcaagaucuccgugcaguacaaucugagccacacauaugcugucgacgccgcuaaccauugcggcaccauugccaauggggugcuccaaacauucaugcggauggcguggggaggcucuuacaucgcccuggauuccgggaagggaagcugggacuguaucaugaccucuuaccaguaucuuauuauccagaacacgacaugggaagaucacugccaguuuucccgccccagcccuauuggcuaccuggggcuccugucccaaagaacccgggacaucuauauuucucgcagacuucugggaacauucaccuggacccucagcgauuccgagagcaacgaaacacccggcggcuacugucugacgcgguggaugcugaucgaggcugagcucaaaugcuuugggaauaccgccguugcuaaguguaacgaaaaacaugacgaggaguucugcgauaugcugcgccuuuuugacuucaauaagcaggccaucagacggcugaaagcggaagcccagaugucuauucagcucaucaacaaggcugugaaugcccugauuaacgaucaacuuaucaugaagaaucaucugcgcgacauuaugggaaucccuuauugcaacuacuccaaauauugguaccucaaucacacagucaccggcagaacaagccugccccgguguuggcuggugucuaacgggagcuaccucaaugaaacccacuucuccgacgauaucgagcagcaggcugacaacaugauuacggagcugcuucaaaaggaauauauggaucgccagggaaaaacaccucugggccucguggaccuguuugucuucucuaccagcuuuuaccugaucuccauuuuccuucaccucguuaagaucccgugaggacuagucccuguucccagagcccacuuuuuuuucuuuuuuugaaauaaaauagccugucuuucagaucuaaaaaaaaaaaaaaaaaaaaaaaaaaaaaaaaaaaaaaaaaaaaaaaaaaaaaaaaaaaaaaaaaaaaaaaaaaaaaaaaaaaaaaaaaaaaaaaaaaaa

SEQ ID NO: 42132 - RNA, 1607 nt, Artificial Sequence
  mRNA product Design a-1 (A100) comprising derived and/or modified sequence from LASV(LASV035-NIG-2009;Clade II)__AIT17588__GPCmut13 (opt5)
aggagagucccgcagucggcguccagcggcucugcuuguucgugugugugucguugcaggccuuauucaagcuuaccaugggccagaucauuaccuucuuucaagaggugccccacgucaucgaagagguuaugaacauugugcugaucgcccucagccugcuugcuauucugaaggggaucuacaauguggccacaugcggacucuucggccuggucuccuuucuucugcucugugggagaucuugcagcacgaccuauaaaggaguguacgaacugcagacacuggagcucgacauggcgucccugaacaugaccaugccucuuucuuguacaaagaauaacagccaucacuauaucaugguuggcaaugaaaccgggcuggagcucacacugaccaacacguccauuaucaaucauaaauucugcaaccuuucugaugcucacaagaaaaaucuguacgaccaugcccucaugagcauuaucuccaccuuucaccugagcauuccgaacuucaaucaguaugaggccaugucuugugauuuuaacggaggcaagaucuccgugcaguacaaucugagccacgcuuaugccgucgacgcugccaaccauugcggcacaauugcgaauggggugcuccaaaccuucaugcggauggccuggggaggcucuuacaucgcucuggauuccgggaagggaagcugggacuguaucaugacaucuuaccaguaucuuauuauccagaacaccacgugggaagaucacugccaguuuucccgccccagcccuauuggcuaccuggggcuccugucccaaagaacacgggacaucuauauuucucgcagacuucugggaaccuucacauggacccucagcgauuccgagggcaacgaaacccccggcggguacugucugacacgguggaugcugaucgaggccgagcucaaaugcuuuggaaauacggcuguugccaaguguaacgaaaaacaugacgaggaguucugcgauaugcugcgccuuuuugacuucaauaagcaggcgaucagacggcugaaagccgaagcucagaugagcauucagcucaucaacaaggccgugaaugcucugauuaacgaucaacuuaucaugaagaaucaucugcgcgacauuaugggcaucccuuauugcaacuacucuaaauauugguaccucaaucacaccgucacagggaagaccucccugcccagauguuggcuggugagcaacggaucuuaccucaaugaaacacacuucagcgacgauaucgagcagcaggccgacaacaugauuaccgagcugcuucaaaaagaauauaucgaucggcagggcaagacgccucuggggcucguggaccuguuugucuucuccacaucuuuuuaccugauuagcaucuuccuucaccucguuaaaauuccgugaggacuagucccuguucccagagcccacuuuuuuuucuuuuuuugaaauaaaauagccugucuuucagaucuaaaaaaaaaaaaaaaaaaaaaaaaaaaaaaaaaaaaaaaaaaaaaaaaaaaaaaaaaaaaaaaaaaaaaaaaaaaaaaaaaaaaaaaaaaaaaaaaaaaa

SEQ ID NO: 42133 - RNA, 1607 nt, Artificial Sequence
  mRNA product Design a-1 (A100) comprising derived and/or modified sequence from LASV(LASV1000-NIG-2009;Clade II)__AIT17782__GPCmut13 (opt5)
aggagagucccgcagucggcguccagcggcucugcuuguucgugugugugucguugcaggccuuauucaagcuuaccaugggccagaucauuaccuucuuucaagaggugccccacgucaucgaagagguuaugaacauugugcugaucgcccucagccugcuugcuauucugaaggggaucuacaauguggccacaugcggacucuucggccuggucuccuuucuucugcucugugggagaucuugcagcacgaccuauaaaggaguguacgaacugcagacacuggagcucgacauggcgucccugaacaugaccaugccucuuucuuguacaaagaauaacagccaucacuauaucaugguuggcaaugaaaccgggcuggagcucacacugaccaacacguccauuaucaaucauaaauucugcaaccuuucugaugcucacaagaaaaaucuguacgaccaugcccucaugagcauuaucuccaccuuucaccugagcauuccgaacuucaaucaguaugaggccaugucuugugauuuuaacggaggcaagaucuccgugcaguacaaucugagccacacauaugcugucgacgccgcuaaccauugcggcaccauugccaauggggugcuccaaacauucaugcggauggcguggggaggcucuuacaucgcccuggauuccgggaagggaagcugggacuguaucaugaccucuuaccaguaucuuauuauccagaacacgacaugggaagaucacugccaguuuucccgccccagcccuauuggcuaccuggggcuccugucccaaagaacccgggacaucuauauuucucgcagacuucugggaacauucaccuggacccucagcgauuccgagggcaacgaaacacccggcggguacugucugacgcgguggaugcugaucgaggcugagcucaaaugcuuuggaaauaccgccguugcuaaguguaacgaaaaacaugacgaggaguucugcgauaugcugcgccuuuuugacuucaauaagcaggccaucaaaagacugaagacagaagcgcagaugagcauucagcucaucaacaaggccgugaaugcucugauuaacgaucaacuuaucaugaaaaaucaucugcgggacauuaugggcaucccuuauugcaacuacucuaaguauugguaccucaaucacaccgucacagggaaaaccucccugccccgcuguuggcuggugagcaacggaucuuaccucaaugaaacgcacuucagcgacgauaucgagcagcaggccgacaacaugauuacagagcugcuucaaaaggaauauaucgauagacagggcaaaaccccucuggggcucguggaccuguuugucuucuccaccucuuuuuaccugauuagcaucuuccuucaccucguuaagauuccgugaggacuagucccuguucccagagcccacuuuuuuuucuuuuuuugaaauaaaauagccugucuuucagaucuaaaaaaaaaaaaaaaaaaaaaaaaaaaaaaaaaaaaaaaaaaaaaaaaaaaaaaaaaaaaaaaaaaaaaaaaaaaaaaaaaaaaaaaaaaaaaaaaaaaa

SEQ ID NO: 42134 - RNA, 1607 nt, Artificial Sequence
  mRNA product Design a-1 (A100) comprising derived and/or modified sequence from LASV(LASV221-NIG-2010;Clade II)__AIT17624__GPCmut13 (opt5)
aggagagucccgcagucggcguccagcggcucugcuuguucgugugugugucguugcaggccuuauucaagcuuaccaugggccagaucauuaccuucuuucaagaggugccccacgucaucgaagagguuaugaacauugugcugaucgcccucagccugcuugcuauucugaaggggaucuacaauguggccacaugcggacucuucggccuggucuccuuucuucugcucugugggagaucuugcagcacgaccuauaaaggaguguacgaacugcagacacuggagcucgacauggcgucccugaacaugaccaugccucuuucuuguacaaagaauaacagccaucacuauaucaugguuggcaaugaaaccgggcuggagcucacacugaccaacacguccauuaucaaucauaaauucugcaaccuuucugaugcucacaagaaaaaucuguacgaccaugcccucaugagcauuaucuccaccuuucaccugagcauuccgaacuucaaucaguaugaggccaugucuugugauuuuaacggaggcaagaucuccgugcaguacaaucugagccacacauaugcuauugacgccgcuaaccauugcggcaccaucgccaaugggguccuccaaacauucaugcggauggcguggggaggcucuuacaucgcccuggauuccgggaagggaagcugggacuguauuaugaccucuuaccaguaucuuaucauucagaacacgacaugggaagaucacugccaguuuucccgccccagcccuaucggcuaccuggggcuccugucccaaagaacccgggacauuuauaucucucgcagacuucugggaacauucaccuggacccucagcgauuccgagggcaacgaaacacccggcggguacugucugacgcgguggaugcugaucgaggcugagcucaaaugcuuuggaaauaccgccguggcuaaguguaacgaaaaacaugacgaggaguucugcgauaugcugcgccuuuuugacuucaauaagcaggccauuagacggcugaaaacagaagcgcagaugagcauccagcucauuaacaaggccguuaaugcucugaucaacgaucaacuuauuaugaagaaucaucugcgcgacaucaugggcaucccuuauugcaacuacucuaaauauugguaccucaaucacaccgugacagggaagaccucccugcccagauguuggcuggucagcaacggaucuuaccucaaugaaacgcacuucagcgacgauauugagcagcaggccgacaacaugaucacagagaugcugcaaaaagaauauauggaucggcagggcaagaccccucuugggcugguggaccucuuuguguucuccaccucuuuuuaccugauuagcaucuuccugcaccuugucaaaauuccgugaggacuagucccuguucccagagcccacuuuuuuuucuuuuuuugaaauaaaauagccugucuuucagaucuaaaaaaaaaaaaaaaaaaaaaaaaaaaaaaaaaaaaaaaaaaaaaaaaaaaaaaaaaaaaaaaaaaaaaaaaaaaaaaaaaaaaaaaaaaaaaaaaaaaa

SEQ ID NO: 42135 - RNA, 1607 nt, Artificial Sequence
  mRNA product Design a-1 (A100) comprising derived and/or modified sequence from LASV(LASV237-NIG-2010;Clade II)__AIT17638__GPCmut13 (opt5)
aggagagucccgcagucggcguccagcggcucugcuuguucgugugugugucguugcaggccuuauucaagcuuaccaugggccagaucauuaccuucuuucaagaggugccccacgucaucgaagagguuaugaacauugugcugaucgcccucagccugcuugcuauucugaaggggaucuacaauguggccacaugcggacucuucggccuggucuccuuucuucugcucugugggagaucuugcagcacgaccuauaaaggaguguacgaacugcagacacuggagcucgacauggcgucccugaacaugaccaugccucuuucuuguacaaagaauaacagccaucacuauaucaugguuggcaaugaaaccgggcuggagcucacacugaccaacacguccauuaucaaucauaaauucugcaaccuuucugaugcucacaagaaagaccuguacgaucaugcccucaugagcauuaucuccaccuuucaccugagcauuccgaauuucaaccaguaugaggccaugucuugugacuuuaauggaggcaagaucuccgugcaguacaaccugagccacacauaugcugucgaugccgcuaaucauugcggcaccauugccaacggggugcuccaaacauucaugcggauggcguggggaggcucuuacaucgcccuggacuccgggaagggaagcugggauuguaucaugaccucuuaccaguaucuuauuauccagaauacgacaugggaagaccacugccaguuuucccgccccagcccuauuggcuaccuggggcuccugucccaaagaacccgggauaucuauauuucucgcagacuucugggaacauucaccuggacccucagcgacuccgagggcaacgaaacacccggcggguacugucugacgcgguggaugcugaucgaggcugagcucaaaugcuuuggaaacaccgccguugcuaaguguaaugaaaaacaugaugaggaguucugcgacaugcugcgccuuuuugauuucaacaagcaggccaucagacggcugaaaacagaagcgcagaugagcauucagcucaucaauaaggccgugaacgcucugauuaaugaccaacuuaucaugaagaaccaucugcgcgacauuaugggcaucccuuauugcaauuacucuaaauauugguaccucaaccacaccgucacagggaagaccucccugcccagauguuggcuggugagcaauggaucuuaccucaacgaaacgcacuucagcgaugacaucgagcagcaggccgauaauaugauuacagagcugcuucaaaaagaauauauggaccggcagggcaagaccccucuggggcucguggaucuguuugucuucuccaccucuuuuuaccugaucagcauuuuccuucaccucaucaaaauuccgugaggacuagucccuguucccagagcccacuuuuuuuucuuuuuuugaaauaaaauagccugucuuucagaucuaaaaaaaaaaaaaaaaaaaaaaaaaaaaaaaaaaaaaaaaaaaaaaaaaaaaaaaaaaaaaaaaaaaaaaaaaaaaaaaaaaaaaaaaaaaaaaaaaaaa

SEQ ID NO: 42136 - RNA, 1607 nt, Artificial Sequence
  mRNA product Design a-1 (A100) comprising derived and/or modified sequence from LASV(LASV253-NIG-2011;Clade II)__AIT17670__GPCmut13 (opt5)
aggagagucccgcagucggcguccagcggcucugcuuguucgugugugugucguugcaggccuuauucaagcuuaccaugggccagaucauuaccuucuuucaagaggugccccacgucaucgaagagguuaugaacauugugcugaucgcccucagccugcuugcuauucugaaggggaucuacaauguggccacaugcggacucuucggccuggucuccuuucuucugcucugugggagaucuugcagcacgaccuauaaaggaguguacgaacugcagacacuggagcucgacauggcgucccugaacaugaccaugccucuuucuuguacaaagaauaacagccaucacuauaucaugguuggcaaugaaaccgggcuggagcucacacugaccaacacguccauuaucaaucauaaauucugcaaccuuucugaugcucacaagaaaaaucuguacgaccaugcccucaugagcauuaucuccaccuuucaccugagcauuccgaacuucaaucaguaugaggccaugucuugugauuuuaacggaggcaagaucuccgugcaguacaaucugagccacacauaugcugucgacgccgcuaaccauugcggcaccauugccaauggggugcuccaaacauucaugcggauggcguggggaggcucuuacaucgcccuggauuccgggaagggaagcugggacuguaucaugaccucuuaccaguaucuuauuauccagaacacgacaugggaagaucacugccaguuuucccgccccagcccuauuggcuaccuggggcuccugucccaaagaacccgggacaucuauauuucucgcagacuucugggaacauucaccuggacccucagcgauuccgagggcaacgaaacacccggcggguacugucugacgcgguggaugcugaucgaggcugagcucaaaugcuuuggaaauaccgccguugcuaaguguaacgaaaaacaugacgaggaguucugcgauaugcugcgccuuuuugacuucaauaagcaggccaucagacggcugaaagcggaagcccagaugagcauucagcucaucaacaaggcugugaaugcccugauuaacgaucaacuuaucaugaagaaucaucugcgcgacauuaugggcaucccuuauugcaacuacucuaaauauugguaccucaaucacacagucaccgggagaacaucccugccccgguguuggcuggugagcaacggaucuuaccucaaugaaacccacuucagcgacgauaucgagcagcaggcugacaacaugauuacggagcugcuucaaaaggaauauaucgaucgccagggcaaaacaccucuggggcucguggaccuguuugucuucuccaccucuuuuuaccugauuagcaucuuccuucaccucguuaagauuccgugaggacuagucccuguucccagagcccacuuuuuuuucuuuuuuugaaauaaaauagccugucuuucagaucuaaaaaaaaaaaaaaaaaaaaaaaaaaaaaaaaaaaaaaaaaaaaaaaaaaaaaaaaaaaaaaaaaaaaaaaaaaaaaaaaaaaaaaaaaaaaaaaaaaaa

SEQ ID NO: 42137 - RNA, 1607 nt, Artificial Sequence
  mRNA product Design a-1 (A100) comprising derived and/or modified sequence from LASV(LASV254-NIG-2011;Clade II)__AIT17674__GPCmut13 (opt5)
aggagagucccgcagucggcguccagcggcucugcuuguucgugugugugucguugcaggccuuauucaagcuuaccaugggccagaucauuaccuucuuucaagaggugccccacgucaucgaagagguuaugaacauugugcugaucgcccucagccugcuugcuauucugaaggggaucuacaauguggccacaugcggacucuucggccuggucuccuuucuucugcucugugggagaucuugcagcacgaccuauaaaggaguguacgaacugcagacacuggagcucgacaugaccaaccugaauaugacaaugccucuuuccuguaccaagaacaauucucaucacuauaucaugguuggcaacgaaacagggcuggagcucacccugacgaauaccagcauuaucaaccauaaauucugcaaucuuuccgaugcgcacaagaaaaaccuguacaaucaugcucucaugucuauuaucagcacauuucaccuguccauuccgaacuucaaucaguaugaggccaugagcugugacuuuaacggaggcaagaucucugugcaguacaaucugucccacagcuaugccgucgaugcugccaaccauugcggcaccauugcuaacggggugcuccaaacauucaugcggauggccuggggaggcucuuacaucgcgcuggacuccgggaagggaaauugggauuguaucaugaccagcuaccaguaucuuauuauccagaacacgacaugggaagaccacugccaguuuucucgccccuccccuauuggcuaccuggggcuccugagccaaagaacccgggauaucuauauuucccgcagacuucugggaacauucaccuggacccucucugacagcgagggcaaugaaacacccggcggguacugucugacgcgguggaugcugaucgaggccgagcucaaaugcuuuggaaacaccgcuguugccaaguguaaugaaaaacaugaugaggaguucugcgacaugcugcgccuuuuugauuucaacaagcaggcuaucagacggcugaaaacagaagcccaggcgaauauucagcucaucaacaaggccgugaaugcucugauuaacgaccaacuuaucaugaagaaucaucugcgcgauauuaugggcaucccuuauugcaacuacuccaaauauugguaccucaaucacaccgucacagggaagaccagccugcccagauguuggcuggugucuaacggauccuaccucaaugaaacgcacuucagcgacgacaucgagcagcaggccgauaacaugauuacagagcugcuucaaaaagaauauauggaccggcagggcaagaccccucuggggcucguggaucuguuugucuucucuaccagcuuuuaccugaucuccauuuuccuucaccucguuaaaaucccgugaggacuagucccuguucccagagcccacuuuuuuuucuuuuuuugaaauaaaauagccugucuuucagaucuaaaaaaaaaaaaaaaaaaaaaaaaaaaaaaaaaaaaaaaaaaaaaaaaaaaaaaaaaaaaaaaaaaaaaaaaaaaaaaaaaaaaaaaaaaaaaaaaaaaa

SEQ ID NO: 42138 - RNA, 1607 nt, Artificial Sequence
  mRNA product Design a-1 (A100) comprising derived and/or modified sequence from LASV(Nig08-A19;Clade III)__ADU56618__GPCmut13 (opt5)
aggagagucccgcagucggcguccagcggcucugcuuguucgugugugugucguugcaggccuuauucaagcuuaccaugggccagaucgugaccuucuuucaagaggucccccacguuauugaagaggugaugaacaucgugcugauugcccucagcauccuggcuauucuuaaggggcuguacaauaucgccacaugcggacucaucggccuggucacguuccuucugcucuccgggagaucuuguagcaugaccuauaaaggaguguacgaacugcagacacuggagcucaacaugaauacccugaacaugacaaugccucuuuccugcaccaagaauaacucucaucacuauauuaugguuggcaaugaaacagggcuggagcucacccugacgaacaccagccuucugcaucacaaauuuuguaaucucuccgacgcgcauaagaaaaaccuguacgaucacacacugaugucuaucauuagcaccuuccaccucuccaucccgaauuuuaaccaguaugaggcuaugagcugcgacuucaauggaggcaagauuacagugcaguacaaccugucucauuccuaugccaucgaugccgcuaaucacuguggcaccgucgccaacggggugcuucaaacguuuaugcggauggcuuggggaggcagcuacauugcccuggacucugggcgcggaaagugggauugcaucaugacauccuaccaguaucucaucauucagaacaccacaugggaagaccauugucaguucagcagacccucuccuaucggcuaccuggggcuucugucccaacggacccgcgauauuuauaucagcagacggcuccugggaaccuuuacauggacgcuguccgacucugagggcaaugaaacccccggcggguacugccucacacgcuggaugcugauugaggcggagcuuaaauguuucggaaacaccgccguugcuaagugcaaugaaaaacacgaugaggaauuuugugacaugcugagacucuucgauuuuaacaagcaggccauccggcgccugaaagcugaggcccagaugagcauccagcuuauuaauaaggcggugaacgcccugaucaaugaccaacucauuaugaagaaccaccugagagauaucaugggcauuccuuauugcaauuacuccaaauauugguaccugaaccauacaagcaccgggcggacgucucucccccgcugcuggcuggucuccaauggaagcuaccuuaacgaaacacacuucucugacgacaucgagcagcaggcugauaauaugaucaccgagaugcugcaaaaggaauaucucgacagacagggcaaaaccccucuggggcugguggaucuuuucguguuuagcacauccuucuaccucauuucuaucuuucugcaucuggucaagauuccgugaggacuagucccuguucccagagcccacuuuuuuuucuuuuuuugaaauaaaauagccugucuuucagaucuaaaaaaaaaaaaaaaaaaaaaaaaaaaaaaaaaaaaaaaaaaaaaaaaaaaaaaaaaaaaaaaaaaaaaaaaaaaaaaaaaaaaaaaaaaaaaaaaaaaa

SEQ ID NO: 42139 - RNA, 1610 nt, Artificial Sequence
  mRNA product Design a-1 (A100) comprising derived and/or modified sequence from LASV(G1180-SLE-2010;Clade IV)__AIT17168__GPCmut13 (opt5)
aggagagucccgcagucggcguccagcggcucugcuuguucgugugugugucguugcaggccuuauucaagcuuaccaugggccagaucgugaccuucuuucaagaggucccccacguuauugaagaggugaugaacaucgugcugauugcccucagcauccuggcuguccuuaaggggcuguacaauuucgccacaugcggacucgugggccugcuuacguuucugcuccugugugggagauccugcaccgcgucucgguauaaaggaguuuacgaacugcagacacucgagcugaacauggaaacccuuaauaugacaaugccucugagcuguaccaagaacaauucccaucacuauauuauggugggcaacgagacagggcucgagcugacccuuacgaauaccucuaucaucaaccauaaauucugcaaucugagcgacgcucacaagaaaaaccucuacgaucaugcccugauguccauuaucucuacauuucaccugagcauuccgaauuucaaccaguaugaagccauguccugugacuuuaauggaggcaagaucagcguccaguacaaccucucucacuccuaugcuggcgaugccgcuaaucauugcgggaccguggccaacggaguucugcaaacauucaugcgcauggcguggggcgggagcuacauugcccuugacucuggacacggcuccugggauuguaucaugaccagcuaccaguaucugauuauccagaacacgacaugggaggaccauugccaguuuucuagacccuccccuaucggguaccucggacugcuuagccaacggacccgcgauauuuauaucuccagacggcugcucggcacauucaccuggacccugucugacagcgaaggcaaggauacacccgggggauacugucugacgcgcuggaugcucauugaggcugagcugaaaugcuuuggcaauaccgccguggcuaaguguaacgaaaaacacgacgaggaguucugcgauaugcuuagacuguuugacuucaauaagcaggccauccagcggcucaaagcggaagcccagauguccauucaacugaucaacaaggcugucaaugcccuuaucaacgaucagcugauuaugaagaaucaccuccgcgacaucauggggauuccuuauugcaacuacagcaaauauugguaccugaaucauacaaccacaggaaagaccucucugcccaaauguuggcucguguccaacggcagcuaccugaaugaaacgcacuucucugacgauaucgagcagcaagcugacaacaugauuacagagaugcuucagaaggaauauauggagagacaggggaaaaccccucugggacucguggaucuguuugucuucagcaccuccuuuuaccugaucucuaucuuccuucaucucguuaagauuccgugaggacuagucccuguucccagagcccacuuuuuuuucuuuuuuugaaauaaaauagccugucuuucagaucuaaaaaaaaaaaaaaaaaaaaaaaaaaaaaaaaaaaaaaaaaaaaaaaaaaaaaaaaaaaaaaaaaaaaaaaaaaaaaaaaaaaaaaaaaaaaaaaaaaaa

SEQ ID NO: 42140 - RNA, 1610 nt, Artificial Sequence
  mRNA product Design a-1 (A100) comprising derived and/or modified sequence from LASV(G1442-SLE-2011;Clade IV)__AIT17180__GPCmut13 (opt5)
aggagagucccgcagucggcguccagcggcucugcuuguucgugugugugucguugcaggccuuauucaagcuuaccaugggccagaucgugaccuucuuucaagaggucccccacguuauugaagaggugaugaacaucgugcugauugcccucagcauccuggcuguccuuaaggggcuguacaauguggccacaugcggacucauuggccugguuacguuccuucugcucugugggagauccugcaccacaacccuguauaaaggaguguacgaacugcagacacucgagcugaacauggaaacccuuaauaugacaaugccucugucuuguaccaagaacaauagccaucacuauauccgggucggcaacgagacggggcucgagcugacccuuacaaauaccuccaucauuaaccauaaauuuugcaaucugucugacgcgcacaagaaaaaccucuacgaucaugcucugaugagcaucauuuccacauuccaccugucuaucccgaauuuuaaccaguaugaagccaugagcugugacuucaauggaggcaagauuuccgugcaguacaaccucagccacucuuaugccggcgaugcugccaaucauugcgggaccguugcuaacggagugcugcaaacguuuaugcgcauggccuggggcggguccuacaucgcgcuugacagcggaagaggcaacugggauuguauuaugacaucuuaccaguaucugaucauccagaauaccacaugggacgaucacugccaguucucccggcccagcccuauuggguaccucggacugcuuucucaacgcaccagagacgucuauaucucccggcgccugcucggcaccuuuacauggacgcugagcgauuccgagggcaaggacacccccgggggauacugucugacaagauggaugcucauugaagccgagcugaaaugcuucggcaacaccgcuguggccaaguguaaugagaaacaugaugaagaguuuugcgacaugcuucggcuguucgauuuuaacaagcaggcuauccagcgccucaaagccgaagcgcagaugucuauucaacugaucaauaaggccgugaacgcucuuaucaaugaccagcugauuaugaagaaccaccucagagacaucauggggauuccuuauugcaauuacagcaaauauugguaccugaacaauacagccaccggaaagacgucccugcccaaauguuggcucaucagcaacggcucuuaccugaaugagacacacuucuccgaugacauugaacaggaggcugauaacaugaucaccgagaugcuucaaaaggaauauauggagcggcaggggaaaaccccucugggacucgucgaccuguucguuuuuagcacaucuuucuaccugaucagcauuuuucuucaucucgugaagaucccgugaggacuagucccuguucccagagcccacuuuuuuuucuuuuuuugaaauaaaauagccugucuuucagaucuaaaaaaaaaaaaaaaaaaaaaaaaaaaaaaaaaaaaaaaaaaaaaaaaaaaaaaaaaaaaaaaaaaaaaaaaaaaaaaaaaaaaaaaaaaaaaaaaaaaa

SEQ ID NO: 42141 - RNA, 1610 nt, Artificial Sequence
  mRNA product Design a-1 (A100) comprising derived and/or modified sequence from LASV(G3010-SLE-2013;Clade IV)__AIT17344__GPCmut13 (opt5)
aggagagucccgcagucggcguccagcggcucugcuuguucgugugugugucguugcaggccuuauucaagcuuaccaugggccagaucgugaccuucuuucaagaggucccccacguuauugaagaggugaugaacaucgugcugauugcccucagcauccuggcuguccuuaaggggcuguacaauuucgccacaugcggacucgugggccugguuacguuucuucugcucugugggagauccugcaccacaucucuguauaaaggaguguacgaacugcagacccucgagcugaacauggaaacacuuaauaugaccaugccucugagcuguacaaagaacaauucccaucacuauauuauggucggcaacgagaccgggcucgagcugacgcuuaccaauacaucuaucaucaaccauaaauucugcaaucugagcgacgcgcacaagaaaaaccucuacaaucaugcucugauguccauuaucucuaccuuucaccugagcauuccgaacuucaaucaguaugaagccauguccugugauuuuaacggaggcaagaucagcgugcaguacaaucucucucacuccuaugccggcgacgcugccagccauugcgggacaguugcuaacggagugcugcaaaccuucaugcggauggccuggggcgggucuuacauugcgcuugauuccggauacggcaagugggacuguaucaugacgagcuaucaguaccugauuauccagaacacaaccugggaggaucacugccaguuuucucgccccuccccuaucggguaucucggacugcuuagccaaagaacacgggacauuuacaucucccgcagacugcucggcaccuucaccuggacacugucugauagcgaaggcaaagacacgcccgggggauauugucugacccgguggaugcucauugaggccgagcugaagugcuuuggcaauacagcugucgccaaauguaacgaaaagcaugaugaggaguucugcgacaugcuucgccuguuugauuucaauaaacaggcuauccagagacucaagaccgaagcccagauguccauucaacugaucaacaaggcggugaaugcccuuaucaacgaccagcugauuaugaaaaaucaccuccgggauaucauggggauuccuuacugcaacuauagcaaguacugguaccugaaucacacaaccacgggaaaaacaucucugcccaaguguuggcucguguccaacggcagcuaucugaaugaaacccauuucucugacgacaucgagcagcaagcugauaacaugauuaccgagaugcuucagaaagaauacauggagcgccaggggaagacaccucugggacucgucgaccuguuuguuuucagcaccuccuuuuaucugaucucuaucuuccuucaccucgugaaaauuccgugaggacuagucccuguucccagagcccacuuuuuuuucuuuuuuugaaauaaaauagccugucuuucagaucuaaaaaaaaaaaaaaaaaaaaaaaaaaaaaaaaaaaaaaaaaaaaaaaaaaaaaaaaaaaaaaaaaaaaaaaaaaaaaaaaaaaaaaaaaaaaaaaaaaaa

SEQ ID NO: 42142 - RNA, 1610 nt, Artificial Sequence
  mRNA product Design a-1 (A100) comprising derived and/or modified sequence from LASV(G502-SLE-2009;Clade IV)__AIT17126__GPCmut13 (opt5)
aggagagucccgcagucggcguccagcggcucugcuuguucgugugugugucguugcaggccuuauucaagcuuaccaugggccagaucgugaccuucuuucaagaggucccccacguuauugaagaggugaugaacaucgugcugauugcccucagcauccuggcuguccuuaaggggcuguacaauuucgccacaugcggacucgugggccugcuuacguuucugcuccugugugggagauccugcaccacaggacuguauaaaggcguuuacgaacuccagacccuggagcuuaacauggaaacacugaauaugaccaugccucucucuuguacaaagaacaauagccaucacuauauuaugguggggaacgagaccggacuggagcuuacgcugaccaauacauccaucaucaaccauaaauucugcaaucucucugacgcgcacaagaaaaaccuguacgaucaugcucugaugagcauuaucuccaccuuucaccucucuauuccgaauuucaaccaguaugaagccaugagcugugacuuuaauggcggcaagaucuccguccaguacaaccugagccacucuuaugccggggaugcugccgaccauugcggaacaguggcuaauggcguucuucaaaccuucaugcggauggccuggggaggguccuacauugcgcuggauagcggccgcgggagaugggacuguaucaugacgucuuaccaguaucucauuauccagaacacaaccugggaggaucacugccaguuuucccggcccagcccuaucggauaccugggccuucugucucaacgcacaagagacauuuauaucucccggcgccuccugggcaccuucaccuggacacugagcgauuccgaagggaaggacacgcccggaggcuacugucucaccagauggaugcugauugaggccgagcuuaaaugcuuugggaacacagcuguggccaaguguaaugaaaaacaugaugaggaguucugcgacaugcugcggcucuuugauuucaacaagcaggcuauccagcgccugaaagccgaagcgcagaugucuauucaacuuaucaauaaggccgucaacgcucugaucaaugaccagcucgugaugaagaaccaccugagagacauuaugggaaucccuuauugcaauuacagccgguauugguaccugaaccacaccacaaccggccgcacgucccuccccaaauguuggcuggugagcaaugggucuuaccuuaacgaaacacauuucuccgaugacauugagcagcaagccgauaauaugaucaccgagaugcugcagaaggaauauauggagagacagggaaaaaccccucucggccuggucgaccuguuuguuuucagcacaucuuuuuaccuuauuagcaucuuccuccaccuggugaagaucccgugaggacuagucccuguucccagagcccacuuuuuuuucuuuuuuugaaauaaaauagccugucuuucagaucuaaaaaaaaaaaaaaaaaaaaaaaaaaaaaaaaaaaaaaaaaaaaaaaaaaaaaaaaaaaaaaaaaaaaaaaaaaaaaaaaaaaaaaaaaaaaaaaaaaaa

SEQ ID NO: 42143 - RNA, 1610 nt, Artificial Sequence
  mRNA product Design a-1 (A100) comprising derived and/or modified sequence from LASV(G733-SLE-2010;Clade IV)__AIT17154__GPCmut13 (opt5)
aggagagucccgcagucggcguccagcggcucugcuuguucgugugugugucguugcaggccuuauucaagcuuaccaugggccagaucgugaccuucuuucaagaggucccccacguuauugaagaggugaugaacaucgugcugauugcccucagcauccuggcuguccuuaaggggcuguacaauuucgccacaugcggaauugugggccucguuuccuuucugcuucugugugggagaucuugcacgaccagccucuauaaaggaguguacgaacugcagacacuggagcucaacauggaaacccugaauaugacaaugccucuuuccuguaccaagaacaauucucaucacuauaucauggucggcaacgagacagggcuggagcucacccugacgaauaccagcaucauuaaccauaaauucugcaaucuuuccgacgcgcacaagaaaaaccuguacgaucaugcucucaugucuaucauuagcacauuucaccuguccaucccgaauuucaaccaguaugaagccaugagcugugacuuuaauggaggcaagauuucugugcaguacaaccugucccacagcuaugccggcgaugcugccaaucauugcgggaccaucgcuaacggaguucuccaaacauucaugcggauggccuggggcgggucuuacauugcgcuggacuccggacgcgauagaugggacuguaucaugaccagcuaccaguaucuuaucauucagaacacgacaugggaggaucacugccaguuuucucggcccuccccuaucggcuaccuggggcuccugagccaacgcaccagagacauuuauaucucccggcgccuucugggaacauucaccuggacccucucugauagcgaaggcaaggacacacccggcggguacugucugacgagauggaugcugauugaggccgagcucaaaugcuuuggaaauaccgcuguggccaaguguaacgaaaaacaugaugaggaguucugcgacaugcugcggcuuuuugauuucaauaagcaggcuauccagcgccugaaagccgaagcgcagauguccauccaacucauuaacaaggccgucaaugcucugaucaacgaccagcuuauuaugaagaaucaccugagagacaucaugggcauuccuuauugcaacuacagcaaauauugguaccucaaucacacaaccacagggaagaccucucugcccaaauguuggcugguguccaacggaagcuaccucaaugaaacgcauuucucugaugacaucgagcagcaagccgauaacaugaucacagagaugcugcagaaggaauauauggagcggcagggcaaaaccccucuugggcugguggaccucuuugucuucagcaccuccuuuuaccugauuucuaucuuccugcaccuuguuaagauuccgugaggacuagucccuguucccagagcccacuuuuuuuucuuuuuuugaaauaaaauagccugucuuucagaucuaaaaaaaaaaaaaaaaaaaaaaaaaaaaaaaaaaaaaaaaaaaaaaaaaaaaaaaaaaaaaaaaaaaaaaaaaaaaaaaaaaaaaaaaaaaaaaaaaaaa

SEQ ID NO: 42144 - RNA, 1610 nt, Artificial Sequence
  mRNA product Design a-1 (A100) comprising derived and/or modified sequence from MOPV/LASV reassortant(IGS-1;Clade IV)__AFY05576__GPCmut13 (opt5)
aggagagucccgcagucggcguccagcggcucugcuuguucgugugugugucguugcaggccuuauucaagcuuaccaugggccagaucgugaccuucuuucaagaggucccccacguuauugaagaggugaugaacaucgugcugauugcccucagcguccuggcugugcuuaaggggcuguacaauuucgccacaugcggacucguuggccuggugacguuucuucugcucugugggagauccugcaccacaucucuguauaaaggagucuacgaacugcagacccucgagcugaacauggaaacacuuaauaugaccaugccucugagcuguacaaagaacaauucccaucacuauaucauggugggcaacgagaccgggcucgagcugacgcuuaccaauacaucuauuaucaaccauaaauucugcaaucugagcgacgcgcacaagaaaaaccucuacgaucaugcucugauguccaucauuucuaccuuucaccugagcaucccgaauuucaaccaguaugaagccauguccugugacuuuaauggaggcaagauuagcguucaguacaaccucucucacuccuaugccggcgaugcugccaaucauugcgggacaguggcuaacggaguccugcaaaccuucaugcggauggccuggggcgggagcuacaucgcgcuugacucuggacgcggcaacugggauuguauuaugacguccuaccaguaucugaucauucagaauacaaccugggaggaccacugccaguuuagcagacccucuccuaucggguaccucggacugcuuucccaacggacacgcgauaucuauauuagcagacggcugcucggcaccuucaccuggacacuguccgacucugaaggcgaggauacgcccgggggauacugucugacccgcuggaugcucaucgaggccgaacugaagugcuuuggcaacacagcuguggccaaauguaaugagaagcaugacgaagaguucugcgauaugcuuagacuguuugacuucaacaaacaggcuauucagcggcucaaggccgaagcgcagaugagcauccaacugauuaauaaagccgugaacgcucuuaucaaugaucagcugaucaugaagaaccaccuccgcgacauuauggggaucccuuauugcaauuacuccaaguauugguaccugaaccacaccacaaccggaagaacgagccugcccaaauguuggcucgucucuaauggcuccuaccugaacgagacacauuucagcgacgauauugagcagcaagccgacaauaugaucaccgaaaugcuucagaaggaguauauggaacggcaggggaaaaccccucugggacucguugaucuguuuguguucucuaccagcuuuuaccugauuuccaucuuccuucaccucgugaagaucccgugaggacuagucccuguucccagagcccacuuuuuuuucuuuuuuugaaauaaaauagccugucuuucagaucuaaaaaaaaaaaaaaaaaaaaaaaaaaaaaaaaaaaaaaaaaaaaaaaaaaaaaaaaaaaaaaaaaaaaaaaaaaaaaaaaaaaaaaaaaaaaaaaaaaaa

SEQ ID NO: 42145 - RNA, 1610 nt, Artificial Sequence
  mRNA product Design a-1 (A100) comprising derived and/or modified sequence from LASV(LM765-SLE-2012;Clade IV)__AIT17814__GPCmut13 (opt5)
aggagagucccgcagucggcguccagcggcucugcuuguucgugugugugucguugcaggccuuauucaagcuuaccaugggccagaucgugaccuucuuucaagaggucccccacguuauugaagaggugaugaacaucgugcugauugcccucagcauccuggcuguccuuaaggggcuguacaauuucgccacaugcggacucgugggccugguuacguuucuucugcucugugggagauccugcaccacaucucuguauaaaggaguguacgaacugcagacccucgagcugaacauggaaacacuuaauaugaccaugccucugagcuguacaaagaacaauucccaucacuauauuauggucggcaacgagaccgggcucgagcugacgcuuaccaauacaucuaucaucgaccauaaauucugcaaccugagcgaugcgcaccggaagaaucucuacgaccaugcucugauguccauuaucucuaccuuucaccugagcauuccgaacuucaaucaguaugaagccauguccugugauuuuaacggaggcaaaaucagcgugcaguacaaucucucucacuccuaugccaaggacgcugccgaucauugcggcacaguugcuaacggggugcugcaaaccuucaugcgcauggccuggggaggcagcuacauugcgcuugacucugggagaggacggugggauuguaucaugacguccuaccaguaucugauuauccagaauacaaccugggaggaccacugccaguuuagccgccccucuccuaucggcuaccucgggcugcuuucccaaagaacacgggauauuuauaucagccgcagacugcucggaaccuucaccuggacacuguccgacucugaaggcaaggauacgcccggcggguacugucugacccgguggaugcucauugaggccgagcugaaaugcuuuggaaacacagcugucgccaaguguaacgaaaaacaugacgaggaguucugcgauaugcuucgccuguuugacuucaauaagcaggcuauccagagacucaaagccgaagcgcagaugagcauucaacugaucaacaaggccgugaaugcucuuaucaacgaccagcugauuaugaagaaucaccuccgggauaucaugggcauuccuuauugcaacuacuccaaauauugguaccugaaucacaccacaaccgggaagacgagccugcccaaauguuggcucgugucuaacggauccuaccugaaugaaacacauuucagcgacgauaucgagcagcaagccgacaacaugauuaccgagaugcuucagaaggaauauauggagcgccagggcaaaaccccucuggggcucgucgaucuguuuguuuucucuaccagcuuuuaccugaucuccaucuuccuucaccucgugaagauuccgugaggacuagucccuguucccagagcccacuuuuuuuucuuuuuuugaaauaaaauagccugucuuucagaucuaaaaaaaaaaaaaaaaaaaaaaaaaaaaaaaaaaaaaaaaaaaaaaaaaaaaaaaaaaaaaaaaaaaaaaaaaaaaaaaaaaaaaaaaaaaaaaaaaaaa

SEQ ID NO: 42146 - RNA, 1610 nt, Artificial Sequence
  mRNA product Design a-1 (A100) comprising derived and/or modified sequence from LASV(LM776-SLE-2012;Clade IV)__AIT17824__GPCmut13 (opt5)
aggagagucccgcagucggcguccagcggcucugcuuguucgugugugugucguugcaggccuuauucaagcuuaccaugggccagaucgugaccuucuuucaagaggucccccacguuauugaagaggugaugaacaucgugcugauugcccucagcauccuggcuguccuuaaggggcuguacaauuucgccacaugcggacucgugggccugguuacguuucuucugcucugugggagauccugcaccacaucuguguauaaaggagucuacgaacugcagacccuggagcucaacauggaaacacugaauaugaccaugccucuuagcuguacaaagaacaauucccaucacuauauuauggugggcaacgagaccgggcuggagcucacgcugaccaauacaucuaucaucaaccauaaauucugcaaucuuagcgacgcgcacaagaaaaaccuguacgaucaugcucucauguccauuaucucuaccuuucaccugagcauuccgaauuucaaccaguaugaagccauguccugugacuuuaauggaggcaagaucagcguucaguacaaccugucucacuccuaugccggcgaugcugccaaucauugcgggacaguggcuaacggaguccuccaaaccuucaugcggauggccuggggcgggagcuacauugcgcuggacucuggacacggcaagugggauuguaucaugacguccuaccaguaucuuauuauccagaacacaaccugggaggaccauugccaguuuagccgccccucuccuaucggguaccugggacuccugucccaaagaacacgggauauuuauaucagccgcagacuucugggcaccuucaccuggacacucuccgacucugaaggcaaagauacgcccgggggauacugucugacccgguggaugcugauugaggccgagcucaagugcuuuggcaauacagcuguggccaaauguaacgaaaagcacgacgaggaguucugcgauaugcugcgccuuuuugacuucaauaaacaggcuauccagagacugaaggccgaagcgcagaugagcauucaacucaucaacaaggccgugaaugcucugaucaacgaucagcuuauuaugaaaaaucaucugcgggacaucauggggauuccuuauugcaacuacuccaaguauugguaccucaaucacaccacaaccggaaaaacgagccugcccaaguguuggcuggucucuaacggcuccuaccucaaugaaacacacuucagcgacgauaucgagcagcaagccgacaacaugauuaccgagaugcugcagaaagaauauauggagcgccaggggaagaccccucuuggacugguugaucucuuuguguucucuaccagcuuuuaccugaucuccaucuuccugcaucuugugaaaauuccgugaggacuagucccuguucccagagcccacuuuuuuuucuuuuuuugaaauaaaauagccugucuuucagaucuaaaaaaaaaaaaaaaaaaaaaaaaaaaaaaaaaaaaaaaaaaaaaaaaaaaaaaaaaaaaaaaaaaaaaaaaaaaaaaaaaaaaaaaaaaaaaaaaaaaa

SEQ ID NO: 42147 - RNA, 1610 nt, Artificial Sequence
  mRNA product Design a-1 (A100) comprising derived and/or modified sequence from LASV(Mad39;Clade IV)__ANH09722__GPCmut13 (opt5)
aggagagucccgcagucggcguccagcggcucugcuuguucgugugugugucguugcaggccuuauucaagcuuaccaugggccagaucgugaccuucuuucaagaggucccccacguuauugaagaggugaugaacaucgugcugauugcccucagcauccuggcuguccuuaaggggcuguacaauguggccacaugcggacucauuggccugguuacguuccuucugcucugugggagauccugcaccacaacccuguauaaaggaguguacgaacugcaggcgcucgagcugaacauggaaacacuuaauaugaccaugccucugucuuguacaaagaacaauagccaucacuauauccgggucggcaacgagaccgggcucgagcugacgcuuaccaauacaucccugaucaaccauaaauuuugcaaucucucugacgcucacaagaaaaaccuguacgaucaugcccugaugagcauuaucuccaccuuccaccucucuauuccgaauuuuaaccaguaugaagccaugagcugugacuucaaugauggaaagaucuccgugcaguacaaccugagccacacauaugcuggcgacaccgccaaucauugcggcacgguugcuaacggggugcuucaaacauuuaugcgcauggccuggggaggcucuuacauugcgcuggauuccgggagaggaggcugggacuguaucaugaccagcuaccaguaucucauuauccagaacacaaccugggaggaucacugccaguucucucggcccuccccuaucggguaccugggacuucugagccaacgcaccagagacauuuauaucucucggcgccuccugggcacauuuacguggacccuguccgauagcgaaggcaaggacacacccgggggauacugucucaccagauggaugcugauugaggccgagcuuaaaugcuucggcaauacagcugucgccaaguguaacgaaaaacaugaugaggaauuuugcgacaugcugcgccucuucgauuuuaauaagcaggcuauccagcggcugaaagccgaggcgcagauguccauucaacuuaucaacaaggccgugaaugcucugaucaacgaccagcucauuaugaagaaucaccugagagacaucauggggauuccuuauugcaacuacucuaaauauugguaccugaaucacaccgugacgggaaagacaagccuccccaaauguuggcuggucuccaacggcagcuaccuuaaugaaacccauuucucugaugacaucgagcagcaagccgauaacaugauuaccgagaugcugcagaaggaauauauggagcggcaggggaaaacaccucucggacugguugaccuguucguguuuuccaccagcuucuaccuuaucucuaucuuucuccaccuggugaagauuccgugaggacuagucccuguucccagagcccacuuuuuuuucuuuuuuugaaauaaaauagccugucuuucagaucuaaaaaaaaaaaaaaaaaaaaaaaaaaaaaaaaaaaaaaaaaaaaaaaaaaaaaaaaaaaaaaaaaaaaaaaaaaaaaaaaaaaaaaaaaaaaaaaaaaaa

SEQ ID NO: 42148 - RNA, 1610 nt, Artificial Sequence
  mRNA product Design a-1 (A100) comprising derived and/or modified sequence from LASV(Z0947-SLE-2011;Clade IV)__AIT17840__GPCmut13 (opt5)
aggagagucccgcagucggcguccagcggcucugcuuguucgugugugugucguugcaggccuuauucaagcuuaccaugggccagaucgugaccuucuuucaagaggucccccacguuauugaagaggugaugaacaucgugcugauugcccucagcauccuggcuguccuuaaggggcuguacaauuucgccacaugcggacucgugggccugguuacguuucuucugcucugugggagauccugcaccauuucucuguauaaaggaguguacgaacugcagacacucgagcugaacauggaaacccuuaauaugacaaugccucugagcuguaccaagaacaauucccaucacuauaucauggucggcaacgagacagggcucgagcugacccuuacgaauaccucuaucauuaaccauaaauucugcaaucugagcgacgcgcacaagaaaaaccucuacgaucaugcucugauguccaucauuucuacauuucaccugagcaucccgaauuucaaccaguaugaagccauguccugugacuuuaauggaggcaagauuagcgugcaguacaaccucucucacuccuaugccggcgaugcugccaaucauugcgggaccguugcuaacggagugcugcaaacauucaugcggauggccuggggcgggagcuacaucgcgcuugacucuggacgcgauagaugggacuguauuaugaccuccuaccaguaucugaucauccagaacacgacaugggaggaucacugccaguuuagccggcccucuccuauuggcuaccucgggcugcuuucccaacgcaccagagacaucuauauuagccggcgccugcucggaacauucaccuggacccuguccgauucugaaggcaaggacacacccggcggguacugucugacgagauggaugcucaucgaggccgagcugaaaugcuuuggaaauaccgcugucgccaaguguaacgaaaaacaugaugaggaguucugcgacaugcuucggcuguuugauuucaauaagcaggcuauucagcgccucaaagccgaagcgcagaugagcauccaacugaucaacaaggccgugaaugcucuuauuaacgaccagcugaucaugaagaaucaccucagagacauuaugggcaucccuuauugcaacuacuccaaauauugguaccugaaucacacaaccacagggaagaccagccugcccaaauguuggcucgugucuaacggauccuaccugaaugaaacgcauuucagcgaugacauugagcagcaagccgauaacaugaucacagagaugcuucagaaggaauauauggagcggcagggcaaaaccccucuggggcucgucgaccuguuuguuuucucuaccagcuuuuaccugaucuccauuuuccuucaccucgugaagaucccgugaggacuagucccuguucccagagcccacuuuuuuuucuuuuuuugaaauaaaauagccugucuuucagaucuaaaaaaaaaaaaaaaaaaaaaaaaaaaaaaaaaaaaaaaaaaaaaaaaaaaaaaaaaaaaaaaaaaaaaaaaaaaaaaaaaaaaaaaaaaaaaaaaaaaa

SEQ ID NO: 42149 - RNA, 1622 nt, Artificial Sequence
  mRNA product Design a-2 (hSL-A64-N5) comprising derived and/or modified sequence from LASV(Josiah;Clade IV)__NP_694870__GPCmut13 (opt1)
aggagaguccgcucagccagguugcagaagcggcuuagcguguguccuaaucuucucucugcguguagguaggccugugccgcaaacaagcuuaccaugggccagaucgugaccuucuuccaggaggucccccacgugaucgaggaggugaugaacaucguccugaucgcccucagcgugcuggccgugcugaaggggcucuacaacuucgcgaccugcggccuggucgggcuggugacguuccuccugcugugcggccgcuccugcaccaccagccucuacaaggggguguacgagcugcagacccuggagcucaacauggagacgcugaacaugaccaugccgcuguccugcaccaagaacaacagccaccacuacaucauggucggcaacgagaccggccucgagcugacgcugaccaacaccuccaucaucaaccacaaguucugcaaccucagcgacgcccacaagaagaaccuguacgaccacgcccugauguccaucaucagcaccuuccaccucuccauccccaacuucaaccaguacgaggccaugagcugcgacuucaacgggggcaagaucuccgugcaguacaaccugagccacuccuacgccggggacgcggccaaccacugcggcacgguggccaacgggguccugcagaccuucaugcggauggccuggggcggcagcuacaucgcgcucgacuccgggcgcggcaacugggacugcaucaugaccagcuaccaguaccugaucauccagaacaccacgugggaggaccacugccaguucucccggcccagccccaucggguaccugggccuccugucccagcgcacccgggacaucuacaucagccgccggcugcucggcaccuucaccuggacgcugagcgacuccgaggggaaggacaccccgggcggguacugccugacccgcuggaugcucaucgaggccgagcugaagugcuucggcaacaccgccguggccaagugcaacgagaagcacgacgaggaguucugcgacaugcugcggcuguucgacuucaacaagcaggccauccagcgccugaaggcggaggcccagaugagcauccagcugaucaacaaggccgugaacgcccucaucaacgaccagcugaucaugaagaaccaccuccgggacaucauggggauccccuacugcaacuacuccaaguacugguaccucaaccacacgaccaccggccgcaccagccugcccaagugcuggcuggucuccaacggcagcuaccucaacgagacgcacuucuccgacgacaucgagcagcaggccgacaacaugaucaccgagaugcugcagaaggaguacauggagcggcaggggaagacgccccugggccucguggaccuguucguguucagcaccuccuucuaccugaucagcaucuuccugcaccucgucaagaucccgugaggacuagucccuguucccagagcccacuuuuuuuucuuuuuuugaaauaaaauagccugucuuucagaucucaaaggcucuuuucagagccaccaaaaaaaaaaaaaaaaaaaaaaaaaaaaaaaaaaaaaaaaaaaaaaaaaaaaaaaaaaaaaaaaagaauu

SEQ ID NO: 42150 - RNA, 1619 nt, Artificial Sequence
  mRNA product Design a-2 (hSL-A64-N5) comprising derived and/or modified sequence from LASV(LP;Clade I)__AAF86701__GPCmut13 (opt1)
aggagaguccgcucagccagguugcagaagcggcuuagcguguguccuaaucuucucucugcguguagguaggccugugccgcaaacaagcuuaccaugggccagaucaucaccuucuuccaggaggugccccacgucaucgaggaggugaugaacaucgugcugaucgcccucagccugcuggccauccucaaggggcuguacaacaucgcgaccugcggcaucaucgggcuggucgccuuccucuuccugugcggcaaguccugcagccugacgcucaagggcggguacgagcugcagacccuggagcucaacauggagacccugaacaugaccaugccgcuguccugcacgaagaacagcucccaccacuacauccgcgugggcaacgagaccgggcucgagcugacccugaccaacacgagcaucaucaaccacaaguucugcaaccucuccgacgcccacaagaagaaccuguacgaccacgcccugaugagcaucaucuccaccuuccaccucagcauccccaacuucaaccaguacgaggccauguccugcgacuucaacggcgggaagaucagcgugcaguacaaccugucccacagcuacgcgggcgacgccgccgagcacugcgggaccgucgccaacggcgugcugcagaccuucaugcggauggcguggggcgggcgcuacaucgcccucgacuccggcaaggggaacugggacugcaucaugacgagcuaccaguaccugaucauccagaacaccaccugggaggaccacugccaguucucccggcccagccccaucggcuaccugggccuccugucccagcgcacccgggacaucuacaucagccgccggcugcucgggacguucaccuggacccugagcgacuccgagggcaacgagacccccgggggcuacugccugacgcgcuggaugcucaucgaggccgagcugaagugcuucgggaacaccgccguggccaagugcaacgagaagcacgacgaggaguucugcgacaugcugcggcuguucgacuucaacaagcaggcgauccgccggcugaaggccgaggcccagaugagcauccagcugaucaacaaggccgucaacgcccucaucaacgaccagcugaucaugaagaaccaccuccgcgacaucaugggcauccccuacugcaacuacuccaaguacugguaccucaaccacaccagcuccggccggaccagccugcccaagugcuggcugaucuccaacgggagcuaccucaacgagacgcaguucuccgacgacaucgagcagcaggcggacaacaugaucaccgagaugcugcagaaggaguacaucgagcgccagggcaagaccccgcuggggcucguggacaucuucaucuucagcaccuccuucuaccugaucagcaucuuccugcaccugaucaagaucccgugaggacuagucccuguucccagagcccacuuuuuuuucuuuuuuugaaauaaaauagccugucuuucagaucucaaaggcucuuuucagagccaccaaaaaaaaaaaaaaaaaaaaaaaaaaaaaaaaaaaaaaaaaaaaaaaaaaaaaaaaaaaaaaaaagaauu

SEQ ID NO: 42151 - RNA, 1619 nt, Artificial Sequence
  mRNA product Design a-2 (hSL-A64-N5) comprising derived and/or modified sequence from LASV(803213;Clade II)__AAF86703__GPCmut13 (opt1)
aggagaguccgcucagccagguugcagaagcggcuuagcguguguccuaaucuucucucugcguguagguaggccugugccgcaaacaagcuuaccaugggccagaucaucaccuucuuccaggaggugccccacgucaucgaggaggugaugaacaucgugcugaucgcccucagccugcuggccauccucaaggggaucuacaacgucgcgaccugcggccuguucgggcugaucuccuuccuccugcugugcggccgcagcugcuccgugacguacaaggggguguacgagcuccagacccuggagcugaacauggccaaccucaacaugaccaugccgcugagcugcaccaagaacaacucccaccacuacaucauggucggcaacgagacgggccuggagcucacccugaccaacaccagcaucaucaaccacaaguucugcaaccuguccgacgcccacaagaagaaccucuacgaccacgcccugaugagcaucaucuccacguuccaccugagcauccccaacuucaaccaguacgaggccauguccugcgacuucaacgggggcaagaucagcgugcaguacaaccucucccacagcuucgcgguggacgccgccaaccacugcgggaccaucgccaacggcguccugcagaccuucaugcggauggcguggggcggguccuacaucgcccuggacagcggcaaggggaacugggacugcaucaugaccuccuaccaguaccucaucauccagaacacgaccugggaggaccacugccaguucagccgccccucccccaucggcuaccuggggcugcucagccagcggacccgcgacaucuacaucagccggcgccugcugggcaccuucacguggacccucuccgacagcgagggcaacgaggcccccgggggcuacugccugacccgguggaugcugaucgaggccgagcucaagugcuucgggaacaccgccguggcgaagugcaacgagaagcacgacgaggaguucugcgacaugcugcgccuguucgacuucaacaagcaggccaucaagcggcucaagacggaggcccagauguccauccagcugaucaacaaggccgugaacgcccugaucaacgaccagcucaucaugaagaaccaccuccgcgacaucaugggcauccccuacugcaacuacagccgguacugguaccugaaccacaccgucaccgggaagaccucccugccccgcugcuggcuggugagcaacggcuccuaccugaacgagacgcacuucagcgacgacaucgagcagcaggcggacaacaugaucaccgagaugcuccagaaggaguacauggaccggcagggcaagaccccgcuggggcugguggaccucuucgucuucuccaccagcuucuaccugaucuccaucuuccugcaccuggugaagaucccgugaggacuagucccuguucccagagcccacuuuuuuuucuuuuuuugaaauaaaauagccugucuuucagaucucaaaggcucuuuucagagccaccaaaaaaaaaaaaaaaaaaaaaaaaaaaaaaaaaaaaaaaaaaaaaaaaaaaaaaaaaaaaaaaaagaauu

SEQ ID NO: 42152 - RNA, 1619 nt, Artificial Sequence
  mRNA product Design a-2 (hSL-A64-N5) comprising derived and/or modified sequence from LASV(GA391;Clade III)__CAA36645__GPCmut13 (opt1)
aggagaguccgcucagccagguugcagaagcggcuuagcguguguccuaaucuucucucugcguguagguaggccugugccgcaaacaagcuuaccaugggccagaucgugaccuucuuccaggaggucccccacgugaucgaggaggugaugaacaucguccugaucgcccucagcauccuggccauccugaaggggcucuacaacguggcgaccugcggccugaucgggcuggugacguuccuccugcuguccggccgcagcugcucccucaucuacaaggggaccuacgagcugcagacccuggagcucaacauggagacccugaacaugacgaugccgcugagcugcaccaagaacaacucccaccacuacauccgggucggcaacgagaccggccucgagcugacccugacgaacaccagcauccucaaccacaaguucugcaaccuguccgacgcccacaagcgcaaccuguacgaccacagccucauguccaucaucagcaccuuccaccuguccauccccaacuucaaccaguacgaggccaugagcugcgacuucaacgggggcaagaucaccgugcaguacaaccugucccacagcuucgccguggacgccgcggggcacugcggcacgcucgccaacgggguccugcagaccuucaugcggauggccuggggcggcuccuacaucgcccuggacagcgggcgcggcaacugggacugcaucaugaccuccuaccaguaccucaucauccagaacaccacgugggacgaccacugccaguucagccggcccucccccaucggguaccugggccugcucagccagcgcacccgggacaucuacaucagccgccggcugcugggcaccuucaccuggacgcucuccgacagcgaggggaacgagaccccgggcggguacugccugacccgcuggaugcugaucgaggcggagcucaagugcuucggcaacaccgccguggccaagugcaacgagaagcacgacgaggaguucugcgacaugcugcggcuguucgacuucaacaagcaggccauccgccggcucaagacggaggcccagauguccauccagcugaucaacaaggcggugaacgcccugaucaacgaccagcucaucaugaagaaccaccuccgcgacaucauggggauccccuacugcaacuacagccgguacugguaccugaaccacaccuccaccggcaagaccagccugccccgcugcuggcugaucuccaacggcagcuaccugaacgagacgaaguucuccgacgacaucgagcagcaggccgacaacaugaucaccgagaugcuccagaaggaguacaucgaccggcaggggaagacgccccugggccuggucgaccuguucguguucagcaccuccuucuaccucaucagcaucuuccugcaccuggugaagaucccgugaggacuagucccuguucccagagcccacuuuuuuuucuuuuuuugaaauaaaauagccugucuuucagaucucaaaggcucuuuucagagccaccaaaaaaaaaaaaaaaaaaaaaaaaaaaaaaaaaaaaaaaaaaaaaaaaaaaaaaaaaaaaaaaaagaauu

SEQ ID NO: 42153 - RNA, 1622 nt, Artificial Sequence
  mRNA product Design a-2 (hSL-A64-N5) comprising derived and/or modified sequence from LASV(AV;Clade V)__CCA30314__GPCmut13 (opt1)
aggagaguccgcucagccagguugcagaagcggcuuagcguguguccuaaucuucucucugcguguagguaggccugugccgcaaacaagcuuaccaugggccagaucgugaccuucuuccaggaggucccccacgugaucgaggaggugaugaacaucguccugaucgcccucagcauccuggccgugcugaaggggcucuacaacaucgcgaccugcggccugaucgggcugaucacguuccuccugcugugcggccgcuccugcagcuccaaccucuacaaggggguguacgagcugcagagccuggaccucaacauggagacccugaacaugaccaugccgcuguccugcaccaagaacaacagccaccacuacauccgggucggcaacgacacgggccucgagcugacccugaccaacaccuccauccucaaccacaaguucugcaaccugagcgacgcccacaagaaggaccuguacgaccacgcccucauguccaucaucagcacguuccaccuguccauccccaacuucaaccaguacgaggccaugagcugcgacuucaacgggggcaagaucuccgugcaguacaaccugagccacuccuacgccaucgacgcggccaaccacugcgggaccguggccaacggcauccuccagaccuucaugcgcauggccuggggcgggagcuacaucgcgcuggacuccggccgggggaacugggacugcaucaugaccagcuaccaguaccugaucauccagaacacgaccugggagaaccacugccaguucucccgccccagccccaucggcuaccucgggcugcugagccagcggacccgcgacaucuacaucucccggcgccuccugggcaccuucacguggacccugagcgacuccgagggcaacgccacccccgggggcuacugccucacccgguggaugcugaucgaggccgagcugaagugcuucgggaacacggccgucgccaagugcaacgagaagcacgacgaggaguucugcgacaugcuccgccuguucgacuucaacaagcaggcgaucagccggcugaaguccgaggcccagaugagcauccagcucaucaacaaggccgugaacgcccugaucaacgaccagcugaucaugaagaaccaccuccgcgacaucaugggcauccccuacugcaacuacuccaaguacugguaccugaaccacaccaucaccgggaagaccagccugcccaagugcuggcucguguccaacggcagcuaccugaacgagacgcacuucuccgacgacaucgagcagcaggccgacaacaugaucaccgagaugcugcagaaggaguacauggagcggcagggcaagaccccgcucgggcuggucgaccuguucguguucagcaccuccuucuaccugaucagcaucuuccuccgccuggugaagaucccgugaggacuagucccuguucccagagcccacuuuuuuuucuuuuuuugaaauaaaauagccugucuuucagaucucaaaggcucuuuucagagccaccaaaaaaaaaaaaaaaaaaaaaaaaaaaaaaaaaaaaaaaaaaaaaaaaaaaaaaaaaaaaaaaaagaauu

SEQ ID NO: 42154 - RNA, 1619 nt, Artificial Sequence
  mRNA product Design a-2 (hSL-A64-N5) comprising derived and/or modified sequence from LASV(Togo/2016/7082;Clade VI)__AMR44577__GPCmut13 (opt1)
aggagaguccgcucagccagguugcagaagcggcuuagcguguguccuaaucuucucucugcguguagguaggccugugccgcaaacaagcuuaccaugggccagaucaucaccuucuuccaggaggugccccacgucaucgaggaggugaugaacaucgugcugaucgcccucagccugcuggccauccucaagggggucuacaacguggcgaccugcggcaucaucgggcuggugacguuccuguuccucugcggccgcuccugcagccugaucuacaagggguccuacgagcugcagacccucgagcugaacauggagacccugaacaugaccaugccgcucagcugcacgaagaacuccagccaccacuacauccgggucggcaacgagaccggccuggagcugacccucaccaacacguccaucaucaaccacaaguucugcaaccugagcgacgcccacaagcgcaaccuguacgaccacgcccucauguccauccugagcaccuuccaccuguccauccccaacuucaaccaguacgaggccaugagcugcgacuucaacgggggcaagaucuccgugcaguacaaccucagccacgccuacgcgguggacgccgccgagcacugcgggaccgucgccaacggcgugcugcagaccuucaugcggauggcguggggcggguccuacaucgcccuggacagcggccgcgggaacugggacugcaucaugacguccuaccaguaccucaucauccagaacaccaccugggaggaccacugccaguucagccggcccucccccaucggcuaccuggggcugcucagccagcgcacccgggacaucuacaucagccgccggcugcugggcacguucaccuggacccucuccgacagcgagggcaacgagacccccgggggcuacugccugacgcgcuggaugcugaucgaggccgagcucaagugcuucgggaacaccgccguggccaagugcaacgagaagcacgacgaggaguucugcgacaugcugcggcuguucgacuucaacaagcaggcgauccagcgccucaaguccgaggcccagaugagcauccagcugaucaacaaggccgucaacgcccugaucaacgaccagcucaucaugaagaaccaccuccgggacaugaugggcauccccuacugcaacuacuccaaguacugguaccugaaccacaccagcuccgggcgcaccagccugcccaagugcuggcugguguccaacggcagcuaccugaacgagacgcacuucuccgacgacaucgagcagcaggccgacaacaugaucaccgagaugcuccagaaggaguacaucgaccggcagggcaagaccccgcuggggcugguggaccucuucgucuucagcaccuccuucuaccugaucagcaucuuccugcaccugaucaagaucccgugaggacuagucccuguucccagagcccacuuuuuuuucuuuuuuugaaauaaaauagccugucuuucagaucucaaaggcucuuuucagagccaccaaaaaaaaaaaaaaaaaaaaaaaaaaaaaaaaaaaaaaaaaaaaaaaaaaaaaaaaaaaaaaaaagaauu

SEQ ID NO: 42155 - RNA, 1619 nt, Artificial Sequence
  mRNA product Design a-2 (hSL-A64-N5) comprising derived and/or modified sequence from LASV(KAK-428;Clade n.d. (VII))__ANH09740__GPCmut13 (opt1)
aggagaguccgcucagccagguugcagaagcggcuuagcguguguccuaaucuucucucugcguguagguaggccugugccgcaaacaagcuuaccaugggccagaucgugaccuucuuccaggaggucccccacgugaucgaggaggugaugaacaucguccugaucgcccucagccugcuggccauccucaaggggcuguacaacuucgcgaccugcggcgugaucgggcugaucacguuccuccugcugugcggccgcuccugcagcgccaccuacaaggggcaguacgagcuccagacccuggagcugaacauggagucccucaacaugaccaugccgcugagcugcacgaagaacaacucccaccacuacauccgggccggcaacaacaccggccuggagcucacccugaccaacacgagcaucaucucccacaaguucugcaaccugagcgacgcccacaagaagaaccucuacgaccacacccugauguccaucaucaccaccuuccaccugagcauccccaacuucaaccaguacgaggccauguccugcgacuucaacgggggcaagaucagcauccaguacaaccucucccacagcuacgcgggggacgccgcccagcacugcggcacgguggccaacgggguccugcagaccuucaugcgcauggcguggggcggcuccuaccuggcccucgacagcgggcggcgcggcugggacugcaucaucuccagcuaccaguaccugaucauccagaacaccaccugggacgaccacugccaguucucccggcccagccccaucggguaccugggcuucgugagccagaagacgcgcgacaucuacaucucccggcgccuccugggcaccuucaccuggacccugagcgacuccgaggggcacgacaugccgggcggguacugccucacgcgguggaugcugaucgaggccgaccugaagugcuucggcaacaccgccguggccaagugcaacgagaagcacgacgaggaguucugcgacauguggcgccucuucgacuucaacaagcaggcgauccagcggcugaaggccgaggcccagaugaacauccagcugaucaacaaggccgucaacgcccucaucaacgaccagcugaugaugaagaaccaccuccgcgacaucauggggauccccuacugcaacuacagcaaguucugguaccugaacaacaccaccacgggccggaccucccugccccgcugcuggcugaucagcaacggcuccuaccucaacgagacccacuucagcgacgacaucgagcagcaggcggacaacaugaucaccgagaugcugcagaaggaguacauggaccggcaggggaagacgccccugggccucguggaccuguucguguucuccaccagcuucuaccugaucaccaucuuccuccaccuggucaagaucccgugaggacuagucccuguucccagagcccacuuuuuuuucuuuuuuugaaauaaaauagccugucuuucagaucucaaaggcucuuuucagagccaccaaaaaaaaaaaaaaaaaaaaaaaaaaaaaaaaaaaaaaaaaaaaaaaaaaaaaaaaaaaaaaaaagaauu

SEQ ID NO: 42156 - RNA, 1619 nt, Artificial Sequence; identical to SEQ ID NO: 42150
  mRNA product Design a-2 (hSL-A64-N5) comprising derived and/or modified sequence from LASV(Pinneo-NIG-1969;Clade I)__AIT17836__GPCmut13 (opt1)

SEQ ID NO: 42157 - RNA, 1619 nt, Artificial Sequence
  mRNA product Design a-2 (hSL-A64-N5) comprising derived and/or modified sequence from LASV(ISTH0009-NIG-2011;Clade II)__AIT17404__GPCmut13 (opt1)
aggagaguccgcucagccagguugcagaagcggcuuagcguguguccuaaucuucucucugcguguagguaggccugugccgcaaacaagcuuaccaugggccagaucaucaccuucuuccaggaggugccccacgucaucgaggaggugaugaacaucgugcugaucgcccucagccugcuggccauccucaaggggaucuacaacgucgcgaccugcggccuguucgggcugguguccuuccuccugcugugcggccgcagcugcuccacgaccuacaaggggguguacgagcuccagacccuggagcuggacauggccagccucaacaugaccaugccgcuguccugcacgaagaacaacagccaccacuacaucauggucggcaacgagaccggccuggagcucacccugaccaacacguccaucaucaaccacaaguucugcaaccugagcgacgcccacaagaagaaccucuacgaccacgcccugauguccaucaucagcaccuuccaccuguccauccccaacuucaaccaguacgaggccaugagcugcgacuucaacgggggcaagaucuccgugcaguacaaccucagccacgcguacgccguggacgccgccaaccacugcgggaccaucgcgaacggcguccugcagaccuucaugcggauggccuggggcggguccuacaucgcccuggacagcggcaagggguccugggacugcaucaugacgagcuaccaguaccucaucauccagaacaccaccugggaggaccacugccaguucucccgccccagccccaucggcuaccuggggcugcucagccagcggacccgcgacaucuacaucucccggcgccugcugggcacguucaccuggacccucagcgacuccgagggcaacgagacccccgggggcuacugccugacgcgguggaugcugaucgaggccgagcucaagugcuucgggaacaccgccguggcgaagugcaacgagaagcacgacgaggaguucugcgacaugcugcgccuguucgacuucaacaagcaggccauccggcgccucaagaccgaggcccagaugagcauccagcugaucaacaaggccgugaacgcccugaucaacgaccagcucaucaugaagaaccaccuccgggacaucaugggcaucccguacugcaacuacuccaaguacugguaccugaaccacaccgucacggggaagaccagccugccccgcugcuggcugguguccaacggcagcuaccugaacgagacccacuucuccgacgacaucgagcagcaggcggacaacaugaucaccgagcuccugcagaaggaguacauggaccggcagggcaagacgccccuggggcucguggaccuguucgucuucagcaccuccuucuaccugaucagcaucuuccugcaccucaucaagaucccgugaggacuagucccuguucccagagcccacuuuuuuuucuuuuuuugaaauaaaauagccugucuuucagaucucaaaggcucuuuucagagccaccaaaaaaaaaaaaaaaaaaaaaaaaaaaaaaaaaaaaaaaaaaaaaaaaaaaaaaaaaaaaaaaaagaauu

SEQ ID NO: 42158 - RNA, 1619 nt, Artificial Sequence
  mRNA product Design a-2 (hSL-A64-N5) comprising derived and/or modified sequence from LASV(ISTH2010-NIG-2012;Clade II)__AIT17482__GPCmut13 (opt1)
aggagaguccgcucagccagguugcagaagcggcuuagcguguguccuaaucuucucucugcguguagguaggccugugccgcaaacaagcuuaccaugggccagaucaucaccuucuuccaggaggugccccacgucaucgaggaggugaugaacaucgugcugaucgcccucagccugcuggccauccucaaggggaucuacaacgucgcgaccugcggccuguucgggcugguguccuuccuccugcugugcggccgcagcugcuccacgaccuacaaggggguguacgagcuccagacccuggagcuggacauggccagccucaacaugaccaugccgcuguccugcacgaagaacaacagccaccacuacaucauggucggcaacgagaccggccuggagcucacccugaccaacacguccaucaucaaccacaaguucugcaaccugagcgacgcccacaagaagaaccucuacgaccacgcccugauguccaucaucagcaccuuccaccuguccauccccaacuucaaccaguacgaggccaugagcugcgacuucaacgggggcaagaucuccgugcaguacaaccucagccacgcguacgccguggacgccgccaaccacugcgggaccaucgcgaacggcguccugcagaccuucaugcggauggccuggggcggguccuacaucgcccuggacagcggcaagggguccugggacugcaucaugacgagcuaccaguaccucaucauccagaacaucaccugggaggaccacugccaguucucccgccccagccccaucggcuaccuggggcugcucagccagcggacccgcgacaucuacaucucccggcgccugcugggcaccuucacguggacccucagcgacuccgagggcaacgagacccccgggggcuacugccugacccgguggaugcugaucgaggccgagcucaagugcuucgggaacacggccguggcgaagugcaacgagaagcacgacgaggaguucugcgacaugcugcgccuguucgacuucaacaagcaggccauccggcgccucaagaccgaggcccagaugagcauccagcugaucaacaaggccgugaacgcccugaucaacgaccagcucaucaugaagaaccaccuccgggacaucaugggcauccccuacugcaacuacuccaaguacugguaccugaaccacaccgucaccgggaagacgagccugccccgcugcuggcugguguccaacggcagcuaccugaacgagacccacuucuccgacgacaucgagcagcaggcggacaacaugaucaccgagcuccugcagaaggaguacaucgaccggcagggcaagaccccgcuggggcucguggaccuguucgucuucagcacguccuucuaccugaucagcaucuuccugcaccucgugaagaucccgugaggacuagucccuguucccagagcccacuuuuuuuucuuuuuuugaaauaaaauagccugucuuucagaucucaaaggcucuuuucagagccaccaaaaaaaaaaaaaaaaaaaaaaaaaaaaaaaaaaaaaaaaaaaaaaaaaaaaaaaaaaaaaaaaagaauu

SEQ ID NO: 42159 - RNA, 1619 nt, Artificial Sequence
  mRNA product Design a-2 (hSL-A64-N5) comprising derived and/or modified sequence from LASV(Lassa virus/H.sapiens-wt/NGA/2015/ISTH_0543;Clade II)__AVO03639__GPCmut13 (opt1)
aggagaguccgcucagccagguugcagaagcggcuuagcguguguccuaaucuucucucugcguguagguaggccugugccgcaaacaagcuuaccaugggccagaucaucaccuucuuccaggaggugccccacgucaucgaggaggugaugaacaucgugcugaucgcccucagccugcuggccauccucaaggggaucuacaacgucgcgaccugcggccuguucgggcugguguccuuccuccugcugugcggccgcagcugcuccacgaccuacaaggggguguacgagcuccagacccuggagcuggacauggccaaccucaacaugaccaugccgcugagcugcacgaagaacaacucccaccacuacaucauggucggcaacgagaccggccuggagcucacccugaccaacacgagcaucaucaaccacaaguucugcaaccuguccgacgcccacaagaagaaccucuacgaccacgcccugaugagcaucaucuccaccuuccaccugagcauccccaacuucaaccaguacgaggccauguccugcgacuucaacgggggcaagaucagcgugcaguacaaccucucccacaccuacgcgguggacgccgccaaccacugcgggaccaucgccaacggcguccugcagacguucaugcggauggcguggggcgggagcuacaucgcccuggacuccggcaaggggagcugggacugcaucaugaccuccuaccaguaccucgugauccagaacaccaccugggaggaccacugccaguucagccgccccucccccaucggcuaccuggggcugcucagccagcggacgcgcgacaucuacaucagccggcgccugcugggcaccuucaccuggacccucuccgacagcgagggcaacgagacgcccgggggcuacugccugacccgguggaugcugaucgaggccgagcucaagugcuucgggaacaccgccguggccaagugcaacgagaagcacgacgaggaguucugcgacaugcugcgccuguucgacuucaacaagcaggcgauccggcgccucaagaccgaggcccagauguccauccagcugaucaacaaggccgucaacgcccugaucaacgaccagcucaucaugaagaaccaccuccgggacaucaugggcauccccuacugcaacuacagcaaguacugguaccugaaccacacggugaccgggaagaccucccugccccgcugcuggcuggugagcaacggcuccuaccugaacgagacccacuucagcgacgacaucgagcagcaggccgacaacaugaucacggagcuccugcagaaggaguacaucgaccggcagggcaagaccccgcuggggcucgucgaccuguucguguucuccaccagcuucuaccugaucuccaucuuccugcaccucgugaagaucccgugaggacuagucccuguucccagagcccacuuuuuuuucuuuuuuugaaauaaaauagccugucuuucagaucucaaaggcucuuuucagagccaccaaaaaaaaaaaaaaaaaaaaaaaaaaaaaaaaaaaaaaaaaaaaaaaaaaaaaaaaaaaaaaaaagaauu

SEQ ID NO: 42160 - RNA, 1619 nt, Artificial Sequence
  mRNA product Design a-2 (hSL-A64-N5) comprising derived and/or modified sequence from LASV(Lassa virus/H.sapiens-wt/NGA/2016/ISTH_0009;Clade II)__AVO03571__GPCmut13 (opt1)
aggagaguccgcucagccagguugcagaagcggcuuagcguguguccuaaucuucucucugcguguagguaggccugugccgcaaacaagcuuaccaugggccagaucaucaccuucuuccaggaggugccccacgucaucgaggaggugaugaacaucgugcugaucgcccucagccugcuggccauccucaaggggaucuacaacgucgcgaccugcggccugcuggggcucguguccuuccugcugcucugcggccgcagcugcuccacgaccuacaaggggguguacgagcugcagacccuggagcucgacauggccagccugaacaugaccaugccgcuguccugcacgaagaacaacagccaccacuacaucauggucggcaacgagaccggccucgagcugacccugaccaacacguccaucaucaaccacaaguucugcaaccucagcgacgcccacaagaagaaccuguacgaccacgcccugauguccaucaucagcaccuuccaccucuccauccccaacuucaaccaguacgaggccaugagcugcgacuucaacgggggccggaucuccgugcaguacaaccugagccacuccuacgcgguggacgccgccaaccacugcgggaccaucgccaacggcguccugcagaccuucaugcgcauggcguggggcgggagcuacaucgcccucgacuccggcaaggggagcugggacugcaucaugacguccuaccaguaccugaucauccagaacaccaccugggaggaccacugccaguucagccggcccagccccaucggcuaccuggggcuccugucccagcgcacccgggacaucuacaucagccgccggcugcucggcacguucaccuggacccuguccgacagcgagggcaacgagacccccgggggcuacugccugacgcgcuggaugcucaucgaggccgagcugaagugcuucgggaacaccgccguggccaagugcaacgagaagcacgacgaggaguucugcgacaugcugcggcuguucgacuucaacaagcaggcgauccgccggcugaagaccgaggcccagauguccauccagcugaucaacaaggccgugaacgcccucaucaacgaccagcugaucaugaagaaccaccuccgcgacaucaugggcaucccguacugcaacuacagcaaguacugguaccucaaccacaccgucacggggaagaccucccugccccggugcuggcuggugagcaacggcuccuaccucaacgagacccacuucagcgacgacaucgagcagcaggccgacaacaugaucaccgagcugcugcagaaggaguacaucgaccgccagggcaagacgccccucgggcugguggaccuguucgucuucuccaccagcuucuaccugaucuccaucuuccuccaccuggugaagaucccgugaggacuagucccuguucccagagcccacuuuuuuuucuuuuuuugaaauaaaauagccugucuuucagaucucaaaggcucuuuucagagccaccaaaaaaaaaaaaaaaaaaaaaaaaaaaaaaaaaaaaaaaaaaaaaaaaaaaaaaaaaaaaaaaaagaauu

SEQ ID NO: 42161 - RNA, 1619 nt, Artificial Sequence
  mRNA product Design a-2 (hSL-A64-N5) comprising derived and/or modified sequence from LASV(Lassa virus/H.sapiens-wt/NGA/2016/ISTH_0017;Clade II)__AVO03567__GPCmut13 (opt1)
aggagaguccgcucagccagguugcagaagcggcuuagcguguguccuaaucuucucucugcguguagguaggccugugccgcaaacaagcuuaccaugggccagaucaucaccuucuuccaggaggugccccacgucaucgaggaggugaugaacaucgugcugaucgcccucagccugcuggccauccucaaggggaucuacaacgucgcgaccugcggccuguucgggcugguguccuuccuccugcugugcggccgcagcugcuccacgaccuacaaggggguguacgagcuccagacccuggagcuggacauggccagccucaacaugaccaugccgcuguccugcacgaagaacaacagccaccacuacaucauggucggcaacgagaccggccuggagcucacccugaccaacacguccaucaucaaccacaaguucugcaaccugagcgacgcccacaagaagaaccucuacgaccacgcccugauguccaucaucagcaccuuccaccuguccauccccaacuucaaccaguacgaggccaugagcugcgacuucaacgggggcaagaucuccgugcaguacaaccucagccacaccuacgcgaucgacgccgccaaccacugcgggaccaucgccaacggcgugcugcagacguucaugcggauggcguggggcggguccuacaucgcccuggacagcggcaagggguccugggacugcaucaugaccagcuaccaguaccucaucauccagaacaccaccugggaggaccacugccaguucucccgccccagccccaucggcuaccuggggcugcucagccagcggacgcgcgacaucuacaucucccggcgccugcugggcaccuucaccuggacccucagcgacuccgagggcaacgagacgcccgggggcuacugccugacccgguggaugcugaucgaggccgagcucaagugcuucgggaacaccgccgucgccaagugcaacgagaagcacgacgaggaguucugcgacaugcugcgccuguucgacuucaacaagcaggcgauccggcgccucaagaccgaggcccagaugagcauccagcugaucaacaaggccgugaacgcccugaucaacgaccagcucaucaugaagaaccaccuccgggacaucaugggcauccccuacugcaacuacuccaaguacugguaccugaaccacacggugaccgggaagaccagccugccccgcugcuggcuggucuccaacggcagcuaccugaacgagacccacuucuccgacgacaucgagcagcaggccgacaacaugaucacggagcuccugcagaaggaguacauggaccggcagggcaagaccccgcuggggcucguggaccuguucguguucagcaccuccuucuaccugaucagcaucuuccugcaccucguccgcaucccgugaggacuagucccuguucccagagcccacuuuuuuuucuuuuuuugaaauaaaauagccugucuuucagaucucaaaggcucuuuucagagccaccaaaaaaaaaaaaaaaaaaaaaaaaaaaaaaaaaaaaaaaaaaaaaaaaaaaaaaaaaaaaaaaaagaauu

SEQ ID NO: 42162 - RNA, 1619 nt, Artificial Sequence
  mRNA product Design a-2 (hSL-A64-N5) comprising derived and/or modified sequence from LASV(Lassa virus/H.sapiens-wt/NGA/2018/ISTH_0959;Clade II)__AVV65099__GPCmut13 (opt1)
aggagaguccgcucagccagguugcagaagcggcuuagcguguguccuaaucuucucucugcguguagguaggccugugccgcaaacaagcuuaccaugggccagaucaucaccuucuuccaggaggugccccacgucaucgaggaggugaugaacaucgugcugaucgcccucagccugcuggccauccucaaggggaucuacaacgucgugaccugcggccuguucgggcugguguccuuccuccugcugugcggccgcagcugcuccacgaccuacaagggggucuacgagcuccagacccuggagcuggacauggcgagccucaacaugaccaugccgcuguccugcacgaagaacaacagccaccacuacaucauggugggcaacgagaccggccuggagcucacccugaccaacacguccaucaucaaccacaaguucugcaaccugagcgacgcccacaagaagaaccucuacgaccacgcccugauguccaucaucagcaccuuccaccuguccauccccaacuucaaccaguacgaggccaugagcugcgacuucaacgggggcaagaucuccgugcaguacaaccucagccacgccuacgcgaucgacgccgccaaccacugcgggaccaucgccaacggcguccugcagaccuucaugcggauggcguggggcggguccuacaucgcccuggacagcggcaagggguccugggacugcaucaugacgagcuaccaguaccucaucauccagaacaccaccugggaggaccacugccaguucucccgccccagccccaucggcuaccuggggcugcucagccagcggacccgcgacaucuacaucucccggcgccugcugggcacguucaccuggacccucagcgacuccgagggcaacgagacccccgggggcuacugccugacgcgguggaugcugaucgaggccgagcucaagugcuucgggaacaccgccguggccaagugcaacgagaagcacgacgaggaguucugcgacaugcugcgccuguucgacuucaacaagcaggcgauccggcgccucaagaccgaggcccagaugagcauccagcugaucaacaaggccgugaacgcccugaucaacgaccagcucaucaugaagaaccaccuccgggacaucaugggcaucccguacugcaacuacuccaaguacugguaccugaaccacaccgucacggggaagaccagccugccccgcugcuggcugguguccaacggcagcuaccugaacgagacccacuucuccgacgacaucgagcagcaggccgacaacaugaucaccgagcuccugcagaaggaguacaucgaccggcagggcaagacgccccuggggcucguggaccuguucgucuucagcaccuccuucuaccugaucagcaucuuccugcaccucgugaagaucccgugaggacuagucccuguucccagagcccacuuuuuuuucuuuuuuugaaauaaaauagccugucuuucagaucucaaaggcucuuuucagagccaccaaaaaaaaaaaaaaaaaaaaaaaaaaaaaaaaaaaaaaaaaaaaaaaaaaaaaaaaaaaaaaaaagaauu

SEQ ID NO: 42163 - RNA, 1619 nt, Artificial Sequence
  mRNA product Design a-2 (hSL-A64-N5) comprising derived and/or modified sequence from LASV(LASV003-NIG-2008;Clade II)__AIT17580__GPCmut13 (opt1)
aggagaguccgcucagccagguugcagaagcggcuuagcguguguccuaaucuucucucugcguguagguaggccugugccgcaaacaagcuuaccaugggccagaucaucaccuucuuccaggaggugccccacgucaucgaggaggugaugaacaucgugcugaucgcccucagccugcuggccauccucaaggggaucuacaacgucgcgaccugcggccuguucgggcugguguccuuccuccugcugugcggccgcagcugcuccacgaccuacaaggggguguacgagcuccagacccuggagcuggacauggccagccucaacaugaccaugccgcuguccugcacgaagaacaacagccaccacuacaucauggucggcaacgagaccggccuggagcucacccugaccaacacguccaucaucaaccacaaguucugcaaccugagcgacgcccacaagaagaaccucuacgaccacgcccugauguccaucaucagcaccuuccaccuguccauccccaacuucaaccaguacgaggccaugagcugcgacuucaacgggggcaagaucuccgugcaguacaaccucagccacaccuacgcgguggacgccgccaaccacugcgggaccaucgccaacggcguccugcagacguucaugcggauggcguggggcggguccuacaucgcccuggacagcggcaagggguccugggacugcaucaugaccagcuaccaguaccucaucauccagaacaccaccugggaggaccacugccaguucucccgccccagccccaucggcuaccuggggcugcucagccagcggacgcgcgacaucuacaucucccggcgccugcugggcaccuucaccuggacccucagcgacuccgagagcaacgagacgccgggcggguacugccugacccgguggaugcugaucgaggccgagcucaagugcuucggcaacaccgccguggccaagugcaacgagaagcacgacgaggaguucugcgacaugcugcgccuguucgacuucaacaagcaggcgauccggcgccucaaggccgaggcccagauguccauccagcugaucaacaaggccgugaacgcccugaucaacgaccagcucaucaugaagaaccaccuccgggacaucauggggauccccuacugcaacuacagcaaguacugguaccugaaccacaccgucacgggccgcaccucccugccccggugcuggcuggugagcaacggguccuaccugaacgagacccacuucagcgacgacaucgagcagcaggcggacaacaugaucaccgagcuccugcagaaggaguacauggaccgccagggcaagacgccccugggccucguggaccuguucgucuucuccaccagcuucuaccugaucuccaucuuccugcaccucgugaagaucccgugaggacuagucccuguucccagagcccacuuuuuuuucuuuuuuugaaauaaaauagccugucuuucagaucucaaaggcucuuuucagagccaccaaaaaaaaaaaaaaaaaaaaaaaaaaaaaaaaaaaaaaaaaaaaaaaaaaaaaaaaaaaaaaaaagaauu

SEQ ID NO: 42164 - RNA, 1619 nt, Artificial Sequence
  mRNA product Design a-2 (hSL-A64-N5) comprising derived and/or modified sequence from LASV(LASV035-NIG-2009;Clade II)__AIT17588__GPCmut13 (opt1)
aggagaguccgcucagccagguugcagaagcggcuuagcguguguccuaaucuucucucugcguguagguaggccugugccgcaaacaagcuuaccaugggccagaucaucaccuucuuccaggaggugccccacgucaucgaggaggugaugaacaucgugcugaucgcccucagccugcuggccauccucaaggggaucuacaacgucgcgaccugcggccuguucgggcugguguccuuccuccugcugugcggccgcagcugcuccacgaccuacaaggggguguacgagcuccagacccuggagcuggacauggccagccucaacaugaccaugccgcuguccugcacgaagaacaacagccaccacuacaucauggucggcaacgagaccggccuggagcucacccugaccaacacguccaucaucaaccacaaguucugcaaccugagcgacgcccacaagaagaaccucuacgaccacgcccugauguccaucaucagcaccuuccaccuguccauccccaacuucaaccaguacgaggccaugagcugcgacuucaacgggggcaagaucuccgugcaguacaaccucagccacgcguacgccguggacgccgccaaccacugcgggaccaucgcgaacggcguccugcagaccuucaugcggauggccuggggcggguccuacaucgcccuggacagcggcaagggguccugggacugcaucaugacgagcuaccaguaccucaucauccagaacaccaccugggaggaccacugccaguucucccgccccagccccaucggcuaccuggggcugcucagccagcggacccgcgacaucuacaucucccggcgccugcugggcacguucaccuggacccucagcgacuccgagggcaacgagacccccgggggcuacugccugacgcgguggaugcugaucgaggccgagcucaagugcuucgggaacaccgccguggcgaagugcaacgagaagcacgacgaggaguucugcgacaugcugcgccuguucgacuucaacaagcaggccauccggcgccucaaggccgaggcccagaugagcauccagcugaucaacaaggccgugaacgcgcugaucaacgaccagcucaucaugaagaaccaccuccgggacaucaugggcauccccuacugcaacuacuccaaguacugguaccugaaccacaccgucaccgggaagacgagccugccccgcugcuggcugguguccaacggcagcuaccugaacgagacccacuucuccgacgacaucgagcagcaggccgacaacaugaucaccgagcuccugcagaaggaguacaucgaccggcagggcaagaccccgcuggggcucguggaccuguucgucuucagcacguccuucuaccugaucagcaucuuccugcaccucgugaagaucccgugaggacuagucccuguucccagagcccacuuuuuuuucuuuuuuugaaauaaaauagccugucuuucagaucucaaaggcucuuuucagagccaccaaaaaaaaaaaaaaaaaaaaaaaaaaaaaaaaaaaaaaaaaaaaaaaaaaaaaaaaaaaaaaaaagaauu

SEQ ID NO: 42165 - RNA, 1619 nt, Artificial Sequence
  mRNA product Design a-2 (hSL-A64-N5) comprising derived and/or modified sequence from LASV(LASV1000-NIG-2009;Clade II)__AIT17782__GPCmut13 (opt1)
aggagaguccgcucagccagguugcagaagcggcuuagcguguguccuaaucuucucucugcguguagguaggccugugccgcaaacaagcuuaccaugggccagaucaucaccuucuuccaggaggugccccacgucaucgaggaggugaugaacaucgugcugaucgcccucagccugcuggccauccucaaggggaucuacaacgucgcgaccugcggccuguucgggcugguguccuuccuccugcugugcggccgcagcugcuccacgaccuacaaggggguguacgagcuccagacccuggagcuggacauggccagccucaacaugaccaugccgcuguccugcacgaagaacaacagccaccacuacaucauggucggcaacgagaccggccuggagcucacccugaccaacacguccaucaucaaccacaaguucugcaaccugagcgacgcccacaagaagaaccucuacgaccacgcccugauguccaucaucagcaccuuccaccuguccauccccaacuucaaccaguacgaggccaugagcugcgacuucaacgggggcaagaucuccgugcaguacaaccucagccacaccuacgcgguggacgccgccaaccacugcgggaccaucgccaacggcguccugcagacguucaugcggauggcguggggcggguccuacaucgcccuggacagcggcaagggguccugggacugcaucaugaccagcuaccaguaccucaucauccagaacaccaccugggaggaccacugccaguucucccgccccagccccaucggcuaccuggggcugcucagccagcggacgcgcgacaucuacaucucccggcgccugcugggcaccuucaccuggacccucagcgacuccgagggcaacgagacgcccgggggcuacugccugacccgguggaugcugaucgaggccgagcucaagugcuucgggaacaccgccguggccaagugcaacgagaagcacgacgaggaguucugcgacaugcugcgccuguucgacuucaacaagcaggcgaucaagcggcucaagaccgaggcccagaugagcauccagcugaucaacaaggccgugaacgcccugaucaacgaccagcucaucaugaagaaccaccuccgcgacaucaugggcauccccuacugcaacuacuccaaguacugguaccugaaccacacggucaccgggaagaccagccugccccggugcuggcugguguccaacggcagcuaccugaacgagacccacuucuccgacgacaucgagcagcaggccgacaacaugaucacggagcuccugcagaaggaguacaucgaccgccagggcaagaccccgcuggggcucguggaccuguucgucuucagcaccuccuucuaccugaucagcaucuuccugcaccucgugaagaucccgugaggacuagucccuguucccagagcccacuuuuuuuucuuuuuuugaaauaaaauagccugucuuucagaucucaaaggcucuuuucagagccaccaaaaaaaaaaaaaaaaaaaaaaaaaaaaaaaaaaaaaaaaaaaaaaaaaaaaaaaaaaaaaaaaagaauu

SEQ ID NO: 42166 - RNA, 1619 nt, Artificial Sequence
  mRNA product Design a-2 (hSL-A64-N5) comprising derived and/or modified sequence from LASV(LASV221-NIG-2010;Clade II)__AIT17624__GPCmut13 (opt1)
aggagaguccgcucagccagguugcagaagcggcuuagcguguguccuaaucuucucucugcguguagguaggccugugccgcaaacaagcuuaccaugggccagaucaucaccuucuuccaggaggugccccacgucaucgaggaggugaugaacaucgugcugaucgcccucagccugcuggccauccucaaggggaucuacaacgucgcgaccugcggccuguucgggcugguguccuuccuccugcugugcggccgcagcugcuccacgaccuacaaggggguguacgagcuccagacccuggagcuggacauggccagccucaacaugaccaugccgcuguccugcacgaagaacaacagccaccacuacaucauggucggcaacgagaccggccuggagcucacccugaccaacacguccaucaucaaccacaaguucugcaaccugagcgacgcccacaagaagaaccucuacgaccacgcccugauguccaucaucagcaccuuccaccuguccauccccaacuucaaccaguacgaggccaugagcugcgacuucaacgggggcaagaucuccgugcaguacaaccucagccacaccuacgcgaucgacgccgccaaccacugcgggaccaucgccaacggcgugcugcagacguucaugcggauggcguggggcggguccuacaucgcccuggacagcggcaagggguccugggacugcaucaugaccagcuaccaguaccucaucauccagaacaccaccugggaggaccacugccaguucucccgccccagccccaucggcuaccuggggcugcucagccagcggacgcgcgacaucuacaucucccggcgccugcugggcaccuucaccuggacccucagcgacuccgagggcaacgagacgcccgggggcuacugccugacccgguggaugcugaucgaggccgagcucaagugcuucgggaacaccgccgucgccaagugcaacgagaagcacgacgaggaguucugcgacaugcugcgccuguucgacuucaacaagcaggcgauccggcgccucaagaccgaggcccagaugagcauccagcugaucaacaaggccgugaacgcccugaucaacgaccagcucaucaugaagaaccaccuccgggacaucaugggcauccccuacugcaacuacuccaaguacugguaccugaaccacacggugaccgggaagaccagccugccccgcugcuggcuggucuccaacggcagcuaccugaacgagacccacuucuccgacgacaucgagcagcaggccgacaacaugaucacggagaugcuccagaaggaguacauggaccggcagggcaagaccccgcuggggcugguggaccucuucguguucagcaccuccuucuaccugaucagcaucuuccugcaccuggucaagaucccgugaggacuagucccuguucccagagcccacuuuuuuuucuuuuuuugaaauaaaauagccugucuuucagaucucaaaggcucuuuucagagccaccaaaaaaaaaaaaaaaaaaaaaaaaaaaaaaaaaaaaaaaaaaaaaaaaaaaaaaaaaaaaaaaaagaauu

SEQ ID NO: 42167 - RNA, 1619 nt, Artificial Sequence
  mRNA product Design a-2 (hSL-A64-N5) comprising derived and/or modified sequence from LASV(LASV237-NIG-2010;Clade II)__AIT17638__GPCmut13 (opt1)
aggagaguccgcucagccagguugcagaagcggcuuagcguguguccuaaucuucucucugcguguagguaggccugugccgcaaacaagcuuaccaugggccagaucaucaccuucuuccaggaggugccccacgucaucgaggaggugaugaacaucgugcugaucgcccucagccugcuggccauccucaaggggaucuacaacgucgcgaccugcggccuguucgggcugguguccuuccuccugcugugcggccgcagcugcuccacgaccuacaaggggguguacgagcuccagacccuggagcuggacauggccagccucaacaugaccaugccgcuguccugcacgaagaacaacagccaccacuacaucauggucggcaacgagaccggccuggagcucacccugaccaacacguccaucaucaaccacaaguucugcaaccugagcgacgcccacaagaaggaccucuacgaccacgcccugauguccaucaucagcaccuuccaccuguccauccccaacuucaaccaguacgaggccaugagcugcgacuucaacgggggcaagaucuccgugcaguacaaccucagccacaccuacgcgguggacgccgccaaccacugcgggaccaucgccaacggcguccugcagacguucaugcggauggcguggggcggguccuacaucgcccuggacagcggcaagggguccugggacugcaucaugaccagcuaccaguaccucaucauccagaacaccaccugggaggaccacugccaguucucccgccccagccccaucggcuaccuggggcugcucagccagcggacgcgcgacaucuacaucucccggcgccugcugggcaccuucaccuggacccucagcgacuccgagggcaacgagacgcccgggggcuacugccugacccgguggaugcugaucgaggccgagcucaagugcuucgggaacaccgccguggccaagugcaacgagaagcacgacgaggaguucugcgacaugcugcgccuguucgacuucaacaagcaggcgauccggcgccucaagaccgaggcccagaugagcauccagcugaucaacaaggccgugaacgcccugaucaacgaccagcucaucaugaagaaccaccuccgggacaucaugggcauccccuacugcaacuacuccaaguacugguaccugaaccacacggucaccgggaagaccagccugccccgcugcuggcugguguccaacggcagcuaccugaacgagacccacuucuccgacgacaucgagcagcaggccgacaacaugaucacggagcuccugcagaaggaguacauggaccggcagggcaagaccccgcuggggcucguggaccuguucgucuucagcaccuccuucuaccugaucagcaucuuccugcaccucaucaagaucccgugaggacuagucccuguucccagagcccacuuuuuuuucuuuuuuugaaauaaaauagccugucuuucagaucucaaaggcucuuuucagagccaccaaaaaaaaaaaaaaaaaaaaaaaaaaaaaaaaaaaaaaaaaaaaaaaaaaaaaaaaaaaaaaaaagaauu

SEQ ID NO: 42168 - RNA, 1619 nt, Artificial Sequence
  mRNA product Design a-2 (hSL-A64-N5) comprising derived and/or modified sequence from LASV(LASV253-NIG-2011;Clade II)__AIT17670__GPCmut13 (opt1)
aggagaguccgcucagccagguugcagaagcggcuuagcguguguccuaaucuucucucugcguguagguaggccugugccgcaaacaagcuuaccaugggccagaucaucaccuucuuccaggaggugccccacgucaucgaggaggugaugaacaucgugcugaucgcccucagccugcuggccauccucaaggggaucuacaacgucgcgaccugcggccuguucgggcugguguccuuccuccugcugugcggccgcagcugcuccacgaccuacaaggggguguacgagcuccagacccuggagcuggacauggccagccucaacaugaccaugccgcuguccugcacgaagaacaacagccaccacuacaucauggucggcaacgagaccggccuggagcucacccugaccaacacguccaucaucaaccacaaguucugcaaccugagcgacgcccacaagaagaaccucuacgaccacgcccugauguccaucaucagcaccuuccaccuguccauccccaacuucaaccaguacgaggccaugagcugcgacuucaacgggggcaagaucuccgugcaguacaaccucagccacaccuacgcgguggacgccgccaaccacugcgggaccaucgccaacggcguccugcagacguucaugcggauggcguggggcggguccuacaucgcccuggacagcggcaagggguccugggacugcaucaugaccagcuaccaguaccucaucauccagaacaccaccugggaggaccacugccaguucucccgccccagccccaucggcuaccuggggcugcucagccagcggacgcgcgacaucuacaucucccggcgccugcugggcaccuucaccuggacccucagcgacuccgagggcaacgagacgcccgggggcuacugccugacccgguggaugcugaucgaggccgagcucaagugcuucgggaacaccgccguggccaagugcaacgagaagcacgacgaggaguucugcgacaugcugcgccuguucgacuucaacaagcaggcgauccggcgccucaaggccgaggcccagaugagcauccagcugaucaacaaggccgugaacgcccugaucaacgaccagcucaucaugaagaaccaccuccgggacaucaugggcaucccguacugcaacuacuccaaguacugguaccugaaccacaccgucacggggcgcaccagccugccccggugcuggcugguguccaacggcagcuaccugaacgagacccacuucuccgacgacaucgagcagcaggcggacaacaugaucaccgagcuccugcagaaggaguacaucgaccgccagggcaagacgccccuggggcucguggaccuguucgucuucagcaccuccuucuaccugaucagcaucuuccugcaccucgugaagaucccgugaggacuagucccuguucccagagcccacuuuuuuuucuuuuuuugaaauaaaauagccugucuuucagaucucaaaggcucuuuucagagccaccaaaaaaaaaaaaaaaaaaaaaaaaaaaaaaaaaaaaaaaaaaaaaaaaaaaaaaaaaaaaaaaaagaauu

SEQ ID NO: 42169 - RNA, 1619 nt, Artificial Sequence
  mRNA product Design a-2 (hSL-A64-N5) comprising derived and/or modified sequence from LASV(LASV254-NIG-2011;Clade II)__AIT17674__GPCmut13 (opt1)
aggagaguccgcucagccagguugcagaagcggcuuagcguguguccuaaucuucucucugcguguagguaggccugugccgcaaacaagcuuaccaugggccagaucaucaccuucuuccaggaggugccccacgucaucgaggaggugaugaacaucgugcugaucgcccucagccugcuggccauccucaaggggaucuacaacgucgcgaccugcggccuguucgggcugguguccuuccuccugcugugcggccgcagcugcuccacgaccuacaaggggguguacgagcuccagacccuggagcuggacaugaccaaccucaacaugacgaugccgcugagcugcaccaagaacaacucccaccacuacaucauggucggcaacgagaccggccuggagcucacccugacgaacaccagcaucaucaaccacaaguucugcaaccuguccgacgcccacaagaagaaccucuacaaccacgcccugaugagcaucaucuccaccuuccaccugagcauccccaacuucaaccaguacgaggccauguccugcgacuucaacgggggcaagaucagcgugcaguacaaccucucccacagcuacgccguggacgcggccaaccacugcgggaccaucgccaacggcguccugcagacguucaugcggauggccuggggcggguccuacaucgcgcuggacagcggcaaggggaacugggacugcaucaugaccuccuaccaguaccucaucauccagaacaccaccugggaggaccacugccaguucagccgccccucccccaucggcuaccuggggcugcucagccagcggacgcgcgacaucuacaucagccggcgccugcugggcaccuucaccuggacccucuccgacagcgagggcaacgagacgcccgggggcuacugccugacccgguggaugcugaucgaggccgagcucaagugcuucgggaacaccgccguggccaagugcaacgagaagcacgacgaggaguucugcgacaugcugcgccuguucgacuucaacaagcaggccauccggcgccucaagaccgaggcgcaggccaacauccagcugaucaacaaggccgugaacgcccugaucaacgaccagcucaucaugaagaaccaccuccgggacaucaugggcauccccuacugcaacuacuccaaguacugguaccugaaccacacggucaccgggaagaccagccugccccgcugcuggcugguguccaacggcagcuaccugaacgagacccacuucuccgacgacaucgagcagcaggccgacaacaugaucacggagcuccugcagaaggaguacauggaccggcagggcaagaccccgcuggggcucguggaccuguucgucuucagcaccuccuucuaccugaucagcaucuuccugcaccucgugaagaucccgugaggacuagucccuguucccagagcccacuuuuuuuucuuuuuuugaaauaaaauagccugucuuucagaucucaaaggcucuuuucagagccaccaaaaaaaaaaaaaaaaaaaaaaaaaaaaaaaaaaaaaaaaaaaaaaaaaaaaaaaaaaaaaaaaagaauu

SEQ ID NO: 42170 - RNA, 1619 nt, Artificial Sequence
  mRNA product Design a-2 (hSL-A64-N5) comprising derived and/or modified sequence from LASV(Nig08-A19;Clade III)__ADU56618__GPCmut13 (opt1)
aggagaguccgcucagccagguugcagaagcggcuuagcguguguccuaaucuucucucugcguguagguaggccugugccgcaaacaagcuuaccaugggccagaucgugaccuucuuccaggaggucccccacgugaucgaggaggugaugaacaucguccugaucgcccucagcauccuggccauccugaaggggcucuacaacaucgcgaccugcggccugaucgggcuggugacguuccuccugcuguccggccgcagcugcuccaugaccuacaaggggguguacgagcuccagacccuggagcugaacaugaacacccucaacaugacgaugccgcugagcugcaccaagaacaacucccaccacuacaucauggucggcaacgagaccggccuggagcucacccugacgaacaccagccugcuccaccacaaguucugcaaccuguccgacgcccacaagaagaaccuguacgaccacacccucaugagcaucaucuccaccuuccaccugagcauccccaacuucaaccaguacgaggccauguccugcgacuucaacgggggcaagaucacggugcaguacaaccugagccacuccuacgccaucgacgccgcgaaccacugcgggaccguggccaacggcguccuccagaccuucaugcggauggccuggggcgggagcuacaucgcccuggacuccggccgcgggaagugggacugcaucaugaccagcuaccaguaccugaucauccagaacacgaccugggaggaccacugccaguucucccggcccagccccaucggcuaccucgggcugcugucccagcgcacccgggacaucuacaucagccgccggcuccugggcaccuucacguggacccugagcgacuccgagggcaacgagacccccgggggcuacugccucacccgcuggaugcugaucgaggcggagcugaagugcuucgggaacacggccguggccaagugcaacgagaagcacgacgaggaguucugcgacaugcuccggcuguucgacuucaacaagcaggccauccgccggcugaaggccgaggcgcagaugagcauccagcucaucaacaaggccgugaacgcccugaucaacgaccagcugaucaugaagaaccaccuccgcgacaucaugggcauccccuacugcaacuacuccaaguacugguaccugaaccacaccagcaccgggcggaccucccugccccgcugcuggcucgucagcaacggcuccuaccugaacgagacgcacuucagcgacgacaucgagcagcaggccgacaacaugaucaccgagaugcugcagaaggaguaccucgaccggcagggcaagaccccgcuggggcugguggaccuguucguguucuccaccagcuucuaccucaucuccaucuuccugcaccuggucaagaucccgugaggacuagucccuguucccagagcccacuuuuuuuucuuuuuuugaaauaaaauagccugucuuucagaucucaaaggcucuuuucagagccaccaaaaaaaaaaaaaaaaaaaaaaaaaaaaaaaaaaaaaaaaaaaaaaaaaaaaaaaaaaaaaaaaagaauu

SEQ ID NO: 42171 - RNA, 1622 nt, Artificial Sequence
  mRNA product Design a-2 (hSL-A64-N5) comprising derived and/or modified sequence from LASV(G1180-SLE-2010;Clade IV)__AIT17168__GPCmut13 (opt1)
aggagaguccgcucagccagguugcagaagcggcuuagcguguguccuaaucuucucucugcguguagguaggccugugccgcaaacaagcuuaccaugggccagaucgugaccuucuuccaggaggucccccacgugaucgaggaggugaugaacaucguccugaucgcccucagcauccuggccgugcugaaggggcucuacaacuucgcgaccugcggccugguggggcugcucaccuuccugcugcucugcggccgcuccugcaccgccagccgguacaagggggucuacgagcugcagacccuggagcucaacauggagacccugaacaugacgaugccgcuguccugcaccaagaacaacagccaccacuacaucauggugggcaacgagaccggccucgagcugacccugacgaacaccuccaucaucaaccacaaguucugcaaccucagcgacgcccacaagaagaaccuguacgaccacgcccugauguccaucaucagcaccuuccaccucuccauccccaacuucaaccaguacgaggccaugagcugcgacuucaacgggggcaagaucuccgugcaguacaaccugagccacuccuacgcgggggacgccgccaaccacugcggcaccgucgccaacggggugcugcagacguucaugcgcauggcguggggcggcagcuacaucgcccucgacuccgggcacggcagcugggacugcaucaugaccuccuaccaguaccugaucauccagaacaccaccugggaggaccacugccaguucagccggcccucccccaucggguaccugggccuccugagccagcgcacgcgggacaucuacaucagccgccggcugcucggcaccuucaccuggacccuguccgacagcgaggggaaggacacgccgggcggguacugccugacccgcuggaugcucaucgaggccgagcugaagugcuucggcaacaccgccguggccaagugcaacgagaagcacgacgaggaguucugcgacaugcugcggcuguucgacuucaacaagcaggcgauccagcgccugaaggccgaggcccagauguccauccagcugaucaacaaggccgucaacgcccucaucaacgaccagcugaucaugaagaaccaccuccgggacaucauggggauccccuacugcaacuacagcaaguacugguaccucaaccacaccacgaccggcaagaccucccugcccaagugcuggcuggugagcaacggcuccuaccucaacgagacccacuucagcgacgacaucgagcagcaggcggacaacaugaucacggagaugcugcagaaggaguacauggagcgccaggggaagacgccccugggccucguggaccuguucgucuucuccaccagcuucuaccugaucuccaucuuccugcaccucgugaagaucccgugaggacuagucccuguucccagagcccacuuuuuuuucuuuuuuugaaauaaaauagccugucuuucagaucucaaaggcucuuuucagagccaccaaaaaaaaaaaaaaaaaaaaaaaaaaaaaaaaaaaaaaaaaaaaaaaaaaaaaaaaaaaaaaaaagaauu

SEQ ID NO: 42172 - RNA, 1622 nt, Artificial Sequence
  mRNA product Design a-2 (hSL-A64-N5) comprising derived and/or modified sequence from LASV(G1442-SLE-2011;Clade IV)__AIT17180__GPCmut13 (opt1)
aggagaguccgcucagccagguugcagaagcggcuuagcguguguccuaaucuucucucugcguguagguaggccugugccgcaaacaagcuuaccaugggccagaucgugaccuucuuccaggaggucccccacgugaucgaggaggugaugaacaucguccugaucgcccucagcauccuggccgugcugaaggggcucuacaacguggcgaccugcggccugaucgggcuggucacguuccuccugcugugcggccgcuccugcaccaccacccucuacaaggggguguacgagcugcagacgcuggagcucaacauggagacccugaacaugaccaugccgcugagcugcaccaagaacaacucccaccacuacauccgggugggcaacgagacgggccucgagcugacccugaccaacaccagcaucaucaaccacaaguucugcaaccucuccgacgcccacaagaagaaccuguacgaccacgcccugaugagcaucaucuccacguuccaccucagcauccccaacuucaaccaguacgaggccauguccugcgacuucaacgggggcaagaucagcguccaguacaaccugucccacagcuacgccggggacgcggccaaccacugcggcaccguggccaacggggugcugcagaccuucaugcgcauggccuggggcggcuccuacaucgcgcucgacagcgggcggggcaacugggacugcaucaugaccuccuaccaguaccugaucauccagaacacgaccugggacgaccacugccaguucagccgccccucccccaucggguaccugggccuccugagccagcggacccgcgacgucuacaucucccggcgccugcucggcaccuucacguggacccugagcgacagcgaggggaaggacaccccgggcggguacugccugacccgguggaugcucaucgaggccgagcugaagugcuucggcaacacggccguggccaagugcaacgagaagcacgacgaggaguucugcgacaugcugcgccucuucgacuucaacaagcaggccauccagcggcugaaggcggaggcccagauguccauccagcugaucaacaaggccgugaacgcccucaucaacgaccagcugaucaugaagaaccaccuccgcgacaucauggggauccccuacugcaacuacagcaaguacugguaccugaacaacaccgccaccggcaagaccucccugcccaagugcuggcugaucagcaacggcuccuaccucaacgagacgcacuucagcgacgacaucgagcaggaggcggacaacaugaucaccgagaugcugcagaaggaguacauggagcggcaggggaagacgccccugggccucgucgaccuguucguguucuccaccagcuucuaccugaucuccaucuuccugcaccucgugaagaucccgugaggacuagucccuguucccagagcccacuuuuuuuucuuuuuuugaaauaaaauagccugucuuucagaucucaaaggcucuuuucagagccaccaaaaaaaaaaaaaaaaaaaaaaaaaaaaaaaaaaaaaaaaaaaaaaaaaaaaaaaaaaaaaaaaagaauu

SEQ ID NO: 42173 - RNA, 1622 nt, Artificial Sequence
  mRNA product Design a-2 (hSL-A64-N5) comprising derived and/or modified sequence from LASV(G3010-SLE-2013;Clade IV)__AIT17344__GPCmut13 (opt1)
aggagaguccgcucagccagguugcagaagcggcuuagcguguguccuaaucuucucucugcguguagguaggccugugccgcaaacaagcuuaccaugggccagaucgugaccuucuuccaggaggucccccacgugaucgaggaggugaugaacaucguccugaucgcccucagcauccuggccgugcugaaggggcucuacaacuucgcgaccugcggccugguggggcuggucacguuccuccugcugugcggccgcuccugcaccaccagccucuacaaggggguguacgagcugcagacccuggagcucaacauggagacgcugaacaugaccaugccgcuguccugcaccaagaacaacagccaccacuacaucauggugggcaacgagaccggccucgagcugacgcugaccaacaccuccaucaucaaccacaaguucugcaaccucagcgacgcccacaagaagaaccuguacaaccacgcccugauguccaucaucagcaccuuccaccucuccauccccaacuucaaccaguacgaggccaugagcugcgacuucaacgggggcaagaucuccguccaguacaaccugagccacuccuacgccggggacgcggccagccacugcggcacgguggccaacggggugcugcagaccuucaugcggauggccuggggcggcuccuacaucgcgcucgacagcggguacggcaagugggacugcaucaugaccuccuaccaguaccugaucauccagaacaccacgugggaggaccacugccaguucagccgccccucccccaucggguaccugggccuccugagccagcggacccgcgacaucuacaucagccggcgccugcucggcaccuucaccuggacgcuguccgacagcgaggggaaggacaccccgggcggguacugccugacccgguggaugcucaucgaggccgagcugaagugcuucggcaacaccgccgucgccaagugcaacgagaagcacgacgaggaguucugcgacaugcugcgccucuucgacuucaacaagcaggccauccagcggcugaagacggaggcgcagauguccauccagcugaucaacaaggccgugaacgcccucaucaacgaccagcugaucaugaagaaccaccuccgcgacaucauggggauccccuacugcaacuacagcaaguacugguaccugaaccacaccaccaccggcaagacgucccugcccaagugcuggcuggugagcaacggcuccuaccucaacgagacccacuucagcgacgacaucgagcagcaggccgacaacaugaucaccgagaugcugcagaaggaguacauggagcggcaggggaagacgccccugggccucgucgaccuguucguguucuccaccagcuucuaccugaucuccaucuuccugcaccucgugaagaucccgugaggacuagucccuguucccagagcccacuuuuuuuucuuuuuuugaaauaaaauagccugucuuucagaucucaaaggcucuuuucagagccaccaaaaaaaaaaaaaaaaaaaaaaaaaaaaaaaaaaaaaaaaaaaaaaaaaaaaaaaaaaaaaaaaagaauu

SEQ ID NO: 42174 - RNA, 1622 nt, Artificial Sequence
  mRNA product Design a-2 (hSL-A64-N5) comprising derived and/or modified sequence from LASV(G502-SLE-2009;Clade IV)__AIT17126__GPCmut13 (opt1)
aggagaguccgcucagccagguugcagaagcggcuuagcguguguccuaaucuucucucugcguguagguaggccugugccgcaaacaagcuuaccaugggccagaucgugaccuucuuccaggaggucccccacgugaucgaggaggugaugaacaucguccugaucgcccucagcauccuggccgugcugaaggggcucuacaacuucgcgaccugcggccugguggggcugcucacguuccugcugcucugcggccgcuccugcaccaccgggcuguacaagggcgucuacgagcugcagacccucgagcugaacauggagacgcugaacaugaccaugccgcucagcugcaccaagaacaacucccaccacuacaucauggugggcaacgagaccgggcuggagcugacgcucaccaacaccagcaucaucaaccacaaguucugcaaccuguccgacgcccacaagaagaaccuguacgaccacgcccucaugagcaucaucuccaccuuccaccugagcauccccaacuucaaccaguacgaggccauguccugcgacuucaacggcgggaagaucagcgugcaguacaaccugucccacagcuacgccggcgacgcggccgaccacugcgggacggucgccaacggcgugcuccagaccuucaugcggauggccuggggcggguccuacaucgcgcuggacagcggccgcgggcggugggacugcaucaugaccuccuaccaguaccugaucauccagaacaccacgugggaggaccacugccaguucagccgccccucccccaucggcuaccucggccugcugagccagcggacccgcgacaucuacaucucccggcgccuccuggggaccuucaccuggacgcugagcgacagcgagggcaaggacacccccgggggcuacugccucacccgguggaugcugaucgaggccgagcugaagugcuucgggaacaccgccguggccaagugcaacgagaagcacgacgaggaguucugcgacaugcuccgccuguucgacuucaacaagcaggccauccagcggcugaaggcggaggcccagauguccauccagcucaucaacaaggccgucaacgcccugaucaacgaccagcuggugaugaagaaccaccuccgcgacaucaugggcauccccuacugcaacuacagccgguacugguaccugaaccacacgaccaccggccgcaccucccugcccaagugcuggcucgugagcaacggguccuaccugaacgagacgcacuucagcgacgacaucgagcagcaggccgacaacaugaucaccgagaugcugcagaaggaguacauggagcggcagggcaagaccccgcucgggcuggucgaccuguucguguucuccaccagcuucuaccugaucuccaucuuccuccaccuggugaagaucccgugaggacuagucccuguucccagagcccacuuuuuuuucuuuuuuugaaauaaaauagccugucuuucagaucucaaaggcucuuuucagagccaccaaaaaaaaaaaaaaaaaaaaaaaaaaaaaaaaaaaaaaaaaaaaaaaaaaaaaaaaaaaaaaaaagaauu

SEQ ID NO: 42175 - RNA, 1622 nt, Artificial Sequence
  mRNA product Design a-2 (hSL-A64-N5) comprising derived and/or modified sequence from LASV(G733-SLE-2010;Clade IV)__AIT17154__GPCmut13 (opt1)
aggagaguccgcucagccagguugcagaagcggcuuagcguguguccuaaucuucucucugcguguagguaggccugugccgcaaacaagcuuaccaugggccagaucgugaccuucuuccaggaggucccccacgugaucgaggaggugaugaacaucguccugaucgcccucagcauccuggccgugcugaaggggcucuacaacuucgcgaccugcggcaucguggggcuggucuccuuccugcuccugugcggccgcagcugcacgaccucccuguacaaggggguguacgagcuccagacccuggagcugaacauggagacccucaacaugacgaugccgcugagcugcaccaagaacaacucccaccacuacaucauggugggcaacgagaccggccuggagcucacccugacgaacaccagcaucaucaaccacaaguucugcaaccuguccgacgcccacaagaagaaccucuacgaccacgcccugaugagcaucaucuccaccuuccaccugagcauccccaacuucaaccaguacgaggccauguccugcgacuucaacgggggcaagaucagcguccaguacaaccucucccacagcuacgccggggacgcggccaaccacugcggcaccaucgccaacggggugcugcagacguucaugcggauggccuggggcggcuccuacaucgcgcuggacagcgggcgcgaccggugggacugcaucaugaccuccuaccaguaccucaucauccagaacaccaccugggaggaccacugccaguucagccgccccucccccaucggcuaccuggggcugcucagccagcggacgcgcgacaucuacaucagccggcgccugcugggcaccuucaccuggacccucuccgacagcgagggcaaggacacgcccgggggcuacugccugacccgguggaugcugaucgaggccgagcucaagugcuucgggaacaccgccguggccaagugcaacgagaagcacgacgaggaguucugcgacaugcugcgccuguucgacuucaacaagcaggccauccagcggcucaaggcggaggcccagauguccauccagcugaucaacaaggccgucaacgcccugaucaacgaccagcucaucaugaagaaccaccuccgcgacaucaugggcauccccuacugcaacuacagcaaguacugguaccugaaccacaccacgaccgggaagaccucccugcccaagugcuggcuggugagcaacggcuccuaccugaacgagacccacuucagcgacgacaucgagcagcaggccgacaacaugaucacggagaugcuccagaaggaguacauggagcggcagggcaagaccccgcuggggcugguggaccucuucgucuucuccaccagcuucuaccugaucuccaucuuccugcaccuggugaagaucccgugaggacuagucccuguucccagagcccacuuuuuuuucuuuuuuugaaauaaaauagccugucuuucagaucucaaaggcucuuuucagagccaccaaaaaaaaaaaaaaaaaaaaaaaaaaaaaaaaaaaaaaaaaaaaaaaaaaaaaaaaaaaaaaaaagaauu

SEQ ID NO: 42176 - RNA, 1622 nt, Artificial Sequence
  mRNA product Design a-2 (hSL-A64-N5) comprising derived and/or modified sequence from MOPV/LASV reassortant(IGS-1;Clade IV)__AFY05576__GPCmut13 (opt1)
aggagaguccgcucagccagguugcagaagcggcuuagcguguguccuaaucuucucucugcguguagguaggccugugccgcaaacaagcuuaccaugggccagaucgugaccuucuuccaggaggucccccacgugaucgaggaggugaugaacaucguccugaucgcccucagcgugcuggccgugcugaaggggcucuacaacuucgcgaccugcggccuggucgggcuggugacguuccuccugcugugcggccgcuccugcaccaccagccucuacaaggggguguacgagcugcagacccuggagcucaacauggagacgcugaacaugaccaugccgcuguccugcaccaagaacaacagccaccacuacaucauggucggcaacgagaccggccucgagcugacgcugaccaacaccuccaucaucaaccacaaguucugcaaccucagcgacgcccacaagaagaaccuguacgaccacgcccugauguccaucaucagcaccuuccaccucuccauccccaacuucaaccaguacgaggccaugagcugcgacuucaacgggggcaagaucuccgugcaguacaaccugagccacuccuacgccggggacgcggccaaccacugcggcacgguggccaacgggguccugcagaccuucaugcggauggccuggggcggcagcuacaucgcgcucgacuccgggcgcggcaacugggacugcaucaugaccagcuaccaguaccugaucauccagaacaccacgugggaggaccacugccaguucucccggcccagccccaucggguaccugggccuccugucccagcgcacccgggacaucuacaucagccgccggcugcucggcaccuucaccuggacgcugagcgacuccgagggggaggacaccccgggcggguacugccugacccgcuggaugcucaucgaggccgagcugaagugcuucggcaacaccgccguggccaagugcaacgagaagcacgacgaggaguucugcgacaugcugcggcuguucgacuucaacaagcaggccauccagcgccugaaggcggaggcccagaugagcauccagcugaucaacaaggccgugaacgcccucaucaacgaccagcugaucaugaagaaccaccuccgggacaucauggggauccccuacugcaacuacuccaaguacugguaccucaaccacacgaccaccggccgcaccagccugcccaagugcuggcuggucuccaacggcagcuaccucaacgagacgcacuucuccgacgacaucgagcagcaggccgacaacaugaucaccgagaugcugcagaaggaguacauggagcggcaggggaagacgccccugggccucguggaccuguucguguucagcaccuccuucuaccugaucagcaucuuccugcaccucgucaagaucccgugaggacuagucccuguucccagagcccacuuuuuuuucuuuuuuugaaauaaaauagccugucuuucagaucucaaaggcucuuuucagagccaccaaaaaaaaaaaaaaaaaaaaaaaaaaaaaaaaaaaaaaaaaaaaaaaaaaaaaaaaaaaaaaaaagaauu

SEQ ID NO: 42177 - RNA, 1622 nt, Artificial Sequence
  mRNA product Design a-2 (hSL-A64-N5) comprising derived and/or modified sequence from LASV(LM765-SLE-2012;Clade IV)__AIT17814__GPCmut13 (opt1)
aggagaguccgcucagccagguugcagaagcggcuuagcguguguccuaaucuucucucugcguguagguaggccugugccgcaaacaagcuuaccaugggccagaucgugaccuucuuccaggaggucccccacgugaucgaggaggugaugaacaucguccugaucgcccucagcauccuggccgugcugaaggggcucuacaacuucgcgaccugcggccugguggggcuggucacguuccuccugcugugcggccgcuccugcaccaccagccucuacaaggggguguacgagcugcagacccuggagcucaacauggagacgcugaacaugaccaugccgcuguccugcaccaagaacaacagccaccacuacaucauggugggcaacgagaccggccucgagcugacgcugaccaacaccuccaucaucgaccacaaguucugcaaccucagcgacgcccaccggaagaaccuguacgaccacgcccugauguccaucaucagcaccuuccaccucuccauccccaacuucaaccaguacgaggccaugagcugcgacuucaacgggggcaagaucuccguccaguacaaccugagccacuccuacgccaaggacgcggccgaccacugcgggacgguggccaacggcgugcugcagaccuucaugcgcauggccuggggcgggagcuacaucgcgcucgacuccggccgggggcgcugggacugcaucaugaccagcuaccaguaccugaucauccagaacaccacgugggaggaccacugccaguucucccggcccagccccaucggcuaccuggggcuccugucccagcgcacccgggacaucuacaucagccgccggcugcucggcaccuucaccuggacgcugagcgacuccgagggcaaggacacccccgggggcuacugccugacccgcuggaugcucaucgaggccgagcugaagugcuucgggaacaccgccgucgccaagugcaacgagaagcacgacgaggaguucugcgacaugcugcggcuguucgacuucaacaagcaggccauccagcgccugaaggcggaggcccagaugagcauccagcugaucaacaaggccgugaacgcccucaucaacgaccagcugaucaugaagaaccaccuccgggacaucaugggcauccccuacugcaacuacuccaaguacugguaccucaaccacacgaccaccgggaagaccagccugcccaagugcuggcugguguccaacggcagcuaccucaacgagacgcacuucuccgacgacaucgagcagcaggccgacaacaugaucaccgagaugcugcagaaggaguacauggagcgccagggcaagaccccgcuggggcucgucgaccuguucguguucagcaccuccuucuaccugaucagcaucuuccugcaccucgugaagaucccgugaggacuagucccuguucccagagcccacuuuuuuuucuuuuuuugaaauaaaauagccugucuuucagaucucaaaggcucuuuucagagccaccaaaaaaaaaaaaaaaaaaaaaaaaaaaaaaaaaaaaaaaaaaaaaaaaaaaaaaaaaaaaaaaaagaauu

SEQ ID NO: 42178 - RNA, 1622 nt, Artificial Sequence
  mRNA product Design a-2 (hSL-A64-N5) comprising derived and/or modified sequence from LASV(LM776-SLE-2012;Clade IV)__AIT17824__GPCmut13 (opt1)
aggagaguccgcucagccagguugcagaagcggcuuagcguguguccuaaucuucucucugcguguagguaggccugugccgcaaacaagcuuaccaugggccagaucgugaccuucuuccaggaggucccccacgugaucgaggaggugaugaacaucguccugaucgcccucagcauccuggccgugcugaaggggcucuacaacuucgcgaccugcggccugguggggcuggucacguuccuccugcugugcggccgcuccugcaccaccagcguguacaaggggguguacgagcuccagacccuggagcugaacauggagacgcucaacaugaccaugccgcuguccugcaccaagaacaacagccaccacuacaucauggucggcaacgagaccggccuggagcucacgcugaccaacaccuccaucaucaaccacaaguucugcaaccugagcgacgcccacaagaagaaccucuacgaccacgcccugauguccaucaucagcaccuuccaccuguccauccccaacuucaaccaguacgaggccaugagcugcgacuucaacgggggcaagaucuccgugcaguacaaccucagccacuccuacgccggggacgcggccaaccacugcggcacgguggccaacgggguccugcagaccuucaugcggauggccuggggcggcagcuacaucgcgcuggacuccgggcacggcaagugggacugcaucaugaccagcuaccaguaccucaucauccagaacaccacgugggaggaccacugccaguucucccgccccagccccaucggguaccugggccugcucucccagcggacccgcgacaucuacaucagccggcgccugcugggcaccuucaccuggacgcucagcgacuccgaggggaaggacaccccgggcggguacugccugacccgguggaugcugaucgaggccgagcucaagugcuucggcaacaccgccguggccaagugcaacgagaagcacgacgaggaguucugcgacaugcugcgccuguucgacuucaacaagcaggccauccagcggcucaaggcggaggcccagaugagcauccagcugaucaacaaggccgugaacgcccugaucaacgaccagcucaucaugaagaaccaccuccgcgacaucauggggauccccuacugcaacuacuccaaguacugguaccugaaccacacgaccaccggcaagaccagccugcccaagugcuggcuggucuccaacggcagcuaccugaacgagacgcacuucuccgacgacaucgagcagcaggccgacaacaugaucaccgagaugcuccagaaggaguacauggagcggcaggggaagacgccccugggccugguggaccucuucguguucagcaccuccuucuaccugaucagcaucuuccugcaccuggucaagaucccgugaggacuagucccuguucccagagcccacuuuuuuuucuuuuuuugaaauaaaauagccugucuuucagaucucaaaggcucuuuucagagccaccaaaaaaaaaaaaaaaaaaaaaaaaaaaaaaaaaaaaaaaaaaaaaaaaaaaaaaaaaaaaaaaaagaauu

SEQ ID NO: 42179 - RNA, 1622 nt, Artificial Sequence
  mRNA product Design a-2 (hSL-A64-N5) comprising derived and/or modified sequence from LASV(Mad39;Clade IV)__ANH09722__GPCmut13 (opt1)
aggagaguccgcucagccagguugcagaagcggcuuagcguguguccuaaucuucucucugcguguagguaggccugugccgcaaacaagcuuaccaugggccagaucgugaccuucuuccaggaggucccccacgugaucgaggaggugaugaacaucguccugaucgcccucagcauccuggccgugcugaaggggcucuacaacguggcgaccugcggccugaucgggcuggucacguuccuccugcugugcggccgcuccugcaccaccacccucuacaaggggguguacgagcugcaggcccuggagcucaacauggagacgcugaacaugaccaugccgcugagcugcaccaagaacaacucccaccacuacauccgggugggcaacgagaccggccucgagcugacgcugaccaacaccagccucaucaaccacaaguucugcaaccuguccgacgcccacaagaagaaccuguacgaccacgcccucaugagcaucaucuccaccuuccaccugagcauccccaacuucaaccaguacgaggccauguccugcgacuucaacgacgggaagaucagcguccaguacaaccugucccacacguacgcgggcgacaccgccaaccacugcgggaccguggccaacggcgugcuccagaccuucaugcgcauggccuggggcgggagcuacaucgcgcuggacuccggccgcgggggcugggacugcaucaugacgagcuaccaguaccugaucauccagaacaccaccugggaggaccacugccaguucucccggcccagccccaucggguaccucggccugcugucccagcggacccgcgacaucuacaucagccggcgccuccugggcacguucaccuggacccuguccgacagcgaggggaaggacaccccgggcggguacugccucacgcgguggaugcugaucgaggccgagcugaagugcuucggcaacaccgccgucgccaagugcaacgagaagcacgacgaggaguucugcgacaugcuccgccuguucgacuucaacaagcaggccauccagcggcugaaggcggaggcccagaugagcauccagcucaucaacaaggccgugaacgcccugaucaacgaccagcugaucaugaagaaccaccuccgcgacaucauggggauccccuacugcaacuacuccaaguacugguaccugaaccacaccgugaccggcaagacgagccugcccaagugcuggcucgucuccaacggcagcuaccugaacgagacccacuucuccgacgacaucgagcagcaggccgacaacaugaucaccgagaugcugcagaaggaguacauggagcggcaggggaagacgccccucggccugguggaccuguucguguucagcaccuccuucuaccugaucagcaucuuccuccaccuggucaagaucccgugaggacuagucccuguucccagagcccacuuuuuuuucuuuuuuugaaauaaaauagccugucuuucagaucucaaaggcucuuuucagagccaccaaaaaaaaaaaaaaaaaaaaaaaaaaaaaaaaaaaaaaaaaaaaaaaaaaaaaaaaaaaaaaaaagaauu

SEQ ID NO: 42180 - RNA, 1622 nt, Artificial Sequence
  mRNA product Design a-2 (hSL-A64-N5) comprising derived and/or modified sequence from LASV(Z0947-SLE-2011;Clade IV)__AIT17840__GPCmut13 (opt1)
aggagaguccgcucagccagguugcagaagcggcuuagcguguguccuaaucuucucucugcguguagguaggccugugccgcaaacaagcuuaccaugggccagaucgugaccuucuuccaggaggucccccacgugaucgaggaggugaugaacaucguccugaucgcccucagcauccuggccgugcugaaggggcucuacaacuucgcgaccugcggccugguggggcuggucacguuccuccugcugugcggccgcuccugcaccaucagccucuacaaggggguguacgagcugcagacccuggagcucaacauggagacccugaacaugacgaugccgcuguccugcaccaagaacaacagccaccacuacaucauggugggcaacgagaccggccucgagcugacccugacgaacaccuccaucaucaaccacaaguucugcaaccucagcgacgcccacaagaagaaccuguacgaccacgcccugauguccaucaucagcaccuuccaccucuccauccccaacuucaaccaguacgaggccaugagcugcgacuucaacgggggcaagaucuccguccaguacaaccugagccacuccuacgccggggacgcggccaaccacugcggcaccguggccaacggggugcugcagacguucaugcggauggccuggggcggcagcuacaucgcgcucgacuccgggcgcgaccggugggacugcaucaugaccagcuaccaguaccugaucauccagaacaccaccugggaggaccacugccaguucucccgccccagccccaucggcuaccuggggcuccugucccagcggacgcgcgacaucuacaucagccggcgccugcucggcaccuucaccuggacccugagcgacuccgagggcaaggacacgcccgggggcuacugccugacccgguggaugcucaucgaggccgagcugaagugcuucgggaacaccgccgucgccaagugcaacgagaagcacgacgaggaguucugcgacaugcugcgccucuucgacuucaacaagcaggccauccagcggcugaaggcggaggcccagaugagcauccagcugaucaacaaggccgugaacgcccucaucaacgaccagcugaucaugaagaaccaccuccgcgacaucaugggcauccccuacugcaacuacuccaaguacugguaccugaaccacaccacgaccgggaagaccagccugcccaagugcuggcugguguccaacggcagcuaccucaacgagacccacuucuccgacgacaucgagcagcaggccgacaacaugaucacggagaugcugcagaaggaguacauggagcggcagggcaagaccccgcuggggcucgucgaccuguucguguucagcaccuccuucuaccugaucagcaucuuccugcaccucgugaagaucccgugaggacuagucccuguucccagagcccacuuuuuuuucuuuuuuugaaauaaaauagccugucuuucagaucucaaaggcucuuuucagagccaccaaaaaaaaaaaaaaaaaaaaaaaaaaaaaaaaaaaaaaaaaaaaaaaaaaaaaaaaaaaaaaaaagaauu

SEQ ID NO: 42181 - RNA, 1622 nt, Artificial Sequence
  mRNA product Design a-2 (hSL-A64-N5) comprising derived and/or modified sequence from LASV(Josiah;Clade IV)__NP_694870__GPCmut13 (opt1)
aggagaguccgcucagccagguugcagaagcggcuuagcguguguccuaaucuucucucugcguguagguaggccugugccgcaaacaagcuuaccaugggccagaucgugaccuucuuccaggaggucccccacgugaucgaggaggugaugaacaucguccugaucgcccucagcgugcuggccgugcugaaggggcucuacaacuucgcgaccugcggccuggucgggcuggugacguuccuccugcugugcggccgcuccugcaccaccagccucuacaaggggguguacgagcugcagacccuggagcucaacauggagacgcugaacaugaccaugccgcuguccugcaccaagaacaacagccaccacuacaucauggucggcaacgagaccggccucgagcugacgcugaccaacaccuccaucaucaaccacaaguucugcaaccucagcgacgcccacaagaagaaccuguacgaccacgcccugauguccaucaucagcaccuuccaccucuccauccccaacuucaaccaguacgaggccaugagcugcgacuucaacgggggcaagaucuccgugcaguacaaccugagccacuccuacgccggggacgcggccaaccacugcggcacgguggccaacgggguccugcagaccuucaugcggauggccuggggcggcagcuacaucgcgcucgacuccgggcgcggcaacugggacugcaucaugaccagcuaccaguaccugaucauccagaacaccacgugggaggaccacugccaguucucccggcccagccccaucggguaccugggccuccugucccagcgcacccgggacaucuacaucagccgccggcugcucggcaccuucaccuggacgcugagcgacuccgaggggaaggacaccccgggcggguacugccugacccgcuggaugcucaucgaggccgagcugaagugcuucggcaacaccgccguggccaagugcaacgagaagcacgacgaggaguucugcgacaugcugcggcuguucgacuucaacaagcaggccauccagcgccugaaggcggaggcccagaugagcauccagcugaucaacaaggccgugaacgcccucaucaacgaccagcugaucaugaagaaccaccuccgggacaucauggggauccccuacugcaacuacuccaaguacugguaccucaaccacacgaccaccggccgcaccagccugcccaagugcuggcuggucuccaacggcagcuaccucaacgagacgcacuucuccgacgacaucgagcagcaggccgacaacaugaucaccgagaugcugcagaaggaguacauggagcggcaggggaagacgccccugggccugguggaccucuucguguucagcaccuccuucuaccugaucagcaucuuccugcaccucgucaagaucccgugaggacuagucccuguucccagagcccacuuuuuuuucuuuuuuugaaauaaaauagccugucuuucagaucucaaaggcucuuuucagagccaccaaaaaaaaaaaaaaaaaaaaaaaaaaaaaaaaaaaaaaaaaaaaaaaaaaaaaaaaaaaaaaaaagaauu

SEQ ID NO: 42182 - RNA, 1619 nt, Artificial Sequence
  mRNA product Design a-2 (hSL-A64-N5) comprising derived and/or modified sequence from LASV(LP;Clade I)__AAF86701__GPCmut13 (opt1)
aggagaguccgcucagccagguugcagaagcggcuuagcguguguccuaaucuucucucugcguguagguaggccugugccgcaaacaagcuuaccaugggccagaucaucaccuucuuccaggaggugccccacgucaucgaggaggugaugaacaucgugcugaucgcccucagccugcuggccauccucaaggggcuguacaacaucgcgaccugcggcaucaucgggcuggucgccuuccucuuccugugcggcaaguccugcagccugacgcucaagggcggguacgagcugcagacccuggagcucaacauggagacccugaacaugaccaugccgcuguccugcacgaagaacagcucccaccacuacauccgcgugggcaacgagaccgggcucgagcugacccugaccaacacgagcaucaucaaccacaaguucugcaaccucuccgacgcccacaagaagaaccuguacgaccacgcccugaugagcaucaucuccaccuuccaccucagcauccccaacuucaaccaguacgaggccauguccugcgacuucaacggcgggaagaucagcgugcaguacaaccugucccacagcuacgcgggcgacgccgccgagcacugcgggaccgucgccaacggcgugcugcagaccuucaugcggauggcguggggcgggcgcuacaucgcccucgacuccggcaaggggaacugggacugcaucaugacgagcuaccaguaccugaucauccagaacaccaccugggaggaccacugccaguucucccggcccagccccaucggcuaccugggccuccugucccagcgcacccgggacaucuacaucagccgccggcugcucgggacguucaccuggacccugagcgacuccgagggcaacgagacccccgggggcuacugccugacgcgcuggaugcucaucgaggccgagcugaagugcuucgggaacaccgccguggccaagugcaacgagaagcacgacgaggaguucugcgacaugcugcggcuguucgacuucaacaagcaggcgauccgccggcugaaggccgaggcccagaugagcauccagcugaucaacaaggccgucaacgcccucaucaacgaccagcugaucaugaagaaccaccuccgcgacaucaugggcauccccuacugcaacuacuccaaguacugguaccucaaccacaccagcuccggccggaccagccugcccaagugcuggcugaucuccaacgggagcuaccucaacgagacgcaguucuccgacgacaucgagcagcaggcggacaacaugaucaccgagaugcugcagaaggaguacaucgagcgccagggcaagaccccgcuggggcugguggacaucuucaucuucagcaccuccuucuaccucaucagcaucuuccugcaccugaucaagaucccgugaggacuagucccuguucccagagcccacuuuuuuuucuuuuuuugaaauaaaauagccugucuuucagaucucaaaggcucuuuucagagccaccaaaaaaaaaaaaaaaaaaaaaaaaaaaaaaaaaaaaaaaaaaaaaaaaaaaaaaaaaaaaaaaaagaauu

SEQ ID NO: 42183 - RNA, 1619 nt, Artificial Sequence
  mRNA product Design a-2 (hSL-A64-N5) comprising derived and/or modified sequence from LASV(803213;Clade II)__AAF86703__GPCmut13 (opt1)
aggagaguccgcucagccagguugcagaagcggcuuagcguguguccuaaucuucucucugcguguagguaggccugugccgcaaacaagcuuaccaugggccagaucaucaccuucuuccaggaggugccccacgucaucgaggaggugaugaacaucgugcugaucgcccucagccugcuggccauccucaaggggaucuacaacgucgcgaccugcggccuguucgggcugaucuccuuccuccugcugugcggccgcagcugcuccgugacguacaaggggguguacgagcuccagacccuggagcugaacauggccaaccucaacaugaccaugccgcugagcugcaccaagaacaacucccaccacuacaucauggucggcaacgagacgggccuggagcucacccugaccaacaccagcaucaucaaccacaaguucugcaaccuguccgacgcccacaagaagaaccucuacgaccacgcccugaugagcaucaucuccacguuccaccugagcauccccaacuucaaccaguacgaggccauguccugcgacuucaacgggggcaagaucagcgugcaguacaaccucucccacagcuucgcgguggacgccgccaaccacugcgggaccaucgccaacggcguccugcagaccuucaugcggauggcguggggcggguccuacaucgcccuggacagcggcaaggggaacugggacugcaucaugaccuccuaccaguaccucaucauccagaacacgaccugggaggaccacugccaguucagccgccccucccccaucggcuaccuggggcugcucagccagcggacccgcgacaucuacaucagccggcgccugcugggcaccuucacguggacccucuccgacagcgagggcaacgaggcccccgggggcuacugccugacccgguggaugcugaucgaggccgagcucaagugcuucgggaacaccgccguggcgaagugcaacgagaagcacgacgaggaguucugcgacaugcugcgccuguucgacuucaacaagcaggccaucaagcggcucaagacggaggcccagauguccauccagcugaucaacaaggccgugaacgcccugaucaacgaccagcucaucaugaagaaccaccuccgcgacaucaugggcauccccuacugcaacuacagccgguacugguaccugaaccacaccgucaccgggaagaccucccugccccgcugcuggcuggugagcaacggcuccuaccugaacgagacgcacuucagcgacgacaucgagcagcaggcggacaacaugaucaccgagaugcuccagaaggaguacauggaccggcagggcaagaccccgcuggggcugguggaccuguucgucuucuccaccagcuucuaccucaucuccaucuuccugcaccuggugaagaucccgugaggacuagucccuguucccagagcccacuuuuuuuucuuuuuuugaaauaaaauagccugucuuucagaucucaaaggcucuuuucagagccaccaaaaaaaaaaaaaaaaaaaaaaaaaaaaaaaaaaaaaaaaaaaaaaaaaaaaaaaaaaaaaaaaagaauu

SEQ ID NO: 42184 - RNA, 1619 nt, Artificial Sequence
  mRNA product Design a-2 (hSL-A64-N5) comprising derived and/or modified sequence from LASV(GA391;Clade III)__CAA36645__GPCmut13 (opt1)
aggagaguccgcucagccagguugcagaagcggcuuagcguguguccuaaucuucucucugcguguagguaggccugugccgcaaacaagcuuaccaugggccagaucgugaccuucuuccaggaggucccccacgugaucgaggaggugaugaacaucguccugaucgcccucagcauccuggccauccugaaggggcucuacaacguggcgaccugcggccugaucgggcuggugacguuccuccugcuguccggccgcagcugcucccucaucuacaaggggaccuacgagcugcagacccuggagcucaacauggagacccugaacaugacgaugccgcugagcugcaccaagaacaacucccaccacuacauccgggucggcaacgagaccggccucgagcugacccugacgaacaccagcauccucaaccacaaguucugcaaccuguccgacgcccacaagcgcaaccuguacgaccacagccucauguccaucaucagcaccuuccaccuguccauccccaacuucaaccaguacgaggccaugagcugcgacuucaacgggggcaagaucaccgugcaguacaaccugucccacagcuucgccguggacgccgcggggcacugcggcacgcucgccaacgggguccugcagaccuucaugcggauggccuggggcggcuccuacaucgcccuggacagcgggcgcggcaacugggacugcaucaugaccuccuaccaguaccucaucauccagaacaccacgugggacgaccacugccaguucagccggcccucccccaucggguaccugggccugcucagccagcgcacccgggacaucuacaucagccgccggcugcugggcaccuucaccuggacgcucuccgacagcgaggggaacgagaccccgggcggguacugccugacccgcuggaugcugaucgaggcggagcucaagugcuucggcaacaccgccguggccaagugcaacgagaagcacgacgaggaguucugcgacaugcugcggcuguucgacuucaacaagcaggccauccgccggcucaagacggaggcccagauguccauccagcugaucaacaaggcggugaacgcccugaucaacgaccagcucaucaugaagaaccaccuccgcgacaucauggggauccccuacugcaacuacagccgguacugguaccugaaccacaccuccaccggcaagaccagccugccccgcugcuggcugaucuccaacggcagcuaccugaacgagacgaaguucuccgacgacaucgagcagcaggccgacaacaugaucaccgagaugcugcagaaggaguacaucgaccggcaggggaagacgccccucggccuggucgaccuguucguguucagcaccuccuucuaccucaucagcaucuuccugcaccuggugaagaucccgugaggacuagucccuguucccagagcccacuuuuuuuucuuuuuuugaaauaaaauagccugucuuucagaucucaaaggcucuuuucagagccaccaaaaaaaaaaaaaaaaaaaaaaaaaaaaaaaaaaaaaaaaaaaaaaaaaaaaaaaaaaaaaaaaagaauu

SEQ ID NO: 42185 - RNA, 1622 nt, Artificial Sequence
  mRNA product Design a-2 (hSL-A64-N5) comprising derived and/or modified sequence from LASV(AV;Clade V)__CCA30314__GPCmut13 (opt1)
aggagaguccgcucagccagguugcagaagcggcuuagcguguguccuaaucuucucucugcguguagguaggccugugccgcaaacaagcuuaccaugggccagaucgugaccuucuuccaggaggucccccacgugaucgaggaggugaugaacaucguccugaucgcccucagcauccuggccgugcugaaggggcucuacaacaucgcgaccugcggccugaucgggcugaucacguuccuccugcugugcggccgcuccugcagcuccaaccucuacaaggggguguacgagcugcagagccuggaccucaacauggagacccugaacaugaccaugccgcuguccugcaccaagaacaacagccaccacuacauccgggucggcaacgacacgggccucgagcugacccugaccaacaccuccauccucaaccacaaguucugcaaccugagcgacgcccacaagaaggaccuguacgaccacgcccucauguccaucaucagcacguuccaccuguccauccccaacuucaaccaguacgaggccaugagcugcgacuucaacgggggcaagaucuccgugcaguacaaccugagccacuccuacgccaucgacgcggccaaccacugcgggaccguggccaacggcauccuccagaccuucaugcgcauggccuggggcgggagcuacaucgcgcuggacuccggccgggggaacugggacugcaucaugaccagcuaccaguaccugaucauccagaacacgaccugggagaaccacugccaguucucccgccccagccccaucggcuaccucgggcugcugagccagcggacccgcgacaucuacaucucccggcgccuccugggcaccuucacguggacccugagcgacuccgagggcaacgccacccccgggggcuacugccucacccgguggaugcugaucgaggccgagcugaagugcuucgggaacacggccgucgccaagugcaacgagaagcacgacgaggaguucugcgacaugcuccgccuguucgacuucaacaagcaggcgaucagccggcugaaguccgaggcccagaugagcauccagcucaucaacaaggccgugaacgcccugaucaacgaccagcugaucaugaagaaccaccuccgcgacaucaugggcauccccuacugcaacuacuccaaguacugguaccugaaccacaccaucaccgggaagaccagccugcccaagugcuggcucguguccaacggcagcuaccugaacgagacgcacuucuccgacgacaucgagcagcaggccgacaacaugaucaccgagaugcugcagaaggaguacauggagcggcagggcaagaccccgcuggggcucgucgaccuguucguguucagcaccuccuucuaccugaucagcaucuuccuccgccuggugaagaucccgugaggacuagucccuguucccagagcccacuuuuuuuucuuuuuuugaaauaaaauagccugucuuucagaucucaaaggcucuuuucagagccaccaaaaaaaaaaaaaaaaaaaaaaaaaaaaaaaaaaaaaaaaaaaaaaaaaaaaaaaaaaaaaaaaagaauu

SEQ ID NO: 42186 - RNA, 1619 nt, Artificial Sequence
  mRNA product Design a-2 (hSL-A64-N5) comprising derived and/or modified sequence from LASV(Togo/2016/7082;Clade VI)__AMR44577__GPCmut13 (opt1)
aggagaguccgcucagccagguugcagaagcggcuuagcguguguccuaaucuucucucugcguguagguaggccugugccgcaaacaagcuuaccaugggccagaucaucaccuucuuccaggaggugccccacgucaucgaggaggugaugaacaucgugcugaucgcccucagccugcuggccauccucaagggggucuacaacguggcgaccugcggcaucaucgggcuggugacguuccuguuccucugcggccgcuccugcagccugaucuacaagggguccuacgagcugcagacccucgagcugaacauggagacccugaacaugaccaugccgcucagcugcacgaagaacuccagccaccacuacauccgggucggcaacgagaccggccuggagcugacccucaccaacacguccaucaucaaccacaaguucugcaaccugagcgacgcccacaagcgcaaccuguacgaccacgcccucauguccauccugagcaccuuccaccuguccauccccaacuucaaccaguacgaggccaugagcugcgacuucaacgggggcaagaucuccgugcaguacaaccucagccacgccuacgcgguggacgccgccgagcacugcgggaccgucgccaacggcgugcugcagaccuucaugcggauggcguggggcggguccuacaucgcccuggacagcggccgcgggaacugggacugcaucaugacguccuaccaguaccucaucauccagaacaccaccugggaggaccacugccaguucagccggcccucccccaucggcuaccuggggcugcucagccagcgcacccgggacaucuacaucagccgccggcugcugggcacguucaccuggacccucuccgacagcgagggcaacgagacccccgggggcuacugccugacgcgcuggaugcugaucgaggccgagcucaagugcuucgggaacaccgccguggccaagugcaacgagaagcacgacgaggaguucugcgacaugcugcggcuguucgacuucaacaagcaggcgauccagcgccucaaguccgaggcccagaugagcauccagcugaucaacaaggccgucaacgcccugaucaacgaccagcucaucaugaagaaccaccuccgggacaugaugggcauccccuacugcaacuacuccaaguacugguaccugaaccacaccagcuccgggcgcaccagccugcccaagugcuggcugguguccaacggcagcuaccugaacgagacgcacuucuccgacgacaucgagcagcaggccgacaacaugaucaccgagaugcuccagaaggaguacaucgaccggcagggcaagaccccgcuggggcugguggaccuguucgucuucagcaccuccuucuaccucaucagcaucuuccugcaccugaucaagaucccgugaggacuagucccuguucccagagcccacuuuuuuuucuuuuuuugaaauaaaauagccugucuuucagaucucaaaggcucuuuucagagccaccaaaaaaaaaaaaaaaaaaaaaaaaaaaaaaaaaaaaaaaaaaaaaaaaaaaaaaaaaaaaaaaaagaauu

SEQ ID NO: 42187 - RNA, 1619 nt, Artificial Sequence
  mRNA product Design a-2 (hSL-A64-N5) comprising derived and/or modified sequence from LASV(KAK-428;Clade n.d. (VII))__ANH09740__GPCmut13 (opt1)
aggagaguccgcucagccagguugcagaagcggcuuagcguguguccuaaucuucucucugcguguagguaggccugugccgcaaacaagcuuaccaugggccagaucgugaccuucuuccaggaggucccccacgugaucgaggaggugaugaacaucguccugaucgcccucagccugcuggccauccucaaggggcuguacaacuucgcgaccugcggcgugaucgggcugaucacguuccuccugcugugcggccgcuccugcagcgccaccuacaaggggcaguacgagcuccagacccuggagcugaacauggagucccucaacaugaccaugccgcugagcugcacgaagaacaacucccaccacuacauccgggccggcaacaacaccggccuggagcucacccugaccaacacgagcaucaucucccacaaguucugcaaccugagcgacgcccacaagaagaaccucuacgaccacacccugauguccaucaucaccaccuuccaccugagcauccccaacuucaaccaguacgaggccauguccugcgacuucaacgggggcaagaucagcauccaguacaaccucucccacagcuacgcgggggacgccgcccagcacugcggcacgguggccaacgggguccugcagaccuucaugcgcauggcguggggcggcuccuaccuggcccucgacagcgggcggcgcggcugggacugcaucaucuccagcuaccaguaccugaucauccagaacaccaccugggacgaccacugccaguucucccggcccagccccaucggguaccugggcuucgugagccagaagacgcgcgacaucuacaucucccggcgccuccugggcaccuucaccuggacccugagcgacuccgaggggcacgacaugccgggcggguacugccucacgcgguggaugcugaucgaggccgaccugaagugcuucggcaacaccgccguggccaagugcaacgagaagcacgacgaggaguucugcgacauguggcgccucuucgacuucaacaagcaggcgauccagcggcugaaggccgaggcccagaugaacauccagcugaucaacaaggccgucaacgcccucaucaacgaccagcugaugaugaagaaccaccuccgcgacaucauggggauccccuacugcaacuacagcaaguucugguaccugaacaacaccaccacgggccggaccucccugccccgcugcuggcugaucagcaacggcuccuaccucaacgagacccacuucagcgacgacaucgagcagcaggcggacaacaugaucaccgagaugcugcagaaggaguacauggaccggcaggggaagacgccccugggccucguggaccuguucguguucuccaccagcuucuaccugaucaccaucuuccugcaccucgucaagaucccgugaggacuagucccuguucccagagcccacuuuuuuuucuuuuuuugaaauaaaauagccugucuuucagaucucaaaggcucuuuucagagccaccaaaaaaaaaaaaaaaaaaaaaaaaaaaaaaaaaaaaaaaaaaaaaaaaaaaaaaaaaaaaaaaaagaauu

SEQ ID NO: 42188 - RNA, 1619 nt, Artificial Sequence; identical to SEQ ID NO: 42182
  mRNA product Design a-2 (hSL-A64-N5) comprising derived and/or modified sequence from LASV(Pinneo-NIG-1969;Clade I)__AIT17836__GPCmut13 (opt1)

SEQ ID NO: 42189 - RNA, 1619 nt, Artificial Sequence
  mRNA product Design a-2 (hSL-A64-N5) comprising derived and/or modified sequence from LASV(ISTH0009-NIG-2011;Clade II)__AIT17404__GPCmut13 (opt1)
aggagaguccgcucagccagguugcagaagcggcuuagcguguguccuaaucuucucucugcguguagguaggccugugccgcaaacaagcuuaccaugggccagaucaucaccuucuuccaggaggugccccacgucaucgaggaggugaugaacaucgugcugaucgcccucagccugcuggccauccucaaggggaucuacaacgucgcgaccugcggccuguucgggcugguguccuuccuccugcugugcggccgcagcugcuccacgaccuacaaggggguguacgagcuccagacccuggagcuggacauggccagccucaacaugaccaugccgcuguccugcacgaagaacaacagccaccacuacaucauggucggcaacgagaccggccuggagcucacccugaccaacacguccaucaucaaccacaaguucugcaaccugagcgacgcccacaagaagaaccucuacgaccacgcccugauguccaucaucagcaccuuccaccuguccauccccaacuucaaccaguacgaggccaugagcugcgacuucaacgggggcaagaucuccgugcaguacaaccucagccacgcguacgccguggacgccgccaaccacugcgggaccaucgcgaacggcguccugcagaccuucaugcggauggccuggggcggguccuacaucgcccuggacagcggcaagggguccugggacugcaucaugacgagcuaccaguaccucaucauccagaacaccaccugggaggaccacugccaguucucccgccccagccccaucggcuaccuggggcugcucagccagcggacccgcgacaucuacaucucccggcgccugcugggcacguucaccuggacccucagcgacuccgagggcaacgagacccccgggggcuacugccugacgcgguggaugcugaucgaggccgagcucaagugcuucgggaacaccgccguggcgaagugcaacgagaagcacgacgaggaguucugcgacaugcugcgccuguucgacuucaacaagcaggccauccggcgccucaagaccgaggcccagaugagcauccagcugaucaacaaggccgugaacgcccugaucaacgaccagcucaucaugaagaaccaccuccgggacaucaugggcaucccguacugcaacuacuccaaguacugguaccugaaccacaccgucacggggaagaccagccugccccgcugcuggcugguguccaacggcagcuaccugaacgagacccacuucuccgacgacaucgagcagcaggcggacaacaugaucaccgagcuccugcagaaggaguacauggaccggcagggcaagacgccccuggggcugguggaccucuucgucuucagcaccuccuucuaccugaucagcaucuuccugcaccucaucaagaucccgugaggacuagucccuguucccagagcccacuuuuuuuucuuuuuuugaaauaaaauagccugucuuucagaucucaaaggcucuuuucagagccaccaaaaaaaaaaaaaaaaaaaaaaaaaaaaaaaaaaaaaaaaaaaaaaaaaaaaaaaaaaaaaaaaagaauu

SEQ ID NO: 42190 - RNA, 1619 nt, Artificial Sequence
  mRNA product Design a-2 (hSL-A64-N5) comprising derived and/or modified sequence from LASV(ISTH2010-NIG-2012;Clade II)__AIT17482__GPCmut13 (opt1)
aggagaguccgcucagccagguugcagaagcggcuuagcguguguccuaaucuucucucugcguguagguaggccugugccgcaaacaagcuuaccaugggccagaucaucaccuucuuccaggaggugccccacgucaucgaggaggugaugaacaucgugcugaucgcccucagccugcuggccauccucaaggggaucuacaacgucgcgaccugcggccuguucgggcugguguccuuccuccugcugugcggccgcagcugcuccacgaccuacaaggggguguacgagcuccagacccuggagcuggacauggccagccucaacaugaccaugccgcuguccugcacgaagaacaacagccaccacuacaucauggucggcaacgagaccggccuggagcucacccugaccaacacguccaucaucaaccacaaguucugcaaccugagcgacgcccacaagaagaaccucuacgaccacgcccugauguccaucaucagcaccuuccaccuguccauccccaacuucaaccaguacgaggccaugagcugcgacuucaacgggggcaagaucuccgugcaguacaaccucagccacgcguacgccguggacgccgccaaccacugcgggaccaucgcgaacggcguccugcagaccuucaugcggauggccuggggcggguccuacaucgcccuggacagcggcaagggguccugggacugcaucaugacgagcuaccaguaccucaucauccagaacaucaccugggaggaccacugccaguucucccgccccagccccaucggcuaccuggggcugcucagccagcggacccgcgacaucuacaucucccggcgccugcugggcaccuucacguggacccucagcgacuccgagggcaacgagacccccgggggcuacugccugacccgguggaugcugaucgaggccgagcucaagugcuucgggaacacggccguggcgaagugcaacgagaagcacgacgaggaguucugcgacaugcugcgccuguucgacuucaacaagcaggccauccggcgccucaagaccgaggcccagaugagcauccagcugaucaacaaggccgugaacgcccugaucaacgaccagcucaucaugaagaaccaccuccgggacaucaugggcauccccuacugcaacuacuccaaguacugguaccugaaccacaccgucaccgggaagacgagccugccccgcugcuggcugguguccaacggcagcuaccugaacgagacccacuucuccgacgacaucgagcagcaggcggacaacaugaucaccgagcuccugcagaaggaguacaucgaccggcagggcaagaccccgcuggggcugguggaccucuucgucuucagcacguccuucuaccugaucagcaucuuccugcaccucgugaagaucccgugaggacuagucccuguucccagagcccacuuuuuuuucuuuuuuugaaauaaaauagccugucuuucagaucucaaaggcucuuuucagagccaccaaaaaaaaaaaaaaaaaaaaaaaaaaaaaaaaaaaaaaaaaaaaaaaaaaaaaaaaaaaaaaaaagaauu

SEQ ID NO: 42191 - RNA, 1619 nt, Artificial Sequence
  mRNA product Design a-2 (hSL-A64-N5) comprising derived and/or modified sequence from LASV(Lassa virus/H.sapiens-wt/NGA/2015/ISTH_0543;Clade II)__AVO03639__GPCmut13 (opt1)
aggagaguccgcucagccagguugcagaagcggcuuagcguguguccuaaucuucucucugcguguagguaggccugugccgcaaacaagcuuaccaugggccagaucaucaccuucuuccaggaggugccccacgucaucgaggaggugaugaacaucgugcugaucgcccucagccugcuggccauccucaaggggaucuacaacgucgcgaccugcggccuguucgggcugguguccuuccuccugcugugcggccgcagcugcuccacgaccuacaaggggguguacgagcuccagacccuggagcuggacauggccaaccucaacaugaccaugccgcugagcugcacgaagaacaacucccaccacuacaucauggucggcaacgagaccggccuggagcucacccugaccaacacgagcaucaucaaccacaaguucugcaaccuguccgacgcccacaagaagaaccucuacgaccacgcccugaugagcaucaucuccaccuuccaccugagcauccccaacuucaaccaguacgaggccauguccugcgacuucaacgggggcaagaucagcgugcaguacaaccucucccacaccuacgcgguggacgccgccaaccacugcgggaccaucgccaacggcguccugcagacguucaugcggauggcguggggcgggagcuacaucgcccuggacuccggcaaggggagcugggacugcaucaugaccuccuaccaguaccucgugauccagaacaccaccugggaggaccacugccaguucagccgccccucccccaucggcuaccuggggcugcucagccagcggacgcgcgacaucuacaucagccggcgccugcugggcaccuucaccuggacccucuccgacagcgagggcaacgagacgcccgggggcuacugccugacccgguggaugcugaucgaggccgagcucaagugcuucgggaacaccgccguggccaagugcaacgagaagcacgacgaggaguucugcgacaugcugcgccuguucgacuucaacaagcaggcgauccggcgccucaagaccgaggcccagauguccauccagcugaucaacaaggccgucaacgcccugaucaacgaccagcucaucaugaagaaccaccuccgggacaucaugggcauccccuacugcaacuacagcaaguacugguaccugaaccacacggugaccgggaagaccucccugccccgcugcuggcuggugagcaacggcuccuaccugaacgagacccacuucagcgacgacaucgagcagcaggccgacaacaugaucacggagcuccugcagaaggaguacaucgaccggcagggcaagaccccgcuggggcuggucgaccucuucguguucuccaccagcuucuaccugaucuccaucuuccugcaccucgugaagaucccgugaggacuagucccuguucccagagcccacuuuuuuuucuuuuuuugaaauaaaauagccugucuuucagaucucaaaggcucuuuucagagccaccaaaaaaaaaaaaaaaaaaaaaaaaaaaaaaaaaaaaaaaaaaaaaaaaaaaaaaaaaaaaaaaaagaauu

SEQ ID NO: 42192 - RNA, 1619 nt, Artificial Sequence
  mRNA product Design a-2 (hSL-A64-N5) comprising derived and/or modified sequence from LASV(Lassa virus/H.sapiens-wt/NGA/2016/ISTH_0009;Clade II)__AVO03571__GPCmut13 (opt1)
aggagaguccgcucagccagguugcagaagcggcuuagcguguguccuaaucuucucucugcguguagguaggccugugccgcaaacaagcuuaccaugggccagaucaucaccuucuuccaggaggugccccacgucaucgaggaggugaugaacaucgugcugaucgcccucagccugcuggccauccucaaggggaucuacaacgucgcgaccugcggccugcuggggcucguguccuuccugcugcucugcggccgcagcugcuccacgaccuacaaggggguguacgagcugcagacccuggagcucgacauggccagccugaacaugaccaugccgcuguccugcacgaagaacaacagccaccacuacaucauggucggcaacgagaccggccucgagcugacccugaccaacacguccaucaucaaccacaaguucugcaaccucagcgacgcccacaagaagaaccuguacgaccacgcccugauguccaucaucagcaccuuccaccucuccauccccaacuucaaccaguacgaggccaugagcugcgacuucaacgggggccggaucuccgugcaguacaaccugagccacuccuacgcgguggacgccgccaaccacugcgggaccaucgccaacggcguccugcagaccuucaugcgcauggcguggggcgggagcuacaucgcccucgacuccggcaaggggagcugggacugcaucaugacguccuaccaguaccugaucauccagaacaccaccugggaggaccacugccaguucagccggcccagccccaucggcuaccuggggcuccugucccagcgcacccgggacaucuacaucagccgccggcugcucggcacguucaccuggacccuguccgacagcgagggcaacgagacccccgggggcuacugccugacgcgcuggaugcucaucgaggccgagcugaagugcuucgggaacaccgccguggccaagugcaacgagaagcacgacgaggaguucugcgacaugcugcggcuguucgacuucaacaagcaggcgauccgccggcugaagaccgaggcccagauguccauccagcugaucaacaaggccgugaacgcccucaucaacgaccagcugaucaugaagaaccaccuccgcgacaucaugggcaucccguacugcaacuacagcaaguacugguaccucaaccacaccgucacggggaagaccucccugccccggugcuggcuggugagcaacggcuccuaccucaacgagacccacuucagcgacgacaucgagcagcaggccgacaacaugaucaccgagcugcugcagaaggaguacaucgaccgccagggcaagacgccccuggggcucguggaccuguucgucuucuccaccagcuucuaccugaucuccaucuuccuccaccuggugaagaucccgugaggacuagucccuguucccagagcccacuuuuuuuucuuuuuuugaaauaaaauagccugucuuucagaucucaaaggcucuuuucagagccaccaaaaaaaaaaaaaaaaaaaaaaaaaaaaaaaaaaaaaaaaaaaaaaaaaaaaaaaaaaaaaaaaagaauu

SEQ ID NO: 42193 - RNA, 1619 nt, Artificial Sequence
  mRNA product Design a-2 (hSL-A64-N5) comprising derived and/or modified sequence from LASV(Lassa virus/H.sapiens-wt/NGA/2016/ISTH_0017;Clade II)__AVO03567__GPCmut13 (opt1)
aggagaguccgcucagccagguugcagaagcggcuuagcguguguccuaaucuucucucugcguguagguaggccugugccgcaaacaagcuuaccaugggccagaucaucaccuucuuccaggaggugccccacgucaucgaggaggugaugaacaucgugcugaucgcccucagccugcuggccauccucaaggggaucuacaacgucgcgaccugcggccuguucgggcugguguccuuccuccugcugugcggccgcagcugcuccacgaccuacaaggggguguacgagcuccagacccuggagcuggacauggccagccucaacaugaccaugccgcuguccugcacgaagaacaacagccaccacuacaucauggucggcaacgagaccggccuggagcucacccugaccaacacguccaucaucaaccacaaguucugcaaccugagcgacgcccacaagaagaaccucuacgaccacgcccugauguccaucaucagcaccuuccaccuguccauccccaacuucaaccaguacgaggccaugagcugcgacuucaacgggggcaagaucuccgugcaguacaaccucagccacaccuacgcgaucgacgccgccaaccacugcgggaccaucgccaacggcgugcugcagacguucaugcggauggcguggggcggguccuacaucgcccuggacagcggcaagggguccugggacugcaucaugaccagcuaccaguaccucaucauccagaacaccaccugggaggaccacugccaguucucccgccccagccccaucggcuaccuggggcugcucagccagcggacgcgcgacaucuacaucucccggcgccugcugggcaccuucaccuggacccucagcgacuccgagggcaacgagacgcccgggggcuacugccugacccgguggaugcugaucgaggccgagcucaagugcuucgggaacaccgccgucgccaagugcaacgagaagcacgacgaggaguucugcgacaugcugcgccuguucgacuucaacaagcaggcgauccggcgccucaagaccgaggcccagaugagcauccagcugaucaacaaggccgugaacgcccugaucaacgaccagcucaucaugaagaaccaccuccgggacaucaugggcauccccuacugcaacuacuccaaguacugguaccugaaccacacggugaccgggaagaccagccugccccgcugcuggcuggucuccaacggcagcuaccugaacgagacccacuucuccgacgacaucgagcagcaggccgacaacaugaucacggagcuccugcagaaggaguacauggaccggcagggcaagaccccgcuggggcugguggaccucuucguguucagcaccuccuucuaccugaucagcaucuuccugcaccucguccgcaucccgugaggacuagucccuguucccagagcccacuuuuuuuucuuuuuuugaaauaaaauagccugucuuucagaucucaaaggcucuuuucagagccaccaaaaaaaaaaaaaaaaaaaaaaaaaaaaaaaaaaaaaaaaaaaaaaaaaaaaaaaaaaaaaaaaagaauu

SEQ ID NO: 42194 - RNA, 1619 nt, Artificial Sequence
  mRNA product Design a-2 (hSL-A64-N5) comprising derived and/or modified sequence from LASV(Lassa virus/H.sapiens-wt/NGA/2018/ISTH_0959;Clade II)__AVV65099__GPCmut13 (opt1)
aggagaguccgcucagccagguugcagaagcggcuuagcguguguccuaaucuucucucugcguguagguaggccugugccgcaaacaagcuuaccaugggccagaucaucaccuucuuccaggaggugccccacgucaucgaggaggugaugaacaucgugcugaucgcccucagccugcuggccauccucaaggggaucuacaacgucgugaccugcggccuguucgggcugguguccuuccuccugcugugcggccgcagcugcuccacgaccuacaagggggucuacgagcuccagacccuggagcuggacauggcgagccucaacaugaccaugccgcuguccugcacgaagaacaacagccaccacuacaucauggugggcaacgagaccggccuggagcucacccugaccaacacguccaucaucaaccacaaguucugcaaccugagcgacgcccacaagaagaaccucuacgaccacgcccugauguccaucaucagcaccuuccaccuguccauccccaacuucaaccaguacgaggccaugagcugcgacuucaacgggggcaagaucuccgugcaguacaaccucagccacgccuacgcgaucgacgccgccaaccacugcgggaccaucgccaacggcguccugcagaccuucaugcggauggcguggggcggguccuacaucgcccuggacagcggcaagggguccugggacugcaucaugacgagcuaccaguaccucaucauccagaacaccaccugggaggaccacugccaguucucccgccccagccccaucggcuaccuggggcugcucagccagcggacccgcgacaucuacaucucccggcgccugcugggcacguucaccuggacccucagcgacuccgagggcaacgagacccccgggggcuacugccugacgcgguggaugcugaucgaggccgagcucaagugcuucgggaacaccgccguggccaagugcaacgagaagcacgacgaggaguucugcgacaugcugcgccuguucgacuucaacaagcaggcgauccggcgccucaagaccgaggcccagaugagcauccagcugaucaacaaggccgugaacgcccugaucaacgaccagcucaucaugaagaaccaccuccgggacaucaugggcaucccguacugcaacuacuccaaguacugguaccugaaccacaccgucacggggaagaccagccugccccgcugcuggcugguguccaacggcagcuaccugaacgagacccacuucuccgacgacaucgagcagcaggccgacaacaugaucaccgagcuccugcagaaggaguacaucgaccggcagggcaagacgccccuggggcugguggaccucuucgucuucagcaccuccuucuaccugaucagcaucuuccugcaccucgugaagaucccgugaggacuagucccuguucccagagcccacuuuuuuuucuuuuuuugaaauaaaauagccugucuuucagaucucaaaggcucuuuucagagccaccaaaaaaaaaaaaaaaaaaaaaaaaaaaaaaaaaaaaaaaaaaaaaaaaaaaaaaaaaaaaaaaaagaauu

SEQ ID NO: 42195 - RNA, 1619 nt, Artificial Sequence
  mRNA product Design a-2 (hSL-A64-N5) comprising derived and/or modified sequence from LASV(LASV003-NIG-2008;Clade II)__AIT17580__GPCmut13 (opt1)
aggagaguccgcucagccagguugcagaagcggcuuagcguguguccuaaucuucucucugcguguagguaggccugugccgcaaacaagcuuaccaugggccagaucaucaccuucuuccaggaggugccccacgucaucgaggaggugaugaacaucgugcugaucgcccucagccugcuggccauccucaaggggaucuacaacgucgcgaccugcggccuguucgggcugguguccuuccuccugcugugcggccgcagcugcuccacgaccuacaaggggguguacgagcuccagacccuggagcuggacauggccagccucaacaugaccaugccgcuguccugcacgaagaacaacagccaccacuacaucauggucggcaacgagaccggccuggagcucacccugaccaacacguccaucaucaaccacaaguucugcaaccugagcgacgcccacaagaagaaccucuacgaccacgcccugauguccaucaucagcaccuuccaccuguccauccccaacuucaaccaguacgaggccaugagcugcgacuucaacgggggcaagaucuccgugcaguacaaccucagccacaccuacgcgguggacgccgccaaccacugcgggaccaucgccaacggcguccugcagacguucaugcggauggcguggggcggguccuacaucgcccuggacagcggcaagggguccugggacugcaucaugaccagcuaccaguaccucaucauccagaacaccaccugggaggaccacugccaguucucccgccccagccccaucggcuaccuggggcugcucagccagcggacgcgcgacaucuacaucucccggcgccugcugggcaccuucaccuggacccucagcgacuccgagagcaacgagacgccgggcggguacugccugacccgguggaugcugaucgaggccgagcucaagugcuucggcaacaccgccguggccaagugcaacgagaagcacgacgaggaguucugcgacaugcugcgccuguucgacuucaacaagcaggcgauccggcgccucaaggccgaggcccagauguccauccagcugaucaacaaggccgugaacgcccugaucaacgaccagcucaucaugaagaaccaccuccgggacaucauggggauccccuacugcaacuacagcaaguacugguaccugaaccacaccgucacgggccgcaccucccugccccggugcuggcuggugagcaacggguccuaccugaacgagacccacuucagcgacgacaucgagcagcaggcggacaacaugaucaccgagcuccugcagaaggaguacauggaccgccagggcaagacgccccugggccugguggaccucuucgucuucuccaccagcuucuaccugaucuccaucuuccugcaccucgugaagaucccgugaggacuagucccuguucccagagcccacuuuuuuuucuuuuuuugaaauaaaauagccugucuuucagaucucaaaggcucuuuucagagccaccaaaaaaaaaaaaaaaaaaaaaaaaaaaaaaaaaaaaaaaaaaaaaaaaaaaaaaaaaaaaaaaaagaauu

SEQ ID NO: 42196 - RNA, 1619 nt, Artificial Sequence
  mRNA product Design a-2 (hSL-A64-N5) comprising derived and/or modified sequence from LASV(LASV035-NIG-2009;Clade II)__AIT17588__GPCmut13 (opt1)
aggagaguccgcucagccagguugcagaagcggcuuagcguguguccuaaucuucucucugcguguagguaggccugugccgcaaacaagcuuaccaugggccagaucaucaccuucuuccaggaggugccccacgucaucgaggaggugaugaacaucgugcugaucgcccucagccugcuggccauccucaaggggaucuacaacgucgcgaccugcggccuguucgggcugguguccuuccuccugcugugcggccgcagcugcuccacgaccuacaaggggguguacgagcuccagacccuggagcuggacauggccagccucaacaugaccaugccgcuguccugcacgaagaacaacagccaccacuacaucauggucggcaacgagaccggccuggagcucacccugaccaacacguccaucaucaaccacaaguucugcaaccugagcgacgcccacaagaagaaccucuacgaccacgcccugauguccaucaucagcaccuuccaccuguccauccccaacuucaaccaguacgaggccaugagcugcgacuucaacgggggcaagaucuccgugcaguacaaccucagccacgcguacgccguggacgccgccaaccacugcgggaccaucgcgaacggcguccugcagaccuucaugcggauggccuggggcggguccuacaucgcccuggacagcggcaagggguccugggacugcaucaugacgagcuaccaguaccucaucauccagaacaccaccugggaggaccacugccaguucucccgccccagccccaucggcuaccuggggcugcucagccagcggacccgcgacaucuacaucucccggcgccugcugggcacguucaccuggacccucagcgacuccgagggcaacgagacccccgggggcuacugccugacgcgguggaugcugaucgaggccgagcucaagugcuucgggaacaccgccguggcgaagugcaacgagaagcacgacgaggaguucugcgacaugcugcgccuguucgacuucaacaagcaggccauccggcgccucaaggccgaggcccagaugagcauccagcugaucaacaaggccgugaacgcgcugaucaacgaccagcucaucaugaagaaccaccuccgggacaucaugggcauccccuacugcaacuacuccaaguacugguaccugaaccacaccgucaccgggaagacgagccugccccgcugcuggcugguguccaacggcagcuaccugaacgagacccacuucuccgacgacaucgagcagcaggccgacaacaugaucaccgagcuccugcagaaggaguacaucgaccggcagggcaagaccccgcuggggcugguggaccucuucgucuucagcacguccuucuaccugaucagcaucuuccugcaccucgugaagaucccgugaggacuagucccuguucccagagcccacuuuuuuuucuuuuuuugaaauaaaauagccugucuuucagaucucaaaggcucuuuucagagccaccaaaaaaaaaaaaaaaaaaaaaaaaaaaaaaaaaaaaaaaaaaaaaaaaaaaaaaaaaaaaaaaaagaauu

SEQ ID NO: 42197 - RNA, 1619 nt, Artificial Sequence
  mRNA product Design a-2 (hSL-A64-N5) comprising derived and/or modified sequence from LASV(LASV1000-NIG-2009;Clade II)__AIT17782__GPCmut13 (opt1)
aggagaguccgcucagccagguugcagaagcggcuuagcguguguccuaaucuucucucugcguguagguaggccugugccgcaaacaagcuuaccaugggccagaucaucaccuucuuccaggaggugccccacgucaucgaggaggugaugaacaucgugcugaucgcccucagccugcuggccauccucaaggggaucuacaacgucgcgaccugcggccuguucgggcugguguccuuccuccugcugugcggccgcagcugcuccacgaccuacaaggggguguacgagcuccagacccuggagcuggacauggccagccucaacaugaccaugccgcuguccugcacgaagaacaacagccaccacuacaucauggucggcaacgagaccggccuggagcucacccugaccaacacguccaucaucaaccacaaguucugcaaccugagcgacgcccacaagaagaaccucuacgaccacgcccugauguccaucaucagcaccuuccaccuguccauccccaacuucaaccaguacgaggccaugagcugcgacuucaacgggggcaagaucuccgugcaguacaaccucagccacaccuacgcgguggacgccgccaaccacugcgggaccaucgccaacggcguccugcagacguucaugcggauggcguggggcggguccuacaucgcccuggacagcggcaagggguccugggacugcaucaugaccagcuaccaguaccucaucauccagaacaccaccugggaggaccacugccaguucucccgccccagccccaucggcuaccuggggcugcucagccagcggacgcgcgacaucuacaucucccggcgccugcugggcaccuucaccuggacccucagcgacuccgagggcaacgagacgcccgggggcuacugccugacccgguggaugcugaucgaggccgagcucaagugcuucgggaacaccgccguggccaagugcaacgagaagcacgacgaggaguucugcgacaugcugcgccuguucgacuucaacaagcaggcgaucaagcggcucaagaccgaggcccagaugagcauccagcugaucaacaaggccgugaacgcccugaucaacgaccagcucaucaugaagaaccaccuccgcgacaucaugggcauccccuacugcaacuacuccaaguacugguaccugaaccacacggucaccgggaagaccagccugccccggugcuggcugguguccaacggcagcuaccugaacgagacccacuucuccgacgacaucgagcagcaggccgacaacaugaucacggagcuccugcagaaggaguacaucgaccgccagggcaagaccccgcuggggcugguggaccucuucgucuucagcaccuccuucuaccugaucagcaucuuccugcaccucgugaagaucccgugaggacuagucccuguucccagagcccacuuuuuuuucuuuuuuugaaauaaaauagccugucuuucagaucucaaaggcucuuuucagagccaccaaaaaaaaaaaaaaaaaaaaaaaaaaaaaaaaaaaaaaaaaaaaaaaaaaaaaaaaaaaaaaaaagaauu

SEQ ID NO: 42198 - RNA, 1619 nt, Artificial Sequence
  mRNA product Design a-2 (hSL-A64-N5) comprising derived and/or modified sequence from LASV(LASV221-NIG-2010;Clade II)__AIT17624__GPCmut13 (opt1)
aggagaguccgcucagccagguugcagaagcggcuuagcguguguccuaaucuucucucugcguguagguaggccugugccgcaaacaagcuuaccaugggccagaucaucaccuucuuccaggaggugccccacgucaucgaggaggugaugaacaucgugcugaucgcccucagccugcuggccauccucaaggggaucuacaacgucgcgaccugcggccuguucgggcugguguccuuccuccugcugugcggccgcagcugcuccacgaccuacaaggggguguacgagcuccagacccuggagcuggacauggccagccucaacaugaccaugccgcuguccugcacgaagaacaacagccaccacuacaucauggucggcaacgagaccggccuggagcucacccugaccaacacguccaucaucaaccacaaguucugcaaccugagcgacgcccacaagaagaaccucuacgaccacgcccugauguccaucaucagcaccuuccaccuguccauccccaacuucaaccaguacgaggccaugagcugcgacuucaacgggggcaagaucuccgugcaguacaaccucagccacaccuacgcgaucgacgccgccaaccacugcgggaccaucgccaacggcgugcugcagacguucaugcggauggcguggggcggguccuacaucgcccuggacagcggcaagggguccugggacugcaucaugaccagcuaccaguaccucaucauccagaacaccaccugggaggaccacugccaguucucccgccccagccccaucggcuaccuggggcugcucagccagcggacgcgcgacaucuacaucucccggcgccugcugggcaccuucaccuggacccucagcgacuccgagggcaacgagacgcccgggggcuacugccugacccgguggaugcugaucgaggccgagcucaagugcuucgggaacaccgccgucgccaagugcaacgagaagcacgacgaggaguucugcgacaugcugcgccuguucgacuucaacaagcaggcgauccggcgccucaagaccgaggcccagaugagcauccagcugaucaacaaggccgugaacgcccugaucaacgaccagcucaucaugaagaaccaccuccgggacaucaugggcauccccuacugcaacuacuccaaguacugguaccugaaccacacggugaccgggaagaccagccugccccgcugcuggcuggucuccaacggcagcuaccugaacgagacccacuucuccgacgacaucgagcagcaggccgacaacaugaucacggagaugcuccagaaggaguacauggaccggcagggcaagaccccgcuggggcugguggaccuguucguguucagcaccuccuucuaccucaucagcaucuuccugcaccuggucaagaucccgugaggacuagucccuguucccagagcccacuuuuuuuucuuuuuuugaaauaaaauagccugucuuucagaucucaaaggcucuuuucagagccaccaaaaaaaaaaaaaaaaaaaaaaaaaaaaaaaaaaaaaaaaaaaaaaaaaaaaaaaaaaaaaaaaagaauu

SEQ ID NO: 42199 - RNA, 1619 nt, Artificial Sequence
  mRNA product Design a-2 (hSL-A64-N5) comprising derived and/or modified sequence from LASV(LASV237-NIG-2010;Clade II)__AIT17638__GPCmut13 (opt1)
aggagaguccgcucagccagguugcagaagcggcuuagcguguguccuaaucuucucucugcguguagguaggccugugccgcaaacaagcuuaccaugggccagaucaucaccuucuuccaggaggugccccacgucaucgaggaggugaugaacaucgugcugaucgcccucagccugcuggccauccucaaggggaucuacaacgucgcgaccugcggccuguucgggcugguguccuuccuccugcugugcggccgcagcugcuccacgaccuacaaggggguguacgagcuccagacccuggagcuggacauggccagccucaacaugaccaugccgcuguccugcacgaagaacaacagccaccacuacaucauggucggcaacgagaccggccuggagcucacccugaccaacacguccaucaucaaccacaaguucugcaaccugagcgacgcccacaagaaggaccucuacgaccacgcccugauguccaucaucagcaccuuccaccuguccauccccaacuucaaccaguacgaggccaugagcugcgacuucaacgggggcaagaucuccgugcaguacaaccucagccacaccuacgcgguggacgccgccaaccacugcgggaccaucgccaacggcguccugcagacguucaugcggauggcguggggcggguccuacaucgcccuggacagcggcaagggguccugggacugcaucaugaccagcuaccaguaccucaucauccagaacaccaccugggaggaccacugccaguucucccgccccagccccaucggcuaccuggggcugcucagccagcggacgcgcgacaucuacaucucccggcgccugcugggcaccuucaccuggacccucagcgacuccgagggcaacgagacgcccgggggcuacugccugacccgguggaugcugaucgaggccgagcucaagugcuucgggaacaccgccguggccaagugcaacgagaagcacgacgaggaguucugcgacaugcugcgccuguucgacuucaacaagcaggcgauccggcgccucaagaccgaggcccagaugagcauccagcugaucaacaaggccgugaacgcccugaucaacgaccagcucaucaugaagaaccaccuccgggacaucaugggcauccccuacugcaacuacuccaaguacugguaccugaaccacacggucaccgggaagaccagccugccccgcugcuggcugguguccaacggcagcuaccugaacgagacccacuucuccgacgacaucgagcagcaggccgacaacaugaucacggagcuccugcagaaggaguacauggaccggcagggcaagaccccgcuggggcugguggaccucuucgucuucagcaccuccuucuaccugaucagcaucuuccugcaccucaucaagaucccgugaggacuagucccuguucccagagcccacuuuuuuuucuuuuuuugaaauaaaauagccugucuuucagaucucaaaggcucuuuucagagccaccaaaaaaaaaaaaaaaaaaaaaaaaaaaaaaaaaaaaaaaaaaaaaaaaaaaaaaaaaaaaaaaaagaauu

SEQ ID NO: 42200 - RNA, 1619 nt, Artificial Sequence
  mRNA product Design a-2 (hSL-A64-N5) comprising derived and/or modified sequence from LASV(LASV253-NIG-2011;Clade II)__AIT17670__GPCmut13 (opt1)
aggagaguccgcucagccagguugcagaagcggcuuagcguguguccuaaucuucucucugcguguagguaggccugugccgcaaacaagcuuaccaugggccagaucaucaccuucuuccaggaggugccccacgucaucgaggaggugaugaacaucgugcugaucgcccucagccugcuggccauccucaaggggaucuacaacgucgcgaccugcggccuguucgggcugguguccuuccuccugcugugcggccgcagcugcuccacgaccuacaaggggguguacgagcuccagacccuggagcuggacauggccagccucaacaugaccaugccgcuguccugcacgaagaacaacagccaccacuacaucauggucggcaacgagaccggccuggagcucacccugaccaacacguccaucaucaaccacaaguucugcaaccugagcgacgcccacaagaagaaccucuacgaccacgcccugauguccaucaucagcaccuuccaccuguccauccccaacuucaaccaguacgaggccaugagcugcgacuucaacgggggcaagaucuccgugcaguacaaccucagccacaccuacgcgguggacgccgccaaccacugcgggaccaucgccaacggcguccugcagacguucaugcggauggcguggggcggguccuacaucgcccuggacagcggcaagggguccugggacugcaucaugaccagcuaccaguaccucaucauccagaacaccaccugggaggaccacugccaguucucccgccccagccccaucggcuaccuggggcugcucagccagcggacgcgcgacaucuacaucucccggcgccugcugggcaccuucaccuggacccucagcgacuccgagggcaacgagacgcccgggggcuacugccugacccgguggaugcugaucgaggccgagcucaagugcuucgggaacaccgccguggccaagugcaacgagaagcacgacgaggaguucugcgacaugcugcgccuguucgacuucaacaagcaggcgauccggcgccucaaggccgaggcccagaugagcauccagcugaucaacaaggccgugaacgcccugaucaacgaccagcucaucaugaagaaccaccuccgggacaucaugggcaucccguacugcaacuacuccaaguacugguaccugaaccacaccgucacggggcgcaccagccugccccggugcuggcugguguccaacggcagcuaccugaacgagacccacuucuccgacgacaucgagcagcaggcggacaacaugaucaccgagcuccugcagaaggaguacaucgaccgccagggcaagacgccccuggggcugguggaccucuucgucuucagcaccuccuucuaccugaucagcaucuuccugcaccucgugaagaucccgugaggacuagucccuguucccagagcccacuuuuuuuucuuuuuuugaaauaaaauagccugucuuucagaucucaaaggcucuuuucagagccaccaaaaaaaaaaaaaaaaaaaaaaaaaaaaaaaaaaaaaaaaaaaaaaaaaaaaaaaaaaaaaaaaagaauu

SEQ ID NO: 42201 - RNA, 1619 nt, Artificial Sequence
  mRNA product Design a-2 (hSL-A64-N5) comprising derived and/or modified sequence from LASV(LASV254-NIG-2011;Clade II)__AIT17674__GPCmut13 (opt1)
aggagaguccgcucagccagguugcagaagcggcuuagcguguguccuaaucuucucucugcguguagguaggccugugccgcaaacaagcuuaccaugggccagaucaucaccuucuuccaggaggugccccacgucaucgaggaggugaugaacaucgugcugaucgcccucagccugcuggccauccucaaggggaucuacaacgucgcgaccugcggccuguucgggcugguguccuuccuccugcugugcggccgcagcugcuccacgaccuacaaggggguguacgagcuccagacccuggagcuggacaugaccaaccucaacaugacgaugccgcugagcugcaccaagaacaacucccaccacuacaucauggucggcaacgagaccggccuggagcucacccugacgaacaccagcaucaucaaccacaaguucugcaaccuguccgacgcccacaagaagaaccucuacaaccacgcccugaugagcaucaucuccaccuuccaccugagcauccccaacuucaaccaguacgaggccauguccugcgacuucaacgggggcaagaucagcgugcaguacaaccucucccacagcuacgccguggacgcggccaaccacugcgggaccaucgccaacggcguccugcagacguucaugcggauggccuggggcggguccuacaucgcgcuggacagcggcaaggggaacugggacugcaucaugaccuccuaccaguaccucaucauccagaacaccaccugggaggaccacugccaguucagccgccccucccccaucggcuaccuggggcugcucagccagcggacgcgcgacaucuacaucagccggcgccugcugggcaccuucaccuggacccucuccgacagcgagggcaacgagacgcccgggggcuacugccugacccgguggaugcugaucgaggccgagcucaagugcuucgggaacaccgccguggccaagugcaacgagaagcacgacgaggaguucugcgacaugcugcgccuguucgacuucaacaagcaggccauccggcgccucaagaccgaggcgcaggccaacauccagcugaucaacaaggccgugaacgcccugaucaacgaccagcucaucaugaagaaccaccuccgggacaucaugggcauccccuacugcaacuacuccaaguacugguaccugaaccacacggucaccgggaagaccagccugccccgcugcuggcugguguccaacggcagcuaccugaacgagacccacuucuccgacgacaucgagcagcaggccgacaacaugaucacggagcuccugcagaaggaguacauggaccggcagggcaagaccccgcuggggcugguggaccucuucgucuucagcaccuccuucuaccugaucagcaucuuccugcaccucgugaagaucccgugaggacuagucccuguucccagagcccacuuuuuuuucuuuuuuugaaauaaaauagccugucuuucagaucucaaaggcucuuuucagagccaccaaaaaaaaaaaaaaaaaaaaaaaaaaaaaaaaaaaaaaaaaaaaaaaaaaaaaaaaaaaaaaaaagaauu

SEQ ID NO: 42202 - RNA, 1619 nt, Artificial Sequence
  mRNA product Design a-2 (hSL-A64-N5) comprising derived and/or modified sequence from LASV(Nig08-A19;Clade III)__ADU56618__GPCmut13 (opt1)
aggagaguccgcucagccagguugcagaagcggcuuagcguguguccuaaucuucucucugcguguagguaggccugugccgcaaacaagcuuaccaugggccagaucgugaccuucuuccaggaggucccccacgugaucgaggaggugaugaacaucguccugaucgcccucagcauccuggccauccugaaggggcucuacaacaucgcgaccugcggccugaucgggcuggugacguuccuccugcuguccggccgcagcugcuccaugaccuacaaggggguguacgagcuccagacccuggagcugaacaugaacacccucaacaugacgaugccgcugagcugcaccaagaacaacucccaccacuacaucauggucggcaacgagaccggccuggagcucacccugacgaacaccagccugcuccaccacaaguucugcaaccuguccgacgcccacaagaagaaccuguacgaccacacccucaugagcaucaucuccaccuuccaccugagcauccccaacuucaaccaguacgaggccauguccugcgacuucaacgggggcaagaucacggugcaguacaaccugagccacuccuacgccaucgacgccgcgaaccacugcgggaccguggccaacggcguccuccagaccuucaugcggauggccuggggcgggagcuacaucgcccuggacuccggccgcgggaagugggacugcaucaugaccagcuaccaguaccugaucauccagaacacgaccugggaggaccacugccaguucucccggcccagccccaucggcuaccucgggcugcugucccagcgcacccgggacaucuacaucagccgccggcuccugggcaccuucacguggacccugagcgacuccgagggcaacgagacccccgggggcuacugccucacccgcuggaugcugaucgaggcggagcugaagugcuucgggaacacggccguggccaagugcaacgagaagcacgacgaggaguucugcgacaugcuccggcuguucgacuucaacaagcaggccauccgccggcugaaggccgaggcgcagaugagcauccagcucaucaacaaggccgugaacgcccugaucaacgaccagcugaucaugaagaaccaccuccgcgacaucaugggcauccccuacugcaacuacuccaaguacugguaccugaaccacaccagcaccgggcggaccucccugccccgcugcuggcucgucagcaacggcuccuaccugaacgagacgcacuucagcgacgacaucgagcagcaggccgacaacaugaucaccgagaugcugcagaaggaguaccuggaccggcagggcaagaccccgcucgggcugguggaccuguucguguucuccaccagcuucuaccucaucuccaucuuccugcaccuggucaagaucccgugaggacuagucccuguucccagagcccacuuuuuuuucuuuuuuugaaauaaaauagccugucuuucagaucucaaaggcucuuuucagagccaccaaaaaaaaaaaaaaaaaaaaaaaaaaaaaaaaaaaaaaaaaaaaaaaaaaaaaaaaaaaaaaaaagaauu

SEQ ID NO: 42203 - RNA, 1622 nt, Artificial Sequence
  mRNA product Design a-2 (hSL-A64-N5) comprising derived and/or modified sequence from LASV(G1180-SLE-2010;Clade IV)__AIT17168__GPCmut13 (opt1)
aggagaguccgcucagccagguugcagaagcggcuuagcguguguccuaaucuucucucugcguguagguaggccugugccgcaaacaagcuuaccaugggccagaucgugaccuucuuccaggaggucccccacgugaucgaggaggugaugaacaucguccugaucgcccucagcauccuggccgugcugaaggggcucuacaacuucgcgaccugcggccugguggggcugcucaccuuccugcugcucugcggccgcuccugcaccgccagccgguacaagggggucuacgagcugcagacccuggagcucaacauggagacccugaacaugacgaugccgcuguccugcaccaagaacaacagccaccacuacaucauggugggcaacgagaccggccucgagcugacccugacgaacaccuccaucaucaaccacaaguucugcaaccucagcgacgcccacaagaagaaccuguacgaccacgcccugauguccaucaucagcaccuuccaccucuccauccccaacuucaaccaguacgaggccaugagcugcgacuucaacgggggcaagaucuccgugcaguacaaccugagccacuccuacgcgggggacgccgccaaccacugcggcaccgucgccaacggggugcugcagacguucaugcgcauggcguggggcggcagcuacaucgcccucgacuccgggcacggcagcugggacugcaucaugaccuccuaccaguaccugaucauccagaacaccaccugggaggaccacugccaguucagccggcccucccccaucggguaccugggccuccugagccagcgcacgcgggacaucuacaucagccgccggcugcucggcaccuucaccuggacccuguccgacagcgaggggaaggacacgccgggcggguacugccugacccgcuggaugcucaucgaggccgagcugaagugcuucggcaacaccgccguggccaagugcaacgagaagcacgacgaggaguucugcgacaugcugcggcuguucgacuucaacaagcaggcgauccagcgccugaaggccgaggcccagauguccauccagcugaucaacaaggccgucaacgcccucaucaacgaccagcugaucaugaagaaccaccuccgggacaucauggggauccccuacugcaacuacagcaaguacugguaccucaaccacaccacgaccggcaagaccucccugcccaagugcuggcuggugagcaacggcuccuaccucaacgagacccacuucagcgacgacaucgagcagcaggcggacaacaugaucacggagaugcugcagaaggaguacauggagcgccaggggaagacgccccugggccugguggaccucuucgucuucuccaccagcuucuaccugaucuccaucuuccugcaccucgugaagaucccgugaggacuagucccuguucccagagcccacuuuuuuuucuuuuuuugaaauaaaauagccugucuuucagaucucaaaggcucuuuucagagccaccaaaaaaaaaaaaaaaaaaaaaaaaaaaaaaaaaaaaaaaaaaaaaaaaaaaaaaaaaaaaaaaaagaauu

SEQ ID NO: 42204 - RNA, 1622 nt, Artificial Sequence
  mRNA product Design a-2 (hSL-A64-N5) comprising derived and/or modified sequence from LASV(G1442-SLE-2011;Clade IV)__AIT17180__GPCmut13 (opt1)
aggagaguccgcucagccagguugcagaagcggcuuagcguguguccuaaucuucucucugcguguagguaggccugugccgcaaacaagcuuaccaugggccagaucgugaccuucuuccaggaggucccccacgugaucgaggaggugaugaacaucguccugaucgcccucagcauccuggccgugcugaaggggcucuacaacguggcgaccugcggccugaucgggcuggucacguuccuccugcugugcggccgcuccugcaccaccacccucuacaaggggguguacgagcugcagacgcuggagcucaacauggagacccugaacaugaccaugccgcugagcugcaccaagaacaacucccaccacuacauccgggugggcaacgagacgggccucgagcugacccugaccaacaccagcaucaucaaccacaaguucugcaaccucuccgacgcccacaagaagaaccuguacgaccacgcccugaugagcaucaucuccacguuccaccucagcauccccaacuucaaccaguacgaggccauguccugcgacuucaacgggggcaagaucagcguccaguacaaccugucccacagcuacgccggggacgcggccaaccacugcggcaccguggccaacggggugcugcagaccuucaugcgcauggccuggggcggcuccuacaucgcgcucgacagcgggcggggcaacugggacugcaucaugaccuccuaccaguaccugaucauccagaacacgaccugggacgaccacugccaguucagccgccccucccccaucggguaccugggccuccugagccagcggacccgcgacgucuacaucucccggcgccugcucggcaccuucacguggacccugagcgacagcgaggggaaggacaccccgggcggguacugccugacccgguggaugcucaucgaggccgagcugaagugcuucggcaacacggccguggccaagugcaacgagaagcacgacgaggaguucugcgacaugcugcgccucuucgacuucaacaagcaggccauccagcggcugaaggcggaggcccagauguccauccagcugaucaacaaggccgugaacgcccucaucaacgaccagcugaucaugaagaaccaccuccgcgacaucauggggauccccuacugcaacuacagcaaguacugguaccugaacaacaccgccaccggcaagaccucccugcccaagugcuggcugaucagcaacggcuccuaccucaacgagacgcacuucagcgacgacaucgagcaggaggcggacaacaugaucaccgagaugcugcagaaggaguacauggagcggcaggggaagacgccccugggccuggucgaccucuucguguucuccaccagcuucuaccugaucuccaucuuccugcaccucgugaagaucccgugaggacuagucccuguucccagagcccacuuuuuuuucuuuuuuugaaauaaaauagccugucuuucagaucucaaaggcucuuuucagagccaccaaaaaaaaaaaaaaaaaaaaaaaaaaaaaaaaaaaaaaaaaaaaaaaaaaaaaaaaaaaaaaaaagaauu

SEQ ID NO: 42205 - RNA, 1622 nt, Artificial Sequence
  mRNA product Design a-2 (hSL-A64-N5) comprising derived and/or modified sequence from LASV(G3010-SLE-2013;Clade IV)__AIT17344__GPCmut13 (opt1)
aggagaguccgcucagccagguugcagaagcggcuuagcguguguccuaaucuucucucugcguguagguaggccugugccgcaaacaagcuuaccaugggccagaucgugaccuucuuccaggaggucccccacgugaucgaggaggugaugaacaucguccugaucgcccucagcauccuggccgugcugaaggggcucuacaacuucgcgaccugcggccugguggggcuggucacguuccuccugcugugcggccgcuccugcaccaccagccucuacaaggggguguacgagcugcagacccuggagcucaacauggagacgcugaacaugaccaugccgcuguccugcaccaagaacaacagccaccacuacaucauggugggcaacgagaccggccucgagcugacgcugaccaacaccuccaucaucaaccacaaguucugcaaccucagcgacgcccacaagaagaaccuguacaaccacgcccugauguccaucaucagcaccuuccaccucuccauccccaacuucaaccaguacgaggccaugagcugcgacuucaacgggggcaagaucuccguccaguacaaccugagccacuccuacgccggggacgcggccagccacugcggcacgguggccaacggggugcugcagaccuucaugcggauggccuggggcggcuccuacaucgcgcucgacagcggguacggcaagugggacugcaucaugaccuccuaccaguaccugaucauccagaacaccacgugggaggaccacugccaguucagccgccccucccccaucggguaccugggccuccugagccagcggacccgcgacaucuacaucagccggcgccugcucggcaccuucaccuggacgcuguccgacagcgaggggaaggacaccccgggcggguacugccugacccgguggaugcucaucgaggccgagcugaagugcuucggcaacaccgccgucgccaagugcaacgagaagcacgacgaggaguucugcgacaugcugcgccucuucgacuucaacaagcaggccauccagcggcugaagacggaggcgcagauguccauccagcugaucaacaaggccgugaacgcccucaucaacgaccagcugaucaugaagaaccaccuccgcgacaucauggggauccccuacugcaacuacagcaaguacugguaccugaaccacaccaccaccggcaagacgucccugcccaagugcuggcuggugagcaacggcuccuaccucaacgagacccacuucagcgacgacaucgagcagcaggccgacaacaugaucaccgagaugcugcagaaggaguacauggagcggcaggggaagacgccccugggccuggucgaccucuucguguucuccaccagcuucuaccugaucuccaucuuccugcaccucgugaagaucccgugaggacuagucccuguucccagagcccacuuuuuuuucuuuuuuugaaauaaaauagccugucuuucagaucucaaaggcucuuuucagagccaccaaaaaaaaaaaaaaaaaaaaaaaaaaaaaaaaaaaaaaaaaaaaaaaaaaaaaaaaaaaaaaaaagaauu

SEQ ID NO: 42206 - RNA, 1622 nt, Artificial Sequence
  mRNA product Design a-2 (hSL-A64-N5) comprising derived and/or modified sequence from LASV(G502-SLE-2009;Clade IV)__AIT17126__GPCmut13 (opt1)
aggagaguccgcucagccagguugcagaagcggcuuagcguguguccuaaucuucucucugcguguagguaggccugugccgcaaacaagcuuaccaugggccagaucgugaccuucuuccaggaggucccccacgugaucgaggaggugaugaacaucguccugaucgcccucagcauccuggccgugcugaaggggcucuacaacuucgcgaccugcggccugguggggcugcucacguuccugcugcucugcggccgcuccugcaccaccgggcuguacaagggcgucuacgagcugcagacccucgagcugaacauggagacgcugaacaugaccaugccgcucagcugcaccaagaacaacucccaccacuacaucauggugggcaacgagaccgggcuggagcugacgcucaccaacaccagcaucaucaaccacaaguucugcaaccuguccgacgcccacaagaagaaccuguacgaccacgcccucaugagcaucaucuccaccuuccaccugagcauccccaacuucaaccaguacgaggccauguccugcgacuucaacggcgggaagaucagcgugcaguacaaccugucccacagcuacgccggcgacgcggccgaccacugcgggacggucgccaacggcgugcuccagaccuucaugcggauggccuggggcggguccuacaucgcgcuggacagcggccgcgggcggugggacugcaucaugaccuccuaccaguaccugaucauccagaacaccacgugggaggaccacugccaguucagccgccccucccccaucggcuaccucggccugcugagccagcggacccgcgacaucuacaucucccggcgccuccuggggaccuucaccuggacgcugagcgacagcgagggcaaggacacccccgggggcuacugccucacccgguggaugcugaucgaggccgagcugaagugcuucgggaacaccgccguggccaagugcaacgagaagcacgacgaggaguucugcgacaugcuccgccuguucgacuucaacaagcaggccauccagcggcugaaggcggaggcccagauguccauccagcucaucaacaaggccgucaacgcccugaucaacgaccagcuggugaugaagaaccaccuccgcgacaucaugggcauccccuacugcaacuacagccgguacugguaccugaaccacacgaccaccggccgcaccucccugcccaagugcuggcucgugagcaacggguccuaccugaacgagacgcacuucagcgacgacaucgagcagcaggccgacaacaugaucaccgagaugcugcagaaggaguacauggagcggcagggcaagaccccgcuggggcucgucgaccuguucguguucuccaccagcuucuaccugaucuccaucuuccuccaccuggugaagaucccgugaggacuagucccuguucccagagcccacuuuuuuuucuuuuuuugaaauaaaauagccugucuuucagaucucaaaggcucuuuucagagccaccaaaaaaaaaaaaaaaaaaaaaaaaaaaaaaaaaaaaaaaaaaaaaaaaaaaaaaaaaaaaaaaaagaauu

SEQ ID NO: 42207 - RNA, 1622 nt, Artificial Sequence
  mRNA product Design a-2 (hSL-A64-N5) comprising derived and/or modified sequence from LASV(G733-SLE-2010;Clade IV)__AIT17154__GPCmut13 (opt1)
aggagaguccgcucagccagguugcagaagcggcuuagcguguguccuaaucuucucucugcguguagguaggccugugccgcaaacaagcuuaccaugggccagaucgugaccuucuuccaggaggucccccacgugaucgaggaggugaugaacaucguccugaucgcccucagcauccuggccgugcugaaggggcucuacaacuucgcgaccugcggcaucguggggcuggucuccuuccugcuccugugcggccgcagcugcacgaccucccuguacaaggggguguacgagcuccagacccuggagcugaacauggagacccucaacaugacgaugccgcugagcugcaccaagaacaacucccaccacuacaucauggugggcaacgagaccggccuggagcucacccugacgaacaccagcaucaucaaccacaaguucugcaaccuguccgacgcccacaagaagaaccucuacgaccacgcccugaugagcaucaucuccaccuuccaccugagcauccccaacuucaaccaguacgaggccauguccugcgacuucaacgggggcaagaucagcguccaguacaaccucucccacagcuacgccggggacgcggccaaccacugcggcaccaucgccaacggggugcugcagacguucaugcggauggccuggggcggcuccuacaucgcgcuggacagcgggcgcgaccggugggacugcaucaugaccuccuaccaguaccucaucauccagaacaccaccugggaggaccacugccaguucagccgccccucccccaucggcuaccuggggcugcucagccagcggacgcgcgacaucuacaucagccggcgccugcugggcaccuucaccuggacccucuccgacagcgagggcaaggacacgcccgggggcuacugccugacccgguggaugcugaucgaggccgagcucaagugcuucgggaacaccgccguggccaagugcaacgagaagcacgacgaggaguucugcgacaugcugcgccuguucgacuucaacaagcaggccauccagcggcucaaggcggaggcccagauguccauccagcugaucaacaaggccgucaacgcccugaucaacgaccagcucaucaugaagaaccaccuccgcgacaucaugggcauccccuacugcaacuacagcaaguacugguaccugaaccacaccacgaccgggaagaccucccugcccaagugcuggcuggugagcaacggcuccuaccugaacgagacccacuucagcgacgacaucgagcagcaggccgacaacaugaucacggagaugcuccagaaggaguacauggagcggcagggcaagaccccgcuggggcugguggaccuguucgucuucuccaccagcuucuaccucaucuccaucuuccugcaccuggugaagaucccgugaggacuagucccuguucccagagcccacuuuuuuuucuuuuuuugaaauaaaauagccugucuuucagaucucaaaggcucuuuucagagccaccaaaaaaaaaaaaaaaaaaaaaaaaaaaaaaaaaaaaaaaaaaaaaaaaaaaaaaaaaaaaaaaaagaauu

SEQ ID NO: 42208 - RNA, 1622 nt, Artificial Sequence
  mRNA product Design a-2 (hSL-A64-N5) comprising derived and/or modified sequence from MOPV/LASV reassortant(IGS-1;Clade IV)__AFY05576__GPCmut13 (opt1)
aggagaguccgcucagccagguugcagaagcggcuuagcguguguccuaaucuucucucugcguguagguaggccugugccgcaaacaagcuuaccaugggccagaucgugaccuucuuccaggaggucccccacgugaucgaggaggugaugaacaucguccugaucgcccucagcgugcuggccgugcugaaggggcucuacaacuucgcgaccugcggccuggucgggcuggugacguuccuccugcugugcggccgcuccugcaccaccagccucuacaaggggguguacgagcugcagacccuggagcucaacauggagacgcugaacaugaccaugccgcuguccugcaccaagaacaacagccaccacuacaucauggucggcaacgagaccggccucgagcugacgcugaccaacaccuccaucaucaaccacaaguucugcaaccucagcgacgcccacaagaagaaccuguacgaccacgcccugauguccaucaucagcaccuuccaccucuccauccccaacuucaaccaguacgaggccaugagcugcgacuucaacgggggcaagaucuccgugcaguacaaccugagccacuccuacgccggggacgcggccaaccacugcggcacgguggccaacgggguccugcagaccuucaugcggauggccuggggcggcagcuacaucgcgcucgacuccgggcgcggcaacugggacugcaucaugaccagcuaccaguaccugaucauccagaacaccacgugggaggaccacugccaguucucccggcccagccccaucggguaccugggccuccugucccagcgcacccgggacaucuacaucagccgccggcugcucggcaccuucaccuggacgcugagcgacuccgagggggaggacaccccgggcggguacugccugacccgcuggaugcucaucgaggccgagcugaagugcuucggcaacaccgccguggccaagugcaacgagaagcacgacgaggaguucugcgacaugcugcggcuguucgacuucaacaagcaggccauccagcgccugaaggcggaggcccagaugagcauccagcugaucaacaaggccgugaacgcccucaucaacgaccagcugaucaugaagaaccaccuccgggacaucauggggauccccuacugcaacuacuccaaguacugguaccucaaccacacgaccaccggccgcaccagccugcccaagugcuggcuggucuccaacggcagcuaccucaacgagacgcacuucuccgacgacaucgagcagcaggccgacaacaugaucaccgagaugcugcagaaggaguacauggagcggcaggggaagacgccccugggccugguggaccucuucguguucagcaccuccuucuaccugaucagcaucuuccugcaccucgucaagaucccgugaggacuagucccuguucccagagcccacuuuuuuuucuuuuuuugaaauaaaauagccugucuuucagaucucaaaggcucuuuucagagccaccaaaaaaaaaaaaaaaaaaaaaaaaaaaaaaaaaaaaaaaaaaaaaaaaaaaaaaaaaaaaaaaaagaauu

SEQ ID NO: 42209 - RNA, 1622 nt, Artificial Sequence
  mRNA product Design a-2 (hSL-A64-N5) comprising derived and/or modified sequence from LASV(LM765-SLE-2012;Clade IV)__AIT17814__GPCmut13 (opt1)
aggagaguccgcucagccagguugcagaagcggcuuagcguguguccuaaucuucucucugcguguagguaggccugugccgcaaacaagcuuaccaugggccagaucgugaccuucuuccaggaggucccccacgugaucgaggaggugaugaacaucguccugaucgcccucagcauccuggccgugcugaaggggcucuacaacuucgcgaccugcggccugguggggcuggucacguuccuccugcugugcggccgcuccugcaccaccagccucuacaaggggguguacgagcugcagacccuggagcucaacauggagacgcugaacaugaccaugccgcuguccugcaccaagaacaacagccaccacuacaucauggugggcaacgagaccggccucgagcugacgcugaccaacaccuccaucaucgaccacaaguucugcaaccucagcgacgcccaccggaagaaccuguacgaccacgcccugauguccaucaucagcaccuuccaccucuccauccccaacuucaaccaguacgaggccaugagcugcgacuucaacgggggcaagaucuccguccaguacaaccugagccacuccuacgccaaggacgcggccgaccacugcgggacgguggccaacggcgugcugcagaccuucaugcgcauggccuggggcgggagcuacaucgcgcucgacuccggccgggggcgcugggacugcaucaugaccagcuaccaguaccugaucauccagaacaccacgugggaggaccacugccaguucucccggcccagccccaucggcuaccuggggcuccugucccagcgcacccgggacaucuacaucagccgccggcugcucggcaccuucaccuggacgcugagcgacuccgagggcaaggacacccccgggggcuacugccugacccgcuggaugcucaucgaggccgagcugaagugcuucgggaacaccgccgucgccaagugcaacgagaagcacgacgaggaguucugcgacaugcugcggcuguucgacuucaacaagcaggccauccagcgccugaaggcggaggcccagaugagcauccagcugaucaacaaggccgugaacgcccucaucaacgaccagcugaucaugaagaaccaccuccgggacaucaugggcauccccuacugcaacuacuccaaguacugguaccucaaccacacgaccaccgggaagaccagccugcccaagugcuggcugguguccaacggcagcuaccucaacgagacgcacuucuccgacgacaucgagcagcaggccgacaacaugaucaccgagaugcugcagaaggaguacauggagcgccagggcaagaccccgcuggggcuggucgaccucuucguguucagcaccuccuucuaccugaucagcaucuuccugcaccucgugaagaucccgugaggacuagucccuguucccagagcccacuuuuuuuucuuuuuuugaaauaaaauagccugucuuucagaucucaaaggcucuuuucagagccaccaaaaaaaaaaaaaaaaaaaaaaaaaaaaaaaaaaaaaaaaaaaaaaaaaaaaaaaaaaaaaaaaagaauu

SEQ ID NO: 42210 - RNA, 1622 nt, Artificial Sequence
  mRNA product Design a-2 (hSL-A64-N5) comprising derived and/or modified sequence from LASV(LM776-SLE-2012;Clade IV)__AIT17824__GPCmut13 (opt1)
aggagaguccgcucagccagguugcagaagcggcuuagcguguguccuaaucuucucucugcguguagguaggccugugccgcaaacaagcuuaccaugggccagaucgugaccuucuuccaggaggucccccacgugaucgaggaggugaugaacaucguccugaucgcccucagcauccuggccgugcugaaggggcucuacaacuucgcgaccugcggccugguggggcuggucacguuccuccugcugugcggccgcuccugcaccaccagcguguacaaggggguguacgagcuccagacccuggagcugaacauggagacgcucaacaugaccaugccgcuguccugcaccaagaacaacagccaccacuacaucauggucggcaacgagaccggccuggagcucacgcugaccaacaccuccaucaucaaccacaaguucugcaaccugagcgacgcccacaagaagaaccucuacgaccacgcccugauguccaucaucagcaccuuccaccuguccauccccaacuucaaccaguacgaggccaugagcugcgacuucaacgggggcaagaucuccgugcaguacaaccucagccacuccuacgccggggacgcggccaaccacugcggcacgguggccaacgggguccugcagaccuucaugcggauggccuggggcggcagcuacaucgcgcuggacuccgggcacggcaagugggacugcaucaugaccagcuaccaguaccucaucauccagaacaccacgugggaggaccacugccaguucucccgccccagccccaucggguaccugggccugcucucccagcggacccgcgacaucuacaucagccggcgccugcugggcaccuucaccuggacgcucagcgacuccgaggggaaggacaccccgggcggguacugccugacccgguggaugcugaucgaggccgagcucaagugcuucggcaacaccgccguggccaagugcaacgagaagcacgacgaggaguucugcgacaugcugcgccuguucgacuucaacaagcaggccauccagcggcucaaggcggaggcccagaugagcauccagcugaucaacaaggccgugaacgcccugaucaacgaccagcucaucaugaagaaccaccuccgcgacaucauggggauccccuacugcaacuacuccaaguacugguaccugaaccacacgaccaccggcaagaccagccugcccaagugcuggcuggucuccaacggcagcuaccugaacgagacgcacuucuccgacgacaucgagcagcaggccgacaacaugaucaccgagaugcuccagaaggaguacauggagcggcaggggaagacgccccugggccugguggaccuguucguguucagcaccuccuucuaccucaucagcaucuuccugcaccuggucaagaucccgugaggacuagucccuguucccagagcccacuuuuuuuucuuuuuuugaaauaaaauagccugucuuucagaucucaaaggcucuuuucagagccaccaaaaaaaaaaaaaaaaaaaaaaaaaaaaaaaaaaaaaaaaaaaaaaaaaaaaaaaaaaaaaaaaagaauu

SEQ ID NO: 42211 - RNA, 1622 nt, Artificial Sequence
  mRNA product Design a-2 (hSL-A64-N5) comprising derived and/or modified sequence from LASV(Mad39;Clade IV)__ANH09722__GPCmut13 (opt1)
aggagaguccgcucagccagguugcagaagcggcuuagcguguguccuaaucuucucucugcguguagguaggccugugccgcaaacaagcuuaccaugggccagaucgugaccuucuuccaggaggucccccacgugaucgaggaggugaugaacaucguccugaucgcccucagcauccuggccgugcugaaggggcucuacaacguggcgaccugcggccugaucgggcuggucacguuccuccugcugugcggccgcuccugcaccaccacccucuacaaggggguguacgagcugcaggcccuggagcucaacauggagacgcugaacaugaccaugccgcugagcugcaccaagaacaacucccaccacuacauccgggugggcaacgagaccggccucgagcugacgcugaccaacaccagccucaucaaccacaaguucugcaaccuguccgacgcccacaagaagaaccuguacgaccacgcccucaugagcaucaucuccaccuuccaccugagcauccccaacuucaaccaguacgaggccauguccugcgacuucaacgacgggaagaucagcguccaguacaaccugucccacacguacgcgggcgacaccgccaaccacugcgggaccguggccaacggcgugcuccagaccuucaugcgcauggccuggggcgggagcuacaucgcgcuggacuccggccgcgggggcugggacugcaucaugacgagcuaccaguaccugaucauccagaacaccaccugggaggaccacugccaguucucccggcccagccccaucggguaccucggccugcugucccagcggacccgcgacaucuacaucagccggcgccuccugggcacguucaccuggacccuguccgacagcgaggggaaggacaccccgggcggguacugccucacgcgguggaugcugaucgaggccgagcugaagugcuucggcaacaccgccgucgccaagugcaacgagaagcacgacgaggaguucugcgacaugcuccgccuguucgacuucaacaagcaggccauccagcggcugaaggcggaggcccagaugagcauccagcucaucaacaaggccgugaacgcccugaucaacgaccagcugaucaugaagaaccaccuccgcgacaucauggggauccccuacugcaacuacuccaaguacugguaccugaaccacaccgugaccggcaagacgagccugcccaagugcuggcucgucuccaacggcagcuaccugaacgagacccacuucuccgacgacaucgagcagcaggccgacaacaugaucaccgagaugcugcagaaggaguacauggagcggcaggggaagacgccccugggccucguggaccuguucguguucagcaccuccuucuaccugaucagcaucuuccuccaccuggucaagaucccgugaggacuagucccuguucccagagcccacuuuuuuuucuuuuuuugaaauaaaauagccugucuuucagaucucaaaggcucuuuucagagccaccaaaaaaaaaaaaaaaaaaaaaaaaaaaaaaaaaaaaaaaaaaaaaaaaaaaaaaaaaaaaaaaaagaauu

SEQ ID NO: 42212 - RNA, 1622 nt, Artificial Sequence
  mRNA product Design a-2 (hSL-A64-N5) comprising derived and/or modified sequence from LASV(Z0947-SLE-2011;Clade IV)__AIT17840__GPCmut13 (opt1)
aggagaguccgcucagccagguugcagaagcggcuuagcguguguccuaaucuucucucugcguguagguaggccugugccgcaaacaagcuuaccaugggccagaucgugaccuucuuccaggaggucccccacgugaucgaggaggugaugaacaucguccugaucgcccucagcauccuggccgugcugaaggggcucuacaacuucgcgaccugcggccugguggggcuggucacguuccuccugcugugcggccgcuccugcaccaucagccucuacaaggggguguacgagcugcagacccuggagcucaacauggagacccugaacaugacgaugccgcuguccugcaccaagaacaacagccaccacuacaucauggugggcaacgagaccggccucgagcugacccugacgaacaccuccaucaucaaccacaaguucugcaaccucagcgacgcccacaagaagaaccuguacgaccacgcccugauguccaucaucagcaccuuccaccucuccauccccaacuucaaccaguacgaggccaugagcugcgacuucaacgggggcaagaucuccguccaguacaaccugagccacuccuacgccggggacgcggccaaccacugcggcaccguggccaacggggugcugcagacguucaugcggauggccuggggcggcagcuacaucgcgcucgacuccgggcgcgaccggugggacugcaucaugaccagcuaccaguaccugaucauccagaacaccaccugggaggaccacugccaguucucccgccccagccccaucggcuaccuggggcuccugucccagcggacgcgcgacaucuacaucagccggcgccugcucggcaccuucaccuggacccugagcgacuccgagggcaaggacacgcccgggggcuacugccugacccgguggaugcucaucgaggccgagcugaagugcuucgggaacaccgccgucgccaagugcaacgagaagcacgacgaggaguucugcgacaugcugcgccucuucgacuucaacaagcaggccauccagcggcugaaggcggaggcccagaugagcauccagcugaucaacaaggccgugaacgcccucaucaacgaccagcugaucaugaagaaccaccuccgcgacaucaugggcauccccuacugcaacuacuccaaguacugguaccugaaccacaccacgaccgggaagaccagccugcccaagugcuggcugguguccaacggcagcuaccucaacgagacccacuucuccgacgacaucgagcagcaggccgacaacaugaucacggagaugcugcagaaggaguacauggagcggcagggcaagaccccgcuggggcuggucgaccucuucguguucagcaccuccuucuaccugaucagcaucuuccugcaccucgugaagaucccgugaggacuagucccuguucccagagcccacuuuuuuuucuuuuuuugaaauaaaauagccugucuuucagaucucaaaggcucuuuucagagccaccaaaaaaaaaaaaaaaaaaaaaaaaaaaaaaaaaaaaaaaaaaaaaaaaaaaaaaaaaaaaaaaaagaauu

SEQ ID NO: 42213 - RNA, 1622 nt, Artificial Sequence
  mRNA product Design a-2 (hSL-A64-N5) comprising derived and/or modified sequence from LASV(Josiah;Clade IV)__NP_694870__GPCmut13 (opt4)
aggagaguccgcucagccagguugcagaagcggcuuagcguguguccuaaucuucucucugcguguagguaggccugugccgcaaacaagcuuaccaugggccagaucgugaccuucuuccaggaggugccccacgugaucgaggaggugaugaacaucgugcugaucgcccugagcgugcuggccgugcugaagggccuguacaacuucgccaccugcggccuggugggccuggugaccuuccugcugcugugcggcagaagcugcaccaccagccuguacaagggcguguacgagcugcagacccuggagcugaacauggagacccugaacaugaccaugccccugagcugcaccaagaacaacagccaccacuacaucauggugggcaacgagaccggccuggagcugacccugaccaacaccagcaucaucaaccacaaguucugcaaccugagcgacgcccacaagaagaaccuguacgaccacgcccugaugagcaucaucagcaccuuccaccugagcauccccaacuucaaccaguacgaggccaugagcugcgacuucaacggcggcaagaucagcgugcaguacaaccugagccacagcuacgccggcgacgccgccaaccacugcggcaccguggccaacggcgugcugcagaccuucaugagaauggccuggggcggcagcuacaucgcccuggacagcggcagaggcaacugggacugcaucaugaccagcuaccaguaccugaucauccagaacaccaccugggaggaccacugccaguucagcagacccagccccaucggcuaccugggccugcugagccagagaaccagagacaucuacaucagcagaagacugcugggcaccuucaccuggacccugagcgacagcgagggcaaggacacccccggcggcuacugccugaccagauggaugcugaucgaggccgagcugaagugcuucggcaacaccgccguggccaagugcaacgagaagcacgacgaggaguucugcgacaugcugagacuguucgacuucaacaagcaggccauccagagacugaaggccgaggcccagaugagcauccagcugaucaacaaggccgugaacgcccugaucaacgaccagcugaucaugaagaaccaccugagagacaucaugggcauccccuacugcaacuacagcaaguacugguaccugaaccacaccaccaccggcagaaccagccugcccaagugcuggcuggugagcaacggcagcuaccugaacgagacccacuucagcgacgacaucgagcagcaggccgacaacaugaucaccgagaugcugcagaaggaguacauggagagacagggcaagaccccccugggccugguggaccuguucguguucagcaccagcuucuaccugaucagcaucuuccugcaccuggugaagauccccugaggacuagucccuguucccagagcccacuuuuuuuucuuuuuuugaaauaaaauagccugucuuucagaucucaaaggcucuuuucagagccaccaaaaaaaaaaaaaaaaaaaaaaaaaaaaaaaaaaaaaaaaaaaaaaaaaaaaaaaaaaaaaaaaagaauu

SEQ ID NO: 42214 - RNA, 1619 nt, Artificial Sequence
  mRNA product Design a-2 (hSL-A64-N5) comprising derived and/or modified sequence from LASV(LP;Clade I)__AAF86701__GPCmut13 (opt4)
aggagaguccgcucagccagguugcagaagcggcuuagcguguguccuaaucuucucucugcguguagguaggccugugccgcaaacaagcuuaccaugggccagaucaucaccuucuuccaggaggugccccacgugaucgaggaggugaugaacaucgugcugaucgcccugagccugcuggccauccugaagggccuguacaacaucgccaccugcggcaucaucggccugguggccuuccuguuccugugcggcaagagcugcagccugacccugaagggcggcuacgagcugcagacccuggagcugaacauggagacccugaacaugaccaugccccugagcugcaccaagaacagcagccaccacuacaucagagugggcaacgagaccggccuggagcugacccugaccaacaccagcaucaucaaccacaaguucugcaaccugagcgacgcccacaagaagaaccuguacgaccacgcccugaugagcaucaucagcaccuuccaccugagcauccccaacuucaaccaguacgaggccaugagcugcgacuucaacggcggcaagaucagcgugcaguacaaccugagccacagcuacgccggcgacgccgccgagcacugcggcaccguggccaacggcgugcugcagaccuucaugagaauggccuggggcggcagauacaucgcccuggacagcggcaagggcaacugggacugcaucaugaccagcuaccaguaccugaucauccagaacaccaccugggaggaccacugccaguucagcagacccagccccaucggcuaccugggccugcugagccagagaaccagagacaucuacaucagcagaagacugcugggcaccuucaccuggacccugagcgacagcgagggcaacgagacccccggcggcuacugccugaccagauggaugcugaucgaggccgagcugaagugcuucggcaacaccgccguggccaagugcaacgagaagcacgacgaggaguucugcgacaugcugagacuguucgacuucaacaagcaggccaucagaagacugaaggccgaggcccagaugagcauccagcugaucaacaaggccgugaacgcccugaucaacgaccagcugaucaugaagaaccaccugagagacaucaugggcauccccuacugcaacuacagcaaguacugguaccugaaccacaccagcagcggcagaaccagccugcccaagugcuggcugaucagcaacggcagcuaccugaacgagacccaguucagcgacgacaucgagcagcaggccgacaacaugaucaccgagaugcugcagaaggaguacaucgagagacagggcaagaccccccugggccugguggacaucuucaucuucagcaccagcuucuaccugaucagcaucuuccugcaccugaucaagauccccugaggacuagucccuguucccagagcccacuuuuuuuucuuuuuuugaaauaaaauagccugucuuucagaucucaaaggcucuuuucagagccaccaaaaaaaaaaaaaaaaaaaaaaaaaaaaaaaaaaaaaaaaaaaaaaaaaaaaaaaaaaaaaaaaagaauu

SEQ ID NO: 42215 - RNA, 1619 nt, Artificial Sequence
  mRNA product Design a-2 (hSL-A64-N5) comprising derived and/or modified sequence from LASV(803213;Clade II)__AAF86703__GPCmut13 (opt4)
aggagaguccgcucagccagguugcagaagcggcuuagcguguguccuaaucuucucucugcguguagguaggccugugccgcaaacaagcuuaccaugggccagaucaucaccuucuuccaggaggugccccacgugaucgaggaggugaugaacaucgugcugaucgcccugagccugcuggccauccugaagggcaucuacaacguggccaccugcggccuguucggccugaucagcuuccugcugcugugcggcagaagcugcagcgugaccuacaagggcguguacgagcugcagacccuggagcugaacauggccaaccugaacaugaccaugccccugagcugcaccaagaacaacagccaccacuacaucauggugggcaacgagaccggccuggagcugacccugaccaacaccagcaucaucaaccacaaguucugcaaccugagcgacgcccacaagaagaaccuguacgaccacgcccugaugagcaucaucagcaccuuccaccugagcauccccaacuucaaccaguacgaggccaugagcugcgacuucaacggcggcaagaucagcgugcaguacaaccugagccacagcuucgccguggacgccgccaaccacugcggcaccaucgccaacggcgugcugcagaccuucaugagaauggccuggggcggcagcuacaucgcccuggacagcggcaagggcaacugggacugcaucaugaccagcuaccaguaccugaucauccagaacaccaccugggaggaccacugccaguucagcagacccagccccaucggcuaccugggccugcugagccagagaaccagagacaucuacaucagcagaagacugcugggcaccuucaccuggacccugagcgacagcgagggcaacgaggcccccggcggcuacugccugaccagauggaugcugaucgaggccgagcugaagugcuucggcaacaccgccguggccaagugcaacgagaagcacgacgaggaguucugcgacaugcugagacuguucgacuucaacaagcaggccaucaagagacugaagaccgaggcccagaugagcauccagcugaucaacaaggccgugaacgcccugaucaacgaccagcugaucaugaagaaccaccugagagacaucaugggcauccccuacugcaacuacagcagauacugguaccugaaccacaccgugaccggcaagaccagccugcccagaugcuggcuggugagcaacggcagcuaccugaacgagacccacuucagcgacgacaucgagcagcaggccgacaacaugaucaccgagaugcugcagaaggaguacauggacagacagggcaagaccccccugggccugguggaccuguucguguucagcaccagcuucuaccugaucagcaucuuccugcaccuggugaagauccccugaggacuagucccuguucccagagcccacuuuuuuuucuuuuuuugaaauaaaauagccugucuuucagaucucaaaggcucuuuucagagccaccaaaaaaaaaaaaaaaaaaaaaaaaaaaaaaaaaaaaaaaaaaaaaaaaaaaaaaaaaaaaaaaaagaauu

SEQ ID NO: 42216 - RNA, 1619 nt, Artificial Sequence
  mRNA product Design a-2 (hSL-A64-N5) comprising derived and/or modified sequence from LASV(GA391;Clade III)__CAA36645__GPCmut13 (opt4)
aggagaguccgcucagccagguugcagaagcggcuuagcguguguccuaaucuucucucugcguguagguaggccugugccgcaaacaagcuuaccaugggccagaucgugaccuucuuccaggaggugccccacgugaucgaggaggugaugaacaucgugcugaucgcccugagcauccuggccauccugaagggccuguacaacguggccaccugcggccugaucggccuggugaccuuccugcugcugagcggcagaagcugcagccugaucuacaagggcaccuacgagcugcagacccuggagcugaacauggagacccugaacaugaccaugccccugagcugcaccaagaacaacagccaccacuacaucagagugggcaacgagaccggccuggagcugacccugaccaacaccagcauccugaaccacaaguucugcaaccugagcgacgcccacaagagaaaccuguacgaccacagccugaugagcaucaucagcaccuuccaccugagcauccccaacuucaaccaguacgaggccaugagcugcgacuucaacggcggcaagaucaccgugcaguacaaccugagccacagcuucgccguggacgccgccggccacugcggcacccuggccaacggcgugcugcagaccuucaugagaauggccuggggcggcagcuacaucgcccuggacagcggcagaggcaacugggacugcaucaugaccagcuaccaguaccugaucauccagaacaccaccugggacgaccacugccaguucagcagacccagccccaucggcuaccugggccugcugagccagagaaccagagacaucuacaucagcagaagacugcugggcaccuucaccuggacccugagcgacagcgagggcaacgagacccccggcggcuacugccugaccagauggaugcugaucgaggccgagcugaagugcuucggcaacaccgccguggccaagugcaacgagaagcacgacgaggaguucugcgacaugcugagacuguucgacuucaacaagcaggccaucagaagacugaagaccgaggcccagaugagcauccagcugaucaacaaggccgugaacgcccugaucaacgaccagcugaucaugaagaaccaccugagagacaucaugggcauccccuacugcaacuacagcagauacugguaccugaaccacaccagcaccggcaagaccagccugcccagaugcuggcugaucagcaacggcagcuaccugaacgagaccaaguucagcgacgacaucgagcagcaggccgacaacaugaucaccgagaugcugcagaaggaguacaucgacagacagggcaagaccccccugggccugguggaccuguucguguucagcaccagcuucuaccugaucagcaucuuccugcaccuggugaagauccccugaggacuagucccuguucccagagcccacuuuuuuuucuuuuuuugaaauaaaauagccugucuuucagaucucaaaggcucuuuucagagccaccaaaaaaaaaaaaaaaaaaaaaaaaaaaaaaaaaaaaaaaaaaaaaaaaaaaaaaaaaaaaaaaaagaauu

SEQ ID NO: 42217 - RNA, 1622 nt, Artificial Sequence
  mRNA product Design a-2 (hSL-A64-N5) comprising derived and/or modified sequence from LASV(AV;Clade V)__CCA30314__GPCmut13 (opt4)
aggagaguccgcucagccagguugcagaagcggcuuagcguguguccuaaucuucucucugcguguagguaggccugugccgcaaacaagcuuaccaugggccagaucgugaccuucuuccaggaggugccccacgugaucgaggaggugaugaacaucgugcugaucgcccugagcauccuggccgugcugaagggccuguacaacaucgccaccugcggccugaucggccugaucaccuuccugcugcugugcggcagaagcugcagcagcaaccuguacaagggcguguacgagcugcagagccuggaccugaacauggagacccugaacaugaccaugccccugagcugcaccaagaacaacagccaccacuacaucagagugggcaacgacaccggccuggagcugacccugaccaacaccagcauccugaaccacaaguucugcaaccugagcgacgcccacaagaaggaccuguacgaccacgcccugaugagcaucaucagcaccuuccaccugagcauccccaacuucaaccaguacgaggccaugagcugcgacuucaacggcggcaagaucagcgugcaguacaaccugagccacagcuacgccaucgacgccgccaaccacugcggcaccguggccaacggcauccugcagaccuucaugagaauggccuggggcggcagcuacaucgcccuggacagcggcagaggcaacugggacugcaucaugaccagcuaccaguaccugaucauccagaacaccaccugggagaaccacugccaguucagcagacccagccccaucggcuaccugggccugcugagccagagaaccagagacaucuacaucagcagaagacugcugggcaccuucaccuggacccugagcgacagcgagggcaacgccacccccggcggcuacugccugaccagauggaugcugaucgaggccgagcugaagugcuucggcaacaccgccguggccaagugcaacgagaagcacgacgaggaguucugcgacaugcugagacuguucgacuucaacaagcaggccaucagcagacugaagagcgaggcccagaugagcauccagcugaucaacaaggccgugaacgcccugaucaacgaccagcugaucaugaagaaccaccugagagacaucaugggcauccccuacugcaacuacagcaaguacugguaccugaaccacaccaucaccggcaagaccagccugcccaagugcuggcuggugagcaacggcagcuaccugaacgagacccacuucagcgacgacaucgagcagcaggccgacaacaugaucaccgagaugcugcagaaggaguacauggagagacagggcaagaccccccugggccugguggaccuguucguguucagcaccagcuucuaccugaucagcaucuuccugagacuggugaagauccccugaggacuagucccuguucccagagcccacuuuuuuuucuuuuuuugaaauaaaauagccugucuuucagaucucaaaggcucuuuucagagccaccaaaaaaaaaaaaaaaaaaaaaaaaaaaaaaaaaaaaaaaaaaaaaaaaaaaaaaaaaaaaaaaaagaauu

SEQ ID NO: 42218 - RNA, 1619 nt, Artificial Sequence
  mRNA product Design a-2 (hSL-A64-N5) comprising derived and/or modified sequence from LASV(Togo/2016/7082;Clade VI)__AMR44577__GPCmut13 (opt4)
aggagaguccgcucagccagguugcagaagcggcuuagcguguguccuaaucuucucucugcguguagguaggccugugccgcaaacaagcuuaccaugggccagaucaucaccuucuuccaggaggugccccacgugaucgaggaggugaugaacaucgugcugaucgcccugagccugcuggccauccugaagggcguguacaacguggccaccugcggcaucaucggccuggugaccuuccuguuccugugcggcagaagcugcagccugaucuacaagggcagcuacgagcugcagacccuggagcugaacauggagacccugaacaugaccaugccccugagcugcaccaagaacagcagccaccacuacaucagagugggcaacgagaccggccuggagcugacccugaccaacaccagcaucaucaaccacaaguucugcaaccugagcgacgcccacaagagaaaccuguacgaccacgcccugaugagcauccugagcaccuuccaccugagcauccccaacuucaaccaguacgaggccaugagcugcgacuucaacggcggcaagaucagcgugcaguacaaccugagccacgccuacgccguggacgccgccgagcacugcggcaccguggccaacggcgugcugcagaccuucaugagaauggccuggggcggcagcuacaucgcccuggacagcggcagaggcaacugggacugcaucaugaccagcuaccaguaccugaucauccagaacaccaccugggaggaccacugccaguucagcagacccagccccaucggcuaccugggccugcugagccagagaaccagagacaucuacaucagcagaagacugcugggcaccuucaccuggacccugagcgacagcgagggcaacgagacccccggcggcuacugccugaccagauggaugcugaucgaggccgagcugaagugcuucggcaacaccgccguggccaagugcaacgagaagcacgacgaggaguucugcgacaugcugagacuguucgacuucaacaagcaggccauccagagacugaagagcgaggcccagaugagcauccagcugaucaacaaggccgugaacgcccugaucaacgaccagcugaucaugaagaaccaccugagagacaugaugggcauccccuacugcaacuacagcaaguacugguaccugaaccacaccagcagcggcagaaccagccugcccaagugcuggcuggugagcaacggcagcuaccugaacgagacccacuucagcgacgacaucgagcagcaggccgacaacaugaucaccgagaugcugcagaaggaguacaucgacagacagggcaagaccccccugggccugguggaccuguucguguucagcaccagcuucuaccugaucagcaucuuccugcaccugaucaagauccccugaggacuagucccuguucccagagcccacuuuuuuuucuuuuuuugaaauaaaauagccugucuuucagaucucaaaggcucuuuucagagccaccaaaaaaaaaaaaaaaaaaaaaaaaaaaaaaaaaaaaaaaaaaaaaaaaaaaaaaaaaaaaaaaaagaauu

SEQ ID NO: 42219 - RNA, 1619 nt, Artificial Sequence
  mRNA product Design a-2 (hSL-A64-N5) comprising derived and/or modified sequence from LASV(KAK-428;Clade n.d. (VII))__ANH09740__GPCmut13 (opt4)
aggagaguccgcucagccagguugcagaagcggcuuagcguguguccuaaucuucucucugcguguagguaggccugugccgcaaacaagcuuaccaugggccagaucgugaccuucuuccaggaggugccccacgugaucgaggaggugaugaacaucgugcugaucgcccugagccugcuggccauccugaagggccuguacaacuucgccaccugcggcgugaucggccugaucaccuuccugcugcugugcggcagaagcugcagcgccaccuacaagggccaguacgagcugcagacccuggagcugaacauggagagccugaacaugaccaugccccugagcugcaccaagaacaacagccaccacuacaucagagccggcaacaacaccggccuggagcugacccugaccaacaccagcaucaucagccacaaguucugcaaccugagcgacgcccacaagaagaaccuguacgaccacacccugaugagcaucaucaccaccuuccaccugagcauccccaacuucaaccaguacgaggccaugagcugcgacuucaacggcggcaagaucagcauccaguacaaccugagccacagcuacgccggcgacgccgcccagcacugcggcaccguggccaacggcgugcugcagaccuucaugagaauggccuggggcggcagcuaccuggcccuggacagcggcagaagaggcugggacugcaucaucagcagcuaccaguaccugaucauccagaacaccaccugggacgaccacugccaguucagcagacccagccccaucggcuaccugggcuucgugagccagaagaccagagacaucuacaucagcagaagacugcugggcaccuucaccuggacccugagcgacagcgagggccacgacaugcccggcggcuacugccugaccagauggaugcugaucgaggccgaccugaagugcuucggcaacaccgccguggccaagugcaacgagaagcacgacgaggaguucugcgacauguggagacuguucgacuucaacaagcaggccauccagagacugaaggccgaggcccagaugaacauccagcugaucaacaaggccgugaacgcccugaucaacgaccagcugaugaugaagaaccaccugagagacaucaugggcauccccuacugcaacuacagcaaguucugguaccugaacaacaccaccaccggcagaaccagccugcccagaugcuggcugaucagcaacggcagcuaccugaacgagacccacuucagcgacgacaucgagcagcaggccgacaacaugaucaccgagaugcugcagaaggaguacauggacagacagggcaagaccccccugggccugguggaccuguucguguucagcaccagcuucuaccugaucaccaucuuccugcaccuggugaagauccccugaggacuagucccuguucccagagcccacuuuuuuuucuuuuuuugaaauaaaauagccugucuuucagaucucaaaggcucuuuucagagccaccaaaaaaaaaaaaaaaaaaaaaaaaaaaaaaaaaaaaaaaaaaaaaaaaaaaaaaaaaaaaaaaaagaauu

SEQ ID NO: 42220 - RNA, 1619 nt, Artificial Sequence; identical to SEQ ID NO: 42214
  mRNA product Design a-2 (hSL-A64-N5) comprising derived and/or modified sequence from LASV(Pinneo-NIG-1969;Clade I)__AIT17836__GPCmut13 (opt4)

SEQ ID NO: 42221 - RNA, 1619 nt, Artificial Sequence
  mRNA product Design a-2 (hSL-A64-N5) comprising derived and/or modified sequence from LASV(ISTH0009-NIG-2011;Clade II)__AIT17404__GPCmut13 (opt4)
aggagaguccgcucagccagguugcagaagcggcuuagcguguguccuaaucuucucucugcguguagguaggccugugccgcaaacaagcuuaccaugggccagaucaucaccuucuuccaggaggugccccacgugaucgaggaggugaugaacaucgugcugaucgcccugagccugcuggccauccugaagggcaucuacaacguggccaccugcggccuguucggccuggugagcuuccugcugcugugcggcagaagcugcagcaccaccuacaagggcguguacgagcugcagacccuggagcuggacauggccagccugaacaugaccaugccccugagcugcaccaagaacaacagccaccacuacaucauggugggcaacgagaccggccuggagcugacccugaccaacaccagcaucaucaaccacaaguucugcaaccugagcgacgcccacaagaagaaccuguacgaccacgcccugaugagcaucaucagcaccuuccaccugagcauccccaacuucaaccaguacgaggccaugagcugcgacuucaacggcggcaagaucagcgugcaguacaaccugagccacgccuacgccguggacgccgccaaccacugcggcaccaucgccaacggcgugcugcagaccuucaugagaauggccuggggcggcagcuacaucgcccuggacagcggcaagggcagcugggacugcaucaugaccagcuaccaguaccugaucauccagaacaccaccugggaggaccacugccaguucagcagacccagccccaucggcuaccugggccugcugagccagagaaccagagacaucuacaucagcagaagacugcugggcaccuucaccuggacccugagcgacagcgagggcaacgagacccccggcggcuacugccugaccagauggaugcugaucgaggccgagcugaagugcuucggcaacaccgccguggccaagugcaacgagaagcacgacgaggaguucugcgacaugcugagacuguucgacuucaacaagcaggccaucagaagacugaagaccgaggcccagaugagcauccagcugaucaacaaggccgugaacgcccugaucaacgaccagcugaucaugaagaaccaccugagagacaucaugggcauccccuacugcaacuacagcaaguacugguaccugaaccacaccgugaccggcaagaccagccugcccagaugcuggcuggugagcaacggcagcuaccugaacgagacccacuucagcgacgacaucgagcagcaggccgacaacaugaucaccgagcugcugcagaaggaguacauggacagacagggcaagaccccccugggccugguggaccuguucguguucagcaccagcuucuaccugaucagcaucuuccugcaccugaucaagauccccugaggacuagucccuguucccagagcccacuuuuuuuucuuuuuuugaaauaaaauagccugucuuucagaucucaaaggcucuuuucagagccaccaaaaaaaaaaaaaaaaaaaaaaaaaaaaaaaaaaaaaaaaaaaaaaaaaaaaaaaaaaaaaaaaagaauu

SEQ ID NO: 42222 - RNA, 1619 nt, Artificial Sequence
  mRNA product Design a-2 (hSL-A64-N5) comprising derived and/or modified sequence from LASV(ISTH2010-NIG-2012;Clade II)__AIT17482__GPCmut13 (opt4)
aggagaguccgcucagccagguugcagaagcggcuuagcguguguccuaaucuucucucugcguguagguaggccugugccgcaaacaagcuuaccaugggccagaucaucaccuucuuccaggaggugccccacgugaucgaggaggugaugaacaucgugcugaucgcccugagccugcuggccauccugaagggcaucuacaacguggccaccugcggccuguucggccuggugagcuuccugcugcugugcggcagaagcugcagcaccaccuacaagggcguguacgagcugcagacccuggagcuggacauggccagccugaacaugaccaugccccugagcugcaccaagaacaacagccaccacuacaucauggugggcaacgagaccggccuggagcugacccugaccaacaccagcaucaucaaccacaaguucugcaaccugagcgacgcccacaagaagaaccuguacgaccacgcccugaugagcaucaucagcaccuuccaccugagcauccccaacuucaaccaguacgaggccaugagcugcgacuucaacggcggcaagaucagcgugcaguacaaccugagccacgccuacgccguggacgccgccaaccacugcggcaccaucgccaacggcgugcugcagaccuucaugagaauggccuggggcggcagcuacaucgcccuggacagcggcaagggcagcugggacugcaucaugaccagcuaccaguaccugaucauccagaacaucaccugggaggaccacugccaguucagcagacccagccccaucggcuaccugggccugcugagccagagaaccagagacaucuacaucagcagaagacugcugggcaccuucaccuggacccugagcgacagcgagggcaacgagacccccggcggcuacugccugaccagauggaugcugaucgaggccgagcugaagugcuucggcaacaccgccguggccaagugcaacgagaagcacgacgaggaguucugcgacaugcugagacuguucgacuucaacaagcaggccaucagaagacugaagaccgaggcccagaugagcauccagcugaucaacaaggccgugaacgcccugaucaacgaccagcugaucaugaagaaccaccugagagacaucaugggcauccccuacugcaacuacagcaaguacugguaccugaaccacaccgugaccggcaagaccagccugcccagaugcuggcuggugagcaacggcagcuaccugaacgagacccacuucagcgacgacaucgagcagcaggccgacaacaugaucaccgagcugcugcagaaggaguacaucgacagacagggcaagaccccccugggccugguggaccuguucguguucagcaccagcuucuaccugaucagcaucuuccugcaccuggugaagauccccugaggacuagucccuguucccagagcccacuuuuuuuucuuuuuuugaaauaaaauagccugucuuucagaucucaaaggcucuuuucagagccaccaaaaaaaaaaaaaaaaaaaaaaaaaaaaaaaaaaaaaaaaaaaaaaaaaaaaaaaaaaaaaaaaagaauu

SEQ ID NO: 42223 - RNA, 1619 nt, Artificial Sequence
  mRNA product Design a-2 (hSL-A64-N5) comprising derived and/or modified sequence from LASV(Lassa virus/H.sapiens-wt/NGA/2015/ISTH_0543;Clade II)__AVO03639__GPCmut13 (opt4)
aggagaguccgcucagccagguugcagaagcggcuuagcguguguccuaaucuucucucugcguguagguaggccugugccgcaaacaagcuuaccaugggccagaucaucaccuucuuccaggaggugccccacgugaucgaggaggugaugaacaucgugcugaucgcccugagccugcuggccauccugaagggcaucuacaacguggccaccugcggccuguucggccuggugagcuuccugcugcugugcggcagaagcugcagcaccaccuacaagggcguguacgagcugcagacccuggagcuggacauggccaaccugaacaugaccaugccccugagcugcaccaagaacaacagccaccacuacaucauggugggcaacgagaccggccuggagcugacccugaccaacaccagcaucaucaaccacaaguucugcaaccugagcgacgcccacaagaagaaccuguacgaccacgcccugaugagcaucaucagcaccuuccaccugagcauccccaacuucaaccaguacgaggccaugagcugcgacuucaacggcggcaagaucagcgugcaguacaaccugagccacaccuacgccguggacgccgccaaccacugcggcaccaucgccaacggcgugcugcagaccuucaugagaauggccuggggcggcagcuacaucgcccuggacagcggcaagggcagcugggacugcaucaugaccagcuaccaguaccuggugauccagaacaccaccugggaggaccacugccaguucagcagacccagccccaucggcuaccugggccugcugagccagagaaccagagacaucuacaucagcagaagacugcugggcaccuucaccuggacccugagcgacagcgagggcaacgagacccccggcggcuacugccugaccagauggaugcugaucgaggccgagcugaagugcuucggcaacaccgccguggccaagugcaacgagaagcacgacgaggaguucugcgacaugcugagacuguucgacuucaacaagcaggccaucagaagacugaagaccgaggcccagaugagcauccagcugaucaacaaggccgugaacgcccugaucaacgaccagcugaucaugaagaaccaccugagagacaucaugggcauccccuacugcaacuacagcaaguacugguaccugaaccacaccgugaccggcaagaccagccugcccagaugcuggcuggugagcaacggcagcuaccugaacgagacccacuucagcgacgacaucgagcagcaggccgacaacaugaucaccgagcugcugcagaaggaguacaucgacagacagggcaagaccccccugggccugguggaccuguucguguucagcaccagcuucuaccugaucagcaucuuccugcaccuggugaagauccccugaggacuagucccuguucccagagcccacuuuuuuuucuuuuuuugaaauaaaauagccugucuuucagaucucaaaggcucuuuucagagccaccaaaaaaaaaaaaaaaaaaaaaaaaaaaaaaaaaaaaaaaaaaaaaaaaaaaaaaaaaaaaaaaaagaauu

SEQ ID NO: 42224 - RNA, 1619 nt, Artificial Sequence
  mRNA product Design a-2 (hSL-A64-N5) comprising derived and/or modified sequence from LASV(Lassa virus/H.sapiens-wt/NGA/2016/ISTH_0009;Clade II)__AVO03571__GPCmut13 (opt4)
aggagaguccgcucagccagguugcagaagcggcuuagcguguguccuaaucuucucucugcguguagguaggccugugccgcaaacaagcuuaccaugggccagaucaucaccuucuuccaggaggugccccacgugaucgaggaggugaugaacaucgugcugaucgcccugagccugcuggccauccugaagggcaucuacaacguggccaccugcggccugcugggccuggugagcuuccugcugcugugcggcagaagcugcagcaccaccuacaagggcguguacgagcugcagacccuggagcuggacauggccagccugaacaugaccaugccccugagcugcaccaagaacaacagccaccacuacaucauggugggcaacgagaccggccuggagcugacccugaccaacaccagcaucaucaaccacaaguucugcaaccugagcgacgcccacaagaagaaccuguacgaccacgcccugaugagcaucaucagcaccuuccaccugagcauccccaacuucaaccaguacgaggccaugagcugcgacuucaacggcggcagaaucagcgugcaguacaaccugagccacagcuacgccguggacgccgccaaccacugcggcaccaucgccaacggcgugcugcagaccuucaugagaauggccuggggcggcagcuacaucgcccuggacagcggcaagggcagcugggacugcaucaugaccagcuaccaguaccugaucauccagaacaccaccugggaggaccacugccaguucagcagacccagccccaucggcuaccugggccugcugagccagagaaccagagacaucuacaucagcagaagacugcugggcaccuucaccuggacccugagcgacagcgagggcaacgagacccccggcggcuacugccugaccagauggaugcugaucgaggccgagcugaagugcuucggcaacaccgccguggccaagugcaacgagaagcacgacgaggaguucugcgacaugcugagacuguucgacuucaacaagcaggccaucagaagacugaagaccgaggcccagaugagcauccagcugaucaacaaggccgugaacgcccugaucaacgaccagcugaucaugaagaaccaccugagagacaucaugggcauccccuacugcaacuacagcaaguacugguaccugaaccacaccgugaccggcaagaccagccugcccagaugcuggcuggugagcaacggcagcuaccugaacgagacccacuucagcgacgacaucgagcagcaggccgacaacaugaucaccgagcugcugcagaaggaguacaucgacagacagggcaagaccccccugggccugguggaccuguucguguucagcaccagcuucuaccugaucagcaucuuccugcaccuggugaagauccccugaggacuagucccuguucccagagcccacuuuuuuuucuuuuuuugaaauaaaauagccugucuuucagaucucaaaggcucuuuucagagccaccaaaaaaaaaaaaaaaaaaaaaaaaaaaaaaaaaaaaaaaaaaaaaaaaaaaaaaaaaaaaaaaaagaauu

SEQ ID NO: 42225 - RNA, 1619 nt, Artificial Sequence
  mRNA product Design a-2 (hSL-A64-N5) comprising derived and/or modified sequence from LASV(Lassa virus/H.sapiens-wt/NGA/2016/ISTH_0017;Clade II)__AVO03567__GPCmut13 (opt4)
aggagaguccgcucagccagguugcagaagcggcuuagcguguguccuaaucuucucucugcguguagguaggccugugccgcaaacaagcuuaccaugggccagaucaucaccuucuuccaggaggugccccacgugaucgaggaggugaugaacaucgugcugaucgcccugagccugcuggccauccugaagggcaucuacaacguggccaccugcggccuguucggccuggugagcuuccugcugcugugcggcagaagcugcagcaccaccuacaagggcguguacgagcugcagacccuggagcuggacauggccagccugaacaugaccaugccccugagcugcaccaagaacaacagccaccacuacaucauggugggcaacgagaccggccuggagcugacccugaccaacaccagcaucaucaaccacaaguucugcaaccugagcgacgcccacaagaagaaccuguacgaccacgcccugaugagcaucaucagcaccuuccaccugagcauccccaacuucaaccaguacgaggccaugagcugcgacuucaacggcggcaagaucagcgugcaguacaaccugagccacaccuacgccaucgacgccgccaaccacugcggcaccaucgccaacggcgugcugcagaccuucaugagaauggccuggggcggcagcuacaucgcccuggacagcggcaagggcagcugggacugcaucaugaccagcuaccaguaccugaucauccagaacaccaccugggaggaccacugccaguucagcagacccagccccaucggcuaccugggccugcugagccagagaaccagagacaucuacaucagcagaagacugcugggcaccuucaccuggacccugagcgacagcgagggcaacgagacccccggcggcuacugccugaccagauggaugcugaucgaggccgagcugaagugcuucggcaacaccgccguggccaagugcaacgagaagcacgacgaggaguucugcgacaugcugagacuguucgacuucaacaagcaggccaucagaagacugaagaccgaggcccagaugagcauccagcugaucaacaaggccgugaacgcccugaucaacgaccagcugaucaugaagaaccaccugagagacaucaugggcauccccuacugcaacuacagcaaguacugguaccugaaccacaccgugaccggcaagaccagccugcccagaugcuggcuggugagcaacggcagcuaccugaacgagacccacuucagcgacgacaucgagcagcaggccgacaacaugaucaccgagcugcugcagaaggaguacauggacagacagggcaagaccccccugggccugguggaccuguucguguucagcaccagcuucuaccugaucagcaucuuccugcaccuggugagaauccccugaggacuagucccuguucccagagcccacuuuuuuuucuuuuuuugaaauaaaauagccugucuuucagaucucaaaggcucuuuucagagccaccaaaaaaaaaaaaaaaaaaaaaaaaaaaaaaaaaaaaaaaaaaaaaaaaaaaaaaaaaaaaaaaaagaauu

SEQ ID NO: 42226 - RNA, 1619 nt, Artificial Sequence
  mRNA product Design a-2 (hSL-A64-N5) comprising derived and/or modified sequence from LASV(Lassa virus/H.sapiens-wt/NGA/2018/ISTH_0959;Clade II)__AVV65099__GPCmut13 (opt4)
aggagaguccgcucagccagguugcagaagcggcuuagcguguguccuaaucuucucucugcguguagguaggccugugccgcaaacaagcuuaccaugggccagaucaucaccuucuuccaggaggugccccacgugaucgaggaggugaugaacaucgugcugaucgcccugagccugcuggccauccugaagggcaucuacaacguggugaccugcggccuguucggccuggugagcuuccugcugcugugcggcagaagcugcagcaccaccuacaagggcguguacgagcugcagacccuggagcuggacauggccagccugaacaugaccaugccccugagcugcaccaagaacaacagccaccacuacaucauggugggcaacgagaccggccuggagcugacccugaccaacaccagcaucaucaaccacaaguucugcaaccugagcgacgcccacaagaagaaccuguacgaccacgcccugaugagcaucaucagcaccuuccaccugagcauccccaacuucaaccaguacgaggccaugagcugcgacuucaacggcggcaagaucagcgugcaguacaaccugagccacgccuacgccaucgacgccgccaaccacugcggcaccaucgccaacggcgugcugcagaccuucaugagaauggccuggggcggcagcuacaucgcccuggacagcggcaagggcagcugggacugcaucaugaccagcuaccaguaccugaucauccagaacaccaccugggaggaccacugccaguucagcagacccagccccaucggcuaccugggccugcugagccagagaaccagagacaucuacaucagcagaagacugcugggcaccuucaccuggacccugagcgacagcgagggcaacgagacccccggcggcuacugccugaccagauggaugcugaucgaggccgagcugaagugcuucggcaacaccgccguggccaagugcaacgagaagcacgacgaggaguucugcgacaugcugagacuguucgacuucaacaagcaggccaucagaagacugaagaccgaggcccagaugagcauccagcugaucaacaaggccgugaacgcccugaucaacgaccagcugaucaugaagaaccaccugagagacaucaugggcauccccuacugcaacuacagcaaguacugguaccugaaccacaccgugaccggcaagaccagccugcccagaugcuggcuggugagcaacggcagcuaccugaacgagacccacuucagcgacgacaucgagcagcaggccgacaacaugaucaccgagcugcugcagaaggaguacaucgacagacagggcaagaccccccugggccugguggaccuguucguguucagcaccagcuucuaccugaucagcaucuuccugcaccuggugaagauccccugaggacuagucccuguucccagagcccacuuuuuuuucuuuuuuugaaauaaaauagccugucuuucagaucucaaaggcucuuuucagagccaccaaaaaaaaaaaaaaaaaaaaaaaaaaaaaaaaaaaaaaaaaaaaaaaaaaaaaaaaaaaaaaaaagaauu

SEQ ID NO: 42227 - RNA, 1619 nt, Artificial Sequence
  mRNA product Design a-2 (hSL-A64-N5) comprising derived and/or modified sequence from LASV(LASV003-NIG-2008;Clade II)__AIT17580__GPCmut13 (opt4)
aggagaguccgcucagccagguugcagaagcggcuuagcguguguccuaaucuucucucugcguguagguaggccugugccgcaaacaagcuuaccaugggccagaucaucaccuucuuccaggaggugccccacgugaucgaggaggugaugaacaucgugcugaucgcccugagccugcuggccauccugaagggcaucuacaacguggccaccugcggccuguucggccuggugagcuuccugcugcugugcggcagaagcugcagcaccaccuacaagggcguguacgagcugcagacccuggagcuggacauggccagccugaacaugaccaugccccugagcugcaccaagaacaacagccaccacuacaucauggugggcaacgagaccggccuggagcugacccugaccaacaccagcaucaucaaccacaaguucugcaaccugagcgacgcccacaagaagaaccuguacgaccacgcccugaugagcaucaucagcaccuuccaccugagcauccccaacuucaaccaguacgaggccaugagcugcgacuucaacggcggcaagaucagcgugcaguacaaccugagccacaccuacgccguggacgccgccaaccacugcggcaccaucgccaacggcgugcugcagaccuucaugagaauggccuggggcggcagcuacaucgcccuggacagcggcaagggcagcugggacugcaucaugaccagcuaccaguaccugaucauccagaacaccaccugggaggaccacugccaguucagcagacccagccccaucggcuaccugggccugcugagccagagaaccagagacaucuacaucagcagaagacugcugggcaccuucaccuggacccugagcgacagcgagagcaacgagacccccggcggcuacugccugaccagauggaugcugaucgaggccgagcugaagugcuucggcaacaccgccguggccaagugcaacgagaagcacgacgaggaguucugcgacaugcugagacuguucgacuucaacaagcaggccaucagaagacugaaggccgaggcccagaugagcauccagcugaucaacaaggccgugaacgcccugaucaacgaccagcugaucaugaagaaccaccugagagacaucaugggcauccccuacugcaacuacagcaaguacugguaccugaaccacaccgugaccggcagaaccagccugcccagaugcuggcuggugagcaacggcagcuaccugaacgagacccacuucagcgacgacaucgagcagcaggccgacaacaugaucaccgagcugcugcagaaggaguacauggacagacagggcaagaccccccugggccugguggaccuguucguguucagcaccagcuucuaccugaucagcaucuuccugcaccuggugaagauccccugaggacuagucccuguucccagagcccacuuuuuuuucuuuuuuugaaauaaaauagccugucuuucagaucucaaaggcucuuuucagagccaccaaaaaaaaaaaaaaaaaaaaaaaaaaaaaaaaaaaaaaaaaaaaaaaaaaaaaaaaaaaaaaaaagaauu

SEQ ID NO: 42228 - RNA, 1619 nt, Artificial Sequence
  mRNA product Design a-2 (hSL-A64-N5) comprising derived and/or modified sequence from LASV(LASV035-NIG-2009;Clade II)__AIT17588__GPCmut13 (opt4)
aggagaguccgcucagccagguugcagaagcggcuuagcguguguccuaaucuucucucugcguguagguaggccugugccgcaaacaagcuuaccaugggccagaucaucaccuucuuccaggaggugccccacgugaucgaggaggugaugaacaucgugcugaucgcccugagccugcuggccauccugaagggcaucuacaacguggccaccugcggccuguucggccuggugagcuuccugcugcugugcggcagaagcugcagcaccaccuacaagggcguguacgagcugcagacccuggagcuggacauggccagccugaacaugaccaugccccugagcugcaccaagaacaacagccaccacuacaucauggugggcaacgagaccggccuggagcugacccugaccaacaccagcaucaucaaccacaaguucugcaaccugagcgacgcccacaagaagaaccuguacgaccacgcccugaugagcaucaucagcaccuuccaccugagcauccccaacuucaaccaguacgaggccaugagcugcgacuucaacggcggcaagaucagcgugcaguacaaccugagccacgccuacgccguggacgccgccaaccacugcggcaccaucgccaacggcgugcugcagaccuucaugagaauggccuggggcggcagcuacaucgcccuggacagcggcaagggcagcugggacugcaucaugaccagcuaccaguaccugaucauccagaacaccaccugggaggaccacugccaguucagcagacccagccccaucggcuaccugggccugcugagccagagaaccagagacaucuacaucagcagaagacugcugggcaccuucaccuggacccugagcgacagcgagggcaacgagacccccggcggcuacugccugaccagauggaugcugaucgaggccgagcugaagugcuucggcaacaccgccguggccaagugcaacgagaagcacgacgaggaguucugcgacaugcugagacuguucgacuucaacaagcaggccaucagaagacugaaggccgaggcccagaugagcauccagcugaucaacaaggccgugaacgcccugaucaacgaccagcugaucaugaagaaccaccugagagacaucaugggcauccccuacugcaacuacagcaaguacugguaccugaaccacaccgugaccggcaagaccagccugcccagaugcuggcuggugagcaacggcagcuaccugaacgagacccacuucagcgacgacaucgagcagcaggccgacaacaugaucaccgagcugcugcagaaggaguacaucgacagacagggcaagaccccccugggccugguggaccuguucguguucagcaccagcuucuaccugaucagcaucuuccugcaccuggugaagauccccugaggacuagucccuguucccagagcccacuuuuuuuucuuuuuuugaaauaaaauagccugucuuucagaucucaaaggcucuuuucagagccaccaaaaaaaaaaaaaaaaaaaaaaaaaaaaaaaaaaaaaaaaaaaaaaaaaaaaaaaaaaaaaaaaagaauu

SEQ ID NO: 42229 - RNA, 1619 nt, Artificial Sequence
  mRNA product Design a-2 (hSL-A64-N5) comprising derived and/or modified sequence from LASV(LASV1000-NIG-2009;Clade II)__AIT17782__GPCmut13 (opt4)
aggagaguccgcucagccagguugcagaagcggcuuagcguguguccuaaucuucucucugcguguagguaggccugugccgcaaacaagcuuaccaugggccagaucaucaccuucuuccaggaggugccccacgugaucgaggaggugaugaacaucgugcugaucgcccugagccugcuggccauccugaagggcaucuacaacguggccaccugcggccuguucggccuggugagcuuccugcugcugugcggcagaagcugcagcaccaccuacaagggcguguacgagcugcagacccuggagcuggacauggccagccugaacaugaccaugccccugagcugcaccaagaacaacagccaccacuacaucauggugggcaacgagaccggccuggagcugacccugaccaacaccagcaucaucaaccacaaguucugcaaccugagcgacgcccacaagaagaaccuguacgaccacgcccugaugagcaucaucagcaccuuccaccugagcauccccaacuucaaccaguacgaggccaugagcugcgacuucaacggcggcaagaucagcgugcaguacaaccugagccacaccuacgccguggacgccgccaaccacugcggcaccaucgccaacggcgugcugcagaccuucaugagaauggccuggggcggcagcuacaucgcccuggacagcggcaagggcagcugggacugcaucaugaccagcuaccaguaccugaucauccagaacaccaccugggaggaccacugccaguucagcagacccagccccaucggcuaccugggccugcugagccagagaaccagagacaucuacaucagcagaagacugcugggcaccuucaccuggacccugagcgacagcgagggcaacgagacccccggcggcuacugccugaccagauggaugcugaucgaggccgagcugaagugcuucggcaacaccgccguggccaagugcaacgagaagcacgacgaggaguucugcgacaugcugagacuguucgacuucaacaagcaggccaucaagagacugaagaccgaggcccagaugagcauccagcugaucaacaaggccgugaacgcccugaucaacgaccagcugaucaugaagaaccaccugagagacaucaugggcauccccuacugcaacuacagcaaguacugguaccugaaccacaccgugaccggcaagaccagccugcccagaugcuggcuggugagcaacggcagcuaccugaacgagacccacuucagcgacgacaucgagcagcaggccgacaacaugaucaccgagcugcugcagaaggaguacaucgacagacagggcaagaccccccugggccugguggaccuguucguguucagcaccagcuucuaccugaucagcaucuuccugcaccuggugaagauccccugaggacuagucccuguucccagagcccacuuuuuuuucuuuuuuugaaauaaaauagccugucuuucagaucucaaaggcucuuuucagagccaccaaaaaaaaaaaaaaaaaaaaaaaaaaaaaaaaaaaaaaaaaaaaaaaaaaaaaaaaaaaaaaaaagaauu

SEQ ID NO: 42230 - RNA, 1619 nt, Artificial Sequence
  mRNA product Design a-2 (hSL-A64-N5) comprising derived and/or modified sequence from LASV(LASV221-NIG-2010;Clade II)__AIT17624__GPCmut13 (opt4)
aggagaguccgcucagccagguugcagaagcggcuuagcguguguccuaaucuucucucugcguguagguaggccugugccgcaaacaagcuuaccaugggccagaucaucaccuucuuccaggaggugccccacgugaucgaggaggugaugaacaucgugcugaucgcccugagccugcuggccauccugaagggcaucuacaacguggccaccugcggccuguucggccuggugagcuuccugcugcugugcggcagaagcugcagcaccaccuacaagggcguguacgagcugcagacccuggagcuggacauggccagccugaacaugaccaugccccugagcugcaccaagaacaacagccaccacuacaucauggugggcaacgagaccggccuggagcugacccugaccaacaccagcaucaucaaccacaaguucugcaaccugagcgacgcccacaagaagaaccuguacgaccacgcccugaugagcaucaucagcaccuuccaccugagcauccccaacuucaaccaguacgaggccaugagcugcgacuucaacggcggcaagaucagcgugcaguacaaccugagccacaccuacgccaucgacgccgccaaccacugcggcaccaucgccaacggcgugcugcagaccuucaugagaauggccuggggcggcagcuacaucgcccuggacagcggcaagggcagcugggacugcaucaugaccagcuaccaguaccugaucauccagaacaccaccugggaggaccacugccaguucagcagacccagccccaucggcuaccugggccugcugagccagagaaccagagacaucuacaucagcagaagacugcugggcaccuucaccuggacccugagcgacagcgagggcaacgagacccccggcggcuacugccugaccagauggaugcugaucgaggccgagcugaagugcuucggcaacaccgccguggccaagugcaacgagaagcacgacgaggaguucugcgacaugcugagacuguucgacuucaacaagcaggccaucagaagacugaagaccgaggcccagaugagcauccagcugaucaacaaggccgugaacgcccugaucaacgaccagcugaucaugaagaaccaccugagagacaucaugggcauccccuacugcaacuacagcaaguacugguaccugaaccacaccgugaccggcaagaccagccugcccagaugcuggcuggugagcaacggcagcuaccugaacgagacccacuucagcgacgacaucgagcagcaggccgacaacaugaucaccgagaugcugcagaaggaguacauggacagacagggcaagaccccccugggccugguggaccuguucguguucagcaccagcuucuaccugaucagcaucuuccugcaccuggugaagauccccugaggacuagucccuguucccagagcccacuuuuuuuucuuuuuuugaaauaaaauagccugucuuucagaucucaaaggcucuuuucagagccaccaaaaaaaaaaaaaaaaaaaaaaaaaaaaaaaaaaaaaaaaaaaaaaaaaaaaaaaaaaaaaaaaagaauu

SEQ ID NO: 42231 - RNA, 1619 nt, Artificial Sequence
  mRNA product Design a-2 (hSL-A64-N5) comprising derived and/or modified sequence from LASV(LASV237-NIG-2010;Clade II)__AIT17638__GPCmut13 (opt4)
aggagaguccgcucagccagguugcagaagcggcuuagcguguguccuaaucuucucucugcguguagguaggccugugccgcaaacaagcuuaccaugggccagaucaucaccuucuuccaggaggugccccacgugaucgaggaggugaugaacaucgugcugaucgcccugagccugcuggccauccugaagggcaucuacaacguggccaccugcggccuguucggccuggugagcuuccugcugcugugcggcagaagcugcagcaccaccuacaagggcguguacgagcugcagacccuggagcuggacauggccagccugaacaugaccaugccccugagcugcaccaagaacaacagccaccacuacaucauggugggcaacgagaccggccuggagcugacccugaccaacaccagcaucaucaaccacaaguucugcaaccugagcgacgcccacaagaaggaccuguacgaccacgcccugaugagcaucaucagcaccuuccaccugagcauccccaacuucaaccaguacgaggccaugagcugcgacuucaacggcggcaagaucagcgugcaguacaaccugagccacaccuacgccguggacgccgccaaccacugcggcaccaucgccaacggcgugcugcagaccuucaugagaauggccuggggcggcagcuacaucgcccuggacagcggcaagggcagcugggacugcaucaugaccagcuaccaguaccugaucauccagaacaccaccugggaggaccacugccaguucagcagacccagccccaucggcuaccugggccugcugagccagagaaccagagacaucuacaucagcagaagacugcugggcaccuucaccuggacccugagcgacagcgagggcaacgagacccccggcggcuacugccugaccagauggaugcugaucgaggccgagcugaagugcuucggcaacaccgccguggccaagugcaacgagaagcacgacgaggaguucugcgacaugcugagacuguucgacuucaacaagcaggccaucagaagacugaagaccgaggcccagaugagcauccagcugaucaacaaggccgugaacgcccugaucaacgaccagcugaucaugaagaaccaccugagagacaucaugggcauccccuacugcaacuacagcaaguacugguaccugaaccacaccgugaccggcaagaccagccugcccagaugcuggcuggugagcaacggcagcuaccugaacgagacccacuucagcgacgacaucgagcagcaggccgacaacaugaucaccgagcugcugcagaaggaguacauggacagacagggcaagaccccccugggccugguggaccuguucguguucagcaccagcuucuaccugaucagcaucuuccugcaccugaucaagauccccugaggacuagucccuguucccagagcccacuuuuuuuucuuuuuuugaaauaaaauagccugucuuucagaucucaaaggcucuuuucagagccaccaaaaaaaaaaaaaaaaaaaaaaaaaaaaaaaaaaaaaaaaaaaaaaaaaaaaaaaaaaaaaaaaagaauu

SEQ ID NO: 42232 - RNA, 1619 nt, Artificial Sequence
  mRNA product Design a-2 (hSL-A64-N5) comprising derived and/or modified sequence from LASV(LASV253-NIG-2011;Clade II)__AIT17670__GPCmut13 (opt4)
aggagaguccgcucagccagguugcagaagcggcuuagcguguguccuaaucuucucucugcguguagguaggccugugccgcaaacaagcuuaccaugggccagaucaucaccuucuuccaggaggugccccacgugaucgaggaggugaugaacaucgugcugaucgcccugagccugcuggccauccugaagggcaucuacaacguggccaccugcggccuguucggccuggugagcuuccugcugcugugcggcagaagcugcagcaccaccuacaagggcguguacgagcugcagacccuggagcuggacauggccagccugaacaugaccaugccccugagcugcaccaagaacaacagccaccacuacaucauggugggcaacgagaccggccuggagcugacccugaccaacaccagcaucaucaaccacaaguucugcaaccugagcgacgcccacaagaagaaccuguacgaccacgcccugaugagcaucaucagcaccuuccaccugagcauccccaacuucaaccaguacgaggccaugagcugcgacuucaacggcggcaagaucagcgugcaguacaaccugagccacaccuacgccguggacgccgccaaccacugcggcaccaucgccaacggcgugcugcagaccuucaugagaauggccuggggcggcagcuacaucgcccuggacagcggcaagggcagcugggacugcaucaugaccagcuaccaguaccugaucauccagaacaccaccugggaggaccacugccaguucagcagacccagccccaucggcuaccugggccugcugagccagagaaccagagacaucuacaucagcagaagacugcugggcaccuucaccuggacccugagcgacagcgagggcaacgagacccccggcggcuacugccugaccagauggaugcugaucgaggccgagcugaagugcuucggcaacaccgccguggccaagugcaacgagaagcacgacgaggaguucugcgacaugcugagacuguucgacuucaacaagcaggccaucagaagacugaaggccgaggcccagaugagcauccagcugaucaacaaggccgugaacgcccugaucaacgaccagcugaucaugaagaaccaccugagagacaucaugggcauccccuacugcaacuacagcaaguacugguaccugaaccacaccgugaccggcagaaccagccugcccagaugcuggcuggugagcaacggcagcuaccugaacgagacccacuucagcgacgacaucgagcagcaggccgacaacaugaucaccgagcugcugcagaaggaguacaucgacagacagggcaagaccccccugggccugguggaccuguucguguucagcaccagcuucuaccugaucagcaucuuccugcaccuggugaagauccccugaggacuagucccuguucccagagcccacuuuuuuuucuuuuuuugaaauaaaauagccugucuuucagaucucaaaggcucuuuucagagccaccaaaaaaaaaaaaaaaaaaaaaaaaaaaaaaaaaaaaaaaaaaaaaaaaaaaaaaaaaaaaaaaaagaauu

SEQ ID NO: 42233 - RNA, 1619 nt, Artificial Sequence
  mRNA product Design a-2 (hSL-A64-N5) comprising derived and/or modified sequence from LASV(LASV254-NIG-2011;Clade II)__AIT17674__GPCmut13 (opt4)
aggagaguccgcucagccagguugcagaagcggcuuagcguguguccuaaucuucucucugcguguagguaggccugugccgcaaacaagcuuaccaugggccagaucaucaccuucuuccaggaggugccccacgugaucgaggaggugaugaacaucgugcugaucgcccugagccugcuggccauccugaagggcaucuacaacguggccaccugcggccuguucggccuggugagcuuccugcugcugugcggcagaagcugcagcaccaccuacaagggcguguacgagcugcagacccuggagcuggacaugaccaaccugaacaugaccaugccccugagcugcaccaagaacaacagccaccacuacaucauggugggcaacgagaccggccuggagcugacccugaccaacaccagcaucaucaaccacaaguucugcaaccugagcgacgcccacaagaagaaccuguacaaccacgcccugaugagcaucaucagcaccuuccaccugagcauccccaacuucaaccaguacgaggccaugagcugcgacuucaacggcggcaagaucagcgugcaguacaaccugagccacagcuacgccguggacgccgccaaccacugcggcaccaucgccaacggcgugcugcagaccuucaugagaauggccuggggcggcagcuacaucgcccuggacagcggcaagggcaacugggacugcaucaugaccagcuaccaguaccugaucauccagaacaccaccugggaggaccacugccaguucagcagacccagccccaucggcuaccugggccugcugagccagagaaccagagacaucuacaucagcagaagacugcugggcaccuucaccuggacccugagcgacagcgagggcaacgagacccccggcggcuacugccugaccagauggaugcugaucgaggccgagcugaagugcuucggcaacaccgccguggccaagugcaacgagaagcacgacgaggaguucugcgacaugcugagacuguucgacuucaacaagcaggccaucagaagacugaagaccgaggcccaggccaacauccagcugaucaacaaggccgugaacgcccugaucaacgaccagcugaucaugaagaaccaccugagagacaucaugggcauccccuacugcaacuacagcaaguacugguaccugaaccacaccgugaccggcaagaccagccugcccagaugcuggcuggugagcaacggcagcuaccugaacgagacccacuucagcgacgacaucgagcagcaggccgacaacaugaucaccgagcugcugcagaaggaguacauggacagacagggcaagaccccccugggccugguggaccuguucguguucagcaccagcuucuaccugaucagcaucuuccugcaccuggugaagauccccugaggacuagucccuguucccagagcccacuuuuuuuucuuuuuuugaaauaaaauagccugucuuucagaucucaaaggcucuuuucagagccaccaaaaaaaaaaaaaaaaaaaaaaaaaaaaaaaaaaaaaaaaaaaaaaaaaaaaaaaaaaaaaaaaagaauu

SEQ ID NO: 42234 - RNA, 1619 nt, Artificial Sequence
  mRNA product Design a-2 (hSL-A64-N5) comprising derived and/or modified sequence from LASV(Nig08-A19;Clade III)__ADU56618__GPCmut13 (opt4)
aggagaguccgcucagccagguugcagaagcggcuuagcguguguccuaaucuucucucugcguguagguaggccugugccgcaaacaagcuuaccaugggccagaucgugaccuucuuccaggaggugccccacgugaucgaggaggugaugaacaucgugcugaucgcccugagcauccuggccauccugaagggccuguacaacaucgccaccugcggccugaucggccuggugaccuuccugcugcugagcggcagaagcugcagcaugaccuacaagggcguguacgagcugcagacccuggagcugaacaugaacacccugaacaugaccaugccccugagcugcaccaagaacaacagccaccacuacaucauggugggcaacgagaccggccuggagcugacccugaccaacaccagccugcugcaccacaaguucugcaaccugagcgacgcccacaagaagaaccuguacgaccacacccugaugagcaucaucagcaccuuccaccugagcauccccaacuucaaccaguacgaggccaugagcugcgacuucaacggcggcaagaucaccgugcaguacaaccugagccacagcuacgccaucgacgccgccaaccacugcggcaccguggccaacggcgugcugcagaccuucaugagaauggccuggggcggcagcuacaucgcccuggacagcggcagaggcaagugggacugcaucaugaccagcuaccaguaccugaucauccagaacaccaccugggaggaccacugccaguucagcagacccagccccaucggcuaccugggccugcugagccagagaaccagagacaucuacaucagcagaagacugcugggcaccuucaccuggacccugagcgacagcgagggcaacgagacccccggcggcuacugccugaccagauggaugcugaucgaggccgagcugaagugcuucggcaacaccgccguggccaagugcaacgagaagcacgacgaggaguucugcgacaugcugagacuguucgacuucaacaagcaggccaucagaagacugaaggccgaggcccagaugagcauccagcugaucaacaaggccgugaacgcccugaucaacgaccagcugaucaugaagaaccaccugagagacaucaugggcauccccuacugcaacuacagcaaguacugguaccugaaccacaccagcaccggcagaaccagccugcccagaugcuggcuggugagcaacggcagcuaccugaacgagacccacuucagcgacgacaucgagcagcaggccgacaacaugaucaccgagaugcugcagaaggaguaccuggacagacagggcaagaccccccugggccugguggaccuguucguguucagcaccagcuucuaccugaucagcaucuuccugcaccuggugaagauccccugaggacuagucccuguucccagagcccacuuuuuuuucuuuuuuugaaauaaaauagccugucuuucagaucucaaaggcucuuuucagagccaccaaaaaaaaaaaaaaaaaaaaaaaaaaaaaaaaaaaaaaaaaaaaaaaaaaaaaaaaaaaaaaaaagaauu

SEQ ID NO: 42235 - RNA, 1622 nt, Artificial Sequence
  mRNA product Design a-2 (hSL-A64-N5) comprising derived and/or modified sequence from LASV(G1180-SLE-2010;Clade IV)__AIT17168__GPCmut13 (opt4)
aggagaguccgcucagccagguugcagaagcggcuuagcguguguccuaaucuucucucugcguguagguaggccugugccgcaaacaagcuuaccaugggccagaucgugaccuucuuccaggaggugccccacgugaucgaggaggugaugaacaucgugcugaucgcccugagcauccuggccgugcugaagggccuguacaacuucgccaccugcggccuggugggccugcugaccuuccugcugcugugcggcagaagcugcaccgccagcagauacaagggcguguacgagcugcagacccuggagcugaacauggagacccugaacaugaccaugccccugagcugcaccaagaacaacagccaccacuacaucauggugggcaacgagaccggccuggagcugacccugaccaacaccagcaucaucaaccacaaguucugcaaccugagcgacgcccacaagaagaaccuguacgaccacgcccugaugagcaucaucagcaccuuccaccugagcauccccaacuucaaccaguacgaggccaugagcugcgacuucaacggcggcaagaucagcgugcaguacaaccugagccacagcuacgccggcgacgccgccaaccacugcggcaccguggccaacggcgugcugcagaccuucaugagaauggccuggggcggcagcuacaucgcccuggacagcggccacggcagcugggacugcaucaugaccagcuaccaguaccugaucauccagaacaccaccugggaggaccacugccaguucagcagacccagccccaucggcuaccugggccugcugagccagagaaccagagacaucuacaucagcagaagacugcugggcaccuucaccuggacccugagcgacagcgagggcaaggacacccccggcggcuacugccugaccagauggaugcugaucgaggccgagcugaagugcuucggcaacaccgccguggccaagugcaacgagaagcacgacgaggaguucugcgacaugcugagacuguucgacuucaacaagcaggccauccagagacugaaggccgaggcccagaugagcauccagcugaucaacaaggccgugaacgcccugaucaacgaccagcugaucaugaagaaccaccugagagacaucaugggcauccccuacugcaacuacagcaaguacugguaccugaaccacaccaccaccggcaagaccagccugcccaagugcuggcuggugagcaacggcagcuaccugaacgagacccacuucagcgacgacaucgagcagcaggccgacaacaugaucaccgagaugcugcagaaggaguacauggagagacagggcaagaccccccugggccugguggaccuguucguguucagcaccagcuucuaccugaucagcaucuuccugcaccuggugaagauccccugaggacuagucccuguucccagagcccacuuuuuuuucuuuuuuugaaauaaaauagccugucuuucagaucucaaaggcucuuuucagagccaccaaaaaaaaaaaaaaaaaaaaaaaaaaaaaaaaaaaaaaaaaaaaaaaaaaaaaaaaaaaaaaaaagaauu

SEQ ID NO: 42236 - RNA, 1622 nt, Artificial Sequence
  mRNA product Design a-2 (hSL-A64-N5) comprising derived and/or modified sequence from LASV(G1442-SLE-2011;Clade IV)__AIT17180__GPCmut13 (opt4)
aggagaguccgcucagccagguugcagaagcggcuuagcguguguccuaaucuucucucugcguguagguaggccugugccgcaaacaagcuuaccaugggccagaucgugaccuucuuccaggaggugccccacgugaucgaggaggugaugaacaucgugcugaucgcccugagcauccuggccgugcugaagggccuguacaacguggccaccugcggccugaucggccuggugaccuuccugcugcugugcggcagaagcugcaccaccacccuguacaagggcguguacgagcugcagacccuggagcugaacauggagacccugaacaugaccaugccccugagcugcaccaagaacaacagccaccacuacaucagagugggcaacgagaccggccuggagcugacccugaccaacaccagcaucaucaaccacaaguucugcaaccugagcgacgcccacaagaagaaccuguacgaccacgcccugaugagcaucaucagcaccuuccaccugagcauccccaacuucaaccaguacgaggccaugagcugcgacuucaacggcggcaagaucagcgugcaguacaaccugagccacagcuacgccggcgacgccgccaaccacugcggcaccguggccaacggcgugcugcagaccuucaugagaauggccuggggcggcagcuacaucgcccuggacagcggcagaggcaacugggacugcaucaugaccagcuaccaguaccugaucauccagaacaccaccugggacgaccacugccaguucagcagacccagccccaucggcuaccugggccugcugagccagagaaccagagacguguacaucagcagaagacugcugggcaccuucaccuggacccugagcgacagcgagggcaaggacacccccggcggcuacugccugaccagauggaugcugaucgaggccgagcugaagugcuucggcaacaccgccguggccaagugcaacgagaagcacgacgaggaguucugcgacaugcugagacuguucgacuucaacaagcaggccauccagagacugaaggccgaggcccagaugagcauccagcugaucaacaaggccgugaacgcccugaucaacgaccagcugaucaugaagaaccaccugagagacaucaugggcauccccuacugcaacuacagcaaguacugguaccugaacaacaccgccaccggcaagaccagccugcccaagugcuggcugaucagcaacggcagcuaccugaacgagacccacuucagcgacgacaucgagcaggaggccgacaacaugaucaccgagaugcugcagaaggaguacauggagagacagggcaagaccccccugggccugguggaccuguucguguucagcaccagcuucuaccugaucagcaucuuccugcaccuggugaagauccccugaggacuagucccuguucccagagcccacuuuuuuuucuuuuuuugaaauaaaauagccugucuuucagaucucaaaggcucuuuucagagccaccaaaaaaaaaaaaaaaaaaaaaaaaaaaaaaaaaaaaaaaaaaaaaaaaaaaaaaaaaaaaaaaaagaauu

SEQ ID NO: 42237 - RNA, 1622 nt, Artificial Sequence
  mRNA product Design a-2 (hSL-A64-N5) comprising derived and/or modified sequence from LASV(G3010-SLE-2013;Clade IV)__AIT17344__GPCmut13 (opt4)
aggagaguccgcucagccagguugcagaagcggcuuagcguguguccuaaucuucucucugcguguagguaggccugugccgcaaacaagcuuaccaugggccagaucgugaccuucuuccaggaggugccccacgugaucgaggaggugaugaacaucgugcugaucgcccugagcauccuggccgugcugaagggccuguacaacuucgccaccugcggccuggugggccuggugaccuuccugcugcugugcggcagaagcugcaccaccagccuguacaagggcguguacgagcugcagacccuggagcugaacauggagacccugaacaugaccaugccccugagcugcaccaagaacaacagccaccacuacaucauggugggcaacgagaccggccuggagcugacccugaccaacaccagcaucaucaaccacaaguucugcaaccugagcgacgcccacaagaagaaccuguacaaccacgcccugaugagcaucaucagcaccuuccaccugagcauccccaacuucaaccaguacgaggccaugagcugcgacuucaacggcggcaagaucagcgugcaguacaaccugagccacagcuacgccggcgacgccgccagccacugcggcaccguggccaacggcgugcugcagaccuucaugagaauggccuggggcggcagcuacaucgcccuggacagcggcuacggcaagugggacugcaucaugaccagcuaccaguaccugaucauccagaacaccaccugggaggaccacugccaguucagcagacccagccccaucggcuaccugggccugcugagccagagaaccagagacaucuacaucagcagaagacugcugggcaccuucaccuggacccugagcgacagcgagggcaaggacacccccggcggcuacugccugaccagauggaugcugaucgaggccgagcugaagugcuucggcaacaccgccguggccaagugcaacgagaagcacgacgaggaguucugcgacaugcugagacuguucgacuucaacaagcaggccauccagagacugaagaccgaggcccagaugagcauccagcugaucaacaaggccgugaacgcccugaucaacgaccagcugaucaugaagaaccaccugagagacaucaugggcauccccuacugcaacuacagcaaguacugguaccugaaccacaccaccaccggcaagaccagccugcccaagugcuggcuggugagcaacggcagcuaccugaacgagacccacuucagcgacgacaucgagcagcaggccgacaacaugaucaccgagaugcugcagaaggaguacauggagagacagggcaagaccccccugggccugguggaccuguucguguucagcaccagcuucuaccugaucagcaucuuccugcaccuggugaagauccccugaggacuagucccuguucccagagcccacuuuuuuuucuuuuuuugaaauaaaauagccugucuuucagaucucaaaggcucuuuucagagccaccaaaaaaaaaaaaaaaaaaaaaaaaaaaaaaaaaaaaaaaaaaaaaaaaaaaaaaaaaaaaaaaaagaauu

SEQ ID NO: 42238 - RNA, 1622 nt, Artificial Sequence
  mRNA product Design a-2 (hSL-A64-N5) comprising derived and/or modified sequence from LASV(G502-SLE-2009;Clade IV)__AIT17126__GPCmut13 (opt4)
aggagaguccgcucagccagguugcagaagcggcuuagcguguguccuaaucuucucucugcguguagguaggccugugccgcaaacaagcuuaccaugggccagaucgugaccuucuuccaggaggugccccacgugaucgaggaggugaugaacaucgugcugaucgcccugagcauccuggccgugcugaagggccuguacaacuucgccaccugcggccuggugggccugcugaccuuccugcugcugugcggcagaagcugcaccaccggccuguacaagggcguguacgagcugcagacccuggagcugaacauggagacccugaacaugaccaugccccugagcugcaccaagaacaacagccaccacuacaucauggugggcaacgagaccggccuggagcugacccugaccaacaccagcaucaucaaccacaaguucugcaaccugagcgacgcccacaagaagaaccuguacgaccacgcccugaugagcaucaucagcaccuuccaccugagcauccccaacuucaaccaguacgaggccaugagcugcgacuucaacggcggcaagaucagcgugcaguacaaccugagccacagcuacgccggcgacgccgccgaccacugcggcaccguggccaacggcgugcugcagaccuucaugagaauggccuggggcggcagcuacaucgcccuggacagcggcagaggcagaugggacugcaucaugaccagcuaccaguaccugaucauccagaacaccaccugggaggaccacugccaguucagcagacccagccccaucggcuaccugggccugcugagccagagaaccagagacaucuacaucagcagaagacugcugggcaccuucaccuggacccugagcgacagcgagggcaaggacacccccggcggcuacugccugaccagauggaugcugaucgaggccgagcugaagugcuucggcaacaccgccguggccaagugcaacgagaagcacgacgaggaguucugcgacaugcugagacuguucgacuucaacaagcaggccauccagagacugaaggccgaggcccagaugagcauccagcugaucaacaaggccgugaacgcccugaucaacgaccagcuggugaugaagaaccaccugagagacaucaugggcauccccuacugcaacuacagcagauacugguaccugaaccacaccaccaccggcagaaccagccugcccaagugcuggcuggugagcaacggcagcuaccugaacgagacccacuucagcgacgacaucgagcagcaggccgacaacaugaucaccgagaugcugcagaaggaguacauggagagacagggcaagaccccccugggccugguggaccuguucguguucagcaccagcuucuaccugaucagcaucuuccugcaccuggugaagauccccugaggacuagucccuguucccagagcccacuuuuuuuucuuuuuuugaaauaaaauagccugucuuucagaucucaaaggcucuuuucagagccaccaaaaaaaaaaaaaaaaaaaaaaaaaaaaaaaaaaaaaaaaaaaaaaaaaaaaaaaaaaaaaaaaagaauu

SEQ ID NO: 42239 - RNA, 1622 nt, Artificial Sequence
  mRNA product Design a-2 (hSL-A64-N5) comprising derived and/or modified sequence from LASV(G733-SLE-2010;Clade IV)__AIT17154__GPCmut13 (opt4)
aggagaguccgcucagccagguugcagaagcggcuuagcguguguccuaaucuucucucugcguguagguaggccugugccgcaaacaagcuuaccaugggccagaucgugaccuucuuccaggaggugccccacgugaucgaggaggugaugaacaucgugcugaucgcccugagcauccuggccgugcugaagggccuguacaacuucgccaccugcggcaucgugggccuggugagcuuccugcugcugugcggcagaagcugcaccaccagccuguacaagggcguguacgagcugcagacccuggagcugaacauggagacccugaacaugaccaugccccugagcugcaccaagaacaacagccaccacuacaucauggugggcaacgagaccggccuggagcugacccugaccaacaccagcaucaucaaccacaaguucugcaaccugagcgacgcccacaagaagaaccuguacgaccacgcccugaugagcaucaucagcaccuuccaccugagcauccccaacuucaaccaguacgaggccaugagcugcgacuucaacggcggcaagaucagcgugcaguacaaccugagccacagcuacgccggcgacgccgccaaccacugcggcaccaucgccaacggcgugcugcagaccuucaugagaauggccuggggcggcagcuacaucgcccuggacagcggcagagacagaugggacugcaucaugaccagcuaccaguaccugaucauccagaacaccaccugggaggaccacugccaguucagcagacccagccccaucggcuaccugggccugcugagccagagaaccagagacaucuacaucagcagaagacugcugggcaccuucaccuggacccugagcgacagcgagggcaaggacacccccggcggcuacugccugaccagauggaugcugaucgaggccgagcugaagugcuucggcaacaccgccguggccaagugcaacgagaagcacgacgaggaguucugcgacaugcugagacuguucgacuucaacaagcaggccauccagagacugaaggccgaggcccagaugagcauccagcugaucaacaaggccgugaacgcccugaucaacgaccagcugaucaugaagaaccaccugagagacaucaugggcauccccuacugcaacuacagcaaguacugguaccugaaccacaccaccaccggcaagaccagccugcccaagugcuggcuggugagcaacggcagcuaccugaacgagacccacuucagcgacgacaucgagcagcaggccgacaacaugaucaccgagaugcugcagaaggaguacauggagagacagggcaagaccccccugggccugguggaccuguucguguucagcaccagcuucuaccugaucagcaucuuccugcaccuggugaagauccccugaggacuagucccuguucccagagcccacuuuuuuuucuuuuuuugaaauaaaauagccugucuuucagaucucaaaggcucuuuucagagccaccaaaaaaaaaaaaaaaaaaaaaaaaaaaaaaaaaaaaaaaaaaaaaaaaaaaaaaaaaaaaaaaaagaauu

SEQ ID NO: 42240 - RNA, 1622 nt, Artificial Sequence
  mRNA product Design a-2 (hSL-A64-N5) comprising derived and/or modified sequence from MOPV/LASV reassortant(IGS-1;Clade IV)__AFY05576__GPCmut13 (opt4)
aggagaguccgcucagccagguugcagaagcggcuuagcguguguccuaaucuucucucugcguguagguaggccugugccgcaaacaagcuuaccaugggccagaucgugaccuucuuccaggaggugccccacgugaucgaggaggugaugaacaucgugcugaucgcccugagcgugcuggccgugcugaagggccuguacaacuucgccaccugcggccuggugggccuggugaccuuccugcugcugugcggcagaagcugcaccaccagccuguacaagggcguguacgagcugcagacccuggagcugaacauggagacccugaacaugaccaugccccugagcugcaccaagaacaacagccaccacuacaucauggugggcaacgagaccggccuggagcugacccugaccaacaccagcaucaucaaccacaaguucugcaaccugagcgacgcccacaagaagaaccuguacgaccacgcccugaugagcaucaucagcaccuuccaccugagcauccccaacuucaaccaguacgaggccaugagcugcgacuucaacggcggcaagaucagcgugcaguacaaccugagccacagcuacgccggcgacgccgccaaccacugcggcaccguggccaacggcgugcugcagaccuucaugagaauggccuggggcggcagcuacaucgcccuggacagcggcagaggcaacugggacugcaucaugaccagcuaccaguaccugaucauccagaacaccaccugggaggaccacugccaguucagcagacccagccccaucggcuaccugggccugcugagccagagaaccagagacaucuacaucagcagaagacugcugggcaccuucaccuggacccugagcgacagcgagggcgaggacacccccggcggcuacugccugaccagauggaugcugaucgaggccgagcugaagugcuucggcaacaccgccguggccaagugcaacgagaagcacgacgaggaguucugcgacaugcugagacuguucgacuucaacaagcaggccauccagagacugaaggccgaggcccagaugagcauccagcugaucaacaaggccgugaacgcccugaucaacgaccagcugaucaugaagaaccaccugagagacaucaugggcauccccuacugcaacuacagcaaguacugguaccugaaccacaccaccaccggcagaaccagccugcccaagugcuggcuggugagcaacggcagcuaccugaacgagacccacuucagcgacgacaucgagcagcaggccgacaacaugaucaccgagaugcugcagaaggaguacauggagagacagggcaagaccccccugggccugguggaccuguucguguucagcaccagcuucuaccugaucagcaucuuccugcaccuggugaagauccccugaggacuagucccuguucccagagcccacuuuuuuuucuuuuuuugaaauaaaauagccugucuuucagaucucaaaggcucuuuucagagccaccaaaaaaaaaaaaaaaaaaaaaaaaaaaaaaaaaaaaaaaaaaaaaaaaaaaaaaaaaaaaaaaaagaauu

SEQ ID NO: 42241 - RNA, 1622 nt, Artificial Sequence
  mRNA product Design a-2 (hSL-A64-N5) comprising derived and/or modified sequence from LASV(LM765-SLE-2012;Clade IV)__AIT17814__GPCmut13 (opt4)
aggagaguccgcucagccagguugcagaagcggcuuagcguguguccuaaucuucucucugcguguagguaggccugugccgcaaacaagcuuaccaugggccagaucgugaccuucuuccaggaggugccccacgugaucgaggaggugaugaacaucgugcugaucgcccugagcauccuggccgugcugaagggccuguacaacuucgccaccugcggccuggugggccuggugaccuuccugcugcugugcggcagaagcugcaccaccagccuguacaagggcguguacgagcugcagacccuggagcugaacauggagacccugaacaugaccaugccccugagcugcaccaagaacaacagccaccacuacaucauggugggcaacgagaccggccuggagcugacccugaccaacaccagcaucaucgaccacaaguucugcaaccugagcgacgcccacagaaagaaccuguacgaccacgcccugaugagcaucaucagcaccuuccaccugagcauccccaacuucaaccaguacgaggccaugagcugcgacuucaacggcggcaagaucagcgugcaguacaaccugagccacagcuacgccaaggacgccgccgaccacugcggcaccguggccaacggcgugcugcagaccuucaugagaauggccuggggcggcagcuacaucgcccuggacagcggcagaggcagaugggacugcaucaugaccagcuaccaguaccugaucauccagaacaccaccugggaggaccacugccaguucagcagacccagccccaucggcuaccugggccugcugagccagagaaccagagacaucuacaucagcagaagacugcugggcaccuucaccuggacccugagcgacagcgagggcaaggacacccccggcggcuacugccugaccagauggaugcugaucgaggccgagcugaagugcuucggcaacaccgccguggccaagugcaacgagaagcacgacgaggaguucugcgacaugcugagacuguucgacuucaacaagcaggccauccagagacugaaggccgaggcccagaugagcauccagcugaucaacaaggccgugaacgcccugaucaacgaccagcugaucaugaagaaccaccugagagacaucaugggcauccccuacugcaacuacagcaaguacugguaccugaaccacaccaccaccggcaagaccagccugcccaagugcuggcuggugagcaacggcagcuaccugaacgagacccacuucagcgacgacaucgagcagcaggccgacaacaugaucaccgagaugcugcagaaggaguacauggagagacagggcaagaccccccugggccugguggaccuguucguguucagcaccagcuucuaccugaucagcaucuuccugcaccuggugaagauccccugaggacuagucccuguucccagagcccacuuuuuuuucuuuuuuugaaauaaaauagccugucuuucagaucucaaaggcucuuuucagagccaccaaaaaaaaaaaaaaaaaaaaaaaaaaaaaaaaaaaaaaaaaaaaaaaaaaaaaaaaaaaaaaaaagaauu

SEQ ID NO: 42242 - RNA, 1622 nt, Artificial Sequence
  mRNA product Design a-2 (hSL-A64-N5) comprising derived and/or modified sequence from LASV(LM776-SLE-2012;Clade IV)__AIT17824__GPCmut13 (opt4)
aggagaguccgcucagccagguugcagaagcggcuuagcguguguccuaaucuucucucugcguguagguaggccugugccgcaaacaagcuuaccaugggccagaucgugaccuucuuccaggaggugccccacgugaucgaggaggugaugaacaucgugcugaucgcccugagcauccuggccgugcugaagggccuguacaacuucgccaccugcggccuggugggccuggugaccuuccugcugcugugcggcagaagcugcaccaccagcguguacaagggcguguacgagcugcagacccuggagcugaacauggagacccugaacaugaccaugccccugagcugcaccaagaacaacagccaccacuacaucauggugggcaacgagaccggccuggagcugacccugaccaacaccagcaucaucaaccacaaguucugcaaccugagcgacgcccacaagaagaaccuguacgaccacgcccugaugagcaucaucagcaccuuccaccugagcauccccaacuucaaccaguacgaggccaugagcugcgacuucaacggcggcaagaucagcgugcaguacaaccugagccacagcuacgccggcgacgccgccaaccacugcggcaccguggccaacggcgugcugcagaccuucaugagaauggccuggggcggcagcuacaucgcccuggacagcggccacggcaagugggacugcaucaugaccagcuaccaguaccugaucauccagaacaccaccugggaggaccacugccaguucagcagacccagccccaucggcuaccugggccugcugagccagagaaccagagacaucuacaucagcagaagacugcugggcaccuucaccuggacccugagcgacagcgagggcaaggacacccccggcggcuacugccugaccagauggaugcugaucgaggccgagcugaagugcuucggcaacaccgccguggccaagugcaacgagaagcacgacgaggaguucugcgacaugcugagacuguucgacuucaacaagcaggccauccagagacugaaggccgaggcccagaugagcauccagcugaucaacaaggccgugaacgcccugaucaacgaccagcugaucaugaagaaccaccugagagacaucaugggcauccccuacugcaacuacagcaaguacugguaccugaaccacaccaccaccggcaagaccagccugcccaagugcuggcuggugagcaacggcagcuaccugaacgagacccacuucagcgacgacaucgagcagcaggccgacaacaugaucaccgagaugcugcagaaggaguacauggagagacagggcaagaccccccugggccugguggaccuguucguguucagcaccagcuucuaccugaucagcaucuuccugcaccuggugaagauccccugaggacuagucccuguucccagagcccacuuuuuuuucuuuuuuugaaauaaaauagccugucuuucagaucucaaaggcucuuuucagagccaccaaaaaaaaaaaaaaaaaaaaaaaaaaaaaaaaaaaaaaaaaaaaaaaaaaaaaaaaaaaaaaaaagaauu

SEQ ID NO: 42243 - RNA, 1622 nt, Artificial Sequence
  mRNA product Design a-2 (hSL-A64-N5) comprising derived and/or modified sequence from LASV(Mad39;Clade IV)__ANH09722__GPCmut13 (opt4)
aggagaguccgcucagccagguugcagaagcggcuuagcguguguccuaaucuucucucugcguguagguaggccugugccgcaaacaagcuuaccaugggccagaucgugaccuucuuccaggaggugccccacgugaucgaggaggugaugaacaucgugcugaucgcccugagcauccuggccgugcugaagggccuguacaacguggccaccugcggccugaucggccuggugaccuuccugcugcugugcggcagaagcugcaccaccacccuguacaagggcguguacgagcugcaggcccuggagcugaacauggagacccugaacaugaccaugccccugagcugcaccaagaacaacagccaccacuacaucagagugggcaacgagaccggccuggagcugacccugaccaacaccagccugaucaaccacaaguucugcaaccugagcgacgcccacaagaagaaccuguacgaccacgcccugaugagcaucaucagcaccuuccaccugagcauccccaacuucaaccaguacgaggccaugagcugcgacuucaacgacggcaagaucagcgugcaguacaaccugagccacaccuacgccggcgacaccgccaaccacugcggcaccguggccaacggcgugcugcagaccuucaugagaauggccuggggcggcagcuacaucgcccuggacagcggcagaggcggcugggacugcaucaugaccagcuaccaguaccugaucauccagaacaccaccugggaggaccacugccaguucagcagacccagccccaucggcuaccugggccugcugagccagagaaccagagacaucuacaucagcagaagacugcugggcaccuucaccuggacccugagcgacagcgagggcaaggacacccccggcggcuacugccugaccagauggaugcugaucgaggccgagcugaagugcuucggcaacaccgccguggccaagugcaacgagaagcacgacgaggaguucugcgacaugcugagacuguucgacuucaacaagcaggccauccagagacugaaggccgaggcccagaugagcauccagcugaucaacaaggccgugaacgcccugaucaacgaccagcugaucaugaagaaccaccugagagacaucaugggcauccccuacugcaacuacagcaaguacugguaccugaaccacaccgugaccggcaagaccagccugcccaagugcuggcuggugagcaacggcagcuaccugaacgagacccacuucagcgacgacaucgagcagcaggccgacaacaugaucaccgagaugcugcagaaggaguacauggagagacagggcaagaccccccugggccugguggaccuguucguguucagcaccagcuucuaccugaucagcaucuuccugcaccuggugaagauccccugaggacuagucccuguucccagagcccacuuuuuuuucuuuuuuugaaauaaaauagccugucuuucagaucucaaaggcucuuuucagagccaccaaaaaaaaaaaaaaaaaaaaaaaaaaaaaaaaaaaaaaaaaaaaaaaaaaaaaaaaaaaaaaaaagaauu

SEQ ID NO: 42244 - RNA, 1622 nt, Artificial Sequence
  mRNA product Design a-2 (hSL-A64-N5) comprising derived and/or modified sequence from LASV(Z0947-SLE-2011;Clade IV)__AIT17840__GPCmut13 (opt4)
aggagaguccgcucagccagguugcagaagcggcuuagcguguguccuaaucuucucucugcguguagguaggccugugccgcaaacaagcuuaccaugggccagaucgugaccuucuuccaggaggugccccacgugaucgaggaggugaugaacaucgugcugaucgcccugagcauccuggccgugcugaagggccuguacaacuucgccaccugcggccuggugggccuggugaccuuccugcugcugugcggcagaagcugcaccaucagccuguacaagggcguguacgagcugcagacccuggagcugaacauggagacccugaacaugaccaugccccugagcugcaccaagaacaacagccaccacuacaucauggugggcaacgagaccggccuggagcugacccugaccaacaccagcaucaucaaccacaaguucugcaaccugagcgacgcccacaagaagaaccuguacgaccacgcccugaugagcaucaucagcaccuuccaccugagcauccccaacuucaaccaguacgaggccaugagcugcgacuucaacggcggcaagaucagcgugcaguacaaccugagccacagcuacgccggcgacgccgccaaccacugcggcaccguggccaacggcgugcugcagaccuucaugagaauggccuggggcggcagcuacaucgcccuggacagcggcagagacagaugggacugcaucaugaccagcuaccaguaccugaucauccagaacaccaccugggaggaccacugccaguucagcagacccagccccaucggcuaccugggccugcugagccagagaaccagagacaucuacaucagcagaagacugcugggcaccuucaccuggacccugagcgacagcgagggcaaggacacccccggcggcuacugccugaccagauggaugcugaucgaggccgagcugaagugcuucggcaacaccgccguggccaagugcaacgagaagcacgacgaggaguucugcgacaugcugagacuguucgacuucaacaagcaggccauccagagacugaaggccgaggcccagaugagcauccagcugaucaacaaggccgugaacgcccugaucaacgaccagcugaucaugaagaaccaccugagagacaucaugggcauccccuacugcaacuacagcaaguacugguaccugaaccacaccaccaccggcaagaccagccugcccaagugcuggcuggugagcaacggcagcuaccugaacgagacccacuucagcgacgacaucgagcagcaggccgacaacaugaucaccgagaugcugcagaaggaguacauggagagacagggcaagaccccccugggccugguggaccuguucguguucagcaccagcuucuaccugaucagcaucuuccugcaccuggugaagauccccugaggacuagucccuguucccagagcccacuuuuuuuucuuuuuuugaaauaaaauagccugucuuucagaucucaaaggcucuuuucagagccaccaaaaaaaaaaaaaaaaaaaaaaaaaaaaaaaaaaaaaaaaaaaaaaaaaaaaaaaaaaaaaaaaagaauu

SEQ ID NO: 42245 - RNA, 1622 nt, Artificial Sequence
  mRNA product Design a-2 (hSL-A64-N5) comprising derived and/or modified sequence from LASV(Josiah;Clade IV)__NP_694870__GPCmut13 (opt5)
aggagaguccgcucagccagguugcagaagcggcuuagcguguguccuaaucuucucucugcguguagguaggccugugccgcaaacaagcuuaccaugggccagaucgugaccuucuuucaagaggucccccacguuauugaagaggugaugaacaucgugcugauugcccucagcguccuggcugugcuuaaggggcuguacaauuucgccacaugcggacucguuggccuggugacguuucuucugcucugugggagauccugcaccacaucucuguauaaaggagucuacgaacugcagacccucgagcugaacauggaaacacuuaauaugaccaugccucugagcuguacaaagaacaauucccaucacuauaucauggugggcaacgagaccgggcucgagcugacgcuuaccaauacaucuauuaucaaccauaaauucugcaaucugagcgacgcgcacaagaaaaaccucuacgaucaugcucugauguccaucauuucuaccuuucaccugagcaucccgaauuucaaccaguaugaagccauguccugugacuuuaauggaggcaagauuagcguucaguacaaccucucucacuccuaugccggcgaugcugccaaucauugcgggacaguggcuaacggaguccugcaaaccuucaugcggauggccuggggcgggagcuacaucgcgcuugacucuggacgcggcaacugggauuguauuaugacguccuaccaguaucugaucauucagaauacaaccugggaggaccacugccaguuuagcagacccucuccuaucggguaccucggacugcuuucccaacggacacgcgauaucuauauuagcagacggcugcucggcaccuucaccuggacacuguccgacucugaaggcaaggauacgcccgggggauacugucugacccgcuggaugcucaucgaggccgagcugaaaugcuuuggcaacacagcuguggccaaguguaaugaaaaacaugacgaggaguucugcgauaugcuuagacuguuugacuucaacaagcaggcuauucagcggcucaaagccgaagcgcagaugagcauccaacugauuaauaaggccgugaacgcucuuaucaaugaucagcugaucaugaagaaccaccuccgcgacauuauggggaucccuuauugcaauuacuccaaauauugguaccugaaccacaccacaaccggaagaacgagccugcccaaguguuggcucgucucuaauggcuccuaccugaacgaaacacauuucagcgacgauauugagcagcaagccgacaauaugaucaccgagaugcuucagaaagaauauauggagcggcaggggaagaccccucugggacucguugaucuguuuguguucucuaccagcuuuuaccugauuuccaucuuccuucaccucgugaaaaucccgugaggacuagucccuguucccagagcccacuuuuuuuucuuuuuuugaaauaaaauagccugucuuucagaucucaaaggcucuuuucagagccaccaaaaaaaaaaaaaaaaaaaaaaaaaaaaaaaaaaaaaaaaaaaaaaaaaaaaaaaaaaaaaaaaagaauu

SEQ ID NO: 42246 - RNA, 1619 nt, Artificial Sequence
  mRNA product Design a-2 (hSL-A64-N5) comprising derived and/or modified sequence from LASV(LP;Clade I)__AAF86701__GPCmut13 (opt5)
aggagaguccgcucagccagguugcagaagcggcuuagcguguguccuaaucuucucucugcguguagguaggccugugccgcaaacaagcuuaccaugggccagaucauuaccuucuuucaagaggugccccacgucaucgaagagguuaugaacauugugcugaucgcccucagccugcuugcuauucugaaggggcucuacaauaucgccacaugcggaaucauuggccugguggcguuccuuuuucugugugggaaauccugcucucucacgcugaagggaggcuaugaacugcagacccucgagcugaacauggaaacacuuaauaugaccaugccucugagcuguaccaaaaacuccucucaucacuacaucagagucgggaaugagacaggacucgagcugacacuuaccaacacgagcauuaucaaucauaaguucugcaaccuguccgacgcucacaaaaagaaucucuaugaucaugcccugaugucuauuaucagcaccuuucaccuguccauuccgaacuucaaucaguacgaagccaugagcugugacuuuaacggcggcaagaucucugugcaguauaaucucucccacagcuacgcuggggaugccgcugagcauugcggaacaguugccaacggcgugcugcaaaccuucaugcggauggcguggggagggcgcuauaucgcccuugacucuggcaaagggaauugggauuguauuaugacauccuaccaguaccugaucauucagaacaccacgugggaagaccacugccaguuuagcagacccucuccuaucggauaucucggccugcuuucccaacggacacgcgauauuuacaucagcagacggcugcucggcaccuucacauggacccuguccgacucugaggggaacgagacccccggaggcuauugucugacacgcuggaugcucaucgaagcugagcugaagugcuuugggaauacggccgucgcuaaauguaacgaaaagcaugaugaggaguucugcgacaugcuuagacuguuugauuucaauaaacaggccauucggcgccucaaggcggaagcccagaugagcauccagcugauuaacaaggcugugaaugcccuuaucaacgaccaacugauuaugaaaaaucaccucagagauaucaugggaaucccuuacugcaacuauuccaaguacugguaucugaaucacaccagcucuggccggacaucccugcccaaauguuggcucauuagcaacgggucuuaccugaaugagacccaguucagcgacgacaucgaacagcaagcugauaacaugauuacagagaugcuucagaaggaauacaucgagcgccagggaaaaaccccucugggccucguugacauuuuuaucuucuccacgucuuuuuaucugauuagcaucuuccugcaucuuaucaagauuccgugaggacuagucccuguucccagagcccacuuuuuuuucuuuuuuugaaauaaaauagccugucuuucagaucucaaaggcucuuuucagagccaccaaaaaaaaaaaaaaaaaaaaaaaaaaaaaaaaaaaaaaaaaaaaaaaaaaaaaaaaaaaaaaaaagaauu

SEQ ID NO: 42247 - RNA, 1619 nt, Artificial Sequence
  mRNA product Design a-2 (hSL-A64-N5) comprising derived and/or modified sequence from LASV(803213;Clade II)__AAF86703__GPCmut13 (opt5)
aggagaguccgcucagccagguugcagaagcggcuuagcguguguccuaaucuucucucugcguguagguaggccugugccgcaaacaagcuuaccaugggccagaucauuaccuucuuucaagaggugccccacgucaucgaagagguuaugaacauugugcugaucgcccucagccugcuugcuauucugaaggggaucuacaauguggccacaugcggacucuucggccugaucuccuuucuucugcucugugggagaucuugcagcgucacguauaaaggaguguacgaacugcagacccuggagcucaacauggcgaaucugaacaugacaaugccucuuuccuguaccaagaauaacucucaucacuauauuaugguuggcaaugaaacagggcuggagcucacccugacaaacaccagcaucauuaaucauaaauucugcaaccuuuccgacgcucacaagaaaaaucuguacgaucaugcccucaugucuaucauuagcacguuucaccuguccaucccgaacuucaaucaguaugaggccaugagcugugacuuuaacggaggcaagauuucugugcaguacaaucugucccacagcuucgcugucgaugccgcuaaccauugcggcaccaucgccaacggggugcuccaaacauuuaugcggauggcguggggaggcucuuauaucgcccuggacuccgggaagggaaauugggauuguauuaugaccagcuaccaguaccuuaucauucagaacacaaccugggaagaccacugccaguucucucgccccuccccuaucggcuaucuggggcuccugagccaaagaacgcgggauauuuacaucucccgcagacuucugggaacauuuaccuggacacucucugacagcgagggcaaugaagcucccggcggguauugucugacccgguggaugcugaucgaggccgagcucaaaugcuucggaaacaccgcuguugccaaguguaaugaaaaacaugaugaggaauuuugcgacaugcugcgccuuuucgauuucaacaagcaggcgauuaaaagacugaagacagaggcccagauguccauccagcucauuaauaaggcugugaacgcccugaucaaugaccaacuuauuaugaaaaaccaucugcgggauaucaugggcaucccuuacugcaauuauagccgcuacugguaucucaaccacacggucaccgggaagacaucucugcccagauguuggcugguguccaauggaagcuaccucaacgaaacccacuuuucugacgacauugagcagcaggcugauaauaugaucacagagaugcugcaaaaagaauacauggaccggcagggcaagaccccucuugggcugguggaucucuucgucuuuagcacguccuucuaucugauuucuaucuuucugcaccuuguuaaaauuccgugaggacuagucccuguucccagagcccacuuuuuuuucuuuuuuugaaauaaaauagccugucuuucagaucucaaaggcucuuuucagagccaccaaaaaaaaaaaaaaaaaaaaaaaaaaaaaaaaaaaaaaaaaaaaaaaaaaaaaaaaaaaaaaaaagaauu

SEQ ID NO: 42248 - RNA, 1619 nt, Artificial Sequence
  mRNA product Design a-2 (hSL-A64-N5) comprising derived and/or modified sequence from LASV(GA391;Clade III)__CAA36645__GPCmut13 (opt5)
aggagaguccgcucagccagguugcagaagcggcuuagcguguguccuaaucuucucucugcguguagguaggccugugccgcaaacaagcuuaccaugggccagaucgugaccuucuuucaagaggucccccacguuauugaagaggugaugaacaucgugcugauugcccucagcauccuggcuauucuuaaggggcuguacaaugucgccacaugcggacucaucggccuggugacguuccuucugcucuccgggagaucuuguagccugaucuauaaaggaaccuacgaacugcagacacucgagcugaacauggaaacccuuaauaugacaaugccucuguccugcaccaagaacaauucucaucacuauauucggguuggcaacgagacagggcucgagcugacccuuacgaauaccagcauccugaaccauaaauuuuguaaucucuccgacgcgcacaagcgcaaccuguacgaucauucucugaugagcauuaucuccacauuccaccucagcauuccgaauuuuaaccaguaugaagcuaugucuugcgacuucaauggaggcaaaaucaccgugcaguacaaccugucccacagcuuugccgucgaugccgcuggccauugugggacacuugccaauggagugcugcaaaccuucaugagaauggcuuggggcgggucuuauauugcccucgacuccggacggggcaacugggauugcaucaugacgagcuaccaguaccugaucauucagaacacaaccugggacgaucacugucaguuuucucgccccuccccuaucggguaucuuggacugcucagccaaagaacacgggacauuuacaucucccgcagacugcugggcaccuucaccuggacacucucugauagcgagggcaaugaaacgcccgggggauauugccugacccgguggaugcuuauugaggcggagcugaaguguuuuggcaacacagccguugcuaagugcaaugaaaaacaugacgaggaguucugugauaugcuccgccuguuugacuucaacaagcaggccaucagacggcuuaaaaccgaagcucagauguccauccagcugauuaauaaggccgugaacgcgcucaucaaugaucaacugauuaugaaaaaccaucugcgcgacaucauggggauuccuuacugcaauuauagcagauacugguaucucaaccacacaucuaccggaaagacgucccugccccggugcuggcuuaucagcaauggcucuuaccugaacgaaacaaaguucagcgacgauaucgagcagcaggccgacaauaugauuaccgagaugcuccaaaaagaauacaucgaucgccaggggaagaccccucugggacuggucgaccuuuuuguguucuccacaucuuuuuaucucauuagcaucuuccugcaccuggugaaaauuccgugaggacuagucccuguucccagagcccacuuuuuuuucuuuuuuugaaauaaaauagccugucuuucagaucucaaaggcucuuuucagagccaccaaaaaaaaaaaaaaaaaaaaaaaaaaaaaaaaaaaaaaaaaaaaaaaaaaaaaaaaaaaaaaaaagaauu

SEQ ID NO: 42249 - RNA, 1622 nt, Artificial Sequence
  mRNA product Design a-2 (hSL-A64-N5) comprising derived and/or modified sequence from LASV(AV;Clade V)__CCA30314__GPCmut13 (opt5)
aggagaguccgcucagccagguugcagaagcggcuuagcguguguccuaaucuucucucugcguguagguaggccugugccgcaaacaagcuuaccaugggccagaucgugaccuucuuucaagaggucccccacguuauugaagaggugaugaacaucgugcugauugcccucagcauccuggcuguccuuaaggggcuguacaauauugccacaugcggacucaucggccugaucacguuccuucugcucugugggagauccugcucuagcaaccuguauaaaggaguguacgaacugcagucccucgaccugaauauggagacccuuaacaugacaaugccucugucuuguaccaagaauaacagccaucacuauauucggguuggcaaugauacagggcucgaacugacccuuacaaacaccuccauccugaaucauaaauuuugcaaccucucugacgcgcacaagaaagaucuguacgaccaugcucugaugagcauuaucuccacguuccaccucagcauuccgaauuuuaaccaguaugaggccaugucuugugauuucaauggaggcaagaucuccgugcaguacaaccugagccacucuuaugccauugacgcugccaaucauugcggcaccgucgcuaacgggauccuucaaacauuuaugcgcauggccuggggaggcuccuacaucgcgcuggauagcgggagaggaaacugggacuguauuaugaccucuuaccaguaucucaucauucagaauacaaccugggagaaccacugccaguucucccggcccagcccuaucggcuaccuggggcuucugucccaacgcacgagagauauuuauaucucucggcgccuccugggaacauuuaccuggacacugagcgacuccgaaggcaaugccacccccggcggguacugucucaccagauggaugcugaucgaggcugaacuuaagugcuucggaaacacagccguggcuaaauguaaugagaagcaugaugaggaauuuugcgacaugcugcgccucuucgauuuuaacaaacaggccauuagccggcugaagucugaggcgcagauguccauccagcuuauuaauaaagccguuaacgcucugaucaaugaccaacucauuaugaagaaccaccugagagacaucaugggcaucccuuauugcaauuacagcaaguauugguaccugaaccacacgauuaccgggaaaacaucucuccccaaguguuggcuggugagcaauggauccuaccuuaacgaaacccauuucucugaugacaucgagcagcaggccgauaauaugauuacagaaaugcugcaaaaagaguauauggagcggcagggcaagaccccucucgggcuggucgaccuguucguguuuagcacguccuucuaccuuaucagcauuuuucuccgccuggugaaaaucccgugaggacuagucccuguucccagagcccacuuuuuuuucuuuuuuugaaauaaaauagccugucuuucagaucucaaaggcucuuuucagagccaccaaaaaaaaaaaaaaaaaaaaaaaaaaaaaaaaaaaaaaaaaaaaaaaaaaaaaaaaaaaaaaaaagaauu

SEQ ID NO: 42250 - RNA, 1619 nt, Artificial Sequence
  mRNA product Design a-2 (hSL-A64-N5) comprising derived and/or modified sequence from LASV(Togo/2016/7082;Clade VI)__AMR44577__GPCmut13 (opt5)
aggagaguccgcucagccagguugcagaagcggcuuagcguguguccuaaucuucucucugcguguagguaggccugugccgcaaacaagcuuaccaugggccagaucauuaccuucuuucaagaggugccccacgucaucgaagagguuaugaacauugugcugaucgcccucagccugcuugcuauucugaaggggguguacaaugucgccacaugcggaaucaucggccucgugacguuccuguuucuuugugggagauccugcucucugauuuauaaaggaagcuacgaacuccagacccuggagcugaacauggaaacacucaauaugaccaugccucuguccuguacaaagaacucuagccaucacuauauccggguuggcaaugagaccgggcuugagcugacacucaccaacacguccauuaucaaucauaaauucugcaaccugucugacgcgcacaagcgcaaucuuuacgaucaugcucugaugagcauucucuccaccuuucaccugagcaucccgaacuucaaucaguaugaagccaugucuugugacuuuaacggaggcaaaauuuccgugcaguacaaucugagccacgccuaugcugucgaugccgcugagcauugcggcacaguggccaacgggguucuccaaaccuucaugagaauggcguggggaggcucuuacaucgcccuggacuccgggcggggaaauugggauuguaucaugacaagcuaccaguaucuuauuauccagaacaccacgugggaagaccacugccaguuuucucgccccuccccuauuggcuaccuggggcuccugagccaaagaacacgggauaucuauauuucccgcagacuucugggaaccuucacauggacccucucugacagcgagggcaacgagacccccggcggguacugucugacacgguggaugcugaucgaagcugagcucaagugcuuuggaaauacggccguggcuaaguguaacgaaaaacaugaugaggaguucugcgacaugcugcgccuuuuugauuucaauaagcaggccauccagagacugaaauccgaagcgcagaugagcauucaacucaucaacaaggccgucaaugcucugauuaacgaccagcuuaucaugaaaaaucaucugcgggauaugaugggcauuccuuauugcaacuacucuaaguauugguaccucaaucacaccuccagcgggcgcacaucucugcccaaguguuggcuggugagcaacggauccuaccucaaugagacccacuucucugacgacaucgaacagcaagccgauaacaugaucacagagaugcugcagaaagaauauauugacagacagggcaagaccccucuugggcugguggaucucuuugucuucagcacguccuuuuaccugaucagcauuuuccugcaccuuaucaaaauuccgugaggacuagucccuguucccagagcccacuuuuuuuucuuuuuuugaaauaaaauagccugucuuucagaucucaaaggcucuuuucagagccaccaaaaaaaaaaaaaaaaaaaaaaaaaaaaaaaaaaaaaaaaaaaaaaaaaaaaaaaaaaaaaaaaagaauu

SEQ ID NO: 42251 - RNA, 1619 nt, Artificial Sequence
  mRNA product Design a-2 (hSL-A64-N5) comprising derived and/or modified sequence from LASV(KAK-428;Clade n.d. (VII))__ANH09740__GPCmut13 (opt5)
aggagaguccgcucagccagguugcagaagcggcuuagcguguguccuaaucuucucucugcguguagguaggccugugccgcaaacaagcuuaccaugggccagaucgugaccuucuuucaagaggucccccacguuauugaagaggugaugaacaucgugcugauugcccucagccugcuugcuauccugaaggggcucuacaauuucgccacaugcggagucauuggccugaucacguuucuucugcucugugggagauccugcucugcgaccuauaaaggacaguacgaacugcagacacuggagcucaacauggaaagccugaauaugaccaugccucuuuccuguacaaagaacaauucucaucacuauauccgggcuggcaacaauaccgggcuggagcucacacugaccaacacgagcauuaucucccauaaauucugcaaucuuucugacgcccacaagaaaaaccuguacgaucauacccucaugagcauuaucacaaccuuucaccuguccauuccgaauuucaaccaguaugaggccaugagcugugacuuuaauggaggcaagaucucuauucaauacaaccugucccacagcuaugcuggcgaugccgcucagcauugcgggacaguggccaauggaguucuccagaccuucaugcgcauggcguggggcgggucuuaccuggcccuugacuccggaagacggggcugggauuguaucaucagcucuuaccaguaucugauuauccaaaacacgacaugggacgaucacugccaguuuucccgccccagcccuauuggguaccucggauucgugucccagaagaccagagacaucuauauuucucggcgccugcuuggcacauuuaccuggacccugagcgauuccgaaggccaugacaugcccgggggauacugucucacaagauggaugcugaucgaggcugaucugaaaugcuucggcaacacggccgucgcuaaguguaaugaaaaacacgacgaggaguuuugcgauauguggcgccucuucgacuucaacaagcaggccauccaacggcugaaagcggaagcccagaugaauauucagcuuaucaacaaggcugugaaugcccugauuaacgaccaacucaugaugaagaaucaccugagagauaucauggggauuccuuauugcaacuacagcaaauuuugguaucuuaauaacaccacaaccggacggacaucucugccccgcuguuggcucaucuccaauggcagcuaccugaacgagacccauuucucugacgauaucgaacagcaggcugacaauaugauuacggagaugcugcagaaggaauacauggauagacaagggaaaacaccucucggacugguugaccuuuuuguguucagcaccuccuuuuaucugaucaccauuuuccuccaccuggucaagaucccgugaggacuagucccuguucccagagcccacuuuuuuuucuuuuuuugaaauaaaauagccugucuuucagaucucaaaggcucuuuucagagccaccaaaaaaaaaaaaaaaaaaaaaaaaaaaaaaaaaaaaaaaaaaaaaaaaaaaaaaaaaaaaaaaaagaauu

SEQ ID NO: 42252 - RNA, 1619 nt, Artificial Sequence; identical to SEQ ID NO: 42246
  mRNA product Design a-2 (hSL-A64-N5) comprising derived and/or modified sequence from LASV(Pinneo-NIG-1969;Clade I)__AIT17836__GPCmut13 (opt5)

SEQ ID NO: 42253 - RNA, 1619 nt, Artificial Sequence
  mRNA product Design a-2 (hSL-A64-N5) comprising derived and/or modified sequence from LASV(ISTH0009-NIG-2011;Clade II)__AIT17404__GPCmut13 (opt5)
aggagaguccgcucagccagguugcagaagcggcuuagcguguguccuaaucuucucucugcguguagguaggccugugccgcaaacaagcuuaccaugggccagaucauuaccuucuuucaagaggugccccacgucaucgaagagguuaugaacauugugcugaucgcccucagccugcuugcuauucugaaggggaucuacaauguggccacaugcggacucuucggccuggucuccuuucuucugcucugugggagaucuugcagcacgaccuauaaaggaguguacgaacugcagacacuggagcucgacauggcgucccugaacaugaccaugccucuuucuuguacaaagaauaacagccaucacuauaucaugguuggcaaugaaaccgggcuggagcucacacugaccaacacguccauuaucaaucauaaauucugcaaccuuucugaugcucacaagaaaaaucuguacgaccaugcccucaugagcauuaucuccaccuuucaccugagcauuccgaacuucaaucaguaugaggccaugucuugugauuuuaacggaggcaagaucuccgugcaguacaaucugagccacgcuuaugccgucgacgcugccaaccauugcggcacaauugcgaauggggugcuccaaaccuucaugcggauggccuggggaggcucuuacaucgcucuggauuccgggaagggaagcugggacuguaucaugacaucuuaccaguaucuuauuauccagaacaccacgugggaagaucacugccaguuuucccgccccagcccuauuggcuaccuggggcuccugucccaaagaacacgggacaucuauauuucucgcagacuucugggaaccuucacauggacccucagcgauuccgagggcaacgaaacccccggcggguacugucugacacgguggaugcugaucgaggccgagcucaaaugcuuuggaaauacggcuguugccaaguguaacgaaaaacaugacgaggaguucugcgauaugcugcgccuuuuugacuucaauaagcaggcgaucagacggcugaaaaccgaagcccagaugagcauucagcucaucaacaaggcugugaaugcccugauuaacgaucaacuuaucaugaagaaucaucugcgcgacauuaugggcaucccuuauugcaacuacucuaaauauugguaccucaaucacacagucaccgggaagacaucccugcccagauguuggcuggugagcaacggaucuuaccucaaugaaacccacuucagcgacgauaucgagcagcaggcugacaacaugauuacggagcugcuucaaaaagaauauauggaucggcagggcaagacaccucuggggcucguggaccuguuugucuucuccaccucuuuuuaccugaucagcauuuuccuucaccucaucaaaauuccgugaggacuagucccuguucccagagcccacuuuuuuuucuuuuuuugaaauaaaauagccugucuuucagaucucaaaggcucuuuucagagccaccaaaaaaaaaaaaaaaaaaaaaaaaaaaaaaaaaaaaaaaaaaaaaaaaaaaaaaaaaaaaaaaaagaauu

SEQ ID NO: 42254 - RNA, 1619 nt, Artificial Sequence
  mRNA product Design a-2 (hSL-A64-N5) comprising derived and/or modified sequence from LASV(ISTH2010-NIG-2012;Clade II)__AIT17482__GPCmut13 (opt5)
aggagaguccgcucagccagguugcagaagcggcuuagcguguguccuaaucuucucucugcguguagguaggccugugccgcaaacaagcuuaccaugggccagaucauuaccuucuuucaagaggugccccacgucaucgaagagguuaugaacauugugcugaucgcccucagccugcuugcuauucugaaggggaucuacaauguggccacaugcggacucuucggccuggucuccuuucuucugcucugugggagaucuugcagcacgaccuauaaaggaguguacgaacugcagacacuggagcucgacauggcgucccugaacaugaccaugccucuuucuuguacaaagaauaacagccaucacuauaucaugguuggcaaugaaaccgggcuggagcucacacugaccaacacguccauuaucaaucauaaauucugcaaccuuucugaugcucacaagaaaaaucuguacgaccaugcccucaugagcauuaucuccaccuuucaccugagcauuccgaacuucaaucaguaugaggccaugucuugugauuuuaacggaggcaagaucuccgugcaguacaaucugagccacgcuuaugccgucgacgcugccaaccauugcggcacaauugcgaauggggugcuccaaaccuucaugcggauggccuggggaggcucuuacaucgcucuggauuccgggaagggaagcugggacuguaucaugacaucuuaccaguaucuuauuauccagaacauuaccugggaagaucacugccaguuuucccgccccagcccuaucggcuaccuggggcuccugucccaaagaacgcgggacauuuauaucucucgcagacuucugggaacauucaccuggacacucagcgauuccgagggcaacgaaacccccggcggguacugucugacccgguggaugcugaucgaggccgagcucaaaugcuuuggaaauacagcuguugccaaguguaacgaaaaacaugacgaggaguucugcgauaugcugcgccuuuuugacuucaauaagcaggcgauuagacggcugaaaacggaagcccagaugagcauccagcucauuaacaaggcugugaaugcccugaucaacgaucaacuuauuaugaagaaucaucugcgcgacaucaugggcaucccuuauugcaacuacucuaaauauugguaccucaaucacaccgucacagggaagaccucccugcccagauguuggcuggugagcaacggaucuuaccucaaugaaacacacuucagcgacgauauugagcagcaggcugacaacaugaucaccgagcugcuucaaaaagaauauauugaucggcagggcaagacgccucuggggcucguggaccuguuugucuucuccacaucuuuuuaccugaucagcauuuuccuucaccucguuaaaaucccgugaggacuagucccuguucccagagcccacuuuuuuuucuuuuuuugaaauaaaauagccugucuuucagaucucaaaggcucuuuucagagccaccaaaaaaaaaaaaaaaaaaaaaaaaaaaaaaaaaaaaaaaaaaaaaaaaaaaaaaaaaaaaaaaaagaauu

SEQ ID NO: 42255 - RNA, 1619 nt, Artificial Sequence
  mRNA product Design a-2 (hSL-A64-N5) comprising derived and/or modified sequence from LASV(Lassa virus/H.sapiens-wt/NGA/2015/ISTH_0543;Clade II)__AVO03639__GPCmut13 (opt5)
aggagaguccgcucagccagguugcagaagcggcuuagcguguguccuaaucuucucucugcguguagguaggccugugccgcaaacaagcuuaccaugggccagaucauuaccuucuuucaagaggugccccacgucaucgaagagguuaugaacauugugcugaucgcccucagccugcuugcuauucugaaggggaucuacaauguggccacaugcggacucuucggccuggucuccuuucuucugcucugugggagaucuugcagcacgaccuauaaaggaguguacgaacugcagacacuggagcucgacauggcgaaccugaauaugaccaugccucuuuccuguacaaagaacaauucucaucacuauaucaugguuggcaacgaaaccgggcuggagcucacacugaccaauacgagcauuaucaaccauaaauucugcaaucuuuccgaugcucacaagaaaaaccuguacgaccaugcccucaugucuauuaucagcaccuuucaccuguccauuccgaauuucaaccaguaugaggccaugagcugugauuuuaauggaggcaagaucucugugcaguacaaccugucccacacauaugcugucgacgccgcuaaucauugcggcaccauugccaacggggugcuccaaacauucaugcggauggcguggggaggcagcuacaucgcccuggauucugggaagggauccugggacuguaucaugaccagcuaccaguaucuuguuauucagaacacgacaugggaagaucacugccaguuuucucgccccuccccuaucggcuaccuggggcuccugagccaaagaacccgggacauuuauaucucccgcagacuucugggaacauucaccuggacccucucugauagcgagggcaaugaaacacccggcggguacugucugacgcgguggaugcugauugaggcugagcucaaaugcuuuggaaacaccgccguggcuaaguguaaugaaaaacaugacgaggaguucugcgauaugcugcgccuuuuugacuucaacaagcaggccaucagacggcugaaaacagaagcgcagauguccauccagcucauuaauaaggccgucaacgcucugaucaaugaucaacuuauuaugaagaaccaucugcgcgacaucaugggcauuccuuauugcaauuacagcaaauauugguaccucaaccacaccgugacagggaagaccucucugcccagauguuggcugguguccaauggaagcuaccucaacgaaacgcacuucucugacgauaucgagcagcaggccgacaauaugaucacagagcugcuucaaaaagaauauauugaucggcagggcaagaccccucuggggcucgucgaccuguuuguuuucagcaccuccuuuuaccugaucucuauuuuccuucaccucgugaaaaucccgugaggacuagucccuguucccagagcccacuuuuuuuucuuuuuuugaaauaaaauagccugucuuucagaucucaaaggcucuuuucagagccaccaaaaaaaaaaaaaaaaaaaaaaaaaaaaaaaaaaaaaaaaaaaaaaaaaaaaaaaaaaaaaaaaagaauu

SEQ ID NO: 42256 - RNA, 1619 nt, Artificial Sequence
  mRNA product Design a-2 (hSL-A64-N5) comprising derived and/or modified sequence from LASV(Lassa virus/H.sapiens-wt/NGA/2016/ISTH_0009;Clade II)__AVO03571__GPCmut13 (opt5)
aggagaguccgcucagccagguugcagaagcggcuuagcguguguccuaaucuucucucugcguguagguaggccugugccgcaaacaagcuuaccaugggccagaucauuaccuucuuucaagaggugccccacgucaucgaagagguuaugaacauugugcugaucgcccucagccugcuugcuauucugaaggggaucuacaauguggccacaugcggacuccugggccuugucuccuuccugcuccugugugggagaucuugcagcacgaccuauaaaggaguguacgaacugcagacacucgagcuggacauggcgucccuuaacaugaccaugccucugucuuguacaaagaauaacagccaucacuauaucaugguuggcaaugaaaccgggcucgagcugacacuuaccaacacguccauuaucaaucauaaauuuugcaaccugucugaugcucacaagaaaaaucucuacgaccaugcccugaugagcauuaucuccaccuuccaccugagcauuccgaacuuuaaucaguaugaggccaugucuugugauuucaacggaggccggaucuccgugcaguacaaucucagccacucuuaugcugucgacgccgcuaaccauugcggcacaauugccaauggggugcugcaaaccuuuaugcgcauggcguggggaggcuccuacaucgcccuugauagcgggaagggaucuugggacuguaucaugacauccuaccaguaucugauuauccagaacaccacgugggaagaucacugccaguucagcagacccuccccuauuggcuaccucgggcugcuuucucaacggacacgcgacaucuauauuagcagacggcugcucggaaccuuuacauggacccuguccgauagcgagggcaacgaaacccccggcggguacugucugacacgcuggaugcucaucgaggcugagcugaagugcuucggaaauacggccguugcuaaauguaacgaaaagcaugacgaggaauuuugcgauaugcuuagacuguucgacuuuaauaaacaggccauccggcgccucaagaccgaggcgcagaugucuauucagcugaucaacaaagccgugaaugcucuuauuaacgaucaacugaucaugaagaaucaccucagagacauuaugggcaucccuuauugcaacuacuccaaguauugguaccugaaucacacagucaccgggaaaacaagccugccccgguguuggcucgugucuaacggaagcuaccugaaugaaacccauuucuccgacgauaucgagcagcaggccgacaacaugauuacggagcuucugcaaaaggaauauaucgaucgccagggcaaaacaccucucgggcugguggaccuguucgucuuuucuaccagcuucuaccuuauuuccaucuuucuccaccugguuaagauuccgugaggacuagucccuguucccagagcccacuuuuuuuucuuuuuuugaaauaaaauagccugucuuucagaucucaaaggcucuuuucagagccaccaaaaaaaaaaaaaaaaaaaaaaaaaaaaaaaaaaaaaaaaaaaaaaaaaaaaaaaaaaaaaaaaagaauu

SEQ ID NO: 42257 - RNA, 1619 nt, Artificial Sequence
  mRNA product Design a-2 (hSL-A64-N5) comprising derived and/or modified sequence from LASV(Lassa virus/H.sapiens-wt/NGA/2016/ISTH_0017;Clade II)__AVO03567__GPCmut13 (opt5)
aggagaguccgcucagccagguugcagaagcggcuuagcguguguccuaaucuucucucugcguguagguaggccugugccgcaaacaagcuuaccaugggccagaucauuaccuucuuucaagaggugccccacgucaucgaagagguuaugaacauugugcugaucgcccucagccugcuugcuauucugaaggggaucuacaauguggccacaugcggacucuucggccuggucuccuuucuucugcucugugggagaucuugcagcacgaccuauaaaggaguguacgaacugcagacacuggagcucgacauggcgucccugaacaugaccaugccucuuucuuguacaaagaauaacagccaucacuauaucaugguuggcaaugaaaccgggcuggagcucacacugaccaacacguccauuaucaaucauaaauucugcaaccuuucugaugcucacaagaaaaaucuguacgaccaugcccucaugagcauuaucuccaccuuucaccugagcauuccgaacuucaaucaguaugaggccaugucuugugauuuuaacggaggcaagaucuccgugcaguacaaucugagccacacauaugcuauugacgccgcuaaccauugcggcaccaucgccaaugggguccuccaaacauucaugcggauggcguggggaggcucuuacaucgcccuggauuccgggaagggaagcugggacuguauuaugaccucuuaccaguaucuuaucauucagaacacgacaugggaagaucacugccaguuuucccgccccagcccuaucggcuaccuggggcuccugucccaaagaacccgggacauuuauaucucucgcagacuucugggaacauucaccuggacccucagcgauuccgagggcaacgaaacacccggcggguacugucugacgcgguggaugcugaucgaggcugagcucaaaugcuuuggaaauaccgccguggcuaaguguaacgaaaaacaugacgaggaguucugcgauaugcugcgccuuuuugacuucaauaagcaggccauuagacggcugaaaacagaagcgcagaugagcauccagcucauuaacaaggccguuaaugcucugaucaacgaucaacuuauuaugaagaaucaucugcgcgacaucaugggcaucccuuauugcaacuacucuaaauauugguaccucaaucacaccgugacagggaagaccucccugcccagauguuggcuggucagcaacggaucuuaccucaaugaaacgcacuucagcgacgauauugagcagcaggccgacaacaugaucacagagcugcuucaaaaagaauauauggaucggcagggcaagaccccucuggggcucguggaccuguuuguguucuccaccucuuuuuaccugauuagcaucuuccuucaccucguccgcauuccgugaggacuagucccuguucccagagcccacuuuuuuuucuuuuuuugaaauaaaauagccugucuuucagaucucaaaggcucuuuucagagccaccaaaaaaaaaaaaaaaaaaaaaaaaaaaaaaaaaaaaaaaaaaaaaaaaaaaaaaaaaaaaaaaaagaauu

SEQ ID NO: 42258 - RNA, 1619 nt, Artificial Sequence
  mRNA product Design a-2 (hSL-A64-N5) comprising derived and/or modified sequence from LASV(Lassa virus/H.sapiens-wt/NGA/2018/ISTH_0959;Clade II)__AVV65099__GPCmut13 (opt5)
aggagaguccgcucagccagguugcagaagcggcuuagcguguguccuaaucuucucucugcguguagguaggccugugccgcaaacaagcuuaccaugggccagaucauuaccuucuuucaagaggugccccacgucaucgaagagguuaugaacauugugcugaucgcccucagccugcuugcuauucugaaggggaucuacaauguggucacaugcggacucuucggccugguguccuuucuucugcucugugggagaucuugcagcacgaccuauaaaggaguuuacgaacugcagacacuggagcucgacauggccucccugaacaugaccaugccucuuucuuguacaaagaauaacagccaucacuauaucauggugggcaaugaaaccgggcuggagcucacacugaccaacacguccauuaucaaucauaaauucugcaaccuuucugaugcgcacaagaaaaaucuguacgaccaugcucucaugagcauuaucuccaccuuucaccugagcauuccgaacuucaaucaguaugaggccaugucuugugauuuuaacggaggcaagaucuccguccaguacaaucugagccacgccuaugcuauugacgccgcuaaccauugcggcacaaucgccaauggggugcuccaaaccuucaugcggauggcguggggaggcucuuacaucgcccuggauuccgggaagggaagcugggacuguauuaugacaucuuaccaguaucuuaucauucagaacaccacgugggaagaucacugccaguuuucccgccccagcccuaucggcuaccuggggcuccugucccaaagaacacgggacauuuauaucucucgcagacuucugggaaccuucacauggacccucagcgauuccgagggcaacgaaacccccggcggguacugucugacacgguggaugcugaucgaggcugagcucaaaugcuuuggaaauacggccguugcuaaguguaacgaaaaacaugacgaggaguucugcgauaugcugcgccuuuuugacuucaauaagcaggccauuagacggcugaaaaccgaagcgcagaugagcauccagcucauuaacaaggccgugaaugcucugaucaacgaucaacuuauuaugaagaaucaucugcgcgacaucaugggcaucccuuauugcaacuacucuaaauauugguaccucaaucacacagucaccgggaagacaucccugcccagauguuggcuggugagcaacggaucuuaccucaaugaaacccacuucagcgacgauauugagcagcaggccgacaacaugaucacggagcugcuucaaaaagaauauauugaucggcagggcaagacaccucuggggcucguggaccuguuugucuucuccaccucuuuuuaccugaucagcauuuuccuucaccucguuaaaaucccgugaggacuagucccuguucccagagcccacuuuuuuuucuuuuuuugaaauaaaauagccugucuuucagaucucaaaggcucuuuucagagccaccaaaaaaaaaaaaaaaaaaaaaaaaaaaaaaaaaaaaaaaaaaaaaaaaaaaaaaaaaaaaaaaaagaauu

SEQ ID NO: 42259 - RNA, 1619 nt, Artificial Sequence
  mRNA product Design a-2 (hSL-A64-N5) comprising derived and/or modified sequence from LASV(LASV003-NIG-2008;Clade II)__AIT17580__GPCmut13 (opt5)
aggagaguccgcucagccagguugcagaagcggcuuagcguguguccuaaucuucucucugcguguagguaggccugugccgcaaacaagcuuaccaugggccagaucauuaccuucuuucaagaggugccccacgucaucgaagagguuaugaacauugugcugaucgcccucagccugcuugcuauucugaaggggaucuacaauguggccacaugcggacucuucggccuggucuccuuucuucugcucugugggagaucuugcagcacgaccuauaaaggaguguacgaacugcagacacuggagcucgacauggcgucccugaacaugaccaugccucuuucuuguacaaagaauaacagccaucacuauaucaugguuggcaaugaaaccgggcuggagcucacacugaccaacacguccauuaucaaucauaaauucugcaaccuuucugaugcucacaagaaaaaucuguacgaccaugcccucaugagcauuaucuccaccuuucaccugagcauuccgaacuucaaucaguaugaggccaugucuugugauuuuaacggaggcaagaucuccgugcaguacaaucugagccacacauaugcugucgacgccgcuaaccauugcggcaccauugccaauggggugcuccaaacauucaugcggauggcguggggaggcucuuacaucgcccuggauuccgggaagggaagcugggacuguaucaugaccucuuaccaguaucuuauuauccagaacacgacaugggaagaucacugccaguuuucccgccccagcccuauuggcuaccuggggcuccugucccaaagaacccgggacaucuauauuucucgcagacuucugggaacauucaccuggacccucagcgauuccgagagcaacgaaacacccggcggcuacugucugacgcgguggaugcugaucgaggcugagcucaaaugcuuugggaauaccgccguugcuaaguguaacgaaaaacaugacgaggaguucugcgauaugcugcgccuuuuugacuucaauaagcaggccaucagacggcugaaagcggaagcccagaugucuauucagcucaucaacaaggcugugaaugcccugauuaacgaucaacuuaucaugaagaaucaucugcgcgacauuaugggaaucccuuauugcaacuacuccaaauauugguaccucaaucacacagucaccggcagaacaagccugccccgguguuggcuggugucuaacgggagcuaccucaaugaaacccacuucuccgacgauaucgagcagcaggcugacaacaugauuacggagcugcuucaaaaggaauauauggaucgccagggaaaaacaccucugggccucguggaccuguuugucuucucuaccagcuuuuaccugaucuccauuuuccuucaccucguuaagaucccgugaggacuagucccuguucccagagcccacuuuuuuuucuuuuuuugaaauaaaauagccugucuuucagaucucaaaggcucuuuucagagccaccaaaaaaaaaaaaaaaaaaaaaaaaaaaaaaaaaaaaaaaaaaaaaaaaaaaaaaaaaaaaaaaaagaauu

SEQ ID NO: 42260 - RNA, 1619 nt, Artificial Sequence
  mRNA product Design a-2 (hSL-A64-N5) comprising derived and/or modified sequence from LASV(LASV035-NIG-2009;Clade II)__AIT17588__GPCmut13 (opt5)
aggagaguccgcucagccagguugcagaagcggcuuagcguguguccuaaucuucucucugcguguagguaggccugugccgcaaacaagcuuaccaugggccagaucauuaccuucuuucaagaggugccccacgucaucgaagagguuaugaacauugugcugaucgcccucagccugcuugcuauucugaaggggaucuacaauguggccacaugcggacucuucggccuggucuccuuucuucugcucugugggagaucuugcagcacgaccuauaaaggaguguacgaacugcagacacuggagcucgacauggcgucccugaacaugaccaugccucuuucuuguacaaagaauaacagccaucacuauaucaugguuggcaaugaaaccgggcuggagcucacacugaccaacacguccauuaucaaucauaaauucugcaaccuuucugaugcucacaagaaaaaucuguacgaccaugcccucaugagcauuaucuccaccuuucaccugagcauuccgaacuucaaucaguaugaggccaugucuugugauuuuaacggaggcaagaucuccgugcaguacaaucugagccacgcuuaugccgucgacgcugccaaccauugcggcacaauugcgaauggggugcuccaaaccuucaugcggauggccuggggaggcucuuacaucgcucuggauuccgggaagggaagcugggacuguaucaugacaucuuaccaguaucuuauuauccagaacaccacgugggaagaucacugccaguuuucccgccccagcccuauuggcuaccuggggcuccugucccaaagaacacgggacaucuauauuucucgcagacuucugggaaccuucacauggacccucagcgauuccgagggcaacgaaacccccggcggguacugucugacacgguggaugcugaucgaggccgagcucaaaugcuuuggaaauacggcuguugccaaguguaacgaaaaacaugacgaggaguucugcgauaugcugcgccuuuuugacuucaauaagcaggcgaucagacggcugaaagccgaagcucagaugagcauucagcucaucaacaaggccgugaaugcucugauuaacgaucaacuuaucaugaagaaucaucugcgcgacauuaugggcaucccuuauugcaacuacucuaaauauugguaccucaaucacaccgucacagggaagaccucccugcccagauguuggcuggugagcaacggaucuuaccucaaugaaacacacuucagcgacgauaucgagcagcaggccgacaacaugauuaccgagcugcuucaaaaagaauauaucgaucggcagggcaagacgccucuggggcucguggaccuguuugucuucuccacaucuuuuuaccugauuagcaucuuccuucaccucguuaaaauuccgugaggacuagucccuguucccagagcccacuuuuuuuucuuuuuuugaaauaaaauagccugucuuucagaucucaaaggcucuuuucagagccaccaaaaaaaaaaaaaaaaaaaaaaaaaaaaaaaaaaaaaaaaaaaaaaaaaaaaaaaaaaaaaaaaagaauu

SEQ ID NO: 42261 - RNA, 1619 nt, Artificial Sequence
  mRNA product Design a-2 (hSL-A64-N5) comprising derived and/or modified sequence from LASV(LASV1000-NIG-2009;Clade II)__AIT17782__GPCmut13 (opt5)
aggagaguccgcucagccagguugcagaagcggcuuagcguguguccuaaucuucucucugcguguagguaggccugugccgcaaacaagcuuaccaugggccagaucauuaccuucuuucaagaggugccccacgucaucgaagagguuaugaacauugugcugaucgcccucagccugcuugcuauucugaaggggaucuacaauguggccacaugcggacucuucggccuggucuccuuucuucugcucugugggagaucuugcagcacgaccuauaaaggaguguacgaacugcagacacuggagcucgacauggcgucccugaacaugaccaugccucuuucuuguacaaagaauaacagccaucacuauaucaugguuggcaaugaaaccgggcuggagcucacacugaccaacacguccauuaucaaucauaaauucugcaaccuuucugaugcucacaagaaaaaucuguacgaccaugcccucaugagcauuaucuccaccuuucaccugagcauuccgaacuucaaucaguaugaggccaugucuugugauuuuaacggaggcaagaucuccgugcaguacaaucugagccacacauaugcugucgacgccgcuaaccauugcggcaccauugccaauggggugcuccaaacauucaugcggauggcguggggaggcucuuacaucgcccuggauuccgggaagggaagcugggacuguaucaugaccucuuaccaguaucuuauuauccagaacacgacaugggaagaucacugccaguuuucccgccccagcccuauuggcuaccuggggcuccugucccaaagaacccgggacaucuauauuucucgcagacuucugggaacauucaccuggacccucagcgauuccgagggcaacgaaacacccggcggguacugucugacgcgguggaugcugaucgaggcugagcucaaaugcuuuggaaauaccgccguugcuaaguguaacgaaaaacaugacgaggaguucugcgauaugcugcgccuuuuugacuucaauaagcaggccaucaaaagacugaagacagaagcgcagaugagcauucagcucaucaacaaggccgugaaugcucugauuaacgaucaacuuaucaugaaaaaucaucugcgggacauuaugggcaucccuuauugcaacuacucuaaguauugguaccucaaucacaccgucacagggaaaaccucccugccccgcuguuggcuggugagcaacggaucuuaccucaaugaaacgcacuucagcgacgauaucgagcagcaggccgacaacaugauuacagagcugcuucaaaaggaauauaucgauagacagggcaaaaccccucuggggcucguggaccuguuugucuucuccaccucuuuuuaccugauuagcaucuuccuucaccucguuaagauuccgugaggacuagucccuguucccagagcccacuuuuuuuucuuuuuuugaaauaaaauagccugucuuucagaucucaaaggcucuuuucagagccaccaaaaaaaaaaaaaaaaaaaaaaaaaaaaaaaaaaaaaaaaaaaaaaaaaaaaaaaaaaaaaaaaagaauu

SEQ ID NO: 42262 - RNA, 1619 nt, Artificial Sequence
  mRNA product Design a-2 (hSL-A64-N5) comprising derived and/or modified sequence from LASV(LASV221-NIG-2010;Clade II)__AIT17624__GPCmut13 (opt5)
aggagaguccgcucagccagguugcagaagcggcuuagcguguguccuaaucuucucucugcguguagguaggccugugccgcaaacaagcuuaccaugggccagaucauuaccuucuuucaagaggugccccacgucaucgaagagguuaugaacauugugcugaucgcccucagccugcuugcuauucugaaggggaucuacaauguggccacaugcggacucuucggccuggucuccuuucuucugcucugugggagaucuugcagcacgaccuauaaaggaguguacgaacugcagacacuggagcucgacauggcgucccugaacaugaccaugccucuuucuuguacaaagaauaacagccaucacuauaucaugguuggcaaugaaaccgggcuggagcucacacugaccaacacguccauuaucaaucauaaauucugcaaccuuucugaugcucacaagaaaaaucuguacgaccaugcccucaugagcauuaucuccaccuuucaccugagcauuccgaacuucaaucaguaugaggccaugucuugugauuuuaacggaggcaagaucuccgugcaguacaaucugagccacacauaugcuauugacgccgcuaaccauugcggcaccaucgccaaugggguccuccaaacauucaugcggauggcguggggaggcucuuacaucgcccuggauuccgggaagggaagcugggacuguauuaugaccucuuaccaguaucuuaucauucagaacacgacaugggaagaucacugccaguuuucccgccccagcccuaucggcuaccuggggcuccugucccaaagaacccgggacauuuauaucucucgcagacuucugggaacauucaccuggacccucagcgauuccgagggcaacgaaacacccggcggguacugucugacgcgguggaugcugaucgaggcugagcucaaaugcuuuggaaauaccgccguggcuaaguguaacgaaaaacaugacgaggaguucugcgauaugcugcgccuuuuugacuucaauaagcaggccauuagacggcugaaaacagaagcgcagaugagcauccagcucauuaacaaggccguuaaugcucugaucaacgaucaacuuauuaugaagaaucaucugcgcgacaucaugggcaucccuuauugcaacuacucuaaauauugguaccucaaucacaccgugacagggaagaccucccugcccagauguuggcuggucagcaacggaucuuaccucaaugaaacgcacuucagcgacgauauugagcagcaggccgacaacaugaucacagagaugcugcaaaaagaauauauggaucggcagggcaagaccccucuugggcugguggaccucuuuguguucuccaccucuuuuuaccugauuagcaucuuccugcaccuugucaaaauuccgugaggacuagucccuguucccagagcccacuuuuuuuucuuuuuuugaaauaaaauagccugucuuucagaucucaaaggcucuuuucagagccaccaaaaaaaaaaaaaaaaaaaaaaaaaaaaaaaaaaaaaaaaaaaaaaaaaaaaaaaaaaaaaaaaagaauu

SEQ ID NO: 42263 - RNA, 1619 nt, Artificial Sequence
  mRNA product Design a-2 (hSL-A64-N5) comprising derived and/or modified sequence from LASV(LASV237-NIG-2010;Clade II)__AIT17638__GPCmut13 (opt5)
aggagaguccgcucagccagguugcagaagcggcuuagcguguguccuaaucuucucucugcguguagguaggccugugccgcaaacaagcuuaccaugggccagaucauuaccuucuuucaagaggugccccacgucaucgaagagguuaugaacauugugcugaucgcccucagccugcuugcuauucugaaggggaucuacaauguggccacaugcggacucuucggccuggucuccuuucuucugcucugugggagaucuugcagcacgaccuauaaaggaguguacgaacugcagacacuggagcucgacauggcgucccugaacaugaccaugccucuuucuuguacaaagaauaacagccaucacuauaucaugguuggcaaugaaaccgggcuggagcucacacugaccaacacguccauuaucaaucauaaauucugcaaccuuucugaugcucacaagaaagaccuguacgaucaugcccucaugagcauuaucuccaccuuucaccugagcauuccgaauuucaaccaguaugaggccaugucuugugacuuuaauggaggcaagaucuccgugcaguacaaccugagccacacauaugcugucgaugccgcuaaucauugcggcaccauugccaacggggugcuccaaacauucaugcggauggcguggggaggcucuuacaucgcccuggacuccgggaagggaagcugggauuguaucaugaccucuuaccaguaucuuauuauccagaauacgacaugggaagaccacugccaguuuucccgccccagcccuauuggcuaccuggggcuccugucccaaagaacccgggauaucuauauuucucgcagacuucugggaacauucaccuggacccucagcgacuccgagggcaacgaaacacccggcggguacugucugacgcgguggaugcugaucgaggcugagcucaaaugcuuuggaaacaccgccguugcuaaguguaaugaaaaacaugaugaggaguucugcgacaugcugcgccuuuuugauuucaacaagcaggccaucagacggcugaaaacagaagcgcagaugagcauucagcucaucaauaaggccgugaacgcucugauuaaugaccaacuuaucaugaagaaccaucugcgcgacauuaugggcaucccuuauugcaauuacucuaaauauugguaccucaaccacaccgucacagggaagaccucccugcccagauguuggcuggugagcaauggaucuuaccucaacgaaacgcacuucagcgaugacaucgagcagcaggccgauaauaugauuacagagcugcuucaaaaagaauauauggaccggcagggcaagaccccucuggggcucguggaucuguuugucuucuccaccucuuuuuaccugaucagcauuuuccuucaccucaucaaaauuccgugaggacuagucccuguucccagagcccacuuuuuuuucuuuuuuugaaauaaaauagccugucuuucagaucucaaaggcucuuuucagagccaccaaaaaaaaaaaaaaaaaaaaaaaaaaaaaaaaaaaaaaaaaaaaaaaaaaaaaaaaaaaaaaaaagaauu

SEQ ID NO: 42264 - RNA, 1619 nt, Artificial Sequence
  mRNA product Design a-2 (hSL-A64-N5) comprising derived and/or modified sequence from LASV(LASV253-NIG-2011;Clade II)__AIT17670__GPCmut13 (opt5)
aggagaguccgcucagccagguugcagaagcggcuuagcguguguccuaaucuucucucugcguguagguaggccugugccgcaaacaagcuuaccaugggccagaucauuaccuucuuucaagaggugccccacgucaucgaagagguuaugaacauugugcugaucgcccucagccugcuugcuauucugaaggggaucuacaauguggccacaugcggacucuucggccuggucuccuuucuucugcucugugggagaucuugcagcacgaccuauaaaggaguguacgaacugcagacacuggagcucgacauggcgucccugaacaugaccaugccucuuucuuguacaaagaauaacagccaucacuauaucaugguuggcaaugaaaccgggcuggagcucacacugaccaacacguccauuaucaaucauaaauucugcaaccuuucugaugcucacaagaaaaaucuguacgaccaugcccucaugagcauuaucuccaccuuucaccugagcauuccgaacuucaaucaguaugaggccaugucuugugauuuuaacggaggcaagaucuccgugcaguacaaucugagccacacauaugcugucgacgccgcuaaccauugcggcaccauugccaauggggugcuccaaacauucaugcggauggcguggggaggcucuuacaucgcccuggauuccgggaagggaagcugggacuguaucaugaccucuuaccaguaucuuauuauccagaacacgacaugggaagaucacugccaguuuucccgccccagcccuauuggcuaccuggggcuccugucccaaagaacccgggacaucuauauuucucgcagacuucugggaacauucaccuggacccucagcgauuccgagggcaacgaaacacccggcggguacugucugacgcgguggaugcugaucgaggcugagcucaaaugcuuuggaaauaccgccguugcuaaguguaacgaaaaacaugacgaggaguucugcgauaugcugcgccuuuuugacuucaauaagcaggccaucagacggcugaaagcggaagcccagaugagcauucagcucaucaacaaggcugugaaugcccugauuaacgaucaacuuaucaugaagaaucaucugcgcgacauuaugggcaucccuuauugcaacuacucuaaauauugguaccucaaucacacagucaccgggagaacaucccugccccgguguuggcuggugagcaacggaucuuaccucaaugaaacccacuucagcgacgauaucgagcagcaggcugacaacaugauuacggagcugcuucaaaaggaauauaucgaucgccagggcaaaacaccucuggggcucguggaccuguuugucuucuccaccucuuuuuaccugauuagcaucuuccuucaccucguuaagauuccgugaggacuagucccuguucccagagcccacuuuuuuuucuuuuuuugaaauaaaauagccugucuuucagaucucaaaggcucuuuucagagccaccaaaaaaaaaaaaaaaaaaaaaaaaaaaaaaaaaaaaaaaaaaaaaaaaaaaaaaaaaaaaaaaaagaauu

SEQ ID NO: 42265 - RNA, 1619 nt, Artificial Sequence
  mRNA product Design a-2 (hSL-A64-N5) comprising derived and/or modified sequence from LASV(LASV254-NIG-2011;Clade II)__AIT17674__GPCmut13 (opt5)
aggagaguccgcucagccagguugcagaagcggcuuagcguguguccuaaucuucucucugcguguagguaggccugugccgcaaacaagcuuaccaugggccagaucauuaccuucuuucaagaggugccccacgucaucgaagagguuaugaacauugugcugaucgcccucagccugcuugcuauucugaaggggaucuacaauguggccacaugcggacucuucggccuggucuccuuucuucugcucugugggagaucuugcagcacgaccuauaaaggaguguacgaacugcagacacuggagcucgacaugaccaaccugaauaugacaaugccucuuuccuguaccaagaacaauucucaucacuauaucaugguuggcaacgaaacagggcuggagcucacccugacgaauaccagcauuaucaaccauaaauucugcaaucuuuccgaugcgcacaagaaaaaccuguacaaucaugcucucaugucuauuaucagcacauuucaccuguccauuccgaacuucaaucaguaugaggccaugagcugugacuuuaacggaggcaagaucucugugcaguacaaucugucccacagcuaugccgucgaugcugccaaccauugcggcaccauugcuaacggggugcuccaaacauucaugcggauggccuggggaggcucuuacaucgcgcuggacuccgggaagggaaauugggauuguaucaugaccagcuaccaguaucuuauuauccagaacacgacaugggaagaccacugccaguuuucucgccccuccccuauuggcuaccuggggcuccugagccaaagaacccgggauaucuauauuucccgcagacuucugggaacauucaccuggacccucucugacagcgagggcaaugaaacacccggcggguacugucugacgcgguggaugcugaucgaggccgagcucaaaugcuuuggaaacaccgcuguugccaaguguaaugaaaaacaugaugaggaguucugcgacaugcugcgccuuuuugauuucaacaagcaggcuaucagacggcugaaaacagaagcccaggcgaauauucagcucaucaacaaggccgugaaugcucugauuaacgaccaacuuaucaugaagaaucaucugcgcgauauuaugggcaucccuuauugcaacuacuccaaauauugguaccucaaucacaccgucacagggaagaccagccugcccagauguuggcuggugucuaacggauccuaccucaaugaaacgcacuucagcgacgacaucgagcagcaggccgauaacaugauuacagagcugcuucaaaaagaauauauggaccggcagggcaagaccccucuggggcucguggaucuguuugucuucucuaccagcuuuuaccugaucuccauuuuccuucaccucguuaaaaucccgugaggacuagucccuguucccagagcccacuuuuuuuucuuuuuuugaaauaaaauagccugucuuucagaucucaaaggcucuuuucagagccaccaaaaaaaaaaaaaaaaaaaaaaaaaaaaaaaaaaaaaaaaaaaaaaaaaaaaaaaaaaaaaaaaagaauu

SEQ ID NO: 42266 - RNA, 1619 nt, Artificial Sequence
  mRNA product Design a-2 (hSL-A64-N5) comprising derived and/or modified sequence from LASV(Nig08-A19;Clade III)__ADU56618__GPCmut13 (opt5)
aggagaguccgcucagccagguugcagaagcggcuuagcguguguccuaaucuucucucugcguguagguaggccugugccgcaaacaagcuuaccaugggccagaucgugaccuucuuucaagaggucccccacguuauugaagaggugaugaacaucgugcugauugcccucagcauccuggcuauucuuaaggggcuguacaauaucgccacaugcggacucaucggccuggucacguuccuucugcucuccgggagaucuuguagcaugaccuauaaaggaguguacgaacugcagacacuggagcucaacaugaauacccugaacaugacaaugccucuuuccugcaccaagaauaacucucaucacuauauuaugguuggcaaugaaacagggcuggagcucacccugacgaacaccagccuucugcaucacaaauuuuguaaucucuccgacgcgcauaagaaaaaccuguacgaucacacacugaugucuaucauuagcaccuuccaccucuccaucccgaauuuuaaccaguaugaggcuaugagcugcgacuucaauggaggcaagauuacagugcaguacaaccugucucauuccuaugccaucgaugccgcuaaucacuguggcaccgucgccaacggggugcuucaaacguuuaugcggauggcuuggggaggcagcuacauugcccuggacucugggcgcggaaagugggauugcaucaugacauccuaccaguaucucaucauucagaacaccacaugggaagaccauugucaguucagcagacccucuccuaucggcuaccuggggcuucugucccaacggacccgcgauauuuauaucagcagacggcuccugggaaccuuuacauggacgcuguccgacucugagggcaaugaaacccccggcggguacugccucacacgcuggaugcugauugaggcggagcuuaaauguuucggaaacaccgccguugcuaagugcaaugaaaaacacgaugaggaauuuugugacaugcugagacucuucgauuuuaacaagcaggccauccggcgccugaaagcugaggcccagaugagcauccagcuuauuaauaaggcggugaacgcccugaucaaugaccaacucauuaugaagaaccaccugagagauaucaugggcauuccuuauugcaauuacuccaaauauugguaccugaaccauacaagcaccgggcggacgucucucccccgcugcuggcuggucuccaauggaagcuaccuuaacgaaacacacuucucugacgacaucgagcagcaggcugauaauaugaucaccgagaugcugcaaaaggaauaucucgacagacagggcaaaaccccucuggggcugguggaucuuuucguguuuagcacauccuucuaccucauuucuaucuuucugcaucuggucaagauuccgugaggacuagucccuguucccagagcccacuuuuuuuucuuuuuuugaaauaaaauagccugucuuucagaucucaaaggcucuuuucagagccaccaaaaaaaaaaaaaaaaaaaaaaaaaaaaaaaaaaaaaaaaaaaaaaaaaaaaaaaaaaaaaaaaagaauu

SEQ ID NO: 42267 - RNA, 1622 nt, Artificial Sequence
  mRNA product Design a-2 (hSL-A64-N5) comprising derived and/or modified sequence from LASV(G1180-SLE-2010;Clade IV)__AIT17168__GPCmut13 (opt5)
aggagaguccgcucagccagguugcagaagcggcuuagcguguguccuaaucuucucucugcguguagguaggccugugccgcaaacaagcuuaccaugggccagaucgugaccuucuuucaagaggucccccacguuauugaagaggugaugaacaucgugcugauugcccucagcauccuggcuguccuuaaggggcuguacaauuucgccacaugcggacucgugggccugcuuacguuucugcuccugugugggagauccugcaccgcgucucgguauaaaggaguuuacgaacugcagacacucgagcugaacauggaaacccuuaauaugacaaugccucugagcuguaccaagaacaauucccaucacuauauuauggugggcaacgagacagggcucgagcugacccuuacgaauaccucuaucaucaaccauaaauucugcaaucugagcgacgcucacaagaaaaaccucuacgaucaugcccugauguccauuaucucuacauuucaccugagcauuccgaauuucaaccaguaugaagccauguccugugacuuuaauggaggcaagaucagcguccaguacaaccucucucacuccuaugcuggcgaugccgcuaaucauugcgggaccguggccaacggaguucugcaaacauucaugcgcauggcguggggcgggagcuacauugcccuugacucuggacacggcuccugggauuguaucaugaccagcuaccaguaucugauuauccagaacacgacaugggaggaccauugccaguuuucuagacccuccccuaucggguaccucggacugcuuagccaacggacccgcgauauuuauaucuccagacggcugcucggcacauucaccuggacccugucugacagcgaaggcaaggauacacccgggggauacugucugacgcgcuggaugcucauugaggcugagcugaaaugcuuuggcaauaccgccguggcuaaguguaacgaaaaacacgacgaggaguucugcgauaugcuuagacuguuugacuucaauaagcaggccauccagcggcucaaagcggaagcccagauguccauucaacugaucaacaaggcugucaaugcccuuaucaacgaucagcugauuaugaagaaucaccuccgcgacaucauggggauuccuuauugcaacuacagcaaauauugguaccugaaucauacaaccacaggaaagaccucucugcccaaauguuggcucguguccaacggcagcuaccugaaugaaacgcacuucucugacgauaucgagcagcaagcugacaacaugauuacagagaugcuucagaaggaauauauggagagacaggggaaaaccccucugggacucguggaucuguuugucuucagcaccuccuuuuaccugaucucuaucuuccuucaucucguuaagauuccgugaggacuagucccuguucccagagcccacuuuuuuuucuuuuuuugaaauaaaauagccugucuuucagaucucaaaggcucuuuucagagccaccaaaaaaaaaaaaaaaaaaaaaaaaaaaaaaaaaaaaaaaaaaaaaaaaaaaaaaaaaaaaaaaaagaauu

SEQ ID NO: 42268 - RNA, 1622 nt, Artificial Sequence
  mRNA product Design a-2 (hSL-A64-N5) comprising derived and/or modified sequence from LASV(G1442-SLE-2011;Clade IV)__AIT17180__GPCmut13 (opt5)
aggagaguccgcucagccagguugcagaagcggcuuagcguguguccuaaucuucucucugcguguagguaggccugugccgcaaacaagcuuaccaugggccagaucgugaccuucuuucaagaggucccccacguuauugaagaggugaugaacaucgugcugauugcccucagcauccuggcuguccuuaaggggcuguacaauguggccacaugcggacucauuggccugguuacguuccuucugcucugugggagauccugcaccacaacccuguauaaaggaguguacgaacugcagacacucgagcugaacauggaaacccuuaauaugacaaugccucugucuuguaccaagaacaauagccaucacuauauccgggucggcaacgagacggggcucgagcugacccuuacaaauaccuccaucauuaaccauaaauuuugcaaucugucugacgcgcacaagaaaaaccucuacgaucaugcucugaugagcaucauuuccacauuccaccugucuaucccgaauuuuaaccaguaugaagccaugagcugugacuucaauggaggcaagauuuccgugcaguacaaccucagccacucuuaugccggcgaugcugccaaucauugcgggaccguugcuaacggagugcugcaaacguuuaugcgcauggccuggggcggguccuacaucgcgcuugacagcggaagaggcaacugggauuguauuaugacaucuuaccaguaucugaucauccagaauaccacaugggacgaucacugccaguucucccggcccagcccuauuggguaccucggacugcuuucucaacgcaccagagacgucuauaucucccggcgccugcucggcaccuuuacauggacgcugagcgauuccgagggcaaggacacccccgggggauacugucugacaagauggaugcucauugaagccgagcugaaaugcuucggcaacaccgcuguggccaaguguaaugagaaacaugaugaagaguuuugcgacaugcuucggcuguucgauuuuaacaagcaggcuauccagcgccucaaagccgaagcgcagaugucuauucaacugaucaauaaggccgugaacgcucuuaucaaugaccagcugauuaugaagaaccaccucagagacaucauggggauuccuuauugcaauuacagcaaauauugguaccugaacaauacagccaccggaaagacgucccugcccaaauguuggcucaucagcaacggcucuuaccugaaugagacacacuucuccgaugacauugaacaggaggcugauaacaugaucaccgagaugcuucaaaaggaauauauggagcggcaggggaaaaccccucugggacucgucgaccuguucguuuuuagcacaucuuucuaccugaucagcauuuuucuucaucucgugaagaucccgugaggacuagucccuguucccagagcccacuuuuuuuucuuuuuuugaaauaaaauagccugucuuucagaucucaaaggcucuuuucagagccaccaaaaaaaaaaaaaaaaaaaaaaaaaaaaaaaaaaaaaaaaaaaaaaaaaaaaaaaaaaaaaaaaagaauu

SEQ ID NO: 42269 - RNA, 1622 nt, Artificial Sequence
  mRNA product Design a-2 (hSL-A64-N5) comprising derived and/or modified sequence from LASV(G3010-SLE-2013;Clade IV)__AIT17344__GPCmut13 (opt5)
aggagaguccgcucagccagguugcagaagcggcuuagcguguguccuaaucuucucucugcguguagguaggccugugccgcaaacaagcuuaccaugggccagaucgugaccuucuuucaagaggucccccacguuauugaagaggugaugaacaucgugcugauugcccucagcauccuggcuguccuuaaggggcuguacaauuucgccacaugcggacucgugggccugguuacguuucuucugcucugugggagauccugcaccacaucucuguauaaaggaguguacgaacugcagacccucgagcugaacauggaaacacuuaauaugaccaugccucugagcuguacaaagaacaauucccaucacuauauuauggucggcaacgagaccgggcucgagcugacgcuuaccaauacaucuaucaucaaccauaaauucugcaaucugagcgacgcgcacaagaaaaaccucuacaaucaugcucugauguccauuaucucuaccuuucaccugagcauuccgaacuucaaucaguaugaagccauguccugugauuuuaacggaggcaagaucagcgugcaguacaaucucucucacuccuaugccggcgacgcugccagccauugcgggacaguugcuaacggagugcugcaaaccuucaugcggauggccuggggcgggucuuacauugcgcuugauuccggauacggcaagugggacuguaucaugacgagcuaucaguaccugauuauccagaacacaaccugggaggaucacugccaguuuucucgccccuccccuaucggguaucucggacugcuuagccaaagaacacgggacauuuacaucucccgcagacugcucggcaccuucaccuggacacugucugauagcgaaggcaaagacacgcccgggggauauugucugacccgguggaugcucauugaggccgagcugaagugcuuuggcaauacagcugucgccaaauguaacgaaaagcaugaugaggaguucugcgacaugcuucgccuguuugauuucaauaaacaggcuauccagagacucaagaccgaagcccagauguccauucaacugaucaacaaggcggugaaugcccuuaucaacgaccagcugauuaugaaaaaucaccuccgggauaucauggggauuccuuacugcaacuauagcaaguacugguaccugaaucacacaaccacgggaaaaacaucucugcccaaguguuggcucguguccaacggcagcuaucugaaugaaacccauuucucugacgacaucgagcagcaagcugauaacaugauuaccgagaugcuucagaaagaauacauggagcgccaggggaagacaccucugggacucgucgaccuguuuguuuucagcaccuccuuuuaucugaucucuaucuuccuucaccucgugaaaauuccgugaggacuagucccuguucccagagcccacuuuuuuuucuuuuuuugaaauaaaauagccugucuuucagaucucaaaggcucuuuucagagccaccaaaaaaaaaaaaaaaaaaaaaaaaaaaaaaaaaaaaaaaaaaaaaaaaaaaaaaaaaaaaaaaaagaauu

SEQ ID NO: 42270 - RNA, 1622 nt, Artificial Sequence
  mRNA product Design a-2 (hSL-A64-N5) comprising derived and/or modified sequence from LASV(G502-SLE-2009;Clade IV)__AIT17126__GPCmut13 (opt5)
aggagaguccgcucagccagguugcagaagcggcuuagcguguguccuaaucuucucucugcguguagguaggccugugccgcaaacaagcuuaccaugggccagaucgugaccuucuuucaagaggucccccacguuauugaagaggugaugaacaucgugcugauugcccucagcauccuggcuguccuuaaggggcuguacaauuucgccacaugcggacucgugggccugcuuacguuucugcuccugugugggagauccugcaccacaggacuguauaaaggcguuuacgaacuccagacccuggagcuuaacauggaaacacugaauaugaccaugccucucucuuguacaaagaacaauagccaucacuauauuaugguggggaacgagaccggacuggagcuuacgcugaccaauacauccaucaucaaccauaaauucugcaaucucucugacgcgcacaagaaaaaccuguacgaucaugcucugaugagcauuaucuccaccuuucaccucucuauuccgaauuucaaccaguaugaagccaugagcugugacuuuaauggcggcaagaucuccguccaguacaaccugagccacucuuaugccggggaugcugccgaccauugcggaacaguggcuaauggcguucuucaaaccuucaugcggauggccuggggaggguccuacauugcgcuggauagcggccgcgggagaugggacuguaucaugacgucuuaccaguaucucauuauccagaacacaaccugggaggaucacugccaguuuucccggcccagcccuaucggauaccugggccuucugucucaacgcacaagagacauuuauaucucccggcgccuccugggcaccuucaccuggacacugagcgauuccgaagggaaggacacgcccggaggcuacugucucaccagauggaugcugauugaggccgagcuuaaaugcuuugggaacacagcuguggccaaguguaaugaaaaacaugaugaggaguucugcgacaugcugcggcucuuugauuucaacaagcaggcuauccagcgccugaaagccgaagcgcagaugucuauucaacuuaucaauaaggccgucaacgcucugaucaaugaccagcucgugaugaagaaccaccugagagacauuaugggaaucccuuauugcaauuacagccgguauugguaccugaaccacaccacaaccggccgcacgucccuccccaaauguuggcuggugagcaaugggucuuaccuuaacgaaacacauuucuccgaugacauugagcagcaagccgauaauaugaucaccgagaugcugcagaaggaauauauggagagacagggaaaaaccccucucggccuggucgaccuguuuguuuucagcacaucuuuuuaccuuauuagcaucuuccuccaccuggugaagaucccgugaggacuagucccuguucccagagcccacuuuuuuuucuuuuuuugaaauaaaauagccugucuuucagaucucaaaggcucuuuucagagccaccaaaaaaaaaaaaaaaaaaaaaaaaaaaaaaaaaaaaaaaaaaaaaaaaaaaaaaaaaaaaaaaaagaauu

SEQ ID NO: 42271 - RNA, 1622 nt, Artificial Sequence
  mRNA product Design a-2 (hSL-A64-N5) comprising derived and/or modified sequence from LASV(G733-SLE-2010;Clade IV)__AIT17154__GPCmut13 (opt5)
aggagaguccgcucagccagguugcagaagcggcuuagcguguguccuaaucuucucucugcguguagguaggccugugccgcaaacaagcuuaccaugggccagaucgugaccuucuuucaagaggucccccacguuauugaagaggugaugaacaucgugcugauugcccucagcauccuggcuguccuuaaggggcuguacaauuucgccacaugcggaauugugggccucguuuccuuucugcuucugugugggagaucuugcacgaccagccucuauaaaggaguguacgaacugcagacacuggagcucaacauggaaacccugaauaugacaaugccucuuuccuguaccaagaacaauucucaucacuauaucauggucggcaacgagacagggcuggagcucacccugacgaauaccagcaucauuaaccauaaauucugcaaucuuuccgacgcgcacaagaaaaaccuguacgaucaugcucucaugucuaucauuagcacauuucaccuguccaucccgaauuucaaccaguaugaagccaugagcugugacuuuaauggaggcaagauuucugugcaguacaaccugucccacagcuaugccggcgaugcugccaaucauugcgggaccaucgcuaacggaguucuccaaacauucaugcggauggccuggggcgggucuuacauugcgcuggacuccggacgcgauagaugggacuguaucaugaccagcuaccaguaucuuaucauucagaacacgacaugggaggaucacugccaguuuucucggcccuccccuaucggcuaccuggggcuccugagccaacgcaccagagacauuuauaucucccggcgccuucugggaacauucaccuggacccucucugauagcgaaggcaaggacacacccggcggguacugucugacgagauggaugcugauugaggccgagcucaaaugcuuuggaaauaccgcuguggccaaguguaacgaaaaacaugaugaggaguucugcgacaugcugcggcuuuuugauuucaauaagcaggcuauccagcgccugaaagccgaagcgcagauguccauccaacucauuaacaaggccgucaaugcucugaucaacgaccagcuuauuaugaagaaucaccugagagacaucaugggcauuccuuauugcaacuacagcaaauauugguaccucaaucacacaaccacagggaagaccucucugcccaaauguuggcugguguccaacggaagcuaccucaaugaaacgcauuucucugaugacaucgagcagcaagccgauaacaugaucacagagaugcugcagaaggaauauauggagcggcagggcaaaaccccucuugggcugguggaccucuuugucuucagcaccuccuuuuaccugauuucuaucuuccugcaccuuguuaagauuccgugaggacuagucccuguucccagagcccacuuuuuuuucuuuuuuugaaauaaaauagccugucuuucagaucucaaaggcucuuuucagagccaccaaaaaaaaaaaaaaaaaaaaaaaaaaaaaaaaaaaaaaaaaaaaaaaaaaaaaaaaaaaaaaaaagaauu

SEQ ID NO: 42272 - RNA, 1622 nt, Artificial Sequence
  mRNA product Design a-2 (hSL-A64-N5) comprising derived and/or modified sequence from MOPV/LASV reassortant(IGS-1;Clade IV)__AFY05576__GPCmut13 (opt5)
aggagaguccgcucagccagguugcagaagcggcuuagcguguguccuaaucuucucucugcguguagguaggccugugccgcaaacaagcuuaccaugggccagaucgugaccuucuuucaagaggucccccacguuauugaagaggugaugaacaucgugcugauugcccucagcguccuggcugugcuuaaggggcuguacaauuucgccacaugcggacucguuggccuggugacguuucuucugcucugugggagauccugcaccacaucucuguauaaaggagucuacgaacugcagacccucgagcugaacauggaaacacuuaauaugaccaugccucugagcuguacaaagaacaauucccaucacuauaucauggugggcaacgagaccgggcucgagcugacgcuuaccaauacaucuauuaucaaccauaaauucugcaaucugagcgacgcgcacaagaaaaaccucuacgaucaugcucugauguccaucauuucuaccuuucaccugagcaucccgaauuucaaccaguaugaagccauguccugugacuuuaauggaggcaagauuagcguucaguacaaccucucucacuccuaugccggcgaugcugccaaucauugcgggacaguggcuaacggaguccugcaaaccuucaugcggauggccuggggcgggagcuacaucgcgcuugacucuggacgcggcaacugggauuguauuaugacguccuaccaguaucugaucauucagaauacaaccugggaggaccacugccaguuuagcagacccucuccuaucggguaccucggacugcuuucccaacggacacgcgauaucuauauuagcagacggcugcucggcaccuucaccuggacacuguccgacucugaaggcgaggauacgcccgggggauacugucugacccgcuggaugcucaucgaggccgaacugaagugcuuuggcaacacagcuguggccaaauguaaugagaagcaugacgaagaguucugcgauaugcuuagacuguuugacuucaacaaacaggcuauucagcggcucaaggccgaagcgcagaugagcauccaacugauuaauaaagccgugaacgcucuuaucaaugaucagcugaucaugaagaaccaccuccgcgacauuauggggaucccuuauugcaauuacuccaaguauugguaccugaaccacaccacaaccggaagaacgagccugcccaaauguuggcucgucucuaauggcuccuaccugaacgagacacauuucagcgacgauauugagcagcaagccgacaauaugaucaccgaaaugcuucagaaggaguauauggaacggcaggggaaaaccccucugggacucguugaucuguuuguguucucuaccagcuuuuaccugauuuccaucuuccuucaccucgugaagaucccgugaggacuagucccuguucccagagcccacuuuuuuuucuuuuuuugaaauaaaauagccugucuuucagaucucaaaggcucuuuucagagccaccaaaaaaaaaaaaaaaaaaaaaaaaaaaaaaaaaaaaaaaaaaaaaaaaaaaaaaaaaaaaaaaaagaauu

SEQ ID NO: 42273 - RNA, 1622 nt, Artificial Sequence
  mRNA product Design a-2 (hSL-A64-N5) comprising derived and/or modified sequence from LASV(LM765-SLE-2012;Clade IV)__AIT17814__GPCmut13 (opt5)
aggagaguccgcucagccagguugcagaagcggcuuagcguguguccuaaucuucucucugcguguagguaggccugugccgcaaacaagcuuaccaugggccagaucgugaccuucuuucaagaggucccccacguuauugaagaggugaugaacaucgugcugauugcccucagcauccuggcuguccuuaaggggcuguacaauuucgccacaugcggacucgugggccugguuacguuucuucugcucugugggagauccugcaccacaucucuguauaaaggaguguacgaacugcagacccucgagcugaacauggaaacacuuaauaugaccaugccucugagcuguacaaagaacaauucccaucacuauauuauggucggcaacgagaccgggcucgagcugacgcuuaccaauacaucuaucaucgaccauaaauucugcaaccugagcgaugcgcaccggaagaaucucuacgaccaugcucugauguccauuaucucuaccuuucaccugagcauuccgaacuucaaucaguaugaagccauguccugugauuuuaacggaggcaaaaucagcgugcaguacaaucucucucacuccuaugccaaggacgcugccgaucauugcggcacaguugcuaacggggugcugcaaaccuucaugcgcauggccuggggaggcagcuacauugcgcuugacucugggagaggacggugggauuguaucaugacguccuaccaguaucugauuauccagaauacaaccugggaggaccacugccaguuuagccgccccucuccuaucggcuaccucgggcugcuuucccaaagaacacgggauauuuauaucagccgcagacugcucggaaccuucaccuggacacuguccgacucugaaggcaaggauacgcccggcggguacugucugacccgguggaugcucauugaggccgagcugaaaugcuuuggaaacacagcugucgccaaguguaacgaaaaacaugacgaggaguucugcgauaugcuucgccuguuugacuucaauaagcaggcuauccagagacucaaagccgaagcgcagaugagcauucaacugaucaacaaggccgugaaugcucuuaucaacgaccagcugauuaugaagaaucaccuccgggauaucaugggcauuccuuauugcaacuacuccaaauauugguaccugaaucacaccacaaccgggaagacgagccugcccaaauguuggcucgugucuaacggauccuaccugaaugaaacacauuucagcgacgauaucgagcagcaagccgacaacaugauuaccgagaugcuucagaaggaauauauggagcgccagggcaaaaccccucuggggcucgucgaucuguuuguuuucucuaccagcuuuuaccugaucuccaucuuccuucaccucgugaagauuccgugaggacuagucccuguucccagagcccacuuuuuuuucuuuuuuugaaauaaaauagccugucuuucagaucucaaaggcucuuuucagagccaccaaaaaaaaaaaaaaaaaaaaaaaaaaaaaaaaaaaaaaaaaaaaaaaaaaaaaaaaaaaaaaaaagaauu

SEQ ID NO: 42274 - RNA, 1622 nt, Artificial Sequence
  mRNA product Design a-2 (hSL-A64-N5) comprising derived and/or modified sequence from LASV(LM776-SLE-2012;Clade IV)__AIT17824__GPCmut13 (opt5)
aggagaguccgcucagccagguugcagaagcggcuuagcguguguccuaaucuucucucugcguguagguaggccugugccgcaaacaagcuuaccaugggccagaucgugaccuucuuucaagaggucccccacguuauugaagaggugaugaacaucgugcugauugcccucagcauccuggcuguccuuaaggggcuguacaauuucgccacaugcggacucgugggccugguuacguuucuucugcucugugggagauccugcaccacaucuguguauaaaggagucuacgaacugcagacccuggagcucaacauggaaacacugaauaugaccaugccucuuagcuguacaaagaacaauucccaucacuauauuauggugggcaacgagaccgggcuggagcucacgcugaccaauacaucuaucaucaaccauaaauucugcaaucuuagcgacgcgcacaagaaaaaccuguacgaucaugcucucauguccauuaucucuaccuuucaccugagcauuccgaauuucaaccaguaugaagccauguccugugacuuuaauggaggcaagaucagcguucaguacaaccugucucacuccuaugccggcgaugcugccaaucauugcgggacaguggcuaacggaguccuccaaaccuucaugcggauggccuggggcgggagcuacauugcgcuggacucuggacacggcaagugggauuguaucaugacguccuaccaguaucuuauuauccagaacacaaccugggaggaccauugccaguuuagccgccccucuccuaucggguaccugggacuccugucccaaagaacacgggauauuuauaucagccgcagacuucugggcaccuucaccuggacacucuccgacucugaaggcaaagauacgcccgggggauacugucugacccgguggaugcugauugaggccgagcucaagugcuuuggcaauacagcuguggccaaauguaacgaaaagcacgacgaggaguucugcgauaugcugcgccuuuuugacuucaauaaacaggcuauccagagacugaaggccgaagcgcagaugagcauucaacucaucaacaaggccgugaaugcucugaucaacgaucagcuuauuaugaaaaaucaucugcgggacaucauggggauuccuuauugcaacuacuccaaguauugguaccucaaucacaccacaaccggaaaaacgagccugcccaaguguuggcuggucucuaacggcuccuaccucaaugaaacacacuucagcgacgauaucgagcagcaagccgacaacaugauuaccgagaugcugcagaaagaauauauggagcgccaggggaagaccccucuuggacugguugaucucuuuguguucucuaccagcuuuuaccugaucuccaucuuccugcaucuugugaaaauuccgugaggacuagucccuguucccagagcccacuuuuuuuucuuuuuuugaaauaaaauagccugucuuucagaucucaaaggcucuuuucagagccaccaaaaaaaaaaaaaaaaaaaaaaaaaaaaaaaaaaaaaaaaaaaaaaaaaaaaaaaaaaaaaaaaagaauu

SEQ ID NO: 42275 - RNA, 1622 nt, Artificial Sequence
  mRNA product Design a-2 (hSL-A64-N5) comprising derived and/or modified sequence from LASV(Mad39;Clade IV)__ANH09722__GPCmut13 (opt5)
aggagaguccgcucagccagguugcagaagcggcuuagcguguguccuaaucuucucucugcguguagguaggccugugccgcaaacaagcuuaccaugggccagaucgugaccuucuuucaagaggucccccacguuauugaagaggugaugaacaucgugcugauugcccucagcauccuggcuguccuuaaggggcuguacaauguggccacaugcggacucauuggccugguuacguuccuucugcucugugggagauccugcaccacaacccuguauaaaggaguguacgaacugcaggcgcucgagcugaacauggaaacacuuaauaugaccaugccucugucuuguacaaagaacaauagccaucacuauauccgggucggcaacgagaccgggcucgagcugacgcuuaccaauacaucccugaucaaccauaaauuuugcaaucucucugacgcucacaagaaaaaccuguacgaucaugcccugaugagcauuaucuccaccuuccaccucucuauuccgaauuuuaaccaguaugaagccaugagcugugacuucaaugauggaaagaucuccgugcaguacaaccugagccacacauaugcuggcgacaccgccaaucauugcggcacgguugcuaacggggugcuucaaacauuuaugcgcauggccuggggaggcucuuacauugcgcuggauuccgggagaggaggcugggacuguaucaugaccagcuaccaguaucucauuauccagaacacaaccugggaggaucacugccaguucucucggcccuccccuaucggguaccugggacuucugagccaacgcaccagagacauuuauaucucucggcgccuccugggcacauuuacguggacccuguccgauagcgaaggcaaggacacacccgggggauacugucucaccagauggaugcugauugaggccgagcuuaaaugcuucggcaauacagcugucgccaaguguaacgaaaaacaugaugaggaauuuugcgacaugcugcgccucuucgauuuuaauaagcaggcuauccagcggcugaaagccgaggcgcagauguccauucaacuuaucaacaaggccgugaaugcucugaucaacgaccagcucauuaugaagaaucaccugagagacaucauggggauuccuuauugcaacuacucuaaauauugguaccugaaucacaccgugacgggaaagacaagccuccccaaauguuggcuggucuccaacggcagcuaccuuaaugaaacccauuucucugaugacaucgagcagcaagccgauaacaugauuaccgagaugcugcagaaggaauauauggagcggcaggggaaaacaccucucggacugguugaccuguucguguuuuccaccagcuucuaccuuaucucuaucuuucuccaccuggugaagauuccgugaggacuagucccuguucccagagcccacuuuuuuuucuuuuuuugaaauaaaauagccugucuuucagaucucaaaggcucuuuucagagccaccaaaaaaaaaaaaaaaaaaaaaaaaaaaaaaaaaaaaaaaaaaaaaaaaaaaaaaaaaaaaaaaaagaauu

SEQ ID NO: 42276 - RNA, 1622 nt, Artificial Sequence
  mRNA product Design a-2 (hSL-A64-N5) comprising derived and/or modified sequence from LASV(Z0947-SLE-2011;Clade IV)__AIT17840__GPCmut13 (opt5)
aggagaguccgcucagccagguugcagaagcggcuuagcguguguccuaaucuucucucugcguguagguaggccugugccgcaaacaagcuuaccaugggccagaucgugaccuucuuucaagaggucccccacguuauugaagaggugaugaacaucgugcugauugcccucagcauccuggcuguccuuaaggggcuguacaauuucgccacaugcggacucgugggccugguuacguuucuucugcucugugggagauccugcaccauuucucuguauaaaggaguguacgaacugcagacacucgagcugaacauggaaacccuuaauaugacaaugccucugagcuguaccaagaacaauucccaucacuauaucauggucggcaacgagacagggcucgagcugacccuuacgaauaccucuaucauuaaccauaaauucugcaaucugagcgacgcgcacaagaaaaaccucuacgaucaugcucugauguccaucauuucuacauuucaccugagcaucccgaauuucaaccaguaugaagccauguccugugacuuuaauggaggcaagauuagcgugcaguacaaccucucucacuccuaugccggcgaugcugccaaucauugcgggaccguugcuaacggagugcugcaaacauucaugcggauggccuggggcgggagcuacaucgcgcuugacucuggacgcgauagaugggacuguauuaugaccuccuaccaguaucugaucauccagaacacgacaugggaggaucacugccaguuuagccggcccucuccuauuggcuaccucgggcugcuuucccaacgcaccagagacaucuauauuagccggcgccugcucggaacauucaccuggacccuguccgauucugaaggcaaggacacacccggcggguacugucugacgagauggaugcucaucgaggccgagcugaaaugcuuuggaaauaccgcugucgccaaguguaacgaaaaacaugaugaggaguucugcgacaugcuucggcuguuugauuucaauaagcaggcuauucagcgccucaaagccgaagcgcagaugagcauccaacugaucaacaaggccgugaaugcucuuauuaacgaccagcugaucaugaagaaucaccucagagacauuaugggcaucccuuauugcaacuacuccaaauauugguaccugaaucacacaaccacagggaagaccagccugcccaaauguuggcucgugucuaacggauccuaccugaaugaaacgcauuucagcgaugacauugagcagcaagccgauaacaugaucacagagaugcuucagaaggaauauauggagcggcagggcaaaaccccucuggggcucgucgaccuguuuguuuucucuaccagcuuuuaccugaucuccauuuuccuucaccucgugaagaucccgugaggacuagucccuguucccagagcccacuuuuuuuucuuuuuuugaaauaaaauagccugucuuucagaucucaaaggcucuuuucagagccaccaaaaaaaaaaaaaaaaaaaaaaaaaaaaaaaaaaaaaaaaaaaaaaaaaaaaaaaaaaaaaaaaagaauu

SEQ ID NO: 42277 - RNA, 1653 nt, Artificial Sequence
  mRNA product Design a-2 (hSL-A100) comprising derived and/or modified sequence from LASV(Josiah;Clade IV)__NP_694870__GPCmut13 (opt1)
aggagaguccgcucagccagguugcagaagcggcuuagcguguguccuaaucuucucucugcguguagguaggccugugccgcaaacaagcuuaccaugggccagaucgugaccuucuuccaggaggucccccacgugaucgaggaggugaugaacaucguccugaucgcccucagcgugcuggccgugcugaaggggcucuacaacuucgcgaccugcggccuggucgggcuggugacguuccuccugcugugcggccgcuccugcaccaccagccucuacaaggggguguacgagcugcagacccuggagcucaacauggagacgcugaacaugaccaugccgcuguccugcaccaagaacaacagccaccacuacaucauggucggcaacgagaccggccucgagcugacgcugaccaacaccuccaucaucaaccacaaguucugcaaccucagcgacgcccacaagaagaaccuguacgaccacgcccugauguccaucaucagcaccuuccaccucuccauccccaacuucaaccaguacgaggccaugagcugcgacuucaacgggggcaagaucuccgugcaguacaaccugagccacuccuacgccggggacgcggccaaccacugcggcacgguggccaacgggguccugcagaccuucaugcggauggccuggggcggcagcuacaucgcgcucgacuccgggcgcggcaacugggacugcaucaugaccagcuaccaguaccugaucauccagaacaccacgugggaggaccacugccaguucucccggcccagccccaucggguaccugggccuccugucccagcgcacccgggacaucuacaucagccgccggcugcucggcaccuucaccuggacgcugagcgacuccgaggggaaggacaccccgggcggguacugccugacccgcuggaugcucaucgaggccgagcugaagugcuucggcaacaccgccguggccaagugcaacgagaagcacgacgaggaguucugcgacaugcugcggcuguucgacuucaacaagcaggccauccagcgccugaaggcggaggcccagaugagcauccagcugaucaacaaggccgugaacgcccucaucaacgaccagcugaucaugaagaaccaccuccgggacaucauggggauccccuacugcaacuacuccaaguacugguaccucaaccacacgaccaccggccgcaccagccugcccaagugcuggcuggucuccaacggcagcuaccucaacgagacgcacuucuccgacgacaucgagcagcaggccgacaacaugaucaccgagaugcugcagaaggaguacauggagcggcaggggaagacgccccugggccucguggaccuguucguguucagcaccuccuucuaccugaucagcaucuuccugcaccucgucaagaucccgugaggacuagucccuguucccagagcccacuuuuuuuucuuuuuuugaaauaaaauagccugucuuucagaucucaaaggcucuuuucagagccaccaaaaaaaaaaaaaaaaaaaaaaaaaaaaaaaaaaaaaaaaaaaaaaaaaaaaaaaaaaaaaaaaaaaaaaaaaaaaaaaaaaaaaaaaaaaaaaaaaaaaa

SEQ ID NO: 42278 - RNA, 1650 nt, Artificial Sequence
  mRNA product Design a-2 (hSL-A100) comprising derived and/or modified sequence from LASV(LP;Clade I)__AAF86701__GPCmut13 (opt1)
aggagaguccgcucagccagguugcagaagcggcuuagcguguguccuaaucuucucucugcguguagguaggccugugccgcaaacaagcuuaccaugggccagaucaucaccuucuuccaggaggugccccacgucaucgaggaggugaugaacaucgugcugaucgcccucagccugcuggccauccucaaggggcuguacaacaucgcgaccugcggcaucaucgggcuggucgccuuccucuuccugugcggcaaguccugcagccugacgcucaagggcggguacgagcugcagacccuggagcucaacauggagacccugaacaugaccaugccgcuguccugcacgaagaacagcucccaccacuacauccgcgugggcaacgagaccgggcucgagcugacccugaccaacacgagcaucaucaaccacaaguucugcaaccucuccgacgcccacaagaagaaccuguacgaccacgcccugaugagcaucaucuccaccuuccaccucagcauccccaacuucaaccaguacgaggccauguccugcgacuucaacggcgggaagaucagcgugcaguacaaccugucccacagcuacgcgggcgacgccgccgagcacugcgggaccgucgccaacggcgugcugcagaccuucaugcggauggcguggggcgggcgcuacaucgcccucgacuccggcaaggggaacugggacugcaucaugacgagcuaccaguaccugaucauccagaacaccaccugggaggaccacugccaguucucccggcccagccccaucggcuaccugggccuccugucccagcgcacccgggacaucuacaucagccgccggcugcucgggacguucaccuggacccugagcgacuccgagggcaacgagacccccgggggcuacugccugacgcgcuggaugcucaucgaggccgagcugaagugcuucgggaacaccgccguggccaagugcaacgagaagcacgacgaggaguucugcgacaugcugcggcuguucgacuucaacaagcaggcgauccgccggcugaaggccgaggcccagaugagcauccagcugaucaacaaggccgucaacgcccucaucaacgaccagcugaucaugaagaaccaccuccgcgacaucaugggcauccccuacugcaacuacuccaaguacugguaccucaaccacaccagcuccggccggaccagccugcccaagugcuggcugaucuccaacgggagcuaccucaacgagacgcaguucuccgacgacaucgagcagcaggcggacaacaugaucaccgagaugcugcagaaggaguacaucgagcgccagggcaagaccccgcuggggcucguggacaucuucaucuucagcaccuccuucuaccugaucagcaucuuccugcaccugaucaagaucccgugaggacuagucccuguucccagagcccacuuuuuuuucuuuuuuugaaauaaaauagccugucuuucagaucucaaaggcucuuuucagagccaccaaaaaaaaaaaaaaaaaaaaaaaaaaaaaaaaaaaaaaaaaaaaaaaaaaaaaaaaaaaaaaaaaaaaaaaaaaaaaaaaaaaaaaaaaaaaaaaaaaaaa

SEQ ID NO: 42279 - RNA, 1650 nt, Artificial Sequence
  mRNA product Design a-2 (hSL-A100) comprising derived and/or modified sequence from LASV(803213;Clade II)__AAF86703__GPCmut13 (opt1)
aggagaguccgcucagccagguugcagaagcggcuuagcguguguccuaaucuucucucugcguguagguaggccugugccgcaaacaagcuuaccaugggccagaucaucaccuucuuccaggaggugccccacgucaucgaggaggugaugaacaucgugcugaucgcccucagccugcuggccauccucaaggggaucuacaacgucgcgaccugcggccuguucgggcugaucuccuuccuccugcugugcggccgcagcugcuccgugacguacaaggggguguacgagcuccagacccuggagcugaacauggccaaccucaacaugaccaugccgcugagcugcaccaagaacaacucccaccacuacaucauggucggcaacgagacgggccuggagcucacccugaccaacaccagcaucaucaaccacaaguucugcaaccuguccgacgcccacaagaagaaccucuacgaccacgcccugaugagcaucaucuccacguuccaccugagcauccccaacuucaaccaguacgaggccauguccugcgacuucaacgggggcaagaucagcgugcaguacaaccucucccacagcuucgcgguggacgccgccaaccacugcgggaccaucgccaacggcguccugcagaccuucaugcggauggcguggggcggguccuacaucgcccuggacagcggcaaggggaacugggacugcaucaugaccuccuaccaguaccucaucauccagaacacgaccugggaggaccacugccaguucagccgccccucccccaucggcuaccuggggcugcucagccagcggacccgcgacaucuacaucagccggcgccugcugggcaccuucacguggacccucuccgacagcgagggcaacgaggcccccgggggcuacugccugacccgguggaugcugaucgaggccgagcucaagugcuucgggaacaccgccguggcgaagugcaacgagaagcacgacgaggaguucugcgacaugcugcgccuguucgacuucaacaagcaggccaucaagcggcucaagacggaggcccagauguccauccagcugaucaacaaggccgugaacgcccugaucaacgaccagcucaucaugaagaaccaccuccgcgacaucaugggcauccccuacugcaacuacagccgguacugguaccugaaccacaccgucaccgggaagaccucccugccccgcugcuggcuggugagcaacggcuccuaccugaacgagacgcacuucagcgacgacaucgagcagcaggcggacaacaugaucaccgagaugcuccagaaggaguacauggaccggcagggcaagaccccgcuggggcugguggaccucuucgucuucuccaccagcuucuaccugaucuccaucuuccugcaccuggugaagaucccgugaggacuagucccuguucccagagcccacuuuuuuuucuuuuuuugaaauaaaauagccugucuuucagaucucaaaggcucuuuucagagccaccaaaaaaaaaaaaaaaaaaaaaaaaaaaaaaaaaaaaaaaaaaaaaaaaaaaaaaaaaaaaaaaaaaaaaaaaaaaaaaaaaaaaaaaaaaaaaaaaaaaaa

SEQ ID NO: 42280 - RNA, 1650 nt, Artificial Sequence
  mRNA product Design a-2 (hSL-A100) comprising derived and/or modified sequence from LASV(GA391;Clade III)__CAA36645__GPCmut13 (opt1)
aggagaguccgcucagccagguugcagaagcggcuuagcguguguccuaaucuucucucugcguguagguaggccugugccgcaaacaagcuuaccaugggccagaucgugaccuucuuccaggaggucccccacgugaucgaggaggugaugaacaucguccugaucgcccucagcauccuggccauccugaaggggcucuacaacguggcgaccugcggccugaucgggcuggugacguuccuccugcuguccggccgcagcugcucccucaucuacaaggggaccuacgagcugcagacccuggagcucaacauggagacccugaacaugacgaugccgcugagcugcaccaagaacaacucccaccacuacauccgggucggcaacgagaccggccucgagcugacccugacgaacaccagcauccucaaccacaaguucugcaaccuguccgacgcccacaagcgcaaccuguacgaccacagccucauguccaucaucagcaccuuccaccuguccauccccaacuucaaccaguacgaggccaugagcugcgacuucaacgggggcaagaucaccgugcaguacaaccugucccacagcuucgccguggacgccgcggggcacugcggcacgcucgccaacgggguccugcagaccuucaugcggauggccuggggcggcuccuacaucgcccuggacagcgggcgcggcaacugggacugcaucaugaccuccuaccaguaccucaucauccagaacaccacgugggacgaccacugccaguucagccggcccucccccaucggguaccugggccugcucagccagcgcacccgggacaucuacaucagccgccggcugcugggcaccuucaccuggacgcucuccgacagcgaggggaacgagaccccgggcggguacugccugacccgcuggaugcugaucgaggcggagcucaagugcuucggcaacaccgccguggccaagugcaacgagaagcacgacgaggaguucugcgacaugcugcggcuguucgacuucaacaagcaggccauccgccggcucaagacggaggcccagauguccauccagcugaucaacaaggcggugaacgcccugaucaacgaccagcucaucaugaagaaccaccuccgcgacaucauggggauccccuacugcaacuacagccgguacugguaccugaaccacaccuccaccggcaagaccagccugccccgcugcuggcugaucuccaacggcagcuaccugaacgagacgaaguucuccgacgacaucgagcagcaggccgacaacaugaucaccgagaugcuccagaaggaguacaucgaccggcaggggaagacgccccugggccuggucgaccuguucguguucagcaccuccuucuaccucaucagcaucuuccugcaccuggugaagaucccgugaggacuagucccuguucccagagcccacuuuuuuuucuuuuuuugaaauaaaauagccugucuuucagaucucaaaggcucuuuucagagccaccaaaaaaaaaaaaaaaaaaaaaaaaaaaaaaaaaaaaaaaaaaaaaaaaaaaaaaaaaaaaaaaaaaaaaaaaaaaaaaaaaaaaaaaaaaaaaaaaaaaaa

SEQ ID NO: 42281 - RNA, 1653 nt, Artificial Sequence
  mRNA product Design a-2 (hSL-A100) comprising derived and/or modified sequence from LASV(AV;Clade V)__CCA30314__GPCmut13 (opt1)
aggagaguccgcucagccagguugcagaagcggcuuagcguguguccuaaucuucucucugcguguagguaggccugugccgcaaacaagcuuaccaugggccagaucgugaccuucuuccaggaggucccccacgugaucgaggaggugaugaacaucguccugaucgcccucagcauccuggccgugcugaaggggcucuacaacaucgcgaccugcggccugaucgggcugaucacguuccuccugcugugcggccgcuccugcagcuccaaccucuacaaggggguguacgagcugcagagccuggaccucaacauggagacccugaacaugaccaugccgcuguccugcaccaagaacaacagccaccacuacauccgggucggcaacgacacgggccucgagcugacccugaccaacaccuccauccucaaccacaaguucugcaaccugagcgacgcccacaagaaggaccuguacgaccacgcccucauguccaucaucagcacguuccaccuguccauccccaacuucaaccaguacgaggccaugagcugcgacuucaacgggggcaagaucuccgugcaguacaaccugagccacuccuacgccaucgacgcggccaaccacugcgggaccguggccaacggcauccuccagaccuucaugcgcauggccuggggcgggagcuacaucgcgcuggacuccggccgggggaacugggacugcaucaugaccagcuaccaguaccugaucauccagaacacgaccugggagaaccacugccaguucucccgccccagccccaucggcuaccucgggcugcugagccagcggacccgcgacaucuacaucucccggcgccuccugggcaccuucacguggacccugagcgacuccgagggcaacgccacccccgggggcuacugccucacccgguggaugcugaucgaggccgagcugaagugcuucgggaacacggccgucgccaagugcaacgagaagcacgacgaggaguucugcgacaugcuccgccuguucgacuucaacaagcaggcgaucagccggcugaaguccgaggcccagaugagcauccagcucaucaacaaggccgugaacgcccugaucaacgaccagcugaucaugaagaaccaccuccgcgacaucaugggcauccccuacugcaacuacuccaaguacugguaccugaaccacaccaucaccgggaagaccagccugcccaagugcuggcucguguccaacggcagcuaccugaacgagacgcacuucuccgacgacaucgagcagcaggccgacaacaugaucaccgagaugcugcagaaggaguacauggagcggcagggcaagaccccgcucgggcuggucgaccuguucguguucagcaccuccuucuaccugaucagcaucuuccuccgccuggugaagaucccgugaggacuagucccuguucccagagcccacuuuuuuuucuuuuuuugaaauaaaauagccugucuuucagaucucaaaggcucuuuucagagccaccaaaaaaaaaaaaaaaaaaaaaaaaaaaaaaaaaaaaaaaaaaaaaaaaaaaaaaaaaaaaaaaaaaaaaaaaaaaaaaaaaaaaaaaaaaaaaaaaaaaaa

SEQ ID NO: 42282 - RNA, 1650 nt, Artificial Sequence
  mRNA product Design a-2 (hSL-A100) comprising derived and/or modified sequence from LASV(Togo/2016/7082;Clade VI)__AMR44577__GPCmut13 (opt1)
aggagaguccgcucagccagguugcagaagcggcuuagcguguguccuaaucuucucucugcguguagguaggccugugccgcaaacaagcuuaccaugggccagaucaucaccuucuuccaggaggugccccacgucaucgaggaggugaugaacaucgugcugaucgcccucagccugcuggccauccucaagggggucuacaacguggcgaccugcggcaucaucgggcuggugacguuccuguuccucugcggccgcuccugcagccugaucuacaagggguccuacgagcugcagacccucgagcugaacauggagacccugaacaugaccaugccgcucagcugcacgaagaacuccagccaccacuacauccgggucggcaacgagaccggccuggagcugacccucaccaacacguccaucaucaaccacaaguucugcaaccugagcgacgcccacaagcgcaaccuguacgaccacgcccucauguccauccugagcaccuuccaccuguccauccccaacuucaaccaguacgaggccaugagcugcgacuucaacgggggcaagaucuccgugcaguacaaccucagccacgccuacgcgguggacgccgccgagcacugcgggaccgucgccaacggcgugcugcagaccuucaugcggauggcguggggcggguccuacaucgcccuggacagcggccgcgggaacugggacugcaucaugacguccuaccaguaccucaucauccagaacaccaccugggaggaccacugccaguucagccggcccucccccaucggcuaccuggggcugcucagccagcgcacccgggacaucuacaucagccgccggcugcugggcacguucaccuggacccucuccgacagcgagggcaacgagacccccgggggcuacugccugacgcgcuggaugcugaucgaggccgagcucaagugcuucgggaacaccgccguggccaagugcaacgagaagcacgacgaggaguucugcgacaugcugcggcuguucgacuucaacaagcaggcgauccagcgccucaaguccgaggcccagaugagcauccagcugaucaacaaggccgucaacgcccugaucaacgaccagcucaucaugaagaaccaccuccgggacaugaugggcauccccuacugcaacuacuccaaguacugguaccugaaccacaccagcuccgggcgcaccagccugcccaagugcuggcugguguccaacggcagcuaccugaacgagacgcacuucuccgacgacaucgagcagcaggccgacaacaugaucaccgagaugcuccagaaggaguacaucgaccggcagggcaagaccccgcuggggcugguggaccucuucgucuucagcaccuccuucuaccugaucagcaucuuccugcaccugaucaagaucccgugaggacuagucccuguucccagagcccacuuuuuuuucuuuuuuugaaauaaaauagccugucuuucagaucucaaaggcucuuuucagagccaccaaaaaaaaaaaaaaaaaaaaaaaaaaaaaaaaaaaaaaaaaaaaaaaaaaaaaaaaaaaaaaaaaaaaaaaaaaaaaaaaaaaaaaaaaaaaaaaaaaaaa

SEQ ID NO: 42283 - RNA, 1650 nt, Artificial Sequence
  mRNA product Design a-2 (hSL-A100) comprising derived and/or modified sequence from LASV(KAK-428;Clade n.d. (VII))__ANH09740__GPCmut13 (opt1)
aggagaguccgcucagccagguugcagaagcggcuuagcguguguccuaaucuucucucugcguguagguaggccugugccgcaaacaagcuuaccaugggccagaucgugaccuucuuccaggaggucccccacgugaucgaggaggugaugaacaucguccugaucgcccucagccugcuggccauccucaaggggcuguacaacuucgcgaccugcggcgugaucgggcugaucacguuccuccugcugugcggccgcuccugcagcgccaccuacaaggggcaguacgagcuccagacccuggagcugaacauggagucccucaacaugaccaugccgcugagcugcacgaagaacaacucccaccacuacauccgggccggcaacaacaccggccuggagcucacccugaccaacacgagcaucaucucccacaaguucugcaaccugagcgacgcccacaagaagaaccucuacgaccacacccugauguccaucaucaccaccuuccaccugagcauccccaacuucaaccaguacgaggccauguccugcgacuucaacgggggcaagaucagcauccaguacaaccucucccacagcuacgcgggggacgccgcccagcacugcggcacgguggccaacgggguccugcagaccuucaugcgcauggcguggggcggcuccuaccuggcccucgacagcgggcggcgcggcugggacugcaucaucuccagcuaccaguaccugaucauccagaacaccaccugggacgaccacugccaguucucccggcccagccccaucggguaccugggcuucgugagccagaagacgcgcgacaucuacaucucccggcgccuccugggcaccuucaccuggacccugagcgacuccgaggggcacgacaugccgggcggguacugccucacgcgguggaugcugaucgaggccgaccugaagugcuucggcaacaccgccguggccaagugcaacgagaagcacgacgaggaguucugcgacauguggcgccucuucgacuucaacaagcaggcgauccagcggcugaaggccgaggcccagaugaacauccagcugaucaacaaggccgucaacgcccucaucaacgaccagcugaugaugaagaaccaccuccgcgacaucauggggauccccuacugcaacuacagcaaguucugguaccugaacaacaccaccacgggccggaccucccugccccgcugcuggcugaucagcaacggcuccuaccucaacgagacccacuucagcgacgacaucgagcagcaggcggacaacaugaucaccgagaugcugcagaaggaguacauggaccggcaggggaagacgccccugggccucguggaccuguucguguucuccaccagcuucuaccugaucaccaucuuccuccaccuggucaagaucccgugaggacuagucccuguucccagagcccacuuuuuuuucuuuuuuugaaauaaaauagccugucuuucagaucucaaaggcucuuuucagagccaccaaaaaaaaaaaaaaaaaaaaaaaaaaaaaaaaaaaaaaaaaaaaaaaaaaaaaaaaaaaaaaaaaaaaaaaaaaaaaaaaaaaaaaaaaaaaaaaaaaaaa

SEQ ID NO: 42284 - RNA, 1650 nt, Artificial Sequence; identical to SEQ ID NO: 42278
  mRNA product Design a-2 (hSL-A100) comprising derived and/or modified sequence from LASV(Pinneo-NIG-1969;Clade I)__AIT17836__GPCmut13 (opt1)

SEQ ID NO: 42285 - RNA, 1650 nt, Artificial Sequence
  mRNA product Design a-2 (hSL-A100) comprising derived and/or modified sequence from LASV(ISTH0009-NIG-2011;Clade II)__AIT17404__GPCmut13 (opt1)
aggagaguccgcucagccagguugcagaagcggcuuagcguguguccuaaucuucucucugcguguagguaggccugugccgcaaacaagcuuaccaugggccagaucaucaccuucuuccaggaggugccccacgucaucgaggaggugaugaacaucgugcugaucgcccucagccugcuggccauccucaaggggaucuacaacgucgcgaccugcggccuguucgggcugguguccuuccuccugcugugcggccgcagcugcuccacgaccuacaaggggguguacgagcuccagacccuggagcuggacauggccagccucaacaugaccaugccgcuguccugcacgaagaacaacagccaccacuacaucauggucggcaacgagaccggccuggagcucacccugaccaacacguccaucaucaaccacaaguucugcaaccugagcgacgcccacaagaagaaccucuacgaccacgcccugauguccaucaucagcaccuuccaccuguccauccccaacuucaaccaguacgaggccaugagcugcgacuucaacgggggcaagaucuccgugcaguacaaccucagccacgcguacgccguggacgccgccaaccacugcgggaccaucgcgaacggcguccugcagaccuucaugcggauggccuggggcggguccuacaucgcccuggacagcggcaagggguccugggacugcaucaugacgagcuaccaguaccucaucauccagaacaccaccugggaggaccacugccaguucucccgccccagccccaucggcuaccuggggcugcucagccagcggacccgcgacaucuacaucucccggcgccugcugggcacguucaccuggacccucagcgacuccgagggcaacgagacccccgggggcuacugccugacgcgguggaugcugaucgaggccgagcucaagugcuucgggaacaccgccguggcgaagugcaacgagaagcacgacgaggaguucugcgacaugcugcgccuguucgacuucaacaagcaggccauccggcgccucaagaccgaggcccagaugagcauccagcugaucaacaaggccgugaacgcccugaucaacgaccagcucaucaugaagaaccaccuccgggacaucaugggcaucccguacugcaacuacuccaaguacugguaccugaaccacaccgucacggggaagaccagccugccccgcugcuggcugguguccaacggcagcuaccugaacgagacccacuucuccgacgacaucgagcagcaggcggacaacaugaucaccgagcuccugcagaaggaguacauggaccggcagggcaagacgccccuggggcucguggaccuguucgucuucagcaccuccuucuaccugaucagcaucuuccugcaccucaucaagaucccgugaggacuagucccuguucccagagcccacuuuuuuuucuuuuuuugaaauaaaauagccugucuuucagaucucaaaggcucuuuucagagccaccaaaaaaaaaaaaaaaaaaaaaaaaaaaaaaaaaaaaaaaaaaaaaaaaaaaaaaaaaaaaaaaaaaaaaaaaaaaaaaaaaaaaaaaaaaaaaaaaaaaaa

SEQ ID NO: 42286 - RNA, 1650 nt, Artificial Sequence
  mRNA product Design a-2 (hSL-A100) comprising derived and/or modified sequence from LASV(ISTH2010-NIG-2012;Clade II)__AIT17482__GPCmut13 (opt1)
aggagaguccgcucagccagguugcagaagcggcuuagcguguguccuaaucuucucucugcguguagguaggccugugccgcaaacaagcuuaccaugggccagaucaucaccuucuuccaggaggugccccacgucaucgaggaggugaugaacaucgugcugaucgcccucagccugcuggccauccucaaggggaucuacaacgucgcgaccugcggccuguucgggcugguguccuuccuccugcugugcggccgcagcugcuccacgaccuacaaggggguguacgagcuccagacccuggagcuggacauggccagccucaacaugaccaugccgcuguccugcacgaagaacaacagccaccacuacaucauggucggcaacgagaccggccuggagcucacccugaccaacacguccaucaucaaccacaaguucugcaaccugagcgacgcccacaagaagaaccucuacgaccacgcccugauguccaucaucagcaccuuccaccuguccauccccaacuucaaccaguacgaggccaugagcugcgacuucaacgggggcaagaucuccgugcaguacaaccucagccacgcguacgccguggacgccgccaaccacugcgggaccaucgcgaacggcguccugcagaccuucaugcggauggccuggggcggguccuacaucgcccuggacagcggcaagggguccugggacugcaucaugacgagcuaccaguaccucaucauccagaacaucaccugggaggaccacugccaguucucccgccccagccccaucggcuaccuggggcugcucagccagcggacccgcgacaucuacaucucccggcgccugcugggcaccuucacguggacccucagcgacuccgagggcaacgagacccccgggggcuacugccugacccgguggaugcugaucgaggccgagcucaagugcuucgggaacacggccguggcgaagugcaacgagaagcacgacgaggaguucugcgacaugcugcgccuguucgacuucaacaagcaggccauccggcgccucaagaccgaggcccagaugagcauccagcugaucaacaaggccgugaacgcccugaucaacgaccagcucaucaugaagaaccaccuccgggacaucaugggcauccccuacugcaacuacuccaaguacugguaccugaaccacaccgucaccgggaagacgagccugccccgcugcuggcugguguccaacggcagcuaccugaacgagacccacuucuccgacgacaucgagcagcaggcggacaacaugaucaccgagcuccugcagaaggaguacaucgaccggcagggcaagaccccgcuggggcucguggaccuguucgucuucagcacguccuucuaccugaucagcaucuuccugcaccucgugaagaucccgugaggacuagucccuguucccagagcccacuuuuuuuucuuuuuuugaaauaaaauagccugucuuucagaucucaaaggcucuuuucagagccaccaaaaaaaaaaaaaaaaaaaaaaaaaaaaaaaaaaaaaaaaaaaaaaaaaaaaaaaaaaaaaaaaaaaaaaaaaaaaaaaaaaaaaaaaaaaaaaaaaaaaa

SEQ ID NO: 42287 - RNA, 1650 nt, Artificial Sequence
  mRNA product Design a-2 (hSL-A100) comprising derived and/or modified sequence from LASV(Lassa virus/H.sapiens-wt/NGA/2015/ISTH_0543;Clade II)__AVO03639__GPCmut13 (opt1)
aggagaguccgcucagccagguugcagaagcggcuuagcguguguccuaaucuucucucugcguguagguaggccugugccgcaaacaagcuuaccaugggccagaucaucaccuucuuccaggaggugccccacgucaucgaggaggugaugaacaucgugcugaucgcccucagccugcuggccauccucaaggggaucuacaacgucgcgaccugcggccuguucgggcugguguccuuccuccugcugugcggccgcagcugcuccacgaccuacaaggggguguacgagcuccagacccuggagcuggacauggccaaccucaacaugaccaugccgcugagcugcacgaagaacaacucccaccacuacaucauggucggcaacgagaccggccuggagcucacccugaccaacacgagcaucaucaaccacaaguucugcaaccuguccgacgcccacaagaagaaccucuacgaccacgcccugaugagcaucaucuccaccuuccaccugagcauccccaacuucaaccaguacgaggccauguccugcgacuucaacgggggcaagaucagcgugcaguacaaccucucccacaccuacgcgguggacgccgccaaccacugcgggaccaucgccaacggcguccugcagacguucaugcggauggcguggggcgggagcuacaucgcccuggacuccggcaaggggagcugggacugcaucaugaccuccuaccaguaccucgugauccagaacaccaccugggaggaccacugccaguucagccgccccucccccaucggcuaccuggggcugcucagccagcggacgcgcgacaucuacaucagccggcgccugcugggcaccuucaccuggacccucuccgacagcgagggcaacgagacgcccgggggcuacugccugacccgguggaugcugaucgaggccgagcucaagugcuucgggaacaccgccguggccaagugcaacgagaagcacgacgaggaguucugcgacaugcugcgccuguucgacuucaacaagcaggcgauccggcgccucaagaccgaggcccagauguccauccagcugaucaacaaggccgucaacgcccugaucaacgaccagcucaucaugaagaaccaccuccgggacaucaugggcauccccuacugcaacuacagcaaguacugguaccugaaccacacggugaccgggaagaccucccugccccgcugcuggcuggugagcaacggcuccuaccugaacgagacccacuucagcgacgacaucgagcagcaggccgacaacaugaucacggagcuccugcagaaggaguacaucgaccggcagggcaagaccccgcuggggcucgucgaccuguucguguucuccaccagcuucuaccugaucuccaucuuccugcaccucgugaagaucccgugaggacuagucccuguucccagagcccacuuuuuuuucuuuuuuugaaauaaaauagccugucuuucagaucucaaaggcucuuuucagagccaccaaaaaaaaaaaaaaaaaaaaaaaaaaaaaaaaaaaaaaaaaaaaaaaaaaaaaaaaaaaaaaaaaaaaaaaaaaaaaaaaaaaaaaaaaaaaaaaaaaaaa

SEQ ID NO: 42288 - RNA, 1650 nt, Artificial Sequence
  mRNA product Design a-2 (hSL-A100) comprising derived and/or modified sequence from LASV(Lassa virus/H.sapiens-wt/NGA/2016/ISTH_0009;Clade II)__AVO03571__GPCmut13 (opt1)
aggagaguccgcucagccagguugcagaagcggcuuagcguguguccuaaucuucucucugcguguagguaggccugugccgcaaacaagcuuaccaugggccagaucaucaccuucuuccaggaggugccccacgucaucgaggaggugaugaacaucgugcugaucgcccucagccugcuggccauccucaaggggaucuacaacgucgcgaccugcggccugcuggggcucguguccuuccugcugcucugcggccgcagcugcuccacgaccuacaaggggguguacgagcugcagacccuggagcucgacauggccagccugaacaugaccaugccgcuguccugcacgaagaacaacagccaccacuacaucauggucggcaacgagaccggccucgagcugacccugaccaacacguccaucaucaaccacaaguucugcaaccucagcgacgcccacaagaagaaccuguacgaccacgcccugauguccaucaucagcaccuuccaccucuccauccccaacuucaaccaguacgaggccaugagcugcgacuucaacgggggccggaucuccgugcaguacaaccugagccacuccuacgcgguggacgccgccaaccacugcgggaccaucgccaacggcguccugcagaccuucaugcgcauggcguggggcgggagcuacaucgcccucgacuccggcaaggggagcugggacugcaucaugacguccuaccaguaccugaucauccagaacaccaccugggaggaccacugccaguucagccggcccagccccaucggcuaccuggggcuccugucccagcgcacccgggacaucuacaucagccgccggcugcucggcacguucaccuggacccuguccgacagcgagggcaacgagacccccgggggcuacugccugacgcgcuggaugcucaucgaggccgagcugaagugcuucgggaacaccgccguggccaagugcaacgagaagcacgacgaggaguucugcgacaugcugcggcuguucgacuucaacaagcaggcgauccgccggcugaagaccgaggcccagauguccauccagcugaucaacaaggccgugaacgcccucaucaacgaccagcugaucaugaagaaccaccuccgcgacaucaugggcaucccguacugcaacuacagcaaguacugguaccucaaccacaccgucacggggaagaccucccugccccggugcuggcuggugagcaacggcuccuaccucaacgagacccacuucagcgacgacaucgagcagcaggccgacaacaugaucaccgagcugcugcagaaggaguacaucgaccgccagggcaagacgccccucgggcugguggaccuguucgucuucuccaccagcuucuaccugaucuccaucuuccuccaccuggugaagaucccgugaggacuagucccuguucccagagcccacuuuuuuuucuuuuuuugaaauaaaauagccugucuuucagaucucaaaggcucuuuucagagccaccaaaaaaaaaaaaaaaaaaaaaaaaaaaaaaaaaaaaaaaaaaaaaaaaaaaaaaaaaaaaaaaaaaaaaaaaaaaaaaaaaaaaaaaaaaaaaaaaaaaaa

SEQ ID NO: 42289 - RNA, 1650 nt, Artificial Sequence
  mRNA product Design a-2 (hSL-A100) comprising derived and/or modified sequence from LASV(Lassa virus/H.sapiens-wt/NGA/2016/ISTH_0017;Clade II)__AVO03567__GPCmut13 (opt1)
aggagaguccgcucagccagguugcagaagcggcuuagcguguguccuaaucuucucucugcguguagguaggccugugccgcaaacaagcuuaccaugggccagaucaucaccuucuuccaggaggugccccacgucaucgaggaggugaugaacaucgugcugaucgcccucagccugcuggccauccucaaggggaucuacaacgucgcgaccugcggccuguucgggcugguguccuuccuccugcugugcggccgcagcugcuccacgaccuacaaggggguguacgagcuccagacccuggagcuggacauggccagccucaacaugaccaugccgcuguccugcacgaagaacaacagccaccacuacaucauggucggcaacgagaccggccuggagcucacccugaccaacacguccaucaucaaccacaaguucugcaaccugagcgacgcccacaagaagaaccucuacgaccacgcccugauguccaucaucagcaccuuccaccuguccauccccaacuucaaccaguacgaggccaugagcugcgacuucaacgggggcaagaucuccgugcaguacaaccucagccacaccuacgcgaucgacgccgccaaccacugcgggaccaucgccaacggcgugcugcagacguucaugcggauggcguggggcggguccuacaucgcccuggacagcggcaagggguccugggacugcaucaugaccagcuaccaguaccucaucauccagaacaccaccugggaggaccacugccaguucucccgccccagccccaucggcuaccuggggcugcucagccagcggacgcgcgacaucuacaucucccggcgccugcugggcaccuucaccuggacccucagcgacuccgagggcaacgagacgcccgggggcuacugccugacccgguggaugcugaucgaggccgagcucaagugcuucgggaacaccgccgucgccaagugcaacgagaagcacgacgaggaguucugcgacaugcugcgccuguucgacuucaacaagcaggcgauccggcgccucaagaccgaggcccagaugagcauccagcugaucaacaaggccgugaacgcccugaucaacgaccagcucaucaugaagaaccaccuccgggacaucaugggcauccccuacugcaacuacuccaaguacugguaccugaaccacacggugaccgggaagaccagccugccccgcugcuggcuggucuccaacggcagcuaccugaacgagacccacuucuccgacgacaucgagcagcaggccgacaacaugaucacggagcuccugcagaaggaguacauggaccggcagggcaagaccccgcuggggcucguggaccuguucguguucagcaccuccuucuaccugaucagcaucuuccugcaccucguccgcaucccgugaggacuagucccuguucccagagcccacuuuuuuuucuuuuuuugaaauaaaauagccugucuuucagaucucaaaggcucuuuucagagccaccaaaaaaaaaaaaaaaaaaaaaaaaaaaaaaaaaaaaaaaaaaaaaaaaaaaaaaaaaaaaaaaaaaaaaaaaaaaaaaaaaaaaaaaaaaaaaaaaaaaaa

SEQ ID NO: 42290 - RNA, 1650 nt, Artificial Sequence
  mRNA product Design a-2 (hSL-A100) comprising derived and/or modified sequence from LASV(Lassa virus/H.sapiens-wt/NGA/2018/ISTH_0959;Clade II)__AVV65099__GPCmut13 (opt1)
aggagaguccgcucagccagguugcagaagcggcuuagcguguguccuaaucuucucucugcguguagguaggccugugccgcaaacaagcuuaccaugggccagaucaucaccuucuuccaggaggugccccacgucaucgaggaggugaugaacaucgugcugaucgcccucagccugcuggccauccucaaggggaucuacaacgucgugaccugcggccuguucgggcugguguccuuccuccugcugugcggccgcagcugcuccacgaccuacaagggggucuacgagcuccagacccuggagcuggacauggcgagccucaacaugaccaugccgcuguccugcacgaagaacaacagccaccacuacaucauggugggcaacgagaccggccuggagcucacccugaccaacacguccaucaucaaccacaaguucugcaaccugagcgacgcccacaagaagaaccucuacgaccacgcccugauguccaucaucagcaccuuccaccuguccauccccaacuucaaccaguacgaggccaugagcugcgacuucaacgggggcaagaucuccgugcaguacaaccucagccacgccuacgcgaucgacgccgccaaccacugcgggaccaucgccaacggcguccugcagaccuucaugcggauggcguggggcggguccuacaucgcccuggacagcggcaagggguccugggacugcaucaugacgagcuaccaguaccucaucauccagaacaccaccugggaggaccacugccaguucucccgccccagccccaucggcuaccuggggcugcucagccagcggacccgcgacaucuacaucucccggcgccugcugggcacguucaccuggacccucagcgacuccgagggcaacgagacccccgggggcuacugccugacgcgguggaugcugaucgaggccgagcucaagugcuucgggaacaccgccguggccaagugcaacgagaagcacgacgaggaguucugcgacaugcugcgccuguucgacuucaacaagcaggcgauccggcgccucaagaccgaggcccagaugagcauccagcugaucaacaaggccgugaacgcccugaucaacgaccagcucaucaugaagaaccaccuccgggacaucaugggcaucccguacugcaacuacuccaaguacugguaccugaaccacaccgucacggggaagaccagccugccccgcugcuggcugguguccaacggcagcuaccugaacgagacccacuucuccgacgacaucgagcagcaggccgacaacaugaucaccgagcuccugcagaaggaguacaucgaccggcagggcaagacgccccuggggcucguggaccuguucgucuucagcaccuccuucuaccugaucagcaucuuccugcaccucgugaagaucccgugaggacuagucccuguucccagagcccacuuuuuuuucuuuuuuugaaauaaaauagccugucuuucagaucucaaaggcucuuuucagagccaccaaaaaaaaaaaaaaaaaaaaaaaaaaaaaaaaaaaaaaaaaaaaaaaaaaaaaaaaaaaaaaaaaaaaaaaaaaaaaaaaaaaaaaaaaaaaaaaaaaaaa

SEQ ID NO: 42291 - RNA, 1650 nt, Artificial Sequence
  mRNA product Design a-2 (hSL-A100) comprising derived and/or modified sequence from LASV(LASV003-NIG-2008;Clade II)__AIT17580__GPCmut13 (opt1)
aggagaguccgcucagccagguugcagaagcggcuuagcguguguccuaaucuucucucugcguguagguaggccugugccgcaaacaagcuuaccaugggccagaucaucaccuucuuccaggaggugccccacgucaucgaggaggugaugaacaucgugcugaucgcccucagccugcuggccauccucaaggggaucuacaacgucgcgaccugcggccuguucgggcugguguccuuccuccugcugugcggccgcagcugcuccacgaccuacaaggggguguacgagcuccagacccuggagcuggacauggccagccucaacaugaccaugccgcuguccugcacgaagaacaacagccaccacuacaucauggucggcaacgagaccggccuggagcucacccugaccaacacguccaucaucaaccacaaguucugcaaccugagcgacgcccacaagaagaaccucuacgaccacgcccugauguccaucaucagcaccuuccaccuguccauccccaacuucaaccaguacgaggccaugagcugcgacuucaacgggggcaagaucuccgugcaguacaaccucagccacaccuacgcgguggacgccgccaaccacugcgggaccaucgccaacggcguccugcagacguucaugcggauggcguggggcggguccuacaucgcccuggacagcggcaagggguccugggacugcaucaugaccagcuaccaguaccucaucauccagaacaccaccugggaggaccacugccaguucucccgccccagccccaucggcuaccuggggcugcucagccagcggacgcgcgacaucuacaucucccggcgccugcugggcaccuucaccuggacccucagcgacuccgagagcaacgagacgccgggcggguacugccugacccgguggaugcugaucgaggccgagcucaagugcuucggcaacaccgccguggccaagugcaacgagaagcacgacgaggaguucugcgacaugcugcgccuguucgacuucaacaagcaggcgauccggcgccucaaggccgaggcccagauguccauccagcugaucaacaaggccgugaacgcccugaucaacgaccagcucaucaugaagaaccaccuccgggacaucauggggauccccuacugcaacuacagcaaguacugguaccugaaccacaccgucacgggccgcaccucccugccccggugcuggcuggugagcaacggguccuaccugaacgagacccacuucagcgacgacaucgagcagcaggcggacaacaugaucaccgagcuccugcagaaggaguacauggaccgccagggcaagacgccccugggccucguggaccuguucgucuucuccaccagcuucuaccugaucuccaucuuccugcaccucgugaagaucccgugaggacuagucccuguucccagagcccacuuuuuuuucuuuuuuugaaauaaaauagccugucuuucagaucucaaaggcucuuuucagagccaccaaaaaaaaaaaaaaaaaaaaaaaaaaaaaaaaaaaaaaaaaaaaaaaaaaaaaaaaaaaaaaaaaaaaaaaaaaaaaaaaaaaaaaaaaaaaaaaaaaaaa

SEQ ID NO: 42292 - RNA, 1650 nt, Artificial Sequence
  mRNA product Design a-2 (hSL-A100) comprising derived and/or modified sequence from LASV(LASV035-NIG-2009;Clade II)__AIT17588__GPCmut13 (opt1)
aggagaguccgcucagccagguugcagaagcggcuuagcguguguccuaaucuucucucugcguguagguaggccugugccgcaaacaagcuuaccaugggccagaucaucaccuucuuccaggaggugccccacgucaucgaggaggugaugaacaucgugcugaucgcccucagccugcuggccauccucaaggggaucuacaacgucgcgaccugcggccuguucgggcugguguccuuccuccugcugugcggccgcagcugcuccacgaccuacaaggggguguacgagcuccagacccuggagcuggacauggccagccucaacaugaccaugccgcuguccugcacgaagaacaacagccaccacuacaucauggucggcaacgagaccggccuggagcucacccugaccaacacguccaucaucaaccacaaguucugcaaccugagcgacgcccacaagaagaaccucuacgaccacgcccugauguccaucaucagcaccuuccaccuguccauccccaacuucaaccaguacgaggccaugagcugcgacuucaacgggggcaagaucuccgugcaguacaaccucagccacgcguacgccguggacgccgccaaccacugcgggaccaucgcgaacggcguccugcagaccuucaugcggauggccuggggcggguccuacaucgcccuggacagcggcaagggguccugggacugcaucaugacgagcuaccaguaccucaucauccagaacaccaccugggaggaccacugccaguucucccgccccagccccaucggcuaccuggggcugcucagccagcggacccgcgacaucuacaucucccggcgccugcugggcacguucaccuggacccucagcgacuccgagggcaacgagacccccgggggcuacugccugacgcgguggaugcugaucgaggccgagcucaagugcuucgggaacaccgccguggcgaagugcaacgagaagcacgacgaggaguucugcgacaugcugcgccuguucgacuucaacaagcaggccauccggcgccucaaggccgaggcccagaugagcauccagcugaucaacaaggccgugaacgcgcugaucaacgaccagcucaucaugaagaaccaccuccgggacaucaugggcauccccuacugcaacuacuccaaguacugguaccugaaccacaccgucaccgggaagacgagccugccccgcugcuggcugguguccaacggcagcuaccugaacgagacccacuucuccgacgacaucgagcagcaggccgacaacaugaucaccgagcuccugcagaaggaguacaucgaccggcagggcaagaccccgcuggggcucguggaccuguucgucuucagcacguccuucuaccugaucagcaucuuccugcaccucgugaagaucccgugaggacuagucccuguucccagagcccacuuuuuuuucuuuuuuugaaauaaaauagccugucuuucagaucucaaaggcucuuuucagagccaccaaaaaaaaaaaaaaaaaaaaaaaaaaaaaaaaaaaaaaaaaaaaaaaaaaaaaaaaaaaaaaaaaaaaaaaaaaaaaaaaaaaaaaaaaaaaaaaaaaaaa

SEQ ID NO: 42293 - RNA, 1650 nt, Artificial Sequence
  mRNA product Design a-2 (hSL-A100) comprising derived and/or modified sequence from LASV(LASV1000-NIG-2009;Clade II)__AIT17782__GPCmut13 (opt1)
aggagaguccgcucagccagguugcagaagcggcuuagcguguguccuaaucuucucucugcguguagguaggccugugccgcaaacaagcuuaccaugggccagaucaucaccuucuuccaggaggugccccacgucaucgaggaggugaugaacaucgugcugaucgcccucagccugcuggccauccucaaggggaucuacaacgucgcgaccugcggccuguucgggcugguguccuuccuccugcugugcggccgcagcugcuccacgaccuacaaggggguguacgagcuccagacccuggagcuggacauggccagccucaacaugaccaugccgcuguccugcacgaagaacaacagccaccacuacaucauggucggcaacgagaccggccuggagcucacccugaccaacacguccaucaucaaccacaaguucugcaaccugagcgacgcccacaagaagaaccucuacgaccacgcccugauguccaucaucagcaccuuccaccuguccauccccaacuucaaccaguacgaggccaugagcugcgacuucaacgggggcaagaucuccgugcaguacaaccucagccacaccuacgcgguggacgccgccaaccacugcgggaccaucgccaacggcguccugcagacguucaugcggauggcguggggcggguccuacaucgcccuggacagcggcaagggguccugggacugcaucaugaccagcuaccaguaccucaucauccagaacaccaccugggaggaccacugccaguucucccgccccagccccaucggcuaccuggggcugcucagccagcggacgcgcgacaucuacaucucccggcgccugcugggcaccuucaccuggacccucagcgacuccgagggcaacgagacgcccgggggcuacugccugacccgguggaugcugaucgaggccgagcucaagugcuucgggaacaccgccguggccaagugcaacgagaagcacgacgaggaguucugcgacaugcugcgccuguucgacuucaacaagcaggcgaucaagcggcucaagaccgaggcccagaugagcauccagcugaucaacaaggccgugaacgcccugaucaacgaccagcucaucaugaagaaccaccuccgcgacaucaugggcauccccuacugcaacuacuccaaguacugguaccugaaccacacggucaccgggaagaccagccugccccggugcuggcugguguccaacggcagcuaccugaacgagacccacuucuccgacgacaucgagcagcaggccgacaacaugaucacggagcuccugcagaaggaguacaucgaccgccagggcaagaccccgcuggggcucguggaccuguucgucuucagcaccuccuucuaccugaucagcaucuuccugcaccucgugaagaucccgugaggacuagucccuguucccagagcccacuuuuuuuucuuuuuuugaaauaaaauagccugucuuucagaucucaaaggcucuuuucagagccaccaaaaaaaaaaaaaaaaaaaaaaaaaaaaaaaaaaaaaaaaaaaaaaaaaaaaaaaaaaaaaaaaaaaaaaaaaaaaaaaaaaaaaaaaaaaaaaaaaaaaa

SEQ ID NO: 42294 - RNA, 1650 nt, Artificial Sequence
  mRNA product Design a-2 (hSL-A100) comprising derived and/or modified sequence from LASV(LASV221-NIG-2010;Clade II)__AIT17624__GPCmut13 (opt1)
aggagaguccgcucagccagguugcagaagcggcuuagcguguguccuaaucuucucucugcguguagguaggccugugccgcaaacaagcuuaccaugggccagaucaucaccuucuuccaggaggugccccacgucaucgaggaggugaugaacaucgugcugaucgcccucagccugcuggccauccucaaggggaucuacaacgucgcgaccugcggccuguucgggcugguguccuuccuccugcugugcggccgcagcugcuccacgaccuacaaggggguguacgagcuccagacccuggagcuggacauggccagccucaacaugaccaugccgcuguccugcacgaagaacaacagccaccacuacaucauggucggcaacgagaccggccuggagcucacccugaccaacacguccaucaucaaccacaaguucugcaaccugagcgacgcccacaagaagaaccucuacgaccacgcccugauguccaucaucagcaccuuccaccuguccauccccaacuucaaccaguacgaggccaugagcugcgacuucaacgggggcaagaucuccgugcaguacaaccucagccacaccuacgcgaucgacgccgccaaccacugcgggaccaucgccaacggcgugcugcagacguucaugcggauggcguggggcggguccuacaucgcccuggacagcggcaagggguccugggacugcaucaugaccagcuaccaguaccucaucauccagaacaccaccugggaggaccacugccaguucucccgccccagccccaucggcuaccuggggcugcucagccagcggacgcgcgacaucuacaucucccggcgccugcugggcaccuucaccuggacccucagcgacuccgagggcaacgagacgcccgggggcuacugccugacccgguggaugcugaucgaggccgagcucaagugcuucgggaacaccgccgucgccaagugcaacgagaagcacgacgaggaguucugcgacaugcugcgccuguucgacuucaacaagcaggcgauccggcgccucaagaccgaggcccagaugagcauccagcugaucaacaaggccgugaacgcccugaucaacgaccagcucaucaugaagaaccaccuccgggacaucaugggcauccccuacugcaacuacuccaaguacugguaccugaaccacacggugaccgggaagaccagccugccccgcugcuggcuggucuccaacggcagcuaccugaacgagacccacuucuccgacgacaucgagcagcaggccgacaacaugaucacggagaugcuccagaaggaguacauggaccggcagggcaagaccccgcuggggcugguggaccucuucguguucagcaccuccuucuaccugaucagcaucuuccugcaccuggucaagaucccgugaggacuagucccuguucccagagcccacuuuuuuuucuuuuuuugaaauaaaauagccugucuuucagaucucaaaggcucuuuucagagccaccaaaaaaaaaaaaaaaaaaaaaaaaaaaaaaaaaaaaaaaaaaaaaaaaaaaaaaaaaaaaaaaaaaaaaaaaaaaaaaaaaaaaaaaaaaaaaaaaaaaaa

SEQ ID NO: 42295 - RNA, 1650 nt, Artificial Sequence
  mRNA product Design a-2 (hSL-A100) comprising derived and/or modified sequence from LASV(LASV237-NIG-2010;Clade II)__AIT17638__GPCmut13 (opt1)
aggagaguccgcucagccagguugcagaagcggcuuagcguguguccuaaucuucucucugcguguagguaggccugugccgcaaacaagcuuaccaugggccagaucaucaccuucuuccaggaggugccccacgucaucgaggaggugaugaacaucgugcugaucgcccucagccugcuggccauccucaaggggaucuacaacgucgcgaccugcggccuguucgggcugguguccuuccuccugcugugcggccgcagcugcuccacgaccuacaaggggguguacgagcuccagacccuggagcuggacauggccagccucaacaugaccaugccgcuguccugcacgaagaacaacagccaccacuacaucauggucggcaacgagaccggccuggagcucacccugaccaacacguccaucaucaaccacaaguucugcaaccugagcgacgcccacaagaaggaccucuacgaccacgcccugauguccaucaucagcaccuuccaccuguccauccccaacuucaaccaguacgaggccaugagcugcgacuucaacgggggcaagaucuccgugcaguacaaccucagccacaccuacgcgguggacgccgccaaccacugcgggaccaucgccaacggcguccugcagacguucaugcggauggcguggggcggguccuacaucgcccuggacagcggcaagggguccugggacugcaucaugaccagcuaccaguaccucaucauccagaacaccaccugggaggaccacugccaguucucccgccccagccccaucggcuaccuggggcugcucagccagcggacgcgcgacaucuacaucucccggcgccugcugggcaccuucaccuggacccucagcgacuccgagggcaacgagacgcccgggggcuacugccugacccgguggaugcugaucgaggccgagcucaagugcuucgggaacaccgccguggccaagugcaacgagaagcacgacgaggaguucugcgacaugcugcgccuguucgacuucaacaagcaggcgauccggcgccucaagaccgaggcccagaugagcauccagcugaucaacaaggccgugaacgcccugaucaacgaccagcucaucaugaagaaccaccuccgggacaucaugggcauccccuacugcaacuacuccaaguacugguaccugaaccacacggucaccgggaagaccagccugccccgcugcuggcugguguccaacggcagcuaccugaacgagacccacuucuccgacgacaucgagcagcaggccgacaacaugaucacggagcuccugcagaaggaguacauggaccggcagggcaagaccccgcuggggcucguggaccuguucgucuucagcaccuccuucuaccugaucagcaucuuccugcaccucaucaagaucccgugaggacuagucccuguucccagagcccacuuuuuuuucuuuuuuugaaauaaaauagccugucuuucagaucucaaaggcucuuuucagagccaccaaaaaaaaaaaaaaaaaaaaaaaaaaaaaaaaaaaaaaaaaaaaaaaaaaaaaaaaaaaaaaaaaaaaaaaaaaaaaaaaaaaaaaaaaaaaaaaaaaaaa

SEQ ID NO: 42296 - RNA, 1650 nt, Artificial Sequence
  mRNA product Design a-2 (hSL-A100) comprising derived and/or modified sequence from LASV(LASV253-NIG-2011;Clade II)__AIT17670__GPCmut13 (opt1)
aggagaguccgcucagccagguugcagaagcggcuuagcguguguccuaaucuucucucugcguguagguaggccugugccgcaaacaagcuuaccaugggccagaucaucaccuucuuccaggaggugccccacgucaucgaggaggugaugaacaucgugcugaucgcccucagccugcuggccauccucaaggggaucuacaacgucgcgaccugcggccuguucgggcugguguccuuccuccugcugugcggccgcagcugcuccacgaccuacaaggggguguacgagcuccagacccuggagcuggacauggccagccucaacaugaccaugccgcuguccugcacgaagaacaacagccaccacuacaucauggucggcaacgagaccggccuggagcucacccugaccaacacguccaucaucaaccacaaguucugcaaccugagcgacgcccacaagaagaaccucuacgaccacgcccugauguccaucaucagcaccuuccaccuguccauccccaacuucaaccaguacgaggccaugagcugcgacuucaacgggggcaagaucuccgugcaguacaaccucagccacaccuacgcgguggacgccgccaaccacugcgggaccaucgccaacggcguccugcagacguucaugcggauggcguggggcggguccuacaucgcccuggacagcggcaagggguccugggacugcaucaugaccagcuaccaguaccucaucauccagaacaccaccugggaggaccacugccaguucucccgccccagccccaucggcuaccuggggcugcucagccagcggacgcgcgacaucuacaucucccggcgccugcugggcaccuucaccuggacccucagcgacuccgagggcaacgagacgcccgggggcuacugccugacccgguggaugcugaucgaggccgagcucaagugcuucgggaacaccgccguggccaagugcaacgagaagcacgacgaggaguucugcgacaugcugcgccuguucgacuucaacaagcaggcgauccggcgccucaaggccgaggcccagaugagcauccagcugaucaacaaggccgugaacgcccugaucaacgaccagcucaucaugaagaaccaccuccgggacaucaugggcaucccguacugcaacuacuccaaguacugguaccugaaccacaccgucacggggcgcaccagccugccccggugcuggcugguguccaacggcagcuaccugaacgagacccacuucuccgacgacaucgagcagcaggcggacaacaugaucaccgagcuccugcagaaggaguacaucgaccgccagggcaagacgccccuggggcucguggaccuguucgucuucagcaccuccuucuaccugaucagcaucuuccugcaccucgugaagaucccgugaggacuagucccuguucccagagcccacuuuuuuuucuuuuuuugaaauaaaauagccugucuuucagaucucaaaggcucuuuucagagccaccaaaaaaaaaaaaaaaaaaaaaaaaaaaaaaaaaaaaaaaaaaaaaaaaaaaaaaaaaaaaaaaaaaaaaaaaaaaaaaaaaaaaaaaaaaaaaaaaaaaaa

SEQ ID NO: 42297 - RNA, 1650 nt, Artificial Sequence
  mRNA product Design a-2 (hSL-A100) comprising derived and/or modified sequence from LASV(LASV254-NIG-2011;Clade II)__AIT17674__GPCmut13 (opt1)
aggagaguccgcucagccagguugcagaagcggcuuagcguguguccuaaucuucucucugcguguagguaggccugugccgcaaacaagcuuaccaugggccagaucaucaccuucuuccaggaggugccccacgucaucgaggaggugaugaacaucgugcugaucgcccucagccugcuggccauccucaaggggaucuacaacgucgcgaccugcggccuguucgggcugguguccuuccuccugcugugcggccgcagcugcuccacgaccuacaaggggguguacgagcuccagacccuggagcuggacaugaccaaccucaacaugacgaugccgcugagcugcaccaagaacaacucccaccacuacaucauggucggcaacgagaccggccuggagcucacccugacgaacaccagcaucaucaaccacaaguucugcaaccuguccgacgcccacaagaagaaccucuacaaccacgcccugaugagcaucaucuccaccuuccaccugagcauccccaacuucaaccaguacgaggccauguccugcgacuucaacgggggcaagaucagcgugcaguacaaccucucccacagcuacgccguggacgcggccaaccacugcgggaccaucgccaacggcguccugcagacguucaugcggauggccuggggcggguccuacaucgcgcuggacagcggcaaggggaacugggacugcaucaugaccuccuaccaguaccucaucauccagaacaccaccugggaggaccacugccaguucagccgccccucccccaucggcuaccuggggcugcucagccagcggacgcgcgacaucuacaucagccggcgccugcugggcaccuucaccuggacccucuccgacagcgagggcaacgagacgcccgggggcuacugccugacccgguggaugcugaucgaggccgagcucaagugcuucgggaacaccgccguggccaagugcaacgagaagcacgacgaggaguucugcgacaugcugcgccuguucgacuucaacaagcaggccauccggcgccucaagaccgaggcgcaggccaacauccagcugaucaacaaggccgugaacgcccugaucaacgaccagcucaucaugaagaaccaccuccgggacaucaugggcauccccuacugcaacuacuccaaguacugguaccugaaccacacggucaccgggaagaccagccugccccgcugcuggcugguguccaacggcagcuaccugaacgagacccacuucuccgacgacaucgagcagcaggccgacaacaugaucacggagcuccugcagaaggaguacauggaccggcagggcaagaccccgcuggggcucguggaccuguucgucuucagcaccuccuucuaccugaucagcaucuuccugcaccucgugaagaucccgugaggacuagucccuguucccagagcccacuuuuuuuucuuuuuuugaaauaaaauagccugucuuucagaucucaaaggcucuuuucagagccaccaaaaaaaaaaaaaaaaaaaaaaaaaaaaaaaaaaaaaaaaaaaaaaaaaaaaaaaaaaaaaaaaaaaaaaaaaaaaaaaaaaaaaaaaaaaaaaaaaaaaa

SEQ ID NO: 42298 - RNA, 1650 nt, Artificial Sequence
  mRNA product Design a-2 (hSL-A100) comprising derived and/or modified sequence from LASV(Nig08-A19;Clade III)__ADU56618__GPCmut13 (opt1)
aggagaguccgcucagccagguugcagaagcggcuuagcguguguccuaaucuucucucugcguguagguaggccugugccgcaaacaagcuuaccaugggccagaucgugaccuucuuccaggaggucccccacgugaucgaggaggugaugaacaucguccugaucgcccucagcauccuggccauccugaaggggcucuacaacaucgcgaccugcggccugaucgggcuggugacguuccuccugcuguccggccgcagcugcuccaugaccuacaaggggguguacgagcuccagacccuggagcugaacaugaacacccucaacaugacgaugccgcugagcugcaccaagaacaacucccaccacuacaucauggucggcaacgagaccggccuggagcucacccugacgaacaccagccugcuccaccacaaguucugcaaccuguccgacgcccacaagaagaaccuguacgaccacacccucaugagcaucaucuccaccuuccaccugagcauccccaacuucaaccaguacgaggccauguccugcgacuucaacgggggcaagaucacggugcaguacaaccugagccacuccuacgccaucgacgccgcgaaccacugcgggaccguggccaacggcguccuccagaccuucaugcggauggccuggggcgggagcuacaucgcccuggacuccggccgcgggaagugggacugcaucaugaccagcuaccaguaccugaucauccagaacacgaccugggaggaccacugccaguucucccggcccagccccaucggcuaccucgggcugcugucccagcgcacccgggacaucuacaucagccgccggcuccugggcaccuucacguggacccugagcgacuccgagggcaacgagacccccgggggcuacugccucacccgcuggaugcugaucgaggcggagcugaagugcuucgggaacacggccguggccaagugcaacgagaagcacgacgaggaguucugcgacaugcuccggcuguucgacuucaacaagcaggccauccgccggcugaaggccgaggcgcagaugagcauccagcucaucaacaaggccgugaacgcccugaucaacgaccagcugaucaugaagaaccaccuccgcgacaucaugggcauccccuacugcaacuacuccaaguacugguaccugaaccacaccagcaccgggcggaccucccugccccgcugcuggcucgucagcaacggcuccuaccugaacgagacgcacuucagcgacgacaucgagcagcaggccgacaacaugaucaccgagaugcugcagaaggaguaccucgaccggcagggcaagaccccgcuggggcugguggaccuguucguguucuccaccagcuucuaccucaucuccaucuuccugcaccuggucaagaucccgugaggacuagucccuguucccagagcccacuuuuuuuucuuuuuuugaaauaaaauagccugucuuucagaucucaaaggcucuuuucagagccaccaaaaaaaaaaaaaaaaaaaaaaaaaaaaaaaaaaaaaaaaaaaaaaaaaaaaaaaaaaaaaaaaaaaaaaaaaaaaaaaaaaaaaaaaaaaaaaaaaaaaa

SEQ ID NO: 42299 - RNA, 1653 nt, Artificial Sequence
  mRNA product Design a-2 (hSL-A100) comprising derived and/or modified sequence from LASV(G1180-SLE-2010;Clade IV)__AIT17168__GPCmut13 (opt1)
aggagaguccgcucagccagguugcagaagcggcuuagcguguguccuaaucuucucucugcguguagguaggccugugccgcaaacaagcuuaccaugggccagaucgugaccuucuuccaggaggucccccacgugaucgaggaggugaugaacaucguccugaucgcccucagcauccuggccgugcugaaggggcucuacaacuucgcgaccugcggccugguggggcugcucaccuuccugcugcucugcggccgcuccugcaccgccagccgguacaagggggucuacgagcugcagacccuggagcucaacauggagacccugaacaugacgaugccgcuguccugcaccaagaacaacagccaccacuacaucauggugggcaacgagaccggccucgagcugacccugacgaacaccuccaucaucaaccacaaguucugcaaccucagcgacgcccacaagaagaaccuguacgaccacgcccugauguccaucaucagcaccuuccaccucuccauccccaacuucaaccaguacgaggccaugagcugcgacuucaacgggggcaagaucuccgugcaguacaaccugagccacuccuacgcgggggacgccgccaaccacugcggcaccgucgccaacggggugcugcagacguucaugcgcauggcguggggcggcagcuacaucgcccucgacuccgggcacggcagcugggacugcaucaugaccuccuaccaguaccugaucauccagaacaccaccugggaggaccacugccaguucagccggcccucccccaucggguaccugggccuccugagccagcgcacgcgggacaucuacaucagccgccggcugcucggcaccuucaccuggacccuguccgacagcgaggggaaggacacgccgggcggguacugccugacccgcuggaugcucaucgaggccgagcugaagugcuucggcaacaccgccguggccaagugcaacgagaagcacgacgaggaguucugcgacaugcugcggcuguucgacuucaacaagcaggcgauccagcgccugaaggccgaggcccagauguccauccagcugaucaacaaggccgucaacgcccucaucaacgaccagcugaucaugaagaaccaccuccgggacaucauggggauccccuacugcaacuacagcaaguacugguaccucaaccacaccacgaccggcaagaccucccugcccaagugcuggcuggugagcaacggcuccuaccucaacgagacccacuucagcgacgacaucgagcagcaggcggacaacaugaucacggagaugcugcagaaggaguacauggagcgccaggggaagacgccccugggccucguggaccuguucgucuucuccaccagcuucuaccugaucuccaucuuccugcaccucgugaagaucccgugaggacuagucccuguucccagagcccacuuuuuuuucuuuuuuugaaauaaaauagccugucuuucagaucucaaaggcucuuuucagagccaccaaaaaaaaaaaaaaaaaaaaaaaaaaaaaaaaaaaaaaaaaaaaaaaaaaaaaaaaaaaaaaaaaaaaaaaaaaaaaaaaaaaaaaaaaaaaaaaaaaaaa

SEQ ID NO: 42300 - RNA, 1653 nt, Artificial Sequence
  mRNA product Design a-2 (hSL-A100) comprising derived and/or modified sequence from LASV(G1442-SLE-2011;Clade IV)__AIT17180__GPCmut13 (opt1)
aggagaguccgcucagccagguugcagaagcggcuuagcguguguccuaaucuucucucugcguguagguaggccugugccgcaaacaagcuuaccaugggccagaucgugaccuucuuccaggaggucccccacgugaucgaggaggugaugaacaucguccugaucgcccucagcauccuggccgugcugaaggggcucuacaacguggcgaccugcggccugaucgggcuggucacguuccuccugcugugcggccgcuccugcaccaccacccucuacaaggggguguacgagcugcagacgcuggagcucaacauggagacccugaacaugaccaugccgcugagcugcaccaagaacaacucccaccacuacauccgggugggcaacgagacgggccucgagcugacccugaccaacaccagcaucaucaaccacaaguucugcaaccucuccgacgcccacaagaagaaccuguacgaccacgcccugaugagcaucaucuccacguuccaccucagcauccccaacuucaaccaguacgaggccauguccugcgacuucaacgggggcaagaucagcguccaguacaaccugucccacagcuacgccggggacgcggccaaccacugcggcaccguggccaacggggugcugcagaccuucaugcgcauggccuggggcggcuccuacaucgcgcucgacagcgggcggggcaacugggacugcaucaugaccuccuaccaguaccugaucauccagaacacgaccugggacgaccacugccaguucagccgccccucccccaucggguaccugggccuccugagccagcggacccgcgacgucuacaucucccggcgccugcucggcaccuucacguggacccugagcgacagcgaggggaaggacaccccgggcggguacugccugacccgguggaugcucaucgaggccgagcugaagugcuucggcaacacggccguggccaagugcaacgagaagcacgacgaggaguucugcgacaugcugcgccucuucgacuucaacaagcaggccauccagcggcugaaggcggaggcccagauguccauccagcugaucaacaaggccgugaacgcccucaucaacgaccagcugaucaugaagaaccaccuccgcgacaucauggggauccccuacugcaacuacagcaaguacugguaccugaacaacaccgccaccggcaagaccucccugcccaagugcuggcugaucagcaacggcuccuaccucaacgagacgcacuucagcgacgacaucgagcaggaggcggacaacaugaucaccgagaugcugcagaaggaguacauggagcggcaggggaagacgccccugggccucgucgaccuguucguguucuccaccagcuucuaccugaucuccaucuuccugcaccucgugaagaucccgugaggacuagucccuguucccagagcccacuuuuuuuucuuuuuuugaaauaaaauagccugucuuucagaucucaaaggcucuuuucagagccaccaaaaaaaaaaaaaaaaaaaaaaaaaaaaaaaaaaaaaaaaaaaaaaaaaaaaaaaaaaaaaaaaaaaaaaaaaaaaaaaaaaaaaaaaaaaaaaaaaaaaa

SEQ ID NO: 42301 - RNA, 1653 nt, Artificial Sequence
  mRNA product Design a-2 (hSL-A100) comprising derived and/or modified sequence from LASV(G3010-SLE-2013;Clade IV)__AIT17344__GPCmut13 (opt1)
aggagaguccgcucagccagguugcagaagcggcuuagcguguguccuaaucuucucucugcguguagguaggccugugccgcaaacaagcuuaccaugggccagaucgugaccuucuuccaggaggucccccacgugaucgaggaggugaugaacaucguccugaucgcccucagcauccuggccgugcugaaggggcucuacaacuucgcgaccugcggccugguggggcuggucacguuccuccugcugugcggccgcuccugcaccaccagccucuacaaggggguguacgagcugcagacccuggagcucaacauggagacgcugaacaugaccaugccgcuguccugcaccaagaacaacagccaccacuacaucauggugggcaacgagaccggccucgagcugacgcugaccaacaccuccaucaucaaccacaaguucugcaaccucagcgacgcccacaagaagaaccuguacaaccacgcccugauguccaucaucagcaccuuccaccucuccauccccaacuucaaccaguacgaggccaugagcugcgacuucaacgggggcaagaucuccguccaguacaaccugagccacuccuacgccggggacgcggccagccacugcggcacgguggccaacggggugcugcagaccuucaugcggauggccuggggcggcuccuacaucgcgcucgacagcggguacggcaagugggacugcaucaugaccuccuaccaguaccugaucauccagaacaccacgugggaggaccacugccaguucagccgccccucccccaucggguaccugggccuccugagccagcggacccgcgacaucuacaucagccggcgccugcucggcaccuucaccuggacgcuguccgacagcgaggggaaggacaccccgggcggguacugccugacccgguggaugcucaucgaggccgagcugaagugcuucggcaacaccgccgucgccaagugcaacgagaagcacgacgaggaguucugcgacaugcugcgccucuucgacuucaacaagcaggccauccagcggcugaagacggaggcgcagauguccauccagcugaucaacaaggccgugaacgcccucaucaacgaccagcugaucaugaagaaccaccuccgcgacaucauggggauccccuacugcaacuacagcaaguacugguaccugaaccacaccaccaccggcaagacgucccugcccaagugcuggcuggugagcaacggcuccuaccucaacgagacccacuucagcgacgacaucgagcagcaggccgacaacaugaucaccgagaugcugcagaaggaguacauggagcggcaggggaagacgccccugggccucgucgaccuguucguguucuccaccagcuucuaccugaucuccaucuuccugcaccucgugaagaucccgugaggacuagucccuguucccagagcccacuuuuuuuucuuuuuuugaaauaaaauagccugucuuucagaucucaaaggcucuuuucagagccaccaaaaaaaaaaaaaaaaaaaaaaaaaaaaaaaaaaaaaaaaaaaaaaaaaaaaaaaaaaaaaaaaaaaaaaaaaaaaaaaaaaaaaaaaaaaaaaaaaaaaa

SEQ ID NO: 42302 - RNA, 1653 nt, Artificial Sequence
  mRNA product Design a-2 (hSL-A100) comprising derived and/or modified sequence from LASV(G502-SLE-2009;Clade IV)__AIT17126__GPCmut13 (opt1)
aggagaguccgcucagccagguugcagaagcggcuuagcguguguccuaaucuucucucugcguguagguaggccugugccgcaaacaagcuuaccaugggccagaucgugaccuucuuccaggaggucccccacgugaucgaggaggugaugaacaucguccugaucgcccucagcauccuggccgugcugaaggggcucuacaacuucgcgaccugcggccugguggggcugcucacguuccugcugcucugcggccgcuccugcaccaccgggcuguacaagggcgucuacgagcugcagacccucgagcugaacauggagacgcugaacaugaccaugccgcucagcugcaccaagaacaacucccaccacuacaucauggugggcaacgagaccgggcuggagcugacgcucaccaacaccagcaucaucaaccacaaguucugcaaccuguccgacgcccacaagaagaaccuguacgaccacgcccucaugagcaucaucuccaccuuccaccugagcauccccaacuucaaccaguacgaggccauguccugcgacuucaacggcgggaagaucagcgugcaguacaaccugucccacagcuacgccggcgacgcggccgaccacugcgggacggucgccaacggcgugcuccagaccuucaugcggauggccuggggcggguccuacaucgcgcuggacagcggccgcgggcggugggacugcaucaugaccuccuaccaguaccugaucauccagaacaccacgugggaggaccacugccaguucagccgccccucccccaucggcuaccucggccugcugagccagcggacccgcgacaucuacaucucccggcgccuccuggggaccuucaccuggacgcugagcgacagcgagggcaaggacacccccgggggcuacugccucacccgguggaugcugaucgaggccgagcugaagugcuucgggaacaccgccguggccaagugcaacgagaagcacgacgaggaguucugcgacaugcuccgccuguucgacuucaacaagcaggccauccagcggcugaaggcggaggcccagauguccauccagcucaucaacaaggccgucaacgcccugaucaacgaccagcuggugaugaagaaccaccuccgcgacaucaugggcauccccuacugcaacuacagccgguacugguaccugaaccacacgaccaccggccgcaccucccugcccaagugcuggcucgugagcaacggguccuaccugaacgagacgcacuucagcgacgacaucgagcagcaggccgacaacaugaucaccgagaugcugcagaaggaguacauggagcggcagggcaagaccccgcucgggcuggucgaccuguucguguucuccaccagcuucuaccugaucuccaucuuccuccaccuggugaagaucccgugaggacuagucccuguucccagagcccacuuuuuuuucuuuuuuugaaauaaaauagccugucuuucagaucucaaaggcucuuuucagagccaccaaaaaaaaaaaaaaaaaaaaaaaaaaaaaaaaaaaaaaaaaaaaaaaaaaaaaaaaaaaaaaaaaaaaaaaaaaaaaaaaaaaaaaaaaaaaaaaaaaaaa

SEQ ID NO: 42303 - RNA, 1653 nt, Artificial Sequence
  mRNA product Design a-2 (hSL-A100) comprising derived and/or modified sequence from LASV(G733-SLE-2010;Clade IV)__AIT17154__GPCmut13 (opt1)
aggagaguccgcucagccagguugcagaagcggcuuagcguguguccuaaucuucucucugcguguagguaggccugugccgcaaacaagcuuaccaugggccagaucgugaccuucuuccaggaggucccccacgugaucgaggaggugaugaacaucguccugaucgcccucagcauccuggccgugcugaaggggcucuacaacuucgcgaccugcggcaucguggggcuggucuccuuccugcuccugugcggccgcagcugcacgaccucccuguacaaggggguguacgagcuccagacccuggagcugaacauggagacccucaacaugacgaugccgcugagcugcaccaagaacaacucccaccacuacaucauggugggcaacgagaccggccuggagcucacccugacgaacaccagcaucaucaaccacaaguucugcaaccuguccgacgcccacaagaagaaccucuacgaccacgcccugaugagcaucaucuccaccuuccaccugagcauccccaacuucaaccaguacgaggccauguccugcgacuucaacgggggcaagaucagcguccaguacaaccucucccacagcuacgccggggacgcggccaaccacugcggcaccaucgccaacggggugcugcagacguucaugcggauggccuggggcggcuccuacaucgcgcuggacagcgggcgcgaccggugggacugcaucaugaccuccuaccaguaccucaucauccagaacaccaccugggaggaccacugccaguucagccgccccucccccaucggcuaccuggggcugcucagccagcggacgcgcgacaucuacaucagccggcgccugcugggcaccuucaccuggacccucuccgacagcgagggcaaggacacgcccgggggcuacugccugacccgguggaugcugaucgaggccgagcucaagugcuucgggaacaccgccguggccaagugcaacgagaagcacgacgaggaguucugcgacaugcugcgccuguucgacuucaacaagcaggccauccagcggcucaaggcggaggcccagauguccauccagcugaucaacaaggccgucaacgcccugaucaacgaccagcucaucaugaagaaccaccuccgcgacaucaugggcauccccuacugcaacuacagcaaguacugguaccugaaccacaccacgaccgggaagaccucccugcccaagugcuggcuggugagcaacggcuccuaccugaacgagacccacuucagcgacgacaucgagcagcaggccgacaacaugaucacggagaugcuccagaaggaguacauggagcggcagggcaagaccccgcuggggcugguggaccucuucgucuucuccaccagcuucuaccugaucuccaucuuccugcaccuggugaagaucccgugaggacuagucccuguucccagagcccacuuuuuuuucuuuuuuugaaauaaaauagccugucuuucagaucucaaaggcucuuuucagagccaccaaaaaaaaaaaaaaaaaaaaaaaaaaaaaaaaaaaaaaaaaaaaaaaaaaaaaaaaaaaaaaaaaaaaaaaaaaaaaaaaaaaaaaaaaaaaaaaaaaaaa

SEQ ID NO: 42304 - RNA, 1653 nt, Artificial Sequence
  mRNA product Design a-2 (hSL-A100) comprising derived and/or modified sequence from MOPV/LASV reassortant(IGS-1;Clade IV)__AFY05576__GPCmut13 (opt1)
aggagaguccgcucagccagguugcagaagcggcuuagcguguguccuaaucuucucucugcguguagguaggccugugccgcaaacaagcuuaccaugggccagaucgugaccuucuuccaggaggucccccacgugaucgaggaggugaugaacaucguccugaucgcccucagcgugcuggccgugcugaaggggcucuacaacuucgcgaccugcggccuggucgggcuggugacguuccuccugcugugcggccgcuccugcaccaccagccucuacaaggggguguacgagcugcagacccuggagcucaacauggagacgcugaacaugaccaugccgcuguccugcaccaagaacaacagccaccacuacaucauggucggcaacgagaccggccucgagcugacgcugaccaacaccuccaucaucaaccacaaguucugcaaccucagcgacgcccacaagaagaaccuguacgaccacgcccugauguccaucaucagcaccuuccaccucuccauccccaacuucaaccaguacgaggccaugagcugcgacuucaacgggggcaagaucuccgugcaguacaaccugagccacuccuacgccggggacgcggccaaccacugcggcacgguggccaacgggguccugcagaccuucaugcggauggccuggggcggcagcuacaucgcgcucgacuccgggcgcggcaacugggacugcaucaugaccagcuaccaguaccugaucauccagaacaccacgugggaggaccacugccaguucucccggcccagccccaucggguaccugggccuccugucccagcgcacccgggacaucuacaucagccgccggcugcucggcaccuucaccuggacgcugagcgacuccgagggggaggacaccccgggcggguacugccugacccgcuggaugcucaucgaggccgagcugaagugcuucggcaacaccgccguggccaagugcaacgagaagcacgacgaggaguucugcgacaugcugcggcuguucgacuucaacaagcaggccauccagcgccugaaggcggaggcccagaugagcauccagcugaucaacaaggccgugaacgcccucaucaacgaccagcugaucaugaagaaccaccuccgggacaucauggggauccccuacugcaacuacuccaaguacugguaccucaaccacacgaccaccggccgcaccagccugcccaagugcuggcuggucuccaacggcagcuaccucaacgagacgcacuucuccgacgacaucgagcagcaggccgacaacaugaucaccgagaugcugcagaaggaguacauggagcggcaggggaagacgccccugggccucguggaccuguucguguucagcaccuccuucuaccugaucagcaucuuccugcaccucgucaagaucccgugaggacuagucccuguucccagagcccacuuuuuuuucuuuuuuugaaauaaaauagccugucuuucagaucucaaaggcucuuuucagagccaccaaaaaaaaaaaaaaaaaaaaaaaaaaaaaaaaaaaaaaaaaaaaaaaaaaaaaaaaaaaaaaaaaaaaaaaaaaaaaaaaaaaaaaaaaaaaaaaaaaaaa

SEQ ID NO: 42305 - RNA, 1653 nt, Artificial Sequence
  mRNA product Design a-2 (hSL-A100) comprising derived and/or modified sequence from LASV(LM765-SLE-2012;Clade IV)__AIT17814__GPCmut13 (opt1)
aggagaguccgcucagccagguugcagaagcggcuuagcguguguccuaaucuucucucugcguguagguaggccugugccgcaaacaagcuuaccaugggccagaucgugaccuucuuccaggaggucccccacgugaucgaggaggugaugaacaucguccugaucgcccucagcauccuggccgugcugaaggggcucuacaacuucgcgaccugcggccugguggggcuggucacguuccuccugcugugcggccgcuccugcaccaccagccucuacaaggggguguacgagcugcagacccuggagcucaacauggagacgcugaacaugaccaugccgcuguccugcaccaagaacaacagccaccacuacaucauggugggcaacgagaccggccucgagcugacgcugaccaacaccuccaucaucgaccacaaguucugcaaccucagcgacgcccaccggaagaaccuguacgaccacgcccugauguccaucaucagcaccuuccaccucuccauccccaacuucaaccaguacgaggccaugagcugcgacuucaacgggggcaagaucuccguccaguacaaccugagccacuccuacgccaaggacgcggccgaccacugcgggacgguggccaacggcgugcugcagaccuucaugcgcauggccuggggcgggagcuacaucgcgcucgacuccggccgggggcgcugggacugcaucaugaccagcuaccaguaccugaucauccagaacaccacgugggaggaccacugccaguucucccggcccagccccaucggcuaccuggggcuccugucccagcgcacccgggacaucuacaucagccgccggcugcucggcaccuucaccuggacgcugagcgacuccgagggcaaggacacccccgggggcuacugccugacccgcuggaugcucaucgaggccgagcugaagugcuucgggaacaccgccgucgccaagugcaacgagaagcacgacgaggaguucugcgacaugcugcggcuguucgacuucaacaagcaggccauccagcgccugaaggcggaggcccagaugagcauccagcugaucaacaaggccgugaacgcccucaucaacgaccagcugaucaugaagaaccaccuccgggacaucaugggcauccccuacugcaacuacuccaaguacugguaccucaaccacacgaccaccgggaagaccagccugcccaagugcuggcugguguccaacggcagcuaccucaacgagacgcacuucuccgacgacaucgagcagcaggccgacaacaugaucaccgagaugcugcagaaggaguacauggagcgccagggcaagaccccgcuggggcucgucgaccuguucguguucagcaccuccuucuaccugaucagcaucuuccugcaccucgugaagaucccgugaggacuagucccuguucccagagcccacuuuuuuuucuuuuuuugaaauaaaauagccugucuuucagaucucaaaggcucuuuucagagccaccaaaaaaaaaaaaaaaaaaaaaaaaaaaaaaaaaaaaaaaaaaaaaaaaaaaaaaaaaaaaaaaaaaaaaaaaaaaaaaaaaaaaaaaaaaaaaaaaaaaaa

SEQ ID NO: 42306 - RNA, 1653 nt, Artificial Sequence
  mRNA product Design a-2 (hSL-A100) comprising derived and/or modified sequence from LASV(LM776-SLE-2012;Clade IV)__AIT17824__GPCmut13 (opt1)
aggagaguccgcucagccagguugcagaagcggcuuagcguguguccuaaucuucucucugcguguagguaggccugugccgcaaacaagcuuaccaugggccagaucgugaccuucuuccaggaggucccccacgugaucgaggaggugaugaacaucguccugaucgcccucagcauccuggccgugcugaaggggcucuacaacuucgcgaccugcggccugguggggcuggucacguuccuccugcugugcggccgcuccugcaccaccagcguguacaaggggguguacgagcuccagacccuggagcugaacauggagacgcucaacaugaccaugccgcuguccugcaccaagaacaacagccaccacuacaucauggucggcaacgagaccggccuggagcucacgcugaccaacaccuccaucaucaaccacaaguucugcaaccugagcgacgcccacaagaagaaccucuacgaccacgcccugauguccaucaucagcaccuuccaccuguccauccccaacuucaaccaguacgaggccaugagcugcgacuucaacgggggcaagaucuccgugcaguacaaccucagccacuccuacgccggggacgcggccaaccacugcggcacgguggccaacgggguccugcagaccuucaugcggauggccuggggcggcagcuacaucgcgcuggacuccgggcacggcaagugggacugcaucaugaccagcuaccaguaccucaucauccagaacaccacgugggaggaccacugccaguucucccgccccagccccaucggguaccugggccugcucucccagcggacccgcgacaucuacaucagccggcgccugcugggcaccuucaccuggacgcucagcgacuccgaggggaaggacaccccgggcggguacugccugacccgguggaugcugaucgaggccgagcucaagugcuucggcaacaccgccguggccaagugcaacgagaagcacgacgaggaguucugcgacaugcugcgccuguucgacuucaacaagcaggccauccagcggcucaaggcggaggcccagaugagcauccagcugaucaacaaggccgugaacgcccugaucaacgaccagcucaucaugaagaaccaccuccgcgacaucauggggauccccuacugcaacuacuccaaguacugguaccugaaccacacgaccaccggcaagaccagccugcccaagugcuggcuggucuccaacggcagcuaccugaacgagacgcacuucuccgacgacaucgagcagcaggccgacaacaugaucaccgagaugcuccagaaggaguacauggagcggcaggggaagacgccccugggccugguggaccucuucguguucagcaccuccuucuaccugaucagcaucuuccugcaccuggucaagaucccgugaggacuagucccuguucccagagcccacuuuuuuuucuuuuuuugaaauaaaauagccugucuuucagaucucaaaggcucuuuucagagccaccaaaaaaaaaaaaaaaaaaaaaaaaaaaaaaaaaaaaaaaaaaaaaaaaaaaaaaaaaaaaaaaaaaaaaaaaaaaaaaaaaaaaaaaaaaaaaaaaaaaaa

SEQ ID NO: 42307 - RNA, 1653 nt, Artificial Sequence
  mRNA product Design a-2 (hSL-A100) comprising derived and/or modified sequence from LASV(Mad39;Clade IV)__ANH09722__GPCmut13 (opt1)
aggagaguccgcucagccagguugcagaagcggcuuagcguguguccuaaucuucucucugcguguagguaggccugugccgcaaacaagcuuaccaugggccagaucgugaccuucuuccaggaggucccccacgugaucgaggaggugaugaacaucguccugaucgcccucagcauccuggccgugcugaaggggcucuacaacguggcgaccugcggccugaucgggcuggucacguuccuccugcugugcggccgcuccugcaccaccacccucuacaaggggguguacgagcugcaggcccuggagcucaacauggagacgcugaacaugaccaugccgcugagcugcaccaagaacaacucccaccacuacauccgggugggcaacgagaccggccucgagcugacgcugaccaacaccagccucaucaaccacaaguucugcaaccuguccgacgcccacaagaagaaccuguacgaccacgcccucaugagcaucaucuccaccuuccaccugagcauccccaacuucaaccaguacgaggccauguccugcgacuucaacgacgggaagaucagcguccaguacaaccugucccacacguacgcgggcgacaccgccaaccacugcgggaccguggccaacggcgugcuccagaccuucaugcgcauggccuggggcgggagcuacaucgcgcuggacuccggccgcgggggcugggacugcaucaugacgagcuaccaguaccugaucauccagaacaccaccugggaggaccacugccaguucucccggcccagccccaucggguaccucggccugcugucccagcggacccgcgacaucuacaucagccggcgccuccugggcacguucaccuggacccuguccgacagcgaggggaaggacaccccgggcggguacugccucacgcgguggaugcugaucgaggccgagcugaagugcuucggcaacaccgccgucgccaagugcaacgagaagcacgacgaggaguucugcgacaugcuccgccuguucgacuucaacaagcaggccauccagcggcugaaggcggaggcccagaugagcauccagcucaucaacaaggccgugaacgcccugaucaacgaccagcugaucaugaagaaccaccuccgcgacaucauggggauccccuacugcaacuacuccaaguacugguaccugaaccacaccgugaccggcaagacgagccugcccaagugcuggcucgucuccaacggcagcuaccugaacgagacccacuucuccgacgacaucgagcagcaggccgacaacaugaucaccgagaugcugcagaaggaguacauggagcggcaggggaagacgccccucggccugguggaccuguucguguucagcaccuccuucuaccugaucagcaucuuccuccaccuggucaagaucccgugaggacuagucccuguucccagagcccacuuuuuuuucuuuuuuugaaauaaaauagccugucuuucagaucucaaaggcucuuuucagagccaccaaaaaaaaaaaaaaaaaaaaaaaaaaaaaaaaaaaaaaaaaaaaaaaaaaaaaaaaaaaaaaaaaaaaaaaaaaaaaaaaaaaaaaaaaaaaaaaaaaaaa

SEQ ID NO: 42308 - RNA, 1653 nt, Artificial Sequence
  mRNA product Design a-2 (hSL-A100) comprising derived and/or modified sequence from LASV(Z0947-SLE-2011;Clade IV)__AIT17840__GPCmut13 (opt1)
aggagaguccgcucagccagguugcagaagcggcuuagcguguguccuaaucuucucucugcguguagguaggccugugccgcaaacaagcuuaccaugggccagaucgugaccuucuuccaggaggucccccacgugaucgaggaggugaugaacaucguccugaucgcccucagcauccuggccgugcugaaggggcucuacaacuucgcgaccugcggccugguggggcuggucacguuccuccugcugugcggccgcuccugcaccaucagccucuacaaggggguguacgagcugcagacccuggagcucaacauggagacccugaacaugacgaugccgcuguccugcaccaagaacaacagccaccacuacaucauggugggcaacgagaccggccucgagcugacccugacgaacaccuccaucaucaaccacaaguucugcaaccucagcgacgcccacaagaagaaccuguacgaccacgcccugauguccaucaucagcaccuuccaccucuccauccccaacuucaaccaguacgaggccaugagcugcgacuucaacgggggcaagaucuccguccaguacaaccugagccacuccuacgccggggacgcggccaaccacugcggcaccguggccaacggggugcugcagacguucaugcggauggccuggggcggcagcuacaucgcgcucgacuccgggcgcgaccggugggacugcaucaugaccagcuaccaguaccugaucauccagaacaccaccugggaggaccacugccaguucucccgccccagccccaucggcuaccuggggcuccugucccagcggacgcgcgacaucuacaucagccggcgccugcucggcaccuucaccuggacccugagcgacuccgagggcaaggacacgcccgggggcuacugccugacccgguggaugcucaucgaggccgagcugaagugcuucgggaacaccgccgucgccaagugcaacgagaagcacgacgaggaguucugcgacaugcugcgccucuucgacuucaacaagcaggccauccagcggcugaaggcggaggcccagaugagcauccagcugaucaacaaggccgugaacgcccucaucaacgaccagcugaucaugaagaaccaccuccgcgacaucaugggcauccccuacugcaacuacuccaaguacugguaccugaaccacaccacgaccgggaagaccagccugcccaagugcuggcugguguccaacggcagcuaccucaacgagacccacuucuccgacgacaucgagcagcaggccgacaacaugaucacggagaugcugcagaaggaguacauggagcggcagggcaagaccccgcuggggcucgucgaccuguucguguucagcaccuccuucuaccugaucagcaucuuccugcaccucgugaagaucccgugaggacuagucccuguucccagagcccacuuuuuuuucuuuuuuugaaauaaaauagccugucuuucagaucucaaaggcucuuuucagagccaccaaaaaaaaaaaaaaaaaaaaaaaaaaaaaaaaaaaaaaaaaaaaaaaaaaaaaaaaaaaaaaaaaaaaaaaaaaaaaaaaaaaaaaaaaaaaaaaaaaaaa

SEQ ID NO: 42309 - RNA, 1653 nt, Artificial Sequence
  mRNA product Design a-2 (hSL-A100) comprising derived and/or modified sequence from LASV(Josiah;Clade IV)__NP_694870__GPCmut13 (opt1)
aggagaguccgcucagccagguugcagaagcggcuuagcguguguccuaaucuucucucugcguguagguaggccugugccgcaaacaagcuuaccaugggccagaucgugaccuucuuccaggaggucccccacgugaucgaggaggugaugaacaucguccugaucgcccucagcgugcuggccgugcugaaggggcucuacaacuucgcgaccugcggccuggucgggcuggugacguuccuccugcugugcggccgcuccugcaccaccagccucuacaaggggguguacgagcugcagacccuggagcucaacauggagacgcugaacaugaccaugccgcuguccugcaccaagaacaacagccaccacuacaucauggucggcaacgagaccggccucgagcugacgcugaccaacaccuccaucaucaaccacaaguucugcaaccucagcgacgcccacaagaagaaccuguacgaccacgcccugauguccaucaucagcaccuuccaccucuccauccccaacuucaaccaguacgaggccaugagcugcgacuucaacgggggcaagaucuccgugcaguacaaccugagccacuccuacgccggggacgcggccaaccacugcggcacgguggccaacgggguccugcagaccuucaugcggauggccuggggcggcagcuacaucgcgcucgacuccgggcgcggcaacugggacugcaucaugaccagcuaccaguaccugaucauccagaacaccacgugggaggaccacugccaguucucccggcccagccccaucggguaccugggccuccugucccagcgcacccgggacaucuacaucagccgccggcugcucggcaccuucaccuggacgcugagcgacuccgaggggaaggacaccccgggcggguacugccugacccgcuggaugcucaucgaggccgagcugaagugcuucggcaacaccgccguggccaagugcaacgagaagcacgacgaggaguucugcgacaugcugcggcuguucgacuucaacaagcaggccauccagcgccugaaggcggaggcccagaugagcauccagcugaucaacaaggccgugaacgcccucaucaacgaccagcugaucaugaagaaccaccuccgggacaucauggggauccccuacugcaacuacuccaaguacugguaccucaaccacacgaccaccggccgcaccagccugcccaagugcuggcuggucuccaacggcagcuaccucaacgagacgcacuucuccgacgacaucgagcagcaggccgacaacaugaucaccgagaugcugcagaaggaguacauggagcggcaggggaagacgccccugggccugguggaccucuucguguucagcaccuccuucuaccugaucagcaucuuccugcaccucgucaagaucccgugaggacuagucccuguucccagagcccacuuuuuuuucuuuuuuugaaauaaaauagccugucuuucagaucucaaaggcucuuuucagagccaccaaaaaaaaaaaaaaaaaaaaaaaaaaaaaaaaaaaaaaaaaaaaaaaaaaaaaaaaaaaaaaaaaaaaaaaaaaaaaaaaaaaaaaaaaaaaaaaaaaaaa

SEQ ID NO: 42310 - RNA, 1650 nt, Artificial Sequence
  mRNA product Design a-2 (hSL-A100) comprising derived and/or modified sequence from LASV(LP;Clade I)__AAF86701__GPCmut13 (opt1)
aggagaguccgcucagccagguugcagaagcggcuuagcguguguccuaaucuucucucugcguguagguaggccugugccgcaaacaagcuuaccaugggccagaucaucaccuucuuccaggaggugccccacgucaucgaggaggugaugaacaucgugcugaucgcccucagccugcuggccauccucaaggggcuguacaacaucgcgaccugcggcaucaucgggcuggucgccuuccucuuccugugcggcaaguccugcagccugacgcucaagggcggguacgagcugcagacccuggagcucaacauggagacccugaacaugaccaugccgcuguccugcacgaagaacagcucccaccacuacauccgcgugggcaacgagaccgggcucgagcugacccugaccaacacgagcaucaucaaccacaaguucugcaaccucuccgacgcccacaagaagaaccuguacgaccacgcccugaugagcaucaucuccaccuuccaccucagcauccccaacuucaaccaguacgaggccauguccugcgacuucaacggcgggaagaucagcgugcaguacaaccugucccacagcuacgcgggcgacgccgccgagcacugcgggaccgucgccaacggcgugcugcagaccuucaugcggauggcguggggcgggcgcuacaucgcccucgacuccggcaaggggaacugggacugcaucaugacgagcuaccaguaccugaucauccagaacaccaccugggaggaccacugccaguucucccggcccagccccaucggcuaccugggccuccugucccagcgcacccgggacaucuacaucagccgccggcugcucgggacguucaccuggacccugagcgacuccgagggcaacgagacccccgggggcuacugccugacgcgcuggaugcucaucgaggccgagcugaagugcuucgggaacaccgccguggccaagugcaacgagaagcacgacgaggaguucugcgacaugcugcggcuguucgacuucaacaagcaggcgauccgccggcugaaggccgaggcccagaugagcauccagcugaucaacaaggccgucaacgcccucaucaacgaccagcugaucaugaagaaccaccuccgcgacaucaugggcauccccuacugcaacuacuccaaguacugguaccucaaccacaccagcuccggccggaccagccugcccaagugcuggcugaucuccaacgggagcuaccucaacgagacgcaguucuccgacgacaucgagcagcaggcggacaacaugaucaccgagaugcugcagaaggaguacaucgagcgccagggcaagaccccgcuggggcugguggacaucuucaucuucagcaccuccuucuaccucaucagcaucuuccugcaccugaucaagaucccgugaggacuagucccuguucccagagcccacuuuuuuuucuuuuuuugaaauaaaauagccugucuuucagaucucaaaggcucuuuucagagccaccaaaaaaaaaaaaaaaaaaaaaaaaaaaaaaaaaaaaaaaaaaaaaaaaaaaaaaaaaaaaaaaaaaaaaaaaaaaaaaaaaaaaaaaaaaaaaaaaaaaaa

SEQ ID NO: 42311 - RNA, 1650 nt, Artificial Sequence
  mRNA product Design a-2 (hSL-A100) comprising derived and/or modified sequence from LASV(803213;Clade II)__AAF86703__GPCmut13 (opt1)
aggagaguccgcucagccagguugcagaagcggcuuagcguguguccuaaucuucucucugcguguagguaggccugugccgcaaacaagcuuaccaugggccagaucaucaccuucuuccaggaggugccccacgucaucgaggaggugaugaacaucgugcugaucgcccucagccugcuggccauccucaaggggaucuacaacgucgcgaccugcggccuguucgggcugaucuccuuccuccugcugugcggccgcagcugcuccgugacguacaaggggguguacgagcuccagacccuggagcugaacauggccaaccucaacaugaccaugccgcugagcugcaccaagaacaacucccaccacuacaucauggucggcaacgagacgggccuggagcucacccugaccaacaccagcaucaucaaccacaaguucugcaaccuguccgacgcccacaagaagaaccucuacgaccacgcccugaugagcaucaucuccacguuccaccugagcauccccaacuucaaccaguacgaggccauguccugcgacuucaacgggggcaagaucagcgugcaguacaaccucucccacagcuucgcgguggacgccgccaaccacugcgggaccaucgccaacggcguccugcagaccuucaugcggauggcguggggcggguccuacaucgcccuggacagcggcaaggggaacugggacugcaucaugaccuccuaccaguaccucaucauccagaacacgaccugggaggaccacugccaguucagccgccccucccccaucggcuaccuggggcugcucagccagcggacccgcgacaucuacaucagccggcgccugcugggcaccuucacguggacccucuccgacagcgagggcaacgaggcccccgggggcuacugccugacccgguggaugcugaucgaggccgagcucaagugcuucgggaacaccgccguggcgaagugcaacgagaagcacgacgaggaguucugcgacaugcugcgccuguucgacuucaacaagcaggccaucaagcggcucaagacggaggcccagauguccauccagcugaucaacaaggccgugaacgcccugaucaacgaccagcucaucaugaagaaccaccuccgcgacaucaugggcauccccuacugcaacuacagccgguacugguaccugaaccacaccgucaccgggaagaccucccugccccgcugcuggcuggugagcaacggcuccuaccugaacgagacgcacuucagcgacgacaucgagcagcaggcggacaacaugaucaccgagaugcuccagaaggaguacauggaccggcagggcaagaccccgcuggggcugguggaccuguucgucuucuccaccagcuucuaccucaucuccaucuuccugcaccuggugaagaucccgugaggacuagucccuguucccagagcccacuuuuuuuucuuuuuuugaaauaaaauagccugucuuucagaucucaaaggcucuuuucagagccaccaaaaaaaaaaaaaaaaaaaaaaaaaaaaaaaaaaaaaaaaaaaaaaaaaaaaaaaaaaaaaaaaaaaaaaaaaaaaaaaaaaaaaaaaaaaaaaaaaaaaa

SEQ ID NO: 42312 - RNA, 1650 nt, Artificial Sequence
  mRNA product Design a-2 (hSL-A100) comprising derived and/or modified sequence from LASV(GA391;Clade III)__CAA36645__GPCmut13 (opt1)
aggagaguccgcucagccagguugcagaagcggcuuagcguguguccuaaucuucucucugcguguagguaggccugugccgcaaacaagcuuaccaugggccagaucgugaccuucuuccaggaggucccccacgugaucgaggaggugaugaacaucguccugaucgcccucagcauccuggccauccugaaggggcucuacaacguggcgaccugcggccugaucgggcuggugacguuccuccugcuguccggccgcagcugcucccucaucuacaaggggaccuacgagcugcagacccuggagcucaacauggagacccugaacaugacgaugccgcugagcugcaccaagaacaacucccaccacuacauccgggucggcaacgagaccggccucgagcugacccugacgaacaccagcauccucaaccacaaguucugcaaccuguccgacgcccacaagcgcaaccuguacgaccacagccucauguccaucaucagcaccuuccaccuguccauccccaacuucaaccaguacgaggccaugagcugcgacuucaacgggggcaagaucaccgugcaguacaaccugucccacagcuucgccguggacgccgcggggcacugcggcacgcucgccaacgggguccugcagaccuucaugcggauggccuggggcggcuccuacaucgcccuggacagcgggcgcggcaacugggacugcaucaugaccuccuaccaguaccucaucauccagaacaccacgugggacgaccacugccaguucagccggcccucccccaucggguaccugggccugcucagccagcgcacccgggacaucuacaucagccgccggcugcugggcaccuucaccuggacgcucuccgacagcgaggggaacgagaccccgggcggguacugccugacccgcuggaugcugaucgaggcggagcucaagugcuucggcaacaccgccguggccaagugcaacgagaagcacgacgaggaguucugcgacaugcugcggcuguucgacuucaacaagcaggccauccgccggcucaagacggaggcccagauguccauccagcugaucaacaaggcggugaacgcccugaucaacgaccagcucaucaugaagaaccaccuccgcgacaucauggggauccccuacugcaacuacagccgguacugguaccugaaccacaccuccaccggcaagaccagccugccccgcugcuggcugaucuccaacggcagcuaccugaacgagacgaaguucuccgacgacaucgagcagcaggccgacaacaugaucaccgagaugcugcagaaggaguacaucgaccggcaggggaagacgccccucggccuggucgaccuguucguguucagcaccuccuucuaccucaucagcaucuuccugcaccuggugaagaucccgugaggacuagucccuguucccagagcccacuuuuuuuucuuuuuuugaaauaaaauagccugucuuucagaucucaaaggcucuuuucagagccaccaaaaaaaaaaaaaaaaaaaaaaaaaaaaaaaaaaaaaaaaaaaaaaaaaaaaaaaaaaaaaaaaaaaaaaaaaaaaaaaaaaaaaaaaaaaaaaaaaaaaa

SEQ ID NO: 42313 - RNA, 1653 nt, Artificial Sequence
  mRNA product Design a-2 (hSL-A100) comprising derived and/or modified sequence from LASV(AV;Clade V)__CCA30314__GPCmut13 (opt1)
aggagaguccgcucagccagguugcagaagcggcuuagcguguguccuaaucuucucucugcguguagguaggccugugccgcaaacaagcuuaccaugggccagaucgugaccuucuuccaggaggucccccacgugaucgaggaggugaugaacaucguccugaucgcccucagcauccuggccgugcugaaggggcucuacaacaucgcgaccugcggccugaucgggcugaucacguuccuccugcugugcggccgcuccugcagcuccaaccucuacaaggggguguacgagcugcagagccuggaccucaacauggagacccugaacaugaccaugccgcuguccugcaccaagaacaacagccaccacuacauccgggucggcaacgacacgggccucgagcugacccugaccaacaccuccauccucaaccacaaguucugcaaccugagcgacgcccacaagaaggaccuguacgaccacgcccucauguccaucaucagcacguuccaccuguccauccccaacuucaaccaguacgaggccaugagcugcgacuucaacgggggcaagaucuccgugcaguacaaccugagccacuccuacgccaucgacgcggccaaccacugcgggaccguggccaacggcauccuccagaccuucaugcgcauggccuggggcgggagcuacaucgcgcuggacuccggccgggggaacugggacugcaucaugaccagcuaccaguaccugaucauccagaacacgaccugggagaaccacugccaguucucccgccccagccccaucggcuaccucgggcugcugagccagcggacccgcgacaucuacaucucccggcgccuccugggcaccuucacguggacccugagcgacuccgagggcaacgccacccccgggggcuacugccucacccgguggaugcugaucgaggccgagcugaagugcuucgggaacacggccgucgccaagugcaacgagaagcacgacgaggaguucugcgacaugcuccgccuguucgacuucaacaagcaggcgaucagccggcugaaguccgaggcccagaugagcauccagcucaucaacaaggccgugaacgcccugaucaacgaccagcugaucaugaagaaccaccuccgcgacaucaugggcauccccuacugcaacuacuccaaguacugguaccugaaccacaccaucaccgggaagaccagccugcccaagugcuggcucguguccaacggcagcuaccugaacgagacgcacuucuccgacgacaucgagcagcaggccgacaacaugaucaccgagaugcugcagaaggaguacauggagcggcagggcaagaccccgcuggggcucgucgaccuguucguguucagcaccuccuucuaccugaucagcaucuuccuccgccuggugaagaucccgugaggacuagucccuguucccagagcccacuuuuuuuucuuuuuuugaaauaaaauagccugucuuucagaucucaaaggcucuuuucagagccaccaaaaaaaaaaaaaaaaaaaaaaaaaaaaaaaaaaaaaaaaaaaaaaaaaaaaaaaaaaaaaaaaaaaaaaaaaaaaaaaaaaaaaaaaaaaaaaaaaaaaa

SEQ ID NO: 42314 - RNA, 1650 nt, Artificial Sequence
  mRNA product Design a-2 (hSL-A100) comprising derived and/or modified sequence from LASV(Togo/2016/7082;Clade VI)__AMR44577__GPCmut13 (opt1)
aggagaguccgcucagccagguugcagaagcggcuuagcguguguccuaaucuucucucugcguguagguaggccugugccgcaaacaagcuuaccaugggccagaucaucaccuucuuccaggaggugccccacgucaucgaggaggugaugaacaucgugcugaucgcccucagccugcuggccauccucaagggggucuacaacguggcgaccugcggcaucaucgggcuggugacguuccuguuccucugcggccgcuccugcagccugaucuacaagggguccuacgagcugcagacccucgagcugaacauggagacccugaacaugaccaugccgcucagcugcacgaagaacuccagccaccacuacauccgggucggcaacgagaccggccuggagcugacccucaccaacacguccaucaucaaccacaaguucugcaaccugagcgacgcccacaagcgcaaccuguacgaccacgcccucauguccauccugagcaccuuccaccuguccauccccaacuucaaccaguacgaggccaugagcugcgacuucaacgggggcaagaucuccgugcaguacaaccucagccacgccuacgcgguggacgccgccgagcacugcgggaccgucgccaacggcgugcugcagaccuucaugcggauggcguggggcggguccuacaucgcccuggacagcggccgcgggaacugggacugcaucaugacguccuaccaguaccucaucauccagaacaccaccugggaggaccacugccaguucagccggcccucccccaucggcuaccuggggcugcucagccagcgcacccgggacaucuacaucagccgccggcugcugggcacguucaccuggacccucuccgacagcgagggcaacgagacccccgggggcuacugccugacgcgcuggaugcugaucgaggccgagcucaagugcuucgggaacaccgccguggccaagugcaacgagaagcacgacgaggaguucugcgacaugcugcggcuguucgacuucaacaagcaggcgauccagcgccucaaguccgaggcccagaugagcauccagcugaucaacaaggccgucaacgcccugaucaacgaccagcucaucaugaagaaccaccuccgggacaugaugggcauccccuacugcaacuacuccaaguacugguaccugaaccacaccagcuccgggcgcaccagccugcccaagugcuggcugguguccaacggcagcuaccugaacgagacgcacuucuccgacgacaucgagcagcaggccgacaacaugaucaccgagaugcuccagaaggaguacaucgaccggcagggcaagaccccgcuggggcugguggaccuguucgucuucagcaccuccuucuaccucaucagcaucuuccugcaccugaucaagaucccgugaggacuagucccuguucccagagcccacuuuuuuuucuuuuuuugaaauaaaauagccugucuuucagaucucaaaggcucuuuucagagccaccaaaaaaaaaaaaaaaaaaaaaaaaaaaaaaaaaaaaaaaaaaaaaaaaaaaaaaaaaaaaaaaaaaaaaaaaaaaaaaaaaaaaaaaaaaaaaaaaaaaaa

SEQ ID NO: 42315 - RNA, 1650 nt, Artificial Sequence
  mRNA product Design a-2 (hSL-A100) comprising derived and/or modified sequence from LASV(KAK-428;Clade n.d. (VII))__ANH09740__GPCmut13 (opt1)
aggagaguccgcucagccagguugcagaagcggcuuagcguguguccuaaucuucucucugcguguagguaggccugugccgcaaacaagcuuaccaugggccagaucgugaccuucuuccaggaggucccccacgugaucgaggaggugaugaacaucguccugaucgcccucagccugcuggccauccucaaggggcuguacaacuucgcgaccugcggcgugaucgggcugaucacguuccuccugcugugcggccgcuccugcagcgccaccuacaaggggcaguacgagcuccagacccuggagcugaacauggagucccucaacaugaccaugccgcugagcugcacgaagaacaacucccaccacuacauccgggccggcaacaacaccggccuggagcucacccugaccaacacgagcaucaucucccacaaguucugcaaccugagcgacgcccacaagaagaaccucuacgaccacacccugauguccaucaucaccaccuuccaccugagcauccccaacuucaaccaguacgaggccauguccugcgacuucaacgggggcaagaucagcauccaguacaaccucucccacagcuacgcgggggacgccgcccagcacugcggcacgguggccaacgggguccugcagaccuucaugcgcauggcguggggcggcuccuaccuggcccucgacagcgggcggcgcggcugggacugcaucaucuccagcuaccaguaccugaucauccagaacaccaccugggacgaccacugccaguucucccggcccagccccaucggguaccugggcuucgugagccagaagacgcgcgacaucuacaucucccggcgccuccugggcaccuucaccuggacccugagcgacuccgaggggcacgacaugccgggcggguacugccucacgcgguggaugcugaucgaggccgaccugaagugcuucggcaacaccgccguggccaagugcaacgagaagcacgacgaggaguucugcgacauguggcgccucuucgacuucaacaagcaggcgauccagcggcugaaggccgaggcccagaugaacauccagcugaucaacaaggccgucaacgcccucaucaacgaccagcugaugaugaagaaccaccuccgcgacaucauggggauccccuacugcaacuacagcaaguucugguaccugaacaacaccaccacgggccggaccucccugccccgcugcuggcugaucagcaacggcuccuaccucaacgagacccacuucagcgacgacaucgagcagcaggcggacaacaugaucaccgagaugcugcagaaggaguacauggaccggcaggggaagacgccccugggccucguggaccuguucguguucuccaccagcuucuaccugaucaccaucuuccugcaccucgucaagaucccgugaggacuagucccuguucccagagcccacuuuuuuuucuuuuuuugaaauaaaauagccugucuuucagaucucaaaggcucuuuucagagccaccaaaaaaaaaaaaaaaaaaaaaaaaaaaaaaaaaaaaaaaaaaaaaaaaaaaaaaaaaaaaaaaaaaaaaaaaaaaaaaaaaaaaaaaaaaaaaaaaaaaaa

SEQ ID NO: 42316 - RNA, 1650 nt, Artificial Sequence; identical to SEQ ID NO: 42310
  mRNA product Design a-2 (hSL-A100) comprising derived and/or modified sequence from LASV(Pinneo-NIG-1969;Clade I)__AIT17836__GPCmut13 (opt1)

SEQ ID NO: 42317 - RNA, 1650 nt, Artificial Sequence
  mRNA product Design a-2 (hSL-A100) comprising derived and/or modified sequence from LASV(ISTH0009-NIG-2011;Clade II)__AIT17404__GPCmut13 (opt1)
aggagaguccgcucagccagguugcagaagcggcuuagcguguguccuaaucuucucucugcguguagguaggccugugccgcaaacaagcuuaccaugggccagaucaucaccuucuuccaggaggugccccacgucaucgaggaggugaugaacaucgugcugaucgcccucagccugcuggccauccucaaggggaucuacaacgucgcgaccugcggccuguucgggcugguguccuuccuccugcugugcggccgcagcugcuccacgaccuacaaggggguguacgagcuccagacccuggagcuggacauggccagccucaacaugaccaugccgcuguccugcacgaagaacaacagccaccacuacaucauggucggcaacgagaccggccuggagcucacccugaccaacacguccaucaucaaccacaaguucugcaaccugagcgacgcccacaagaagaaccucuacgaccacgcccugauguccaucaucagcaccuuccaccuguccauccccaacuucaaccaguacgaggccaugagcugcgacuucaacgggggcaagaucuccgugcaguacaaccucagccacgcguacgccguggacgccgccaaccacugcgggaccaucgcgaacggcguccugcagaccuucaugcggauggccuggggcggguccuacaucgcccuggacagcggcaagggguccugggacugcaucaugacgagcuaccaguaccucaucauccagaacaccaccugggaggaccacugccaguucucccgccccagccccaucggcuaccuggggcugcucagccagcggacccgcgacaucuacaucucccggcgccugcugggcacguucaccuggacccucagcgacuccgagggcaacgagacccccgggggcuacugccugacgcgguggaugcugaucgaggccgagcucaagugcuucgggaacaccgccguggcgaagugcaacgagaagcacgacgaggaguucugcgacaugcugcgccuguucgacuucaacaagcaggccauccggcgccucaagaccgaggcccagaugagcauccagcugaucaacaaggccgugaacgcccugaucaacgaccagcucaucaugaagaaccaccuccgggacaucaugggcaucccguacugcaacuacuccaaguacugguaccugaaccacaccgucacggggaagaccagccugccccgcugcuggcugguguccaacggcagcuaccugaacgagacccacuucuccgacgacaucgagcagcaggcggacaacaugaucaccgagcuccugcagaaggaguacauggaccggcagggcaagacgccccuggggcugguggaccucuucgucuucagcaccuccuucuaccugaucagcaucuuccugcaccucaucaagaucccgugaggacuagucccuguucccagagcccacuuuuuuuucuuuuuuugaaauaaaauagccugucuuucagaucucaaaggcucuuuucagagccaccaaaaaaaaaaaaaaaaaaaaaaaaaaaaaaaaaaaaaaaaaaaaaaaaaaaaaaaaaaaaaaaaaaaaaaaaaaaaaaaaaaaaaaaaaaaaaaaaaaaaa

SEQ ID NO: 42318 - RNA, 1650 nt, Artificial Sequence
  mRNA product Design a-2 (hSL-A100) comprising derived and/or modified sequence from LASV(ISTH2010-NIG-2012;Clade II)__AIT17482__GPCmut13 (opt1)
aggagaguccgcucagccagguugcagaagcggcuuagcguguguccuaaucuucucucugcguguagguaggccugugccgcaaacaagcuuaccaugggccagaucaucaccuucuuccaggaggugccccacgucaucgaggaggugaugaacaucgugcugaucgcccucagccugcuggccauccucaaggggaucuacaacgucgcgaccugcggccuguucgggcugguguccuuccuccugcugugcggccgcagcugcuccacgaccuacaaggggguguacgagcuccagacccuggagcuggacauggccagccucaacaugaccaugccgcuguccugcacgaagaacaacagccaccacuacaucauggucggcaacgagaccggccuggagcucacccugaccaacacguccaucaucaaccacaaguucugcaaccugagcgacgcccacaagaagaaccucuacgaccacgcccugauguccaucaucagcaccuuccaccuguccauccccaacuucaaccaguacgaggccaugagcugcgacuucaacgggggcaagaucuccgugcaguacaaccucagccacgcguacgccguggacgccgccaaccacugcgggaccaucgcgaacggcguccugcagaccuucaugcggauggccuggggcggguccuacaucgcccuggacagcggcaagggguccugggacugcaucaugacgagcuaccaguaccucaucauccagaacaucaccugggaggaccacugccaguucucccgccccagccccaucggcuaccuggggcugcucagccagcggacccgcgacaucuacaucucccggcgccugcugggcaccuucacguggacccucagcgacuccgagggcaacgagacccccgggggcuacugccugacccgguggaugcugaucgaggccgagcucaagugcuucgggaacacggccguggcgaagugcaacgagaagcacgacgaggaguucugcgacaugcugcgccuguucgacuucaacaagcaggccauccggcgccucaagaccgaggcccagaugagcauccagcugaucaacaaggccgugaacgcccugaucaacgaccagcucaucaugaagaaccaccuccgggacaucaugggcauccccuacugcaacuacuccaaguacugguaccugaaccacaccgucaccgggaagacgagccugccccgcugcuggcugguguccaacggcagcuaccugaacgagacccacuucuccgacgacaucgagcagcaggcggacaacaugaucaccgagcuccugcagaaggaguacaucgaccggcagggcaagaccccgcuggggcugguggaccucuucgucuucagcacguccuucuaccugaucagcaucuuccugcaccucgugaagaucccgugaggacuagucccuguucccagagcccacuuuuuuuucuuuuuuugaaauaaaauagccugucuuucagaucucaaaggcucuuuucagagccaccaaaaaaaaaaaaaaaaaaaaaaaaaaaaaaaaaaaaaaaaaaaaaaaaaaaaaaaaaaaaaaaaaaaaaaaaaaaaaaaaaaaaaaaaaaaaaaaaaaaaa

SEQ ID NO: 42319 - RNA, 1650 nt, Artificial Sequence
  mRNA product Design a-2 (hSL-A100) comprising derived and/or modified sequence from LASV(Lassa virus/H.sapiens-wt/NGA/2015/ISTH_0543;Clade II)__AVO03639__GPCmut13 (opt1)
aggagaguccgcucagccagguugcagaagcggcuuagcguguguccuaaucuucucucugcguguagguaggccugugccgcaaacaagcuuaccaugggccagaucaucaccuucuuccaggaggugccccacgucaucgaggaggugaugaacaucgugcugaucgcccucagccugcuggccauccucaaggggaucuacaacgucgcgaccugcggccuguucgggcugguguccuuccuccugcugugcggccgcagcugcuccacgaccuacaaggggguguacgagcuccagacccuggagcuggacauggccaaccucaacaugaccaugccgcugagcugcacgaagaacaacucccaccacuacaucauggucggcaacgagaccggccuggagcucacccugaccaacacgagcaucaucaaccacaaguucugcaaccuguccgacgcccacaagaagaaccucuacgaccacgcccugaugagcaucaucuccaccuuccaccugagcauccccaacuucaaccaguacgaggccauguccugcgacuucaacgggggcaagaucagcgugcaguacaaccucucccacaccuacgcgguggacgccgccaaccacugcgggaccaucgccaacggcguccugcagacguucaugcggauggcguggggcgggagcuacaucgcccuggacuccggcaaggggagcugggacugcaucaugaccuccuaccaguaccucgugauccagaacaccaccugggaggaccacugccaguucagccgccccucccccaucggcuaccuggggcugcucagccagcggacgcgcgacaucuacaucagccggcgccugcugggcaccuucaccuggacccucuccgacagcgagggcaacgagacgcccgggggcuacugccugacccgguggaugcugaucgaggccgagcucaagugcuucgggaacaccgccguggccaagugcaacgagaagcacgacgaggaguucugcgacaugcugcgccuguucgacuucaacaagcaggcgauccggcgccucaagaccgaggcccagauguccauccagcugaucaacaaggccgucaacgcccugaucaacgaccagcucaucaugaagaaccaccuccgggacaucaugggcauccccuacugcaacuacagcaaguacugguaccugaaccacacggugaccgggaagaccucccugccccgcugcuggcuggugagcaacggcuccuaccugaacgagacccacuucagcgacgacaucgagcagcaggccgacaacaugaucacggagcuccugcagaaggaguacaucgaccggcagggcaagaccccgcuggggcuggucgaccucuucguguucuccaccagcuucuaccugaucuccaucuuccugcaccucgugaagaucccgugaggacuagucccuguucccagagcccacuuuuuuuucuuuuuuugaaauaaaauagccugucuuucagaucucaaaggcucuuuucagagccaccaaaaaaaaaaaaaaaaaaaaaaaaaaaaaaaaaaaaaaaaaaaaaaaaaaaaaaaaaaaaaaaaaaaaaaaaaaaaaaaaaaaaaaaaaaaaaaaaaaaaa

SEQ ID NO: 42320 - RNA, 1650 nt, Artificial Sequence
  mRNA product Design a-2 (hSL-A100) comprising derived and/or modified sequence from LASV(Lassa virus/H.sapiens-wt/NGA/2016/ISTH_0009;Clade II)__AVO03571__GPCmut13 (opt1)
aggagaguccgcucagccagguugcagaagcggcuuagcguguguccuaaucuucucucugcguguagguaggccugugccgcaaacaagcuuaccaugggccagaucaucaccuucuuccaggaggugccccacgucaucgaggaggugaugaacaucgugcugaucgcccucagccugcuggccauccucaaggggaucuacaacgucgcgaccugcggccugcuggggcucguguccuuccugcugcucugcggccgcagcugcuccacgaccuacaaggggguguacgagcugcagacccuggagcucgacauggccagccugaacaugaccaugccgcuguccugcacgaagaacaacagccaccacuacaucauggucggcaacgagaccggccucgagcugacccugaccaacacguccaucaucaaccacaaguucugcaaccucagcgacgcccacaagaagaaccuguacgaccacgcccugauguccaucaucagcaccuuccaccucuccauccccaacuucaaccaguacgaggccaugagcugcgacuucaacgggggccggaucuccgugcaguacaaccugagccacuccuacgcgguggacgccgccaaccacugcgggaccaucgccaacggcguccugcagaccuucaugcgcauggcguggggcgggagcuacaucgcccucgacuccggcaaggggagcugggacugcaucaugacguccuaccaguaccugaucauccagaacaccaccugggaggaccacugccaguucagccggcccagccccaucggcuaccuggggcuccugucccagcgcacccgggacaucuacaucagccgccggcugcucggcacguucaccuggacccuguccgacagcgagggcaacgagacccccgggggcuacugccugacgcgcuggaugcucaucgaggccgagcugaagugcuucgggaacaccgccguggccaagugcaacgagaagcacgacgaggaguucugcgacaugcugcggcuguucgacuucaacaagcaggcgauccgccggcugaagaccgaggcccagauguccauccagcugaucaacaaggccgugaacgcccucaucaacgaccagcugaucaugaagaaccaccuccgcgacaucaugggcaucccguacugcaacuacagcaaguacugguaccucaaccacaccgucacggggaagaccucccugccccggugcuggcuggugagcaacggcuccuaccucaacgagacccacuucagcgacgacaucgagcagcaggccgacaacaugaucaccgagcugcugcagaaggaguacaucgaccgccagggcaagacgccccuggggcucguggaccuguucgucuucuccaccagcuucuaccugaucuccaucuuccuccaccuggugaagaucccgugaggacuagucccuguucccagagcccacuuuuuuuucuuuuuuugaaauaaaauagccugucuuucagaucucaaaggcucuuuucagagccaccaaaaaaaaaaaaaaaaaaaaaaaaaaaaaaaaaaaaaaaaaaaaaaaaaaaaaaaaaaaaaaaaaaaaaaaaaaaaaaaaaaaaaaaaaaaaaaaaaaaaa

SEQ ID NO: 42321 - RNA, 1650 nt, Artificial Sequence
  mRNA product Design a-2 (hSL-A100) comprising derived and/or modified sequence from LASV(Lassa virus/H.sapiens-wt/NGA/2016/ISTH_0017;Clade II)__AVO03567__GPCmut13 (opt1)
aggagaguccgcucagccagguugcagaagcggcuuagcguguguccuaaucuucucucugcguguagguaggccugugccgcaaacaagcuuaccaugggccagaucaucaccuucuuccaggaggugccccacgucaucgaggaggugaugaacaucgugcugaucgcccucagccugcuggccauccucaaggggaucuacaacgucgcgaccugcggccuguucgggcugguguccuuccuccugcugugcggccgcagcugcuccacgaccuacaaggggguguacgagcuccagacccuggagcuggacauggccagccucaacaugaccaugccgcuguccugcacgaagaacaacagccaccacuacaucauggucggcaacgagaccggccuggagcucacccugaccaacacguccaucaucaaccacaaguucugcaaccugagcgacgcccacaagaagaaccucuacgaccacgcccugauguccaucaucagcaccuuccaccuguccauccccaacuucaaccaguacgaggccaugagcugcgacuucaacgggggcaagaucuccgugcaguacaaccucagccacaccuacgcgaucgacgccgccaaccacugcgggaccaucgccaacggcgugcugcagacguucaugcggauggcguggggcggguccuacaucgcccuggacagcggcaagggguccugggacugcaucaugaccagcuaccaguaccucaucauccagaacaccaccugggaggaccacugccaguucucccgccccagccccaucggcuaccuggggcugcucagccagcggacgcgcgacaucuacaucucccggcgccugcugggcaccuucaccuggacccucagcgacuccgagggcaacgagacgcccgggggcuacugccugacccgguggaugcugaucgaggccgagcucaagugcuucgggaacaccgccgucgccaagugcaacgagaagcacgacgaggaguucugcgacaugcugcgccuguucgacuucaacaagcaggcgauccggcgccucaagaccgaggcccagaugagcauccagcugaucaacaaggccgugaacgcccugaucaacgaccagcucaucaugaagaaccaccuccgggacaucaugggcauccccuacugcaacuacuccaaguacugguaccugaaccacacggugaccgggaagaccagccugccccgcugcuggcuggucuccaacggcagcuaccugaacgagacccacuucuccgacgacaucgagcagcaggccgacaacaugaucacggagcuccugcagaaggaguacauggaccggcagggcaagaccccgcuggggcugguggaccucuucguguucagcaccuccuucuaccugaucagcaucuuccugcaccucguccgcaucccgugaggacuagucccuguucccagagcccacuuuuuuuucuuuuuuugaaauaaaauagccugucuuucagaucucaaaggcucuuuucagagccaccaaaaaaaaaaaaaaaaaaaaaaaaaaaaaaaaaaaaaaaaaaaaaaaaaaaaaaaaaaaaaaaaaaaaaaaaaaaaaaaaaaaaaaaaaaaaaaaaaaaaa

SEQ ID NO: 42322 - RNA, 1650 nt, Artificial Sequence
  mRNA product Design a-2 (hSL-A100) comprising derived and/or modified sequence from LASV(Lassa virus/H.sapiens-wt/NGA/2018/ISTH_0959;Clade II)__AVV65099__GPCmut13 (opt1)
aggagaguccgcucagccagguugcagaagcggcuuagcguguguccuaaucuucucucugcguguagguaggccugugccgcaaacaagcuuaccaugggccagaucaucaccuucuuccaggaggugccccacgucaucgaggaggugaugaacaucgugcugaucgcccucagccugcuggccauccucaaggggaucuacaacgucgugaccugcggccuguucgggcugguguccuuccuccugcugugcggccgcagcugcuccacgaccuacaagggggucuacgagcuccagacccuggagcuggacauggcgagccucaacaugaccaugccgcuguccugcacgaagaacaacagccaccacuacaucauggugggcaacgagaccggccuggagcucacccugaccaacacguccaucaucaaccacaaguucugcaaccugagcgacgcccacaagaagaaccucuacgaccacgcccugauguccaucaucagcaccuuccaccuguccauccccaacuucaaccaguacgaggccaugagcugcgacuucaacgggggcaagaucuccgugcaguacaaccucagccacgccuacgcgaucgacgccgccaaccacugcgggaccaucgccaacggcguccugcagaccuucaugcggauggcguggggcggguccuacaucgcccuggacagcggcaagggguccugggacugcaucaugacgagcuaccaguaccucaucauccagaacaccaccugggaggaccacugccaguucucccgccccagccccaucggcuaccuggggcugcucagccagcggacccgcgacaucuacaucucccggcgccugcugggcacguucaccuggacccucagcgacuccgagggcaacgagacccccgggggcuacugccugacgcgguggaugcugaucgaggccgagcucaagugcuucgggaacaccgccguggccaagugcaacgagaagcacgacgaggaguucugcgacaugcugcgccuguucgacuucaacaagcaggcgauccggcgccucaagaccgaggcccagaugagcauccagcugaucaacaaggccgugaacgcccugaucaacgaccagcucaucaugaagaaccaccuccgggacaucaugggcaucccguacugcaacuacuccaaguacugguaccugaaccacaccgucacggggaagaccagccugccccgcugcuggcugguguccaacggcagcuaccugaacgagacccacuucuccgacgacaucgagcagcaggccgacaacaugaucaccgagcuccugcagaaggaguacaucgaccggcagggcaagacgccccuggggcugguggaccucuucgucuucagcaccuccuucuaccugaucagcaucuuccugcaccucgugaagaucccgugaggacuagucccuguucccagagcccacuuuuuuuucuuuuuuugaaauaaaauagccugucuuucagaucucaaaggcucuuuucagagccaccaaaaaaaaaaaaaaaaaaaaaaaaaaaaaaaaaaaaaaaaaaaaaaaaaaaaaaaaaaaaaaaaaaaaaaaaaaaaaaaaaaaaaaaaaaaaaaaaaaaaa

SEQ ID NO: 42323 - RNA, 1650 nt, Artificial Sequence
  mRNA product Design a-2 (hSL-A100) comprising derived and/or modified sequence from LASV(LASV003-NIG-2008;Clade II)__AIT17580__GPCmut13 (opt1)
aggagaguccgcucagccagguugcagaagcggcuuagcguguguccuaaucuucucucugcguguagguaggccugugccgcaaacaagcuuaccaugggccagaucaucaccuucuuccaggaggugccccacgucaucgaggaggugaugaacaucgugcugaucgcccucagccugcuggccauccucaaggggaucuacaacgucgcgaccugcggccuguucgggcugguguccuuccuccugcugugcggccgcagcugcuccacgaccuacaaggggguguacgagcuccagacccuggagcuggacauggccagccucaacaugaccaugccgcuguccugcacgaagaacaacagccaccacuacaucauggucggcaacgagaccggccuggagcucacccugaccaacacguccaucaucaaccacaaguucugcaaccugagcgacgcccacaagaagaaccucuacgaccacgcccugauguccaucaucagcaccuuccaccuguccauccccaacuucaaccaguacgaggccaugagcugcgacuucaacgggggcaagaucuccgugcaguacaaccucagccacaccuacgcgguggacgccgccaaccacugcgggaccaucgccaacggcguccugcagacguucaugcggauggcguggggcggguccuacaucgcccuggacagcggcaagggguccugggacugcaucaugaccagcuaccaguaccucaucauccagaacaccaccugggaggaccacugccaguucucccgccccagccccaucggcuaccuggggcugcucagccagcggacgcgcgacaucuacaucucccggcgccugcugggcaccuucaccuggacccucagcgacuccgagagcaacgagacgccgggcggguacugccugacccgguggaugcugaucgaggccgagcucaagugcuucggcaacaccgccguggccaagugcaacgagaagcacgacgaggaguucugcgacaugcugcgccuguucgacuucaacaagcaggcgauccggcgccucaaggccgaggcccagauguccauccagcugaucaacaaggccgugaacgcccugaucaacgaccagcucaucaugaagaaccaccuccgggacaucauggggauccccuacugcaacuacagcaaguacugguaccugaaccacaccgucacgggccgcaccucccugccccggugcuggcuggugagcaacggguccuaccugaacgagacccacuucagcgacgacaucgagcagcaggcggacaacaugaucaccgagcuccugcagaaggaguacauggaccgccagggcaagacgccccugggccugguggaccucuucgucuucuccaccagcuucuaccugaucuccaucuuccugcaccucgugaagaucccgugaggacuagucccuguucccagagcccacuuuuuuuucuuuuuuugaaauaaaauagccugucuuucagaucucaaaggcucuuuucagagccaccaaaaaaaaaaaaaaaaaaaaaaaaaaaaaaaaaaaaaaaaaaaaaaaaaaaaaaaaaaaaaaaaaaaaaaaaaaaaaaaaaaaaaaaaaaaaaaaaaaaaa

SEQ ID NO: 42324 - RNA, 1650 nt, Artificial Sequence
  mRNA product Design a-2 (hSL-A100) comprising derived and/or modified sequence from LASV(LASV035-NIG-2009;Clade II)__AIT17588__GPCmut13 (opt1)
aggagaguccgcucagccagguugcagaagcggcuuagcguguguccuaaucuucucucugcguguagguaggccugugccgcaaacaagcuuaccaugggccagaucaucaccuucuuccaggaggugccccacgucaucgaggaggugaugaacaucgugcugaucgcccucagccugcuggccauccucaaggggaucuacaacgucgcgaccugcggccuguucgggcugguguccuuccuccugcugugcggccgcagcugcuccacgaccuacaaggggguguacgagcuccagacccuggagcuggacauggccagccucaacaugaccaugccgcuguccugcacgaagaacaacagccaccacuacaucauggucggcaacgagaccggccuggagcucacccugaccaacacguccaucaucaaccacaaguucugcaaccugagcgacgcccacaagaagaaccucuacgaccacgcccugauguccaucaucagcaccuuccaccuguccauccccaacuucaaccaguacgaggccaugagcugcgacuucaacgggggcaagaucuccgugcaguacaaccucagccacgcguacgccguggacgccgccaaccacugcgggaccaucgcgaacggcguccugcagaccuucaugcggauggccuggggcggguccuacaucgcccuggacagcggcaagggguccugggacugcaucaugacgagcuaccaguaccucaucauccagaacaccaccugggaggaccacugccaguucucccgccccagccccaucggcuaccuggggcugcucagccagcggacccgcgacaucuacaucucccggcgccugcugggcacguucaccuggacccucagcgacuccgagggcaacgagacccccgggggcuacugccugacgcgguggaugcugaucgaggccgagcucaagugcuucgggaacaccgccguggcgaagugcaacgagaagcacgacgaggaguucugcgacaugcugcgccuguucgacuucaacaagcaggccauccggcgccucaaggccgaggcccagaugagcauccagcugaucaacaaggccgugaacgcgcugaucaacgaccagcucaucaugaagaaccaccuccgggacaucaugggcauccccuacugcaacuacuccaaguacugguaccugaaccacaccgucaccgggaagacgagccugccccgcugcuggcugguguccaacggcagcuaccugaacgagacccacuucuccgacgacaucgagcagcaggccgacaacaugaucaccgagcuccugcagaaggaguacaucgaccggcagggcaagaccccgcuggggcugguggaccucuucgucuucagcacguccuucuaccugaucagcaucuuccugcaccucgugaagaucccgugaggacuagucccuguucccagagcccacuuuuuuuucuuuuuuugaaauaaaauagccugucuuucagaucucaaaggcucuuuucagagccaccaaaaaaaaaaaaaaaaaaaaaaaaaaaaaaaaaaaaaaaaaaaaaaaaaaaaaaaaaaaaaaaaaaaaaaaaaaaaaaaaaaaaaaaaaaaaaaaaaaaaa

SEQ ID NO: 42325 - RNA, 1650 nt, Artificial Sequence
  mRNA product Design a-2 (hSL-A100) comprising derived and/or modified sequence from LASV(LASV1000-NIG-2009;Clade II)__AIT17782__GPCmut13 (opt1)
aggagaguccgcucagccagguugcagaagcggcuuagcguguguccuaaucuucucucugcguguagguaggccugugccgcaaacaagcuuaccaugggccagaucaucaccuucuuccaggaggugccccacgucaucgaggaggugaugaacaucgugcugaucgcccucagccugcuggccauccucaaggggaucuacaacgucgcgaccugcggccuguucgggcugguguccuuccuccugcugugcggccgcagcugcuccacgaccuacaaggggguguacgagcuccagacccuggagcuggacauggccagccucaacaugaccaugccgcuguccugcacgaagaacaacagccaccacuacaucauggucggcaacgagaccggccuggagcucacccugaccaacacguccaucaucaaccacaaguucugcaaccugagcgacgcccacaagaagaaccucuacgaccacgcccugauguccaucaucagcaccuuccaccuguccauccccaacuucaaccaguacgaggccaugagcugcgacuucaacgggggcaagaucuccgugcaguacaaccucagccacaccuacgcgguggacgccgccaaccacugcgggaccaucgccaacggcguccugcagacguucaugcggauggcguggggcggguccuacaucgcccuggacagcggcaagggguccugggacugcaucaugaccagcuaccaguaccucaucauccagaacaccaccugggaggaccacugccaguucucccgccccagccccaucggcuaccuggggcugcucagccagcggacgcgcgacaucuacaucucccggcgccugcugggcaccuucaccuggacccucagcgacuccgagggcaacgagacgcccgggggcuacugccugacccgguggaugcugaucgaggccgagcucaagugcuucgggaacaccgccguggccaagugcaacgagaagcacgacgaggaguucugcgacaugcugcgccuguucgacuucaacaagcaggcgaucaagcggcucaagaccgaggcccagaugagcauccagcugaucaacaaggccgugaacgcccugaucaacgaccagcucaucaugaagaaccaccuccgcgacaucaugggcauccccuacugcaacuacuccaaguacugguaccugaaccacacggucaccgggaagaccagccugccccggugcuggcugguguccaacggcagcuaccugaacgagacccacuucuccgacgacaucgagcagcaggccgacaacaugaucacggagcuccugcagaaggaguacaucgaccgccagggcaagaccccgcuggggcugguggaccucuucgucuucagcaccuccuucuaccugaucagcaucuuccugcaccucgugaagaucccgugaggacuagucccuguucccagagcccacuuuuuuuucuuuuuuugaaauaaaauagccugucuuucagaucucaaaggcucuuuucagagccaccaaaaaaaaaaaaaaaaaaaaaaaaaaaaaaaaaaaaaaaaaaaaaaaaaaaaaaaaaaaaaaaaaaaaaaaaaaaaaaaaaaaaaaaaaaaaaaaaaaaaa

SEQ ID NO: 42326 - RNA, 1650 nt, Artificial Sequence
  mRNA product Design a-2 (hSL-A100) comprising derived and/or modified sequence from LASV(LASV221-NIG-2010;Clade II)__AIT17624__GPCmut13 (opt1)
aggagaguccgcucagccagguugcagaagcggcuuagcguguguccuaaucuucucucugcguguagguaggccugugccgcaaacaagcuuaccaugggccagaucaucaccuucuuccaggaggugccccacgucaucgaggaggugaugaacaucgugcugaucgcccucagccugcuggccauccucaaggggaucuacaacgucgcgaccugcggccuguucgggcugguguccuuccuccugcugugcggccgcagcugcuccacgaccuacaaggggguguacgagcuccagacccuggagcuggacauggccagccucaacaugaccaugccgcuguccugcacgaagaacaacagccaccacuacaucauggucggcaacgagaccggccuggagcucacccugaccaacacguccaucaucaaccacaaguucugcaaccugagcgacgcccacaagaagaaccucuacgaccacgcccugauguccaucaucagcaccuuccaccuguccauccccaacuucaaccaguacgaggccaugagcugcgacuucaacgggggcaagaucuccgugcaguacaaccucagccacaccuacgcgaucgacgccgccaaccacugcgggaccaucgccaacggcgugcugcagacguucaugcggauggcguggggcggguccuacaucgcccuggacagcggcaagggguccugggacugcaucaugaccagcuaccaguaccucaucauccagaacaccaccugggaggaccacugccaguucucccgccccagccccaucggcuaccuggggcugcucagccagcggacgcgcgacaucuacaucucccggcgccugcugggcaccuucaccuggacccucagcgacuccgagggcaacgagacgcccgggggcuacugccugacccgguggaugcugaucgaggccgagcucaagugcuucgggaacaccgccgucgccaagugcaacgagaagcacgacgaggaguucugcgacaugcugcgccuguucgacuucaacaagcaggcgauccggcgccucaagaccgaggcccagaugagcauccagcugaucaacaaggccgugaacgcccugaucaacgaccagcucaucaugaagaaccaccuccgggacaucaugggcauccccuacugcaacuacuccaaguacugguaccugaaccacacggugaccgggaagaccagccugccccgcugcuggcuggucuccaacggcagcuaccugaacgagacccacuucuccgacgacaucgagcagcaggccgacaacaugaucacggagaugcuccagaaggaguacauggaccggcagggcaagaccccgcuggggcugguggaccuguucguguucagcaccuccuucuaccucaucagcaucuuccugcaccuggucaagaucccgugaggacuagucccuguucccagagcccacuuuuuuuucuuuuuuugaaauaaaauagccugucuuucagaucucaaaggcucuuuucagagccaccaaaaaaaaaaaaaaaaaaaaaaaaaaaaaaaaaaaaaaaaaaaaaaaaaaaaaaaaaaaaaaaaaaaaaaaaaaaaaaaaaaaaaaaaaaaaaaaaaaaaa

SEQ ID NO: 42327 - RNA, 1650 nt, Artificial Sequence
  mRNA product Design a-2 (hSL-A100) comprising derived and/or modified sequence from LASV(LASV237-NIG-2010;Clade II)__AIT17638__GPCmut13 (opt1)
aggagaguccgcucagccagguugcagaagcggcuuagcguguguccuaaucuucucucugcguguagguaggccugugccgcaaacaagcuuaccaugggccagaucaucaccuucuuccaggaggugccccacgucaucgaggaggugaugaacaucgugcugaucgcccucagccugcuggccauccucaaggggaucuacaacgucgcgaccugcggccuguucgggcugguguccuuccuccugcugugcggccgcagcugcuccacgaccuacaaggggguguacgagcuccagacccuggagcuggacauggccagccucaacaugaccaugccgcuguccugcacgaagaacaacagccaccacuacaucauggucggcaacgagaccggccuggagcucacccugaccaacacguccaucaucaaccacaaguucugcaaccugagcgacgcccacaagaaggaccucuacgaccacgcccugauguccaucaucagcaccuuccaccuguccauccccaacuucaaccaguacgaggccaugagcugcgacuucaacgggggcaagaucuccgugcaguacaaccucagccacaccuacgcgguggacgccgccaaccacugcgggaccaucgccaacggcguccugcagacguucaugcggauggcguggggcggguccuacaucgcccuggacagcggcaagggguccugggacugcaucaugaccagcuaccaguaccucaucauccagaacaccaccugggaggaccacugccaguucucccgccccagccccaucggcuaccuggggcugcucagccagcggacgcgcgacaucuacaucucccggcgccugcugggcaccuucaccuggacccucagcgacuccgagggcaacgagacgcccgggggcuacugccugacccgguggaugcugaucgaggccgagcucaagugcuucgggaacaccgccguggccaagugcaacgagaagcacgacgaggaguucugcgacaugcugcgccuguucgacuucaacaagcaggcgauccggcgccucaagaccgaggcccagaugagcauccagcugaucaacaaggccgugaacgcccugaucaacgaccagcucaucaugaagaaccaccuccgggacaucaugggcauccccuacugcaacuacuccaaguacugguaccugaaccacacggucaccgggaagaccagccugccccgcugcuggcugguguccaacggcagcuaccugaacgagacccacuucuccgacgacaucgagcagcaggccgacaacaugaucacggagcuccugcagaaggaguacauggaccggcagggcaagaccccgcuggggcugguggaccucuucgucuucagcaccuccuucuaccugaucagcaucuuccugcaccucaucaagaucccgugaggacuagucccuguucccagagcccacuuuuuuuucuuuuuuugaaauaaaauagccugucuuucagaucucaaaggcucuuuucagagccaccaaaaaaaaaaaaaaaaaaaaaaaaaaaaaaaaaaaaaaaaaaaaaaaaaaaaaaaaaaaaaaaaaaaaaaaaaaaaaaaaaaaaaaaaaaaaaaaaaaaaa

SEQ ID NO: 42328 - RNA, 1650 nt, Artificial Sequence
  mRNA product Design a-2 (hSL-A100) comprising derived and/or modified sequence from LASV(LASV253-NIG-2011;Clade II)__AIT17670__GPCmut13 (opt1)
aggagaguccgcucagccagguugcagaagcggcuuagcguguguccuaaucuucucucugcguguagguaggccugugccgcaaacaagcuuaccaugggccagaucaucaccuucuuccaggaggugccccacgucaucgaggaggugaugaacaucgugcugaucgcccucagccugcuggccauccucaaggggaucuacaacgucgcgaccugcggccuguucgggcugguguccuuccuccugcugugcggccgcagcugcuccacgaccuacaaggggguguacgagcuccagacccuggagcuggacauggccagccucaacaugaccaugccgcuguccugcacgaagaacaacagccaccacuacaucauggucggcaacgagaccggccuggagcucacccugaccaacacguccaucaucaaccacaaguucugcaaccugagcgacgcccacaagaagaaccucuacgaccacgcccugauguccaucaucagcaccuuccaccuguccauccccaacuucaaccaguacgaggccaugagcugcgacuucaacgggggcaagaucuccgugcaguacaaccucagccacaccuacgcgguggacgccgccaaccacugcgggaccaucgccaacggcguccugcagacguucaugcggauggcguggggcggguccuacaucgcccuggacagcggcaagggguccugggacugcaucaugaccagcuaccaguaccucaucauccagaacaccaccugggaggaccacugccaguucucccgccccagccccaucggcuaccuggggcugcucagccagcggacgcgcgacaucuacaucucccggcgccugcugggcaccuucaccuggacccucagcgacuccgagggcaacgagacgcccgggggcuacugccugacccgguggaugcugaucgaggccgagcucaagugcuucgggaacaccgccguggccaagugcaacgagaagcacgacgaggaguucugcgacaugcugcgccuguucgacuucaacaagcaggcgauccggcgccucaaggccgaggcccagaugagcauccagcugaucaacaaggccgugaacgcccugaucaacgaccagcucaucaugaagaaccaccuccgggacaucaugggcaucccguacugcaacuacuccaaguacugguaccugaaccacaccgucacggggcgcaccagccugccccggugcuggcugguguccaacggcagcuaccugaacgagacccacuucuccgacgacaucgagcagcaggcggacaacaugaucaccgagcuccugcagaaggaguacaucgaccgccagggcaagacgccccuggggcugguggaccucuucgucuucagcaccuccuucuaccugaucagcaucuuccugcaccucgugaagaucccgugaggacuagucccuguucccagagcccacuuuuuuuucuuuuuuugaaauaaaauagccugucuuucagaucucaaaggcucuuuucagagccaccaaaaaaaaaaaaaaaaaaaaaaaaaaaaaaaaaaaaaaaaaaaaaaaaaaaaaaaaaaaaaaaaaaaaaaaaaaaaaaaaaaaaaaaaaaaaaaaaaaaaa

SEQ ID NO: 42329 - RNA, 1650 nt, Artificial Sequence
  mRNA product Design a-2 (hSL-A100) comprising derived and/or modified sequence from LASV(LASV254-NIG-2011;Clade II)__AIT17674__GPCmut13 (opt1)
aggagaguccgcucagccagguugcagaagcggcuuagcguguguccuaaucuucucucugcguguagguaggccugugccgcaaacaagcuuaccaugggccagaucaucaccuucuuccaggaggugccccacgucaucgaggaggugaugaacaucgugcugaucgcccucagccugcuggccauccucaaggggaucuacaacgucgcgaccugcggccuguucgggcugguguccuuccuccugcugugcggccgcagcugcuccacgaccuacaaggggguguacgagcuccagacccuggagcuggacaugaccaaccucaacaugacgaugccgcugagcugcaccaagaacaacucccaccacuacaucauggucggcaacgagaccggccuggagcucacccugacgaacaccagcaucaucaaccacaaguucugcaaccuguccgacgcccacaagaagaaccucuacaaccacgcccugaugagcaucaucuccaccuuccaccugagcauccccaacuucaaccaguacgaggccauguccugcgacuucaacgggggcaagaucagcgugcaguacaaccucucccacagcuacgccguggacgcggccaaccacugcgggaccaucgccaacggcguccugcagacguucaugcggauggccuggggcggguccuacaucgcgcuggacagcggcaaggggaacugggacugcaucaugaccuccuaccaguaccucaucauccagaacaccaccugggaggaccacugccaguucagccgccccucccccaucggcuaccuggggcugcucagccagcggacgcgcgacaucuacaucagccggcgccugcugggcaccuucaccuggacccucuccgacagcgagggcaacgagacgcccgggggcuacugccugacccgguggaugcugaucgaggccgagcucaagugcuucgggaacaccgccguggccaagugcaacgagaagcacgacgaggaguucugcgacaugcugcgccuguucgacuucaacaagcaggccauccggcgccucaagaccgaggcgcaggccaacauccagcugaucaacaaggccgugaacgcccugaucaacgaccagcucaucaugaagaaccaccuccgggacaucaugggcauccccuacugcaacuacuccaaguacugguaccugaaccacacggucaccgggaagaccagccugccccgcugcuggcugguguccaacggcagcuaccugaacgagacccacuucuccgacgacaucgagcagcaggccgacaacaugaucacggagcuccugcagaaggaguacauggaccggcagggcaagaccccgcuggggcugguggaccucuucgucuucagcaccuccuucuaccugaucagcaucuuccugcaccucgugaagaucccgugaggacuagucccuguucccagagcccacuuuuuuuucuuuuuuugaaauaaaauagccugucuuucagaucucaaaggcucuuuucagagccaccaaaaaaaaaaaaaaaaaaaaaaaaaaaaaaaaaaaaaaaaaaaaaaaaaaaaaaaaaaaaaaaaaaaaaaaaaaaaaaaaaaaaaaaaaaaaaaaaaaaaa

SEQ ID NO: 42330 - RNA, 1650 nt, Artificial Sequence
  mRNA product Design a-2 (hSL-A100) comprising derived and/or modified sequence from LASV(Nig08-A19;Clade III)__ADU56618__GPCmut13 (opt1)
aggagaguccgcucagccagguugcagaagcggcuuagcguguguccuaaucuucucucugcguguagguaggccugugccgcaaacaagcuuaccaugggccagaucgugaccuucuuccaggaggucccccacgugaucgaggaggugaugaacaucguccugaucgcccucagcauccuggccauccugaaggggcucuacaacaucgcgaccugcggccugaucgggcuggugacguuccuccugcuguccggccgcagcugcuccaugaccuacaaggggguguacgagcuccagacccuggagcugaacaugaacacccucaacaugacgaugccgcugagcugcaccaagaacaacucccaccacuacaucauggucggcaacgagaccggccuggagcucacccugacgaacaccagccugcuccaccacaaguucugcaaccuguccgacgcccacaagaagaaccuguacgaccacacccucaugagcaucaucuccaccuuccaccugagcauccccaacuucaaccaguacgaggccauguccugcgacuucaacgggggcaagaucacggugcaguacaaccugagccacuccuacgccaucgacgccgcgaaccacugcgggaccguggccaacggcguccuccagaccuucaugcggauggccuggggcgggagcuacaucgcccuggacuccggccgcgggaagugggacugcaucaugaccagcuaccaguaccugaucauccagaacacgaccugggaggaccacugccaguucucccggcccagccccaucggcuaccucgggcugcugucccagcgcacccgggacaucuacaucagccgccggcuccugggcaccuucacguggacccugagcgacuccgagggcaacgagacccccgggggcuacugccucacccgcuggaugcugaucgaggcggagcugaagugcuucgggaacacggccguggccaagugcaacgagaagcacgacgaggaguucugcgacaugcuccggcuguucgacuucaacaagcaggccauccgccggcugaaggccgaggcgcagaugagcauccagcucaucaacaaggccgugaacgcccugaucaacgaccagcugaucaugaagaaccaccuccgcgacaucaugggcauccccuacugcaacuacuccaaguacugguaccugaaccacaccagcaccgggcggaccucccugccccgcugcuggcucgucagcaacggcuccuaccugaacgagacgcacuucagcgacgacaucgagcagcaggccgacaacaugaucaccgagaugcugcagaaggaguaccuggaccggcagggcaagaccccgcucgggcugguggaccuguucguguucuccaccagcuucuaccucaucuccaucuuccugcaccuggucaagaucccgugaggacuagucccuguucccagagcccacuuuuuuuucuuuuuuugaaauaaaauagccugucuuucagaucucaaaggcucuuuucagagccaccaaaaaaaaaaaaaaaaaaaaaaaaaaaaaaaaaaaaaaaaaaaaaaaaaaaaaaaaaaaaaaaaaaaaaaaaaaaaaaaaaaaaaaaaaaaaaaaaaaaaa

SEQ ID NO: 42331 - RNA, 1653 nt, Artificial Sequence
  mRNA product Design a-2 (hSL-A100) comprising derived and/or modified sequence from LASV(G1180-SLE-2010;Clade IV)__AIT17168__GPCmut13 (opt1)
aggagaguccgcucagccagguugcagaagcggcuuagcguguguccuaaucuucucucugcguguagguaggccugugccgcaaacaagcuuaccaugggccagaucgugaccuucuuccaggaggucccccacgugaucgaggaggugaugaacaucguccugaucgcccucagcauccuggccgugcugaaggggcucuacaacuucgcgaccugcggccugguggggcugcucaccuuccugcugcucugcggccgcuccugcaccgccagccgguacaagggggucuacgagcugcagacccuggagcucaacauggagacccugaacaugacgaugccgcuguccugcaccaagaacaacagccaccacuacaucauggugggcaacgagaccggccucgagcugacccugacgaacaccuccaucaucaaccacaaguucugcaaccucagcgacgcccacaagaagaaccuguacgaccacgcccugauguccaucaucagcaccuuccaccucuccauccccaacuucaaccaguacgaggccaugagcugcgacuucaacgggggcaagaucuccgugcaguacaaccugagccacuccuacgcgggggacgccgccaaccacugcggcaccgucgccaacggggugcugcagacguucaugcgcauggcguggggcggcagcuacaucgcccucgacuccgggcacggcagcugggacugcaucaugaccuccuaccaguaccugaucauccagaacaccaccugggaggaccacugccaguucagccggcccucccccaucggguaccugggccuccugagccagcgcacgcgggacaucuacaucagccgccggcugcucggcaccuucaccuggacccuguccgacagcgaggggaaggacacgccgggcggguacugccugacccgcuggaugcucaucgaggccgagcugaagugcuucggcaacaccgccguggccaagugcaacgagaagcacgacgaggaguucugcgacaugcugcggcuguucgacuucaacaagcaggcgauccagcgccugaaggccgaggcccagauguccauccagcugaucaacaaggccgucaacgcccucaucaacgaccagcugaucaugaagaaccaccuccgggacaucauggggauccccuacugcaacuacagcaaguacugguaccucaaccacaccacgaccggcaagaccucccugcccaagugcuggcuggugagcaacggcuccuaccucaacgagacccacuucagcgacgacaucgagcagcaggcggacaacaugaucacggagaugcugcagaaggaguacauggagcgccaggggaagacgccccugggccugguggaccucuucgucuucuccaccagcuucuaccugaucuccaucuuccugcaccucgugaagaucccgugaggacuagucccuguucccagagcccacuuuuuuuucuuuuuuugaaauaaaauagccugucuuucagaucucaaaggcucuuuucagagccaccaaaaaaaaaaaaaaaaaaaaaaaaaaaaaaaaaaaaaaaaaaaaaaaaaaaaaaaaaaaaaaaaaaaaaaaaaaaaaaaaaaaaaaaaaaaaaaaaaaaaa

SEQ ID NO: 42332 - RNA, 1653 nt, Artificial Sequence
  mRNA product Design a-2 (hSL-A100) comprising derived and/or modified sequence from LASV(G1442-SLE-2011;Clade IV)__AIT17180__GPCmut13 (opt1)
aggagaguccgcucagccagguugcagaagcggcuuagcguguguccuaaucuucucucugcguguagguaggccugugccgcaaacaagcuuaccaugggccagaucgugaccuucuuccaggaggucccccacgugaucgaggaggugaugaacaucguccugaucgcccucagcauccuggccgugcugaaggggcucuacaacguggcgaccugcggccugaucgggcuggucacguuccuccugcugugcggccgcuccugcaccaccacccucuacaaggggguguacgagcugcagacgcuggagcucaacauggagacccugaacaugaccaugccgcugagcugcaccaagaacaacucccaccacuacauccgggugggcaacgagacgggccucgagcugacccugaccaacaccagcaucaucaaccacaaguucugcaaccucuccgacgcccacaagaagaaccuguacgaccacgcccugaugagcaucaucuccacguuccaccucagcauccccaacuucaaccaguacgaggccauguccugcgacuucaacgggggcaagaucagcguccaguacaaccugucccacagcuacgccggggacgcggccaaccacugcggcaccguggccaacggggugcugcagaccuucaugcgcauggccuggggcggcuccuacaucgcgcucgacagcgggcggggcaacugggacugcaucaugaccuccuaccaguaccugaucauccagaacacgaccugggacgaccacugccaguucagccgccccucccccaucggguaccugggccuccugagccagcggacccgcgacgucuacaucucccggcgccugcucggcaccuucacguggacccugagcgacagcgaggggaaggacaccccgggcggguacugccugacccgguggaugcucaucgaggccgagcugaagugcuucggcaacacggccguggccaagugcaacgagaagcacgacgaggaguucugcgacaugcugcgccucuucgacuucaacaagcaggccauccagcggcugaaggcggaggcccagauguccauccagcugaucaacaaggccgugaacgcccucaucaacgaccagcugaucaugaagaaccaccuccgcgacaucauggggauccccuacugcaacuacagcaaguacugguaccugaacaacaccgccaccggcaagaccucccugcccaagugcuggcugaucagcaacggcuccuaccucaacgagacgcacuucagcgacgacaucgagcaggaggcggacaacaugaucaccgagaugcugcagaaggaguacauggagcggcaggggaagacgccccugggccuggucgaccucuucguguucuccaccagcuucuaccugaucuccaucuuccugcaccucgugaagaucccgugaggacuagucccuguucccagagcccacuuuuuuuucuuuuuuugaaauaaaauagccugucuuucagaucucaaaggcucuuuucagagccaccaaaaaaaaaaaaaaaaaaaaaaaaaaaaaaaaaaaaaaaaaaaaaaaaaaaaaaaaaaaaaaaaaaaaaaaaaaaaaaaaaaaaaaaaaaaaaaaaaaaaa

SEQ ID NO: 42333 - RNA, 1653 nt, Artificial Sequence
  mRNA product Design a-2 (hSL-A100) comprising derived and/or modified sequence from LASV(G3010-SLE-2013;Clade IV)__AIT17344__GPCmut13 (opt1)
aggagaguccgcucagccagguugcagaagcggcuuagcguguguccuaaucuucucucugcguguagguaggccugugccgcaaacaagcuuaccaugggccagaucgugaccuucuuccaggaggucccccacgugaucgaggaggugaugaacaucguccugaucgcccucagcauccuggccgugcugaaggggcucuacaacuucgcgaccugcggccugguggggcuggucacguuccuccugcugugcggccgcuccugcaccaccagccucuacaaggggguguacgagcugcagacccuggagcucaacauggagacgcugaacaugaccaugccgcuguccugcaccaagaacaacagccaccacuacaucauggugggcaacgagaccggccucgagcugacgcugaccaacaccuccaucaucaaccacaaguucugcaaccucagcgacgcccacaagaagaaccuguacaaccacgcccugauguccaucaucagcaccuuccaccucuccauccccaacuucaaccaguacgaggccaugagcugcgacuucaacgggggcaagaucuccguccaguacaaccugagccacuccuacgccggggacgcggccagccacugcggcacgguggccaacggggugcugcagaccuucaugcggauggccuggggcggcuccuacaucgcgcucgacagcggguacggcaagugggacugcaucaugaccuccuaccaguaccugaucauccagaacaccacgugggaggaccacugccaguucagccgccccucccccaucggguaccugggccuccugagccagcggacccgcgacaucuacaucagccggcgccugcucggcaccuucaccuggacgcuguccgacagcgaggggaaggacaccccgggcggguacugccugacccgguggaugcucaucgaggccgagcugaagugcuucggcaacaccgccgucgccaagugcaacgagaagcacgacgaggaguucugcgacaugcugcgccucuucgacuucaacaagcaggccauccagcggcugaagacggaggcgcagauguccauccagcugaucaacaaggccgugaacgcccucaucaacgaccagcugaucaugaagaaccaccuccgcgacaucauggggauccccuacugcaacuacagcaaguacugguaccugaaccacaccaccaccggcaagacgucccugcccaagugcuggcuggugagcaacggcuccuaccucaacgagacccacuucagcgacgacaucgagcagcaggccgacaacaugaucaccgagaugcugcagaaggaguacauggagcggcaggggaagacgccccugggccuggucgaccucuucguguucuccaccagcuucuaccugaucuccaucuuccugcaccucgugaagaucccgugaggacuagucccuguucccagagcccacuuuuuuuucuuuuuuugaaauaaaauagccugucuuucagaucucaaaggcucuuuucagagccaccaaaaaaaaaaaaaaaaaaaaaaaaaaaaaaaaaaaaaaaaaaaaaaaaaaaaaaaaaaaaaaaaaaaaaaaaaaaaaaaaaaaaaaaaaaaaaaaaaaaaa

SEQ ID NO: 42334 - RNA, 1653 nt, Artificial Sequence
  mRNA product Design a-2 (hSL-A100) comprising derived and/or modified sequence from LASV(G502-SLE-2009;Clade IV)__AIT17126__GPCmut13 (opt1)
aggagaguccgcucagccagguugcagaagcggcuuagcguguguccuaaucuucucucugcguguagguaggccugugccgcaaacaagcuuaccaugggccagaucgugaccuucuuccaggaggucccccacgugaucgaggaggugaugaacaucguccugaucgcccucagcauccuggccgugcugaaggggcucuacaacuucgcgaccugcggccugguggggcugcucacguuccugcugcucugcggccgcuccugcaccaccgggcuguacaagggcgucuacgagcugcagacccucgagcugaacauggagacgcugaacaugaccaugccgcucagcugcaccaagaacaacucccaccacuacaucauggugggcaacgagaccgggcuggagcugacgcucaccaacaccagcaucaucaaccacaaguucugcaaccuguccgacgcccacaagaagaaccuguacgaccacgcccucaugagcaucaucuccaccuuccaccugagcauccccaacuucaaccaguacgaggccauguccugcgacuucaacggcgggaagaucagcgugcaguacaaccugucccacagcuacgccggcgacgcggccgaccacugcgggacggucgccaacggcgugcuccagaccuucaugcggauggccuggggcggguccuacaucgcgcuggacagcggccgcgggcggugggacugcaucaugaccuccuaccaguaccugaucauccagaacaccacgugggaggaccacugccaguucagccgccccucccccaucggcuaccucggccugcugagccagcggacccgcgacaucuacaucucccggcgccuccuggggaccuucaccuggacgcugagcgacagcgagggcaaggacacccccgggggcuacugccucacccgguggaugcugaucgaggccgagcugaagugcuucgggaacaccgccguggccaagugcaacgagaagcacgacgaggaguucugcgacaugcuccgccuguucgacuucaacaagcaggccauccagcggcugaaggcggaggcccagauguccauccagcucaucaacaaggccgucaacgcccugaucaacgaccagcuggugaugaagaaccaccuccgcgacaucaugggcauccccuacugcaacuacagccgguacugguaccugaaccacacgaccaccggccgcaccucccugcccaagugcuggcucgugagcaacggguccuaccugaacgagacgcacuucagcgacgacaucgagcagcaggccgacaacaugaucaccgagaugcugcagaaggaguacauggagcggcagggcaagaccccgcuggggcucgucgaccuguucguguucuccaccagcuucuaccugaucuccaucuuccuccaccuggugaagaucccgugaggacuagucccuguucccagagcccacuuuuuuuucuuuuuuugaaauaaaauagccugucuuucagaucucaaaggcucuuuucagagccaccaaaaaaaaaaaaaaaaaaaaaaaaaaaaaaaaaaaaaaaaaaaaaaaaaaaaaaaaaaaaaaaaaaaaaaaaaaaaaaaaaaaaaaaaaaaaaaaaaaaaa

SEQ ID NO: 42335 - RNA, 1653 nt, Artificial Sequence
  mRNA product Design a-2 (hSL-A100) comprising derived and/or modified sequence from LASV(G733-SLE-2010;Clade IV)__AIT17154__GPCmut13 (opt1)
aggagaguccgcucagccagguugcagaagcggcuuagcguguguccuaaucuucucucugcguguagguaggccugugccgcaaacaagcuuaccaugggccagaucgugaccuucuuccaggaggucccccacgugaucgaggaggugaugaacaucguccugaucgcccucagcauccuggccgugcugaaggggcucuacaacuucgcgaccugcggcaucguggggcuggucuccuuccugcuccugugcggccgcagcugcacgaccucccuguacaaggggguguacgagcuccagacccuggagcugaacauggagacccucaacaugacgaugccgcugagcugcaccaagaacaacucccaccacuacaucauggugggcaacgagaccggccuggagcucacccugacgaacaccagcaucaucaaccacaaguucugcaaccuguccgacgcccacaagaagaaccucuacgaccacgcccugaugagcaucaucuccaccuuccaccugagcauccccaacuucaaccaguacgaggccauguccugcgacuucaacgggggcaagaucagcguccaguacaaccucucccacagcuacgccggggacgcggccaaccacugcggcaccaucgccaacggggugcugcagacguucaugcggauggccuggggcggcuccuacaucgcgcuggacagcgggcgcgaccggugggacugcaucaugaccuccuaccaguaccucaucauccagaacaccaccugggaggaccacugccaguucagccgccccucccccaucggcuaccuggggcugcucagccagcggacgcgcgacaucuacaucagccggcgccugcugggcaccuucaccuggacccucuccgacagcgagggcaaggacacgcccgggggcuacugccugacccgguggaugcugaucgaggccgagcucaagugcuucgggaacaccgccguggccaagugcaacgagaagcacgacgaggaguucugcgacaugcugcgccuguucgacuucaacaagcaggccauccagcggcucaaggcggaggcccagauguccauccagcugaucaacaaggccgucaacgcccugaucaacgaccagcucaucaugaagaaccaccuccgcgacaucaugggcauccccuacugcaacuacagcaaguacugguaccugaaccacaccacgaccgggaagaccucccugcccaagugcuggcuggugagcaacggcuccuaccugaacgagacccacuucagcgacgacaucgagcagcaggccgacaacaugaucacggagaugcuccagaaggaguacauggagcggcagggcaagaccccgcuggggcugguggaccuguucgucuucuccaccagcuucuaccucaucuccaucuuccugcaccuggugaagaucccgugaggacuagucccuguucccagagcccacuuuuuuuucuuuuuuugaaauaaaauagccugucuuucagaucucaaaggcucuuuucagagccaccaaaaaaaaaaaaaaaaaaaaaaaaaaaaaaaaaaaaaaaaaaaaaaaaaaaaaaaaaaaaaaaaaaaaaaaaaaaaaaaaaaaaaaaaaaaaaaaaaaaaa

SEQ ID NO: 42336 - RNA, 1653 nt, Artificial Sequence
  mRNA product Design a-2 (hSL-A100) comprising derived and/or modified sequence from MOPV/LASV reassortant(IGS-1;Clade IV)__AFY05576__GPCmut13 (opt1)
aggagaguccgcucagccagguugcagaagcggcuuagcguguguccuaaucuucucucugcguguagguaggccugugccgcaaacaagcuuaccaugggccagaucgugaccuucuuccaggaggucccccacgugaucgaggaggugaugaacaucguccugaucgcccucagcgugcuggccgugcugaaggggcucuacaacuucgcgaccugcggccuggucgggcuggugacguuccuccugcugugcggccgcuccugcaccaccagccucuacaaggggguguacgagcugcagacccuggagcucaacauggagacgcugaacaugaccaugccgcuguccugcaccaagaacaacagccaccacuacaucauggucggcaacgagaccggccucgagcugacgcugaccaacaccuccaucaucaaccacaaguucugcaaccucagcgacgcccacaagaagaaccuguacgaccacgcccugauguccaucaucagcaccuuccaccucuccauccccaacuucaaccaguacgaggccaugagcugcgacuucaacgggggcaagaucuccgugcaguacaaccugagccacuccuacgccggggacgcggccaaccacugcggcacgguggccaacgggguccugcagaccuucaugcggauggccuggggcggcagcuacaucgcgcucgacuccgggcgcggcaacugggacugcaucaugaccagcuaccaguaccugaucauccagaacaccacgugggaggaccacugccaguucucccggcccagccccaucggguaccugggccuccugucccagcgcacccgggacaucuacaucagccgccggcugcucggcaccuucaccuggacgcugagcgacuccgagggggaggacaccccgggcggguacugccugacccgcuggaugcucaucgaggccgagcugaagugcuucggcaacaccgccguggccaagugcaacgagaagcacgacgaggaguucugcgacaugcugcggcuguucgacuucaacaagcaggccauccagcgccugaaggcggaggcccagaugagcauccagcugaucaacaaggccgugaacgcccucaucaacgaccagcugaucaugaagaaccaccuccgggacaucauggggauccccuacugcaacuacuccaaguacugguaccucaaccacacgaccaccggccgcaccagccugcccaagugcuggcuggucuccaacggcagcuaccucaacgagacgcacuucuccgacgacaucgagcagcaggccgacaacaugaucaccgagaugcugcagaaggaguacauggagcggcaggggaagacgccccugggccugguggaccucuucguguucagcaccuccuucuaccugaucagcaucuuccugcaccucgucaagaucccgugaggacuagucccuguucccagagcccacuuuuuuuucuuuuuuugaaauaaaauagccugucuuucagaucucaaaggcucuuuucagagccaccaaaaaaaaaaaaaaaaaaaaaaaaaaaaaaaaaaaaaaaaaaaaaaaaaaaaaaaaaaaaaaaaaaaaaaaaaaaaaaaaaaaaaaaaaaaaaaaaaaaaa

SEQ ID NO: 42337 - RNA, 1653 nt, Artificial Sequence
  mRNA product Design a-2 (hSL-A100) comprising derived and/or modified sequence from LASV(LM765-SLE-2012;Clade IV)__AIT17814__GPCmut13 (opt1)
aggagaguccgcucagccagguugcagaagcggcuuagcguguguccuaaucuucucucugcguguagguaggccugugccgcaaacaagcuuaccaugggccagaucgugaccuucuuccaggaggucccccacgugaucgaggaggugaugaacaucguccugaucgcccucagcauccuggccgugcugaaggggcucuacaacuucgcgaccugcggccugguggggcuggucacguuccuccugcugugcggccgcuccugcaccaccagccucuacaaggggguguacgagcugcagacccuggagcucaacauggagacgcugaacaugaccaugccgcuguccugcaccaagaacaacagccaccacuacaucauggugggcaacgagaccggccucgagcugacgcugaccaacaccuccaucaucgaccacaaguucugcaaccucagcgacgcccaccggaagaaccuguacgaccacgcccugauguccaucaucagcaccuuccaccucuccauccccaacuucaaccaguacgaggccaugagcugcgacuucaacgggggcaagaucuccguccaguacaaccugagccacuccuacgccaaggacgcggccgaccacugcgggacgguggccaacggcgugcugcagaccuucaugcgcauggccuggggcgggagcuacaucgcgcucgacuccggccgggggcgcugggacugcaucaugaccagcuaccaguaccugaucauccagaacaccacgugggaggaccacugccaguucucccggcccagccccaucggcuaccuggggcuccugucccagcgcacccgggacaucuacaucagccgccggcugcucggcaccuucaccuggacgcugagcgacuccgagggcaaggacacccccgggggcuacugccugacccgcuggaugcucaucgaggccgagcugaagugcuucgggaacaccgccgucgccaagugcaacgagaagcacgacgaggaguucugcgacaugcugcggcuguucgacuucaacaagcaggccauccagcgccugaaggcggaggcccagaugagcauccagcugaucaacaaggccgugaacgcccucaucaacgaccagcugaucaugaagaaccaccuccgggacaucaugggcauccccuacugcaacuacuccaaguacugguaccucaaccacacgaccaccgggaagaccagccugcccaagugcuggcugguguccaacggcagcuaccucaacgagacgcacuucuccgacgacaucgagcagcaggccgacaacaugaucaccgagaugcugcagaaggaguacauggagcgccagggcaagaccccgcuggggcuggucgaccucuucguguucagcaccuccuucuaccugaucagcaucuuccugcaccucgugaagaucccgugaggacuagucccuguucccagagcccacuuuuuuuucuuuuuuugaaauaaaauagccugucuuucagaucucaaaggcucuuuucagagccaccaaaaaaaaaaaaaaaaaaaaaaaaaaaaaaaaaaaaaaaaaaaaaaaaaaaaaaaaaaaaaaaaaaaaaaaaaaaaaaaaaaaaaaaaaaaaaaaaaaaaa

SEQ ID NO: 42338 - RNA, 1653 nt, Artificial Sequence
  mRNA product Design a-2 (hSL-A100) comprising derived and/or modified sequence from LASV(LM776-SLE-2012;Clade IV)__AIT17824__GPCmut13 (opt1)
aggagaguccgcucagccagguugcagaagcggcuuagcguguguccuaaucuucucucugcguguagguaggccugugccgcaaacaagcuuaccaugggccagaucgugaccuucuuccaggaggucccccacgugaucgaggaggugaugaacaucguccugaucgcccucagcauccuggccgugcugaaggggcucuacaacuucgcgaccugcggccugguggggcuggucacguuccuccugcugugcggccgcuccugcaccaccagcguguacaaggggguguacgagcuccagacccuggagcugaacauggagacgcucaacaugaccaugccgcuguccugcaccaagaacaacagccaccacuacaucauggucggcaacgagaccggccuggagcucacgcugaccaacaccuccaucaucaaccacaaguucugcaaccugagcgacgcccacaagaagaaccucuacgaccacgcccugauguccaucaucagcaccuuccaccuguccauccccaacuucaaccaguacgaggccaugagcugcgacuucaacgggggcaagaucuccgugcaguacaaccucagccacuccuacgccggggacgcggccaaccacugcggcacgguggccaacgggguccugcagaccuucaugcggauggccuggggcggcagcuacaucgcgcuggacuccgggcacggcaagugggacugcaucaugaccagcuaccaguaccucaucauccagaacaccacgugggaggaccacugccaguucucccgccccagccccaucggguaccugggccugcucucccagcggacccgcgacaucuacaucagccggcgccugcugggcaccuucaccuggacgcucagcgacuccgaggggaaggacaccccgggcggguacugccugacccgguggaugcugaucgaggccgagcucaagugcuucggcaacaccgccguggccaagugcaacgagaagcacgacgaggaguucugcgacaugcugcgccuguucgacuucaacaagcaggccauccagcggcucaaggcggaggcccagaugagcauccagcugaucaacaaggccgugaacgcccugaucaacgaccagcucaucaugaagaaccaccuccgcgacaucauggggauccccuacugcaacuacuccaaguacugguaccugaaccacacgaccaccggcaagaccagccugcccaagugcuggcuggucuccaacggcagcuaccugaacgagacgcacuucuccgacgacaucgagcagcaggccgacaacaugaucaccgagaugcuccagaaggaguacauggagcggcaggggaagacgccccugggccugguggaccuguucguguucagcaccuccuucuaccucaucagcaucuuccugcaccuggucaagaucccgugaggacuagucccuguucccagagcccacuuuuuuuucuuuuuuugaaauaaaauagccugucuuucagaucucaaaggcucuuuucagagccaccaaaaaaaaaaaaaaaaaaaaaaaaaaaaaaaaaaaaaaaaaaaaaaaaaaaaaaaaaaaaaaaaaaaaaaaaaaaaaaaaaaaaaaaaaaaaaaaaaaaaa

SEQ ID NO: 42339 - RNA, 1653 nt, Artificial Sequence
  mRNA product Design a-2 (hSL-A100) comprising derived and/or modified sequence from LASV(Mad39;Clade IV)__ANH09722__GPCmut13 (opt1)
aggagaguccgcucagccagguugcagaagcggcuuagcguguguccuaaucuucucucugcguguagguaggccugugccgcaaacaagcuuaccaugggccagaucgugaccuucuuccaggaggucccccacgugaucgaggaggugaugaacaucguccugaucgcccucagcauccuggccgugcugaaggggcucuacaacguggcgaccugcggccugaucgggcuggucacguuccuccugcugugcggccgcuccugcaccaccacccucuacaaggggguguacgagcugcaggcccuggagcucaacauggagacgcugaacaugaccaugccgcugagcugcaccaagaacaacucccaccacuacauccgggugggcaacgagaccggccucgagcugacgcugaccaacaccagccucaucaaccacaaguucugcaaccuguccgacgcccacaagaagaaccuguacgaccacgcccucaugagcaucaucuccaccuuccaccugagcauccccaacuucaaccaguacgaggccauguccugcgacuucaacgacgggaagaucagcguccaguacaaccugucccacacguacgcgggcgacaccgccaaccacugcgggaccguggccaacggcgugcuccagaccuucaugcgcauggccuggggcgggagcuacaucgcgcuggacuccggccgcgggggcugggacugcaucaugacgagcuaccaguaccugaucauccagaacaccaccugggaggaccacugccaguucucccggcccagccccaucggguaccucggccugcugucccagcggacccgcgacaucuacaucagccggcgccuccugggcacguucaccuggacccuguccgacagcgaggggaaggacaccccgggcggguacugccucacgcgguggaugcugaucgaggccgagcugaagugcuucggcaacaccgccgucgccaagugcaacgagaagcacgacgaggaguucugcgacaugcuccgccuguucgacuucaacaagcaggccauccagcggcugaaggcggaggcccagaugagcauccagcucaucaacaaggccgugaacgcccugaucaacgaccagcugaucaugaagaaccaccuccgcgacaucauggggauccccuacugcaacuacuccaaguacugguaccugaaccacaccgugaccggcaagacgagccugcccaagugcuggcucgucuccaacggcagcuaccugaacgagacccacuucuccgacgacaucgagcagcaggccgacaacaugaucaccgagaugcugcagaaggaguacauggagcggcaggggaagacgccccugggccucguggaccuguucguguucagcaccuccuucuaccugaucagcaucuuccuccaccuggucaagaucccgugaggacuagucccuguucccagagcccacuuuuuuuucuuuuuuugaaauaaaauagccugucuuucagaucucaaaggcucuuuucagagccaccaaaaaaaaaaaaaaaaaaaaaaaaaaaaaaaaaaaaaaaaaaaaaaaaaaaaaaaaaaaaaaaaaaaaaaaaaaaaaaaaaaaaaaaaaaaaaaaaaaaaa

SEQ ID NO: 42340 - RNA, 1653 nt, Artificial Sequence
  mRNA product Design a-2 (hSL-A100) comprising derived and/or modified sequence from LASV(Z0947-SLE-2011;Clade IV)__AIT17840__GPCmut13 (opt1)
aggagaguccgcucagccagguugcagaagcggcuuagcguguguccuaaucuucucucugcguguagguaggccugugccgcaaacaagcuuaccaugggccagaucgugaccuucuuccaggaggucccccacgugaucgaggaggugaugaacaucguccugaucgcccucagcauccuggccgugcugaaggggcucuacaacuucgcgaccugcggccugguggggcuggucacguuccuccugcugugcggccgcuccugcaccaucagccucuacaaggggguguacgagcugcagacccuggagcucaacauggagacccugaacaugacgaugccgcuguccugcaccaagaacaacagccaccacuacaucauggugggcaacgagaccggccucgagcugacccugacgaacaccuccaucaucaaccacaaguucugcaaccucagcgacgcccacaagaagaaccuguacgaccacgcccugauguccaucaucagcaccuuccaccucuccauccccaacuucaaccaguacgaggccaugagcugcgacuucaacgggggcaagaucuccguccaguacaaccugagccacuccuacgccggggacgcggccaaccacugcggcaccguggccaacggggugcugcagacguucaugcggauggccuggggcggcagcuacaucgcgcucgacuccgggcgcgaccggugggacugcaucaugaccagcuaccaguaccugaucauccagaacaccaccugggaggaccacugccaguucucccgccccagccccaucggcuaccuggggcuccugucccagcggacgcgcgacaucuacaucagccggcgccugcucggcaccuucaccuggacccugagcgacuccgagggcaaggacacgcccgggggcuacugccugacccgguggaugcucaucgaggccgagcugaagugcuucgggaacaccgccgucgccaagugcaacgagaagcacgacgaggaguucugcgacaugcugcgccucuucgacuucaacaagcaggccauccagcggcugaaggcggaggcccagaugagcauccagcugaucaacaaggccgugaacgcccucaucaacgaccagcugaucaugaagaaccaccuccgcgacaucaugggcauccccuacugcaacuacuccaaguacugguaccugaaccacaccacgaccgggaagaccagccugcccaagugcuggcugguguccaacggcagcuaccucaacgagacccacuucuccgacgacaucgagcagcaggccgacaacaugaucacggagaugcugcagaaggaguacauggagcggcagggcaagaccccgcuggggcuggucgaccucuucguguucagcaccuccuucuaccugaucagcaucuuccugcaccucgugaagaucccgugaggacuagucccuguucccagagcccacuuuuuuuucuuuuuuugaaauaaaauagccugucuuucagaucucaaaggcucuuuucagagccaccaaaaaaaaaaaaaaaaaaaaaaaaaaaaaaaaaaaaaaaaaaaaaaaaaaaaaaaaaaaaaaaaaaaaaaaaaaaaaaaaaaaaaaaaaaaaaaaaaaaaa

SEQ ID NO: 42341 - RNA, 1653 nt, Artificial Sequence
  mRNA product Design a-2 (hSL-A100) comprising derived and/or modified sequence from LASV(Josiah;Clade IV)__NP_694870__GPCmut13 (opt4)
aggagaguccgcucagccagguugcagaagcggcuuagcguguguccuaaucuucucucugcguguagguaggccugugccgcaaacaagcuuaccaugggccagaucgugaccuucuuccaggaggugccccacgugaucgaggaggugaugaacaucgugcugaucgcccugagcgugcuggccgugcugaagggccuguacaacuucgccaccugcggccuggugggccuggugaccuuccugcugcugugcggcagaagcugcaccaccagccuguacaagggcguguacgagcugcagacccuggagcugaacauggagacccugaacaugaccaugccccugagcugcaccaagaacaacagccaccacuacaucauggugggcaacgagaccggccuggagcugacccugaccaacaccagcaucaucaaccacaaguucugcaaccugagcgacgcccacaagaagaaccuguacgaccacgcccugaugagcaucaucagcaccuuccaccugagcauccccaacuucaaccaguacgaggccaugagcugcgacuucaacggcggcaagaucagcgugcaguacaaccugagccacagcuacgccggcgacgccgccaaccacugcggcaccguggccaacggcgugcugcagaccuucaugagaauggccuggggcggcagcuacaucgcccuggacagcggcagaggcaacugggacugcaucaugaccagcuaccaguaccugaucauccagaacaccaccugggaggaccacugccaguucagcagacccagccccaucggcuaccugggccugcugagccagagaaccagagacaucuacaucagcagaagacugcugggcaccuucaccuggacccugagcgacagcgagggcaaggacacccccggcggcuacugccugaccagauggaugcugaucgaggccgagcugaagugcuucggcaacaccgccguggccaagugcaacgagaagcacgacgaggaguucugcgacaugcugagacuguucgacuucaacaagcaggccauccagagacugaaggccgaggcccagaugagcauccagcugaucaacaaggccgugaacgcccugaucaacgaccagcugaucaugaagaaccaccugagagacaucaugggcauccccuacugcaacuacagcaaguacugguaccugaaccacaccaccaccggcagaaccagccugcccaagugcuggcuggugagcaacggcagcuaccugaacgagacccacuucagcgacgacaucgagcagcaggccgacaacaugaucaccgagaugcugcagaaggaguacauggagagacagggcaagaccccccugggccugguggaccuguucguguucagcaccagcuucuaccugaucagcaucuuccugcaccuggugaagauccccugaggacuagucccuguucccagagcccacuuuuuuuucuuuuuuugaaauaaaauagccugucuuucagaucucaaaggcucuuuucagagccaccaaaaaaaaaaaaaaaaaaaaaaaaaaaaaaaaaaaaaaaaaaaaaaaaaaaaaaaaaaaaaaaaaaaaaaaaaaaaaaaaaaaaaaaaaaaaaaaaaaaaa

SEQ ID NO: 42342 - RNA, 1650 nt, Artificial Sequence
  mRNA product Design a-2 (hSL-A100) comprising derived and/or modified sequence from LASV(LP;Clade I)__AAF86701__GPCmut13 (opt4)
aggagaguccgcucagccagguugcagaagcggcuuagcguguguccuaaucuucucucugcguguagguaggccugugccgcaaacaagcuuaccaugggccagaucaucaccuucuuccaggaggugccccacgugaucgaggaggugaugaacaucgugcugaucgcccugagccugcuggccauccugaagggccuguacaacaucgccaccugcggcaucaucggccugguggccuuccuguuccugugcggcaagagcugcagccugacccugaagggcggcuacgagcugcagacccuggagcugaacauggagacccugaacaugaccaugccccugagcugcaccaagaacagcagccaccacuacaucagagugggcaacgagaccggccuggagcugacccugaccaacaccagcaucaucaaccacaaguucugcaaccugagcgacgcccacaagaagaaccuguacgaccacgcccugaugagcaucaucagcaccuuccaccugagcauccccaacuucaaccaguacgaggccaugagcugcgacuucaacggcggcaagaucagcgugcaguacaaccugagccacagcuacgccggcgacgccgccgagcacugcggcaccguggccaacggcgugcugcagaccuucaugagaauggccuggggcggcagauacaucgcccuggacagcggcaagggcaacugggacugcaucaugaccagcuaccaguaccugaucauccagaacaccaccugggaggaccacugccaguucagcagacccagccccaucggcuaccugggccugcugagccagagaaccagagacaucuacaucagcagaagacugcugggcaccuucaccuggacccugagcgacagcgagggcaacgagacccccggcggcuacugccugaccagauggaugcugaucgaggccgagcugaagugcuucggcaacaccgccguggccaagugcaacgagaagcacgacgaggaguucugcgacaugcugagacuguucgacuucaacaagcaggccaucagaagacugaaggccgaggcccagaugagcauccagcugaucaacaaggccgugaacgcccugaucaacgaccagcugaucaugaagaaccaccugagagacaucaugggcauccccuacugcaacuacagcaaguacugguaccugaaccacaccagcagcggcagaaccagccugcccaagugcuggcugaucagcaacggcagcuaccugaacgagacccaguucagcgacgacaucgagcagcaggccgacaacaugaucaccgagaugcugcagaaggaguacaucgagagacagggcaagaccccccugggccugguggacaucuucaucuucagcaccagcuucuaccugaucagcaucuuccugcaccugaucaagauccccugaggacuagucccuguucccagagcccacuuuuuuuucuuuuuuugaaauaaaauagccugucuuucagaucucaaaggcucuuuucagagccaccaaaaaaaaaaaaaaaaaaaaaaaaaaaaaaaaaaaaaaaaaaaaaaaaaaaaaaaaaaaaaaaaaaaaaaaaaaaaaaaaaaaaaaaaaaaaaaaaaaaaa

SEQ ID NO: 42343 - RNA, 1650 nt, Artificial Sequence
  mRNA product Design a-2 (hSL-A100) comprising derived and/or modified sequence from LASV(803213;Clade II)__AAF86703__GPCmut13 (opt4)
aggagaguccgcucagccagguugcagaagcggcuuagcguguguccuaaucuucucucugcguguagguaggccugugccgcaaacaagcuuaccaugggccagaucaucaccuucuuccaggaggugccccacgugaucgaggaggugaugaacaucgugcugaucgcccugagccugcuggccauccugaagggcaucuacaacguggccaccugcggccuguucggccugaucagcuuccugcugcugugcggcagaagcugcagcgugaccuacaagggcguguacgagcugcagacccuggagcugaacauggccaaccugaacaugaccaugccccugagcugcaccaagaacaacagccaccacuacaucauggugggcaacgagaccggccuggagcugacccugaccaacaccagcaucaucaaccacaaguucugcaaccugagcgacgcccacaagaagaaccuguacgaccacgcccugaugagcaucaucagcaccuuccaccugagcauccccaacuucaaccaguacgaggccaugagcugcgacuucaacggcggcaagaucagcgugcaguacaaccugagccacagcuucgccguggacgccgccaaccacugcggcaccaucgccaacggcgugcugcagaccuucaugagaauggccuggggcggcagcuacaucgcccuggacagcggcaagggcaacugggacugcaucaugaccagcuaccaguaccugaucauccagaacaccaccugggaggaccacugccaguucagcagacccagccccaucggcuaccugggccugcugagccagagaaccagagacaucuacaucagcagaagacugcugggcaccuucaccuggacccugagcgacagcgagggcaacgaggcccccggcggcuacugccugaccagauggaugcugaucgaggccgagcugaagugcuucggcaacaccgccguggccaagugcaacgagaagcacgacgaggaguucugcgacaugcugagacuguucgacuucaacaagcaggccaucaagagacugaagaccgaggcccagaugagcauccagcugaucaacaaggccgugaacgcccugaucaacgaccagcugaucaugaagaaccaccugagagacaucaugggcauccccuacugcaacuacagcagauacugguaccugaaccacaccgugaccggcaagaccagccugcccagaugcuggcuggugagcaacggcagcuaccugaacgagacccacuucagcgacgacaucgagcagcaggccgacaacaugaucaccgagaugcugcagaaggaguacauggacagacagggcaagaccccccugggccugguggaccuguucguguucagcaccagcuucuaccugaucagcaucuuccugcaccuggugaagauccccugaggacuagucccuguucccagagcccacuuuuuuuucuuuuuuugaaauaaaauagccugucuuucagaucucaaaggcucuuuucagagccaccaaaaaaaaaaaaaaaaaaaaaaaaaaaaaaaaaaaaaaaaaaaaaaaaaaaaaaaaaaaaaaaaaaaaaaaaaaaaaaaaaaaaaaaaaaaaaaaaaaaaa

SEQ ID NO: 42344 - RNA, 1650 nt, Artificial Sequence
  mRNA product Design a-2 (hSL-A100) comprising derived and/or modified sequence from LASV(GA391;Clade III)__CAA36645__GPCmut13 (opt4)
aggagaguccgcucagccagguugcagaagcggcuuagcguguguccuaaucuucucucugcguguagguaggccugugccgcaaacaagcuuaccaugggccagaucgugaccuucuuccaggaggugccccacgugaucgaggaggugaugaacaucgugcugaucgcccugagcauccuggccauccugaagggccuguacaacguggccaccugcggccugaucggccuggugaccuuccugcugcugagcggcagaagcugcagccugaucuacaagggcaccuacgagcugcagacccuggagcugaacauggagacccugaacaugaccaugccccugagcugcaccaagaacaacagccaccacuacaucagagugggcaacgagaccggccuggagcugacccugaccaacaccagcauccugaaccacaaguucugcaaccugagcgacgcccacaagagaaaccuguacgaccacagccugaugagcaucaucagcaccuuccaccugagcauccccaacuucaaccaguacgaggccaugagcugcgacuucaacggcggcaagaucaccgugcaguacaaccugagccacagcuucgccguggacgccgccggccacugcggcacccuggccaacggcgugcugcagaccuucaugagaauggccuggggcggcagcuacaucgcccuggacagcggcagaggcaacugggacugcaucaugaccagcuaccaguaccugaucauccagaacaccaccugggacgaccacugccaguucagcagacccagccccaucggcuaccugggccugcugagccagagaaccagagacaucuacaucagcagaagacugcugggcaccuucaccuggacccugagcgacagcgagggcaacgagacccccggcggcuacugccugaccagauggaugcugaucgaggccgagcugaagugcuucggcaacaccgccguggccaagugcaacgagaagcacgacgaggaguucugcgacaugcugagacuguucgacuucaacaagcaggccaucagaagacugaagaccgaggcccagaugagcauccagcugaucaacaaggccgugaacgcccugaucaacgaccagcugaucaugaagaaccaccugagagacaucaugggcauccccuacugcaacuacagcagauacugguaccugaaccacaccagcaccggcaagaccagccugcccagaugcuggcugaucagcaacggcagcuaccugaacgagaccaaguucagcgacgacaucgagcagcaggccgacaacaugaucaccgagaugcugcagaaggaguacaucgacagacagggcaagaccccccugggccugguggaccuguucguguucagcaccagcuucuaccugaucagcaucuuccugcaccuggugaagauccccugaggacuagucccuguucccagagcccacuuuuuuuucuuuuuuugaaauaaaauagccugucuuucagaucucaaaggcucuuuucagagccaccaaaaaaaaaaaaaaaaaaaaaaaaaaaaaaaaaaaaaaaaaaaaaaaaaaaaaaaaaaaaaaaaaaaaaaaaaaaaaaaaaaaaaaaaaaaaaaaaaaaaa

SEQ ID NO: 42345 - RNA, 1653 nt, Artificial Sequence
  mRNA product Design a-2 (hSL-A100) comprising derived and/or modified sequence from LASV(AV;Clade V)__CCA30314__GPCmut13 (opt4)
aggagaguccgcucagccagguugcagaagcggcuuagcguguguccuaaucuucucucugcguguagguaggccugugccgcaaacaagcuuaccaugggccagaucgugaccuucuuccaggaggugccccacgugaucgaggaggugaugaacaucgugcugaucgcccugagcauccuggccgugcugaagggccuguacaacaucgccaccugcggccugaucggccugaucaccuuccugcugcugugcggcagaagcugcagcagcaaccuguacaagggcguguacgagcugcagagccuggaccugaacauggagacccugaacaugaccaugccccugagcugcaccaagaacaacagccaccacuacaucagagugggcaacgacaccggccuggagcugacccugaccaacaccagcauccugaaccacaaguucugcaaccugagcgacgcccacaagaaggaccuguacgaccacgcccugaugagcaucaucagcaccuuccaccugagcauccccaacuucaaccaguacgaggccaugagcugcgacuucaacggcggcaagaucagcgugcaguacaaccugagccacagcuacgccaucgacgccgccaaccacugcggcaccguggccaacggcauccugcagaccuucaugagaauggccuggggcggcagcuacaucgcccuggacagcggcagaggcaacugggacugcaucaugaccagcuaccaguaccugaucauccagaacaccaccugggagaaccacugccaguucagcagacccagccccaucggcuaccugggccugcugagccagagaaccagagacaucuacaucagcagaagacugcugggcaccuucaccuggacccugagcgacagcgagggcaacgccacccccggcggcuacugccugaccagauggaugcugaucgaggccgagcugaagugcuucggcaacaccgccguggccaagugcaacgagaagcacgacgaggaguucugcgacaugcugagacuguucgacuucaacaagcaggccaucagcagacugaagagcgaggcccagaugagcauccagcugaucaacaaggccgugaacgcccugaucaacgaccagcugaucaugaagaaccaccugagagacaucaugggcauccccuacugcaacuacagcaaguacugguaccugaaccacaccaucaccggcaagaccagccugcccaagugcuggcuggugagcaacggcagcuaccugaacgagacccacuucagcgacgacaucgagcagcaggccgacaacaugaucaccgagaugcugcagaaggaguacauggagagacagggcaagaccccccugggccugguggaccuguucguguucagcaccagcuucuaccugaucagcaucuuccugagacuggugaagauccccugaggacuagucccuguucccagagcccacuuuuuuuucuuuuuuugaaauaaaauagccugucuuucagaucucaaaggcucuuuucagagccaccaaaaaaaaaaaaaaaaaaaaaaaaaaaaaaaaaaaaaaaaaaaaaaaaaaaaaaaaaaaaaaaaaaaaaaaaaaaaaaaaaaaaaaaaaaaaaaaaaaaaa

SEQ ID NO: 42346 - RNA, 1650 nt, Artificial Sequence
  mRNA product Design a-2 (hSL-A100) comprising derived and/or modified sequence from LASV(Togo/2016/7082;Clade VI)__AMR44577__GPCmut13 (opt4)
aggagaguccgcucagccagguugcagaagcggcuuagcguguguccuaaucuucucucugcguguagguaggccugugccgcaaacaagcuuaccaugggccagaucaucaccuucuuccaggaggugccccacgugaucgaggaggugaugaacaucgugcugaucgcccugagccugcuggccauccugaagggcguguacaacguggccaccugcggcaucaucggccuggugaccuuccuguuccugugcggcagaagcugcagccugaucuacaagggcagcuacgagcugcagacccuggagcugaacauggagacccugaacaugaccaugccccugagcugcaccaagaacagcagccaccacuacaucagagugggcaacgagaccggccuggagcugacccugaccaacaccagcaucaucaaccacaaguucugcaaccugagcgacgcccacaagagaaaccuguacgaccacgcccugaugagcauccugagcaccuuccaccugagcauccccaacuucaaccaguacgaggccaugagcugcgacuucaacggcggcaagaucagcgugcaguacaaccugagccacgccuacgccguggacgccgccgagcacugcggcaccguggccaacggcgugcugcagaccuucaugagaauggccuggggcggcagcuacaucgcccuggacagcggcagaggcaacugggacugcaucaugaccagcuaccaguaccugaucauccagaacaccaccugggaggaccacugccaguucagcagacccagccccaucggcuaccugggccugcugagccagagaaccagagacaucuacaucagcagaagacugcugggcaccuucaccuggacccugagcgacagcgagggcaacgagacccccggcggcuacugccugaccagauggaugcugaucgaggccgagcugaagugcuucggcaacaccgccguggccaagugcaacgagaagcacgacgaggaguucugcgacaugcugagacuguucgacuucaacaagcaggccauccagagacugaagagcgaggcccagaugagcauccagcugaucaacaaggccgugaacgcccugaucaacgaccagcugaucaugaagaaccaccugagagacaugaugggcauccccuacugcaacuacagcaaguacugguaccugaaccacaccagcagcggcagaaccagccugcccaagugcuggcuggugagcaacggcagcuaccugaacgagacccacuucagcgacgacaucgagcagcaggccgacaacaugaucaccgagaugcugcagaaggaguacaucgacagacagggcaagaccccccugggccugguggaccuguucguguucagcaccagcuucuaccugaucagcaucuuccugcaccugaucaagauccccugaggacuagucccuguucccagagcccacuuuuuuuucuuuuuuugaaauaaaauagccugucuuucagaucucaaaggcucuuuucagagccaccaaaaaaaaaaaaaaaaaaaaaaaaaaaaaaaaaaaaaaaaaaaaaaaaaaaaaaaaaaaaaaaaaaaaaaaaaaaaaaaaaaaaaaaaaaaaaaaaaaaaa

SEQ ID NO: 42347 - RNA, 1650 nt, Artificial Sequence
  mRNA product Design a-2 (hSL-A100) comprising derived and/or modified sequence from LASV(KAK-428;Clade n.d. (VII))__ANH09740__GPCmut13 (opt4)
aggagaguccgcucagccagguugcagaagcggcuuagcguguguccuaaucuucucucugcguguagguaggccugugccgcaaacaagcuuaccaugggccagaucgugaccuucuuccaggaggugccccacgugaucgaggaggugaugaacaucgugcugaucgcccugagccugcuggccauccugaagggccuguacaacuucgccaccugcggcgugaucggccugaucaccuuccugcugcugugcggcagaagcugcagcgccaccuacaagggccaguacgagcugcagacccuggagcugaacauggagagccugaacaugaccaugccccugagcugcaccaagaacaacagccaccacuacaucagagccggcaacaacaccggccuggagcugacccugaccaacaccagcaucaucagccacaaguucugcaaccugagcgacgcccacaagaagaaccuguacgaccacacccugaugagcaucaucaccaccuuccaccugagcauccccaacuucaaccaguacgaggccaugagcugcgacuucaacggcggcaagaucagcauccaguacaaccugagccacagcuacgccggcgacgccgcccagcacugcggcaccguggccaacggcgugcugcagaccuucaugagaauggccuggggcggcagcuaccuggcccuggacagcggcagaagaggcugggacugcaucaucagcagcuaccaguaccugaucauccagaacaccaccugggacgaccacugccaguucagcagacccagccccaucggcuaccugggcuucgugagccagaagaccagagacaucuacaucagcagaagacugcugggcaccuucaccuggacccugagcgacagcgagggccacgacaugcccggcggcuacugccugaccagauggaugcugaucgaggccgaccugaagugcuucggcaacaccgccguggccaagugcaacgagaagcacgacgaggaguucugcgacauguggagacuguucgacuucaacaagcaggccauccagagacugaaggccgaggcccagaugaacauccagcugaucaacaaggccgugaacgcccugaucaacgaccagcugaugaugaagaaccaccugagagacaucaugggcauccccuacugcaacuacagcaaguucugguaccugaacaacaccaccaccggcagaaccagccugcccagaugcuggcugaucagcaacggcagcuaccugaacgagacccacuucagcgacgacaucgagcagcaggccgacaacaugaucaccgagaugcugcagaaggaguacauggacagacagggcaagaccccccugggccugguggaccuguucguguucagcaccagcuucuaccugaucaccaucuuccugcaccuggugaagauccccugaggacuagucccuguucccagagcccacuuuuuuuucuuuuuuugaaauaaaauagccugucuuucagaucucaaaggcucuuuucagagccaccaaaaaaaaaaaaaaaaaaaaaaaaaaaaaaaaaaaaaaaaaaaaaaaaaaaaaaaaaaaaaaaaaaaaaaaaaaaaaaaaaaaaaaaaaaaaaaaaaaaaa

SEQ ID NO: 42348 - RNA, 1650 nt, Artificial Sequence; identical to SEQ ID NO: 42342
  mRNA product Design a-2 (hSL-A100) comprising derived and/or modified sequence from LASV(Pinneo-NIG-1969;Clade I)__AIT17836__GPCmut13 (opt4)

SEQ ID NO: 42349 - RNA, 1650 nt, Artificial Sequence
  mRNA product Design a-2 (hSL-A100) comprising derived and/or modified sequence from LASV(ISTH0009-NIG-2011;Clade II)__AIT17404__GPCmut13 (opt4)
aggagaguccgcucagccagguugcagaagcggcuuagcguguguccuaaucuucucucugcguguagguaggccugugccgcaaacaagcuuaccaugggccagaucaucaccuucuuccaggaggugccccacgugaucgaggaggugaugaacaucgugcugaucgcccugagccugcuggccauccugaagggcaucuacaacguggccaccugcggccuguucggccuggugagcuuccugcugcugugcggcagaagcugcagcaccaccuacaagggcguguacgagcugcagacccuggagcuggacauggccagccugaacaugaccaugccccugagcugcaccaagaacaacagccaccacuacaucauggugggcaacgagaccggccuggagcugacccugaccaacaccagcaucaucaaccacaaguucugcaaccugagcgacgcccacaagaagaaccuguacgaccacgcccugaugagcaucaucagcaccuuccaccugagcauccccaacuucaaccaguacgaggccaugagcugcgacuucaacggcggcaagaucagcgugcaguacaaccugagccacgccuacgccguggacgccgccaaccacugcggcaccaucgccaacggcgugcugcagaccuucaugagaauggccuggggcggcagcuacaucgcccuggacagcggcaagggcagcugggacugcaucaugaccagcuaccaguaccugaucauccagaacaccaccugggaggaccacugccaguucagcagacccagccccaucggcuaccugggccugcugagccagagaaccagagacaucuacaucagcagaagacugcugggcaccuucaccuggacccugagcgacagcgagggcaacgagacccccggcggcuacugccugaccagauggaugcugaucgaggccgagcugaagugcuucggcaacaccgccguggccaagugcaacgagaagcacgacgaggaguucugcgacaugcugagacuguucgacuucaacaagcaggccaucagaagacugaagaccgaggcccagaugagcauccagcugaucaacaaggccgugaacgcccugaucaacgaccagcugaucaugaagaaccaccugagagacaucaugggcauccccuacugcaacuacagcaaguacugguaccugaaccacaccgugaccggcaagaccagccugcccagaugcuggcuggugagcaacggcagcuaccugaacgagacccacuucagcgacgacaucgagcagcaggccgacaacaugaucaccgagcugcugcagaaggaguacauggacagacagggcaagaccccccugggccugguggaccuguucguguucagcaccagcuucuaccugaucagcaucuuccugcaccugaucaagauccccugaggacuagucccuguucccagagcccacuuuuuuuucuuuuuuugaaauaaaauagccugucuuucagaucucaaaggcucuuuucagagccaccaaaaaaaaaaaaaaaaaaaaaaaaaaaaaaaaaaaaaaaaaaaaaaaaaaaaaaaaaaaaaaaaaaaaaaaaaaaaaaaaaaaaaaaaaaaaaaaaaaaaa

SEQ ID NO: 42350 - RNA, 1650 nt, Artificial Sequence
  mRNA product Design a-2 (hSL-A100) comprising derived and/or modified sequence from LASV(ISTH2010-NIG-2012;Clade II)__AIT17482__GPCmut13 (opt4)
aggagaguccgcucagccagguugcagaagcggcuuagcguguguccuaaucuucucucugcguguagguaggccugugccgcaaacaagcuuaccaugggccagaucaucaccuucuuccaggaggugccccacgugaucgaggaggugaugaacaucgugcugaucgcccugagccugcuggccauccugaagggcaucuacaacguggccaccugcggccuguucggccuggugagcuuccugcugcugugcggcagaagcugcagcaccaccuacaagggcguguacgagcugcagacccuggagcuggacauggccagccugaacaugaccaugccccugagcugcaccaagaacaacagccaccacuacaucauggugggcaacgagaccggccuggagcugacccugaccaacaccagcaucaucaaccacaaguucugcaaccugagcgacgcccacaagaagaaccuguacgaccacgcccugaugagcaucaucagcaccuuccaccugagcauccccaacuucaaccaguacgaggccaugagcugcgacuucaacggcggcaagaucagcgugcaguacaaccugagccacgccuacgccguggacgccgccaaccacugcggcaccaucgccaacggcgugcugcagaccuucaugagaauggccuggggcggcagcuacaucgcccuggacagcggcaagggcagcugggacugcaucaugaccagcuaccaguaccugaucauccagaacaucaccugggaggaccacugccaguucagcagacccagccccaucggcuaccugggccugcugagccagagaaccagagacaucuacaucagcagaagacugcugggcaccuucaccuggacccugagcgacagcgagggcaacgagacccccggcggcuacugccugaccagauggaugcugaucgaggccgagcugaagugcuucggcaacaccgccguggccaagugcaacgagaagcacgacgaggaguucugcgacaugcugagacuguucgacuucaacaagcaggccaucagaagacugaagaccgaggcccagaugagcauccagcugaucaacaaggccgugaacgcccugaucaacgaccagcugaucaugaagaaccaccugagagacaucaugggcauccccuacugcaacuacagcaaguacugguaccugaaccacaccgugaccggcaagaccagccugcccagaugcuggcuggugagcaacggcagcuaccugaacgagacccacuucagcgacgacaucgagcagcaggccgacaacaugaucaccgagcugcugcagaaggaguacaucgacagacagggcaagaccccccugggccugguggaccuguucguguucagcaccagcuucuaccugaucagcaucuuccugcaccuggugaagauccccugaggacuagucccuguucccagagcccacuuuuuuuucuuuuuuugaaauaaaauagccugucuuucagaucucaaaggcucuuuucagagccaccaaaaaaaaaaaaaaaaaaaaaaaaaaaaaaaaaaaaaaaaaaaaaaaaaaaaaaaaaaaaaaaaaaaaaaaaaaaaaaaaaaaaaaaaaaaaaaaaaaaaa

SEQ ID NO: 42351 - RNA, 1650 nt, Artificial Sequence
  mRNA product Design a-2 (hSL-A100) comprising derived and/or modified sequence from LASV(Lassa virus/H.sapiens-wt/NGA/2015/ISTH_0543;Clade II)__AVO03639__GPCmut13 (opt4)
aggagaguccgcucagccagguugcagaagcggcuuagcguguguccuaaucuucucucugcguguagguaggccugugccgcaaacaagcuuaccaugggccagaucaucaccuucuuccaggaggugccccacgugaucgaggaggugaugaacaucgugcugaucgcccugagccugcuggccauccugaagggcaucuacaacguggccaccugcggccuguucggccuggugagcuuccugcugcugugcggcagaagcugcagcaccaccuacaagggcguguacgagcugcagacccuggagcuggacauggccaaccugaacaugaccaugccccugagcugcaccaagaacaacagccaccacuacaucauggugggcaacgagaccggccuggagcugacccugaccaacaccagcaucaucaaccacaaguucugcaaccugagcgacgcccacaagaagaaccuguacgaccacgcccugaugagcaucaucagcaccuuccaccugagcauccccaacuucaaccaguacgaggccaugagcugcgacuucaacggcggcaagaucagcgugcaguacaaccugagccacaccuacgccguggacgccgccaaccacugcggcaccaucgccaacggcgugcugcagaccuucaugagaauggccuggggcggcagcuacaucgcccuggacagcggcaagggcagcugggacugcaucaugaccagcuaccaguaccuggugauccagaacaccaccugggaggaccacugccaguucagcagacccagccccaucggcuaccugggccugcugagccagagaaccagagacaucuacaucagcagaagacugcugggcaccuucaccuggacccugagcgacagcgagggcaacgagacccccggcggcuacugccugaccagauggaugcugaucgaggccgagcugaagugcuucggcaacaccgccguggccaagugcaacgagaagcacgacgaggaguucugcgacaugcugagacuguucgacuucaacaagcaggccaucagaagacugaagaccgaggcccagaugagcauccagcugaucaacaaggccgugaacgcccugaucaacgaccagcugaucaugaagaaccaccugagagacaucaugggcauccccuacugcaacuacagcaaguacugguaccugaaccacaccgugaccggcaagaccagccugcccagaugcuggcuggugagcaacggcagcuaccugaacgagacccacuucagcgacgacaucgagcagcaggccgacaacaugaucaccgagcugcugcagaaggaguacaucgacagacagggcaagaccccccugggccugguggaccuguucguguucagcaccagcuucuaccugaucagcaucuuccugcaccuggugaagauccccugaggacuagucccuguucccagagcccacuuuuuuuucuuuuuuugaaauaaaauagccugucuuucagaucucaaaggcucuuuucagagccaccaaaaaaaaaaaaaaaaaaaaaaaaaaaaaaaaaaaaaaaaaaaaaaaaaaaaaaaaaaaaaaaaaaaaaaaaaaaaaaaaaaaaaaaaaaaaaaaaaaaaa

SEQ ID NO: 42352 - RNA, 1650 nt, Artificial Sequence
  mRNA product Design a-2 (hSL-A100) comprising derived and/or modified sequence from LASV(Lassa virus/H.sapiens-wt/NGA/2016/ISTH_0009;Clade II)__AVO03571__GPCmut13 (opt4)
aggagaguccgcucagccagguugcagaagcggcuuagcguguguccuaaucuucucucugcguguagguaggccugugccgcaaacaagcuuaccaugggccagaucaucaccuucuuccaggaggugccccacgugaucgaggaggugaugaacaucgugcugaucgcccugagccugcuggccauccugaagggcaucuacaacguggccaccugcggccugcugggccuggugagcuuccugcugcugugcggcagaagcugcagcaccaccuacaagggcguguacgagcugcagacccuggagcuggacauggccagccugaacaugaccaugccccugagcugcaccaagaacaacagccaccacuacaucauggugggcaacgagaccggccuggagcugacccugaccaacaccagcaucaucaaccacaaguucugcaaccugagcgacgcccacaagaagaaccuguacgaccacgcccugaugagcaucaucagcaccuuccaccugagcauccccaacuucaaccaguacgaggccaugagcugcgacuucaacggcggcagaaucagcgugcaguacaaccugagccacagcuacgccguggacgccgccaaccacugcggcaccaucgccaacggcgugcugcagaccuucaugagaauggccuggggcggcagcuacaucgcccuggacagcggcaagggcagcugggacugcaucaugaccagcuaccaguaccugaucauccagaacaccaccugggaggaccacugccaguucagcagacccagccccaucggcuaccugggccugcugagccagagaaccagagacaucuacaucagcagaagacugcugggcaccuucaccuggacccugagcgacagcgagggcaacgagacccccggcggcuacugccugaccagauggaugcugaucgaggccgagcugaagugcuucggcaacaccgccguggccaagugcaacgagaagcacgacgaggaguucugcgacaugcugagacuguucgacuucaacaagcaggccaucagaagacugaagaccgaggcccagaugagcauccagcugaucaacaaggccgugaacgcccugaucaacgaccagcugaucaugaagaaccaccugagagacaucaugggcauccccuacugcaacuacagcaaguacugguaccugaaccacaccgugaccggcaagaccagccugcccagaugcuggcuggugagcaacggcagcuaccugaacgagacccacuucagcgacgacaucgagcagcaggccgacaacaugaucaccgagcugcugcagaaggaguacaucgacagacagggcaagaccccccugggccugguggaccuguucguguucagcaccagcuucuaccugaucagcaucuuccugcaccuggugaagauccccugaggacuagucccuguucccagagcccacuuuuuuuucuuuuuuugaaauaaaauagccugucuuucagaucucaaaggcucuuuucagagccaccaaaaaaaaaaaaaaaaaaaaaaaaaaaaaaaaaaaaaaaaaaaaaaaaaaaaaaaaaaaaaaaaaaaaaaaaaaaaaaaaaaaaaaaaaaaaaaaaaaaaa

SEQ ID NO: 42353 - RNA, 1650 nt, Artificial Sequence
  mRNA product Design a-2 (hSL-A100) comprising derived and/or modified sequence from LASV(Lassa virus/H.sapiens-wt/NGA/2016/ISTH_0017;Clade II)__AVO03567__GPCmut13 (opt4)
aggagaguccgcucagccagguugcagaagcggcuuagcguguguccuaaucuucucucugcguguagguaggccugugccgcaaacaagcuuaccaugggccagaucaucaccuucuuccaggaggugccccacgugaucgaggaggugaugaacaucgugcugaucgcccugagccugcuggccauccugaagggcaucuacaacguggccaccugcggccuguucggccuggugagcuuccugcugcugugcggcagaagcugcagcaccaccuacaagggcguguacgagcugcagacccuggagcuggacauggccagccugaacaugaccaugccccugagcugcaccaagaacaacagccaccacuacaucauggugggcaacgagaccggccuggagcugacccugaccaacaccagcaucaucaaccacaaguucugcaaccugagcgacgcccacaagaagaaccuguacgaccacgcccugaugagcaucaucagcaccuuccaccugagcauccccaacuucaaccaguacgaggccaugagcugcgacuucaacggcggcaagaucagcgugcaguacaaccugagccacaccuacgccaucgacgccgccaaccacugcggcaccaucgccaacggcgugcugcagaccuucaugagaauggccuggggcggcagcuacaucgcccuggacagcggcaagggcagcugggacugcaucaugaccagcuaccaguaccugaucauccagaacaccaccugggaggaccacugccaguucagcagacccagccccaucggcuaccugggccugcugagccagagaaccagagacaucuacaucagcagaagacugcugggcaccuucaccuggacccugagcgacagcgagggcaacgagacccccggcggcuacugccugaccagauggaugcugaucgaggccgagcugaagugcuucggcaacaccgccguggccaagugcaacgagaagcacgacgaggaguucugcgacaugcugagacuguucgacuucaacaagcaggccaucagaagacugaagaccgaggcccagaugagcauccagcugaucaacaaggccgugaacgcccugaucaacgaccagcugaucaugaagaaccaccugagagacaucaugggcauccccuacugcaacuacagcaaguacugguaccugaaccacaccgugaccggcaagaccagccugcccagaugcuggcuggugagcaacggcagcuaccugaacgagacccacuucagcgacgacaucgagcagcaggccgacaacaugaucaccgagcugcugcagaaggaguacauggacagacagggcaagaccccccugggccugguggaccuguucguguucagcaccagcuucuaccugaucagcaucuuccugcaccuggugagaauccccugaggacuagucccuguucccagagcccacuuuuuuuucuuuuuuugaaauaaaauagccugucuuucagaucucaaaggcucuuuucagagccaccaaaaaaaaaaaaaaaaaaaaaaaaaaaaaaaaaaaaaaaaaaaaaaaaaaaaaaaaaaaaaaaaaaaaaaaaaaaaaaaaaaaaaaaaaaaaaaaaaaaaa

SEQ ID NO: 42354 - RNA, 1650 nt, Artificial Sequence
  mRNA product Design a-2 (hSL-A100) comprising derived and/or modified sequence from LASV(Lassa virus/H.sapiens-wt/NGA/2018/ISTH_0959;Clade II)__AVV65099__GPCmut13 (opt4)
aggagaguccgcucagccagguugcagaagcggcuuagcguguguccuaaucuucucucugcguguagguaggccugugccgcaaacaagcuuaccaugggccagaucaucaccuucuuccaggaggugccccacgugaucgaggaggugaugaacaucgugcugaucgcccugagccugcuggccauccugaagggcaucuacaacguggugaccugcggccuguucggccuggugagcuuccugcugcugugcggcagaagcugcagcaccaccuacaagggcguguacgagcugcagacccuggagcuggacauggccagccugaacaugaccaugccccugagcugcaccaagaacaacagccaccacuacaucauggugggcaacgagaccggccuggagcugacccugaccaacaccagcaucaucaaccacaaguucugcaaccugagcgacgcccacaagaagaaccuguacgaccacgcccugaugagcaucaucagcaccuuccaccugagcauccccaacuucaaccaguacgaggccaugagcugcgacuucaacggcggcaagaucagcgugcaguacaaccugagccacgccuacgccaucgacgccgccaaccacugcggcaccaucgccaacggcgugcugcagaccuucaugagaauggccuggggcggcagcuacaucgcccuggacagcggcaagggcagcugggacugcaucaugaccagcuaccaguaccugaucauccagaacaccaccugggaggaccacugccaguucagcagacccagccccaucggcuaccugggccugcugagccagagaaccagagacaucuacaucagcagaagacugcugggcaccuucaccuggacccugagcgacagcgagggcaacgagacccccggcggcuacugccugaccagauggaugcugaucgaggccgagcugaagugcuucggcaacaccgccguggccaagugcaacgagaagcacgacgaggaguucugcgacaugcugagacuguucgacuucaacaagcaggccaucagaagacugaagaccgaggcccagaugagcauccagcugaucaacaaggccgugaacgcccugaucaacgaccagcugaucaugaagaaccaccugagagacaucaugggcauccccuacugcaacuacagcaaguacugguaccugaaccacaccgugaccggcaagaccagccugcccagaugcuggcuggugagcaacggcagcuaccugaacgagacccacuucagcgacgacaucgagcagcaggccgacaacaugaucaccgagcugcugcagaaggaguacaucgacagacagggcaagaccccccugggccugguggaccuguucguguucagcaccagcuucuaccugaucagcaucuuccugcaccuggugaagauccccugaggacuagucccuguucccagagcccacuuuuuuuucuuuuuuugaaauaaaauagccugucuuucagaucucaaaggcucuuuucagagccaccaaaaaaaaaaaaaaaaaaaaaaaaaaaaaaaaaaaaaaaaaaaaaaaaaaaaaaaaaaaaaaaaaaaaaaaaaaaaaaaaaaaaaaaaaaaaaaaaaaaaa

SEQ ID NO: 42355 - RNA, 1650 nt, Artificial Sequence
  mRNA product Design a-2 (hSL-A100) comprising derived and/or modified sequence from LASV(LASV003-NIG-2008;Clade II)__AIT17580__GPCmut13 (opt4)
aggagaguccgcucagccagguugcagaagcggcuuagcguguguccuaaucuucucucugcguguagguaggccugugccgcaaacaagcuuaccaugggccagaucaucaccuucuuccaggaggugccccacgugaucgaggaggugaugaacaucgugcugaucgcccugagccugcuggccauccugaagggcaucuacaacguggccaccugcggccuguucggccuggugagcuuccugcugcugugcggcagaagcugcagcaccaccuacaagggcguguacgagcugcagacccuggagcuggacauggccagccugaacaugaccaugccccugagcugcaccaagaacaacagccaccacuacaucauggugggcaacgagaccggccuggagcugacccugaccaacaccagcaucaucaaccacaaguucugcaaccugagcgacgcccacaagaagaaccuguacgaccacgcccugaugagcaucaucagcaccuuccaccugagcauccccaacuucaaccaguacgaggccaugagcugcgacuucaacggcggcaagaucagcgugcaguacaaccugagccacaccuacgccguggacgccgccaaccacugcggcaccaucgccaacggcgugcugcagaccuucaugagaauggccuggggcggcagcuacaucgcccuggacagcggcaagggcagcugggacugcaucaugaccagcuaccaguaccugaucauccagaacaccaccugggaggaccacugccaguucagcagacccagccccaucggcuaccugggccugcugagccagagaaccagagacaucuacaucagcagaagacugcugggcaccuucaccuggacccugagcgacagcgagagcaacgagacccccggcggcuacugccugaccagauggaugcugaucgaggccgagcugaagugcuucggcaacaccgccguggccaagugcaacgagaagcacgacgaggaguucugcgacaugcugagacuguucgacuucaacaagcaggccaucagaagacugaaggccgaggcccagaugagcauccagcugaucaacaaggccgugaacgcccugaucaacgaccagcugaucaugaagaaccaccugagagacaucaugggcauccccuacugcaacuacagcaaguacugguaccugaaccacaccgugaccggcagaaccagccugcccagaugcuggcuggugagcaacggcagcuaccugaacgagacccacuucagcgacgacaucgagcagcaggccgacaacaugaucaccgagcugcugcagaaggaguacauggacagacagggcaagaccccccugggccugguggaccuguucguguucagcaccagcuucuaccugaucagcaucuuccugcaccuggugaagauccccugaggacuagucccuguucccagagcccacuuuuuuuucuuuuuuugaaauaaaauagccugucuuucagaucucaaaggcucuuuucagagccaccaaaaaaaaaaaaaaaaaaaaaaaaaaaaaaaaaaaaaaaaaaaaaaaaaaaaaaaaaaaaaaaaaaaaaaaaaaaaaaaaaaaaaaaaaaaaaaaaaaaaa

SEQ ID NO: 42356 - RNA, 1650 nt, Artificial Sequence
  mRNA product Design a-2 (hSL-A100) comprising derived and/or modified sequence from LASV(LASV035-NIG-2009;Clade II)__AIT17588__GPCmut13 (opt4)
aggagaguccgcucagccagguugcagaagcggcuuagcguguguccuaaucuucucucugcguguagguaggccugugccgcaaacaagcuuaccaugggccagaucaucaccuucuuccaggaggugccccacgugaucgaggaggugaugaacaucgugcugaucgcccugagccugcuggccauccugaagggcaucuacaacguggccaccugcggccuguucggccuggugagcuuccugcugcugugcggcagaagcugcagcaccaccuacaagggcguguacgagcugcagacccuggagcuggacauggccagccugaacaugaccaugccccugagcugcaccaagaacaacagccaccacuacaucauggugggcaacgagaccggccuggagcugacccugaccaacaccagcaucaucaaccacaaguucugcaaccugagcgacgcccacaagaagaaccuguacgaccacgcccugaugagcaucaucagcaccuuccaccugagcauccccaacuucaaccaguacgaggccaugagcugcgacuucaacggcggcaagaucagcgugcaguacaaccugagccacgccuacgccguggacgccgccaaccacugcggcaccaucgccaacggcgugcugcagaccuucaugagaauggccuggggcggcagcuacaucgcccuggacagcggcaagggcagcugggacugcaucaugaccagcuaccaguaccugaucauccagaacaccaccugggaggaccacugccaguucagcagacccagccccaucggcuaccugggccugcugagccagagaaccagagacaucuacaucagcagaagacugcugggcaccuucaccuggacccugagcgacagcgagggcaacgagacccccggcggcuacugccugaccagauggaugcugaucgaggccgagcugaagugcuucggcaacaccgccguggccaagugcaacgagaagcacgacgaggaguucugcgacaugcugagacuguucgacuucaacaagcaggccaucagaagacugaaggccgaggcccagaugagcauccagcugaucaacaaggccgugaacgcccugaucaacgaccagcugaucaugaagaaccaccugagagacaucaugggcauccccuacugcaacuacagcaaguacugguaccugaaccacaccgugaccggcaagaccagccugcccagaugcuggcuggugagcaacggcagcuaccugaacgagacccacuucagcgacgacaucgagcagcaggccgacaacaugaucaccgagcugcugcagaaggaguacaucgacagacagggcaagaccccccugggccugguggaccuguucguguucagcaccagcuucuaccugaucagcaucuuccugcaccuggugaagauccccugaggacuagucccuguucccagagcccacuuuuuuuucuuuuuuugaaauaaaauagccugucuuucagaucucaaaggcucuuuucagagccaccaaaaaaaaaaaaaaaaaaaaaaaaaaaaaaaaaaaaaaaaaaaaaaaaaaaaaaaaaaaaaaaaaaaaaaaaaaaaaaaaaaaaaaaaaaaaaaaaaaaaa

SEQ ID NO: 42357 - RNA, 1650 nt, Artificial Sequence
  mRNA product Design a-2 (hSL-A100) comprising derived and/or modified sequence from LASV(LASV1000-NIG-2009;Clade II)__AIT17782__GPCmut13 (opt4)
aggagaguccgcucagccagguugcagaagcggcuuagcguguguccuaaucuucucucugcguguagguaggccugugccgcaaacaagcuuaccaugggccagaucaucaccuucuuccaggaggugccccacgugaucgaggaggugaugaacaucgugcugaucgcccugagccugcuggccauccugaagggcaucuacaacguggccaccugcggccuguucggccuggugagcuuccugcugcugugcggcagaagcugcagcaccaccuacaagggcguguacgagcugcagacccuggagcuggacauggccagccugaacaugaccaugccccugagcugcaccaagaacaacagccaccacuacaucauggugggcaacgagaccggccuggagcugacccugaccaacaccagcaucaucaaccacaaguucugcaaccugagcgacgcccacaagaagaaccuguacgaccacgcccugaugagcaucaucagcaccuuccaccugagcauccccaacuucaaccaguacgaggccaugagcugcgacuucaacggcggcaagaucagcgugcaguacaaccugagccacaccuacgccguggacgccgccaaccacugcggcaccaucgccaacggcgugcugcagaccuucaugagaauggccuggggcggcagcuacaucgcccuggacagcggcaagggcagcugggacugcaucaugaccagcuaccaguaccugaucauccagaacaccaccugggaggaccacugccaguucagcagacccagccccaucggcuaccugggccugcugagccagagaaccagagacaucuacaucagcagaagacugcugggcaccuucaccuggacccugagcgacagcgagggcaacgagacccccggcggcuacugccugaccagauggaugcugaucgaggccgagcugaagugcuucggcaacaccgccguggccaagugcaacgagaagcacgacgaggaguucugcgacaugcugagacuguucgacuucaacaagcaggccaucaagagacugaagaccgaggcccagaugagcauccagcugaucaacaaggccgugaacgcccugaucaacgaccagcugaucaugaagaaccaccugagagacaucaugggcauccccuacugcaacuacagcaaguacugguaccugaaccacaccgugaccggcaagaccagccugcccagaugcuggcuggugagcaacggcagcuaccugaacgagacccacuucagcgacgacaucgagcagcaggccgacaacaugaucaccgagcugcugcagaaggaguacaucgacagacagggcaagaccccccugggccugguggaccuguucguguucagcaccagcuucuaccugaucagcaucuuccugcaccuggugaagauccccugaggacuagucccuguucccagagcccacuuuuuuuucuuuuuuugaaauaaaauagccugucuuucagaucucaaaggcucuuuucagagccaccaaaaaaaaaaaaaaaaaaaaaaaaaaaaaaaaaaaaaaaaaaaaaaaaaaaaaaaaaaaaaaaaaaaaaaaaaaaaaaaaaaaaaaaaaaaaaaaaaaaaa

SEQ ID NO: 42358 - RNA, 1650 nt, Artificial Sequence
  mRNA product Design a-2 (hSL-A100) comprising derived and/or modified sequence from LASV(LASV221-NIG-2010;Clade II)__AIT17624__GPCmut13 (opt4)
aggagaguccgcucagccagguugcagaagcggcuuagcguguguccuaaucuucucucugcguguagguaggccugugccgcaaacaagcuuaccaugggccagaucaucaccuucuuccaggaggugccccacgugaucgaggaggugaugaacaucgugcugaucgcccugagccugcuggccauccugaagggcaucuacaacguggccaccugcggccuguucggccuggugagcuuccugcugcugugcggcagaagcugcagcaccaccuacaagggcguguacgagcugcagacccuggagcuggacauggccagccugaacaugaccaugccccugagcugcaccaagaacaacagccaccacuacaucauggugggcaacgagaccggccuggagcugacccugaccaacaccagcaucaucaaccacaaguucugcaaccugagcgacgcccacaagaagaaccuguacgaccacgcccugaugagcaucaucagcaccuuccaccugagcauccccaacuucaaccaguacgaggccaugagcugcgacuucaacggcggcaagaucagcgugcaguacaaccugagccacaccuacgccaucgacgccgccaaccacugcggcaccaucgccaacggcgugcugcagaccuucaugagaauggccuggggcggcagcuacaucgcccuggacagcggcaagggcagcugggacugcaucaugaccagcuaccaguaccugaucauccagaacaccaccugggaggaccacugccaguucagcagacccagccccaucggcuaccugggccugcugagccagagaaccagagacaucuacaucagcagaagacugcugggcaccuucaccuggacccugagcgacagcgagggcaacgagacccccggcggcuacugccugaccagauggaugcugaucgaggccgagcugaagugcuucggcaacaccgccguggccaagugcaacgagaagcacgacgaggaguucugcgacaugcugagacuguucgacuucaacaagcaggccaucagaagacugaagaccgaggcccagaugagcauccagcugaucaacaaggccgugaacgcccugaucaacgaccagcugaucaugaagaaccaccugagagacaucaugggcauccccuacugcaacuacagcaaguacugguaccugaaccacaccgugaccggcaagaccagccugcccagaugcuggcuggugagcaacggcagcuaccugaacgagacccacuucagcgacgacaucgagcagcaggccgacaacaugaucaccgagaugcugcagaaggaguacauggacagacagggcaagaccccccugggccugguggaccuguucguguucagcaccagcuucuaccugaucagcaucuuccugcaccuggugaagauccccugaggacuagucccuguucccagagcccacuuuuuuuucuuuuuuugaaauaaaauagccugucuuucagaucucaaaggcucuuuucagagccaccaaaaaaaaaaaaaaaaaaaaaaaaaaaaaaaaaaaaaaaaaaaaaaaaaaaaaaaaaaaaaaaaaaaaaaaaaaaaaaaaaaaaaaaaaaaaaaaaaaaaa

SEQ ID NO: 42359 - RNA, 1650 nt, Artificial Sequence
  mRNA product Design a-2 (hSL-A100) comprising derived and/or modified sequence from LASV(LASV237-NIG-2010;Clade II)__AIT17638__GPCmut13 (opt4)
aggagaguccgcucagccagguugcagaagcggcuuagcguguguccuaaucuucucucugcguguagguaggccugugccgcaaacaagcuuaccaugggccagaucaucaccuucuuccaggaggugccccacgugaucgaggaggugaugaacaucgugcugaucgcccugagccugcuggccauccugaagggcaucuacaacguggccaccugcggccuguucggccuggugagcuuccugcugcugugcggcagaagcugcagcaccaccuacaagggcguguacgagcugcagacccuggagcuggacauggccagccugaacaugaccaugccccugagcugcaccaagaacaacagccaccacuacaucauggugggcaacgagaccggccuggagcugacccugaccaacaccagcaucaucaaccacaaguucugcaaccugagcgacgcccacaagaaggaccuguacgaccacgcccugaugagcaucaucagcaccuuccaccugagcauccccaacuucaaccaguacgaggccaugagcugcgacuucaacggcggcaagaucagcgugcaguacaaccugagccacaccuacgccguggacgccgccaaccacugcggcaccaucgccaacggcgugcugcagaccuucaugagaauggccuggggcggcagcuacaucgcccuggacagcggcaagggcagcugggacugcaucaugaccagcuaccaguaccugaucauccagaacaccaccugggaggaccacugccaguucagcagacccagccccaucggcuaccugggccugcugagccagagaaccagagacaucuacaucagcagaagacugcugggcaccuucaccuggacccugagcgacagcgagggcaacgagacccccggcggcuacugccugaccagauggaugcugaucgaggccgagcugaagugcuucggcaacaccgccguggccaagugcaacgagaagcacgacgaggaguucugcgacaugcugagacuguucgacuucaacaagcaggccaucagaagacugaagaccgaggcccagaugagcauccagcugaucaacaaggccgugaacgcccugaucaacgaccagcugaucaugaagaaccaccugagagacaucaugggcauccccuacugcaacuacagcaaguacugguaccugaaccacaccgugaccggcaagaccagccugcccagaugcuggcuggugagcaacggcagcuaccugaacgagacccacuucagcgacgacaucgagcagcaggccgacaacaugaucaccgagcugcugcagaaggaguacauggacagacagggcaagaccccccugggccugguggaccuguucguguucagcaccagcuucuaccugaucagcaucuuccugcaccugaucaagauccccugaggacuagucccuguucccagagcccacuuuuuuuucuuuuuuugaaauaaaauagccugucuuucagaucucaaaggcucuuuucagagccaccaaaaaaaaaaaaaaaaaaaaaaaaaaaaaaaaaaaaaaaaaaaaaaaaaaaaaaaaaaaaaaaaaaaaaaaaaaaaaaaaaaaaaaaaaaaaaaaaaaaaa

SEQ ID NO: 42360 - RNA, 1650 nt, Artificial Sequence
  mRNA product Design a-2 (hSL-A100) comprising derived and/or modified sequence from LASV(LASV253-NIG-2011;Clade II)__AIT17670__GPCmut13 (opt4)
aggagaguccgcucagccagguugcagaagcggcuuagcguguguccuaaucuucucucugcguguagguaggccugugccgcaaacaagcuuaccaugggccagaucaucaccuucuuccaggaggugccccacgugaucgaggaggugaugaacaucgugcugaucgcccugagccugcuggccauccugaagggcaucuacaacguggccaccugcggccuguucggccuggugagcuuccugcugcugugcggcagaagcugcagcaccaccuacaagggcguguacgagcugcagacccuggagcuggacauggccagccugaacaugaccaugccccugagcugcaccaagaacaacagccaccacuacaucauggugggcaacgagaccggccuggagcugacccugaccaacaccagcaucaucaaccacaaguucugcaaccugagcgacgcccacaagaagaaccuguacgaccacgcccugaugagcaucaucagcaccuuccaccugagcauccccaacuucaaccaguacgaggccaugagcugcgacuucaacggcggcaagaucagcgugcaguacaaccugagccacaccuacgccguggacgccgccaaccacugcggcaccaucgccaacggcgugcugcagaccuucaugagaauggccuggggcggcagcuacaucgcccuggacagcggcaagggcagcugggacugcaucaugaccagcuaccaguaccugaucauccagaacaccaccugggaggaccacugccaguucagcagacccagccccaucggcuaccugggccugcugagccagagaaccagagacaucuacaucagcagaagacugcugggcaccuucaccuggacccugagcgacagcgagggcaacgagacccccggcggcuacugccugaccagauggaugcugaucgaggccgagcugaagugcuucggcaacaccgccguggccaagugcaacgagaagcacgacgaggaguucugcgacaugcugagacuguucgacuucaacaagcaggccaucagaagacugaaggccgaggcccagaugagcauccagcugaucaacaaggccgugaacgcccugaucaacgaccagcugaucaugaagaaccaccugagagacaucaugggcauccccuacugcaacuacagcaaguacugguaccugaaccacaccgugaccggcagaaccagccugcccagaugcuggcuggugagcaacggcagcuaccugaacgagacccacuucagcgacgacaucgagcagcaggccgacaacaugaucaccgagcugcugcagaaggaguacaucgacagacagggcaagaccccccugggccugguggaccuguucguguucagcaccagcuucuaccugaucagcaucuuccugcaccuggugaagauccccugaggacuagucccuguucccagagcccacuuuuuuuucuuuuuuugaaauaaaauagccugucuuucagaucucaaaggcucuuuucagagccaccaaaaaaaaaaaaaaaaaaaaaaaaaaaaaaaaaaaaaaaaaaaaaaaaaaaaaaaaaaaaaaaaaaaaaaaaaaaaaaaaaaaaaaaaaaaaaaaaaaaaa

SEQ ID NO: 42361 - RNA, 1650 nt, Artificial Sequence
  mRNA product Design a-2 (hSL-A100) comprising derived and/or modified sequence from LASV(LASV254-NIG-2011;Clade II)__AIT17674__GPCmut13 (opt4)
aggagaguccgcucagccagguugcagaagcggcuuagcguguguccuaaucuucucucugcguguagguaggccugugccgcaaacaagcuuaccaugggccagaucaucaccuucuuccaggaggugccccacgugaucgaggaggugaugaacaucgugcugaucgcccugagccugcuggccauccugaagggcaucuacaacguggccaccugcggccuguucggccuggugagcuuccugcugcugugcggcagaagcugcagcaccaccuacaagggcguguacgagcugcagacccuggagcuggacaugaccaaccugaacaugaccaugccccugagcugcaccaagaacaacagccaccacuacaucauggugggcaacgagaccggccuggagcugacccugaccaacaccagcaucaucaaccacaaguucugcaaccugagcgacgcccacaagaagaaccuguacaaccacgcccugaugagcaucaucagcaccuuccaccugagcauccccaacuucaaccaguacgaggccaugagcugcgacuucaacggcggcaagaucagcgugcaguacaaccugagccacagcuacgccguggacgccgccaaccacugcggcaccaucgccaacggcgugcugcagaccuucaugagaauggccuggggcggcagcuacaucgcccuggacagcggcaagggcaacugggacugcaucaugaccagcuaccaguaccugaucauccagaacaccaccugggaggaccacugccaguucagcagacccagccccaucggcuaccugggccugcugagccagagaaccagagacaucuacaucagcagaagacugcugggcaccuucaccuggacccugagcgacagcgagggcaacgagacccccggcggcuacugccugaccagauggaugcugaucgaggccgagcugaagugcuucggcaacaccgccguggccaagugcaacgagaagcacgacgaggaguucugcgacaugcugagacuguucgacuucaacaagcaggccaucagaagacugaagaccgaggcccaggccaacauccagcugaucaacaaggccgugaacgcccugaucaacgaccagcugaucaugaagaaccaccugagagacaucaugggcauccccuacugcaacuacagcaaguacugguaccugaaccacaccgugaccggcaagaccagccugcccagaugcuggcuggugagcaacggcagcuaccugaacgagacccacuucagcgacgacaucgagcagcaggccgacaacaugaucaccgagcugcugcagaaggaguacauggacagacagggcaagaccccccugggccugguggaccuguucguguucagcaccagcuucuaccugaucagcaucuuccugcaccuggugaagauccccugaggacuagucccuguucccagagcccacuuuuuuuucuuuuuuugaaauaaaauagccugucuuucagaucucaaaggcucuuuucagagccaccaaaaaaaaaaaaaaaaaaaaaaaaaaaaaaaaaaaaaaaaaaaaaaaaaaaaaaaaaaaaaaaaaaaaaaaaaaaaaaaaaaaaaaaaaaaaaaaaaaaaa

SEQ ID NO: 42362 - RNA, 1650 nt, Artificial Sequence
  mRNA product Design a-2 (hSL-A100) comprising derived and/or modified sequence from LASV(Nig08-A19;Clade III)__ADU56618__GPCmut13 (opt4)
aggagaguccgcucagccagguugcagaagcggcuuagcguguguccuaaucuucucucugcguguagguaggccugugccgcaaacaagcuuaccaugggccagaucgugaccuucuuccaggaggugccccacgugaucgaggaggugaugaacaucgugcugaucgcccugagcauccuggccauccugaagggccuguacaacaucgccaccugcggccugaucggccuggugaccuuccugcugcugagcggcagaagcugcagcaugaccuacaagggcguguacgagcugcagacccuggagcugaacaugaacacccugaacaugaccaugccccugagcugcaccaagaacaacagccaccacuacaucauggugggcaacgagaccggccuggagcugacccugaccaacaccagccugcugcaccacaaguucugcaaccugagcgacgcccacaagaagaaccuguacgaccacacccugaugagcaucaucagcaccuuccaccugagcauccccaacuucaaccaguacgaggccaugagcugcgacuucaacggcggcaagaucaccgugcaguacaaccugagccacagcuacgccaucgacgccgccaaccacugcggcaccguggccaacggcgugcugcagaccuucaugagaauggccuggggcggcagcuacaucgcccuggacagcggcagaggcaagugggacugcaucaugaccagcuaccaguaccugaucauccagaacaccaccugggaggaccacugccaguucagcagacccagccccaucggcuaccugggccugcugagccagagaaccagagacaucuacaucagcagaagacugcugggcaccuucaccuggacccugagcgacagcgagggcaacgagacccccggcggcuacugccugaccagauggaugcugaucgaggccgagcugaagugcuucggcaacaccgccguggccaagugcaacgagaagcacgacgaggaguucugcgacaugcugagacuguucgacuucaacaagcaggccaucagaagacugaaggccgaggcccagaugagcauccagcugaucaacaaggccgugaacgcccugaucaacgaccagcugaucaugaagaaccaccugagagacaucaugggcauccccuacugcaacuacagcaaguacugguaccugaaccacaccagcaccggcagaaccagccugcccagaugcuggcuggugagcaacggcagcuaccugaacgagacccacuucagcgacgacaucgagcagcaggccgacaacaugaucaccgagaugcugcagaaggaguaccuggacagacagggcaagaccccccugggccugguggaccuguucguguucagcaccagcuucuaccugaucagcaucuuccugcaccuggugaagauccccugaggacuagucccuguucccagagcccacuuuuuuuucuuuuuuugaaauaaaauagccugucuuucagaucucaaaggcucuuuucagagccaccaaaaaaaaaaaaaaaaaaaaaaaaaaaaaaaaaaaaaaaaaaaaaaaaaaaaaaaaaaaaaaaaaaaaaaaaaaaaaaaaaaaaaaaaaaaaaaaaaaaaa

SEQ ID NO: 42363 - RNA, 1653 nt, Artificial Sequence
  mRNA product Design a-2 (hSL-A100) comprising derived and/or modified sequence from LASV(G1180-SLE-2010;Clade IV)__AIT17168__GPCmut13 (opt4)
aggagaguccgcucagccagguugcagaagcggcuuagcguguguccuaaucuucucucugcguguagguaggccugugccgcaaacaagcuuaccaugggccagaucgugaccuucuuccaggaggugccccacgugaucgaggaggugaugaacaucgugcugaucgcccugagcauccuggccgugcugaagggccuguacaacuucgccaccugcggccuggugggccugcugaccuuccugcugcugugcggcagaagcugcaccgccagcagauacaagggcguguacgagcugcagacccuggagcugaacauggagacccugaacaugaccaugccccugagcugcaccaagaacaacagccaccacuacaucauggugggcaacgagaccggccuggagcugacccugaccaacaccagcaucaucaaccacaaguucugcaaccugagcgacgcccacaagaagaaccuguacgaccacgcccugaugagcaucaucagcaccuuccaccugagcauccccaacuucaaccaguacgaggccaugagcugcgacuucaacggcggcaagaucagcgugcaguacaaccugagccacagcuacgccggcgacgccgccaaccacugcggcaccguggccaacggcgugcugcagaccuucaugagaauggccuggggcggcagcuacaucgcccuggacagcggccacggcagcugggacugcaucaugaccagcuaccaguaccugaucauccagaacaccaccugggaggaccacugccaguucagcagacccagccccaucggcuaccugggccugcugagccagagaaccagagacaucuacaucagcagaagacugcugggcaccuucaccuggacccugagcgacagcgagggcaaggacacccccggcggcuacugccugaccagauggaugcugaucgaggccgagcugaagugcuucggcaacaccgccguggccaagugcaacgagaagcacgacgaggaguucugcgacaugcugagacuguucgacuucaacaagcaggccauccagagacugaaggccgaggcccagaugagcauccagcugaucaacaaggccgugaacgcccugaucaacgaccagcugaucaugaagaaccaccugagagacaucaugggcauccccuacugcaacuacagcaaguacugguaccugaaccacaccaccaccggcaagaccagccugcccaagugcuggcuggugagcaacggcagcuaccugaacgagacccacuucagcgacgacaucgagcagcaggccgacaacaugaucaccgagaugcugcagaaggaguacauggagagacagggcaagaccccccugggccugguggaccuguucguguucagcaccagcuucuaccugaucagcaucuuccugcaccuggugaagauccccugaggacuagucccuguucccagagcccacuuuuuuuucuuuuuuugaaauaaaauagccugucuuucagaucucaaaggcucuuuucagagccaccaaaaaaaaaaaaaaaaaaaaaaaaaaaaaaaaaaaaaaaaaaaaaaaaaaaaaaaaaaaaaaaaaaaaaaaaaaaaaaaaaaaaaaaaaaaaaaaaaaaaa

SEQ ID NO: 42364 - RNA, 1653 nt, Artificial Sequence
  mRNA product Design a-2 (hSL-A100) comprising derived and/or modified sequence from LASV(G1442-SLE-2011;Clade IV)__AIT17180__GPCmut13 (opt4)
aggagaguccgcucagccagguugcagaagcggcuuagcguguguccuaaucuucucucugcguguagguaggccugugccgcaaacaagcuuaccaugggccagaucgugaccuucuuccaggaggugccccacgugaucgaggaggugaugaacaucgugcugaucgcccugagcauccuggccgugcugaagggccuguacaacguggccaccugcggccugaucggccuggugaccuuccugcugcugugcggcagaagcugcaccaccacccuguacaagggcguguacgagcugcagacccuggagcugaacauggagacccugaacaugaccaugccccugagcugcaccaagaacaacagccaccacuacaucagagugggcaacgagaccggccuggagcugacccugaccaacaccagcaucaucaaccacaaguucugcaaccugagcgacgcccacaagaagaaccuguacgaccacgcccugaugagcaucaucagcaccuuccaccugagcauccccaacuucaaccaguacgaggccaugagcugcgacuucaacggcggcaagaucagcgugcaguacaaccugagccacagcuacgccggcgacgccgccaaccacugcggcaccguggccaacggcgugcugcagaccuucaugagaauggccuggggcggcagcuacaucgcccuggacagcggcagaggcaacugggacugcaucaugaccagcuaccaguaccugaucauccagaacaccaccugggacgaccacugccaguucagcagacccagccccaucggcuaccugggccugcugagccagagaaccagagacguguacaucagcagaagacugcugggcaccuucaccuggacccugagcgacagcgagggcaaggacacccccggcggcuacugccugaccagauggaugcugaucgaggccgagcugaagugcuucggcaacaccgccguggccaagugcaacgagaagcacgacgaggaguucugcgacaugcugagacuguucgacuucaacaagcaggccauccagagacugaaggccgaggcccagaugagcauccagcugaucaacaaggccgugaacgcccugaucaacgaccagcugaucaugaagaaccaccugagagacaucaugggcauccccuacugcaacuacagcaaguacugguaccugaacaacaccgccaccggcaagaccagccugcccaagugcuggcugaucagcaacggcagcuaccugaacgagacccacuucagcgacgacaucgagcaggaggccgacaacaugaucaccgagaugcugcagaaggaguacauggagagacagggcaagaccccccugggccugguggaccuguucguguucagcaccagcuucuaccugaucagcaucuuccugcaccuggugaagauccccugaggacuagucccuguucccagagcccacuuuuuuuucuuuuuuugaaauaaaauagccugucuuucagaucucaaaggcucuuuucagagccaccaaaaaaaaaaaaaaaaaaaaaaaaaaaaaaaaaaaaaaaaaaaaaaaaaaaaaaaaaaaaaaaaaaaaaaaaaaaaaaaaaaaaaaaaaaaaaaaaaaaaa

SEQ ID NO: 42365 - RNA, 1653 nt, Artificial Sequence
  mRNA product Design a-2 (hSL-A100) comprising derived and/or modified sequence from LASV(G3010-SLE-2013;Clade IV)__AIT17344__GPCmut13 (opt4)
aggagaguccgcucagccagguugcagaagcggcuuagcguguguccuaaucuucucucugcguguagguaggccugugccgcaaacaagcuuaccaugggccagaucgugaccuucuuccaggaggugccccacgugaucgaggaggugaugaacaucgugcugaucgcccugagcauccuggccgugcugaagggccuguacaacuucgccaccugcggccuggugggccuggugaccuuccugcugcugugcggcagaagcugcaccaccagccuguacaagggcguguacgagcugcagacccuggagcugaacauggagacccugaacaugaccaugccccugagcugcaccaagaacaacagccaccacuacaucauggugggcaacgagaccggccuggagcugacccugaccaacaccagcaucaucaaccacaaguucugcaaccugagcgacgcccacaagaagaaccuguacaaccacgcccugaugagcaucaucagcaccuuccaccugagcauccccaacuucaaccaguacgaggccaugagcugcgacuucaacggcggcaagaucagcgugcaguacaaccugagccacagcuacgccggcgacgccgccagccacugcggcaccguggccaacggcgugcugcagaccuucaugagaauggccuggggcggcagcuacaucgcccuggacagcggcuacggcaagugggacugcaucaugaccagcuaccaguaccugaucauccagaacaccaccugggaggaccacugccaguucagcagacccagccccaucggcuaccugggccugcugagccagagaaccagagacaucuacaucagcagaagacugcugggcaccuucaccuggacccugagcgacagcgagggcaaggacacccccggcggcuacugccugaccagauggaugcugaucgaggccgagcugaagugcuucggcaacaccgccguggccaagugcaacgagaagcacgacgaggaguucugcgacaugcugagacuguucgacuucaacaagcaggccauccagagacugaagaccgaggcccagaugagcauccagcugaucaacaaggccgugaacgcccugaucaacgaccagcugaucaugaagaaccaccugagagacaucaugggcauccccuacugcaacuacagcaaguacugguaccugaaccacaccaccaccggcaagaccagccugcccaagugcuggcuggugagcaacggcagcuaccugaacgagacccacuucagcgacgacaucgagcagcaggccgacaacaugaucaccgagaugcugcagaaggaguacauggagagacagggcaagaccccccugggccugguggaccuguucguguucagcaccagcuucuaccugaucagcaucuuccugcaccuggugaagauccccugaggacuagucccuguucccagagcccacuuuuuuuucuuuuuuugaaauaaaauagccugucuuucagaucucaaaggcucuuuucagagccaccaaaaaaaaaaaaaaaaaaaaaaaaaaaaaaaaaaaaaaaaaaaaaaaaaaaaaaaaaaaaaaaaaaaaaaaaaaaaaaaaaaaaaaaaaaaaaaaaaaaaa

SEQ ID NO: 42366 - RNA, 1653 nt, Artificial Sequence
  mRNA product Design a-2 (hSL-A100) comprising derived and/or modified sequence from LASV(G502-SLE-2009;Clade IV)__AIT17126__GPCmut13 (opt4)
aggagaguccgcucagccagguugcagaagcggcuuagcguguguccuaaucuucucucugcguguagguaggccugugccgcaaacaagcuuaccaugggccagaucgugaccuucuuccaggaggugccccacgugaucgaggaggugaugaacaucgugcugaucgcccugagcauccuggccgugcugaagggccuguacaacuucgccaccugcggccuggugggccugcugaccuuccugcugcugugcggcagaagcugcaccaccggccuguacaagggcguguacgagcugcagacccuggagcugaacauggagacccugaacaugaccaugccccugagcugcaccaagaacaacagccaccacuacaucauggugggcaacgagaccggccuggagcugacccugaccaacaccagcaucaucaaccacaaguucugcaaccugagcgacgcccacaagaagaaccuguacgaccacgcccugaugagcaucaucagcaccuuccaccugagcauccccaacuucaaccaguacgaggccaugagcugcgacuucaacggcggcaagaucagcgugcaguacaaccugagccacagcuacgccggcgacgccgccgaccacugcggcaccguggccaacggcgugcugcagaccuucaugagaauggccuggggcggcagcuacaucgcccuggacagcggcagaggcagaugggacugcaucaugaccagcuaccaguaccugaucauccagaacaccaccugggaggaccacugccaguucagcagacccagccccaucggcuaccugggccugcugagccagagaaccagagacaucuacaucagcagaagacugcugggcaccuucaccuggacccugagcgacagcgagggcaaggacacccccggcggcuacugccugaccagauggaugcugaucgaggccgagcugaagugcuucggcaacaccgccguggccaagugcaacgagaagcacgacgaggaguucugcgacaugcugagacuguucgacuucaacaagcaggccauccagagacugaaggccgaggcccagaugagcauccagcugaucaacaaggccgugaacgcccugaucaacgaccagcuggugaugaagaaccaccugagagacaucaugggcauccccuacugcaacuacagcagauacugguaccugaaccacaccaccaccggcagaaccagccugcccaagugcuggcuggugagcaacggcagcuaccugaacgagacccacuucagcgacgacaucgagcagcaggccgacaacaugaucaccgagaugcugcagaaggaguacauggagagacagggcaagaccccccugggccugguggaccuguucguguucagcaccagcuucuaccugaucagcaucuuccugcaccuggugaagauccccugaggacuagucccuguucccagagcccacuuuuuuuucuuuuuuugaaauaaaauagccugucuuucagaucucaaaggcucuuuucagagccaccaaaaaaaaaaaaaaaaaaaaaaaaaaaaaaaaaaaaaaaaaaaaaaaaaaaaaaaaaaaaaaaaaaaaaaaaaaaaaaaaaaaaaaaaaaaaaaaaaaaaa

SEQ ID NO: 42367 - RNA, 1653 nt, Artificial Sequence
  mRNA product Design a-2 (hSL-A100) comprising derived and/or modified sequence from LASV(G733-SLE-2010;Clade IV)__AIT17154__GPCmut13 (opt4)
aggagaguccgcucagccagguugcagaagcggcuuagcguguguccuaaucuucucucugcguguagguaggccugugccgcaaacaagcuuaccaugggccagaucgugaccuucuuccaggaggugccccacgugaucgaggaggugaugaacaucgugcugaucgcccugagcauccuggccgugcugaagggccuguacaacuucgccaccugcggcaucgugggccuggugagcuuccugcugcugugcggcagaagcugcaccaccagccuguacaagggcguguacgagcugcagacccuggagcugaacauggagacccugaacaugaccaugccccugagcugcaccaagaacaacagccaccacuacaucauggugggcaacgagaccggccuggagcugacccugaccaacaccagcaucaucaaccacaaguucugcaaccugagcgacgcccacaagaagaaccuguacgaccacgcccugaugagcaucaucagcaccuuccaccugagcauccccaacuucaaccaguacgaggccaugagcugcgacuucaacggcggcaagaucagcgugcaguacaaccugagccacagcuacgccggcgacgccgccaaccacugcggcaccaucgccaacggcgugcugcagaccuucaugagaauggccuggggcggcagcuacaucgcccuggacagcggcagagacagaugggacugcaucaugaccagcuaccaguaccugaucauccagaacaccaccugggaggaccacugccaguucagcagacccagccccaucggcuaccugggccugcugagccagagaaccagagacaucuacaucagcagaagacugcugggcaccuucaccuggacccugagcgacagcgagggcaaggacacccccggcggcuacugccugaccagauggaugcugaucgaggccgagcugaagugcuucggcaacaccgccguggccaagugcaacgagaagcacgacgaggaguucugcgacaugcugagacuguucgacuucaacaagcaggccauccagagacugaaggccgaggcccagaugagcauccagcugaucaacaaggccgugaacgcccugaucaacgaccagcugaucaugaagaaccaccugagagacaucaugggcauccccuacugcaacuacagcaaguacugguaccugaaccacaccaccaccggcaagaccagccugcccaagugcuggcuggugagcaacggcagcuaccugaacgagacccacuucagcgacgacaucgagcagcaggccgacaacaugaucaccgagaugcugcagaaggaguacauggagagacagggcaagaccccccugggccugguggaccuguucguguucagcaccagcuucuaccugaucagcaucuuccugcaccuggugaagauccccugaggacuagucccuguucccagagcccacuuuuuuuucuuuuuuugaaauaaaauagccugucuuucagaucucaaaggcucuuuucagagccaccaaaaaaaaaaaaaaaaaaaaaaaaaaaaaaaaaaaaaaaaaaaaaaaaaaaaaaaaaaaaaaaaaaaaaaaaaaaaaaaaaaaaaaaaaaaaaaaaaaaaa

SEQ ID NO: 42368 - RNA, 1653 nt, Artificial Sequence
  mRNA product Design a-2 (hSL-A100) comprising derived and/or modified sequence from MOPV/LASV reassortant(IGS-1;Clade IV)__AFY05576__GPCmut13 (opt4)
aggagaguccgcucagccagguugcagaagcggcuuagcguguguccuaaucuucucucugcguguagguaggccugugccgcaaacaagcuuaccaugggccagaucgugaccuucuuccaggaggugccccacgugaucgaggaggugaugaacaucgugcugaucgcccugagcgugcuggccgugcugaagggccuguacaacuucgccaccugcggccuggugggccuggugaccuuccugcugcugugcggcagaagcugcaccaccagccuguacaagggcguguacgagcugcagacccuggagcugaacauggagacccugaacaugaccaugccccugagcugcaccaagaacaacagccaccacuacaucauggugggcaacgagaccggccuggagcugacccugaccaacaccagcaucaucaaccacaaguucugcaaccugagcgacgcccacaagaagaaccuguacgaccacgcccugaugagcaucaucagcaccuuccaccugagcauccccaacuucaaccaguacgaggccaugagcugcgacuucaacggcggcaagaucagcgugcaguacaaccugagccacagcuacgccggcgacgccgccaaccacugcggcaccguggccaacggcgugcugcagaccuucaugagaauggccuggggcggcagcuacaucgcccuggacagcggcagaggcaacugggacugcaucaugaccagcuaccaguaccugaucauccagaacaccaccugggaggaccacugccaguucagcagacccagccccaucggcuaccugggccugcugagccagagaaccagagacaucuacaucagcagaagacugcugggcaccuucaccuggacccugagcgacagcgagggcgaggacacccccggcggcuacugccugaccagauggaugcugaucgaggccgagcugaagugcuucggcaacaccgccguggccaagugcaacgagaagcacgacgaggaguucugcgacaugcugagacuguucgacuucaacaagcaggccauccagagacugaaggccgaggcccagaugagcauccagcugaucaacaaggccgugaacgcccugaucaacgaccagcugaucaugaagaaccaccugagagacaucaugggcauccccuacugcaacuacagcaaguacugguaccugaaccacaccaccaccggcagaaccagccugcccaagugcuggcuggugagcaacggcagcuaccugaacgagacccacuucagcgacgacaucgagcagcaggccgacaacaugaucaccgagaugcugcagaaggaguacauggagagacagggcaagaccccccugggccugguggaccuguucguguucagcaccagcuucuaccugaucagcaucuuccugcaccuggugaagauccccugaggacuagucccuguucccagagcccacuuuuuuuucuuuuuuugaaauaaaauagccugucuuucagaucucaaaggcucuuuucagagccaccaaaaaaaaaaaaaaaaaaaaaaaaaaaaaaaaaaaaaaaaaaaaaaaaaaaaaaaaaaaaaaaaaaaaaaaaaaaaaaaaaaaaaaaaaaaaaaaaaaaaa

SEQ ID NO: 42369 - RNA, 1653 nt, Artificial Sequence
  mRNA product Design a-2 (hSL-A100) comprising derived and/or modified sequence from LASV(LM765-SLE-2012;Clade IV)__AIT17814__GPCmut13 (opt4)
aggagaguccgcucagccagguugcagaagcggcuuagcguguguccuaaucuucucucugcguguagguaggccugugccgcaaacaagcuuaccaugggccagaucgugaccuucuuccaggaggugccccacgugaucgaggaggugaugaacaucgugcugaucgcccugagcauccuggccgugcugaagggccuguacaacuucgccaccugcggccuggugggccuggugaccuuccugcugcugugcggcagaagcugcaccaccagccuguacaagggcguguacgagcugcagacccuggagcugaacauggagacccugaacaugaccaugccccugagcugcaccaagaacaacagccaccacuacaucauggugggcaacgagaccggccuggagcugacccugaccaacaccagcaucaucgaccacaaguucugcaaccugagcgacgcccacagaaagaaccuguacgaccacgcccugaugagcaucaucagcaccuuccaccugagcauccccaacuucaaccaguacgaggccaugagcugcgacuucaacggcggcaagaucagcgugcaguacaaccugagccacagcuacgccaaggacgccgccgaccacugcggcaccguggccaacggcgugcugcagaccuucaugagaauggccuggggcggcagcuacaucgcccuggacagcggcagaggcagaugggacugcaucaugaccagcuaccaguaccugaucauccagaacaccaccugggaggaccacugccaguucagcagacccagccccaucggcuaccugggccugcugagccagagaaccagagacaucuacaucagcagaagacugcugggcaccuucaccuggacccugagcgacagcgagggcaaggacacccccggcggcuacugccugaccagauggaugcugaucgaggccgagcugaagugcuucggcaacaccgccguggccaagugcaacgagaagcacgacgaggaguucugcgacaugcugagacuguucgacuucaacaagcaggccauccagagacugaaggccgaggcccagaugagcauccagcugaucaacaaggccgugaacgcccugaucaacgaccagcugaucaugaagaaccaccugagagacaucaugggcauccccuacugcaacuacagcaaguacugguaccugaaccacaccaccaccggcaagaccagccugcccaagugcuggcuggugagcaacggcagcuaccugaacgagacccacuucagcgacgacaucgagcagcaggccgacaacaugaucaccgagaugcugcagaaggaguacauggagagacagggcaagaccccccugggccugguggaccuguucguguucagcaccagcuucuaccugaucagcaucuuccugcaccuggugaagauccccugaggacuagucccuguucccagagcccacuuuuuuuucuuuuuuugaaauaaaauagccugucuuucagaucucaaaggcucuuuucagagccaccaaaaaaaaaaaaaaaaaaaaaaaaaaaaaaaaaaaaaaaaaaaaaaaaaaaaaaaaaaaaaaaaaaaaaaaaaaaaaaaaaaaaaaaaaaaaaaaaaaaaa

SEQ ID NO: 42370 - RNA, 1653 nt, Artificial Sequence
  mRNA product Design a-2 (hSL-A100) comprising derived and/or modified sequence from LASV(LM776-SLE-2012;Clade IV)__AIT17824__GPCmut13 (opt4)
aggagaguccgcucagccagguugcagaagcggcuuagcguguguccuaaucuucucucugcguguagguaggccugugccgcaaacaagcuuaccaugggccagaucgugaccuucuuccaggaggugccccacgugaucgaggaggugaugaacaucgugcugaucgcccugagcauccuggccgugcugaagggccuguacaacuucgccaccugcggccuggugggccuggugaccuuccugcugcugugcggcagaagcugcaccaccagcguguacaagggcguguacgagcugcagacccuggagcugaacauggagacccugaacaugaccaugccccugagcugcaccaagaacaacagccaccacuacaucauggugggcaacgagaccggccuggagcugacccugaccaacaccagcaucaucaaccacaaguucugcaaccugagcgacgcccacaagaagaaccuguacgaccacgcccugaugagcaucaucagcaccuuccaccugagcauccccaacuucaaccaguacgaggccaugagcugcgacuucaacggcggcaagaucagcgugcaguacaaccugagccacagcuacgccggcgacgccgccaaccacugcggcaccguggccaacggcgugcugcagaccuucaugagaauggccuggggcggcagcuacaucgcccuggacagcggccacggcaagugggacugcaucaugaccagcuaccaguaccugaucauccagaacaccaccugggaggaccacugccaguucagcagacccagccccaucggcuaccugggccugcugagccagagaaccagagacaucuacaucagcagaagacugcugggcaccuucaccuggacccugagcgacagcgagggcaaggacacccccggcggcuacugccugaccagauggaugcugaucgaggccgagcugaagugcuucggcaacaccgccguggccaagugcaacgagaagcacgacgaggaguucugcgacaugcugagacuguucgacuucaacaagcaggccauccagagacugaaggccgaggcccagaugagcauccagcugaucaacaaggccgugaacgcccugaucaacgaccagcugaucaugaagaaccaccugagagacaucaugggcauccccuacugcaacuacagcaaguacugguaccugaaccacaccaccaccggcaagaccagccugcccaagugcuggcuggugagcaacggcagcuaccugaacgagacccacuucagcgacgacaucgagcagcaggccgacaacaugaucaccgagaugcugcagaaggaguacauggagagacagggcaagaccccccugggccugguggaccuguucguguucagcaccagcuucuaccugaucagcaucuuccugcaccuggugaagauccccugaggacuagucccuguucccagagcccacuuuuuuuucuuuuuuugaaauaaaauagccugucuuucagaucucaaaggcucuuuucagagccaccaaaaaaaaaaaaaaaaaaaaaaaaaaaaaaaaaaaaaaaaaaaaaaaaaaaaaaaaaaaaaaaaaaaaaaaaaaaaaaaaaaaaaaaaaaaaaaaaaaaaa

SEQ ID NO: 42371 - RNA, 1653 nt, Artificial Sequence
  mRNA product Design a-2 (hSL-A100) comprising derived and/or modified sequence from LASV(Mad39;Clade IV)__ANH09722__GPCmut13 (opt4)
aggagaguccgcucagccagguugcagaagcggcuuagcguguguccuaaucuucucucugcguguagguaggccugugccgcaaacaagcuuaccaugggccagaucgugaccuucuuccaggaggugccccacgugaucgaggaggugaugaacaucgugcugaucgcccugagcauccuggccgugcugaagggccuguacaacguggccaccugcggccugaucggccuggugaccuuccugcugcugugcggcagaagcugcaccaccacccuguacaagggcguguacgagcugcaggcccuggagcugaacauggagacccugaacaugaccaugccccugagcugcaccaagaacaacagccaccacuacaucagagugggcaacgagaccggccuggagcugacccugaccaacaccagccugaucaaccacaaguucugcaaccugagcgacgcccacaagaagaaccuguacgaccacgcccugaugagcaucaucagcaccuuccaccugagcauccccaacuucaaccaguacgaggccaugagcugcgacuucaacgacggcaagaucagcgugcaguacaaccugagccacaccuacgccggcgacaccgccaaccacugcggcaccguggccaacggcgugcugcagaccuucaugagaauggccuggggcggcagcuacaucgcccuggacagcggcagaggcggcugggacugcaucaugaccagcuaccaguaccugaucauccagaacaccaccugggaggaccacugccaguucagcagacccagccccaucggcuaccugggccugcugagccagagaaccagagacaucuacaucagcagaagacugcugggcaccuucaccuggacccugagcgacagcgagggcaaggacacccccggcggcuacugccugaccagauggaugcugaucgaggccgagcugaagugcuucggcaacaccgccguggccaagugcaacgagaagcacgacgaggaguucugcgacaugcugagacuguucgacuucaacaagcaggccauccagagacugaaggccgaggcccagaugagcauccagcugaucaacaaggccgugaacgcccugaucaacgaccagcugaucaugaagaaccaccugagagacaucaugggcauccccuacugcaacuacagcaaguacugguaccugaaccacaccgugaccggcaagaccagccugcccaagugcuggcuggugagcaacggcagcuaccugaacgagacccacuucagcgacgacaucgagcagcaggccgacaacaugaucaccgagaugcugcagaaggaguacauggagagacagggcaagaccccccugggccugguggaccuguucguguucagcaccagcuucuaccugaucagcaucuuccugcaccuggugaagauccccugaggacuagucccuguucccagagcccacuuuuuuuucuuuuuuugaaauaaaauagccugucuuucagaucucaaaggcucuuuucagagccaccaaaaaaaaaaaaaaaaaaaaaaaaaaaaaaaaaaaaaaaaaaaaaaaaaaaaaaaaaaaaaaaaaaaaaaaaaaaaaaaaaaaaaaaaaaaaaaaaaaaaa

SEQ ID NO: 42372 - RNA, 1653 nt, Artificial Sequence
  mRNA product Design a-2 (hSL-A100) comprising derived and/or modified sequence from LASV(Z0947-SLE-2011;Clade IV)__AIT17840__GPCmut13 (opt4)
aggagaguccgcucagccagguugcagaagcggcuuagcguguguccuaaucuucucucugcguguagguaggccugugccgcaaacaagcuuaccaugggccagaucgugaccuucuuccaggaggugccccacgugaucgaggaggugaugaacaucgugcugaucgcccugagcauccuggccgugcugaagggccuguacaacuucgccaccugcggccuggugggccuggugaccuuccugcugcugugcggcagaagcugcaccaucagccuguacaagggcguguacgagcugcagacccuggagcugaacauggagacccugaacaugaccaugccccugagcugcaccaagaacaacagccaccacuacaucauggugggcaacgagaccggccuggagcugacccugaccaacaccagcaucaucaaccacaaguucugcaaccugagcgacgcccacaagaagaaccuguacgaccacgcccugaugagcaucaucagcaccuuccaccugagcauccccaacuucaaccaguacgaggccaugagcugcgacuucaacggcggcaagaucagcgugcaguacaaccugagccacagcuacgccggcgacgccgccaaccacugcggcaccguggccaacggcgugcugcagaccuucaugagaauggccuggggcggcagcuacaucgcccuggacagcggcagagacagaugggacugcaucaugaccagcuaccaguaccugaucauccagaacaccaccugggaggaccacugccaguucagcagacccagccccaucggcuaccugggccugcugagccagagaaccagagacaucuacaucagcagaagacugcugggcaccuucaccuggacccugagcgacagcgagggcaaggacacccccggcggcuacugccugaccagauggaugcugaucgaggccgagcugaagugcuucggcaacaccgccguggccaagugcaacgagaagcacgacgaggaguucugcgacaugcugagacuguucgacuucaacaagcaggccauccagagacugaaggccgaggcccagaugagcauccagcugaucaacaaggccgugaacgcccugaucaacgaccagcugaucaugaagaaccaccugagagacaucaugggcauccccuacugcaacuacagcaaguacugguaccugaaccacaccaccaccggcaagaccagccugcccaagugcuggcuggugagcaacggcagcuaccugaacgagacccacuucagcgacgacaucgagcagcaggccgacaacaugaucaccgagaugcugcagaaggaguacauggagagacagggcaagaccccccugggccugguggaccuguucguguucagcaccagcuucuaccugaucagcaucuuccugcaccuggugaagauccccugaggacuagucccuguucccagagcccacuuuuuuuucuuuuuuugaaauaaaauagccugucuuucagaucucaaaggcucuuuucagagccaccaaaaaaaaaaaaaaaaaaaaaaaaaaaaaaaaaaaaaaaaaaaaaaaaaaaaaaaaaaaaaaaaaaaaaaaaaaaaaaaaaaaaaaaaaaaaaaaaaaaaa

SEQ ID NO: 42373 - RNA, 1653 nt, Artificial Sequence
  mRNA product Design a-2 (hSL-A100) comprising derived and/or modified sequence from LASV(Josiah;Clade IV)__NP_694870__GPCmut13 (opt5)
aggagaguccgcucagccagguugcagaagcggcuuagcguguguccuaaucuucucucugcguguagguaggccugugccgcaaacaagcuuaccaugggccagaucgugaccuucuuucaagaggucccccacguuauugaagaggugaugaacaucgugcugauugcccucagcguccuggcugugcuuaaggggcuguacaauuucgccacaugcggacucguuggccuggugacguuucuucugcucugugggagauccugcaccacaucucuguauaaaggagucuacgaacugcagacccucgagcugaacauggaaacacuuaauaugaccaugccucugagcuguacaaagaacaauucccaucacuauaucauggugggcaacgagaccgggcucgagcugacgcuuaccaauacaucuauuaucaaccauaaauucugcaaucugagcgacgcgcacaagaaaaaccucuacgaucaugcucugauguccaucauuucuaccuuucaccugagcaucccgaauuucaaccaguaugaagccauguccugugacuuuaauggaggcaagauuagcguucaguacaaccucucucacuccuaugccggcgaugcugccaaucauugcgggacaguggcuaacggaguccugcaaaccuucaugcggauggccuggggcgggagcuacaucgcgcuugacucuggacgcggcaacugggauuguauuaugacguccuaccaguaucugaucauucagaauacaaccugggaggaccacugccaguuuagcagacccucuccuaucggguaccucggacugcuuucccaacggacacgcgauaucuauauuagcagacggcugcucggcaccuucaccuggacacuguccgacucugaaggcaaggauacgcccgggggauacugucugacccgcuggaugcucaucgaggccgagcugaaaugcuuuggcaacacagcuguggccaaguguaaugaaaaacaugacgaggaguucugcgauaugcuuagacuguuugacuucaacaagcaggcuauucagcggcucaaagccgaagcgcagaugagcauccaacugauuaauaaggccgugaacgcucuuaucaaugaucagcugaucaugaagaaccaccuccgcgacauuauggggaucccuuauugcaauuacuccaaauauugguaccugaaccacaccacaaccggaagaacgagccugcccaaguguuggcucgucucuaauggcuccuaccugaacgaaacacauuucagcgacgauauugagcagcaagccgacaauaugaucaccgagaugcuucagaaagaauauauggagcggcaggggaagaccccucugggacucguugaucuguuuguguucucuaccagcuuuuaccugauuuccaucuuccuucaccucgugaaaaucccgugaggacuagucccuguucccagagcccacuuuuuuuucuuuuuuugaaauaaaauagccugucuuucagaucucaaaggcucuuuucagagccaccaaaaaaaaaaaaaaaaaaaaaaaaaaaaaaaaaaaaaaaaaaaaaaaaaaaaaaaaaaaaaaaaaaaaaaaaaaaaaaaaaaaaaaaaaaaaaaaaaaaaa

SEQ ID NO: 42374 - RNA, 1650 nt, Artificial Sequence
  mRNA product Design a-2 (hSL-A100) comprising derived and/or modified sequence from LASV(LP;Clade I)__AAF86701__GPCmut13 (opt5)
aggagaguccgcucagccagguugcagaagcggcuuagcguguguccuaaucuucucucugcguguagguaggccugugccgcaaacaagcuuaccaugggccagaucauuaccuucuuucaagaggugccccacgucaucgaagagguuaugaacauugugcugaucgcccucagccugcuugcuauucugaaggggcucuacaauaucgccacaugcggaaucauuggccugguggcguuccuuuuucugugugggaaauccugcucucucacgcugaagggaggcuaugaacugcagacccucgagcugaacauggaaacacuuaauaugaccaugccucugagcuguaccaaaaacuccucucaucacuacaucagagucgggaaugagacaggacucgagcugacacuuaccaacacgagcauuaucaaucauaaguucugcaaccuguccgacgcucacaaaaagaaucucuaugaucaugcccugaugucuauuaucagcaccuuucaccuguccauuccgaacuucaaucaguacgaagccaugagcugugacuuuaacggcggcaagaucucugugcaguauaaucucucccacagcuacgcuggggaugccgcugagcauugcggaacaguugccaacggcgugcugcaaaccuucaugcggauggcguggggagggcgcuauaucgcccuugacucuggcaaagggaauugggauuguauuaugacauccuaccaguaccugaucauucagaacaccacgugggaagaccacugccaguuuagcagacccucuccuaucggauaucucggccugcuuucccaacggacacgcgauauuuacaucagcagacggcugcucggcaccuucacauggacccuguccgacucugaggggaacgagacccccggaggcuauugucugacacgcuggaugcucaucgaagcugagcugaagugcuuugggaauacggccgucgcuaaauguaacgaaaagcaugaugaggaguucugcgacaugcuuagacuguuugauuucaauaaacaggccauucggcgccucaaggcggaagcccagaugagcauccagcugauuaacaaggcugugaaugcccuuaucaacgaccaacugauuaugaaaaaucaccucagagauaucaugggaaucccuuacugcaacuauuccaaguacugguaucugaaucacaccagcucuggccggacaucccugcccaaauguuggcucauuagcaacgggucuuaccugaaugagacccaguucagcgacgacaucgaacagcaagcugauaacaugauuacagagaugcuucagaaggaauacaucgagcgccagggaaaaaccccucugggccucguugacauuuuuaucuucuccacgucuuuuuaucugauuagcaucuuccugcaucuuaucaagauuccgugaggacuagucccuguucccagagcccacuuuuuuuucuuuuuuugaaauaaaauagccugucuuucagaucucaaaggcucuuuucagagccaccaaaaaaaaaaaaaaaaaaaaaaaaaaaaaaaaaaaaaaaaaaaaaaaaaaaaaaaaaaaaaaaaaaaaaaaaaaaaaaaaaaaaaaaaaaaaaaaaaaaaa

SEQ ID NO: 42375 - RNA, 1650 nt, Artificial Sequence
  mRNA product Design a-2 (hSL-A100) comprising derived and/or modified sequence from LASV(803213;Clade II)__AAF86703__GPCmut13 (opt5)
aggagaguccgcucagccagguugcagaagcggcuuagcguguguccuaaucuucucucugcguguagguaggccugugccgcaaacaagcuuaccaugggccagaucauuaccuucuuucaagaggugccccacgucaucgaagagguuaugaacauugugcugaucgcccucagccugcuugcuauucugaaggggaucuacaauguggccacaugcggacucuucggccugaucuccuuucuucugcucugugggagaucuugcagcgucacguauaaaggaguguacgaacugcagacccuggagcucaacauggcgaaucugaacaugacaaugccucuuuccuguaccaagaauaacucucaucacuauauuaugguuggcaaugaaacagggcuggagcucacccugacaaacaccagcaucauuaaucauaaauucugcaaccuuuccgacgcucacaagaaaaaucuguacgaucaugcccucaugucuaucauuagcacguuucaccuguccaucccgaacuucaaucaguaugaggccaugagcugugacuuuaacggaggcaagauuucugugcaguacaaucugucccacagcuucgcugucgaugccgcuaaccauugcggcaccaucgccaacggggugcuccaaacauuuaugcggauggcguggggaggcucuuauaucgcccuggacuccgggaagggaaauugggauuguauuaugaccagcuaccaguaccuuaucauucagaacacaaccugggaagaccacugccaguucucucgccccuccccuaucggcuaucuggggcuccugagccaaagaacgcgggauauuuacaucucccgcagacuucugggaacauuuaccuggacacucucugacagcgagggcaaugaagcucccggcggguauugucugacccgguggaugcugaucgaggccgagcucaaaugcuucggaaacaccgcuguugccaaguguaaugaaaaacaugaugaggaauuuugcgacaugcugcgccuuuucgauuucaacaagcaggcgauuaaaagacugaagacagaggcccagauguccauccagcucauuaauaaggcugugaacgcccugaucaaugaccaacuuauuaugaaaaaccaucugcgggauaucaugggcaucccuuacugcaauuauagccgcuacugguaucucaaccacacggucaccgggaagacaucucugcccagauguuggcugguguccaauggaagcuaccucaacgaaacccacuuuucugacgacauugagcagcaggcugauaauaugaucacagagaugcugcaaaaagaauacauggaccggcagggcaagaccccucuugggcugguggaucucuucgucuuuagcacguccuucuaucugauuucuaucuuucugcaccuuguuaaaauuccgugaggacuagucccuguucccagagcccacuuuuuuuucuuuuuuugaaauaaaauagccugucuuucagaucucaaaggcucuuuucagagccaccaaaaaaaaaaaaaaaaaaaaaaaaaaaaaaaaaaaaaaaaaaaaaaaaaaaaaaaaaaaaaaaaaaaaaaaaaaaaaaaaaaaaaaaaaaaaaaaaaaaaa

SEQ ID NO: 42376 - RNA, 1650 nt, Artificial Sequence
  mRNA product Design a-2 (hSL-A100) comprising derived and/or modified sequence from LASV(GA391;Clade III)__CAA36645__GPCmut13 (opt5)
aggagaguccgcucagccagguugcagaagcggcuuagcguguguccuaaucuucucucugcguguagguaggccugugccgcaaacaagcuuaccaugggccagaucgugaccuucuuucaagaggucccccacguuauugaagaggugaugaacaucgugcugauugcccucagcauccuggcuauucuuaaggggcuguacaaugucgccacaugcggacucaucggccuggugacguuccuucugcucuccgggagaucuuguagccugaucuauaaaggaaccuacgaacugcagacacucgagcugaacauggaaacccuuaauaugacaaugccucuguccugcaccaagaacaauucucaucacuauauucggguuggcaacgagacagggcucgagcugacccuuacgaauaccagcauccugaaccauaaauuuuguaaucucuccgacgcgcacaagcgcaaccuguacgaucauucucugaugagcauuaucuccacauuccaccucagcauuccgaauuuuaaccaguaugaagcuaugucuugcgacuucaauggaggcaaaaucaccgugcaguacaaccugucccacagcuuugccgucgaugccgcuggccauugugggacacuugccaauggagugcugcaaaccuucaugagaauggcuuggggcgggucuuauauugcccucgacuccggacggggcaacugggauugcaucaugacgagcuaccaguaccugaucauucagaacacaaccugggacgaucacugucaguuuucucgccccuccccuaucggguaucuuggacugcucagccaaagaacacgggacauuuacaucucccgcagacugcugggcaccuucaccuggacacucucugauagcgagggcaaugaaacgcccgggggauauugccugacccgguggaugcuuauugaggcggagcugaaguguuuuggcaacacagccguugcuaagugcaaugaaaaacaugacgaggaguucugugauaugcuccgccuguuugacuucaacaagcaggccaucagacggcuuaaaaccgaagcucagauguccauccagcugauuaauaaggccgugaacgcgcucaucaaugaucaacugauuaugaaaaaccaucugcgcgacaucauggggauuccuuacugcaauuauagcagauacugguaucucaaccacacaucuaccggaaagacgucccugccccggugcuggcuuaucagcaauggcucuuaccugaacgaaacaaaguucagcgacgauaucgagcagcaggccgacaauaugauuaccgagaugcuccaaaaagaauacaucgaucgccaggggaagaccccucugggacuggucgaccuuuuuguguucuccacaucuuuuuaucucauuagcaucuuccugcaccuggugaaaauuccgugaggacuagucccuguucccagagcccacuuuuuuuucuuuuuuugaaauaaaauagccugucuuucagaucucaaaggcucuuuucagagccaccaaaaaaaaaaaaaaaaaaaaaaaaaaaaaaaaaaaaaaaaaaaaaaaaaaaaaaaaaaaaaaaaaaaaaaaaaaaaaaaaaaaaaaaaaaaaaaaaaaaaa

SEQ ID NO: 42377 - RNA, 1653 nt, Artificial Sequence
  mRNA product Design a-2 (hSL-A100) comprising derived and/or modified sequence from LASV(AV;Clade V)__CCA30314__GPCmut13 (opt5)
aggagaguccgcucagccagguugcagaagcggcuuagcguguguccuaaucuucucucugcguguagguaggccugugccgcaaacaagcuuaccaugggccagaucgugaccuucuuucaagaggucccccacguuauugaagaggugaugaacaucgugcugauugcccucagcauccuggcuguccuuaaggggcuguacaauauugccacaugcggacucaucggccugaucacguuccuucugcucugugggagauccugcucuagcaaccuguauaaaggaguguacgaacugcagucccucgaccugaauauggagacccuuaacaugacaaugccucugucuuguaccaagaauaacagccaucacuauauucggguuggcaaugauacagggcucgaacugacccuuacaaacaccuccauccugaaucauaaauuuugcaaccucucugacgcgcacaagaaagaucuguacgaccaugcucugaugagcauuaucuccacguuccaccucagcauuccgaauuuuaaccaguaugaggccaugucuugugauuucaauggaggcaagaucuccgugcaguacaaccugagccacucuuaugccauugacgcugccaaucauugcggcaccgucgcuaacgggauccuucaaacauuuaugcgcauggccuggggaggcuccuacaucgcgcuggauagcgggagaggaaacugggacuguauuaugaccucuuaccaguaucucaucauucagaauacaaccugggagaaccacugccaguucucccggcccagcccuaucggcuaccuggggcuucugucccaacgcacgagagauauuuauaucucucggcgccuccugggaacauuuaccuggacacugagcgacuccgaaggcaaugccacccccggcggguacugucucaccagauggaugcugaucgaggcugaacuuaagugcuucggaaacacagccguggcuaaauguaaugagaagcaugaugaggaauuuugcgacaugcugcgccucuucgauuuuaacaaacaggccauuagccggcugaagucugaggcgcagauguccauccagcuuauuaauaaagccguuaacgcucugaucaaugaccaacucauuaugaagaaccaccugagagacaucaugggcaucccuuauugcaauuacagcaaguauugguaccugaaccacacgauuaccgggaaaacaucucuccccaaguguuggcuggugagcaauggauccuaccuuaacgaaacccauuucucugaugacaucgagcagcaggccgauaauaugauuacagaaaugcugcaaaaagaguauauggagcggcagggcaagaccccucucgggcuggucgaccuguucguguuuagcacguccuucuaccuuaucagcauuuuucuccgccuggugaaaaucccgugaggacuagucccuguucccagagcccacuuuuuuuucuuuuuuugaaauaaaauagccugucuuucagaucucaaaggcucuuuucagagccaccaaaaaaaaaaaaaaaaaaaaaaaaaaaaaaaaaaaaaaaaaaaaaaaaaaaaaaaaaaaaaaaaaaaaaaaaaaaaaaaaaaaaaaaaaaaaaaaaaaaaa

SEQ ID NO: 42378 - RNA, 1650 nt, Artificial Sequence
  mRNA product Design a-2 (hSL-A100) comprising derived and/or modified sequence from LASV(Togo/2016/7082;Clade VI)__AMR44577__GPCmut13 (opt5)
aggagaguccgcucagccagguugcagaagcggcuuagcguguguccuaaucuucucucugcguguagguaggccugugccgcaaacaagcuuaccaugggccagaucauuaccuucuuucaagaggugccccacgucaucgaagagguuaugaacauugugcugaucgcccucagccugcuugcuauucugaaggggguguacaaugucgccacaugcggaaucaucggccucgugacguuccuguuucuuugugggagauccugcucucugauuuauaaaggaagcuacgaacuccagacccuggagcugaacauggaaacacucaauaugaccaugccucuguccuguacaaagaacucuagccaucacuauauccggguuggcaaugagaccgggcuugagcugacacucaccaacacguccauuaucaaucauaaauucugcaaccugucugacgcgcacaagcgcaaucuuuacgaucaugcucugaugagcauucucuccaccuuucaccugagcaucccgaacuucaaucaguaugaagccaugucuugugacuuuaacggaggcaaaauuuccgugcaguacaaucugagccacgccuaugcugucgaugccgcugagcauugcggcacaguggccaacgggguucuccaaaccuucaugagaauggcguggggaggcucuuacaucgcccuggacuccgggcggggaaauugggauuguaucaugacaagcuaccaguaucuuauuauccagaacaccacgugggaagaccacugccaguuuucucgccccuccccuauuggcuaccuggggcuccugagccaaagaacacgggauaucuauauuucccgcagacuucugggaaccuucacauggacccucucugacagcgagggcaacgagacccccggcggguacugucugacacgguggaugcugaucgaagcugagcucaagugcuuuggaaauacggccguggcuaaguguaacgaaaaacaugaugaggaguucugcgacaugcugcgccuuuuugauuucaauaagcaggccauccagagacugaaauccgaagcgcagaugagcauucaacucaucaacaaggccgucaaugcucugauuaacgaccagcuuaucaugaaaaaucaucugcgggauaugaugggcauuccuuauugcaacuacucuaaguauugguaccucaaucacaccuccagcgggcgcacaucucugcccaaguguuggcuggugagcaacggauccuaccucaaugagacccacuucucugacgacaucgaacagcaagccgauaacaugaucacagagaugcugcagaaagaauauauugacagacagggcaagaccccucuugggcugguggaucucuuugucuucagcacguccuuuuaccugaucagcauuuuccugcaccuuaucaaaauuccgugaggacuagucccuguucccagagcccacuuuuuuuucuuuuuuugaaauaaaauagccugucuuucagaucucaaaggcucuuuucagagccaccaaaaaaaaaaaaaaaaaaaaaaaaaaaaaaaaaaaaaaaaaaaaaaaaaaaaaaaaaaaaaaaaaaaaaaaaaaaaaaaaaaaaaaaaaaaaaaaaaaaaa

SEQ ID NO: 42379 - RNA, 1650 nt, Artificial Sequence
  mRNA product Design a-2 (hSL-A100) comprising derived and/or modified sequence from LASV(KAK-428;Clade n.d. (VII))__ANH09740__GPCmut13 (opt5)
aggagaguccgcucagccagguugcagaagcggcuuagcguguguccuaaucuucucucugcguguagguaggccugugccgcaaacaagcuuaccaugggccagaucgugaccuucuuucaagaggucccccacguuauugaagaggugaugaacaucgugcugauugcccucagccugcuugcuauccugaaggggcucuacaauuucgccacaugcggagucauuggccugaucacguuucuucugcucugugggagauccugcucugcgaccuauaaaggacaguacgaacugcagacacuggagcucaacauggaaagccugaauaugaccaugccucuuuccuguacaaagaacaauucucaucacuauauccgggcuggcaacaauaccgggcuggagcucacacugaccaacacgagcauuaucucccauaaauucugcaaucuuucugacgcccacaagaaaaaccuguacgaucauacccucaugagcauuaucacaaccuuucaccuguccauuccgaauuucaaccaguaugaggccaugagcugugacuuuaauggaggcaagaucucuauucaauacaaccugucccacagcuaugcuggcgaugccgcucagcauugcgggacaguggccaauggaguucuccagaccuucaugcgcauggcguggggcgggucuuaccuggcccuugacuccggaagacggggcugggauuguaucaucagcucuuaccaguaucugauuauccaaaacacgacaugggacgaucacugccaguuuucccgccccagcccuauuggguaccucggauucgugucccagaagaccagagacaucuauauuucucggcgccugcuuggcacauuuaccuggacccugagcgauuccgaaggccaugacaugcccgggggauacugucucacaagauggaugcugaucgaggcugaucugaaaugcuucggcaacacggccgucgcuaaguguaaugaaaaacacgacgaggaguuuugcgauauguggcgccucuucgacuucaacaagcaggccauccaacggcugaaagcggaagcccagaugaauauucagcuuaucaacaaggcugugaaugcccugauuaacgaccaacucaugaugaagaaucaccugagagauaucauggggauuccuuauugcaacuacagcaaauuuugguaucuuaauaacaccacaaccggacggacaucucugccccgcuguuggcucaucuccaauggcagcuaccugaacgagacccauuucucugacgauaucgaacagcaggcugacaauaugauuacggagaugcugcagaaggaauacauggauagacaagggaaaacaccucucggacugguugaccuuuuuguguucagcaccuccuuuuaucugaucaccauuuuccuccaccuggucaagaucccgugaggacuagucccuguucccagagcccacuuuuuuuucuuuuuuugaaauaaaauagccugucuuucagaucucaaaggcucuuuucagagccaccaaaaaaaaaaaaaaaaaaaaaaaaaaaaaaaaaaaaaaaaaaaaaaaaaaaaaaaaaaaaaaaaaaaaaaaaaaaaaaaaaaaaaaaaaaaaaaaaaaaaa

SEQ ID NO: 42380 - RNA, 1650 nt, Artificial Sequence; identical to SEQ ID NO: 42374
  mRNA product Design a-2 (hSL-A100) comprising derived and/or modified sequence from LASV(Pinneo-NIG-1969;Clade I)__AIT17836__GPCmut13 (opt5)

SEQ ID NO: 42381 - RNA, 1650 nt, Artificial Sequence
  mRNA product Design a-2 (hSL-A100) comprising derived and/or modified sequence from LASV(ISTH0009-NIG-2011;Clade II)__AIT17404__GPCmut13 (opt5)
aggagaguccgcucagccagguugcagaagcggcuuagcguguguccuaaucuucucucugcguguagguaggccugugccgcaaacaagcuuaccaugggccagaucauuaccuucuuucaagaggugccccacgucaucgaagagguuaugaacauugugcugaucgcccucagccugcuugcuauucugaaggggaucuacaauguggccacaugcggacucuucggccuggucuccuuucuucugcucugugggagaucuugcagcacgaccuauaaaggaguguacgaacugcagacacuggagcucgacauggcgucccugaacaugaccaugccucuuucuuguacaaagaauaacagccaucacuauaucaugguuggcaaugaaaccgggcuggagcucacacugaccaacacguccauuaucaaucauaaauucugcaaccuuucugaugcucacaagaaaaaucuguacgaccaugcccucaugagcauuaucuccaccuuucaccugagcauuccgaacuucaaucaguaugaggccaugucuugugauuuuaacggaggcaagaucuccgugcaguacaaucugagccacgcuuaugccgucgacgcugccaaccauugcggcacaauugcgaauggggugcuccaaaccuucaugcggauggccuggggaggcucuuacaucgcucuggauuccgggaagggaagcugggacuguaucaugacaucuuaccaguaucuuauuauccagaacaccacgugggaagaucacugccaguuuucccgccccagcccuauuggcuaccuggggcuccugucccaaagaacacgggacaucuauauuucucgcagacuucugggaaccuucacauggacccucagcgauuccgagggcaacgaaacccccggcggguacugucugacacgguggaugcugaucgaggccgagcucaaaugcuuuggaaauacggcuguugccaaguguaacgaaaaacaugacgaggaguucugcgauaugcugcgccuuuuugacuucaauaagcaggcgaucagacggcugaaaaccgaagcccagaugagcauucagcucaucaacaaggcugugaaugcccugauuaacgaucaacuuaucaugaagaaucaucugcgcgacauuaugggcaucccuuauugcaacuacucuaaauauugguaccucaaucacacagucaccgggaagacaucccugcccagauguuggcuggugagcaacggaucuuaccucaaugaaacccacuucagcgacgauaucgagcagcaggcugacaacaugauuacggagcugcuucaaaaagaauauauggaucggcagggcaagacaccucuggggcucguggaccuguuugucuucuccaccucuuuuuaccugaucagcauuuuccuucaccucaucaaaauuccgugaggacuagucccuguucccagagcccacuuuuuuuucuuuuuuugaaauaaaauagccugucuuucagaucucaaaggcucuuuucagagccaccaaaaaaaaaaaaaaaaaaaaaaaaaaaaaaaaaaaaaaaaaaaaaaaaaaaaaaaaaaaaaaaaaaaaaaaaaaaaaaaaaaaaaaaaaaaaaaaaaaaaa

SEQ ID NO: 42382 - RNA, 1650 nt, Artificial Sequence
  mRNA product Design a-2 (hSL-A100) comprising derived and/or modified sequence from LASV(ISTH2010-NIG-2012;Clade II)__AIT17482__GPCmut13 (opt5)
aggagaguccgcucagccagguugcagaagcggcuuagcguguguccuaaucuucucucugcguguagguaggccugugccgcaaacaagcuuaccaugggccagaucauuaccuucuuucaagaggugccccacgucaucgaagagguuaugaacauugugcugaucgcccucagccugcuugcuauucugaaggggaucuacaauguggccacaugcggacucuucggccuggucuccuuucuucugcucugugggagaucuugcagcacgaccuauaaaggaguguacgaacugcagacacuggagcucgacauggcgucccugaacaugaccaugccucuuucuuguacaaagaauaacagccaucacuauaucaugguuggcaaugaaaccgggcuggagcucacacugaccaacacguccauuaucaaucauaaauucugcaaccuuucugaugcucacaagaaaaaucuguacgaccaugcccucaugagcauuaucuccaccuuucaccugagcauuccgaacuucaaucaguaugaggccaugucuugugauuuuaacggaggcaagaucuccgugcaguacaaucugagccacgcuuaugccgucgacgcugccaaccauugcggcacaauugcgaauggggugcuccaaaccuucaugcggauggccuggggaggcucuuacaucgcucuggauuccgggaagggaagcugggacuguaucaugacaucuuaccaguaucuuauuauccagaacauuaccugggaagaucacugccaguuuucccgccccagcccuaucggcuaccuggggcuccugucccaaagaacgcgggacauuuauaucucucgcagacuucugggaacauucaccuggacacucagcgauuccgagggcaacgaaacccccggcggguacugucugacccgguggaugcugaucgaggccgagcucaaaugcuuuggaaauacagcuguugccaaguguaacgaaaaacaugacgaggaguucugcgauaugcugcgccuuuuugacuucaauaagcaggcgauuagacggcugaaaacggaagcccagaugagcauccagcucauuaacaaggcugugaaugcccugaucaacgaucaacuuauuaugaagaaucaucugcgcgacaucaugggcaucccuuauugcaacuacucuaaauauugguaccucaaucacaccgucacagggaagaccucccugcccagauguuggcuggugagcaacggaucuuaccucaaugaaacacacuucagcgacgauauugagcagcaggcugacaacaugaucaccgagcugcuucaaaaagaauauauugaucggcagggcaagacgccucuggggcucguggaccuguuugucuucuccacaucuuuuuaccugaucagcauuuuccuucaccucguuaaaaucccgugaggacuagucccuguucccagagcccacuuuuuuuucuuuuuuugaaauaaaauagccugucuuucagaucucaaaggcucuuuucagagccaccaaaaaaaaaaaaaaaaaaaaaaaaaaaaaaaaaaaaaaaaaaaaaaaaaaaaaaaaaaaaaaaaaaaaaaaaaaaaaaaaaaaaaaaaaaaaaaaaaaaaa

SEQ ID NO: 42383 - RNA, 1650 nt, Artificial Sequence
  mRNA product Design a-2 (hSL-A100) comprising derived and/or modified sequence from LASV(Lassa virus/H.sapiens-wt/NGA/2015/ISTH_0543;Clade II)__AVO03639__GPCmut13 (opt5)
aggagaguccgcucagccagguugcagaagcggcuuagcguguguccuaaucuucucucugcguguagguaggccugugccgcaaacaagcuuaccaugggccagaucauuaccuucuuucaagaggugccccacgucaucgaagagguuaugaacauugugcugaucgcccucagccugcuugcuauucugaaggggaucuacaauguggccacaugcggacucuucggccuggucuccuuucuucugcucugugggagaucuugcagcacgaccuauaaaggaguguacgaacugcagacacuggagcucgacauggcgaaccugaauaugaccaugccucuuuccuguacaaagaacaauucucaucacuauaucaugguuggcaacgaaaccgggcuggagcucacacugaccaauacgagcauuaucaaccauaaauucugcaaucuuuccgaugcucacaagaaaaaccuguacgaccaugcccucaugucuauuaucagcaccuuucaccuguccauuccgaauuucaaccaguaugaggccaugagcugugauuuuaauggaggcaagaucucugugcaguacaaccugucccacacauaugcugucgacgccgcuaaucauugcggcaccauugccaacggggugcuccaaacauucaugcggauggcguggggaggcagcuacaucgcccuggauucugggaagggauccugggacuguaucaugaccagcuaccaguaucuuguuauucagaacacgacaugggaagaucacugccaguuuucucgccccuccccuaucggcuaccuggggcuccugagccaaagaacccgggacauuuauaucucccgcagacuucugggaacauucaccuggacccucucugauagcgagggcaaugaaacacccggcggguacugucugacgcgguggaugcugauugaggcugagcucaaaugcuuuggaaacaccgccguggcuaaguguaaugaaaaacaugacgaggaguucugcgauaugcugcgccuuuuugacuucaacaagcaggccaucagacggcugaaaacagaagcgcagauguccauccagcucauuaauaaggccgucaacgcucugaucaaugaucaacuuauuaugaagaaccaucugcgcgacaucaugggcauuccuuauugcaauuacagcaaauauugguaccucaaccacaccgugacagggaagaccucucugcccagauguuggcugguguccaauggaagcuaccucaacgaaacgcacuucucugacgauaucgagcagcaggccgacaauaugaucacagagcugcuucaaaaagaauauauugaucggcagggcaagaccccucuggggcucgucgaccuguuuguuuucagcaccuccuuuuaccugaucucuauuuuccuucaccucgugaaaaucccgugaggacuagucccuguucccagagcccacuuuuuuuucuuuuuuugaaauaaaauagccugucuuucagaucucaaaggcucuuuucagagccaccaaaaaaaaaaaaaaaaaaaaaaaaaaaaaaaaaaaaaaaaaaaaaaaaaaaaaaaaaaaaaaaaaaaaaaaaaaaaaaaaaaaaaaaaaaaaaaaaaaaaa

SEQ ID NO: 42384 - RNA, 1650 nt, Artificial Sequence
  mRNA product Design a-2 (hSL-A100) comprising derived and/or modified sequence from LASV(Lassa virus/H.sapiens-wt/NGA/2016/ISTH_0009;Clade II)__AVO03571__GPCmut13 (opt5)
aggagaguccgcucagccagguugcagaagcggcuuagcguguguccuaaucuucucucugcguguagguaggccugugccgcaaacaagcuuaccaugggccagaucauuaccuucuuucaagaggugccccacgucaucgaagagguuaugaacauugugcugaucgcccucagccugcuugcuauucugaaggggaucuacaauguggccacaugcggacuccugggccuugucuccuuccugcuccugugugggagaucuugcagcacgaccuauaaaggaguguacgaacugcagacacucgagcuggacauggcgucccuuaacaugaccaugccucugucuuguacaaagaauaacagccaucacuauaucaugguuggcaaugaaaccgggcucgagcugacacuuaccaacacguccauuaucaaucauaaauuuugcaaccugucugaugcucacaagaaaaaucucuacgaccaugcccugaugagcauuaucuccaccuuccaccugagcauuccgaacuuuaaucaguaugaggccaugucuugugauuucaacggaggccggaucuccgugcaguacaaucucagccacucuuaugcugucgacgccgcuaaccauugcggcacaauugccaauggggugcugcaaaccuuuaugcgcauggcguggggaggcuccuacaucgcccuugauagcgggaagggaucuugggacuguaucaugacauccuaccaguaucugauuauccagaacaccacgugggaagaucacugccaguucagcagacccuccccuauuggcuaccucgggcugcuuucucaacggacacgcgacaucuauauuagcagacggcugcucggaaccuuuacauggacccuguccgauagcgagggcaacgaaacccccggcggguacugucugacacgcuggaugcucaucgaggcugagcugaagugcuucggaaauacggccguugcuaaauguaacgaaaagcaugacgaggaauuuugcgauaugcuuagacuguucgacuuuaauaaacaggccauccggcgccucaagaccgaggcgcagaugucuauucagcugaucaacaaagccgugaaugcucuuauuaacgaucaacugaucaugaagaaucaccucagagacauuaugggcaucccuuauugcaacuacuccaaguauugguaccugaaucacacagucaccgggaaaacaagccugccccgguguuggcucgugucuaacggaagcuaccugaaugaaacccauuucuccgacgauaucgagcagcaggccgacaacaugauuacggagcuucugcaaaaggaauauaucgaucgccagggcaaaacaccucucgggcugguggaccuguucgucuuuucuaccagcuucuaccuuauuuccaucuuucuccaccugguuaagauuccgugaggacuagucccuguucccagagcccacuuuuuuuucuuuuuuugaaauaaaauagccugucuuucagaucucaaaggcucuuuucagagccaccaaaaaaaaaaaaaaaaaaaaaaaaaaaaaaaaaaaaaaaaaaaaaaaaaaaaaaaaaaaaaaaaaaaaaaaaaaaaaaaaaaaaaaaaaaaaaaaaaaaaa

SEQ ID NO: 42385 - RNA, 1650 nt, Artificial Sequence
  mRNA product Design a-2 (hSL-A100) comprising derived and/or modified sequence from LASV(Lassa virus/H.sapiens-wt/NGA/2016/ISTH_0017;Clade II)__AVO03567__GPCmut13 (opt5)
aggagaguccgcucagccagguugcagaagcggcuuagcguguguccuaaucuucucucugcguguagguaggccugugccgcaaacaagcuuaccaugggccagaucauuaccuucuuucaagaggugccccacgucaucgaagagguuaugaacauugugcugaucgcccucagccugcuugcuauucugaaggggaucuacaauguggccacaugcggacucuucggccuggucuccuuucuucugcucugugggagaucuugcagcacgaccuauaaaggaguguacgaacugcagacacuggagcucgacauggcgucccugaacaugaccaugccucuuucuuguacaaagaauaacagccaucacuauaucaugguuggcaaugaaaccgggcuggagcucacacugaccaacacguccauuaucaaucauaaauucugcaaccuuucugaugcucacaagaaaaaucuguacgaccaugcccucaugagcauuaucuccaccuuucaccugagcauuccgaacuucaaucaguaugaggccaugucuugugauuuuaacggaggcaagaucuccgugcaguacaaucugagccacacauaugcuauugacgccgcuaaccauugcggcaccaucgccaaugggguccuccaaacauucaugcggauggcguggggaggcucuuacaucgcccuggauuccgggaagggaagcugggacuguauuaugaccucuuaccaguaucuuaucauucagaacacgacaugggaagaucacugccaguuuucccgccccagcccuaucggcuaccuggggcuccugucccaaagaacccgggacauuuauaucucucgcagacuucugggaacauucaccuggacccucagcgauuccgagggcaacgaaacacccggcggguacugucugacgcgguggaugcugaucgaggcugagcucaaaugcuuuggaaauaccgccguggcuaaguguaacgaaaaacaugacgaggaguucugcgauaugcugcgccuuuuugacuucaauaagcaggccauuagacggcugaaaacagaagcgcagaugagcauccagcucauuaacaaggccguuaaugcucugaucaacgaucaacuuauuaugaagaaucaucugcgcgacaucaugggcaucccuuauugcaacuacucuaaauauugguaccucaaucacaccgugacagggaagaccucccugcccagauguuggcuggucagcaacggaucuuaccucaaugaaacgcacuucagcgacgauauugagcagcaggccgacaacaugaucacagagcugcuucaaaaagaauauauggaucggcagggcaagaccccucuggggcucguggaccuguuuguguucuccaccucuuuuuaccugauuagcaucuuccuucaccucguccgcauuccgugaggacuagucccuguucccagagcccacuuuuuuuucuuuuuuugaaauaaaauagccugucuuucagaucucaaaggcucuuuucagagccaccaaaaaaaaaaaaaaaaaaaaaaaaaaaaaaaaaaaaaaaaaaaaaaaaaaaaaaaaaaaaaaaaaaaaaaaaaaaaaaaaaaaaaaaaaaaaaaaaaaaaa

SEQ ID NO: 42386 - RNA, 1650 nt, Artificial Sequence
  mRNA product Design a-2 (hSL-A100) comprising derived and/or modified sequence from LASV(Lassa virus/H.sapiens-wt/NGA/2018/ISTH_0959;Clade II)__AVV65099__GPCmut13 (opt5)
aggagaguccgcucagccagguugcagaagcggcuuagcguguguccuaaucuucucucugcguguagguaggccugugccgcaaacaagcuuaccaugggccagaucauuaccuucuuucaagaggugccccacgucaucgaagagguuaugaacauugugcugaucgcccucagccugcuugcuauucugaaggggaucuacaauguggucacaugcggacucuucggccugguguccuuucuucugcucugugggagaucuugcagcacgaccuauaaaggaguuuacgaacugcagacacuggagcucgacauggccucccugaacaugaccaugccucuuucuuguacaaagaauaacagccaucacuauaucauggugggcaaugaaaccgggcuggagcucacacugaccaacacguccauuaucaaucauaaauucugcaaccuuucugaugcgcacaagaaaaaucuguacgaccaugcucucaugagcauuaucuccaccuuucaccugagcauuccgaacuucaaucaguaugaggccaugucuugugauuuuaacggaggcaagaucuccguccaguacaaucugagccacgccuaugcuauugacgccgcuaaccauugcggcacaaucgccaauggggugcuccaaaccuucaugcggauggcguggggaggcucuuacaucgcccuggauuccgggaagggaagcugggacuguauuaugacaucuuaccaguaucuuaucauucagaacaccacgugggaagaucacugccaguuuucccgccccagcccuaucggcuaccuggggcuccugucccaaagaacacgggacauuuauaucucucgcagacuucugggaaccuucacauggacccucagcgauuccgagggcaacgaaacccccggcggguacugucugacacgguggaugcugaucgaggcugagcucaaaugcuuuggaaauacggccguugcuaaguguaacgaaaaacaugacgaggaguucugcgauaugcugcgccuuuuugacuucaauaagcaggccauuagacggcugaaaaccgaagcgcagaugagcauccagcucauuaacaaggccgugaaugcucugaucaacgaucaacuuauuaugaagaaucaucugcgcgacaucaugggcaucccuuauugcaacuacucuaaauauugguaccucaaucacacagucaccgggaagacaucccugcccagauguuggcuggugagcaacggaucuuaccucaaugaaacccacuucagcgacgauauugagcagcaggccgacaacaugaucacggagcugcuucaaaaagaauauauugaucggcagggcaagacaccucuggggcucguggaccuguuugucuucuccaccucuuuuuaccugaucagcauuuuccuucaccucguuaaaaucccgugaggacuagucccuguucccagagcccacuuuuuuuucuuuuuuugaaauaaaauagccugucuuucagaucucaaaggcucuuuucagagccaccaaaaaaaaaaaaaaaaaaaaaaaaaaaaaaaaaaaaaaaaaaaaaaaaaaaaaaaaaaaaaaaaaaaaaaaaaaaaaaaaaaaaaaaaaaaaaaaaaaaaa

SEQ ID NO: 42387 - RNA, 1650 nt, Artificial Sequence
  mRNA product Design a-2 (hSL-A100) comprising derived and/or modified sequence from LASV(LASV003-NIG-2008;Clade II)__AIT17580__GPCmut13 (opt5)
aggagaguccgcucagccagguugcagaagcggcuuagcguguguccuaaucuucucucugcguguagguaggccugugccgcaaacaagcuuaccaugggccagaucauuaccuucuuucaagaggugccccacgucaucgaagagguuaugaacauugugcugaucgcccucagccugcuugcuauucugaaggggaucuacaauguggccacaugcggacucuucggccuggucuccuuucuucugcucugugggagaucuugcagcacgaccuauaaaggaguguacgaacugcagacacuggagcucgacauggcgucccugaacaugaccaugccucuuucuuguacaaagaauaacagccaucacuauaucaugguuggcaaugaaaccgggcuggagcucacacugaccaacacguccauuaucaaucauaaauucugcaaccuuucugaugcucacaagaaaaaucuguacgaccaugcccucaugagcauuaucuccaccuuucaccugagcauuccgaacuucaaucaguaugaggccaugucuugugauuuuaacggaggcaagaucuccgugcaguacaaucugagccacacauaugcugucgacgccgcuaaccauugcggcaccauugccaauggggugcuccaaacauucaugcggauggcguggggaggcucuuacaucgcccuggauuccgggaagggaagcugggacuguaucaugaccucuuaccaguaucuuauuauccagaacacgacaugggaagaucacugccaguuuucccgccccagcccuauuggcuaccuggggcuccugucccaaagaacccgggacaucuauauuucucgcagacuucugggaacauucaccuggacccucagcgauuccgagagcaacgaaacacccggcggcuacugucugacgcgguggaugcugaucgaggcugagcucaaaugcuuugggaauaccgccguugcuaaguguaacgaaaaacaugacgaggaguucugcgauaugcugcgccuuuuugacuucaauaagcaggccaucagacggcugaaagcggaagcccagaugucuauucagcucaucaacaaggcugugaaugcccugauuaacgaucaacuuaucaugaagaaucaucugcgcgacauuaugggaaucccuuauugcaacuacuccaaauauugguaccucaaucacacagucaccggcagaacaagccugccccgguguuggcuggugucuaacgggagcuaccucaaugaaacccacuucuccgacgauaucgagcagcaggcugacaacaugauuacggagcugcuucaaaaggaauauauggaucgccagggaaaaacaccucugggccucguggaccuguuugucuucucuaccagcuuuuaccugaucuccauuuuccuucaccucguuaagaucccgugaggacuagucccuguucccagagcccacuuuuuuuucuuuuuuugaaauaaaauagccugucuuucagaucucaaaggcucuuuucagagccaccaaaaaaaaaaaaaaaaaaaaaaaaaaaaaaaaaaaaaaaaaaaaaaaaaaaaaaaaaaaaaaaaaaaaaaaaaaaaaaaaaaaaaaaaaaaaaaaaaaaaa

SEQ ID NO: 42388 - RNA, 1650 nt, Artificial Sequence
  mRNA product Design a-2 (hSL-A100) comprising derived and/or modified sequence from LASV(LASV035-NIG-2009;Clade II)__AIT17588__GPCmut13 (opt5)
aggagaguccgcucagccagguugcagaagcggcuuagcguguguccuaaucuucucucugcguguagguaggccugugccgcaaacaagcuuaccaugggccagaucauuaccuucuuucaagaggugccccacgucaucgaagagguuaugaacauugugcugaucgcccucagccugcuugcuauucugaaggggaucuacaauguggccacaugcggacucuucggccuggucuccuuucuucugcucugugggagaucuugcagcacgaccuauaaaggaguguacgaacugcagacacuggagcucgacauggcgucccugaacaugaccaugccucuuucuuguacaaagaauaacagccaucacuauaucaugguuggcaaugaaaccgggcuggagcucacacugaccaacacguccauuaucaaucauaaauucugcaaccuuucugaugcucacaagaaaaaucuguacgaccaugcccucaugagcauuaucuccaccuuucaccugagcauuccgaacuucaaucaguaugaggccaugucuugugauuuuaacggaggcaagaucuccgugcaguacaaucugagccacgcuuaugccgucgacgcugccaaccauugcggcacaauugcgaauggggugcuccaaaccuucaugcggauggccuggggaggcucuuacaucgcucuggauuccgggaagggaagcugggacuguaucaugacaucuuaccaguaucuuauuauccagaacaccacgugggaagaucacugccaguuuucccgccccagcccuauuggcuaccuggggcuccugucccaaagaacacgggacaucuauauuucucgcagacuucugggaaccuucacauggacccucagcgauuccgagggcaacgaaacccccggcggguacugucugacacgguggaugcugaucgaggccgagcucaaaugcuuuggaaauacggcuguugccaaguguaacgaaaaacaugacgaggaguucugcgauaugcugcgccuuuuugacuucaauaagcaggcgaucagacggcugaaagccgaagcucagaugagcauucagcucaucaacaaggccgugaaugcucugauuaacgaucaacuuaucaugaagaaucaucugcgcgacauuaugggcaucccuuauugcaacuacucuaaauauugguaccucaaucacaccgucacagggaagaccucccugcccagauguuggcuggugagcaacggaucuuaccucaaugaaacacacuucagcgacgauaucgagcagcaggccgacaacaugauuaccgagcugcuucaaaaagaauauaucgaucggcagggcaagacgccucuggggcucguggaccuguuugucuucuccacaucuuuuuaccugauuagcaucuuccuucaccucguuaaaauuccgugaggacuagucccuguucccagagcccacuuuuuuuucuuuuuuugaaauaaaauagccugucuuucagaucucaaaggcucuuuucagagccaccaaaaaaaaaaaaaaaaaaaaaaaaaaaaaaaaaaaaaaaaaaaaaaaaaaaaaaaaaaaaaaaaaaaaaaaaaaaaaaaaaaaaaaaaaaaaaaaaaaaaa

SEQ ID NO: 42389 - RNA, 1650 nt, Artificial Sequence
  mRNA product Design a-2 (hSL-A100) comprising derived and/or modified sequence from LASV(LASV1000-NIG-2009;Clade II)__AIT17782__GPCmut13 (opt5)
aggagaguccgcucagccagguugcagaagcggcuuagcguguguccuaaucuucucucugcguguagguaggccugugccgcaaacaagcuuaccaugggccagaucauuaccuucuuucaagaggugccccacgucaucgaagagguuaugaacauugugcugaucgcccucagccugcuugcuauucugaaggggaucuacaauguggccacaugcggacucuucggccuggucuccuuucuucugcucugugggagaucuugcagcacgaccuauaaaggaguguacgaacugcagacacuggagcucgacauggcgucccugaacaugaccaugccucuuucuuguacaaagaauaacagccaucacuauaucaugguuggcaaugaaaccgggcuggagcucacacugaccaacacguccauuaucaaucauaaauucugcaaccuuucugaugcucacaagaaaaaucuguacgaccaugcccucaugagcauuaucuccaccuuucaccugagcauuccgaacuucaaucaguaugaggccaugucuugugauuuuaacggaggcaagaucuccgugcaguacaaucugagccacacauaugcugucgacgccgcuaaccauugcggcaccauugccaauggggugcuccaaacauucaugcggauggcguggggaggcucuuacaucgcccuggauuccgggaagggaagcugggacuguaucaugaccucuuaccaguaucuuauuauccagaacacgacaugggaagaucacugccaguuuucccgccccagcccuauuggcuaccuggggcuccugucccaaagaacccgggacaucuauauuucucgcagacuucugggaacauucaccuggacccucagcgauuccgagggcaacgaaacacccggcggguacugucugacgcgguggaugcugaucgaggcugagcucaaaugcuuuggaaauaccgccguugcuaaguguaacgaaaaacaugacgaggaguucugcgauaugcugcgccuuuuugacuucaauaagcaggccaucaaaagacugaagacagaagcgcagaugagcauucagcucaucaacaaggccgugaaugcucugauuaacgaucaacuuaucaugaaaaaucaucugcgggacauuaugggcaucccuuauugcaacuacucuaaguauugguaccucaaucacaccgucacagggaaaaccucccugccccgcuguuggcuggugagcaacggaucuuaccucaaugaaacgcacuucagcgacgauaucgagcagcaggccgacaacaugauuacagagcugcuucaaaaggaauauaucgauagacagggcaaaaccccucuggggcucguggaccuguuugucuucuccaccucuuuuuaccugauuagcaucuuccuucaccucguuaagauuccgugaggacuagucccuguucccagagcccacuuuuuuuucuuuuuuugaaauaaaauagccugucuuucagaucucaaaggcucuuuucagagccaccaaaaaaaaaaaaaaaaaaaaaaaaaaaaaaaaaaaaaaaaaaaaaaaaaaaaaaaaaaaaaaaaaaaaaaaaaaaaaaaaaaaaaaaaaaaaaaaaaaaaa

SEQ ID NO: 42390 - RNA, 1650 nt, Artificial Sequence
  mRNA product Design a-2 (hSL-A100) comprising derived and/or modified sequence from LASV(LASV221-NIG-2010;Clade II)__AIT17624__GPCmut13 (opt5)
aggagaguccgcucagccagguugcagaagcggcuuagcguguguccuaaucuucucucugcguguagguaggccugugccgcaaacaagcuuaccaugggccagaucauuaccuucuuucaagaggugccccacgucaucgaagagguuaugaacauugugcugaucgcccucagccugcuugcuauucugaaggggaucuacaauguggccacaugcggacucuucggccuggucuccuuucuucugcucugugggagaucuugcagcacgaccuauaaaggaguguacgaacugcagacacuggagcucgacauggcgucccugaacaugaccaugccucuuucuuguacaaagaauaacagccaucacuauaucaugguuggcaaugaaaccgggcuggagcucacacugaccaacacguccauuaucaaucauaaauucugcaaccuuucugaugcucacaagaaaaaucuguacgaccaugcccucaugagcauuaucuccaccuuucaccugagcauuccgaacuucaaucaguaugaggccaugucuugugauuuuaacggaggcaagaucuccgugcaguacaaucugagccacacauaugcuauugacgccgcuaaccauugcggcaccaucgccaaugggguccuccaaacauucaugcggauggcguggggaggcucuuacaucgcccuggauuccgggaagggaagcugggacuguauuaugaccucuuaccaguaucuuaucauucagaacacgacaugggaagaucacugccaguuuucccgccccagcccuaucggcuaccuggggcuccugucccaaagaacccgggacauuuauaucucucgcagacuucugggaacauucaccuggacccucagcgauuccgagggcaacgaaacacccggcggguacugucugacgcgguggaugcugaucgaggcugagcucaaaugcuuuggaaauaccgccguggcuaaguguaacgaaaaacaugacgaggaguucugcgauaugcugcgccuuuuugacuucaauaagcaggccauuagacggcugaaaacagaagcgcagaugagcauccagcucauuaacaaggccguuaaugcucugaucaacgaucaacuuauuaugaagaaucaucugcgcgacaucaugggcaucccuuauugcaacuacucuaaauauugguaccucaaucacaccgugacagggaagaccucccugcccagauguuggcuggucagcaacggaucuuaccucaaugaaacgcacuucagcgacgauauugagcagcaggccgacaacaugaucacagagaugcugcaaaaagaauauauggaucggcagggcaagaccccucuugggcugguggaccucuuuguguucuccaccucuuuuuaccugauuagcaucuuccugcaccuugucaaaauuccgugaggacuagucccuguucccagagcccacuuuuuuuucuuuuuuugaaauaaaauagccugucuuucagaucucaaaggcucuuuucagagccaccaaaaaaaaaaaaaaaaaaaaaaaaaaaaaaaaaaaaaaaaaaaaaaaaaaaaaaaaaaaaaaaaaaaaaaaaaaaaaaaaaaaaaaaaaaaaaaaaaaaaa

SEQ ID NO: 42391 - RNA, 1650 nt, Artificial Sequence
  mRNA product Design a-2 (hSL-A100) comprising derived and/or modified sequence from LASV(LASV237-NIG-2010;Clade II)__AIT17638__GPCmut13 (opt5)
aggagaguccgcucagccagguugcagaagcggcuuagcguguguccuaaucuucucucugcguguagguaggccugugccgcaaacaagcuuaccaugggccagaucauuaccuucuuucaagaggugccccacgucaucgaagagguuaugaacauugugcugaucgcccucagccugcuugcuauucugaaggggaucuacaauguggccacaugcggacucuucggccuggucuccuuucuucugcucugugggagaucuugcagcacgaccuauaaaggaguguacgaacugcagacacuggagcucgacauggcgucccugaacaugaccaugccucuuucuuguacaaagaauaacagccaucacuauaucaugguuggcaaugaaaccgggcuggagcucacacugaccaacacguccauuaucaaucauaaauucugcaaccuuucugaugcucacaagaaagaccuguacgaucaugcccucaugagcauuaucuccaccuuucaccugagcauuccgaauuucaaccaguaugaggccaugucuugugacuuuaauggaggcaagaucuccgugcaguacaaccugagccacacauaugcugucgaugccgcuaaucauugcggcaccauugccaacggggugcuccaaacauucaugcggauggcguggggaggcucuuacaucgcccuggacuccgggaagggaagcugggauuguaucaugaccucuuaccaguaucuuauuauccagaauacgacaugggaagaccacugccaguuuucccgccccagcccuauuggcuaccuggggcuccugucccaaagaacccgggauaucuauauuucucgcagacuucugggaacauucaccuggacccucagcgacuccgagggcaacgaaacacccggcggguacugucugacgcgguggaugcugaucgaggcugagcucaaaugcuuuggaaacaccgccguugcuaaguguaaugaaaaacaugaugaggaguucugcgacaugcugcgccuuuuugauuucaacaagcaggccaucagacggcugaaaacagaagcgcagaugagcauucagcucaucaauaaggccgugaacgcucugauuaaugaccaacuuaucaugaagaaccaucugcgcgacauuaugggcaucccuuauugcaauuacucuaaauauugguaccucaaccacaccgucacagggaagaccucccugcccagauguuggcuggugagcaauggaucuuaccucaacgaaacgcacuucagcgaugacaucgagcagcaggccgauaauaugauuacagagcugcuucaaaaagaauauauggaccggcagggcaagaccccucuggggcucguggaucuguuugucuucuccaccucuuuuuaccugaucagcauuuuccuucaccucaucaaaauuccgugaggacuagucccuguucccagagcccacuuuuuuuucuuuuuuugaaauaaaauagccugucuuucagaucucaaaggcucuuuucagagccaccaaaaaaaaaaaaaaaaaaaaaaaaaaaaaaaaaaaaaaaaaaaaaaaaaaaaaaaaaaaaaaaaaaaaaaaaaaaaaaaaaaaaaaaaaaaaaaaaaaaaa

SEQ ID NO: 42392 - RNA, 1650 nt, Artificial Sequence
  mRNA product Design a-2 (hSL-A100) comprising derived and/or modified sequence from LASV(LASV253-NIG-2011;Clade II)__AIT17670__GPCmut13 (opt5)
aggagaguccgcucagccagguugcagaagcggcuuagcguguguccuaaucuucucucugcguguagguaggccugugccgcaaacaagcuuaccaugggccagaucauuaccuucuuucaagaggugccccacgucaucgaagagguuaugaacauugugcugaucgcccucagccugcuugcuauucugaaggggaucuacaauguggccacaugcggacucuucggccuggucuccuuucuucugcucugugggagaucuugcagcacgaccuauaaaggaguguacgaacugcagacacuggagcucgacauggcgucccugaacaugaccaugccucuuucuuguacaaagaauaacagccaucacuauaucaugguuggcaaugaaaccgggcuggagcucacacugaccaacacguccauuaucaaucauaaauucugcaaccuuucugaugcucacaagaaaaaucuguacgaccaugcccucaugagcauuaucuccaccuuucaccugagcauuccgaacuucaaucaguaugaggccaugucuugugauuuuaacggaggcaagaucuccgugcaguacaaucugagccacacauaugcugucgacgccgcuaaccauugcggcaccauugccaauggggugcuccaaacauucaugcggauggcguggggaggcucuuacaucgcccuggauuccgggaagggaagcugggacuguaucaugaccucuuaccaguaucuuauuauccagaacacgacaugggaagaucacugccaguuuucccgccccagcccuauuggcuaccuggggcuccugucccaaagaacccgggacaucuauauuucucgcagacuucugggaacauucaccuggacccucagcgauuccgagggcaacgaaacacccggcggguacugucugacgcgguggaugcugaucgaggcugagcucaaaugcuuuggaaauaccgccguugcuaaguguaacgaaaaacaugacgaggaguucugcgauaugcugcgccuuuuugacuucaauaagcaggccaucagacggcugaaagcggaagcccagaugagcauucagcucaucaacaaggcugugaaugcccugauuaacgaucaacuuaucaugaagaaucaucugcgcgacauuaugggcaucccuuauugcaacuacucuaaauauugguaccucaaucacacagucaccgggagaacaucccugccccgguguuggcuggugagcaacggaucuuaccucaaugaaacccacuucagcgacgauaucgagcagcaggcugacaacaugauuacggagcugcuucaaaaggaauauaucgaucgccagggcaaaacaccucuggggcucguggaccuguuugucuucuccaccucuuuuuaccugauuagcaucuuccuucaccucguuaagauuccgugaggacuagucccuguucccagagcccacuuuuuuuucuuuuuuugaaauaaaauagccugucuuucagaucucaaaggcucuuuucagagccaccaaaaaaaaaaaaaaaaaaaaaaaaaaaaaaaaaaaaaaaaaaaaaaaaaaaaaaaaaaaaaaaaaaaaaaaaaaaaaaaaaaaaaaaaaaaaaaaaaaaaa

SEQ ID NO: 42393 - RNA, 1650 nt, Artificial Sequence
  mRNA product Design a-2 (hSL-A100) comprising derived and/or modified sequence from LASV(LASV254-NIG-2011;Clade II)__AIT17674__GPCmut13 (opt5)
aggagaguccgcucagccagguugcagaagcggcuuagcguguguccuaaucuucucucugcguguagguaggccugugccgcaaacaagcuuaccaugggccagaucauuaccuucuuucaagaggugccccacgucaucgaagagguuaugaacauugugcugaucgcccucagccugcuugcuauucugaaggggaucuacaauguggccacaugcggacucuucggccuggucuccuuucuucugcucugugggagaucuugcagcacgaccuauaaaggaguguacgaacugcagacacuggagcucgacaugaccaaccugaauaugacaaugccucuuuccuguaccaagaacaauucucaucacuauaucaugguuggcaacgaaacagggcuggagcucacccugacgaauaccagcauuaucaaccauaaauucugcaaucuuuccgaugcgcacaagaaaaaccuguacaaucaugcucucaugucuauuaucagcacauuucaccuguccauuccgaacuucaaucaguaugaggccaugagcugugacuuuaacggaggcaagaucucugugcaguacaaucugucccacagcuaugccgucgaugcugccaaccauugcggcaccauugcuaacggggugcuccaaacauucaugcggauggccuggggaggcucuuacaucgcgcuggacuccgggaagggaaauugggauuguaucaugaccagcuaccaguaucuuauuauccagaacacgacaugggaagaccacugccaguuuucucgccccuccccuauuggcuaccuggggcuccugagccaaagaacccgggauaucuauauuucccgcagacuucugggaacauucaccuggacccucucugacagcgagggcaaugaaacacccggcggguacugucugacgcgguggaugcugaucgaggccgagcucaaaugcuuuggaaacaccgcuguugccaaguguaaugaaaaacaugaugaggaguucugcgacaugcugcgccuuuuugauuucaacaagcaggcuaucagacggcugaaaacagaagcccaggcgaauauucagcucaucaacaaggccgugaaugcucugauuaacgaccaacuuaucaugaagaaucaucugcgcgauauuaugggcaucccuuauugcaacuacuccaaauauugguaccucaaucacaccgucacagggaagaccagccugcccagauguuggcuggugucuaacggauccuaccucaaugaaacgcacuucagcgacgacaucgagcagcaggccgauaacaugauuacagagcugcuucaaaaagaauauauggaccggcagggcaagaccccucuggggcucguggaucuguuugucuucucuaccagcuuuuaccugaucuccauuuuccuucaccucguuaaaaucccgugaggacuagucccuguucccagagcccacuuuuuuuucuuuuuuugaaauaaaauagccugucuuucagaucucaaaggcucuuuucagagccaccaaaaaaaaaaaaaaaaaaaaaaaaaaaaaaaaaaaaaaaaaaaaaaaaaaaaaaaaaaaaaaaaaaaaaaaaaaaaaaaaaaaaaaaaaaaaaaaaaaaaa

SEQ ID NO: 42394 - RNA, 1650 nt, Artificial Sequence
  mRNA product Design a-2 (hSL-A100) comprising derived and/or modified sequence from LASV(Nig08-A19;Clade III)__ADU56618__GPCmut13 (opt5)
aggagaguccgcucagccagguugcagaagcggcuuagcguguguccuaaucuucucucugcguguagguaggccugugccgcaaacaagcuuaccaugggccagaucgugaccuucuuucaagaggucccccacguuauugaagaggugaugaacaucgugcugauugcccucagcauccuggcuauucuuaaggggcuguacaauaucgccacaugcggacucaucggccuggucacguuccuucugcucuccgggagaucuuguagcaugaccuauaaaggaguguacgaacugcagacacuggagcucaacaugaauacccugaacaugacaaugccucuuuccugcaccaagaauaacucucaucacuauauuaugguuggcaaugaaacagggcuggagcucacccugacgaacaccagccuucugcaucacaaauuuuguaaucucuccgacgcgcauaagaaaaaccuguacgaucacacacugaugucuaucauuagcaccuuccaccucuccaucccgaauuuuaaccaguaugaggcuaugagcugcgacuucaauggaggcaagauuacagugcaguacaaccugucucauuccuaugccaucgaugccgcuaaucacuguggcaccgucgccaacggggugcuucaaacguuuaugcggauggcuuggggaggcagcuacauugcccuggacucugggcgcggaaagugggauugcaucaugacauccuaccaguaucucaucauucagaacaccacaugggaagaccauugucaguucagcagacccucuccuaucggcuaccuggggcuucugucccaacggacccgcgauauuuauaucagcagacggcuccugggaaccuuuacauggacgcuguccgacucugagggcaaugaaacccccggcggguacugccucacacgcuggaugcugauugaggcggagcuuaaauguuucggaaacaccgccguugcuaagugcaaugaaaaacacgaugaggaauuuugugacaugcugagacucuucgauuuuaacaagcaggccauccggcgccugaaagcugaggcccagaugagcauccagcuuauuaauaaggcggugaacgcccugaucaaugaccaacucauuaugaagaaccaccugagagauaucaugggcauuccuuauugcaauuacuccaaauauugguaccugaaccauacaagcaccgggcggacgucucucccccgcugcuggcuggucuccaauggaagcuaccuuaacgaaacacacuucucugacgacaucgagcagcaggcugauaauaugaucaccgagaugcugcaaaaggaauaucucgacagacagggcaaaaccccucuggggcugguggaucuuuucguguuuagcacauccuucuaccucauuucuaucuuucugcaucuggucaagauuccgugaggacuagucccuguucccagagcccacuuuuuuuucuuuuuuugaaauaaaauagccugucuuucagaucucaaaggcucuuuucagagccaccaaaaaaaaaaaaaaaaaaaaaaaaaaaaaaaaaaaaaaaaaaaaaaaaaaaaaaaaaaaaaaaaaaaaaaaaaaaaaaaaaaaaaaaaaaaaaaaaaaaaa

SEQ ID NO: 42395 - RNA, 1653 nt, Artificial Sequence
  mRNA product Design a-2 (hSL-A100) comprising derived and/or modified sequence from LASV(G1180-SLE-2010;Clade IV)__AIT17168__GPCmut13 (opt5)
aggagaguccgcucagccagguugcagaagcggcuuagcguguguccuaaucuucucucugcguguagguaggccugugccgcaaacaagcuuaccaugggccagaucgugaccuucuuucaagaggucccccacguuauugaagaggugaugaacaucgugcugauugcccucagcauccuggcuguccuuaaggggcuguacaauuucgccacaugcggacucgugggccugcuuacguuucugcuccugugugggagauccugcaccgcgucucgguauaaaggaguuuacgaacugcagacacucgagcugaacauggaaacccuuaauaugacaaugccucugagcuguaccaagaacaauucccaucacuauauuauggugggcaacgagacagggcucgagcugacccuuacgaauaccucuaucaucaaccauaaauucugcaaucugagcgacgcucacaagaaaaaccucuacgaucaugcccugauguccauuaucucuacauuucaccugagcauuccgaauuucaaccaguaugaagccauguccugugacuuuaauggaggcaagaucagcguccaguacaaccucucucacuccuaugcuggcgaugccgcuaaucauugcgggaccguggccaacggaguucugcaaacauucaugcgcauggcguggggcgggagcuacauugcccuugacucuggacacggcuccugggauuguaucaugaccagcuaccaguaucugauuauccagaacacgacaugggaggaccauugccaguuuucuagacccuccccuaucggguaccucggacugcuuagccaacggacccgcgauauuuauaucuccagacggcugcucggcacauucaccuggacccugucugacagcgaaggcaaggauacacccgggggauacugucugacgcgcuggaugcucauugaggcugagcugaaaugcuuuggcaauaccgccguggcuaaguguaacgaaaaacacgacgaggaguucugcgauaugcuuagacuguuugacuucaauaagcaggccauccagcggcucaaagcggaagcccagauguccauucaacugaucaacaaggcugucaaugcccuuaucaacgaucagcugauuaugaagaaucaccuccgcgacaucauggggauuccuuauugcaacuacagcaaauauugguaccugaaucauacaaccacaggaaagaccucucugcccaaauguuggcucguguccaacggcagcuaccugaaugaaacgcacuucucugacgauaucgagcagcaagcugacaacaugauuacagagaugcuucagaaggaauauauggagagacaggggaaaaccccucugggacucguggaucuguuugucuucagcaccuccuuuuaccugaucucuaucuuccuucaucucguuaagauuccgugaggacuagucccuguucccagagcccacuuuuuuuucuuuuuuugaaauaaaauagccugucuuucagaucucaaaggcucuuuucagagccaccaaaaaaaaaaaaaaaaaaaaaaaaaaaaaaaaaaaaaaaaaaaaaaaaaaaaaaaaaaaaaaaaaaaaaaaaaaaaaaaaaaaaaaaaaaaaaaaaaaaaa

SEQ ID NO: 42396 - RNA, 1653 nt, Artificial Sequence
  mRNA product Design a-2 (hSL-A100) comprising derived and/or modified sequence from LASV(G1442-SLE-2011;Clade IV)__AIT17180__GPCmut13 (opt5)
aggagaguccgcucagccagguugcagaagcggcuuagcguguguccuaaucuucucucugcguguagguaggccugugccgcaaacaagcuuaccaugggccagaucgugaccuucuuucaagaggucccccacguuauugaagaggugaugaacaucgugcugauugcccucagcauccuggcuguccuuaaggggcuguacaauguggccacaugcggacucauuggccugguuacguuccuucugcucugugggagauccugcaccacaacccuguauaaaggaguguacgaacugcagacacucgagcugaacauggaaacccuuaauaugacaaugccucugucuuguaccaagaacaauagccaucacuauauccgggucggcaacgagacggggcucgagcugacccuuacaaauaccuccaucauuaaccauaaauuuugcaaucugucugacgcgcacaagaaaaaccucuacgaucaugcucugaugagcaucauuuccacauuccaccugucuaucccgaauuuuaaccaguaugaagccaugagcugugacuucaauggaggcaagauuuccgugcaguacaaccucagccacucuuaugccggcgaugcugccaaucauugcgggaccguugcuaacggagugcugcaaacguuuaugcgcauggccuggggcggguccuacaucgcgcuugacagcggaagaggcaacugggauuguauuaugacaucuuaccaguaucugaucauccagaauaccacaugggacgaucacugccaguucucccggcccagcccuauuggguaccucggacugcuuucucaacgcaccagagacgucuauaucucccggcgccugcucggcaccuuuacauggacgcugagcgauuccgagggcaaggacacccccgggggauacugucugacaagauggaugcucauugaagccgagcugaaaugcuucggcaacaccgcuguggccaaguguaaugagaaacaugaugaagaguuuugcgacaugcuucggcuguucgauuuuaacaagcaggcuauccagcgccucaaagccgaagcgcagaugucuauucaacugaucaauaaggccgugaacgcucuuaucaaugaccagcugauuaugaagaaccaccucagagacaucauggggauuccuuauugcaauuacagcaaauauugguaccugaacaauacagccaccggaaagacgucccugcccaaauguuggcucaucagcaacggcucuuaccugaaugagacacacuucuccgaugacauugaacaggaggcugauaacaugaucaccgagaugcuucaaaaggaauauauggagcggcaggggaaaaccccucugggacucgucgaccuguucguuuuuagcacaucuuucuaccugaucagcauuuuucuucaucucgugaagaucccgugaggacuagucccuguucccagagcccacuuuuuuuucuuuuuuugaaauaaaauagccugucuuucagaucucaaaggcucuuuucagagccaccaaaaaaaaaaaaaaaaaaaaaaaaaaaaaaaaaaaaaaaaaaaaaaaaaaaaaaaaaaaaaaaaaaaaaaaaaaaaaaaaaaaaaaaaaaaaaaaaaaaaa

SEQ ID NO: 42397 - RNA, 1653 nt, Artificial Sequence
  mRNA product Design a-2 (hSL-A100) comprising derived and/or modified sequence from LASV(G3010-SLE-2013;Clade IV)__AIT17344__GPCmut13 (opt5)
aggagaguccgcucagccagguugcagaagcggcuuagcguguguccuaaucuucucucugcguguagguaggccugugccgcaaacaagcuuaccaugggccagaucgugaccuucuuucaagaggucccccacguuauugaagaggugaugaacaucgugcugauugcccucagcauccuggcuguccuuaaggggcuguacaauuucgccacaugcggacucgugggccugguuacguuucuucugcucugugggagauccugcaccacaucucuguauaaaggaguguacgaacugcagacccucgagcugaacauggaaacacuuaauaugaccaugccucugagcuguacaaagaacaauucccaucacuauauuauggucggcaacgagaccgggcucgagcugacgcuuaccaauacaucuaucaucaaccauaaauucugcaaucugagcgacgcgcacaagaaaaaccucuacaaucaugcucugauguccauuaucucuaccuuucaccugagcauuccgaacuucaaucaguaugaagccauguccugugauuuuaacggaggcaagaucagcgugcaguacaaucucucucacuccuaugccggcgacgcugccagccauugcgggacaguugcuaacggagugcugcaaaccuucaugcggauggccuggggcgggucuuacauugcgcuugauuccggauacggcaagugggacuguaucaugacgagcuaucaguaccugauuauccagaacacaaccugggaggaucacugccaguuuucucgccccuccccuaucggguaucucggacugcuuagccaaagaacacgggacauuuacaucucccgcagacugcucggcaccuucaccuggacacugucugauagcgaaggcaaagacacgcccgggggauauugucugacccgguggaugcucauugaggccgagcugaagugcuuuggcaauacagcugucgccaaauguaacgaaaagcaugaugaggaguucugcgacaugcuucgccuguuugauuucaauaaacaggcuauccagagacucaagaccgaagcccagauguccauucaacugaucaacaaggcggugaaugcccuuaucaacgaccagcugauuaugaaaaaucaccuccgggauaucauggggauuccuuacugcaacuauagcaaguacugguaccugaaucacacaaccacgggaaaaacaucucugcccaaguguuggcucguguccaacggcagcuaucugaaugaaacccauuucucugacgacaucgagcagcaagcugauaacaugauuaccgagaugcuucagaaagaauacauggagcgccaggggaagacaccucugggacucgucgaccuguuuguuuucagcaccuccuuuuaucugaucucuaucuuccuucaccucgugaaaauuccgugaggacuagucccuguucccagagcccacuuuuuuuucuuuuuuugaaauaaaauagccugucuuucagaucucaaaggcucuuuucagagccaccaaaaaaaaaaaaaaaaaaaaaaaaaaaaaaaaaaaaaaaaaaaaaaaaaaaaaaaaaaaaaaaaaaaaaaaaaaaaaaaaaaaaaaaaaaaaaaaaaaaaa

SEQ ID NO: 42398 - RNA, 1653 nt, Artificial Sequence
  mRNA product Design a-2 (hSL-A100) comprising derived and/or modified sequence from LASV(G502-SLE-2009;Clade IV)__AIT17126__GPCmut13 (opt5)
aggagaguccgcucagccagguugcagaagcggcuuagcguguguccuaaucuucucucugcguguagguaggccugugccgcaaacaagcuuaccaugggccagaucgugaccuucuuucaagaggucccccacguuauugaagaggugaugaacaucgugcugauugcccucagcauccuggcuguccuuaaggggcuguacaauuucgccacaugcggacucgugggccugcuuacguuucugcuccugugugggagauccugcaccacaggacuguauaaaggcguuuacgaacuccagacccuggagcuuaacauggaaacacugaauaugaccaugccucucucuuguacaaagaacaauagccaucacuauauuaugguggggaacgagaccggacuggagcuuacgcugaccaauacauccaucaucaaccauaaauucugcaaucucucugacgcgcacaagaaaaaccuguacgaucaugcucugaugagcauuaucuccaccuuucaccucucuauuccgaauuucaaccaguaugaagccaugagcugugacuuuaauggcggcaagaucuccguccaguacaaccugagccacucuuaugccggggaugcugccgaccauugcggaacaguggcuaauggcguucuucaaaccuucaugcggauggccuggggaggguccuacauugcgcuggauagcggccgcgggagaugggacuguaucaugacgucuuaccaguaucucauuauccagaacacaaccugggaggaucacugccaguuuucccggcccagcccuaucggauaccugggccuucugucucaacgcacaagagacauuuauaucucccggcgccuccugggcaccuucaccuggacacugagcgauuccgaagggaaggacacgcccggaggcuacugucucaccagauggaugcugauugaggccgagcuuaaaugcuuugggaacacagcuguggccaaguguaaugaaaaacaugaugaggaguucugcgacaugcugcggcucuuugauuucaacaagcaggcuauccagcgccugaaagccgaagcgcagaugucuauucaacuuaucaauaaggccgucaacgcucugaucaaugaccagcucgugaugaagaaccaccugagagacauuaugggaaucccuuauugcaauuacagccgguauugguaccugaaccacaccacaaccggccgcacgucccuccccaaauguuggcuggugagcaaugggucuuaccuuaacgaaacacauuucuccgaugacauugagcagcaagccgauaauaugaucaccgagaugcugcagaaggaauauauggagagacagggaaaaaccccucucggccuggucgaccuguuuguuuucagcacaucuuuuuaccuuauuagcaucuuccuccaccuggugaagaucccgugaggacuagucccuguucccagagcccacuuuuuuuucuuuuuuugaaauaaaauagccugucuuucagaucucaaaggcucuuuucagagccaccaaaaaaaaaaaaaaaaaaaaaaaaaaaaaaaaaaaaaaaaaaaaaaaaaaaaaaaaaaaaaaaaaaaaaaaaaaaaaaaaaaaaaaaaaaaaaaaaaaaaa

SEQ ID NO: 42399 - RNA, 1653 nt, Artificial Sequence
  mRNA product Design a-2 (hSL-A100) comprising derived and/or modified sequence from LASV(G733-SLE-2010;Clade IV)__AIT17154__GPCmut13 (opt5)
aggagaguccgcucagccagguugcagaagcggcuuagcguguguccuaaucuucucucugcguguagguaggccugugccgcaaacaagcuuaccaugggccagaucgugaccuucuuucaagaggucccccacguuauugaagaggugaugaacaucgugcugauugcccucagcauccuggcuguccuuaaggggcuguacaauuucgccacaugcggaauugugggccucguuuccuuucugcuucugugugggagaucuugcacgaccagccucuauaaaggaguguacgaacugcagacacuggagcucaacauggaaacccugaauaugacaaugccucuuuccuguaccaagaacaauucucaucacuauaucauggucggcaacgagacagggcuggagcucacccugacgaauaccagcaucauuaaccauaaauucugcaaucuuuccgacgcgcacaagaaaaaccuguacgaucaugcucucaugucuaucauuagcacauuucaccuguccaucccgaauuucaaccaguaugaagccaugagcugugacuuuaauggaggcaagauuucugugcaguacaaccugucccacagcuaugccggcgaugcugccaaucauugcgggaccaucgcuaacggaguucuccaaacauucaugcggauggccuggggcgggucuuacauugcgcuggacuccggacgcgauagaugggacuguaucaugaccagcuaccaguaucuuaucauucagaacacgacaugggaggaucacugccaguuuucucggcccuccccuaucggcuaccuggggcuccugagccaacgcaccagagacauuuauaucucccggcgccuucugggaacauucaccuggacccucucugauagcgaaggcaaggacacacccggcggguacugucugacgagauggaugcugauugaggccgagcucaaaugcuuuggaaauaccgcuguggccaaguguaacgaaaaacaugaugaggaguucugcgacaugcugcggcuuuuugauuucaauaagcaggcuauccagcgccugaaagccgaagcgcagauguccauccaacucauuaacaaggccgucaaugcucugaucaacgaccagcuuauuaugaagaaucaccugagagacaucaugggcauuccuuauugcaacuacagcaaauauugguaccucaaucacacaaccacagggaagaccucucugcccaaauguuggcugguguccaacggaagcuaccucaaugaaacgcauuucucugaugacaucgagcagcaagccgauaacaugaucacagagaugcugcagaaggaauauauggagcggcagggcaaaaccccucuugggcugguggaccucuuugucuucagcaccuccuuuuaccugauuucuaucuuccugcaccuuguuaagauuccgugaggacuagucccuguucccagagcccacuuuuuuuucuuuuuuugaaauaaaauagccugucuuucagaucucaaaggcucuuuucagagccaccaaaaaaaaaaaaaaaaaaaaaaaaaaaaaaaaaaaaaaaaaaaaaaaaaaaaaaaaaaaaaaaaaaaaaaaaaaaaaaaaaaaaaaaaaaaaaaaaaaaaa

SEQ ID NO: 42400 - RNA, 1653 nt, Artificial Sequence
  mRNA product Design a-2 (hSL-A100) comprising derived and/or modified sequence from MOPV/LASV reassortant(IGS-1;Clade IV)__AFY05576__GPCmut13 (opt5)
aggagaguccgcucagccagguugcagaagcggcuuagcguguguccuaaucuucucucugcguguagguaggccugugccgcaaacaagcuuaccaugggccagaucgugaccuucuuucaagaggucccccacguuauugaagaggugaugaacaucgugcugauugcccucagcguccuggcugugcuuaaggggcuguacaauuucgccacaugcggacucguuggccuggugacguuucuucugcucugugggagauccugcaccacaucucuguauaaaggagucuacgaacugcagacccucgagcugaacauggaaacacuuaauaugaccaugccucugagcuguacaaagaacaauucccaucacuauaucauggugggcaacgagaccgggcucgagcugacgcuuaccaauacaucuauuaucaaccauaaauucugcaaucugagcgacgcgcacaagaaaaaccucuacgaucaugcucugauguccaucauuucuaccuuucaccugagcaucccgaauuucaaccaguaugaagccauguccugugacuuuaauggaggcaagauuagcguucaguacaaccucucucacuccuaugccggcgaugcugccaaucauugcgggacaguggcuaacggaguccugcaaaccuucaugcggauggccuggggcgggagcuacaucgcgcuugacucuggacgcggcaacugggauuguauuaugacguccuaccaguaucugaucauucagaauacaaccugggaggaccacugccaguuuagcagacccucuccuaucggguaccucggacugcuuucccaacggacacgcgauaucuauauuagcagacggcugcucggcaccuucaccuggacacuguccgacucugaaggcgaggauacgcccgggggauacugucugacccgcuggaugcucaucgaggccgaacugaagugcuuuggcaacacagcuguggccaaauguaaugagaagcaugacgaagaguucugcgauaugcuuagacuguuugacuucaacaaacaggcuauucagcggcucaaggccgaagcgcagaugagcauccaacugauuaauaaagccgugaacgcucuuaucaaugaucagcugaucaugaagaaccaccuccgcgacauuauggggaucccuuauugcaauuacuccaaguauugguaccugaaccacaccacaaccggaagaacgagccugcccaaauguuggcucgucucuaauggcuccuaccugaacgagacacauuucagcgacgauauugagcagcaagccgacaauaugaucaccgaaaugcuucagaaggaguauauggaacggcaggggaaaaccccucugggacucguugaucuguuuguguucucuaccagcuuuuaccugauuuccaucuuccuucaccucgugaagaucccgugaggacuagucccuguucccagagcccacuuuuuuuucuuuuuuugaaauaaaauagccugucuuucagaucucaaaggcucuuuucagagccaccaaaaaaaaaaaaaaaaaaaaaaaaaaaaaaaaaaaaaaaaaaaaaaaaaaaaaaaaaaaaaaaaaaaaaaaaaaaaaaaaaaaaaaaaaaaaaaaaaaaaa

SEQ ID NO: 42401 - RNA, 1653 nt, Artificial Sequence
  mRNA product Design a-2 (hSL-A100) comprising derived and/or modified sequence from LASV(LM765-SLE-2012;Clade IV)__AIT17814__GPCmut13 (opt5)
aggagaguccgcucagccagguugcagaagcggcuuagcguguguccuaaucuucucucugcguguagguaggccugugccgcaaacaagcuuaccaugggccagaucgugaccuucuuucaagaggucccccacguuauugaagaggugaugaacaucgugcugauugcccucagcauccuggcuguccuuaaggggcuguacaauuucgccacaugcggacucgugggccugguuacguuucuucugcucugugggagauccugcaccacaucucuguauaaaggaguguacgaacugcagacccucgagcugaacauggaaacacuuaauaugaccaugccucugagcuguacaaagaacaauucccaucacuauauuauggucggcaacgagaccgggcucgagcugacgcuuaccaauacaucuaucaucgaccauaaauucugcaaccugagcgaugcgcaccggaagaaucucuacgaccaugcucugauguccauuaucucuaccuuucaccugagcauuccgaacuucaaucaguaugaagccauguccugugauuuuaacggaggcaaaaucagcgugcaguacaaucucucucacuccuaugccaaggacgcugccgaucauugcggcacaguugcuaacggggugcugcaaaccuucaugcgcauggccuggggaggcagcuacauugcgcuugacucugggagaggacggugggauuguaucaugacguccuaccaguaucugauuauccagaauacaaccugggaggaccacugccaguuuagccgccccucuccuaucggcuaccucgggcugcuuucccaaagaacacgggauauuuauaucagccgcagacugcucggaaccuucaccuggacacuguccgacucugaaggcaaggauacgcccggcggguacugucugacccgguggaugcucauugaggccgagcugaaaugcuuuggaaacacagcugucgccaaguguaacgaaaaacaugacgaggaguucugcgauaugcuucgccuguuugacuucaauaagcaggcuauccagagacucaaagccgaagcgcagaugagcauucaacugaucaacaaggccgugaaugcucuuaucaacgaccagcugauuaugaagaaucaccuccgggauaucaugggcauuccuuauugcaacuacuccaaauauugguaccugaaucacaccacaaccgggaagacgagccugcccaaauguuggcucgugucuaacggauccuaccugaaugaaacacauuucagcgacgauaucgagcagcaagccgacaacaugauuaccgagaugcuucagaaggaauauauggagcgccagggcaaaaccccucuggggcucgucgaucuguuuguuuucucuaccagcuuuuaccugaucuccaucuuccuucaccucgugaagauuccgugaggacuagucccuguucccagagcccacuuuuuuuucuuuuuuugaaauaaaauagccugucuuucagaucucaaaggcucuuuucagagccaccaaaaaaaaaaaaaaaaaaaaaaaaaaaaaaaaaaaaaaaaaaaaaaaaaaaaaaaaaaaaaaaaaaaaaaaaaaaaaaaaaaaaaaaaaaaaaaaaaaaaa

SEQ ID NO: 42402 - RNA, 1653 nt, Artificial Sequence
  mRNA product Design a-2 (hSL-A100) comprising derived and/or modified sequence from LASV(LM776-SLE-2012;Clade IV)__AIT17824__GPCmut13 (opt5)
aggagaguccgcucagccagguugcagaagcggcuuagcguguguccuaaucuucucucugcguguagguaggccugugccgcaaacaagcuuaccaugggccagaucgugaccuucuuucaagaggucccccacguuauugaagaggugaugaacaucgugcugauugcccucagcauccuggcuguccuuaaggggcuguacaauuucgccacaugcggacucgugggccugguuacguuucuucugcucugugggagauccugcaccacaucuguguauaaaggagucuacgaacugcagacccuggagcucaacauggaaacacugaauaugaccaugccucuuagcuguacaaagaacaauucccaucacuauauuauggugggcaacgagaccgggcuggagcucacgcugaccaauacaucuaucaucaaccauaaauucugcaaucuuagcgacgcgcacaagaaaaaccuguacgaucaugcucucauguccauuaucucuaccuuucaccugagcauuccgaauuucaaccaguaugaagccauguccugugacuuuaauggaggcaagaucagcguucaguacaaccugucucacuccuaugccggcgaugcugccaaucauugcgggacaguggcuaacggaguccuccaaaccuucaugcggauggccuggggcgggagcuacauugcgcuggacucuggacacggcaagugggauuguaucaugacguccuaccaguaucuuauuauccagaacacaaccugggaggaccauugccaguuuagccgccccucuccuaucggguaccugggacuccugucccaaagaacacgggauauuuauaucagccgcagacuucugggcaccuucaccuggacacucuccgacucugaaggcaaagauacgcccgggggauacugucugacccgguggaugcugauugaggccgagcucaagugcuuuggcaauacagcuguggccaaauguaacgaaaagcacgacgaggaguucugcgauaugcugcgccuuuuugacuucaauaaacaggcuauccagagacugaaggccgaagcgcagaugagcauucaacucaucaacaaggccgugaaugcucugaucaacgaucagcuuauuaugaaaaaucaucugcgggacaucauggggauuccuuauugcaacuacuccaaguauugguaccucaaucacaccacaaccggaaaaacgagccugcccaaguguuggcuggucucuaacggcuccuaccucaaugaaacacacuucagcgacgauaucgagcagcaagccgacaacaugauuaccgagaugcugcagaaagaauauauggagcgccaggggaagaccccucuuggacugguugaucucuuuguguucucuaccagcuuuuaccugaucuccaucuuccugcaucuugugaaaauuccgugaggacuagucccuguucccagagcccacuuuuuuuucuuuuuuugaaauaaaauagccugucuuucagaucucaaaggcucuuuucagagccaccaaaaaaaaaaaaaaaaaaaaaaaaaaaaaaaaaaaaaaaaaaaaaaaaaaaaaaaaaaaaaaaaaaaaaaaaaaaaaaaaaaaaaaaaaaaaaaaaaaaaa

SEQ ID NO: 42403 - RNA, 1653 nt, Artificial Sequence
  mRNA product Design a-2 (hSL-A100) comprising derived and/or modified sequence from LASV(Mad39;Clade IV)__ANH09722__GPCmut13 (opt5)
aggagaguccgcucagccagguugcagaagcggcuuagcguguguccuaaucuucucucugcguguagguaggccugugccgcaaacaagcuuaccaugggccagaucgugaccuucuuucaagaggucccccacguuauugaagaggugaugaacaucgugcugauugcccucagcauccuggcuguccuuaaggggcuguacaauguggccacaugcggacucauuggccugguuacguuccuucugcucugugggagauccugcaccacaacccuguauaaaggaguguacgaacugcaggcgcucgagcugaacauggaaacacuuaauaugaccaugccucugucuuguacaaagaacaauagccaucacuauauccgggucggcaacgagaccgggcucgagcugacgcuuaccaauacaucccugaucaaccauaaauuuugcaaucucucugacgcucacaagaaaaaccuguacgaucaugcccugaugagcauuaucuccaccuuccaccucucuauuccgaauuuuaaccaguaugaagccaugagcugugacuucaaugauggaaagaucuccgugcaguacaaccugagccacacauaugcuggcgacaccgccaaucauugcggcacgguugcuaacggggugcuucaaacauuuaugcgcauggccuggggaggcucuuacauugcgcuggauuccgggagaggaggcugggacuguaucaugaccagcuaccaguaucucauuauccagaacacaaccugggaggaucacugccaguucucucggcccuccccuaucggguaccugggacuucugagccaacgcaccagagacauuuauaucucucggcgccuccugggcacauuuacguggacccuguccgauagcgaaggcaaggacacacccgggggauacugucucaccagauggaugcugauugaggccgagcuuaaaugcuucggcaauacagcugucgccaaguguaacgaaaaacaugaugaggaauuuugcgacaugcugcgccucuucgauuuuaauaagcaggcuauccagcggcugaaagccgaggcgcagauguccauucaacuuaucaacaaggccgugaaugcucugaucaacgaccagcucauuaugaagaaucaccugagagacaucauggggauuccuuauugcaacuacucuaaauauugguaccugaaucacaccgugacgggaaagacaagccuccccaaauguuggcuggucuccaacggcagcuaccuuaaugaaacccauuucucugaugacaucgagcagcaagccgauaacaugauuaccgagaugcugcagaaggaauauauggagcggcaggggaaaacaccucucggacugguugaccuguucguguuuuccaccagcuucuaccuuaucucuaucuuucuccaccuggugaagauuccgugaggacuagucccuguucccagagcccacuuuuuuuucuuuuuuugaaauaaaauagccugucuuucagaucucaaaggcucuuuucagagccaccaaaaaaaaaaaaaaaaaaaaaaaaaaaaaaaaaaaaaaaaaaaaaaaaaaaaaaaaaaaaaaaaaaaaaaaaaaaaaaaaaaaaaaaaaaaaaaaaaaaaa

SEQ ID NO: 42404 - RNA, 1653 nt, Artificial Sequence
  mRNA product Design a-2 (hSL-A100) comprising derived and/or modified sequence from LASV(Z0947-SLE-2011;Clade IV)__AIT17840__GPCmut13 (opt5)
aggagaguccgcucagccagguugcagaagcggcuuagcguguguccuaaucuucucucugcguguagguaggccugugccgcaaacaagcuuaccaugggccagaucgugaccuucuuucaagaggucccccacguuauugaagaggugaugaacaucgugcugauugcccucagcauccuggcuguccuuaaggggcuguacaauuucgccacaugcggacucgugggccugguuacguuucuucugcucugugggagauccugcaccauuucucuguauaaaggaguguacgaacugcagacacucgagcugaacauggaaacccuuaauaugacaaugccucugagcuguaccaagaacaauucccaucacuauaucauggucggcaacgagacagggcucgagcugacccuuacgaauaccucuaucauuaaccauaaauucugcaaucugagcgacgcgcacaagaaaaaccucuacgaucaugcucugauguccaucauuucuacauuucaccugagcaucccgaauuucaaccaguaugaagccauguccugugacuuuaauggaggcaagauuagcgugcaguacaaccucucucacuccuaugccggcgaugcugccaaucauugcgggaccguugcuaacggagugcugcaaacauucaugcggauggccuggggcgggagcuacaucgcgcuugacucuggacgcgauagaugggacuguauuaugaccuccuaccaguaucugaucauccagaacacgacaugggaggaucacugccaguuuagccggcccucuccuauuggcuaccucgggcugcuuucccaacgcaccagagacaucuauauuagccggcgccugcucggaacauucaccuggacccuguccgauucugaaggcaaggacacacccggcggguacugucugacgagauggaugcucaucgaggccgagcugaaaugcuuuggaaauaccgcugucgccaaguguaacgaaaaacaugaugaggaguucugcgacaugcuucggcuguuugauuucaauaagcaggcuauucagcgccucaaagccgaagcgcagaugagcauccaacugaucaacaaggccgugaaugcucuuauuaacgaccagcugaucaugaagaaucaccucagagacauuaugggcaucccuuauugcaacuacuccaaauauugguaccugaaucacacaaccacagggaagaccagccugcccaaauguuggcucgugucuaacggauccuaccugaaugaaacgcauuucagcgaugacauugagcagcaagccgauaacaugaucacagagaugcuucagaaggaauauauggagcggcagggcaaaaccccucuggggcucgucgaccuguuuguuuucucuaccagcuuuuaccugaucuccauuuuccuucaccucgugaagaucccgugaggacuagucccuguucccagagcccacuuuuuuuucuuuuuuugaaauaaaauagccugucuuucagaucucaaaggcucuuuucagagccaccaaaaaaaaaaaaaaaaaaaaaaaaaaaaaaaaaaaaaaaaaaaaaaaaaaaaaaaaaaaaaaaaaaaaaaaaaaaaaaaaaaaaaaaaaaaaaaaaaaaaa

SEQ ID NO: 42405 - RNA, 1629 nt, Artificial Sequence
  mRNA product Design a-2 (A100) comprising derived and/or modified sequence from LASV(Josiah;Clade IV)__NP_694870__GPCmut13 (opt1)
aggagaguccgcucagccagguugcagaagcggcuuagcguguguccuaaucuucucucugcguguagguaggccugugccgcaaacaagcuuaccaugggccagaucgugaccuucuuccaggaggucccccacgugaucgaggaggugaugaacaucguccugaucgcccucagcgugcuggccgugcugaaggggcucuacaacuucgcgaccugcggccuggucgggcuggugacguuccuccugcugugcggccgcuccugcaccaccagccucuacaaggggguguacgagcugcagacccuggagcucaacauggagacgcugaacaugaccaugccgcuguccugcaccaagaacaacagccaccacuacaucauggucggcaacgagaccggccucgagcugacgcugaccaacaccuccaucaucaaccacaaguucugcaaccucagcgacgcccacaagaagaaccuguacgaccacgcccugauguccaucaucagcaccuuccaccucuccauccccaacuucaaccaguacgaggccaugagcugcgacuucaacgggggcaagaucuccgugcaguacaaccugagccacuccuacgccggggacgcggccaaccacugcggcacgguggccaacgggguccugcagaccuucaugcggauggccuggggcggcagcuacaucgcgcucgacuccgggcgcggcaacugggacugcaucaugaccagcuaccaguaccugaucauccagaacaccacgugggaggaccacugccaguucucccggcccagccccaucggguaccugggccuccugucccagcgcacccgggacaucuacaucagccgccggcugcucggcaccuucaccuggacgcugagcgacuccgaggggaaggacaccccgggcggguacugccugacccgcuggaugcucaucgaggccgagcugaagugcuucggcaacaccgccguggccaagugcaacgagaagcacgacgaggaguucugcgacaugcugcggcuguucgacuucaacaagcaggccauccagcgccugaaggcggaggcccagaugagcauccagcugaucaacaaggccgugaacgcccucaucaacgaccagcugaucaugaagaaccaccuccgggacaucauggggauccccuacugcaacuacuccaaguacugguaccucaaccacacgaccaccggccgcaccagccugcccaagugcuggcuggucuccaacggcagcuaccucaacgagacgcacuucuccgacgacaucgagcagcaggccgacaacaugaucaccgagaugcugcagaaggaguacauggagcggcaggggaagacgccccugggccucguggaccuguucguguucagcaccuccuucuaccugaucagcaucuuccugcaccucgucaagaucccgugaggacuagucccuguucccagagcccacuuuuuuuucuuuuuuugaaauaaaauagccugucuuucagaucuaaaaaaaaaaaaaaaaaaaaaaaaaaaaaaaaaaaaaaaaaaaaaaaaaaaaaaaaaaaaaaaaaaaaaaaaaaaaaaaaaaaaaaaaaaaaaaaaaaaa

SEQ ID NO: 42406 - RNA, 1626 nt, Artificial Sequence
  mRNA product Design a-2 (A100) comprising derived and/or modified sequence from LASV(LP;Clade I)__AAF86701__GPCmut13 (opt1)
aggagaguccgcucagccagguugcagaagcggcuuagcguguguccuaaucuucucucugcguguagguaggccugugccgcaaacaagcuuaccaugggccagaucaucaccuucuuccaggaggugccccacgucaucgaggaggugaugaacaucgugcugaucgcccucagccugcuggccauccucaaggggcuguacaacaucgcgaccugcggcaucaucgggcuggucgccuuccucuuccugugcggcaaguccugcagccugacgcucaagggcggguacgagcugcagacccuggagcucaacauggagacccugaacaugaccaugccgcuguccugcacgaagaacagcucccaccacuacauccgcgugggcaacgagaccgggcucgagcugacccugaccaacacgagcaucaucaaccacaaguucugcaaccucuccgacgcccacaagaagaaccuguacgaccacgcccugaugagcaucaucuccaccuuccaccucagcauccccaacuucaaccaguacgaggccauguccugcgacuucaacggcgggaagaucagcgugcaguacaaccugucccacagcuacgcgggcgacgccgccgagcacugcgggaccgucgccaacggcgugcugcagaccuucaugcggauggcguggggcgggcgcuacaucgcccucgacuccggcaaggggaacugggacugcaucaugacgagcuaccaguaccugaucauccagaacaccaccugggaggaccacugccaguucucccggcccagccccaucggcuaccugggccuccugucccagcgcacccgggacaucuacaucagccgccggcugcucgggacguucaccuggacccugagcgacuccgagggcaacgagacccccgggggcuacugccugacgcgcuggaugcucaucgaggccgagcugaagugcuucgggaacaccgccguggccaagugcaacgagaagcacgacgaggaguucugcgacaugcugcggcuguucgacuucaacaagcaggcgauccgccggcugaaggccgaggcccagaugagcauccagcugaucaacaaggccgucaacgcccucaucaacgaccagcugaucaugaagaaccaccuccgcgacaucaugggcauccccuacugcaacuacuccaaguacugguaccucaaccacaccagcuccggccggaccagccugcccaagugcuggcugaucuccaacgggagcuaccucaacgagacgcaguucuccgacgacaucgagcagcaggcggacaacaugaucaccgagaugcugcagaaggaguacaucgagcgccagggcaagaccccgcuggggcucguggacaucuucaucuucagcaccuccuucuaccugaucagcaucuuccugcaccugaucaagaucccgugaggacuagucccuguucccagagcccacuuuuuuuucuuuuuuugaaauaaaauagccugucuuucagaucuaaaaaaaaaaaaaaaaaaaaaaaaaaaaaaaaaaaaaaaaaaaaaaaaaaaaaaaaaaaaaaaaaaaaaaaaaaaaaaaaaaaaaaaaaaaaaaaaaaaa

SEQ ID NO: 42407 - RNA, 1626 nt, Artificial Sequence
  mRNA product Design a-2 (A100) comprising derived and/or modified sequence from LASV(803213;Clade II)__AAF86703__GPCmut13 (opt1)
aggagaguccgcucagccagguugcagaagcggcuuagcguguguccuaaucuucucucugcguguagguaggccugugccgcaaacaagcuuaccaugggccagaucaucaccuucuuccaggaggugccccacgucaucgaggaggugaugaacaucgugcugaucgcccucagccugcuggccauccucaaggggaucuacaacgucgcgaccugcggccuguucgggcugaucuccuuccuccugcugugcggccgcagcugcuccgugacguacaaggggguguacgagcuccagacccuggagcugaacauggccaaccucaacaugaccaugccgcugagcugcaccaagaacaacucccaccacuacaucauggucggcaacgagacgggccuggagcucacccugaccaacaccagcaucaucaaccacaaguucugcaaccuguccgacgcccacaagaagaaccucuacgaccacgcccugaugagcaucaucuccacguuccaccugagcauccccaacuucaaccaguacgaggccauguccugcgacuucaacgggggcaagaucagcgugcaguacaaccucucccacagcuucgcgguggacgccgccaaccacugcgggaccaucgccaacggcguccugcagaccuucaugcggauggcguggggcggguccuacaucgcccuggacagcggcaaggggaacugggacugcaucaugaccuccuaccaguaccucaucauccagaacacgaccugggaggaccacugccaguucagccgccccucccccaucggcuaccuggggcugcucagccagcggacccgcgacaucuacaucagccggcgccugcugggcaccuucacguggacccucuccgacagcgagggcaacgaggcccccgggggcuacugccugacccgguggaugcugaucgaggccgagcucaagugcuucgggaacaccgccguggcgaagugcaacgagaagcacgacgaggaguucugcgacaugcugcgccuguucgacuucaacaagcaggccaucaagcggcucaagacggaggcccagauguccauccagcugaucaacaaggccgugaacgcccugaucaacgaccagcucaucaugaagaaccaccuccgcgacaucaugggcauccccuacugcaacuacagccgguacugguaccugaaccacaccgucaccgggaagaccucccugccccgcugcuggcuggugagcaacggcuccuaccugaacgagacgcacuucagcgacgacaucgagcagcaggcggacaacaugaucaccgagaugcuccagaaggaguacauggaccggcagggcaagaccccgcuggggcugguggaccucuucgucuucuccaccagcuucuaccugaucuccaucuuccugcaccuggugaagaucccgugaggacuagucccuguucccagagcccacuuuuuuuucuuuuuuugaaauaaaauagccugucuuucagaucuaaaaaaaaaaaaaaaaaaaaaaaaaaaaaaaaaaaaaaaaaaaaaaaaaaaaaaaaaaaaaaaaaaaaaaaaaaaaaaaaaaaaaaaaaaaaaaaaaaaa

SEQ ID NO: 42408 - RNA, 1626 nt, Artificial Sequence
  mRNA product Design a-2 (A100) comprising derived and/or modified sequence from LASV(GA391;Clade III)__CAA36645__GPCmut13 (opt1)
aggagaguccgcucagccagguugcagaagcggcuuagcguguguccuaaucuucucucugcguguagguaggccugugccgcaaacaagcuuaccaugggccagaucgugaccuucuuccaggaggucccccacgugaucgaggaggugaugaacaucguccugaucgcccucagcauccuggccauccugaaggggcucuacaacguggcgaccugcggccugaucgggcuggugacguuccuccugcuguccggccgcagcugcucccucaucuacaaggggaccuacgagcugcagacccuggagcucaacauggagacccugaacaugacgaugccgcugagcugcaccaagaacaacucccaccacuacauccgggucggcaacgagaccggccucgagcugacccugacgaacaccagcauccucaaccacaaguucugcaaccuguccgacgcccacaagcgcaaccuguacgaccacagccucauguccaucaucagcaccuuccaccuguccauccccaacuucaaccaguacgaggccaugagcugcgacuucaacgggggcaagaucaccgugcaguacaaccugucccacagcuucgccguggacgccgcggggcacugcggcacgcucgccaacgggguccugcagaccuucaugcggauggccuggggcggcuccuacaucgcccuggacagcgggcgcggcaacugggacugcaucaugaccuccuaccaguaccucaucauccagaacaccacgugggacgaccacugccaguucagccggcccucccccaucggguaccugggccugcucagccagcgcacccgggacaucuacaucagccgccggcugcugggcaccuucaccuggacgcucuccgacagcgaggggaacgagaccccgggcggguacugccugacccgcuggaugcugaucgaggcggagcucaagugcuucggcaacaccgccguggccaagugcaacgagaagcacgacgaggaguucugcgacaugcugcggcuguucgacuucaacaagcaggccauccgccggcucaagacggaggcccagauguccauccagcugaucaacaaggcggugaacgcccugaucaacgaccagcucaucaugaagaaccaccuccgcgacaucauggggauccccuacugcaacuacagccgguacugguaccugaaccacaccuccaccggcaagaccagccugccccgcugcuggcugaucuccaacggcagcuaccugaacgagacgaaguucuccgacgacaucgagcagcaggccgacaacaugaucaccgagaugcuccagaaggaguacaucgaccggcaggggaagacgccccugggccuggucgaccuguucguguucagcaccuccuucuaccucaucagcaucuuccugcaccuggugaagaucccgugaggacuagucccuguucccagagcccacuuuuuuuucuuuuuuugaaauaaaauagccugucuuucagaucuaaaaaaaaaaaaaaaaaaaaaaaaaaaaaaaaaaaaaaaaaaaaaaaaaaaaaaaaaaaaaaaaaaaaaaaaaaaaaaaaaaaaaaaaaaaaaaaaaaaa

SEQ ID NO: 42409 - RNA, 1629 nt, Artificial Sequence
  mRNA product Design a-2 (A100) comprising derived and/or modified sequence from LASV(AV;Clade V)__CCA30314__GPCmut13 (opt1)
aggagaguccgcucagccagguugcagaagcggcuuagcguguguccuaaucuucucucugcguguagguaggccugugccgcaaacaagcuuaccaugggccagaucgugaccuucuuccaggaggucccccacgugaucgaggaggugaugaacaucguccugaucgcccucagcauccuggccgugcugaaggggcucuacaacaucgcgaccugcggccugaucgggcugaucacguuccuccugcugugcggccgcuccugcagcuccaaccucuacaaggggguguacgagcugcagagccuggaccucaacauggagacccugaacaugaccaugccgcuguccugcaccaagaacaacagccaccacuacauccgggucggcaacgacacgggccucgagcugacccugaccaacaccuccauccucaaccacaaguucugcaaccugagcgacgcccacaagaaggaccuguacgaccacgcccucauguccaucaucagcacguuccaccuguccauccccaacuucaaccaguacgaggccaugagcugcgacuucaacgggggcaagaucuccgugcaguacaaccugagccacuccuacgccaucgacgcggccaaccacugcgggaccguggccaacggcauccuccagaccuucaugcgcauggccuggggcgggagcuacaucgcgcuggacuccggccgggggaacugggacugcaucaugaccagcuaccaguaccugaucauccagaacacgaccugggagaaccacugccaguucucccgccccagccccaucggcuaccucgggcugcugagccagcggacccgcgacaucuacaucucccggcgccuccugggcaccuucacguggacccugagcgacuccgagggcaacgccacccccgggggcuacugccucacccgguggaugcugaucgaggccgagcugaagugcuucgggaacacggccgucgccaagugcaacgagaagcacgacgaggaguucugcgacaugcuccgccuguucgacuucaacaagcaggcgaucagccggcugaaguccgaggcccagaugagcauccagcucaucaacaaggccgugaacgcccugaucaacgaccagcugaucaugaagaaccaccuccgcgacaucaugggcauccccuacugcaacuacuccaaguacugguaccugaaccacaccaucaccgggaagaccagccugcccaagugcuggcucguguccaacggcagcuaccugaacgagacgcacuucuccgacgacaucgagcagcaggccgacaacaugaucaccgagaugcugcagaaggaguacauggagcggcagggcaagaccccgcucgggcuggucgaccuguucguguucagcaccuccuucuaccugaucagcaucuuccuccgccuggugaagaucccgugaggacuagucccuguucccagagcccacuuuuuuuucuuuuuuugaaauaaaauagccugucuuucagaucuaaaaaaaaaaaaaaaaaaaaaaaaaaaaaaaaaaaaaaaaaaaaaaaaaaaaaaaaaaaaaaaaaaaaaaaaaaaaaaaaaaaaaaaaaaaaaaaaaaaa

SEQ ID NO: 42410 - RNA, 1626 nt, Artificial Sequence
  mRNA product Design a-2 (A100) comprising derived and/or modified sequence from LASV(Togo/2016/7082;Clade VI)__AMR44577__GPCmut13 (opt1)
aggagaguccgcucagccagguugcagaagcggcuuagcguguguccuaaucuucucucugcguguagguaggccugugccgcaaacaagcuuaccaugggccagaucaucaccuucuuccaggaggugccccacgucaucgaggaggugaugaacaucgugcugaucgcccucagccugcuggccauccucaagggggucuacaacguggcgaccugcggcaucaucgggcuggugacguuccuguuccucugcggccgcuccugcagccugaucuacaagggguccuacgagcugcagacccucgagcugaacauggagacccugaacaugaccaugccgcucagcugcacgaagaacuccagccaccacuacauccgggucggcaacgagaccggccuggagcugacccucaccaacacguccaucaucaaccacaaguucugcaaccugagcgacgcccacaagcgcaaccuguacgaccacgcccucauguccauccugagcaccuuccaccuguccauccccaacuucaaccaguacgaggccaugagcugcgacuucaacgggggcaagaucuccgugcaguacaaccucagccacgccuacgcgguggacgccgccgagcacugcgggaccgucgccaacggcgugcugcagaccuucaugcggauggcguggggcggguccuacaucgcccuggacagcggccgcgggaacugggacugcaucaugacguccuaccaguaccucaucauccagaacaccaccugggaggaccacugccaguucagccggcccucccccaucggcuaccuggggcugcucagccagcgcacccgggacaucuacaucagccgccggcugcugggcacguucaccuggacccucuccgacagcgagggcaacgagacccccgggggcuacugccugacgcgcuggaugcugaucgaggccgagcucaagugcuucgggaacaccgccguggccaagugcaacgagaagcacgacgaggaguucugcgacaugcugcggcuguucgacuucaacaagcaggcgauccagcgccucaaguccgaggcccagaugagcauccagcugaucaacaaggccgucaacgcccugaucaacgaccagcucaucaugaagaaccaccuccgggacaugaugggcauccccuacugcaacuacuccaaguacugguaccugaaccacaccagcuccgggcgcaccagccugcccaagugcuggcugguguccaacggcagcuaccugaacgagacgcacuucuccgacgacaucgagcagcaggccgacaacaugaucaccgagaugcuccagaaggaguacaucgaccggcagggcaagaccccgcuggggcugguggaccucuucgucuucagcaccuccuucuaccugaucagcaucuuccugcaccugaucaagaucccgugaggacuagucccuguucccagagcccacuuuuuuuucuuuuuuugaaauaaaauagccugucuuucagaucuaaaaaaaaaaaaaaaaaaaaaaaaaaaaaaaaaaaaaaaaaaaaaaaaaaaaaaaaaaaaaaaaaaaaaaaaaaaaaaaaaaaaaaaaaaaaaaaaaaaa

SEQ ID NO: 42411 - RNA, 1626 nt, Artificial Sequence
  mRNA product Design a-2 (A100) comprising derived and/or modified sequence from LASV(KAK-428;Clade n.d. (VII))__ANH09740__GPCmut13 (opt1)
aggagaguccgcucagccagguugcagaagcggcuuagcguguguccuaaucuucucucugcguguagguaggccugugccgcaaacaagcuuaccaugggccagaucgugaccuucuuccaggaggucccccacgugaucgaggaggugaugaacaucguccugaucgcccucagccugcuggccauccucaaggggcuguacaacuucgcgaccugcggcgugaucgggcugaucacguuccuccugcugugcggccgcuccugcagcgccaccuacaaggggcaguacgagcuccagacccuggagcugaacauggagucccucaacaugaccaugccgcugagcugcacgaagaacaacucccaccacuacauccgggccggcaacaacaccggccuggagcucacccugaccaacacgagcaucaucucccacaaguucugcaaccugagcgacgcccacaagaagaaccucuacgaccacacccugauguccaucaucaccaccuuccaccugagcauccccaacuucaaccaguacgaggccauguccugcgacuucaacgggggcaagaucagcauccaguacaaccucucccacagcuacgcgggggacgccgcccagcacugcggcacgguggccaacgggguccugcagaccuucaugcgcauggcguggggcggcuccuaccuggcccucgacagcgggcggcgcggcugggacugcaucaucuccagcuaccaguaccugaucauccagaacaccaccugggacgaccacugccaguucucccggcccagccccaucggguaccugggcuucgugagccagaagacgcgcgacaucuacaucucccggcgccuccugggcaccuucaccuggacccugagcgacuccgaggggcacgacaugccgggcggguacugccucacgcgguggaugcugaucgaggccgaccugaagugcuucggcaacaccgccguggccaagugcaacgagaagcacgacgaggaguucugcgacauguggcgccucuucgacuucaacaagcaggcgauccagcggcugaaggccgaggcccagaugaacauccagcugaucaacaaggccgucaacgcccucaucaacgaccagcugaugaugaagaaccaccuccgcgacaucauggggauccccuacugcaacuacagcaaguucugguaccugaacaacaccaccacgggccggaccucccugccccgcugcuggcugaucagcaacggcuccuaccucaacgagacccacuucagcgacgacaucgagcagcaggcggacaacaugaucaccgagaugcugcagaaggaguacauggaccggcaggggaagacgccccugggccucguggaccuguucguguucuccaccagcuucuaccugaucaccaucuuccuccaccuggucaagaucccgugaggacuagucccuguucccagagcccacuuuuuuuucuuuuuuugaaauaaaauagccugucuuucagaucuaaaaaaaaaaaaaaaaaaaaaaaaaaaaaaaaaaaaaaaaaaaaaaaaaaaaaaaaaaaaaaaaaaaaaaaaaaaaaaaaaaaaaaaaaaaaaaaaaaaa

SEQ ID NO: 42412 - RNA, 1626 nt, Artificial Sequence; identical to SEQ ID NO: 42406
  mRNA product Design a-2 (A100) comprising derived and/or modified sequence from LASV(Pinneo-NIG-1969;Clade I)__AIT17836__GPCmut13 (opt1)

SEQ ID NO: 42413 - RNA, 1626 nt, Artificial Sequence
  mRNA product Design a-2 (A100) comprising derived and/or modified sequence from LASV(ISTH0009-NIG-2011;Clade II)__AIT17404__GPCmut13 (opt1)
aggagaguccgcucagccagguugcagaagcggcuuagcguguguccuaaucuucucucugcguguagguaggccugugccgcaaacaagcuuaccaugggccagaucaucaccuucuuccaggaggugccccacgucaucgaggaggugaugaacaucgugcugaucgcccucagccugcuggccauccucaaggggaucuacaacgucgcgaccugcggccuguucgggcugguguccuuccuccugcugugcggccgcagcugcuccacgaccuacaaggggguguacgagcuccagacccuggagcuggacauggccagccucaacaugaccaugccgcuguccugcacgaagaacaacagccaccacuacaucauggucggcaacgagaccggccuggagcucacccugaccaacacguccaucaucaaccacaaguucugcaaccugagcgacgcccacaagaagaaccucuacgaccacgcccugauguccaucaucagcaccuuccaccuguccauccccaacuucaaccaguacgaggccaugagcugcgacuucaacgggggcaagaucuccgugcaguacaaccucagccacgcguacgccguggacgccgccaaccacugcgggaccaucgcgaacggcguccugcagaccuucaugcggauggccuggggcggguccuacaucgcccuggacagcggcaagggguccugggacugcaucaugacgagcuaccaguaccucaucauccagaacaccaccugggaggaccacugccaguucucccgccccagccccaucggcuaccuggggcugcucagccagcggacccgcgacaucuacaucucccggcgccugcugggcacguucaccuggacccucagcgacuccgagggcaacgagacccccgggggcuacugccugacgcgguggaugcugaucgaggccgagcucaagugcuucgggaacaccgccguggcgaagugcaacgagaagcacgacgaggaguucugcgacaugcugcgccuguucgacuucaacaagcaggccauccggcgccucaagaccgaggcccagaugagcauccagcugaucaacaaggccgugaacgcccugaucaacgaccagcucaucaugaagaaccaccuccgggacaucaugggcaucccguacugcaacuacuccaaguacugguaccugaaccacaccgucacggggaagaccagccugccccgcugcuggcugguguccaacggcagcuaccugaacgagacccacuucuccgacgacaucgagcagcaggcggacaacaugaucaccgagcuccugcagaaggaguacauggaccggcagggcaagacgccccuggggcucguggaccuguucgucuucagcaccuccuucuaccugaucagcaucuuccugcaccucaucaagaucccgugaggacuagucccuguucccagagcccacuuuuuuuucuuuuuuugaaauaaaauagccugucuuucagaucuaaaaaaaaaaaaaaaaaaaaaaaaaaaaaaaaaaaaaaaaaaaaaaaaaaaaaaaaaaaaaaaaaaaaaaaaaaaaaaaaaaaaaaaaaaaaaaaaaaaa

SEQ ID NO: 42414 - RNA, 1626 nt, Artificial Sequence
  mRNA product Design a-2 (A100) comprising derived and/or modified sequence from LASV(ISTH2010-NIG-2012;Clade II)__AIT17482__GPCmut13 (opt1)
aggagaguccgcucagccagguugcagaagcggcuuagcguguguccuaaucuucucucugcguguagguaggccugugccgcaaacaagcuuaccaugggccagaucaucaccuucuuccaggaggugccccacgucaucgaggaggugaugaacaucgugcugaucgcccucagccugcuggccauccucaaggggaucuacaacgucgcgaccugcggccuguucgggcugguguccuuccuccugcugugcggccgcagcugcuccacgaccuacaaggggguguacgagcuccagacccuggagcuggacauggccagccucaacaugaccaugccgcuguccugcacgaagaacaacagccaccacuacaucauggucggcaacgagaccggccuggagcucacccugaccaacacguccaucaucaaccacaaguucugcaaccugagcgacgcccacaagaagaaccucuacgaccacgcccugauguccaucaucagcaccuuccaccuguccauccccaacuucaaccaguacgaggccaugagcugcgacuucaacgggggcaagaucuccgugcaguacaaccucagccacgcguacgccguggacgccgccaaccacugcgggaccaucgcgaacggcguccugcagaccuucaugcggauggccuggggcggguccuacaucgcccuggacagcggcaagggguccugggacugcaucaugacgagcuaccaguaccucaucauccagaacaucaccugggaggaccacugccaguucucccgccccagccccaucggcuaccuggggcugcucagccagcggacccgcgacaucuacaucucccggcgccugcugggcaccuucacguggacccucagcgacuccgagggcaacgagacccccgggggcuacugccugacccgguggaugcugaucgaggccgagcucaagugcuucgggaacacggccguggcgaagugcaacgagaagcacgacgaggaguucugcgacaugcugcgccuguucgacuucaacaagcaggccauccggcgccucaagaccgaggcccagaugagcauccagcugaucaacaaggccgugaacgcccugaucaacgaccagcucaucaugaagaaccaccuccgggacaucaugggcauccccuacugcaacuacuccaaguacugguaccugaaccacaccgucaccgggaagacgagccugccccgcugcuggcugguguccaacggcagcuaccugaacgagacccacuucuccgacgacaucgagcagcaggcggacaacaugaucaccgagcuccugcagaaggaguacaucgaccggcagggcaagaccccgcuggggcucguggaccuguucgucuucagcacguccuucuaccugaucagcaucuuccugcaccucgugaagaucccgugaggacuagucccuguucccagagcccacuuuuuuuucuuuuuuugaaauaaaauagccugucuuucagaucuaaaaaaaaaaaaaaaaaaaaaaaaaaaaaaaaaaaaaaaaaaaaaaaaaaaaaaaaaaaaaaaaaaaaaaaaaaaaaaaaaaaaaaaaaaaaaaaaaaaa

SEQ ID NO: 42415 - RNA, 1626 nt, Artificial Sequence
  mRNA product Design a-2 (A100) comprising derived and/or modified sequence from LASV(Lassa virus/H.sapiens-wt/NGA/2015/ISTH_0543;Clade II)__AVO03639__GPCmut13 (opt1)
aggagaguccgcucagccagguugcagaagcggcuuagcguguguccuaaucuucucucugcguguagguaggccugugccgcaaacaagcuuaccaugggccagaucaucaccuucuuccaggaggugccccacgucaucgaggaggugaugaacaucgugcugaucgcccucagccugcuggccauccucaaggggaucuacaacgucgcgaccugcggccuguucgggcugguguccuuccuccugcugugcggccgcagcugcuccacgaccuacaaggggguguacgagcuccagacccuggagcuggacauggccaaccucaacaugaccaugccgcugagcugcacgaagaacaacucccaccacuacaucauggucggcaacgagaccggccuggagcucacccugaccaacacgagcaucaucaaccacaaguucugcaaccuguccgacgcccacaagaagaaccucuacgaccacgcccugaugagcaucaucuccaccuuccaccugagcauccccaacuucaaccaguacgaggccauguccugcgacuucaacgggggcaagaucagcgugcaguacaaccucucccacaccuacgcgguggacgccgccaaccacugcgggaccaucgccaacggcguccugcagacguucaugcggauggcguggggcgggagcuacaucgcccuggacuccggcaaggggagcugggacugcaucaugaccuccuaccaguaccucgugauccagaacaccaccugggaggaccacugccaguucagccgccccucccccaucggcuaccuggggcugcucagccagcggacgcgcgacaucuacaucagccggcgccugcugggcaccuucaccuggacccucuccgacagcgagggcaacgagacgcccgggggcuacugccugacccgguggaugcugaucgaggccgagcucaagugcuucgggaacaccgccguggccaagugcaacgagaagcacgacgaggaguucugcgacaugcugcgccuguucgacuucaacaagcaggcgauccggcgccucaagaccgaggcccagauguccauccagcugaucaacaaggccgucaacgcccugaucaacgaccagcucaucaugaagaaccaccuccgggacaucaugggcauccccuacugcaacuacagcaaguacugguaccugaaccacacggugaccgggaagaccucccugccccgcugcuggcuggugagcaacggcuccuaccugaacgagacccacuucagcgacgacaucgagcagcaggccgacaacaugaucacggagcuccugcagaaggaguacaucgaccggcagggcaagaccccgcuggggcucgucgaccuguucguguucuccaccagcuucuaccugaucuccaucuuccugcaccucgugaagaucccgugaggacuagucccuguucccagagcccacuuuuuuuucuuuuuuugaaauaaaauagccugucuuucagaucuaaaaaaaaaaaaaaaaaaaaaaaaaaaaaaaaaaaaaaaaaaaaaaaaaaaaaaaaaaaaaaaaaaaaaaaaaaaaaaaaaaaaaaaaaaaaaaaaaaaa

SEQ ID NO: 42416 - RNA, 1626 nt, Artificial Sequence
  mRNA product Design a-2 (A100) comprising derived and/or modified sequence from LASV(Lassa virus/H.sapiens-wt/NGA/2016/ISTH_0009;Clade II)__AVO03571__GPCmut13 (opt1)
aggagaguccgcucagccagguugcagaagcggcuuagcguguguccuaaucuucucucugcguguagguaggccugugccgcaaacaagcuuaccaugggccagaucaucaccuucuuccaggaggugccccacgucaucgaggaggugaugaacaucgugcugaucgcccucagccugcuggccauccucaaggggaucuacaacgucgcgaccugcggccugcuggggcucguguccuuccugcugcucugcggccgcagcugcuccacgaccuacaaggggguguacgagcugcagacccuggagcucgacauggccagccugaacaugaccaugccgcuguccugcacgaagaacaacagccaccacuacaucauggucggcaacgagaccggccucgagcugacccugaccaacacguccaucaucaaccacaaguucugcaaccucagcgacgcccacaagaagaaccuguacgaccacgcccugauguccaucaucagcaccuuccaccucuccauccccaacuucaaccaguacgaggccaugagcugcgacuucaacgggggccggaucuccgugcaguacaaccugagccacuccuacgcgguggacgccgccaaccacugcgggaccaucgccaacggcguccugcagaccuucaugcgcauggcguggggcgggagcuacaucgcccucgacuccggcaaggggagcugggacugcaucaugacguccuaccaguaccugaucauccagaacaccaccugggaggaccacugccaguucagccggcccagccccaucggcuaccuggggcuccugucccagcgcacccgggacaucuacaucagccgccggcugcucggcacguucaccuggacccuguccgacagcgagggcaacgagacccccgggggcuacugccugacgcgcuggaugcucaucgaggccgagcugaagugcuucgggaacaccgccguggccaagugcaacgagaagcacgacgaggaguucugcgacaugcugcggcuguucgacuucaacaagcaggcgauccgccggcugaagaccgaggcccagauguccauccagcugaucaacaaggccgugaacgcccucaucaacgaccagcugaucaugaagaaccaccuccgcgacaucaugggcaucccguacugcaacuacagcaaguacugguaccucaaccacaccgucacggggaagaccucccugccccggugcuggcuggugagcaacggcuccuaccucaacgagacccacuucagcgacgacaucgagcagcaggccgacaacaugaucaccgagcugcugcagaaggaguacaucgaccgccagggcaagacgccccucgggcugguggaccuguucgucuucuccaccagcuucuaccugaucuccaucuuccuccaccuggugaagaucccgugaggacuagucccuguucccagagcccacuuuuuuuucuuuuuuugaaauaaaauagccugucuuucagaucuaaaaaaaaaaaaaaaaaaaaaaaaaaaaaaaaaaaaaaaaaaaaaaaaaaaaaaaaaaaaaaaaaaaaaaaaaaaaaaaaaaaaaaaaaaaaaaaaaaaa

SEQ ID NO: 42417 - RNA, 1626 nt, Artificial Sequence
  mRNA product Design a-2 (A100) comprising derived and/or modified sequence from LASV(Lassa virus/H.sapiens-wt/NGA/2016/ISTH_0017;Clade II)__AVO03567__GPCmut13 (opt1)
aggagaguccgcucagccagguugcagaagcggcuuagcguguguccuaaucuucucucugcguguagguaggccugugccgcaaacaagcuuaccaugggccagaucaucaccuucuuccaggaggugccccacgucaucgaggaggugaugaacaucgugcugaucgcccucagccugcuggccauccucaaggggaucuacaacgucgcgaccugcggccuguucgggcugguguccuuccuccugcugugcggccgcagcugcuccacgaccuacaaggggguguacgagcuccagacccuggagcuggacauggccagccucaacaugaccaugccgcuguccugcacgaagaacaacagccaccacuacaucauggucggcaacgagaccggccuggagcucacccugaccaacacguccaucaucaaccacaaguucugcaaccugagcgacgcccacaagaagaaccucuacgaccacgcccugauguccaucaucagcaccuuccaccuguccauccccaacuucaaccaguacgaggccaugagcugcgacuucaacgggggcaagaucuccgugcaguacaaccucagccacaccuacgcgaucgacgccgccaaccacugcgggaccaucgccaacggcgugcugcagacguucaugcggauggcguggggcggguccuacaucgcccuggacagcggcaagggguccugggacugcaucaugaccagcuaccaguaccucaucauccagaacaccaccugggaggaccacugccaguucucccgccccagccccaucggcuaccuggggcugcucagccagcggacgcgcgacaucuacaucucccggcgccugcugggcaccuucaccuggacccucagcgacuccgagggcaacgagacgcccgggggcuacugccugacccgguggaugcugaucgaggccgagcucaagugcuucgggaacaccgccgucgccaagugcaacgagaagcacgacgaggaguucugcgacaugcugcgccuguucgacuucaacaagcaggcgauccggcgccucaagaccgaggcccagaugagcauccagcugaucaacaaggccgugaacgcccugaucaacgaccagcucaucaugaagaaccaccuccgggacaucaugggcauccccuacugcaacuacuccaaguacugguaccugaaccacacggugaccgggaagaccagccugccccgcugcuggcuggucuccaacggcagcuaccugaacgagacccacuucuccgacgacaucgagcagcaggccgacaacaugaucacggagcuccugcagaaggaguacauggaccggcagggcaagaccccgcuggggcucguggaccuguucguguucagcaccuccuucuaccugaucagcaucuuccugcaccucguccgcaucccgugaggacuagucccuguucccagagcccacuuuuuuuucuuuuuuugaaauaaaauagccugucuuucagaucuaaaaaaaaaaaaaaaaaaaaaaaaaaaaaaaaaaaaaaaaaaaaaaaaaaaaaaaaaaaaaaaaaaaaaaaaaaaaaaaaaaaaaaaaaaaaaaaaaaaa

SEQ ID NO: 42418 - RNA, 1626 nt, Artificial Sequence
  mRNA product Design a-2 (A100) comprising derived and/or modified sequence from LASV(Lassa virus/H.sapiens-wt/NGA/2018/ISTH_0959;Clade II)__AVV65099__GPCmut13 (opt1)
aggagaguccgcucagccagguugcagaagcggcuuagcguguguccuaaucuucucucugcguguagguaggccugugccgcaaacaagcuuaccaugggccagaucaucaccuucuuccaggaggugccccacgucaucgaggaggugaugaacaucgugcugaucgcccucagccugcuggccauccucaaggggaucuacaacgucgugaccugcggccuguucgggcugguguccuuccuccugcugugcggccgcagcugcuccacgaccuacaagggggucuacgagcuccagacccuggagcuggacauggcgagccucaacaugaccaugccgcuguccugcacgaagaacaacagccaccacuacaucauggugggcaacgagaccggccuggagcucacccugaccaacacguccaucaucaaccacaaguucugcaaccugagcgacgcccacaagaagaaccucuacgaccacgcccugauguccaucaucagcaccuuccaccuguccauccccaacuucaaccaguacgaggccaugagcugcgacuucaacgggggcaagaucuccgugcaguacaaccucagccacgccuacgcgaucgacgccgccaaccacugcgggaccaucgccaacggcguccugcagaccuucaugcggauggcguggggcggguccuacaucgcccuggacagcggcaagggguccugggacugcaucaugacgagcuaccaguaccucaucauccagaacaccaccugggaggaccacugccaguucucccgccccagccccaucggcuaccuggggcugcucagccagcggacccgcgacaucuacaucucccggcgccugcugggcacguucaccuggacccucagcgacuccgagggcaacgagacccccgggggcuacugccugacgcgguggaugcugaucgaggccgagcucaagugcuucgggaacaccgccguggccaagugcaacgagaagcacgacgaggaguucugcgacaugcugcgccuguucgacuucaacaagcaggcgauccggcgccucaagaccgaggcccagaugagcauccagcugaucaacaaggccgugaacgcccugaucaacgaccagcucaucaugaagaaccaccuccgggacaucaugggcaucccguacugcaacuacuccaaguacugguaccugaaccacaccgucacggggaagaccagccugccccgcugcuggcugguguccaacggcagcuaccugaacgagacccacuucuccgacgacaucgagcagcaggccgacaacaugaucaccgagcuccugcagaaggaguacaucgaccggcagggcaagacgccccuggggcucguggaccuguucgucuucagcaccuccuucuaccugaucagcaucuuccugcaccucgugaagaucccgugaggacuagucccuguucccagagcccacuuuuuuuucuuuuuuugaaauaaaauagccugucuuucagaucuaaaaaaaaaaaaaaaaaaaaaaaaaaaaaaaaaaaaaaaaaaaaaaaaaaaaaaaaaaaaaaaaaaaaaaaaaaaaaaaaaaaaaaaaaaaaaaaaaaaa

SEQ ID NO: 42419 - RNA, 1626 nt, Artificial Sequence
  mRNA product Design a-2 (A100) comprising derived and/or modified sequence from LASV(LASV003-NIG-2008;Clade II)__AIT17580__GPCmut13 (opt1)
aggagaguccgcucagccagguugcagaagcggcuuagcguguguccuaaucuucucucugcguguagguaggccugugccgcaaacaagcuuaccaugggccagaucaucaccuucuuccaggaggugccccacgucaucgaggaggugaugaacaucgugcugaucgcccucagccugcuggccauccucaaggggaucuacaacgucgcgaccugcggccuguucgggcugguguccuuccuccugcugugcggccgcagcugcuccacgaccuacaaggggguguacgagcuccagacccuggagcuggacauggccagccucaacaugaccaugccgcuguccugcacgaagaacaacagccaccacuacaucauggucggcaacgagaccggccuggagcucacccugaccaacacguccaucaucaaccacaaguucugcaaccugagcgacgcccacaagaagaaccucuacgaccacgcccugauguccaucaucagcaccuuccaccuguccauccccaacuucaaccaguacgaggccaugagcugcgacuucaacgggggcaagaucuccgugcaguacaaccucagccacaccuacgcgguggacgccgccaaccacugcgggaccaucgccaacggcguccugcagacguucaugcggauggcguggggcggguccuacaucgcccuggacagcggcaagggguccugggacugcaucaugaccagcuaccaguaccucaucauccagaacaccaccugggaggaccacugccaguucucccgccccagccccaucggcuaccuggggcugcucagccagcggacgcgcgacaucuacaucucccggcgccugcugggcaccuucaccuggacccucagcgacuccgagagcaacgagacgccgggcggguacugccugacccgguggaugcugaucgaggccgagcucaagugcuucggcaacaccgccguggccaagugcaacgagaagcacgacgaggaguucugcgacaugcugcgccuguucgacuucaacaagcaggcgauccggcgccucaaggccgaggcccagauguccauccagcugaucaacaaggccgugaacgcccugaucaacgaccagcucaucaugaagaaccaccuccgggacaucauggggauccccuacugcaacuacagcaaguacugguaccugaaccacaccgucacgggccgcaccucccugccccggugcuggcuggugagcaacggguccuaccugaacgagacccacuucagcgacgacaucgagcagcaggcggacaacaugaucaccgagcuccugcagaaggaguacauggaccgccagggcaagacgccccugggccucguggaccuguucgucuucuccaccagcuucuaccugaucuccaucuuccugcaccucgugaagaucccgugaggacuagucccuguucccagagcccacuuuuuuuucuuuuuuugaaauaaaauagccugucuuucagaucuaaaaaaaaaaaaaaaaaaaaaaaaaaaaaaaaaaaaaaaaaaaaaaaaaaaaaaaaaaaaaaaaaaaaaaaaaaaaaaaaaaaaaaaaaaaaaaaaaaaa

SEQ ID NO: 42420 - RNA, 1626 nt, Artificial Sequence
  mRNA product Design a-2 (A100) comprising derived and/or modified sequence from LASV(LASV035-NIG-2009;Clade II)__AIT17588__GPCmut13 (opt1)
aggagaguccgcucagccagguugcagaagcggcuuagcguguguccuaaucuucucucugcguguagguaggccugugccgcaaacaagcuuaccaugggccagaucaucaccuucuuccaggaggugccccacgucaucgaggaggugaugaacaucgugcugaucgcccucagccugcuggccauccucaaggggaucuacaacgucgcgaccugcggccuguucgggcugguguccuuccuccugcugugcggccgcagcugcuccacgaccuacaaggggguguacgagcuccagacccuggagcuggacauggccagccucaacaugaccaugccgcuguccugcacgaagaacaacagccaccacuacaucauggucggcaacgagaccggccuggagcucacccugaccaacacguccaucaucaaccacaaguucugcaaccugagcgacgcccacaagaagaaccucuacgaccacgcccugauguccaucaucagcaccuuccaccuguccauccccaacuucaaccaguacgaggccaugagcugcgacuucaacgggggcaagaucuccgugcaguacaaccucagccacgcguacgccguggacgccgccaaccacugcgggaccaucgcgaacggcguccugcagaccuucaugcggauggccuggggcggguccuacaucgcccuggacagcggcaagggguccugggacugcaucaugacgagcuaccaguaccucaucauccagaacaccaccugggaggaccacugccaguucucccgccccagccccaucggcuaccuggggcugcucagccagcggacccgcgacaucuacaucucccggcgccugcugggcacguucaccuggacccucagcgacuccgagggcaacgagacccccgggggcuacugccugacgcgguggaugcugaucgaggccgagcucaagugcuucgggaacaccgccguggcgaagugcaacgagaagcacgacgaggaguucugcgacaugcugcgccuguucgacuucaacaagcaggccauccggcgccucaaggccgaggcccagaugagcauccagcugaucaacaaggccgugaacgcgcugaucaacgaccagcucaucaugaagaaccaccuccgggacaucaugggcauccccuacugcaacuacuccaaguacugguaccugaaccacaccgucaccgggaagacgagccugccccgcugcuggcugguguccaacggcagcuaccugaacgagacccacuucuccgacgacaucgagcagcaggccgacaacaugaucaccgagcuccugcagaaggaguacaucgaccggcagggcaagaccccgcuggggcucguggaccuguucgucuucagcacguccuucuaccugaucagcaucuuccugcaccucgugaagaucccgugaggacuagucccuguucccagagcccacuuuuuuuucuuuuuuugaaauaaaauagccugucuuucagaucuaaaaaaaaaaaaaaaaaaaaaaaaaaaaaaaaaaaaaaaaaaaaaaaaaaaaaaaaaaaaaaaaaaaaaaaaaaaaaaaaaaaaaaaaaaaaaaaaaaaa

SEQ ID NO: 42421 - RNA, 1626 nt, Artificial Sequence
  mRNA product Design a-2 (A100) comprising derived and/or modified sequence from LASV(LASV1000-NIG-2009;Clade II)__AIT17782__GPCmut13 (opt1)
aggagaguccgcucagccagguugcagaagcggcuuagcguguguccuaaucuucucucugcguguagguaggccugugccgcaaacaagcuuaccaugggccagaucaucaccuucuuccaggaggugccccacgucaucgaggaggugaugaacaucgugcugaucgcccucagccugcuggccauccucaaggggaucuacaacgucgcgaccugcggccuguucgggcugguguccuuccuccugcugugcggccgcagcugcuccacgaccuacaaggggguguacgagcuccagacccuggagcuggacauggccagccucaacaugaccaugccgcuguccugcacgaagaacaacagccaccacuacaucauggucggcaacgagaccggccuggagcucacccugaccaacacguccaucaucaaccacaaguucugcaaccugagcgacgcccacaagaagaaccucuacgaccacgcccugauguccaucaucagcaccuuccaccuguccauccccaacuucaaccaguacgaggccaugagcugcgacuucaacgggggcaagaucuccgugcaguacaaccucagccacaccuacgcgguggacgccgccaaccacugcgggaccaucgccaacggcguccugcagacguucaugcggauggcguggggcggguccuacaucgcccuggacagcggcaagggguccugggacugcaucaugaccagcuaccaguaccucaucauccagaacaccaccugggaggaccacugccaguucucccgccccagccccaucggcuaccuggggcugcucagccagcggacgcgcgacaucuacaucucccggcgccugcugggcaccuucaccuggacccucagcgacuccgagggcaacgagacgcccgggggcuacugccugacccgguggaugcugaucgaggccgagcucaagugcuucgggaacaccgccguggccaagugcaacgagaagcacgacgaggaguucugcgacaugcugcgccuguucgacuucaacaagcaggcgaucaagcggcucaagaccgaggcccagaugagcauccagcugaucaacaaggccgugaacgcccugaucaacgaccagcucaucaugaagaaccaccuccgcgacaucaugggcauccccuacugcaacuacuccaaguacugguaccugaaccacacggucaccgggaagaccagccugccccggugcuggcugguguccaacggcagcuaccugaacgagacccacuucuccgacgacaucgagcagcaggccgacaacaugaucacggagcuccugcagaaggaguacaucgaccgccagggcaagaccccgcuggggcucguggaccuguucgucuucagcaccuccuucuaccugaucagcaucuuccugcaccucgugaagaucccgugaggacuagucccuguucccagagcccacuuuuuuuucuuuuuuugaaauaaaauagccugucuuucagaucuaaaaaaaaaaaaaaaaaaaaaaaaaaaaaaaaaaaaaaaaaaaaaaaaaaaaaaaaaaaaaaaaaaaaaaaaaaaaaaaaaaaaaaaaaaaaaaaaaaaa

SEQ ID NO: 42422 - RNA, 1626 nt, Artificial Sequence
  mRNA product Design a-2 (A100) comprising derived and/or modified sequence from LASV(LASV221-NIG-2010;Clade II)__AIT17624__GPCmut13 (opt1)
aggagaguccgcucagccagguugcagaagcggcuuagcguguguccuaaucuucucucugcguguagguaggccugugccgcaaacaagcuuaccaugggccagaucaucaccuucuuccaggaggugccccacgucaucgaggaggugaugaacaucgugcugaucgcccucagccugcuggccauccucaaggggaucuacaacgucgcgaccugcggccuguucgggcugguguccuuccuccugcugugcggccgcagcugcuccacgaccuacaaggggguguacgagcuccagacccuggagcuggacauggccagccucaacaugaccaugccgcuguccugcacgaagaacaacagccaccacuacaucauggucggcaacgagaccggccuggagcucacccugaccaacacguccaucaucaaccacaaguucugcaaccugagcgacgcccacaagaagaaccucuacgaccacgcccugauguccaucaucagcaccuuccaccuguccauccccaacuucaaccaguacgaggccaugagcugcgacuucaacgggggcaagaucuccgugcaguacaaccucagccacaccuacgcgaucgacgccgccaaccacugcgggaccaucgccaacggcgugcugcagacguucaugcggauggcguggggcggguccuacaucgcccuggacagcggcaagggguccugggacugcaucaugaccagcuaccaguaccucaucauccagaacaccaccugggaggaccacugccaguucucccgccccagccccaucggcuaccuggggcugcucagccagcggacgcgcgacaucuacaucucccggcgccugcugggcaccuucaccuggacccucagcgacuccgagggcaacgagacgcccgggggcuacugccugacccgguggaugcugaucgaggccgagcucaagugcuucgggaacaccgccgucgccaagugcaacgagaagcacgacgaggaguucugcgacaugcugcgccuguucgacuucaacaagcaggcgauccggcgccucaagaccgaggcccagaugagcauccagcugaucaacaaggccgugaacgcccugaucaacgaccagcucaucaugaagaaccaccuccgggacaucaugggcauccccuacugcaacuacuccaaguacugguaccugaaccacacggugaccgggaagaccagccugccccgcugcuggcuggucuccaacggcagcuaccugaacgagacccacuucuccgacgacaucgagcagcaggccgacaacaugaucacggagaugcuccagaaggaguacauggaccggcagggcaagaccccgcuggggcugguggaccucuucguguucagcaccuccuucuaccugaucagcaucuuccugcaccuggucaagaucccgugaggacuagucccuguucccagagcccacuuuuuuuucuuuuuuugaaauaaaauagccugucuuucagaucuaaaaaaaaaaaaaaaaaaaaaaaaaaaaaaaaaaaaaaaaaaaaaaaaaaaaaaaaaaaaaaaaaaaaaaaaaaaaaaaaaaaaaaaaaaaaaaaaaaaa

SEQ ID NO: 42423 - RNA, 1626 nt, Artificial Sequence
  mRNA product Design a-2 (A100) comprising derived and/or modified sequence from LASV(LASV237-NIG-2010;Clade II)__AIT17638__GPCmut13 (opt1)
aggagaguccgcucagccagguugcagaagcggcuuagcguguguccuaaucuucucucugcguguagguaggccugugccgcaaacaagcuuaccaugggccagaucaucaccuucuuccaggaggugccccacgucaucgaggaggugaugaacaucgugcugaucgcccucagccugcuggccauccucaaggggaucuacaacgucgcgaccugcggccuguucgggcugguguccuuccuccugcugugcggccgcagcugcuccacgaccuacaaggggguguacgagcuccagacccuggagcuggacauggccagccucaacaugaccaugccgcuguccugcacgaagaacaacagccaccacuacaucauggucggcaacgagaccggccuggagcucacccugaccaacacguccaucaucaaccacaaguucugcaaccugagcgacgcccacaagaaggaccucuacgaccacgcccugauguccaucaucagcaccuuccaccuguccauccccaacuucaaccaguacgaggccaugagcugcgacuucaacgggggcaagaucuccgugcaguacaaccucagccacaccuacgcgguggacgccgccaaccacugcgggaccaucgccaacggcguccugcagacguucaugcggauggcguggggcggguccuacaucgcccuggacagcggcaagggguccugggacugcaucaugaccagcuaccaguaccucaucauccagaacaccaccugggaggaccacugccaguucucccgccccagccccaucggcuaccuggggcugcucagccagcggacgcgcgacaucuacaucucccggcgccugcugggcaccuucaccuggacccucagcgacuccgagggcaacgagacgcccgggggcuacugccugacccgguggaugcugaucgaggccgagcucaagugcuucgggaacaccgccguggccaagugcaacgagaagcacgacgaggaguucugcgacaugcugcgccuguucgacuucaacaagcaggcgauccggcgccucaagaccgaggcccagaugagcauccagcugaucaacaaggccgugaacgcccugaucaacgaccagcucaucaugaagaaccaccuccgggacaucaugggcauccccuacugcaacuacuccaaguacugguaccugaaccacacggucaccgggaagaccagccugccccgcugcuggcugguguccaacggcagcuaccugaacgagacccacuucuccgacgacaucgagcagcaggccgacaacaugaucacggagcuccugcagaaggaguacauggaccggcagggcaagaccccgcuggggcucguggaccuguucgucuucagcaccuccuucuaccugaucagcaucuuccugcaccucaucaagaucccgugaggacuagucccuguucccagagcccacuuuuuuuucuuuuuuugaaauaaaauagccugucuuucagaucuaaaaaaaaaaaaaaaaaaaaaaaaaaaaaaaaaaaaaaaaaaaaaaaaaaaaaaaaaaaaaaaaaaaaaaaaaaaaaaaaaaaaaaaaaaaaaaaaaaaa

SEQ ID NO: 42424 - RNA, 1626 nt, Artificial Sequence
  mRNA product Design a-2 (A100) comprising derived and/or modified sequence from LASV(LASV253-NIG-2011;Clade II)__AIT17670__GPCmut13 (opt1)
aggagaguccgcucagccagguugcagaagcggcuuagcguguguccuaaucuucucucugcguguagguaggccugugccgcaaacaagcuuaccaugggccagaucaucaccuucuuccaggaggugccccacgucaucgaggaggugaugaacaucgugcugaucgcccucagccugcuggccauccucaaggggaucuacaacgucgcgaccugcggccuguucgggcugguguccuuccuccugcugugcggccgcagcugcuccacgaccuacaaggggguguacgagcuccagacccuggagcuggacauggccagccucaacaugaccaugccgcuguccugcacgaagaacaacagccaccacuacaucauggucggcaacgagaccggccuggagcucacccugaccaacacguccaucaucaaccacaaguucugcaaccugagcgacgcccacaagaagaaccucuacgaccacgcccugauguccaucaucagcaccuuccaccuguccauccccaacuucaaccaguacgaggccaugagcugcgacuucaacgggggcaagaucuccgugcaguacaaccucagccacaccuacgcgguggacgccgccaaccacugcgggaccaucgccaacggcguccugcagacguucaugcggauggcguggggcggguccuacaucgcccuggacagcggcaagggguccugggacugcaucaugaccagcuaccaguaccucaucauccagaacaccaccugggaggaccacugccaguucucccgccccagccccaucggcuaccuggggcugcucagccagcggacgcgcgacaucuacaucucccggcgccugcugggcaccuucaccuggacccucagcgacuccgagggcaacgagacgcccgggggcuacugccugacccgguggaugcugaucgaggccgagcucaagugcuucgggaacaccgccguggccaagugcaacgagaagcacgacgaggaguucugcgacaugcugcgccuguucgacuucaacaagcaggcgauccggcgccucaaggccgaggcccagaugagcauccagcugaucaacaaggccgugaacgcccugaucaacgaccagcucaucaugaagaaccaccuccgggacaucaugggcaucccguacugcaacuacuccaaguacugguaccugaaccacaccgucacggggcgcaccagccugccccggugcuggcugguguccaacggcagcuaccugaacgagacccacuucuccgacgacaucgagcagcaggcggacaacaugaucaccgagcuccugcagaaggaguacaucgaccgccagggcaagacgccccuggggcucguggaccuguucgucuucagcaccuccuucuaccugaucagcaucuuccugcaccucgugaagaucccgugaggacuagucccuguucccagagcccacuuuuuuuucuuuuuuugaaauaaaauagccugucuuucagaucuaaaaaaaaaaaaaaaaaaaaaaaaaaaaaaaaaaaaaaaaaaaaaaaaaaaaaaaaaaaaaaaaaaaaaaaaaaaaaaaaaaaaaaaaaaaaaaaaaaaa

SEQ ID NO: 42425 - RNA, 1626 nt, Artificial Sequence
  mRNA product Design a-2 (A100) comprising derived and/or modified sequence from LASV(LASV254-NIG-2011;Clade II)__AIT17674__GPCmut13 (opt1)
aggagaguccgcucagccagguugcagaagcggcuuagcguguguccuaaucuucucucugcguguagguaggccugugccgcaaacaagcuuaccaugggccagaucaucaccuucuuccaggaggugccccacgucaucgaggaggugaugaacaucgugcugaucgcccucagccugcuggccauccucaaggggaucuacaacgucgcgaccugcggccuguucgggcugguguccuuccuccugcugugcggccgcagcugcuccacgaccuacaaggggguguacgagcuccagacccuggagcuggacaugaccaaccucaacaugacgaugccgcugagcugcaccaagaacaacucccaccacuacaucauggucggcaacgagaccggccuggagcucacccugacgaacaccagcaucaucaaccacaaguucugcaaccuguccgacgcccacaagaagaaccucuacaaccacgcccugaugagcaucaucuccaccuuccaccugagcauccccaacuucaaccaguacgaggccauguccugcgacuucaacgggggcaagaucagcgugcaguacaaccucucccacagcuacgccguggacgcggccaaccacugcgggaccaucgccaacggcguccugcagacguucaugcggauggccuggggcggguccuacaucgcgcuggacagcggcaaggggaacugggacugcaucaugaccuccuaccaguaccucaucauccagaacaccaccugggaggaccacugccaguucagccgccccucccccaucggcuaccuggggcugcucagccagcggacgcgcgacaucuacaucagccggcgccugcugggcaccuucaccuggacccucuccgacagcgagggcaacgagacgcccgggggcuacugccugacccgguggaugcugaucgaggccgagcucaagugcuucgggaacaccgccguggccaagugcaacgagaagcacgacgaggaguucugcgacaugcugcgccuguucgacuucaacaagcaggccauccggcgccucaagaccgaggcgcaggccaacauccagcugaucaacaaggccgugaacgcccugaucaacgaccagcucaucaugaagaaccaccuccgggacaucaugggcauccccuacugcaacuacuccaaguacugguaccugaaccacacggucaccgggaagaccagccugccccgcugcuggcugguguccaacggcagcuaccugaacgagacccacuucuccgacgacaucgagcagcaggccgacaacaugaucacggagcuccugcagaaggaguacauggaccggcagggcaagaccccgcuggggcucguggaccuguucgucuucagcaccuccuucuaccugaucagcaucuuccugcaccucgugaagaucccgugaggacuagucccuguucccagagcccacuuuuuuuucuuuuuuugaaauaaaauagccugucuuucagaucuaaaaaaaaaaaaaaaaaaaaaaaaaaaaaaaaaaaaaaaaaaaaaaaaaaaaaaaaaaaaaaaaaaaaaaaaaaaaaaaaaaaaaaaaaaaaaaaaaaaa

SEQ ID NO: 42426 - RNA, 1626 nt, Artificial Sequence
  mRNA product Design a-2 (A100) comprising derived and/or modified sequence from LASV(Nig08-A19;Clade III)__ADU56618__GPCmut13 (opt1)
aggagaguccgcucagccagguugcagaagcggcuuagcguguguccuaaucuucucucugcguguagguaggccugugccgcaaacaagcuuaccaugggccagaucgugaccuucuuccaggaggucccccacgugaucgaggaggugaugaacaucguccugaucgcccucagcauccuggccauccugaaggggcucuacaacaucgcgaccugcggccugaucgggcuggugacguuccuccugcuguccggccgcagcugcuccaugaccuacaaggggguguacgagcuccagacccuggagcugaacaugaacacccucaacaugacgaugccgcugagcugcaccaagaacaacucccaccacuacaucauggucggcaacgagaccggccuggagcucacccugacgaacaccagccugcuccaccacaaguucugcaaccuguccgacgcccacaagaagaaccuguacgaccacacccucaugagcaucaucuccaccuuccaccugagcauccccaacuucaaccaguacgaggccauguccugcgacuucaacgggggcaagaucacggugcaguacaaccugagccacuccuacgccaucgacgccgcgaaccacugcgggaccguggccaacggcguccuccagaccuucaugcggauggccuggggcgggagcuacaucgcccuggacuccggccgcgggaagugggacugcaucaugaccagcuaccaguaccugaucauccagaacacgaccugggaggaccacugccaguucucccggcccagccccaucggcuaccucgggcugcugucccagcgcacccgggacaucuacaucagccgccggcuccugggcaccuucacguggacccugagcgacuccgagggcaacgagacccccgggggcuacugccucacccgcuggaugcugaucgaggcggagcugaagugcuucgggaacacggccguggccaagugcaacgagaagcacgacgaggaguucugcgacaugcuccggcuguucgacuucaacaagcaggccauccgccggcugaaggccgaggcgcagaugagcauccagcucaucaacaaggccgugaacgcccugaucaacgaccagcugaucaugaagaaccaccuccgcgacaucaugggcauccccuacugcaacuacuccaaguacugguaccugaaccacaccagcaccgggcggaccucccugccccgcugcuggcucgucagcaacggcuccuaccugaacgagacgcacuucagcgacgacaucgagcagcaggccgacaacaugaucaccgagaugcugcagaaggaguaccucgaccggcagggcaagaccccgcuggggcugguggaccuguucguguucuccaccagcuucuaccucaucuccaucuuccugcaccuggucaagaucccgugaggacuagucccuguucccagagcccacuuuuuuuucuuuuuuugaaauaaaauagccugucuuucagaucuaaaaaaaaaaaaaaaaaaaaaaaaaaaaaaaaaaaaaaaaaaaaaaaaaaaaaaaaaaaaaaaaaaaaaaaaaaaaaaaaaaaaaaaaaaaaaaaaaaaa

SEQ ID NO: 42427 - RNA, 1629 nt, Artificial Sequence
  mRNA product Design a-2 (A100) comprising derived and/or modified sequence from LASV(G1180-SLE-2010;Clade IV)__AIT17168__GPCmut13 (opt1)
aggagaguccgcucagccagguugcagaagcggcuuagcguguguccuaaucuucucucugcguguagguaggccugugccgcaaacaagcuuaccaugggccagaucgugaccuucuuccaggaggucccccacgugaucgaggaggugaugaacaucguccugaucgcccucagcauccuggccgugcugaaggggcucuacaacuucgcgaccugcggccugguggggcugcucaccuuccugcugcucugcggccgcuccugcaccgccagccgguacaagggggucuacgagcugcagacccuggagcucaacauggagacccugaacaugacgaugccgcuguccugcaccaagaacaacagccaccacuacaucauggugggcaacgagaccggccucgagcugacccugacgaacaccuccaucaucaaccacaaguucugcaaccucagcgacgcccacaagaagaaccuguacgaccacgcccugauguccaucaucagcaccuuccaccucuccauccccaacuucaaccaguacgaggccaugagcugcgacuucaacgggggcaagaucuccgugcaguacaaccugagccacuccuacgcgggggacgccgccaaccacugcggcaccgucgccaacggggugcugcagacguucaugcgcauggcguggggcggcagcuacaucgcccucgacuccgggcacggcagcugggacugcaucaugaccuccuaccaguaccugaucauccagaacaccaccugggaggaccacugccaguucagccggcccucccccaucggguaccugggccuccugagccagcgcacgcgggacaucuacaucagccgccggcugcucggcaccuucaccuggacccuguccgacagcgaggggaaggacacgccgggcggguacugccugacccgcuggaugcucaucgaggccgagcugaagugcuucggcaacaccgccguggccaagugcaacgagaagcacgacgaggaguucugcgacaugcugcggcuguucgacuucaacaagcaggcgauccagcgccugaaggccgaggcccagauguccauccagcugaucaacaaggccgucaacgcccucaucaacgaccagcugaucaugaagaaccaccuccgggacaucauggggauccccuacugcaacuacagcaaguacugguaccucaaccacaccacgaccggcaagaccucccugcccaagugcuggcuggugagcaacggcuccuaccucaacgagacccacuucagcgacgacaucgagcagcaggcggacaacaugaucacggagaugcugcagaaggaguacauggagcgccaggggaagacgccccugggccucguggaccuguucgucuucuccaccagcuucuaccugaucuccaucuuccugcaccucgugaagaucccgugaggacuagucccuguucccagagcccacuuuuuuuucuuuuuuugaaauaaaauagccugucuuucagaucuaaaaaaaaaaaaaaaaaaaaaaaaaaaaaaaaaaaaaaaaaaaaaaaaaaaaaaaaaaaaaaaaaaaaaaaaaaaaaaaaaaaaaaaaaaaaaaaaaaaa

SEQ ID NO: 42428 - RNA, 1629 nt, Artificial Sequence
  mRNA product Design a-2 (A100) comprising derived and/or modified sequence from LASV(G1442-SLE-2011;Clade IV)__AIT17180__GPCmut13 (opt1)
aggagaguccgcucagccagguugcagaagcggcuuagcguguguccuaaucuucucucugcguguagguaggccugugccgcaaacaagcuuaccaugggccagaucgugaccuucuuccaggaggucccccacgugaucgaggaggugaugaacaucguccugaucgcccucagcauccuggccgugcugaaggggcucuacaacguggcgaccugcggccugaucgggcuggucacguuccuccugcugugcggccgcuccugcaccaccacccucuacaaggggguguacgagcugcagacgcuggagcucaacauggagacccugaacaugaccaugccgcugagcugcaccaagaacaacucccaccacuacauccgggugggcaacgagacgggccucgagcugacccugaccaacaccagcaucaucaaccacaaguucugcaaccucuccgacgcccacaagaagaaccuguacgaccacgcccugaugagcaucaucuccacguuccaccucagcauccccaacuucaaccaguacgaggccauguccugcgacuucaacgggggcaagaucagcguccaguacaaccugucccacagcuacgccggggacgcggccaaccacugcggcaccguggccaacggggugcugcagaccuucaugcgcauggccuggggcggcuccuacaucgcgcucgacagcgggcggggcaacugggacugcaucaugaccuccuaccaguaccugaucauccagaacacgaccugggacgaccacugccaguucagccgccccucccccaucggguaccugggccuccugagccagcggacccgcgacgucuacaucucccggcgccugcucggcaccuucacguggacccugagcgacagcgaggggaaggacaccccgggcggguacugccugacccgguggaugcucaucgaggccgagcugaagugcuucggcaacacggccguggccaagugcaacgagaagcacgacgaggaguucugcgacaugcugcgccucuucgacuucaacaagcaggccauccagcggcugaaggcggaggcccagauguccauccagcugaucaacaaggccgugaacgcccucaucaacgaccagcugaucaugaagaaccaccuccgcgacaucauggggauccccuacugcaacuacagcaaguacugguaccugaacaacaccgccaccggcaagaccucccugcccaagugcuggcugaucagcaacggcuccuaccucaacgagacgcacuucagcgacgacaucgagcaggaggcggacaacaugaucaccgagaugcugcagaaggaguacauggagcggcaggggaagacgccccugggccucgucgaccuguucguguucuccaccagcuucuaccugaucuccaucuuccugcaccucgugaagaucccgugaggacuagucccuguucccagagcccacuuuuuuuucuuuuuuugaaauaaaauagccugucuuucagaucuaaaaaaaaaaaaaaaaaaaaaaaaaaaaaaaaaaaaaaaaaaaaaaaaaaaaaaaaaaaaaaaaaaaaaaaaaaaaaaaaaaaaaaaaaaaaaaaaaaaa

SEQ ID NO: 42429 - RNA, 1629 nt, Artificial Sequence
  mRNA product Design a-2 (A100) comprising derived and/or modified sequence from LASV(G3010-SLE-2013;Clade IV)__AIT17344__GPCmut13 (opt1)
aggagaguccgcucagccagguugcagaagcggcuuagcguguguccuaaucuucucucugcguguagguaggccugugccgcaaacaagcuuaccaugggccagaucgugaccuucuuccaggaggucccccacgugaucgaggaggugaugaacaucguccugaucgcccucagcauccuggccgugcugaaggggcucuacaacuucgcgaccugcggccugguggggcuggucacguuccuccugcugugcggccgcuccugcaccaccagccucuacaaggggguguacgagcugcagacccuggagcucaacauggagacgcugaacaugaccaugccgcuguccugcaccaagaacaacagccaccacuacaucauggugggcaacgagaccggccucgagcugacgcugaccaacaccuccaucaucaaccacaaguucugcaaccucagcgacgcccacaagaagaaccuguacaaccacgcccugauguccaucaucagcaccuuccaccucuccauccccaacuucaaccaguacgaggccaugagcugcgacuucaacgggggcaagaucuccguccaguacaaccugagccacuccuacgccggggacgcggccagccacugcggcacgguggccaacggggugcugcagaccuucaugcggauggccuggggcggcuccuacaucgcgcucgacagcggguacggcaagugggacugcaucaugaccuccuaccaguaccugaucauccagaacaccacgugggaggaccacugccaguucagccgccccucccccaucggguaccugggccuccugagccagcggacccgcgacaucuacaucagccggcgccugcucggcaccuucaccuggacgcuguccgacagcgaggggaaggacaccccgggcggguacugccugacccgguggaugcucaucgaggccgagcugaagugcuucggcaacaccgccgucgccaagugcaacgagaagcacgacgaggaguucugcgacaugcugcgccucuucgacuucaacaagcaggccauccagcggcugaagacggaggcgcagauguccauccagcugaucaacaaggccgugaacgcccucaucaacgaccagcugaucaugaagaaccaccuccgcgacaucauggggauccccuacugcaacuacagcaaguacugguaccugaaccacaccaccaccggcaagacgucccugcccaagugcuggcuggugagcaacggcuccuaccucaacgagacccacuucagcgacgacaucgagcagcaggccgacaacaugaucaccgagaugcugcagaaggaguacauggagcggcaggggaagacgccccugggccucgucgaccuguucguguucuccaccagcuucuaccugaucuccaucuuccugcaccucgugaagaucccgugaggacuagucccuguucccagagcccacuuuuuuuucuuuuuuugaaauaaaauagccugucuuucagaucuaaaaaaaaaaaaaaaaaaaaaaaaaaaaaaaaaaaaaaaaaaaaaaaaaaaaaaaaaaaaaaaaaaaaaaaaaaaaaaaaaaaaaaaaaaaaaaaaaaaa

SEQ ID NO: 42430 - RNA, 1629 nt, Artificial Sequence
  mRNA product Design a-2 (A100) comprising derived and/or modified sequence from LASV(G502-SLE-2009;Clade IV)__AIT17126__GPCmut13 (opt1)
aggagaguccgcucagccagguugcagaagcggcuuagcguguguccuaaucuucucucugcguguagguaggccugugccgcaaacaagcuuaccaugggccagaucgugaccuucuuccaggaggucccccacgugaucgaggaggugaugaacaucguccugaucgcccucagcauccuggccgugcugaaggggcucuacaacuucgcgaccugcggccugguggggcugcucacguuccugcugcucugcggccgcuccugcaccaccgggcuguacaagggcgucuacgagcugcagacccucgagcugaacauggagacgcugaacaugaccaugccgcucagcugcaccaagaacaacucccaccacuacaucauggugggcaacgagaccgggcuggagcugacgcucaccaacaccagcaucaucaaccacaaguucugcaaccuguccgacgcccacaagaagaaccuguacgaccacgcccucaugagcaucaucuccaccuuccaccugagcauccccaacuucaaccaguacgaggccauguccugcgacuucaacggcgggaagaucagcgugcaguacaaccugucccacagcuacgccggcgacgcggccgaccacugcgggacggucgccaacggcgugcuccagaccuucaugcggauggccuggggcggguccuacaucgcgcuggacagcggccgcgggcggugggacugcaucaugaccuccuaccaguaccugaucauccagaacaccacgugggaggaccacugccaguucagccgccccucccccaucggcuaccucggccugcugagccagcggacccgcgacaucuacaucucccggcgccuccuggggaccuucaccuggacgcugagcgacagcgagggcaaggacacccccgggggcuacugccucacccgguggaugcugaucgaggccgagcugaagugcuucgggaacaccgccguggccaagugcaacgagaagcacgacgaggaguucugcgacaugcuccgccuguucgacuucaacaagcaggccauccagcggcugaaggcggaggcccagauguccauccagcucaucaacaaggccgucaacgcccugaucaacgaccagcuggugaugaagaaccaccuccgcgacaucaugggcauccccuacugcaacuacagccgguacugguaccugaaccacacgaccaccggccgcaccucccugcccaagugcuggcucgugagcaacggguccuaccugaacgagacgcacuucagcgacgacaucgagcagcaggccgacaacaugaucaccgagaugcugcagaaggaguacauggagcggcagggcaagaccccgcucgggcuggucgaccuguucguguucuccaccagcuucuaccugaucuccaucuuccuccaccuggugaagaucccgugaggacuagucccuguucccagagcccacuuuuuuuucuuuuuuugaaauaaaauagccugucuuucagaucuaaaaaaaaaaaaaaaaaaaaaaaaaaaaaaaaaaaaaaaaaaaaaaaaaaaaaaaaaaaaaaaaaaaaaaaaaaaaaaaaaaaaaaaaaaaaaaaaaaaa

SEQ ID NO: 42431 - RNA, 1629 nt, Artificial Sequence
  mRNA product Design a-2 (A100) comprising derived and/or modified sequence from LASV(G733-SLE-2010;Clade IV)__AIT17154__GPCmut13 (opt1)
aggagaguccgcucagccagguugcagaagcggcuuagcguguguccuaaucuucucucugcguguagguaggccugugccgcaaacaagcuuaccaugggccagaucgugaccuucuuccaggaggucccccacgugaucgaggaggugaugaacaucguccugaucgcccucagcauccuggccgugcugaaggggcucuacaacuucgcgaccugcggcaucguggggcuggucuccuuccugcuccugugcggccgcagcugcacgaccucccuguacaaggggguguacgagcuccagacccuggagcugaacauggagacccucaacaugacgaugccgcugagcugcaccaagaacaacucccaccacuacaucauggugggcaacgagaccggccuggagcucacccugacgaacaccagcaucaucaaccacaaguucugcaaccuguccgacgcccacaagaagaaccucuacgaccacgcccugaugagcaucaucuccaccuuccaccugagcauccccaacuucaaccaguacgaggccauguccugcgacuucaacgggggcaagaucagcguccaguacaaccucucccacagcuacgccggggacgcggccaaccacugcggcaccaucgccaacggggugcugcagacguucaugcggauggccuggggcggcuccuacaucgcgcuggacagcgggcgcgaccggugggacugcaucaugaccuccuaccaguaccucaucauccagaacaccaccugggaggaccacugccaguucagccgccccucccccaucggcuaccuggggcugcucagccagcggacgcgcgacaucuacaucagccggcgccugcugggcaccuucaccuggacccucuccgacagcgagggcaaggacacgcccgggggcuacugccugacccgguggaugcugaucgaggccgagcucaagugcuucgggaacaccgccguggccaagugcaacgagaagcacgacgaggaguucugcgacaugcugcgccuguucgacuucaacaagcaggccauccagcggcucaaggcggaggcccagauguccauccagcugaucaacaaggccgucaacgcccugaucaacgaccagcucaucaugaagaaccaccuccgcgacaucaugggcauccccuacugcaacuacagcaaguacugguaccugaaccacaccacgaccgggaagaccucccugcccaagugcuggcuggugagcaacggcuccuaccugaacgagacccacuucagcgacgacaucgagcagcaggccgacaacaugaucacggagaugcuccagaaggaguacauggagcggcagggcaagaccccgcuggggcugguggaccucuucgucuucuccaccagcuucuaccugaucuccaucuuccugcaccuggugaagaucccgugaggacuagucccuguucccagagcccacuuuuuuuucuuuuuuugaaauaaaauagccugucuuucagaucuaaaaaaaaaaaaaaaaaaaaaaaaaaaaaaaaaaaaaaaaaaaaaaaaaaaaaaaaaaaaaaaaaaaaaaaaaaaaaaaaaaaaaaaaaaaaaaaaaaaa

SEQ ID NO: 42432 - RNA, 1629 nt, Artificial Sequence
  mRNA product Design a-2 (A100) comprising derived and/or modified sequence from MOPV/LASV reassortant(IGS-1;Clade IV)__AFY05576__GPCmut13 (opt1)
aggagaguccgcucagccagguugcagaagcggcuuagcguguguccuaaucuucucucugcguguagguaggccugugccgcaaacaagcuuaccaugggccagaucgugaccuucuuccaggaggucccccacgugaucgaggaggugaugaacaucguccugaucgcccucagcgugcuggccgugcugaaggggcucuacaacuucgcgaccugcggccuggucgggcuggugacguuccuccugcugugcggccgcuccugcaccaccagccucuacaaggggguguacgagcugcagacccuggagcucaacauggagacgcugaacaugaccaugccgcuguccugcaccaagaacaacagccaccacuacaucauggucggcaacgagaccggccucgagcugacgcugaccaacaccuccaucaucaaccacaaguucugcaaccucagcgacgcccacaagaagaaccuguacgaccacgcccugauguccaucaucagcaccuuccaccucuccauccccaacuucaaccaguacgaggccaugagcugcgacuucaacgggggcaagaucuccgugcaguacaaccugagccacuccuacgccggggacgcggccaaccacugcggcacgguggccaacgggguccugcagaccuucaugcggauggccuggggcggcagcuacaucgcgcucgacuccgggcgcggcaacugggacugcaucaugaccagcuaccaguaccugaucauccagaacaccacgugggaggaccacugccaguucucccggcccagccccaucggguaccugggccuccugucccagcgcacccgggacaucuacaucagccgccggcugcucggcaccuucaccuggacgcugagcgacuccgagggggaggacaccccgggcggguacugccugacccgcuggaugcucaucgaggccgagcugaagugcuucggcaacaccgccguggccaagugcaacgagaagcacgacgaggaguucugcgacaugcugcggcuguucgacuucaacaagcaggccauccagcgccugaaggcggaggcccagaugagcauccagcugaucaacaaggccgugaacgcccucaucaacgaccagcugaucaugaagaaccaccuccgggacaucauggggauccccuacugcaacuacuccaaguacugguaccucaaccacacgaccaccggccgcaccagccugcccaagugcuggcuggucuccaacggcagcuaccucaacgagacgcacuucuccgacgacaucgagcagcaggccgacaacaugaucaccgagaugcugcagaaggaguacauggagcggcaggggaagacgccccugggccucguggaccuguucguguucagcaccuccuucuaccugaucagcaucuuccugcaccucgucaagaucccgugaggacuagucccuguucccagagcccacuuuuuuuucuuuuuuugaaauaaaauagccugucuuucagaucuaaaaaaaaaaaaaaaaaaaaaaaaaaaaaaaaaaaaaaaaaaaaaaaaaaaaaaaaaaaaaaaaaaaaaaaaaaaaaaaaaaaaaaaaaaaaaaaaaaaa

SEQ ID NO: 42433 - RNA, 1629 nt, Artificial Sequence
  mRNA product Design a-2 (A100) comprising derived and/or modified sequence from LASV(LM765-SLE-2012;Clade IV)__AIT17814__GPCmut13 (opt1)
aggagaguccgcucagccagguugcagaagcggcuuagcguguguccuaaucuucucucugcguguagguaggccugugccgcaaacaagcuuaccaugggccagaucgugaccuucuuccaggaggucccccacgugaucgaggaggugaugaacaucguccugaucgcccucagcauccuggccgugcugaaggggcucuacaacuucgcgaccugcggccugguggggcuggucacguuccuccugcugugcggccgcuccugcaccaccagccucuacaaggggguguacgagcugcagacccuggagcucaacauggagacgcugaacaugaccaugccgcuguccugcaccaagaacaacagccaccacuacaucauggugggcaacgagaccggccucgagcugacgcugaccaacaccuccaucaucgaccacaaguucugcaaccucagcgacgcccaccggaagaaccuguacgaccacgcccugauguccaucaucagcaccuuccaccucuccauccccaacuucaaccaguacgaggccaugagcugcgacuucaacgggggcaagaucuccguccaguacaaccugagccacuccuacgccaaggacgcggccgaccacugcgggacgguggccaacggcgugcugcagaccuucaugcgcauggccuggggcgggagcuacaucgcgcucgacuccggccgggggcgcugggacugcaucaugaccagcuaccaguaccugaucauccagaacaccacgugggaggaccacugccaguucucccggcccagccccaucggcuaccuggggcuccugucccagcgcacccgggacaucuacaucagccgccggcugcucggcaccuucaccuggacgcugagcgacuccgagggcaaggacacccccgggggcuacugccugacccgcuggaugcucaucgaggccgagcugaagugcuucgggaacaccgccgucgccaagugcaacgagaagcacgacgaggaguucugcgacaugcugcggcuguucgacuucaacaagcaggccauccagcgccugaaggcggaggcccagaugagcauccagcugaucaacaaggccgugaacgcccucaucaacgaccagcugaucaugaagaaccaccuccgggacaucaugggcauccccuacugcaacuacuccaaguacugguaccucaaccacacgaccaccgggaagaccagccugcccaagugcuggcugguguccaacggcagcuaccucaacgagacgcacuucuccgacgacaucgagcagcaggccgacaacaugaucaccgagaugcugcagaaggaguacauggagcgccagggcaagaccccgcuggggcucgucgaccuguucguguucagcaccuccuucuaccugaucagcaucuuccugcaccucgugaagaucccgugaggacuagucccuguucccagagcccacuuuuuuuucuuuuuuugaaauaaaauagccugucuuucagaucuaaaaaaaaaaaaaaaaaaaaaaaaaaaaaaaaaaaaaaaaaaaaaaaaaaaaaaaaaaaaaaaaaaaaaaaaaaaaaaaaaaaaaaaaaaaaaaaaaaaa

SEQ ID NO: 42434 - RNA, 1629 nt, Artificial Sequence
  mRNA product Design a-2 (A100) comprising derived and/or modified sequence from LASV(LM776-SLE-2012;Clade IV)__AIT17824__GPCmut13 (opt1)
aggagaguccgcucagccagguugcagaagcggcuuagcguguguccuaaucuucucucugcguguagguaggccugugccgcaaacaagcuuaccaugggccagaucgugaccuucuuccaggaggucccccacgugaucgaggaggugaugaacaucguccugaucgcccucagcauccuggccgugcugaaggggcucuacaacuucgcgaccugcggccugguggggcuggucacguuccuccugcugugcggccgcuccugcaccaccagcguguacaaggggguguacgagcuccagacccuggagcugaacauggagacgcucaacaugaccaugccgcuguccugcaccaagaacaacagccaccacuacaucauggucggcaacgagaccggccuggagcucacgcugaccaacaccuccaucaucaaccacaaguucugcaaccugagcgacgcccacaagaagaaccucuacgaccacgcccugauguccaucaucagcaccuuccaccuguccauccccaacuucaaccaguacgaggccaugagcugcgacuucaacgggggcaagaucuccgugcaguacaaccucagccacuccuacgccggggacgcggccaaccacugcggcacgguggccaacgggguccugcagaccuucaugcggauggccuggggcggcagcuacaucgcgcuggacuccgggcacggcaagugggacugcaucaugaccagcuaccaguaccucaucauccagaacaccacgugggaggaccacugccaguucucccgccccagccccaucggguaccugggccugcucucccagcggacccgcgacaucuacaucagccggcgccugcugggcaccuucaccuggacgcucagcgacuccgaggggaaggacaccccgggcggguacugccugacccgguggaugcugaucgaggccgagcucaagugcuucggcaacaccgccguggccaagugcaacgagaagcacgacgaggaguucugcgacaugcugcgccuguucgacuucaacaagcaggccauccagcggcucaaggcggaggcccagaugagcauccagcugaucaacaaggccgugaacgcccugaucaacgaccagcucaucaugaagaaccaccuccgcgacaucauggggauccccuacugcaacuacuccaaguacugguaccugaaccacacgaccaccggcaagaccagccugcccaagugcuggcuggucuccaacggcagcuaccugaacgagacgcacuucuccgacgacaucgagcagcaggccgacaacaugaucaccgagaugcuccagaaggaguacauggagcggcaggggaagacgccccugggccugguggaccucuucguguucagcaccuccuucuaccugaucagcaucuuccugcaccuggucaagaucccgugaggacuagucccuguucccagagcccacuuuuuuuucuuuuuuugaaauaaaauagccugucuuucagaucuaaaaaaaaaaaaaaaaaaaaaaaaaaaaaaaaaaaaaaaaaaaaaaaaaaaaaaaaaaaaaaaaaaaaaaaaaaaaaaaaaaaaaaaaaaaaaaaaaaaa

SEQ ID NO: 42435 - RNA, 1629 nt, Artificial Sequence
  mRNA product Design a-2 (A100) comprising derived and/or modified sequence from LASV(Mad39;Clade IV)__ANH09722__GPCmut13 (opt1)
aggagaguccgcucagccagguugcagaagcggcuuagcguguguccuaaucuucucucugcguguagguaggccugugccgcaaacaagcuuaccaugggccagaucgugaccuucuuccaggaggucccccacgugaucgaggaggugaugaacaucguccugaucgcccucagcauccuggccgugcugaaggggcucuacaacguggcgaccugcggccugaucgggcuggucacguuccuccugcugugcggccgcuccugcaccaccacccucuacaaggggguguacgagcugcaggcccuggagcucaacauggagacgcugaacaugaccaugccgcugagcugcaccaagaacaacucccaccacuacauccgggugggcaacgagaccggccucgagcugacgcugaccaacaccagccucaucaaccacaaguucugcaaccuguccgacgcccacaagaagaaccuguacgaccacgcccucaugagcaucaucuccaccuuccaccugagcauccccaacuucaaccaguacgaggccauguccugcgacuucaacgacgggaagaucagcguccaguacaaccugucccacacguacgcgggcgacaccgccaaccacugcgggaccguggccaacggcgugcuccagaccuucaugcgcauggccuggggcgggagcuacaucgcgcuggacuccggccgcgggggcugggacugcaucaugacgagcuaccaguaccugaucauccagaacaccaccugggaggaccacugccaguucucccggcccagccccaucggguaccucggccugcugucccagcggacccgcgacaucuacaucagccggcgccuccugggcacguucaccuggacccuguccgacagcgaggggaaggacaccccgggcggguacugccucacgcgguggaugcugaucgaggccgagcugaagugcuucggcaacaccgccgucgccaagugcaacgagaagcacgacgaggaguucugcgacaugcuccgccuguucgacuucaacaagcaggccauccagcggcugaaggcggaggcccagaugagcauccagcucaucaacaaggccgugaacgcccugaucaacgaccagcugaucaugaagaaccaccuccgcgacaucauggggauccccuacugcaacuacuccaaguacugguaccugaaccacaccgugaccggcaagacgagccugcccaagugcuggcucgucuccaacggcagcuaccugaacgagacccacuucuccgacgacaucgagcagcaggccgacaacaugaucaccgagaugcugcagaaggaguacauggagcggcaggggaagacgccccucggccugguggaccuguucguguucagcaccuccuucuaccugaucagcaucuuccuccaccuggucaagaucccgugaggacuagucccuguucccagagcccacuuuuuuuucuuuuuuugaaauaaaauagccugucuuucagaucuaaaaaaaaaaaaaaaaaaaaaaaaaaaaaaaaaaaaaaaaaaaaaaaaaaaaaaaaaaaaaaaaaaaaaaaaaaaaaaaaaaaaaaaaaaaaaaaaaaaa

SEQ ID NO: 42436 - RNA, 1629 nt, Artificial Sequence
  mRNA product Design a-2 (A100) comprising derived and/or modified sequence from LASV(Z0947-SLE-2011;Clade IV)__AIT17840__GPCmut13 (opt1)
aggagaguccgcucagccagguugcagaagcggcuuagcguguguccuaaucuucucucugcguguagguaggccugugccgcaaacaagcuuaccaugggccagaucgugaccuucuuccaggaggucccccacgugaucgaggaggugaugaacaucguccugaucgcccucagcauccuggccgugcugaaggggcucuacaacuucgcgaccugcggccugguggggcuggucacguuccuccugcugugcggccgcuccugcaccaucagccucuacaaggggguguacgagcugcagacccuggagcucaacauggagacccugaacaugacgaugccgcuguccugcaccaagaacaacagccaccacuacaucauggugggcaacgagaccggccucgagcugacccugacgaacaccuccaucaucaaccacaaguucugcaaccucagcgacgcccacaagaagaaccuguacgaccacgcccugauguccaucaucagcaccuuccaccucuccauccccaacuucaaccaguacgaggccaugagcugcgacuucaacgggggcaagaucuccguccaguacaaccugagccacuccuacgccggggacgcggccaaccacugcggcaccguggccaacggggugcugcagacguucaugcggauggccuggggcggcagcuacaucgcgcucgacuccgggcgcgaccggugggacugcaucaugaccagcuaccaguaccugaucauccagaacaccaccugggaggaccacugccaguucucccgccccagccccaucggcuaccuggggcuccugucccagcggacgcgcgacaucuacaucagccggcgccugcucggcaccuucaccuggacccugagcgacuccgagggcaaggacacgcccgggggcuacugccugacccgguggaugcucaucgaggccgagcugaagugcuucgggaacaccgccgucgccaagugcaacgagaagcacgacgaggaguucugcgacaugcugcgccucuucgacuucaacaagcaggccauccagcggcugaaggcggaggcccagaugagcauccagcugaucaacaaggccgugaacgcccucaucaacgaccagcugaucaugaagaaccaccuccgcgacaucaugggcauccccuacugcaacuacuccaaguacugguaccugaaccacaccacgaccgggaagaccagccugcccaagugcuggcugguguccaacggcagcuaccucaacgagacccacuucuccgacgacaucgagcagcaggccgacaacaugaucacggagaugcugcagaaggaguacauggagcggcagggcaagaccccgcuggggcucgucgaccuguucguguucagcaccuccuucuaccugaucagcaucuuccugcaccucgugaagaucccgugaggacuagucccuguucccagagcccacuuuuuuuucuuuuuuugaaauaaaauagccugucuuucagaucuaaaaaaaaaaaaaaaaaaaaaaaaaaaaaaaaaaaaaaaaaaaaaaaaaaaaaaaaaaaaaaaaaaaaaaaaaaaaaaaaaaaaaaaaaaaaaaaaaaaa

SEQ ID NO: 42437 - RNA, 1629 nt, Artificial Sequence
  mRNA product Design a-2 (A100) comprising derived and/or modified sequence from LASV(Josiah;Clade IV)__NP_694870__GPCmut13 (opt1)
aggagaguccgcucagccagguugcagaagcggcuuagcguguguccuaaucuucucucugcguguagguaggccugugccgcaaacaagcuuaccaugggccagaucgugaccuucuuccaggaggucccccacgugaucgaggaggugaugaacaucguccugaucgcccucagcgugcuggccgugcugaaggggcucuacaacuucgcgaccugcggccuggucgggcuggugacguuccuccugcugugcggccgcuccugcaccaccagccucuacaaggggguguacgagcugcagacccuggagcucaacauggagacgcugaacaugaccaugccgcuguccugcaccaagaacaacagccaccacuacaucauggucggcaacgagaccggccucgagcugacgcugaccaacaccuccaucaucaaccacaaguucugcaaccucagcgacgcccacaagaagaaccuguacgaccacgcccugauguccaucaucagcaccuuccaccucuccauccccaacuucaaccaguacgaggccaugagcugcgacuucaacgggggcaagaucuccgugcaguacaaccugagccacuccuacgccggggacgcggccaaccacugcggcacgguggccaacgggguccugcagaccuucaugcggauggccuggggcggcagcuacaucgcgcucgacuccgggcgcggcaacugggacugcaucaugaccagcuaccaguaccugaucauccagaacaccacgugggaggaccacugccaguucucccggcccagccccaucggguaccugggccuccugucccagcgcacccgggacaucuacaucagccgccggcugcucggcaccuucaccuggacgcugagcgacuccgaggggaaggacaccccgggcggguacugccugacccgcuggaugcucaucgaggccgagcugaagugcuucggcaacaccgccguggccaagugcaacgagaagcacgacgaggaguucugcgacaugcugcggcuguucgacuucaacaagcaggccauccagcgccugaaggcggaggcccagaugagcauccagcugaucaacaaggccgugaacgcccucaucaacgaccagcugaucaugaagaaccaccuccgggacaucauggggauccccuacugcaacuacuccaaguacugguaccucaaccacacgaccaccggccgcaccagccugcccaagugcuggcuggucuccaacggcagcuaccucaacgagacgcacuucuccgacgacaucgagcagcaggccgacaacaugaucaccgagaugcugcagaaggaguacauggagcggcaggggaagacgccccugggccugguggaccucuucguguucagcaccuccuucuaccugaucagcaucuuccugcaccucgucaagaucccgugaggacuagucccuguucccagagcccacuuuuuuuucuuuuuuugaaauaaaauagccugucuuucagaucuaaaaaaaaaaaaaaaaaaaaaaaaaaaaaaaaaaaaaaaaaaaaaaaaaaaaaaaaaaaaaaaaaaaaaaaaaaaaaaaaaaaaaaaaaaaaaaaaaaaa

SEQ ID NO: 42438 - RNA, 1626 nt, Artificial Sequence
  mRNA product Design a-2 (A100) comprising derived and/or modified sequence from LASV(LP;Clade I)__AAF86701__GPCmut13 (opt1)
aggagaguccgcucagccagguugcagaagcggcuuagcguguguccuaaucuucucucugcguguagguaggccugugccgcaaacaagcuuaccaugggccagaucaucaccuucuuccaggaggugccccacgucaucgaggaggugaugaacaucgugcugaucgcccucagccugcuggccauccucaaggggcuguacaacaucgcgaccugcggcaucaucgggcuggucgccuuccucuuccugugcggcaaguccugcagccugacgcucaagggcggguacgagcugcagacccuggagcucaacauggagacccugaacaugaccaugccgcuguccugcacgaagaacagcucccaccacuacauccgcgugggcaacgagaccgggcucgagcugacccugaccaacacgagcaucaucaaccacaaguucugcaaccucuccgacgcccacaagaagaaccuguacgaccacgcccugaugagcaucaucuccaccuuccaccucagcauccccaacuucaaccaguacgaggccauguccugcgacuucaacggcgggaagaucagcgugcaguacaaccugucccacagcuacgcgggcgacgccgccgagcacugcgggaccgucgccaacggcgugcugcagaccuucaugcggauggcguggggcgggcgcuacaucgcccucgacuccggcaaggggaacugggacugcaucaugacgagcuaccaguaccugaucauccagaacaccaccugggaggaccacugccaguucucccggcccagccccaucggcuaccugggccuccugucccagcgcacccgggacaucuacaucagccgccggcugcucgggacguucaccuggacccugagcgacuccgagggcaacgagacccccgggggcuacugccugacgcgcuggaugcucaucgaggccgagcugaagugcuucgggaacaccgccguggccaagugcaacgagaagcacgacgaggaguucugcgacaugcugcggcuguucgacuucaacaagcaggcgauccgccggcugaaggccgaggcccagaugagcauccagcugaucaacaaggccgucaacgcccucaucaacgaccagcugaucaugaagaaccaccuccgcgacaucaugggcauccccuacugcaacuacuccaaguacugguaccucaaccacaccagcuccggccggaccagccugcccaagugcuggcugaucuccaacgggagcuaccucaacgagacgcaguucuccgacgacaucgagcagcaggcggacaacaugaucaccgagaugcugcagaaggaguacaucgagcgccagggcaagaccccgcuggggcugguggacaucuucaucuucagcaccuccuucuaccucaucagcaucuuccugcaccugaucaagaucccgugaggacuagucccuguucccagagcccacuuuuuuuucuuuuuuugaaauaaaauagccugucuuucagaucuaaaaaaaaaaaaaaaaaaaaaaaaaaaaaaaaaaaaaaaaaaaaaaaaaaaaaaaaaaaaaaaaaaaaaaaaaaaaaaaaaaaaaaaaaaaaaaaaaaaa

SEQ ID NO: 42439 - RNA, 1626 nt, Artificial Sequence
  mRNA product Design a-2 (A100) comprising derived and/or modified sequence from LASV(803213;Clade II)__AAF86703__GPCmut13 (opt1)
aggagaguccgcucagccagguugcagaagcggcuuagcguguguccuaaucuucucucugcguguagguaggccugugccgcaaacaagcuuaccaugggccagaucaucaccuucuuccaggaggugccccacgucaucgaggaggugaugaacaucgugcugaucgcccucagccugcuggccauccucaaggggaucuacaacgucgcgaccugcggccuguucgggcugaucuccuuccuccugcugugcggccgcagcugcuccgugacguacaaggggguguacgagcuccagacccuggagcugaacauggccaaccucaacaugaccaugccgcugagcugcaccaagaacaacucccaccacuacaucauggucggcaacgagacgggccuggagcucacccugaccaacaccagcaucaucaaccacaaguucugcaaccuguccgacgcccacaagaagaaccucuacgaccacgcccugaugagcaucaucuccacguuccaccugagcauccccaacuucaaccaguacgaggccauguccugcgacuucaacgggggcaagaucagcgugcaguacaaccucucccacagcuucgcgguggacgccgccaaccacugcgggaccaucgccaacggcguccugcagaccuucaugcggauggcguggggcggguccuacaucgcccuggacagcggcaaggggaacugggacugcaucaugaccuccuaccaguaccucaucauccagaacacgaccugggaggaccacugccaguucagccgccccucccccaucggcuaccuggggcugcucagccagcggacccgcgacaucuacaucagccggcgccugcugggcaccuucacguggacccucuccgacagcgagggcaacgaggcccccgggggcuacugccugacccgguggaugcugaucgaggccgagcucaagugcuucgggaacaccgccguggcgaagugcaacgagaagcacgacgaggaguucugcgacaugcugcgccuguucgacuucaacaagcaggccaucaagcggcucaagacggaggcccagauguccauccagcugaucaacaaggccgugaacgcccugaucaacgaccagcucaucaugaagaaccaccuccgcgacaucaugggcauccccuacugcaacuacagccgguacugguaccugaaccacaccgucaccgggaagaccucccugccccgcugcuggcuggugagcaacggcuccuaccugaacgagacgcacuucagcgacgacaucgagcagcaggcggacaacaugaucaccgagaugcuccagaaggaguacauggaccggcagggcaagaccccgcuggggcugguggaccuguucgucuucuccaccagcuucuaccucaucuccaucuuccugcaccuggugaagaucccgugaggacuagucccuguucccagagcccacuuuuuuuucuuuuuuugaaauaaaauagccugucuuucagaucuaaaaaaaaaaaaaaaaaaaaaaaaaaaaaaaaaaaaaaaaaaaaaaaaaaaaaaaaaaaaaaaaaaaaaaaaaaaaaaaaaaaaaaaaaaaaaaaaaaaa

SEQ ID NO: 42440 - RNA, 1626 nt, Artificial Sequence
  mRNA product Design a-2 (A100) comprising derived and/or modified sequence from LASV(GA391;Clade III)__CAA36645__GPCmut13 (opt1)
aggagaguccgcucagccagguugcagaagcggcuuagcguguguccuaaucuucucucugcguguagguaggccugugccgcaaacaagcuuaccaugggccagaucgugaccuucuuccaggaggucccccacgugaucgaggaggugaugaacaucguccugaucgcccucagcauccuggccauccugaaggggcucuacaacguggcgaccugcggccugaucgggcuggugacguuccuccugcuguccggccgcagcugcucccucaucuacaaggggaccuacgagcugcagacccuggagcucaacauggagacccugaacaugacgaugccgcugagcugcaccaagaacaacucccaccacuacauccgggucggcaacgagaccggccucgagcugacccugacgaacaccagcauccucaaccacaaguucugcaaccuguccgacgcccacaagcgcaaccuguacgaccacagccucauguccaucaucagcaccuuccaccuguccauccccaacuucaaccaguacgaggccaugagcugcgacuucaacgggggcaagaucaccgugcaguacaaccugucccacagcuucgccguggacgccgcggggcacugcggcacgcucgccaacgggguccugcagaccuucaugcggauggccuggggcggcuccuacaucgcccuggacagcgggcgcggcaacugggacugcaucaugaccuccuaccaguaccucaucauccagaacaccacgugggacgaccacugccaguucagccggcccucccccaucggguaccugggccugcucagccagcgcacccgggacaucuacaucagccgccggcugcugggcaccuucaccuggacgcucuccgacagcgaggggaacgagaccccgggcggguacugccugacccgcuggaugcugaucgaggcggagcucaagugcuucggcaacaccgccguggccaagugcaacgagaagcacgacgaggaguucugcgacaugcugcggcuguucgacuucaacaagcaggccauccgccggcucaagacggaggcccagauguccauccagcugaucaacaaggcggugaacgcccugaucaacgaccagcucaucaugaagaaccaccuccgcgacaucauggggauccccuacugcaacuacagccgguacugguaccugaaccacaccuccaccggcaagaccagccugccccgcugcuggcugaucuccaacggcagcuaccugaacgagacgaaguucuccgacgacaucgagcagcaggccgacaacaugaucaccgagaugcugcagaaggaguacaucgaccggcaggggaagacgccccucggccuggucgaccuguucguguucagcaccuccuucuaccucaucagcaucuuccugcaccuggugaagaucccgugaggacuagucccuguucccagagcccacuuuuuuuucuuuuuuugaaauaaaauagccugucuuucagaucuaaaaaaaaaaaaaaaaaaaaaaaaaaaaaaaaaaaaaaaaaaaaaaaaaaaaaaaaaaaaaaaaaaaaaaaaaaaaaaaaaaaaaaaaaaaaaaaaaaaa

SEQ ID NO: 42441 - RNA, 1629 nt, Artificial Sequence
  mRNA product Design a-2 (A100) comprising derived and/or modified sequence from LASV(AV;Clade V)__CCA30314__GPCmut13 (opt1)
aggagaguccgcucagccagguugcagaagcggcuuagcguguguccuaaucuucucucugcguguagguaggccugugccgcaaacaagcuuaccaugggccagaucgugaccuucuuccaggaggucccccacgugaucgaggaggugaugaacaucguccugaucgcccucagcauccuggccgugcugaaggggcucuacaacaucgcgaccugcggccugaucgggcugaucacguuccuccugcugugcggccgcuccugcagcuccaaccucuacaaggggguguacgagcugcagagccuggaccucaacauggagacccugaacaugaccaugccgcuguccugcaccaagaacaacagccaccacuacauccgggucggcaacgacacgggccucgagcugacccugaccaacaccuccauccucaaccacaaguucugcaaccugagcgacgcccacaagaaggaccuguacgaccacgcccucauguccaucaucagcacguuccaccuguccauccccaacuucaaccaguacgaggccaugagcugcgacuucaacgggggcaagaucuccgugcaguacaaccugagccacuccuacgccaucgacgcggccaaccacugcgggaccguggccaacggcauccuccagaccuucaugcgcauggccuggggcgggagcuacaucgcgcuggacuccggccgggggaacugggacugcaucaugaccagcuaccaguaccugaucauccagaacacgaccugggagaaccacugccaguucucccgccccagccccaucggcuaccucgggcugcugagccagcggacccgcgacaucuacaucucccggcgccuccugggcaccuucacguggacccugagcgacuccgagggcaacgccacccccgggggcuacugccucacccgguggaugcugaucgaggccgagcugaagugcuucgggaacacggccgucgccaagugcaacgagaagcacgacgaggaguucugcgacaugcuccgccuguucgacuucaacaagcaggcgaucagccggcugaaguccgaggcccagaugagcauccagcucaucaacaaggccgugaacgcccugaucaacgaccagcugaucaugaagaaccaccuccgcgacaucaugggcauccccuacugcaacuacuccaaguacugguaccugaaccacaccaucaccgggaagaccagccugcccaagugcuggcucguguccaacggcagcuaccugaacgagacgcacuucuccgacgacaucgagcagcaggccgacaacaugaucaccgagaugcugcagaaggaguacauggagcggcagggcaagaccccgcuggggcucgucgaccuguucguguucagcaccuccuucuaccugaucagcaucuuccuccgccuggugaagaucccgugaggacuagucccuguucccagagcccacuuuuuuuucuuuuuuugaaauaaaauagccugucuuucagaucuaaaaaaaaaaaaaaaaaaaaaaaaaaaaaaaaaaaaaaaaaaaaaaaaaaaaaaaaaaaaaaaaaaaaaaaaaaaaaaaaaaaaaaaaaaaaaaaaaaaa

SEQ ID NO: 42442 - RNA, 1626 nt, Artificial Sequence
  mRNA product Design a-2 (A100) comprising derived and/or modified sequence from LASV(Togo/2016/7082;Clade VI)__AMR44577__GPCmut13 (opt1)
aggagaguccgcucagccagguugcagaagcggcuuagcguguguccuaaucuucucucugcguguagguaggccugugccgcaaacaagcuuaccaugggccagaucaucaccuucuuccaggaggugccccacgucaucgaggaggugaugaacaucgugcugaucgcccucagccugcuggccauccucaagggggucuacaacguggcgaccugcggcaucaucgggcuggugacguuccuguuccucugcggccgcuccugcagccugaucuacaagggguccuacgagcugcagacccucgagcugaacauggagacccugaacaugaccaugccgcucagcugcacgaagaacuccagccaccacuacauccgggucggcaacgagaccggccuggagcugacccucaccaacacguccaucaucaaccacaaguucugcaaccugagcgacgcccacaagcgcaaccuguacgaccacgcccucauguccauccugagcaccuuccaccuguccauccccaacuucaaccaguacgaggccaugagcugcgacuucaacgggggcaagaucuccgugcaguacaaccucagccacgccuacgcgguggacgccgccgagcacugcgggaccgucgccaacggcgugcugcagaccuucaugcggauggcguggggcggguccuacaucgcccuggacagcggccgcgggaacugggacugcaucaugacguccuaccaguaccucaucauccagaacaccaccugggaggaccacugccaguucagccggcccucccccaucggcuaccuggggcugcucagccagcgcacccgggacaucuacaucagccgccggcugcugggcacguucaccuggacccucuccgacagcgagggcaacgagacccccgggggcuacugccugacgcgcuggaugcugaucgaggccgagcucaagugcuucgggaacaccgccguggccaagugcaacgagaagcacgacgaggaguucugcgacaugcugcggcuguucgacuucaacaagcaggcgauccagcgccucaaguccgaggcccagaugagcauccagcugaucaacaaggccgucaacgcccugaucaacgaccagcucaucaugaagaaccaccuccgggacaugaugggcauccccuacugcaacuacuccaaguacugguaccugaaccacaccagcuccgggcgcaccagccugcccaagugcuggcugguguccaacggcagcuaccugaacgagacgcacuucuccgacgacaucgagcagcaggccgacaacaugaucaccgagaugcuccagaaggaguacaucgaccggcagggcaagaccccgcuggggcugguggaccuguucgucuucagcaccuccuucuaccucaucagcaucuuccugcaccugaucaagaucccgugaggacuagucccuguucccagagcccacuuuuuuuucuuuuuuugaaauaaaauagccugucuuucagaucuaaaaaaaaaaaaaaaaaaaaaaaaaaaaaaaaaaaaaaaaaaaaaaaaaaaaaaaaaaaaaaaaaaaaaaaaaaaaaaaaaaaaaaaaaaaaaaaaaaaa

SEQ ID NO: 42443 - RNA, 1626 nt, Artificial Sequence
  mRNA product Design a-2 (A100) comprising derived and/or modified sequence from LASV(KAK-428;Clade n.d. (VII))__ANH09740__GPCmut13 (opt1)
aggagaguccgcucagccagguugcagaagcggcuuagcguguguccuaaucuucucucugcguguagguaggccugugccgcaaacaagcuuaccaugggccagaucgugaccuucuuccaggaggucccccacgugaucgaggaggugaugaacaucguccugaucgcccucagccugcuggccauccucaaggggcuguacaacuucgcgaccugcggcgugaucgggcugaucacguuccuccugcugugcggccgcuccugcagcgccaccuacaaggggcaguacgagcuccagacccuggagcugaacauggagucccucaacaugaccaugccgcugagcugcacgaagaacaacucccaccacuacauccgggccggcaacaacaccggccuggagcucacccugaccaacacgagcaucaucucccacaaguucugcaaccugagcgacgcccacaagaagaaccucuacgaccacacccugauguccaucaucaccaccuuccaccugagcauccccaacuucaaccaguacgaggccauguccugcgacuucaacgggggcaagaucagcauccaguacaaccucucccacagcuacgcgggggacgccgcccagcacugcggcacgguggccaacgggguccugcagaccuucaugcgcauggcguggggcggcuccuaccuggcccucgacagcgggcggcgcggcugggacugcaucaucuccagcuaccaguaccugaucauccagaacaccaccugggacgaccacugccaguucucccggcccagccccaucggguaccugggcuucgugagccagaagacgcgcgacaucuacaucucccggcgccuccugggcaccuucaccuggacccugagcgacuccgaggggcacgacaugccgggcggguacugccucacgcgguggaugcugaucgaggccgaccugaagugcuucggcaacaccgccguggccaagugcaacgagaagcacgacgaggaguucugcgacauguggcgccucuucgacuucaacaagcaggcgauccagcggcugaaggccgaggcccagaugaacauccagcugaucaacaaggccgucaacgcccucaucaacgaccagcugaugaugaagaaccaccuccgcgacaucauggggauccccuacugcaacuacagcaaguucugguaccugaacaacaccaccacgggccggaccucccugccccgcugcuggcugaucagcaacggcuccuaccucaacgagacccacuucagcgacgacaucgagcagcaggcggacaacaugaucaccgagaugcugcagaaggaguacauggaccggcaggggaagacgccccugggccucguggaccuguucguguucuccaccagcuucuaccugaucaccaucuuccugcaccucgucaagaucccgugaggacuagucccuguucccagagcccacuuuuuuuucuuuuuuugaaauaaaauagccugucuuucagaucuaaaaaaaaaaaaaaaaaaaaaaaaaaaaaaaaaaaaaaaaaaaaaaaaaaaaaaaaaaaaaaaaaaaaaaaaaaaaaaaaaaaaaaaaaaaaaaaaaaaa

SEQ ID NO: 42444 - RNA, 1626 nt, Artificial Sequence; identical to SEQ ID NO: 42438
  mRNA product Design a-2 (A100) comprising derived and/or modified sequence from LASV(Pinneo-NIG-1969;Clade I)__AIT17836__GPCmut13 (opt1)

SEQ ID NO: 42445 - RNA, 1626 nt, Artificial Sequence
  mRNA product Design a-2 (A100) comprising derived and/or modified sequence from LASV(ISTH0009-NIG-2011;Clade II)__AIT17404__GPCmut13 (opt1)
aggagaguccgcucagccagguugcagaagcggcuuagcguguguccuaaucuucucucugcguguagguaggccugugccgcaaacaagcuuaccaugggccagaucaucaccuucuuccaggaggugccccacgucaucgaggaggugaugaacaucgugcugaucgcccucagccugcuggccauccucaaggggaucuacaacgucgcgaccugcggccuguucgggcugguguccuuccuccugcugugcggccgcagcugcuccacgaccuacaaggggguguacgagcuccagacccuggagcuggacauggccagccucaacaugaccaugccgcuguccugcacgaagaacaacagccaccacuacaucauggucggcaacgagaccggccuggagcucacccugaccaacacguccaucaucaaccacaaguucugcaaccugagcgacgcccacaagaagaaccucuacgaccacgcccugauguccaucaucagcaccuuccaccuguccauccccaacuucaaccaguacgaggccaugagcugcgacuucaacgggggcaagaucuccgugcaguacaaccucagccacgcguacgccguggacgccgccaaccacugcgggaccaucgcgaacggcguccugcagaccuucaugcggauggccuggggcggguccuacaucgcccuggacagcggcaagggguccugggacugcaucaugacgagcuaccaguaccucaucauccagaacaccaccugggaggaccacugccaguucucccgccccagccccaucggcuaccuggggcugcucagccagcggacccgcgacaucuacaucucccggcgccugcugggcacguucaccuggacccucagcgacuccgagggcaacgagacccccgggggcuacugccugacgcgguggaugcugaucgaggccgagcucaagugcuucgggaacaccgccguggcgaagugcaacgagaagcacgacgaggaguucugcgacaugcugcgccuguucgacuucaacaagcaggccauccggcgccucaagaccgaggcccagaugagcauccagcugaucaacaaggccgugaacgcccugaucaacgaccagcucaucaugaagaaccaccuccgggacaucaugggcaucccguacugcaacuacuccaaguacugguaccugaaccacaccgucacggggaagaccagccugccccgcugcuggcugguguccaacggcagcuaccugaacgagacccacuucuccgacgacaucgagcagcaggcggacaacaugaucaccgagcuccugcagaaggaguacauggaccggcagggcaagacgccccuggggcugguggaccucuucgucuucagcaccuccuucuaccugaucagcaucuuccugcaccucaucaagaucccgugaggacuagucccuguucccagagcccacuuuuuuuucuuuuuuugaaauaaaauagccugucuuucagaucuaaaaaaaaaaaaaaaaaaaaaaaaaaaaaaaaaaaaaaaaaaaaaaaaaaaaaaaaaaaaaaaaaaaaaaaaaaaaaaaaaaaaaaaaaaaaaaaaaaaa

SEQ ID NO: 42446 - RNA, 1626 nt, Artificial Sequence
  mRNA product Design a-2 (A100) comprising derived and/or modified sequence from LASV(ISTH2010-NIG-2012;Clade II)__AIT17482__GPCmut13 (opt1)
aggagaguccgcucagccagguugcagaagcggcuuagcguguguccuaaucuucucucugcguguagguaggccugugccgcaaacaagcuuaccaugggccagaucaucaccuucuuccaggaggugccccacgucaucgaggaggugaugaacaucgugcugaucgcccucagccugcuggccauccucaaggggaucuacaacgucgcgaccugcggccuguucgggcugguguccuuccuccugcugugcggccgcagcugcuccacgaccuacaaggggguguacgagcuccagacccuggagcuggacauggccagccucaacaugaccaugccgcuguccugcacgaagaacaacagccaccacuacaucauggucggcaacgagaccggccuggagcucacccugaccaacacguccaucaucaaccacaaguucugcaaccugagcgacgcccacaagaagaaccucuacgaccacgcccugauguccaucaucagcaccuuccaccuguccauccccaacuucaaccaguacgaggccaugagcugcgacuucaacgggggcaagaucuccgugcaguacaaccucagccacgcguacgccguggacgccgccaaccacugcgggaccaucgcgaacggcguccugcagaccuucaugcggauggccuggggcggguccuacaucgcccuggacagcggcaagggguccugggacugcaucaugacgagcuaccaguaccucaucauccagaacaucaccugggaggaccacugccaguucucccgccccagccccaucggcuaccuggggcugcucagccagcggacccgcgacaucuacaucucccggcgccugcugggcaccuucacguggacccucagcgacuccgagggcaacgagacccccgggggcuacugccugacccgguggaugcugaucgaggccgagcucaagugcuucgggaacacggccguggcgaagugcaacgagaagcacgacgaggaguucugcgacaugcugcgccuguucgacuucaacaagcaggccauccggcgccucaagaccgaggcccagaugagcauccagcugaucaacaaggccgugaacgcccugaucaacgaccagcucaucaugaagaaccaccuccgggacaucaugggcauccccuacugcaacuacuccaaguacugguaccugaaccacaccgucaccgggaagacgagccugccccgcugcuggcugguguccaacggcagcuaccugaacgagacccacuucuccgacgacaucgagcagcaggcggacaacaugaucaccgagcuccugcagaaggaguacaucgaccggcagggcaagaccccgcuggggcugguggaccucuucgucuucagcacguccuucuaccugaucagcaucuuccugcaccucgugaagaucccgugaggacuagucccuguucccagagcccacuuuuuuuucuuuuuuugaaauaaaauagccugucuuucagaucuaaaaaaaaaaaaaaaaaaaaaaaaaaaaaaaaaaaaaaaaaaaaaaaaaaaaaaaaaaaaaaaaaaaaaaaaaaaaaaaaaaaaaaaaaaaaaaaaaaaa

SEQ ID NO: 42447 - RNA, 1626 nt, Artificial Sequence
  mRNA product Design a-2 (A100) comprising derived and/or modified sequence from LASV(Lassa virus/H.sapiens-wt/NGA/2015/ISTH_0543;Clade II)__AVO03639__GPCmut13 (opt1)
aggagaguccgcucagccagguugcagaagcggcuuagcguguguccuaaucuucucucugcguguagguaggccugugccgcaaacaagcuuaccaugggccagaucaucaccuucuuccaggaggugccccacgucaucgaggaggugaugaacaucgugcugaucgcccucagccugcuggccauccucaaggggaucuacaacgucgcgaccugcggccuguucgggcugguguccuuccuccugcugugcggccgcagcugcuccacgaccuacaaggggguguacgagcuccagacccuggagcuggacauggccaaccucaacaugaccaugccgcugagcugcacgaagaacaacucccaccacuacaucauggucggcaacgagaccggccuggagcucacccugaccaacacgagcaucaucaaccacaaguucugcaaccuguccgacgcccacaagaagaaccucuacgaccacgcccugaugagcaucaucuccaccuuccaccugagcauccccaacuucaaccaguacgaggccauguccugcgacuucaacgggggcaagaucagcgugcaguacaaccucucccacaccuacgcgguggacgccgccaaccacugcgggaccaucgccaacggcguccugcagacguucaugcggauggcguggggcgggagcuacaucgcccuggacuccggcaaggggagcugggacugcaucaugaccuccuaccaguaccucgugauccagaacaccaccugggaggaccacugccaguucagccgccccucccccaucggcuaccuggggcugcucagccagcggacgcgcgacaucuacaucagccggcgccugcugggcaccuucaccuggacccucuccgacagcgagggcaacgagacgcccgggggcuacugccugacccgguggaugcugaucgaggccgagcucaagugcuucgggaacaccgccguggccaagugcaacgagaagcacgacgaggaguucugcgacaugcugcgccuguucgacuucaacaagcaggcgauccggcgccucaagaccgaggcccagauguccauccagcugaucaacaaggccgucaacgcccugaucaacgaccagcucaucaugaagaaccaccuccgggacaucaugggcauccccuacugcaacuacagcaaguacugguaccugaaccacacggugaccgggaagaccucccugccccgcugcuggcuggugagcaacggcuccuaccugaacgagacccacuucagcgacgacaucgagcagcaggccgacaacaugaucacggagcuccugcagaaggaguacaucgaccggcagggcaagaccccgcuggggcuggucgaccucuucguguucuccaccagcuucuaccugaucuccaucuuccugcaccucgugaagaucccgugaggacuagucccuguucccagagcccacuuuuuuuucuuuuuuugaaauaaaauagccugucuuucagaucuaaaaaaaaaaaaaaaaaaaaaaaaaaaaaaaaaaaaaaaaaaaaaaaaaaaaaaaaaaaaaaaaaaaaaaaaaaaaaaaaaaaaaaaaaaaaaaaaaaaa

SEQ ID NO: 42448 - RNA, 1626 nt, Artificial Sequence
  mRNA product Design a-2 (A100) comprising derived and/or modified sequence from LASV(Lassa virus/H.sapiens-wt/NGA/2016/ISTH_0009;Clade II)__AVO03571__GPCmut13 (opt1)
aggagaguccgcucagccagguugcagaagcggcuuagcguguguccuaaucuucucucugcguguagguaggccugugccgcaaacaagcuuaccaugggccagaucaucaccuucuuccaggaggugccccacgucaucgaggaggugaugaacaucgugcugaucgcccucagccugcuggccauccucaaggggaucuacaacgucgcgaccugcggccugcuggggcucguguccuuccugcugcucugcggccgcagcugcuccacgaccuacaaggggguguacgagcugcagacccuggagcucgacauggccagccugaacaugaccaugccgcuguccugcacgaagaacaacagccaccacuacaucauggucggcaacgagaccggccucgagcugacccugaccaacacguccaucaucaaccacaaguucugcaaccucagcgacgcccacaagaagaaccuguacgaccacgcccugauguccaucaucagcaccuuccaccucuccauccccaacuucaaccaguacgaggccaugagcugcgacuucaacgggggccggaucuccgugcaguacaaccugagccacuccuacgcgguggacgccgccaaccacugcgggaccaucgccaacggcguccugcagaccuucaugcgcauggcguggggcgggagcuacaucgcccucgacuccggcaaggggagcugggacugcaucaugacguccuaccaguaccugaucauccagaacaccaccugggaggaccacugccaguucagccggcccagccccaucggcuaccuggggcuccugucccagcgcacccgggacaucuacaucagccgccggcugcucggcacguucaccuggacccuguccgacagcgagggcaacgagacccccgggggcuacugccugacgcgcuggaugcucaucgaggccgagcugaagugcuucgggaacaccgccguggccaagugcaacgagaagcacgacgaggaguucugcgacaugcugcggcuguucgacuucaacaagcaggcgauccgccggcugaagaccgaggcccagauguccauccagcugaucaacaaggccgugaacgcccucaucaacgaccagcugaucaugaagaaccaccuccgcgacaucaugggcaucccguacugcaacuacagcaaguacugguaccucaaccacaccgucacggggaagaccucccugccccggugcuggcuggugagcaacggcuccuaccucaacgagacccacuucagcgacgacaucgagcagcaggccgacaacaugaucaccgagcugcugcagaaggaguacaucgaccgccagggcaagacgccccuggggcucguggaccuguucgucuucuccaccagcuucuaccugaucuccaucuuccuccaccuggugaagaucccgugaggacuagucccuguucccagagcccacuuuuuuuucuuuuuuugaaauaaaauagccugucuuucagaucuaaaaaaaaaaaaaaaaaaaaaaaaaaaaaaaaaaaaaaaaaaaaaaaaaaaaaaaaaaaaaaaaaaaaaaaaaaaaaaaaaaaaaaaaaaaaaaaaaaaa

SEQ ID NO: 42449 - RNA, 1626 nt, Artificial Sequence
  mRNA product Design a-2 (A100) comprising derived and/or modified sequence from LASV(Lassa virus/H.sapiens-wt/NGA/2016/ISTH_0017;Clade II)__AVO03567__GPCmut13 (opt1)
aggagaguccgcucagccagguugcagaagcggcuuagcguguguccuaaucuucucucugcguguagguaggccugugccgcaaacaagcuuaccaugggccagaucaucaccuucuuccaggaggugccccacgucaucgaggaggugaugaacaucgugcugaucgcccucagccugcuggccauccucaaggggaucuacaacgucgcgaccugcggccuguucgggcugguguccuuccuccugcugugcggccgcagcugcuccacgaccuacaaggggguguacgagcuccagacccuggagcuggacauggccagccucaacaugaccaugccgcuguccugcacgaagaacaacagccaccacuacaucauggucggcaacgagaccggccuggagcucacccugaccaacacguccaucaucaaccacaaguucugcaaccugagcgacgcccacaagaagaaccucuacgaccacgcccugauguccaucaucagcaccuuccaccuguccauccccaacuucaaccaguacgaggccaugagcugcgacuucaacgggggcaagaucuccgugcaguacaaccucagccacaccuacgcgaucgacgccgccaaccacugcgggaccaucgccaacggcgugcugcagacguucaugcggauggcguggggcggguccuacaucgcccuggacagcggcaagggguccugggacugcaucaugaccagcuaccaguaccucaucauccagaacaccaccugggaggaccacugccaguucucccgccccagccccaucggcuaccuggggcugcucagccagcggacgcgcgacaucuacaucucccggcgccugcugggcaccuucaccuggacccucagcgacuccgagggcaacgagacgcccgggggcuacugccugacccgguggaugcugaucgaggccgagcucaagugcuucgggaacaccgccgucgccaagugcaacgagaagcacgacgaggaguucugcgacaugcugcgccuguucgacuucaacaagcaggcgauccggcgccucaagaccgaggcccagaugagcauccagcugaucaacaaggccgugaacgcccugaucaacgaccagcucaucaugaagaaccaccuccgggacaucaugggcauccccuacugcaacuacuccaaguacugguaccugaaccacacggugaccgggaagaccagccugccccgcugcuggcuggucuccaacggcagcuaccugaacgagacccacuucuccgacgacaucgagcagcaggccgacaacaugaucacggagcuccugcagaaggaguacauggaccggcagggcaagaccccgcuggggcugguggaccucuucguguucagcaccuccuucuaccugaucagcaucuuccugcaccucguccgcaucccgugaggacuagucccuguucccagagcccacuuuuuuuucuuuuuuugaaauaaaauagccugucuuucagaucuaaaaaaaaaaaaaaaaaaaaaaaaaaaaaaaaaaaaaaaaaaaaaaaaaaaaaaaaaaaaaaaaaaaaaaaaaaaaaaaaaaaaaaaaaaaaaaaaaaaa

SEQ ID NO: 42450 - RNA, 1626 nt, Artificial Sequence
  mRNA product Design a-2 (A100) comprising derived and/or modified sequence from LASV(Lassa virus/H.sapiens-wt/NGA/2018/ISTH_0959;Clade II)__AVV65099__GPCmut13 (opt1)
aggagaguccgcucagccagguugcagaagcggcuuagcguguguccuaaucuucucucugcguguagguaggccugugccgcaaacaagcuuaccaugggccagaucaucaccuucuuccaggaggugccccacgucaucgaggaggugaugaacaucgugcugaucgcccucagccugcuggccauccucaaggggaucuacaacgucgugaccugcggccuguucgggcugguguccuuccuccugcugugcggccgcagcugcuccacgaccuacaagggggucuacgagcuccagacccuggagcuggacauggcgagccucaacaugaccaugccgcuguccugcacgaagaacaacagccaccacuacaucauggugggcaacgagaccggccuggagcucacccugaccaacacguccaucaucaaccacaaguucugcaaccugagcgacgcccacaagaagaaccucuacgaccacgcccugauguccaucaucagcaccuuccaccuguccauccccaacuucaaccaguacgaggccaugagcugcgacuucaacgggggcaagaucuccgugcaguacaaccucagccacgccuacgcgaucgacgccgccaaccacugcgggaccaucgccaacggcguccugcagaccuucaugcggauggcguggggcggguccuacaucgcccuggacagcggcaagggguccugggacugcaucaugacgagcuaccaguaccucaucauccagaacaccaccugggaggaccacugccaguucucccgccccagccccaucggcuaccuggggcugcucagccagcggacccgcgacaucuacaucucccggcgccugcugggcacguucaccuggacccucagcgacuccgagggcaacgagacccccgggggcuacugccugacgcgguggaugcugaucgaggccgagcucaagugcuucgggaacaccgccguggccaagugcaacgagaagcacgacgaggaguucugcgacaugcugcgccuguucgacuucaacaagcaggcgauccggcgccucaagaccgaggcccagaugagcauccagcugaucaacaaggccgugaacgcccugaucaacgaccagcucaucaugaagaaccaccuccgggacaucaugggcaucccguacugcaacuacuccaaguacugguaccugaaccacaccgucacggggaagaccagccugccccgcugcuggcugguguccaacggcagcuaccugaacgagacccacuucuccgacgacaucgagcagcaggccgacaacaugaucaccgagcuccugcagaaggaguacaucgaccggcagggcaagacgccccuggggcugguggaccucuucgucuucagcaccuccuucuaccugaucagcaucuuccugcaccucgugaagaucccgugaggacuagucccuguucccagagcccacuuuuuuuucuuuuuuugaaauaaaauagccugucuuucagaucuaaaaaaaaaaaaaaaaaaaaaaaaaaaaaaaaaaaaaaaaaaaaaaaaaaaaaaaaaaaaaaaaaaaaaaaaaaaaaaaaaaaaaaaaaaaaaaaaaaaa

SEQ ID NO: 42451 - RNA, 1626 nt, Artificial Sequence
  mRNA product Design a-2 (A100) comprising derived and/or modified sequence from LASV(LASV003-NIG-2008;Clade II)__AIT17580__GPCmut13 (opt1)
aggagaguccgcucagccagguugcagaagcggcuuagcguguguccuaaucuucucucugcguguagguaggccugugccgcaaacaagcuuaccaugggccagaucaucaccuucuuccaggaggugccccacgucaucgaggaggugaugaacaucgugcugaucgcccucagccugcuggccauccucaaggggaucuacaacgucgcgaccugcggccuguucgggcugguguccuuccuccugcugugcggccgcagcugcuccacgaccuacaaggggguguacgagcuccagacccuggagcuggacauggccagccucaacaugaccaugccgcuguccugcacgaagaacaacagccaccacuacaucauggucggcaacgagaccggccuggagcucacccugaccaacacguccaucaucaaccacaaguucugcaaccugagcgacgcccacaagaagaaccucuacgaccacgcccugauguccaucaucagcaccuuccaccuguccauccccaacuucaaccaguacgaggccaugagcugcgacuucaacgggggcaagaucuccgugcaguacaaccucagccacaccuacgcgguggacgccgccaaccacugcgggaccaucgccaacggcguccugcagacguucaugcggauggcguggggcggguccuacaucgcccuggacagcggcaagggguccugggacugcaucaugaccagcuaccaguaccucaucauccagaacaccaccugggaggaccacugccaguucucccgccccagccccaucggcuaccuggggcugcucagccagcggacgcgcgacaucuacaucucccggcgccugcugggcaccuucaccuggacccucagcgacuccgagagcaacgagacgccgggcggguacugccugacccgguggaugcugaucgaggccgagcucaagugcuucggcaacaccgccguggccaagugcaacgagaagcacgacgaggaguucugcgacaugcugcgccuguucgacuucaacaagcaggcgauccggcgccucaaggccgaggcccagauguccauccagcugaucaacaaggccgugaacgcccugaucaacgaccagcucaucaugaagaaccaccuccgggacaucauggggauccccuacugcaacuacagcaaguacugguaccugaaccacaccgucacgggccgcaccucccugccccggugcuggcuggugagcaacggguccuaccugaacgagacccacuucagcgacgacaucgagcagcaggcggacaacaugaucaccgagcuccugcagaaggaguacauggaccgccagggcaagacgccccugggccugguggaccucuucgucuucuccaccagcuucuaccugaucuccaucuuccugcaccucgugaagaucccgugaggacuagucccuguucccagagcccacuuuuuuuucuuuuuuugaaauaaaauagccugucuuucagaucuaaaaaaaaaaaaaaaaaaaaaaaaaaaaaaaaaaaaaaaaaaaaaaaaaaaaaaaaaaaaaaaaaaaaaaaaaaaaaaaaaaaaaaaaaaaaaaaaaaaa

SEQ ID NO: 42452 - RNA, 1626 nt, Artificial Sequence
  mRNA product Design a-2 (A100) comprising derived and/or modified sequence from LASV(LASV035-NIG-2009;Clade II)__AIT17588__GPCmut13 (opt1)
aggagaguccgcucagccagguugcagaagcggcuuagcguguguccuaaucuucucucugcguguagguaggccugugccgcaaacaagcuuaccaugggccagaucaucaccuucuuccaggaggugccccacgucaucgaggaggugaugaacaucgugcugaucgcccucagccugcuggccauccucaaggggaucuacaacgucgcgaccugcggccuguucgggcugguguccuuccuccugcugugcggccgcagcugcuccacgaccuacaaggggguguacgagcuccagacccuggagcuggacauggccagccucaacaugaccaugccgcuguccugcacgaagaacaacagccaccacuacaucauggucggcaacgagaccggccuggagcucacccugaccaacacguccaucaucaaccacaaguucugcaaccugagcgacgcccacaagaagaaccucuacgaccacgcccugauguccaucaucagcaccuuccaccuguccauccccaacuucaaccaguacgaggccaugagcugcgacuucaacgggggcaagaucuccgugcaguacaaccucagccacgcguacgccguggacgccgccaaccacugcgggaccaucgcgaacggcguccugcagaccuucaugcggauggccuggggcggguccuacaucgcccuggacagcggcaagggguccugggacugcaucaugacgagcuaccaguaccucaucauccagaacaccaccugggaggaccacugccaguucucccgccccagccccaucggcuaccuggggcugcucagccagcggacccgcgacaucuacaucucccggcgccugcugggcacguucaccuggacccucagcgacuccgagggcaacgagacccccgggggcuacugccugacgcgguggaugcugaucgaggccgagcucaagugcuucgggaacaccgccguggcgaagugcaacgagaagcacgacgaggaguucugcgacaugcugcgccuguucgacuucaacaagcaggccauccggcgccucaaggccgaggcccagaugagcauccagcugaucaacaaggccgugaacgcgcugaucaacgaccagcucaucaugaagaaccaccuccgggacaucaugggcauccccuacugcaacuacuccaaguacugguaccugaaccacaccgucaccgggaagacgagccugccccgcugcuggcugguguccaacggcagcuaccugaacgagacccacuucuccgacgacaucgagcagcaggccgacaacaugaucaccgagcuccugcagaaggaguacaucgaccggcagggcaagaccccgcuggggcugguggaccucuucgucuucagcacguccuucuaccugaucagcaucuuccugcaccucgugaagaucccgugaggacuagucccuguucccagagcccacuuuuuuuucuuuuuuugaaauaaaauagccugucuuucagaucuaaaaaaaaaaaaaaaaaaaaaaaaaaaaaaaaaaaaaaaaaaaaaaaaaaaaaaaaaaaaaaaaaaaaaaaaaaaaaaaaaaaaaaaaaaaaaaaaaaaa

SEQ ID NO: 42453 - RNA, 1626 nt, Artificial Sequence
  mRNA product Design a-2 (A100) comprising derived and/or modified sequence from LASV(LASV1000-NIG-2009;Clade II)__AIT17782__GPCmut13 (opt1)
aggagaguccgcucagccagguugcagaagcggcuuagcguguguccuaaucuucucucugcguguagguaggccugugccgcaaacaagcuuaccaugggccagaucaucaccuucuuccaggaggugccccacgucaucgaggaggugaugaacaucgugcugaucgcccucagccugcuggccauccucaaggggaucuacaacgucgcgaccugcggccuguucgggcugguguccuuccuccugcugugcggccgcagcugcuccacgaccuacaaggggguguacgagcuccagacccuggagcuggacauggccagccucaacaugaccaugccgcuguccugcacgaagaacaacagccaccacuacaucauggucggcaacgagaccggccuggagcucacccugaccaacacguccaucaucaaccacaaguucugcaaccugagcgacgcccacaagaagaaccucuacgaccacgcccugauguccaucaucagcaccuuccaccuguccauccccaacuucaaccaguacgaggccaugagcugcgacuucaacgggggcaagaucuccgugcaguacaaccucagccacaccuacgcgguggacgccgccaaccacugcgggaccaucgccaacggcguccugcagacguucaugcggauggcguggggcggguccuacaucgcccuggacagcggcaagggguccugggacugcaucaugaccagcuaccaguaccucaucauccagaacaccaccugggaggaccacugccaguucucccgccccagccccaucggcuaccuggggcugcucagccagcggacgcgcgacaucuacaucucccggcgccugcugggcaccuucaccuggacccucagcgacuccgagggcaacgagacgcccgggggcuacugccugacccgguggaugcugaucgaggccgagcucaagugcuucgggaacaccgccguggccaagugcaacgagaagcacgacgaggaguucugcgacaugcugcgccuguucgacuucaacaagcaggcgaucaagcggcucaagaccgaggcccagaugagcauccagcugaucaacaaggccgugaacgcccugaucaacgaccagcucaucaugaagaaccaccuccgcgacaucaugggcauccccuacugcaacuacuccaaguacugguaccugaaccacacggucaccgggaagaccagccugccccggugcuggcugguguccaacggcagcuaccugaacgagacccacuucuccgacgacaucgagcagcaggccgacaacaugaucacggagcuccugcagaaggaguacaucgaccgccagggcaagaccccgcuggggcugguggaccucuucgucuucagcaccuccuucuaccugaucagcaucuuccugcaccucgugaagaucccgugaggacuagucccuguucccagagcccacuuuuuuuucuuuuuuugaaauaaaauagccugucuuucagaucuaaaaaaaaaaaaaaaaaaaaaaaaaaaaaaaaaaaaaaaaaaaaaaaaaaaaaaaaaaaaaaaaaaaaaaaaaaaaaaaaaaaaaaaaaaaaaaaaaaaa

SEQ ID NO: 42454 - RNA, 1626 nt, Artificial Sequence
  mRNA product Design a-2 (A100) comprising derived and/or modified sequence from LASV(LASV221-NIG-2010;Clade II)__AIT17624__GPCmut13 (opt1)
aggagaguccgcucagccagguugcagaagcggcuuagcguguguccuaaucuucucucugcguguagguaggccugugccgcaaacaagcuuaccaugggccagaucaucaccuucuuccaggaggugccccacgucaucgaggaggugaugaacaucgugcugaucgcccucagccugcuggccauccucaaggggaucuacaacgucgcgaccugcggccuguucgggcugguguccuuccuccugcugugcggccgcagcugcuccacgaccuacaaggggguguacgagcuccagacccuggagcuggacauggccagccucaacaugaccaugccgcuguccugcacgaagaacaacagccaccacuacaucauggucggcaacgagaccggccuggagcucacccugaccaacacguccaucaucaaccacaaguucugcaaccugagcgacgcccacaagaagaaccucuacgaccacgcccugauguccaucaucagcaccuuccaccuguccauccccaacuucaaccaguacgaggccaugagcugcgacuucaacgggggcaagaucuccgugcaguacaaccucagccacaccuacgcgaucgacgccgccaaccacugcgggaccaucgccaacggcgugcugcagacguucaugcggauggcguggggcggguccuacaucgcccuggacagcggcaagggguccugggacugcaucaugaccagcuaccaguaccucaucauccagaacaccaccugggaggaccacugccaguucucccgccccagccccaucggcuaccuggggcugcucagccagcggacgcgcgacaucuacaucucccggcgccugcugggcaccuucaccuggacccucagcgacuccgagggcaacgagacgcccgggggcuacugccugacccgguggaugcugaucgaggccgagcucaagugcuucgggaacaccgccgucgccaagugcaacgagaagcacgacgaggaguucugcgacaugcugcgccuguucgacuucaacaagcaggcgauccggcgccucaagaccgaggcccagaugagcauccagcugaucaacaaggccgugaacgcccugaucaacgaccagcucaucaugaagaaccaccuccgggacaucaugggcauccccuacugcaacuacuccaaguacugguaccugaaccacacggugaccgggaagaccagccugccccgcugcuggcuggucuccaacggcagcuaccugaacgagacccacuucuccgacgacaucgagcagcaggccgacaacaugaucacggagaugcuccagaaggaguacauggaccggcagggcaagaccccgcuggggcugguggaccuguucguguucagcaccuccuucuaccucaucagcaucuuccugcaccuggucaagaucccgugaggacuagucccuguucccagagcccacuuuuuuuucuuuuuuugaaauaaaauagccugucuuucagaucuaaaaaaaaaaaaaaaaaaaaaaaaaaaaaaaaaaaaaaaaaaaaaaaaaaaaaaaaaaaaaaaaaaaaaaaaaaaaaaaaaaaaaaaaaaaaaaaaaaaa

SEQ ID NO: 42455 - RNA, 1626 nt, Artificial Sequence
  mRNA product Design a-2 (A100) comprising derived and/or modified sequence from LASV(LASV237-NIG-2010;Clade II)__AIT17638__GPCmut13 (opt1)
aggagaguccgcucagccagguugcagaagcggcuuagcguguguccuaaucuucucucugcguguagguaggccugugccgcaaacaagcuuaccaugggccagaucaucaccuucuuccaggaggugccccacgucaucgaggaggugaugaacaucgugcugaucgcccucagccugcuggccauccucaaggggaucuacaacgucgcgaccugcggccuguucgggcugguguccuuccuccugcugugcggccgcagcugcuccacgaccuacaaggggguguacgagcuccagacccuggagcuggacauggccagccucaacaugaccaugccgcuguccugcacgaagaacaacagccaccacuacaucauggucggcaacgagaccggccuggagcucacccugaccaacacguccaucaucaaccacaaguucugcaaccugagcgacgcccacaagaaggaccucuacgaccacgcccugauguccaucaucagcaccuuccaccuguccauccccaacuucaaccaguacgaggccaugagcugcgacuucaacgggggcaagaucuccgugcaguacaaccucagccacaccuacgcgguggacgccgccaaccacugcgggaccaucgccaacggcguccugcagacguucaugcggauggcguggggcggguccuacaucgcccuggacagcggcaagggguccugggacugcaucaugaccagcuaccaguaccucaucauccagaacaccaccugggaggaccacugccaguucucccgccccagccccaucggcuaccuggggcugcucagccagcggacgcgcgacaucuacaucucccggcgccugcugggcaccuucaccuggacccucagcgacuccgagggcaacgagacgcccgggggcuacugccugacccgguggaugcugaucgaggccgagcucaagugcuucgggaacaccgccguggccaagugcaacgagaagcacgacgaggaguucugcgacaugcugcgccuguucgacuucaacaagcaggcgauccggcgccucaagaccgaggcccagaugagcauccagcugaucaacaaggccgugaacgcccugaucaacgaccagcucaucaugaagaaccaccuccgggacaucaugggcauccccuacugcaacuacuccaaguacugguaccugaaccacacggucaccgggaagaccagccugccccgcugcuggcugguguccaacggcagcuaccugaacgagacccacuucuccgacgacaucgagcagcaggccgacaacaugaucacggagcuccugcagaaggaguacauggaccggcagggcaagaccccgcuggggcugguggaccucuucgucuucagcaccuccuucuaccugaucagcaucuuccugcaccucaucaagaucccgugaggacuagucccuguucccagagcccacuuuuuuuucuuuuuuugaaauaaaauagccugucuuucagaucuaaaaaaaaaaaaaaaaaaaaaaaaaaaaaaaaaaaaaaaaaaaaaaaaaaaaaaaaaaaaaaaaaaaaaaaaaaaaaaaaaaaaaaaaaaaaaaaaaaaa

SEQ ID NO: 42456 - RNA, 1626 nt, Artificial Sequence
  mRNA product Design a-2 (A100) comprising derived and/or modified sequence from LASV(LASV253-NIG-2011;Clade II)__AIT17670__GPCmut13 (opt1)
aggagaguccgcucagccagguugcagaagcggcuuagcguguguccuaaucuucucucugcguguagguaggccugugccgcaaacaagcuuaccaugggccagaucaucaccuucuuccaggaggugccccacgucaucgaggaggugaugaacaucgugcugaucgcccucagccugcuggccauccucaaggggaucuacaacgucgcgaccugcggccuguucgggcugguguccuuccuccugcugugcggccgcagcugcuccacgaccuacaaggggguguacgagcuccagacccuggagcuggacauggccagccucaacaugaccaugccgcuguccugcacgaagaacaacagccaccacuacaucauggucggcaacgagaccggccuggagcucacccugaccaacacguccaucaucaaccacaaguucugcaaccugagcgacgcccacaagaagaaccucuacgaccacgcccugauguccaucaucagcaccuuccaccuguccauccccaacuucaaccaguacgaggccaugagcugcgacuucaacgggggcaagaucuccgugcaguacaaccucagccacaccuacgcgguggacgccgccaaccacugcgggaccaucgccaacggcguccugcagacguucaugcggauggcguggggcggguccuacaucgcccuggacagcggcaagggguccugggacugcaucaugaccagcuaccaguaccucaucauccagaacaccaccugggaggaccacugccaguucucccgccccagccccaucggcuaccuggggcugcucagccagcggacgcgcgacaucuacaucucccggcgccugcugggcaccuucaccuggacccucagcgacuccgagggcaacgagacgcccgggggcuacugccugacccgguggaugcugaucgaggccgagcucaagugcuucgggaacaccgccguggccaagugcaacgagaagcacgacgaggaguucugcgacaugcugcgccuguucgacuucaacaagcaggcgauccggcgccucaaggccgaggcccagaugagcauccagcugaucaacaaggccgugaacgcccugaucaacgaccagcucaucaugaagaaccaccuccgggacaucaugggcaucccguacugcaacuacuccaaguacugguaccugaaccacaccgucacggggcgcaccagccugccccggugcuggcugguguccaacggcagcuaccugaacgagacccacuucuccgacgacaucgagcagcaggcggacaacaugaucaccgagcuccugcagaaggaguacaucgaccgccagggcaagacgccccuggggcugguggaccucuucgucuucagcaccuccuucuaccugaucagcaucuuccugcaccucgugaagaucccgugaggacuagucccuguucccagagcccacuuuuuuuucuuuuuuugaaauaaaauagccugucuuucagaucuaaaaaaaaaaaaaaaaaaaaaaaaaaaaaaaaaaaaaaaaaaaaaaaaaaaaaaaaaaaaaaaaaaaaaaaaaaaaaaaaaaaaaaaaaaaaaaaaaaaa

SEQ ID NO: 42457 - RNA, 1626 nt, Artificial Sequence
  mRNA product Design a-2 (A100) comprising derived and/or modified sequence from LASV(LASV254-NIG-2011;Clade II)__AIT17674__GPCmut13 (opt1)
aggagaguccgcucagccagguugcagaagcggcuuagcguguguccuaaucuucucucugcguguagguaggccugugccgcaaacaagcuuaccaugggccagaucaucaccuucuuccaggaggugccccacgucaucgaggaggugaugaacaucgugcugaucgcccucagccugcuggccauccucaaggggaucuacaacgucgcgaccugcggccuguucgggcugguguccuuccuccugcugugcggccgcagcugcuccacgaccuacaaggggguguacgagcuccagacccuggagcuggacaugaccaaccucaacaugacgaugccgcugagcugcaccaagaacaacucccaccacuacaucauggucggcaacgagaccggccuggagcucacccugacgaacaccagcaucaucaaccacaaguucugcaaccuguccgacgcccacaagaagaaccucuacaaccacgcccugaugagcaucaucuccaccuuccaccugagcauccccaacuucaaccaguacgaggccauguccugcgacuucaacgggggcaagaucagcgugcaguacaaccucucccacagcuacgccguggacgcggccaaccacugcgggaccaucgccaacggcguccugcagacguucaugcggauggccuggggcggguccuacaucgcgcuggacagcggcaaggggaacugggacugcaucaugaccuccuaccaguaccucaucauccagaacaccaccugggaggaccacugccaguucagccgccccucccccaucggcuaccuggggcugcucagccagcggacgcgcgacaucuacaucagccggcgccugcugggcaccuucaccuggacccucuccgacagcgagggcaacgagacgcccgggggcuacugccugacccgguggaugcugaucgaggccgagcucaagugcuucgggaacaccgccguggccaagugcaacgagaagcacgacgaggaguucugcgacaugcugcgccuguucgacuucaacaagcaggccauccggcgccucaagaccgaggcgcaggccaacauccagcugaucaacaaggccgugaacgcccugaucaacgaccagcucaucaugaagaaccaccuccgggacaucaugggcauccccuacugcaacuacuccaaguacugguaccugaaccacacggucaccgggaagaccagccugccccgcugcuggcugguguccaacggcagcuaccugaacgagacccacuucuccgacgacaucgagcagcaggccgacaacaugaucacggagcuccugcagaaggaguacauggaccggcagggcaagaccccgcuggggcugguggaccucuucgucuucagcaccuccuucuaccugaucagcaucuuccugcaccucgugaagaucccgugaggacuagucccuguucccagagcccacuuuuuuuucuuuuuuugaaauaaaauagccugucuuucagaucuaaaaaaaaaaaaaaaaaaaaaaaaaaaaaaaaaaaaaaaaaaaaaaaaaaaaaaaaaaaaaaaaaaaaaaaaaaaaaaaaaaaaaaaaaaaaaaaaaaaa

SEQ ID NO: 42458 - RNA, 1626 nt, Artificial Sequence
  mRNA product Design a-2 (A100) comprising derived and/or modified sequence from LASV(Nig08-A19;Clade III)__ADU56618__GPCmut13 (opt1)
aggagaguccgcucagccagguugcagaagcggcuuagcguguguccuaaucuucucucugcguguagguaggccugugccgcaaacaagcuuaccaugggccagaucgugaccuucuuccaggaggucccccacgugaucgaggaggugaugaacaucguccugaucgcccucagcauccuggccauccugaaggggcucuacaacaucgcgaccugcggccugaucgggcuggugacguuccuccugcuguccggccgcagcugcuccaugaccuacaaggggguguacgagcuccagacccuggagcugaacaugaacacccucaacaugacgaugccgcugagcugcaccaagaacaacucccaccacuacaucauggucggcaacgagaccggccuggagcucacccugacgaacaccagccugcuccaccacaaguucugcaaccuguccgacgcccacaagaagaaccuguacgaccacacccucaugagcaucaucuccaccuuccaccugagcauccccaacuucaaccaguacgaggccauguccugcgacuucaacgggggcaagaucacggugcaguacaaccugagccacuccuacgccaucgacgccgcgaaccacugcgggaccguggccaacggcguccuccagaccuucaugcggauggccuggggcgggagcuacaucgcccuggacuccggccgcgggaagugggacugcaucaugaccagcuaccaguaccugaucauccagaacacgaccugggaggaccacugccaguucucccggcccagccccaucggcuaccucgggcugcugucccagcgcacccgggacaucuacaucagccgccggcuccugggcaccuucacguggacccugagcgacuccgagggcaacgagacccccgggggcuacugccucacccgcuggaugcugaucgaggcggagcugaagugcuucgggaacacggccguggccaagugcaacgagaagcacgacgaggaguucugcgacaugcuccggcuguucgacuucaacaagcaggccauccgccggcugaaggccgaggcgcagaugagcauccagcucaucaacaaggccgugaacgcccugaucaacgaccagcugaucaugaagaaccaccuccgcgacaucaugggcauccccuacugcaacuacuccaaguacugguaccugaaccacaccagcaccgggcggaccucccugccccgcugcuggcucgucagcaacggcuccuaccugaacgagacgcacuucagcgacgacaucgagcagcaggccgacaacaugaucaccgagaugcugcagaaggaguaccuggaccggcagggcaagaccccgcucgggcugguggaccuguucguguucuccaccagcuucuaccucaucuccaucuuccugcaccuggucaagaucccgugaggacuagucccuguucccagagcccacuuuuuuuucuuuuuuugaaauaaaauagccugucuuucagaucuaaaaaaaaaaaaaaaaaaaaaaaaaaaaaaaaaaaaaaaaaaaaaaaaaaaaaaaaaaaaaaaaaaaaaaaaaaaaaaaaaaaaaaaaaaaaaaaaaaaa

SEQ ID NO: 42459 - RNA, 1629 nt, Artificial Sequence
  mRNA product Design a-2 (A100) comprising derived and/or modified sequence from LASV(G1180-SLE-2010;Clade IV)__AIT17168__GPCmut13 (opt1)
aggagaguccgcucagccagguugcagaagcggcuuagcguguguccuaaucuucucucugcguguagguaggccugugccgcaaacaagcuuaccaugggccagaucgugaccuucuuccaggaggucccccacgugaucgaggaggugaugaacaucguccugaucgcccucagcauccuggccgugcugaaggggcucuacaacuucgcgaccugcggccugguggggcugcucaccuuccugcugcucugcggccgcuccugcaccgccagccgguacaagggggucuacgagcugcagacccuggagcucaacauggagacccugaacaugacgaugccgcuguccugcaccaagaacaacagccaccacuacaucauggugggcaacgagaccggccucgagcugacccugacgaacaccuccaucaucaaccacaaguucugcaaccucagcgacgcccacaagaagaaccuguacgaccacgcccugauguccaucaucagcaccuuccaccucuccauccccaacuucaaccaguacgaggccaugagcugcgacuucaacgggggcaagaucuccgugcaguacaaccugagccacuccuacgcgggggacgccgccaaccacugcggcaccgucgccaacggggugcugcagacguucaugcgcauggcguggggcggcagcuacaucgcccucgacuccgggcacggcagcugggacugcaucaugaccuccuaccaguaccugaucauccagaacaccaccugggaggaccacugccaguucagccggcccucccccaucggguaccugggccuccugagccagcgcacgcgggacaucuacaucagccgccggcugcucggcaccuucaccuggacccuguccgacagcgaggggaaggacacgccgggcggguacugccugacccgcuggaugcucaucgaggccgagcugaagugcuucggcaacaccgccguggccaagugcaacgagaagcacgacgaggaguucugcgacaugcugcggcuguucgacuucaacaagcaggcgauccagcgccugaaggccgaggcccagauguccauccagcugaucaacaaggccgucaacgcccucaucaacgaccagcugaucaugaagaaccaccuccgggacaucauggggauccccuacugcaacuacagcaaguacugguaccucaaccacaccacgaccggcaagaccucccugcccaagugcuggcuggugagcaacggcuccuaccucaacgagacccacuucagcgacgacaucgagcagcaggcggacaacaugaucacggagaugcugcagaaggaguacauggagcgccaggggaagacgccccugggccugguggaccucuucgucuucuccaccagcuucuaccugaucuccaucuuccugcaccucgugaagaucccgugaggacuagucccuguucccagagcccacuuuuuuuucuuuuuuugaaauaaaauagccugucuuucagaucuaaaaaaaaaaaaaaaaaaaaaaaaaaaaaaaaaaaaaaaaaaaaaaaaaaaaaaaaaaaaaaaaaaaaaaaaaaaaaaaaaaaaaaaaaaaaaaaaaaaa

SEQ ID NO: 42460 - RNA, 1629 nt, Artificial Sequence
  mRNA product Design a-2 (A100) comprising derived and/or modified sequence from LASV(G1442-SLE-2011;Clade IV)__AIT17180__GPCmut13 (opt1)
aggagaguccgcucagccagguugcagaagcggcuuagcguguguccuaaucuucucucugcguguagguaggccugugccgcaaacaagcuuaccaugggccagaucgugaccuucuuccaggaggucccccacgugaucgaggaggugaugaacaucguccugaucgcccucagcauccuggccgugcugaaggggcucuacaacguggcgaccugcggccugaucgggcuggucacguuccuccugcugugcggccgcuccugcaccaccacccucuacaaggggguguacgagcugcagacgcuggagcucaacauggagacccugaacaugaccaugccgcugagcugcaccaagaacaacucccaccacuacauccgggugggcaacgagacgggccucgagcugacccugaccaacaccagcaucaucaaccacaaguucugcaaccucuccgacgcccacaagaagaaccuguacgaccacgcccugaugagcaucaucuccacguuccaccucagcauccccaacuucaaccaguacgaggccauguccugcgacuucaacgggggcaagaucagcguccaguacaaccugucccacagcuacgccggggacgcggccaaccacugcggcaccguggccaacggggugcugcagaccuucaugcgcauggccuggggcggcuccuacaucgcgcucgacagcgggcggggcaacugggacugcaucaugaccuccuaccaguaccugaucauccagaacacgaccugggacgaccacugccaguucagccgccccucccccaucggguaccugggccuccugagccagcggacccgcgacgucuacaucucccggcgccugcucggcaccuucacguggacccugagcgacagcgaggggaaggacaccccgggcggguacugccugacccgguggaugcucaucgaggccgagcugaagugcuucggcaacacggccguggccaagugcaacgagaagcacgacgaggaguucugcgacaugcugcgccucuucgacuucaacaagcaggccauccagcggcugaaggcggaggcccagauguccauccagcugaucaacaaggccgugaacgcccucaucaacgaccagcugaucaugaagaaccaccuccgcgacaucauggggauccccuacugcaacuacagcaaguacugguaccugaacaacaccgccaccggcaagaccucccugcccaagugcuggcugaucagcaacggcuccuaccucaacgagacgcacuucagcgacgacaucgagcaggaggcggacaacaugaucaccgagaugcugcagaaggaguacauggagcggcaggggaagacgccccugggccuggucgaccucuucguguucuccaccagcuucuaccugaucuccaucuuccugcaccucgugaagaucccgugaggacuagucccuguucccagagcccacuuuuuuuucuuuuuuugaaauaaaauagccugucuuucagaucuaaaaaaaaaaaaaaaaaaaaaaaaaaaaaaaaaaaaaaaaaaaaaaaaaaaaaaaaaaaaaaaaaaaaaaaaaaaaaaaaaaaaaaaaaaaaaaaaaaaa

SEQ ID NO: 42461 - RNA, 1629 nt, Artificial Sequence
  mRNA product Design a-2 (A100) comprising derived and/or modified sequence from LASV(G3010-SLE-2013;Clade IV)__AIT17344__GPCmut13 (opt1)
aggagaguccgcucagccagguugcagaagcggcuuagcguguguccuaaucuucucucugcguguagguaggccugugccgcaaacaagcuuaccaugggccagaucgugaccuucuuccaggaggucccccacgugaucgaggaggugaugaacaucguccugaucgcccucagcauccuggccgugcugaaggggcucuacaacuucgcgaccugcggccugguggggcuggucacguuccuccugcugugcggccgcuccugcaccaccagccucuacaaggggguguacgagcugcagacccuggagcucaacauggagacgcugaacaugaccaugccgcuguccugcaccaagaacaacagccaccacuacaucauggugggcaacgagaccggccucgagcugacgcugaccaacaccuccaucaucaaccacaaguucugcaaccucagcgacgcccacaagaagaaccuguacaaccacgcccugauguccaucaucagcaccuuccaccucuccauccccaacuucaaccaguacgaggccaugagcugcgacuucaacgggggcaagaucuccguccaguacaaccugagccacuccuacgccggggacgcggccagccacugcggcacgguggccaacggggugcugcagaccuucaugcggauggccuggggcggcuccuacaucgcgcucgacagcggguacggcaagugggacugcaucaugaccuccuaccaguaccugaucauccagaacaccacgugggaggaccacugccaguucagccgccccucccccaucggguaccugggccuccugagccagcggacccgcgacaucuacaucagccggcgccugcucggcaccuucaccuggacgcuguccgacagcgaggggaaggacaccccgggcggguacugccugacccgguggaugcucaucgaggccgagcugaagugcuucggcaacaccgccgucgccaagugcaacgagaagcacgacgaggaguucugcgacaugcugcgccucuucgacuucaacaagcaggccauccagcggcugaagacggaggcgcagauguccauccagcugaucaacaaggccgugaacgcccucaucaacgaccagcugaucaugaagaaccaccuccgcgacaucauggggauccccuacugcaacuacagcaaguacugguaccugaaccacaccaccaccggcaagacgucccugcccaagugcuggcuggugagcaacggcuccuaccucaacgagacccacuucagcgacgacaucgagcagcaggccgacaacaugaucaccgagaugcugcagaaggaguacauggagcggcaggggaagacgccccugggccuggucgaccucuucguguucuccaccagcuucuaccugaucuccaucuuccugcaccucgugaagaucccgugaggacuagucccuguucccagagcccacuuuuuuuucuuuuuuugaaauaaaauagccugucuuucagaucuaaaaaaaaaaaaaaaaaaaaaaaaaaaaaaaaaaaaaaaaaaaaaaaaaaaaaaaaaaaaaaaaaaaaaaaaaaaaaaaaaaaaaaaaaaaaaaaaaaaa

SEQ ID NO: 42462 - RNA, 1629 nt, Artificial Sequence
  mRNA product Design a-2 (A100) comprising derived and/or modified sequence from LASV(G502-SLE-2009;Clade IV)__AIT17126__GPCmut13 (opt1)
aggagaguccgcucagccagguugcagaagcggcuuagcguguguccuaaucuucucucugcguguagguaggccugugccgcaaacaagcuuaccaugggccagaucgugaccuucuuccaggaggucccccacgugaucgaggaggugaugaacaucguccugaucgcccucagcauccuggccgugcugaaggggcucuacaacuucgcgaccugcggccugguggggcugcucacguuccugcugcucugcggccgcuccugcaccaccgggcuguacaagggcgucuacgagcugcagacccucgagcugaacauggagacgcugaacaugaccaugccgcucagcugcaccaagaacaacucccaccacuacaucauggugggcaacgagaccgggcuggagcugacgcucaccaacaccagcaucaucaaccacaaguucugcaaccuguccgacgcccacaagaagaaccuguacgaccacgcccucaugagcaucaucuccaccuuccaccugagcauccccaacuucaaccaguacgaggccauguccugcgacuucaacggcgggaagaucagcgugcaguacaaccugucccacagcuacgccggcgacgcggccgaccacugcgggacggucgccaacggcgugcuccagaccuucaugcggauggccuggggcggguccuacaucgcgcuggacagcggccgcgggcggugggacugcaucaugaccuccuaccaguaccugaucauccagaacaccacgugggaggaccacugccaguucagccgccccucccccaucggcuaccucggccugcugagccagcggacccgcgacaucuacaucucccggcgccuccuggggaccuucaccuggacgcugagcgacagcgagggcaaggacacccccgggggcuacugccucacccgguggaugcugaucgaggccgagcugaagugcuucgggaacaccgccguggccaagugcaacgagaagcacgacgaggaguucugcgacaugcuccgccuguucgacuucaacaagcaggccauccagcggcugaaggcggaggcccagauguccauccagcucaucaacaaggccgucaacgcccugaucaacgaccagcuggugaugaagaaccaccuccgcgacaucaugggcauccccuacugcaacuacagccgguacugguaccugaaccacacgaccaccggccgcaccucccugcccaagugcuggcucgugagcaacggguccuaccugaacgagacgcacuucagcgacgacaucgagcagcaggccgacaacaugaucaccgagaugcugcagaaggaguacauggagcggcagggcaagaccccgcuggggcucgucgaccuguucguguucuccaccagcuucuaccugaucuccaucuuccuccaccuggugaagaucccgugaggacuagucccuguucccagagcccacuuuuuuuucuuuuuuugaaauaaaauagccugucuuucagaucuaaaaaaaaaaaaaaaaaaaaaaaaaaaaaaaaaaaaaaaaaaaaaaaaaaaaaaaaaaaaaaaaaaaaaaaaaaaaaaaaaaaaaaaaaaaaaaaaaaaa

SEQ ID NO: 42463 - RNA, 1629 nt, Artificial Sequence
  mRNA product Design a-2 (A100) comprising derived and/or modified sequence from LASV(G733-SLE-2010;Clade IV)__AIT17154__GPCmut13 (opt1)
aggagaguccgcucagccagguugcagaagcggcuuagcguguguccuaaucuucucucugcguguagguaggccugugccgcaaacaagcuuaccaugggccagaucgugaccuucuuccaggaggucccccacgugaucgaggaggugaugaacaucguccugaucgcccucagcauccuggccgugcugaaggggcucuacaacuucgcgaccugcggcaucguggggcuggucuccuuccugcuccugugcggccgcagcugcacgaccucccuguacaaggggguguacgagcuccagacccuggagcugaacauggagacccucaacaugacgaugccgcugagcugcaccaagaacaacucccaccacuacaucauggugggcaacgagaccggccuggagcucacccugacgaacaccagcaucaucaaccacaaguucugcaaccuguccgacgcccacaagaagaaccucuacgaccacgcccugaugagcaucaucuccaccuuccaccugagcauccccaacuucaaccaguacgaggccauguccugcgacuucaacgggggcaagaucagcguccaguacaaccucucccacagcuacgccggggacgcggccaaccacugcggcaccaucgccaacggggugcugcagacguucaugcggauggccuggggcggcuccuacaucgcgcuggacagcgggcgcgaccggugggacugcaucaugaccuccuaccaguaccucaucauccagaacaccaccugggaggaccacugccaguucagccgccccucccccaucggcuaccuggggcugcucagccagcggacgcgcgacaucuacaucagccggcgccugcugggcaccuucaccuggacccucuccgacagcgagggcaaggacacgcccgggggcuacugccugacccgguggaugcugaucgaggccgagcucaagugcuucgggaacaccgccguggccaagugcaacgagaagcacgacgaggaguucugcgacaugcugcgccuguucgacuucaacaagcaggccauccagcggcucaaggcggaggcccagauguccauccagcugaucaacaaggccgucaacgcccugaucaacgaccagcucaucaugaagaaccaccuccgcgacaucaugggcauccccuacugcaacuacagcaaguacugguaccugaaccacaccacgaccgggaagaccucccugcccaagugcuggcuggugagcaacggcuccuaccugaacgagacccacuucagcgacgacaucgagcagcaggccgacaacaugaucacggagaugcuccagaaggaguacauggagcggcagggcaagaccccgcuggggcugguggaccuguucgucuucuccaccagcuucuaccucaucuccaucuuccugcaccuggugaagaucccgugaggacuagucccuguucccagagcccacuuuuuuuucuuuuuuugaaauaaaauagccugucuuucagaucuaaaaaaaaaaaaaaaaaaaaaaaaaaaaaaaaaaaaaaaaaaaaaaaaaaaaaaaaaaaaaaaaaaaaaaaaaaaaaaaaaaaaaaaaaaaaaaaaaaaa

SEQ ID NO: 42464 - RNA, 1629 nt, Artificial Sequence
  mRNA product Design a-2 (A100) comprising derived and/or modified sequence from MOPV/LASV reassortant(IGS-1;Clade IV)__AFY05576__GPCmut13 (opt1)
aggagaguccgcucagccagguugcagaagcggcuuagcguguguccuaaucuucucucugcguguagguaggccugugccgcaaacaagcuuaccaugggccagaucgugaccuucuuccaggaggucccccacgugaucgaggaggugaugaacaucguccugaucgcccucagcgugcuggccgugcugaaggggcucuacaacuucgcgaccugcggccuggucgggcuggugacguuccuccugcugugcggccgcuccugcaccaccagccucuacaaggggguguacgagcugcagacccuggagcucaacauggagacgcugaacaugaccaugccgcuguccugcaccaagaacaacagccaccacuacaucauggucggcaacgagaccggccucgagcugacgcugaccaacaccuccaucaucaaccacaaguucugcaaccucagcgacgcccacaagaagaaccuguacgaccacgcccugauguccaucaucagcaccuuccaccucuccauccccaacuucaaccaguacgaggccaugagcugcgacuucaacgggggcaagaucuccgugcaguacaaccugagccacuccuacgccggggacgcggccaaccacugcggcacgguggccaacgggguccugcagaccuucaugcggauggccuggggcggcagcuacaucgcgcucgacuccgggcgcggcaacugggacugcaucaugaccagcuaccaguaccugaucauccagaacaccacgugggaggaccacugccaguucucccggcccagccccaucggguaccugggccuccugucccagcgcacccgggacaucuacaucagccgccggcugcucggcaccuucaccuggacgcugagcgacuccgagggggaggacaccccgggcggguacugccugacccgcuggaugcucaucgaggccgagcugaagugcuucggcaacaccgccguggccaagugcaacgagaagcacgacgaggaguucugcgacaugcugcggcuguucgacuucaacaagcaggccauccagcgccugaaggcggaggcccagaugagcauccagcugaucaacaaggccgugaacgcccucaucaacgaccagcugaucaugaagaaccaccuccgggacaucauggggauccccuacugcaacuacuccaaguacugguaccucaaccacacgaccaccggccgcaccagccugcccaagugcuggcuggucuccaacggcagcuaccucaacgagacgcacuucuccgacgacaucgagcagcaggccgacaacaugaucaccgagaugcugcagaaggaguacauggagcggcaggggaagacgccccugggccugguggaccucuucguguucagcaccuccuucuaccugaucagcaucuuccugcaccucgucaagaucccgugaggacuagucccuguucccagagcccacuuuuuuuucuuuuuuugaaauaaaauagccugucuuucagaucuaaaaaaaaaaaaaaaaaaaaaaaaaaaaaaaaaaaaaaaaaaaaaaaaaaaaaaaaaaaaaaaaaaaaaaaaaaaaaaaaaaaaaaaaaaaaaaaaaaaa

SEQ ID NO: 42465 - RNA, 1629 nt, Artificial Sequence
  mRNA product Design a-2 (A100) comprising derived and/or modified sequence from LASV(LM765-SLE-2012;Clade IV)__AIT17814__GPCmut13 (opt1)
aggagaguccgcucagccagguugcagaagcggcuuagcguguguccuaaucuucucucugcguguagguaggccugugccgcaaacaagcuuaccaugggccagaucgugaccuucuuccaggaggucccccacgugaucgaggaggugaugaacaucguccugaucgcccucagcauccuggccgugcugaaggggcucuacaacuucgcgaccugcggccugguggggcuggucacguuccuccugcugugcggccgcuccugcaccaccagccucuacaaggggguguacgagcugcagacccuggagcucaacauggagacgcugaacaugaccaugccgcuguccugcaccaagaacaacagccaccacuacaucauggugggcaacgagaccggccucgagcugacgcugaccaacaccuccaucaucgaccacaaguucugcaaccucagcgacgcccaccggaagaaccuguacgaccacgcccugauguccaucaucagcaccuuccaccucuccauccccaacuucaaccaguacgaggccaugagcugcgacuucaacgggggcaagaucuccguccaguacaaccugagccacuccuacgccaaggacgcggccgaccacugcgggacgguggccaacggcgugcugcagaccuucaugcgcauggccuggggcgggagcuacaucgcgcucgacuccggccgggggcgcugggacugcaucaugaccagcuaccaguaccugaucauccagaacaccacgugggaggaccacugccaguucucccggcccagccccaucggcuaccuggggcuccugucccagcgcacccgggacaucuacaucagccgccggcugcucggcaccuucaccuggacgcugagcgacuccgagggcaaggacacccccgggggcuacugccugacccgcuggaugcucaucgaggccgagcugaagugcuucgggaacaccgccgucgccaagugcaacgagaagcacgacgaggaguucugcgacaugcugcggcuguucgacuucaacaagcaggccauccagcgccugaaggcggaggcccagaugagcauccagcugaucaacaaggccgugaacgcccucaucaacgaccagcugaucaugaagaaccaccuccgggacaucaugggcauccccuacugcaacuacuccaaguacugguaccucaaccacacgaccaccgggaagaccagccugcccaagugcuggcugguguccaacggcagcuaccucaacgagacgcacuucuccgacgacaucgagcagcaggccgacaacaugaucaccgagaugcugcagaaggaguacauggagcgccagggcaagaccccgcuggggcuggucgaccucuucguguucagcaccuccuucuaccugaucagcaucuuccugcaccucgugaagaucccgugaggacuagucccuguucccagagcccacuuuuuuuucuuuuuuugaaauaaaauagccugucuuucagaucuaaaaaaaaaaaaaaaaaaaaaaaaaaaaaaaaaaaaaaaaaaaaaaaaaaaaaaaaaaaaaaaaaaaaaaaaaaaaaaaaaaaaaaaaaaaaaaaaaaaa

SEQ ID NO: 42466 - RNA, 1629 nt, Artificial Sequence
  mRNA product Design a-2 (A100) comprising derived and/or modified sequence from LASV(LM776-SLE-2012;Clade IV)__AIT17824__GPCmut13 (opt1)
aggagaguccgcucagccagguugcagaagcggcuuagcguguguccuaaucuucucucugcguguagguaggccugugccgcaaacaagcuuaccaugggccagaucgugaccuucuuccaggaggucccccacgugaucgaggaggugaugaacaucguccugaucgcccucagcauccuggccgugcugaaggggcucuacaacuucgcgaccugcggccugguggggcuggucacguuccuccugcugugcggccgcuccugcaccaccagcguguacaaggggguguacgagcuccagacccuggagcugaacauggagacgcucaacaugaccaugccgcuguccugcaccaagaacaacagccaccacuacaucauggucggcaacgagaccggccuggagcucacgcugaccaacaccuccaucaucaaccacaaguucugcaaccugagcgacgcccacaagaagaaccucuacgaccacgcccugauguccaucaucagcaccuuccaccuguccauccccaacuucaaccaguacgaggccaugagcugcgacuucaacgggggcaagaucuccgugcaguacaaccucagccacuccuacgccggggacgcggccaaccacugcggcacgguggccaacgggguccugcagaccuucaugcggauggccuggggcggcagcuacaucgcgcuggacuccgggcacggcaagugggacugcaucaugaccagcuaccaguaccucaucauccagaacaccacgugggaggaccacugccaguucucccgccccagccccaucggguaccugggccugcucucccagcggacccgcgacaucuacaucagccggcgccugcugggcaccuucaccuggacgcucagcgacuccgaggggaaggacaccccgggcggguacugccugacccgguggaugcugaucgaggccgagcucaagugcuucggcaacaccgccguggccaagugcaacgagaagcacgacgaggaguucugcgacaugcugcgccuguucgacuucaacaagcaggccauccagcggcucaaggcggaggcccagaugagcauccagcugaucaacaaggccgugaacgcccugaucaacgaccagcucaucaugaagaaccaccuccgcgacaucauggggauccccuacugcaacuacuccaaguacugguaccugaaccacacgaccaccggcaagaccagccugcccaagugcuggcuggucuccaacggcagcuaccugaacgagacgcacuucuccgacgacaucgagcagcaggccgacaacaugaucaccgagaugcuccagaaggaguacauggagcggcaggggaagacgccccugggccugguggaccuguucguguucagcaccuccuucuaccucaucagcaucuuccugcaccuggucaagaucccgugaggacuagucccuguucccagagcccacuuuuuuuucuuuuuuugaaauaaaauagccugucuuucagaucuaaaaaaaaaaaaaaaaaaaaaaaaaaaaaaaaaaaaaaaaaaaaaaaaaaaaaaaaaaaaaaaaaaaaaaaaaaaaaaaaaaaaaaaaaaaaaaaaaaaa

SEQ ID NO: 42467 - RNA, 1629 nt, Artificial Sequence
  mRNA product Design a-2 (A100) comprising derived and/or modified sequence from LASV(Mad39;Clade IV)__ANH09722__GPCmut13 (opt1)
aggagaguccgcucagccagguugcagaagcggcuuagcguguguccuaaucuucucucugcguguagguaggccugugccgcaaacaagcuuaccaugggccagaucgugaccuucuuccaggaggucccccacgugaucgaggaggugaugaacaucguccugaucgcccucagcauccuggccgugcugaaggggcucuacaacguggcgaccugcggccugaucgggcuggucacguuccuccugcugugcggccgcuccugcaccaccacccucuacaaggggguguacgagcugcaggcccuggagcucaacauggagacgcugaacaugaccaugccgcugagcugcaccaagaacaacucccaccacuacauccgggugggcaacgagaccggccucgagcugacgcugaccaacaccagccucaucaaccacaaguucugcaaccuguccgacgcccacaagaagaaccuguacgaccacgcccucaugagcaucaucuccaccuuccaccugagcauccccaacuucaaccaguacgaggccauguccugcgacuucaacgacgggaagaucagcguccaguacaaccugucccacacguacgcgggcgacaccgccaaccacugcgggaccguggccaacggcgugcuccagaccuucaugcgcauggccuggggcgggagcuacaucgcgcuggacuccggccgcgggggcugggacugcaucaugacgagcuaccaguaccugaucauccagaacaccaccugggaggaccacugccaguucucccggcccagccccaucggguaccucggccugcugucccagcggacccgcgacaucuacaucagccggcgccuccugggcacguucaccuggacccuguccgacagcgaggggaaggacaccccgggcggguacugccucacgcgguggaugcugaucgaggccgagcugaagugcuucggcaacaccgccgucgccaagugcaacgagaagcacgacgaggaguucugcgacaugcuccgccuguucgacuucaacaagcaggccauccagcggcugaaggcggaggcccagaugagcauccagcucaucaacaaggccgugaacgcccugaucaacgaccagcugaucaugaagaaccaccuccgcgacaucauggggauccccuacugcaacuacuccaaguacugguaccugaaccacaccgugaccggcaagacgagccugcccaagugcuggcucgucuccaacggcagcuaccugaacgagacccacuucuccgacgacaucgagcagcaggccgacaacaugaucaccgagaugcugcagaaggaguacauggagcggcaggggaagacgccccugggccucguggaccuguucguguucagcaccuccuucuaccugaucagcaucuuccuccaccuggucaagaucccgugaggacuagucccuguucccagagcccacuuuuuuuucuuuuuuugaaauaaaauagccugucuuucagaucuaaaaaaaaaaaaaaaaaaaaaaaaaaaaaaaaaaaaaaaaaaaaaaaaaaaaaaaaaaaaaaaaaaaaaaaaaaaaaaaaaaaaaaaaaaaaaaaaaaaa

SEQ ID NO: 42468 - RNA, 1629 nt, Artificial Sequence
  mRNA product Design a-2 (A100) comprising derived and/or modified sequence from LASV(Z0947-SLE-2011;Clade IV)__AIT17840__GPCmut13 (opt1)
aggagaguccgcucagccagguugcagaagcggcuuagcguguguccuaaucuucucucugcguguagguaggccugugccgcaaacaagcuuaccaugggccagaucgugaccuucuuccaggaggucccccacgugaucgaggaggugaugaacaucguccugaucgcccucagcauccuggccgugcugaaggggcucuacaacuucgcgaccugcggccugguggggcuggucacguuccuccugcugugcggccgcuccugcaccaucagccucuacaaggggguguacgagcugcagacccuggagcucaacauggagacccugaacaugacgaugccgcuguccugcaccaagaacaacagccaccacuacaucauggugggcaacgagaccggccucgagcugacccugacgaacaccuccaucaucaaccacaaguucugcaaccucagcgacgcccacaagaagaaccuguacgaccacgcccugauguccaucaucagcaccuuccaccucuccauccccaacuucaaccaguacgaggccaugagcugcgacuucaacgggggcaagaucuccguccaguacaaccugagccacuccuacgccggggacgcggccaaccacugcggcaccguggccaacggggugcugcagacguucaugcggauggccuggggcggcagcuacaucgcgcucgacuccgggcgcgaccggugggacugcaucaugaccagcuaccaguaccugaucauccagaacaccaccugggaggaccacugccaguucucccgccccagccccaucggcuaccuggggcuccugucccagcggacgcgcgacaucuacaucagccggcgccugcucggcaccuucaccuggacccugagcgacuccgagggcaaggacacgcccgggggcuacugccugacccgguggaugcucaucgaggccgagcugaagugcuucgggaacaccgccgucgccaagugcaacgagaagcacgacgaggaguucugcgacaugcugcgccucuucgacuucaacaagcaggccauccagcggcugaaggcggaggcccagaugagcauccagcugaucaacaaggccgugaacgcccucaucaacgaccagcugaucaugaagaaccaccuccgcgacaucaugggcauccccuacugcaacuacuccaaguacugguaccugaaccacaccacgaccgggaagaccagccugcccaagugcuggcugguguccaacggcagcuaccucaacgagacccacuucuccgacgacaucgagcagcaggccgacaacaugaucacggagaugcugcagaaggaguacauggagcggcagggcaagaccccgcuggggcuggucgaccucuucguguucagcaccuccuucuaccugaucagcaucuuccugcaccucgugaagaucccgugaggacuagucccuguucccagagcccacuuuuuuuucuuuuuuugaaauaaaauagccugucuuucagaucuaaaaaaaaaaaaaaaaaaaaaaaaaaaaaaaaaaaaaaaaaaaaaaaaaaaaaaaaaaaaaaaaaaaaaaaaaaaaaaaaaaaaaaaaaaaaaaaaaaaa

SEQ ID NO: 42469 - RNA, 1629 nt, Artificial Sequence
  mRNA product Design a-2 (A100) comprising derived and/or modified sequence from LASV(Josiah;Clade IV)__NP_694870__GPCmut13 (opt4)
aggagaguccgcucagccagguugcagaagcggcuuagcguguguccuaaucuucucucugcguguagguaggccugugccgcaaacaagcuuaccaugggccagaucgugaccuucuuccaggaggugccccacgugaucgaggaggugaugaacaucgugcugaucgcccugagcgugcuggccgugcugaagggccuguacaacuucgccaccugcggccuggugggccuggugaccuuccugcugcugugcggcagaagcugcaccaccagccuguacaagggcguguacgagcugcagacccuggagcugaacauggagacccugaacaugaccaugccccugagcugcaccaagaacaacagccaccacuacaucauggugggcaacgagaccggccuggagcugacccugaccaacaccagcaucaucaaccacaaguucugcaaccugagcgacgcccacaagaagaaccuguacgaccacgcccugaugagcaucaucagcaccuuccaccugagcauccccaacuucaaccaguacgaggccaugagcugcgacuucaacggcggcaagaucagcgugcaguacaaccugagccacagcuacgccggcgacgccgccaaccacugcggcaccguggccaacggcgugcugcagaccuucaugagaauggccuggggcggcagcuacaucgcccuggacagcggcagaggcaacugggacugcaucaugaccagcuaccaguaccugaucauccagaacaccaccugggaggaccacugccaguucagcagacccagccccaucggcuaccugggccugcugagccagagaaccagagacaucuacaucagcagaagacugcugggcaccuucaccuggacccugagcgacagcgagggcaaggacacccccggcggcuacugccugaccagauggaugcugaucgaggccgagcugaagugcuucggcaacaccgccguggccaagugcaacgagaagcacgacgaggaguucugcgacaugcugagacuguucgacuucaacaagcaggccauccagagacugaaggccgaggcccagaugagcauccagcugaucaacaaggccgugaacgcccugaucaacgaccagcugaucaugaagaaccaccugagagacaucaugggcauccccuacugcaacuacagcaaguacugguaccugaaccacaccaccaccggcagaaccagccugcccaagugcuggcuggugagcaacggcagcuaccugaacgagacccacuucagcgacgacaucgagcagcaggccgacaacaugaucaccgagaugcugcagaaggaguacauggagagacagggcaagaccccccugggccugguggaccuguucguguucagcaccagcuucuaccugaucagcaucuuccugcaccuggugaagauccccugaggacuagucccuguucccagagcccacuuuuuuuucuuuuuuugaaauaaaauagccugucuuucagaucuaaaaaaaaaaaaaaaaaaaaaaaaaaaaaaaaaaaaaaaaaaaaaaaaaaaaaaaaaaaaaaaaaaaaaaaaaaaaaaaaaaaaaaaaaaaaaaaaaaaa

SEQ ID NO: 42470 - RNA, 1626 nt, Artificial Sequence
  mRNA product Design a-2 (A100) comprising derived and/or modified sequence from LASV(LP;Clade I)__AAF86701__GPCmut13 (opt4)
aggagaguccgcucagccagguugcagaagcggcuuagcguguguccuaaucuucucucugcguguagguaggccugugccgcaaacaagcuuaccaugggccagaucaucaccuucuuccaggaggugccccacgugaucgaggaggugaugaacaucgugcugaucgcccugagccugcuggccauccugaagggccuguacaacaucgccaccugcggcaucaucggccugguggccuuccuguuccugugcggcaagagcugcagccugacccugaagggcggcuacgagcugcagacccuggagcugaacauggagacccugaacaugaccaugccccugagcugcaccaagaacagcagccaccacuacaucagagugggcaacgagaccggccuggagcugacccugaccaacaccagcaucaucaaccacaaguucugcaaccugagcgacgcccacaagaagaaccuguacgaccacgcccugaugagcaucaucagcaccuuccaccugagcauccccaacuucaaccaguacgaggccaugagcugcgacuucaacggcggcaagaucagcgugcaguacaaccugagccacagcuacgccggcgacgccgccgagcacugcggcaccguggccaacggcgugcugcagaccuucaugagaauggccuggggcggcagauacaucgcccuggacagcggcaagggcaacugggacugcaucaugaccagcuaccaguaccugaucauccagaacaccaccugggaggaccacugccaguucagcagacccagccccaucggcuaccugggccugcugagccagagaaccagagacaucuacaucagcagaagacugcugggcaccuucaccuggacccugagcgacagcgagggcaacgagacccccggcggcuacugccugaccagauggaugcugaucgaggccgagcugaagugcuucggcaacaccgccguggccaagugcaacgagaagcacgacgaggaguucugcgacaugcugagacuguucgacuucaacaagcaggccaucagaagacugaaggccgaggcccagaugagcauccagcugaucaacaaggccgugaacgcccugaucaacgaccagcugaucaugaagaaccaccugagagacaucaugggcauccccuacugcaacuacagcaaguacugguaccugaaccacaccagcagcggcagaaccagccugcccaagugcuggcugaucagcaacggcagcuaccugaacgagacccaguucagcgacgacaucgagcagcaggccgacaacaugaucaccgagaugcugcagaaggaguacaucgagagacagggcaagaccccccugggccugguggacaucuucaucuucagcaccagcuucuaccugaucagcaucuuccugcaccugaucaagauccccugaggacuagucccuguucccagagcccacuuuuuuuucuuuuuuugaaauaaaauagccugucuuucagaucuaaaaaaaaaaaaaaaaaaaaaaaaaaaaaaaaaaaaaaaaaaaaaaaaaaaaaaaaaaaaaaaaaaaaaaaaaaaaaaaaaaaaaaaaaaaaaaaaaaaa

SEQ ID NO: 42471 - RNA, 1626 nt, Artificial Sequence
  mRNA product Design a-2 (A100) comprising derived and/or modified sequence from LASV(803213;Clade II)__AAF86703__GPCmut13 (opt4)
aggagaguccgcucagccagguugcagaagcggcuuagcguguguccuaaucuucucucugcguguagguaggccugugccgcaaacaagcuuaccaugggccagaucaucaccuucuuccaggaggugccccacgugaucgaggaggugaugaacaucgugcugaucgcccugagccugcuggccauccugaagggcaucuacaacguggccaccugcggccuguucggccugaucagcuuccugcugcugugcggcagaagcugcagcgugaccuacaagggcguguacgagcugcagacccuggagcugaacauggccaaccugaacaugaccaugccccugagcugcaccaagaacaacagccaccacuacaucauggugggcaacgagaccggccuggagcugacccugaccaacaccagcaucaucaaccacaaguucugcaaccugagcgacgcccacaagaagaaccuguacgaccacgcccugaugagcaucaucagcaccuuccaccugagcauccccaacuucaaccaguacgaggccaugagcugcgacuucaacggcggcaagaucagcgugcaguacaaccugagccacagcuucgccguggacgccgccaaccacugcggcaccaucgccaacggcgugcugcagaccuucaugagaauggccuggggcggcagcuacaucgcccuggacagcggcaagggcaacugggacugcaucaugaccagcuaccaguaccugaucauccagaacaccaccugggaggaccacugccaguucagcagacccagccccaucggcuaccugggccugcugagccagagaaccagagacaucuacaucagcagaagacugcugggcaccuucaccuggacccugagcgacagcgagggcaacgaggcccccggcggcuacugccugaccagauggaugcugaucgaggccgagcugaagugcuucggcaacaccgccguggccaagugcaacgagaagcacgacgaggaguucugcgacaugcugagacuguucgacuucaacaagcaggccaucaagagacugaagaccgaggcccagaugagcauccagcugaucaacaaggccgugaacgcccugaucaacgaccagcugaucaugaagaaccaccugagagacaucaugggcauccccuacugcaacuacagcagauacugguaccugaaccacaccgugaccggcaagaccagccugcccagaugcuggcuggugagcaacggcagcuaccugaacgagacccacuucagcgacgacaucgagcagcaggccgacaacaugaucaccgagaugcugcagaaggaguacauggacagacagggcaagaccccccugggccugguggaccuguucguguucagcaccagcuucuaccugaucagcaucuuccugcaccuggugaagauccccugaggacuagucccuguucccagagcccacuuuuuuuucuuuuuuugaaauaaaauagccugucuuucagaucuaaaaaaaaaaaaaaaaaaaaaaaaaaaaaaaaaaaaaaaaaaaaaaaaaaaaaaaaaaaaaaaaaaaaaaaaaaaaaaaaaaaaaaaaaaaaaaaaaaaa

SEQ ID NO: 42472 - RNA, 1626 nt, Artificial Sequence
  mRNA product Design a-2 (A100) comprising derived and/or modified sequence from LASV(GA391;Clade III)__CAA36645__GPCmut13 (opt4)
aggagaguccgcucagccagguugcagaagcggcuuagcguguguccuaaucuucucucugcguguagguaggccugugccgcaaacaagcuuaccaugggccagaucgugaccuucuuccaggaggugccccacgugaucgaggaggugaugaacaucgugcugaucgcccugagcauccuggccauccugaagggccuguacaacguggccaccugcggccugaucggccuggugaccuuccugcugcugagcggcagaagcugcagccugaucuacaagggcaccuacgagcugcagacccuggagcugaacauggagacccugaacaugaccaugccccugagcugcaccaagaacaacagccaccacuacaucagagugggcaacgagaccggccuggagcugacccugaccaacaccagcauccugaaccacaaguucugcaaccugagcgacgcccacaagagaaaccuguacgaccacagccugaugagcaucaucagcaccuuccaccugagcauccccaacuucaaccaguacgaggccaugagcugcgacuucaacggcggcaagaucaccgugcaguacaaccugagccacagcuucgccguggacgccgccggccacugcggcacccuggccaacggcgugcugcagaccuucaugagaauggccuggggcggcagcuacaucgcccuggacagcggcagaggcaacugggacugcaucaugaccagcuaccaguaccugaucauccagaacaccaccugggacgaccacugccaguucagcagacccagccccaucggcuaccugggccugcugagccagagaaccagagacaucuacaucagcagaagacugcugggcaccuucaccuggacccugagcgacagcgagggcaacgagacccccggcggcuacugccugaccagauggaugcugaucgaggccgagcugaagugcuucggcaacaccgccguggccaagugcaacgagaagcacgacgaggaguucugcgacaugcugagacuguucgacuucaacaagcaggccaucagaagacugaagaccgaggcccagaugagcauccagcugaucaacaaggccgugaacgcccugaucaacgaccagcugaucaugaagaaccaccugagagacaucaugggcauccccuacugcaacuacagcagauacugguaccugaaccacaccagcaccggcaagaccagccugcccagaugcuggcugaucagcaacggcagcuaccugaacgagaccaaguucagcgacgacaucgagcagcaggccgacaacaugaucaccgagaugcugcagaaggaguacaucgacagacagggcaagaccccccugggccugguggaccuguucguguucagcaccagcuucuaccugaucagcaucuuccugcaccuggugaagauccccugaggacuagucccuguucccagagcccacuuuuuuuucuuuuuuugaaauaaaauagccugucuuucagaucuaaaaaaaaaaaaaaaaaaaaaaaaaaaaaaaaaaaaaaaaaaaaaaaaaaaaaaaaaaaaaaaaaaaaaaaaaaaaaaaaaaaaaaaaaaaaaaaaaaaa

SEQ ID NO: 42473 - RNA, 1629 nt, Artificial Sequence
  mRNA product Design a-2 (A100) comprising derived and/or modified sequence from LASV(AV;Clade V)__CCA30314__GPCmut13 (opt4)
aggagaguccgcucagccagguugcagaagcggcuuagcguguguccuaaucuucucucugcguguagguaggccugugccgcaaacaagcuuaccaugggccagaucgugaccuucuuccaggaggugccccacgugaucgaggaggugaugaacaucgugcugaucgcccugagcauccuggccgugcugaagggccuguacaacaucgccaccugcggccugaucggccugaucaccuuccugcugcugugcggcagaagcugcagcagcaaccuguacaagggcguguacgagcugcagagccuggaccugaacauggagacccugaacaugaccaugccccugagcugcaccaagaacaacagccaccacuacaucagagugggcaacgacaccggccuggagcugacccugaccaacaccagcauccugaaccacaaguucugcaaccugagcgacgcccacaagaaggaccuguacgaccacgcccugaugagcaucaucagcaccuuccaccugagcauccccaacuucaaccaguacgaggccaugagcugcgacuucaacggcggcaagaucagcgugcaguacaaccugagccacagcuacgccaucgacgccgccaaccacugcggcaccguggccaacggcauccugcagaccuucaugagaauggccuggggcggcagcuacaucgcccuggacagcggcagaggcaacugggacugcaucaugaccagcuaccaguaccugaucauccagaacaccaccugggagaaccacugccaguucagcagacccagccccaucggcuaccugggccugcugagccagagaaccagagacaucuacaucagcagaagacugcugggcaccuucaccuggacccugagcgacagcgagggcaacgccacccccggcggcuacugccugaccagauggaugcugaucgaggccgagcugaagugcuucggcaacaccgccguggccaagugcaacgagaagcacgacgaggaguucugcgacaugcugagacuguucgacuucaacaagcaggccaucagcagacugaagagcgaggcccagaugagcauccagcugaucaacaaggccgugaacgcccugaucaacgaccagcugaucaugaagaaccaccugagagacaucaugggcauccccuacugcaacuacagcaaguacugguaccugaaccacaccaucaccggcaagaccagccugcccaagugcuggcuggugagcaacggcagcuaccugaacgagacccacuucagcgacgacaucgagcagcaggccgacaacaugaucaccgagaugcugcagaaggaguacauggagagacagggcaagaccccccugggccugguggaccuguucguguucagcaccagcuucuaccugaucagcaucuuccugagacuggugaagauccccugaggacuagucccuguucccagagcccacuuuuuuuucuuuuuuugaaauaaaauagccugucuuucagaucuaaaaaaaaaaaaaaaaaaaaaaaaaaaaaaaaaaaaaaaaaaaaaaaaaaaaaaaaaaaaaaaaaaaaaaaaaaaaaaaaaaaaaaaaaaaaaaaaaaaa

SEQ ID NO: 42474 - RNA, 1626 nt, Artificial Sequence
  mRNA product Design a-2 (A100) comprising derived and/or modified sequence from LASV(Togo/2016/7082;Clade VI)__AMR44577__GPCmut13 (opt4)
aggagaguccgcucagccagguugcagaagcggcuuagcguguguccuaaucuucucucugcguguagguaggccugugccgcaaacaagcuuaccaugggccagaucaucaccuucuuccaggaggugccccacgugaucgaggaggugaugaacaucgugcugaucgcccugagccugcuggccauccugaagggcguguacaacguggccaccugcggcaucaucggccuggugaccuuccuguuccugugcggcagaagcugcagccugaucuacaagggcagcuacgagcugcagacccuggagcugaacauggagacccugaacaugaccaugccccugagcugcaccaagaacagcagccaccacuacaucagagugggcaacgagaccggccuggagcugacccugaccaacaccagcaucaucaaccacaaguucugcaaccugagcgacgcccacaagagaaaccuguacgaccacgcccugaugagcauccugagcaccuuccaccugagcauccccaacuucaaccaguacgaggccaugagcugcgacuucaacggcggcaagaucagcgugcaguacaaccugagccacgccuacgccguggacgccgccgagcacugcggcaccguggccaacggcgugcugcagaccuucaugagaauggccuggggcggcagcuacaucgcccuggacagcggcagaggcaacugggacugcaucaugaccagcuaccaguaccugaucauccagaacaccaccugggaggaccacugccaguucagcagacccagccccaucggcuaccugggccugcugagccagagaaccagagacaucuacaucagcagaagacugcugggcaccuucaccuggacccugagcgacagcgagggcaacgagacccccggcggcuacugccugaccagauggaugcugaucgaggccgagcugaagugcuucggcaacaccgccguggccaagugcaacgagaagcacgacgaggaguucugcgacaugcugagacuguucgacuucaacaagcaggccauccagagacugaagagcgaggcccagaugagcauccagcugaucaacaaggccgugaacgcccugaucaacgaccagcugaucaugaagaaccaccugagagacaugaugggcauccccuacugcaacuacagcaaguacugguaccugaaccacaccagcagcggcagaaccagccugcccaagugcuggcuggugagcaacggcagcuaccugaacgagacccacuucagcgacgacaucgagcagcaggccgacaacaugaucaccgagaugcugcagaaggaguacaucgacagacagggcaagaccccccugggccugguggaccuguucguguucagcaccagcuucuaccugaucagcaucuuccugcaccugaucaagauccccugaggacuagucccuguucccagagcccacuuuuuuuucuuuuuuugaaauaaaauagccugucuuucagaucuaaaaaaaaaaaaaaaaaaaaaaaaaaaaaaaaaaaaaaaaaaaaaaaaaaaaaaaaaaaaaaaaaaaaaaaaaaaaaaaaaaaaaaaaaaaaaaaaaaaa

SEQ ID NO: 42475 - RNA, 1626 nt, Artificial Sequence
  mRNA product Design a-2 (A100) comprising derived and/or modified sequence from LASV(KAK-428;Clade n.d. (VII))__ANH09740__GPCmut13 (opt4)
aggagaguccgcucagccagguugcagaagcggcuuagcguguguccuaaucuucucucugcguguagguaggccugugccgcaaacaagcuuaccaugggccagaucgugaccuucuuccaggaggugccccacgugaucgaggaggugaugaacaucgugcugaucgcccugagccugcuggccauccugaagggccuguacaacuucgccaccugcggcgugaucggccugaucaccuuccugcugcugugcggcagaagcugcagcgccaccuacaagggccaguacgagcugcagacccuggagcugaacauggagagccugaacaugaccaugccccugagcugcaccaagaacaacagccaccacuacaucagagccggcaacaacaccggccuggagcugacccugaccaacaccagcaucaucagccacaaguucugcaaccugagcgacgcccacaagaagaaccuguacgaccacacccugaugagcaucaucaccaccuuccaccugagcauccccaacuucaaccaguacgaggccaugagcugcgacuucaacggcggcaagaucagcauccaguacaaccugagccacagcuacgccggcgacgccgcccagcacugcggcaccguggccaacggcgugcugcagaccuucaugagaauggccuggggcggcagcuaccuggcccuggacagcggcagaagaggcugggacugcaucaucagcagcuaccaguaccugaucauccagaacaccaccugggacgaccacugccaguucagcagacccagccccaucggcuaccugggcuucgugagccagaagaccagagacaucuacaucagcagaagacugcugggcaccuucaccuggacccugagcgacagcgagggccacgacaugcccggcggcuacugccugaccagauggaugcugaucgaggccgaccugaagugcuucggcaacaccgccguggccaagugcaacgagaagcacgacgaggaguucugcgacauguggagacuguucgacuucaacaagcaggccauccagagacugaaggccgaggcccagaugaacauccagcugaucaacaaggccgugaacgcccugaucaacgaccagcugaugaugaagaaccaccugagagacaucaugggcauccccuacugcaacuacagcaaguucugguaccugaacaacaccaccaccggcagaaccagccugcccagaugcuggcugaucagcaacggcagcuaccugaacgagacccacuucagcgacgacaucgagcagcaggccgacaacaugaucaccgagaugcugcagaaggaguacauggacagacagggcaagaccccccugggccugguggaccuguucguguucagcaccagcuucuaccugaucaccaucuuccugcaccuggugaagauccccugaggacuagucccuguucccagagcccacuuuuuuuucuuuuuuugaaauaaaauagccugucuuucagaucuaaaaaaaaaaaaaaaaaaaaaaaaaaaaaaaaaaaaaaaaaaaaaaaaaaaaaaaaaaaaaaaaaaaaaaaaaaaaaaaaaaaaaaaaaaaaaaaaaaaa

SEQ ID NO: 42476 - RNA, 1626 nt, Artificial Sequence; identical to SEQ ID NO: 42470
  mRNA product Design a-2 (A100) comprising derived and/or modified sequence from LASV(Pinneo-NIG-1969;Clade I)__AIT17836__GPCmut13 (opt4)

SEQ ID NO: 42477 - RNA, 1626 nt, Artificial Sequence
  mRNA product Design a-2 (A100) comprising derived and/or modified sequence from LASV(ISTH0009-NIG-2011;Clade II)__AIT17404__GPCmut13 (opt4)
aggagaguccgcucagccagguugcagaagcggcuuagcguguguccuaaucuucucucugcguguagguaggccugugccgcaaacaagcuuaccaugggccagaucaucaccuucuuccaggaggugccccacgugaucgaggaggugaugaacaucgugcugaucgcccugagccugcuggccauccugaagggcaucuacaacguggccaccugcggccuguucggccuggugagcuuccugcugcugugcggcagaagcugcagcaccaccuacaagggcguguacgagcugcagacccuggagcuggacauggccagccugaacaugaccaugccccugagcugcaccaagaacaacagccaccacuacaucauggugggcaacgagaccggccuggagcugacccugaccaacaccagcaucaucaaccacaaguucugcaaccugagcgacgcccacaagaagaaccuguacgaccacgcccugaugagcaucaucagcaccuuccaccugagcauccccaacuucaaccaguacgaggccaugagcugcgacuucaacggcggcaagaucagcgugcaguacaaccugagccacgccuacgccguggacgccgccaaccacugcggcaccaucgccaacggcgugcugcagaccuucaugagaauggccuggggcggcagcuacaucgcccuggacagcggcaagggcagcugggacugcaucaugaccagcuaccaguaccugaucauccagaacaccaccugggaggaccacugccaguucagcagacccagccccaucggcuaccugggccugcugagccagagaaccagagacaucuacaucagcagaagacugcugggcaccuucaccuggacccugagcgacagcgagggcaacgagacccccggcggcuacugccugaccagauggaugcugaucgaggccgagcugaagugcuucggcaacaccgccguggccaagugcaacgagaagcacgacgaggaguucugcgacaugcugagacuguucgacuucaacaagcaggccaucagaagacugaagaccgaggcccagaugagcauccagcugaucaacaaggccgugaacgcccugaucaacgaccagcugaucaugaagaaccaccugagagacaucaugggcauccccuacugcaacuacagcaaguacugguaccugaaccacaccgugaccggcaagaccagccugcccagaugcuggcuggugagcaacggcagcuaccugaacgagacccacuucagcgacgacaucgagcagcaggccgacaacaugaucaccgagcugcugcagaaggaguacauggacagacagggcaagaccccccugggccugguggaccuguucguguucagcaccagcuucuaccugaucagcaucuuccugcaccugaucaagauccccugaggacuagucccuguucccagagcccacuuuuuuuucuuuuuuugaaauaaaauagccugucuuucagaucuaaaaaaaaaaaaaaaaaaaaaaaaaaaaaaaaaaaaaaaaaaaaaaaaaaaaaaaaaaaaaaaaaaaaaaaaaaaaaaaaaaaaaaaaaaaaaaaaaaaa

SEQ ID NO: 42478 - RNA, 1626 nt, Artificial Sequence
  mRNA product Design a-2 (A100) comprising derived and/or modified sequence from LASV(ISTH2010-NIG-2012;Clade II)__AIT17482__GPCmut13 (opt4)
aggagaguccgcucagccagguugcagaagcggcuuagcguguguccuaaucuucucucugcguguagguaggccugugccgcaaacaagcuuaccaugggccagaucaucaccuucuuccaggaggugccccacgugaucgaggaggugaugaacaucgugcugaucgcccugagccugcuggccauccugaagggcaucuacaacguggccaccugcggccuguucggccuggugagcuuccugcugcugugcggcagaagcugcagcaccaccuacaagggcguguacgagcugcagacccuggagcuggacauggccagccugaacaugaccaugccccugagcugcaccaagaacaacagccaccacuacaucauggugggcaacgagaccggccuggagcugacccugaccaacaccagcaucaucaaccacaaguucugcaaccugagcgacgcccacaagaagaaccuguacgaccacgcccugaugagcaucaucagcaccuuccaccugagcauccccaacuucaaccaguacgaggccaugagcugcgacuucaacggcggcaagaucagcgugcaguacaaccugagccacgccuacgccguggacgccgccaaccacugcggcaccaucgccaacggcgugcugcagaccuucaugagaauggccuggggcggcagcuacaucgcccuggacagcggcaagggcagcugggacugcaucaugaccagcuaccaguaccugaucauccagaacaucaccugggaggaccacugccaguucagcagacccagccccaucggcuaccugggccugcugagccagagaaccagagacaucuacaucagcagaagacugcugggcaccuucaccuggacccugagcgacagcgagggcaacgagacccccggcggcuacugccugaccagauggaugcugaucgaggccgagcugaagugcuucggcaacaccgccguggccaagugcaacgagaagcacgacgaggaguucugcgacaugcugagacuguucgacuucaacaagcaggccaucagaagacugaagaccgaggcccagaugagcauccagcugaucaacaaggccgugaacgcccugaucaacgaccagcugaucaugaagaaccaccugagagacaucaugggcauccccuacugcaacuacagcaaguacugguaccugaaccacaccgugaccggcaagaccagccugcccagaugcuggcuggugagcaacggcagcuaccugaacgagacccacuucagcgacgacaucgagcagcaggccgacaacaugaucaccgagcugcugcagaaggaguacaucgacagacagggcaagaccccccugggccugguggaccuguucguguucagcaccagcuucuaccugaucagcaucuuccugcaccuggugaagauccccugaggacuagucccuguucccagagcccacuuuuuuuucuuuuuuugaaauaaaauagccugucuuucagaucuaaaaaaaaaaaaaaaaaaaaaaaaaaaaaaaaaaaaaaaaaaaaaaaaaaaaaaaaaaaaaaaaaaaaaaaaaaaaaaaaaaaaaaaaaaaaaaaaaaaa

SEQ ID NO: 42479 - RNA, 1626 nt, Artificial Sequence
  mRNA product Design a-2 (A100) comprising derived and/or modified sequence from LASV(Lassa virus/H.sapiens-wt/NGA/2015/ISTH_0543;Clade II)__AVO03639__GPCmut13 (opt4)
aggagaguccgcucagccagguugcagaagcggcuuagcguguguccuaaucuucucucugcguguagguaggccugugccgcaaacaagcuuaccaugggccagaucaucaccuucuuccaggaggugccccacgugaucgaggaggugaugaacaucgugcugaucgcccugagccugcuggccauccugaagggcaucuacaacguggccaccugcggccuguucggccuggugagcuuccugcugcugugcggcagaagcugcagcaccaccuacaagggcguguacgagcugcagacccuggagcuggacauggccaaccugaacaugaccaugccccugagcugcaccaagaacaacagccaccacuacaucauggugggcaacgagaccggccuggagcugacccugaccaacaccagcaucaucaaccacaaguucugcaaccugagcgacgcccacaagaagaaccuguacgaccacgcccugaugagcaucaucagcaccuuccaccugagcauccccaacuucaaccaguacgaggccaugagcugcgacuucaacggcggcaagaucagcgugcaguacaaccugagccacaccuacgccguggacgccgccaaccacugcggcaccaucgccaacggcgugcugcagaccuucaugagaauggccuggggcggcagcuacaucgcccuggacagcggcaagggcagcugggacugcaucaugaccagcuaccaguaccuggugauccagaacaccaccugggaggaccacugccaguucagcagacccagccccaucggcuaccugggccugcugagccagagaaccagagacaucuacaucagcagaagacugcugggcaccuucaccuggacccugagcgacagcgagggcaacgagacccccggcggcuacugccugaccagauggaugcugaucgaggccgagcugaagugcuucggcaacaccgccguggccaagugcaacgagaagcacgacgaggaguucugcgacaugcugagacuguucgacuucaacaagcaggccaucagaagacugaagaccgaggcccagaugagcauccagcugaucaacaaggccgugaacgcccugaucaacgaccagcugaucaugaagaaccaccugagagacaucaugggcauccccuacugcaacuacagcaaguacugguaccugaaccacaccgugaccggcaagaccagccugcccagaugcuggcuggugagcaacggcagcuaccugaacgagacccacuucagcgacgacaucgagcagcaggccgacaacaugaucaccgagcugcugcagaaggaguacaucgacagacagggcaagaccccccugggccugguggaccuguucguguucagcaccagcuucuaccugaucagcaucuuccugcaccuggugaagauccccugaggacuagucccuguucccagagcccacuuuuuuuucuuuuuuugaaauaaaauagccugucuuucagaucuaaaaaaaaaaaaaaaaaaaaaaaaaaaaaaaaaaaaaaaaaaaaaaaaaaaaaaaaaaaaaaaaaaaaaaaaaaaaaaaaaaaaaaaaaaaaaaaaaaaa

SEQ ID NO: 42480 - RNA, 1626 nt, Artificial Sequence
  mRNA product Design a-2 (A100) comprising derived and/or modified sequence from LASV(Lassa virus/H.sapiens-wt/NGA/2016/ISTH_0009;Clade II)__AVO03571__GPCmut13 (opt4)
aggagaguccgcucagccagguugcagaagcggcuuagcguguguccuaaucuucucucugcguguagguaggccugugccgcaaacaagcuuaccaugggccagaucaucaccuucuuccaggaggugccccacgugaucgaggaggugaugaacaucgugcugaucgcccugagccugcuggccauccugaagggcaucuacaacguggccaccugcggccugcugggccuggugagcuuccugcugcugugcggcagaagcugcagcaccaccuacaagggcguguacgagcugcagacccuggagcuggacauggccagccugaacaugaccaugccccugagcugcaccaagaacaacagccaccacuacaucauggugggcaacgagaccggccuggagcugacccugaccaacaccagcaucaucaaccacaaguucugcaaccugagcgacgcccacaagaagaaccuguacgaccacgcccugaugagcaucaucagcaccuuccaccugagcauccccaacuucaaccaguacgaggccaugagcugcgacuucaacggcggcagaaucagcgugcaguacaaccugagccacagcuacgccguggacgccgccaaccacugcggcaccaucgccaacggcgugcugcagaccuucaugagaauggccuggggcggcagcuacaucgcccuggacagcggcaagggcagcugggacugcaucaugaccagcuaccaguaccugaucauccagaacaccaccugggaggaccacugccaguucagcagacccagccccaucggcuaccugggccugcugagccagagaaccagagacaucuacaucagcagaagacugcugggcaccuucaccuggacccugagcgacagcgagggcaacgagacccccggcggcuacugccugaccagauggaugcugaucgaggccgagcugaagugcuucggcaacaccgccguggccaagugcaacgagaagcacgacgaggaguucugcgacaugcugagacuguucgacuucaacaagcaggccaucagaagacugaagaccgaggcccagaugagcauccagcugaucaacaaggccgugaacgcccugaucaacgaccagcugaucaugaagaaccaccugagagacaucaugggcauccccuacugcaacuacagcaaguacugguaccugaaccacaccgugaccggcaagaccagccugcccagaugcuggcuggugagcaacggcagcuaccugaacgagacccacuucagcgacgacaucgagcagcaggccgacaacaugaucaccgagcugcugcagaaggaguacaucgacagacagggcaagaccccccugggccugguggaccuguucguguucagcaccagcuucuaccugaucagcaucuuccugcaccuggugaagauccccugaggacuagucccuguucccagagcccacuuuuuuuucuuuuuuugaaauaaaauagccugucuuucagaucuaaaaaaaaaaaaaaaaaaaaaaaaaaaaaaaaaaaaaaaaaaaaaaaaaaaaaaaaaaaaaaaaaaaaaaaaaaaaaaaaaaaaaaaaaaaaaaaaaaaa

SEQ ID NO: 42481 - RNA, 1626 nt, Artificial Sequence
  mRNA product Design a-2 (A100) comprising derived and/or modified sequence from LASV(Lassa virus/H.sapiens-wt/NGA/2016/ISTH_0017;Clade II)__AVO03567__GPCmut13 (opt4)
aggagaguccgcucagccagguugcagaagcggcuuagcguguguccuaaucuucucucugcguguagguaggccugugccgcaaacaagcuuaccaugggccagaucaucaccuucuuccaggaggugccccacgugaucgaggaggugaugaacaucgugcugaucgcccugagccugcuggccauccugaagggcaucuacaacguggccaccugcggccuguucggccuggugagcuuccugcugcugugcggcagaagcugcagcaccaccuacaagggcguguacgagcugcagacccuggagcuggacauggccagccugaacaugaccaugccccugagcugcaccaagaacaacagccaccacuacaucauggugggcaacgagaccggccuggagcugacccugaccaacaccagcaucaucaaccacaaguucugcaaccugagcgacgcccacaagaagaaccuguacgaccacgcccugaugagcaucaucagcaccuuccaccugagcauccccaacuucaaccaguacgaggccaugagcugcgacuucaacggcggcaagaucagcgugcaguacaaccugagccacaccuacgccaucgacgccgccaaccacugcggcaccaucgccaacggcgugcugcagaccuucaugagaauggccuggggcggcagcuacaucgcccuggacagcggcaagggcagcugggacugcaucaugaccagcuaccaguaccugaucauccagaacaccaccugggaggaccacugccaguucagcagacccagccccaucggcuaccugggccugcugagccagagaaccagagacaucuacaucagcagaagacugcugggcaccuucaccuggacccugagcgacagcgagggcaacgagacccccggcggcuacugccugaccagauggaugcugaucgaggccgagcugaagugcuucggcaacaccgccguggccaagugcaacgagaagcacgacgaggaguucugcgacaugcugagacuguucgacuucaacaagcaggccaucagaagacugaagaccgaggcccagaugagcauccagcugaucaacaaggccgugaacgcccugaucaacgaccagcugaucaugaagaaccaccugagagacaucaugggcauccccuacugcaacuacagcaaguacugguaccugaaccacaccgugaccggcaagaccagccugcccagaugcuggcuggugagcaacggcagcuaccugaacgagacccacuucagcgacgacaucgagcagcaggccgacaacaugaucaccgagcugcugcagaaggaguacauggacagacagggcaagaccccccugggccugguggaccuguucguguucagcaccagcuucuaccugaucagcaucuuccugcaccuggugagaauccccugaggacuagucccuguucccagagcccacuuuuuuuucuuuuuuugaaauaaaauagccugucuuucagaucuaaaaaaaaaaaaaaaaaaaaaaaaaaaaaaaaaaaaaaaaaaaaaaaaaaaaaaaaaaaaaaaaaaaaaaaaaaaaaaaaaaaaaaaaaaaaaaaaaaaa

SEQ ID NO: 42482 - RNA, 1626 nt, Artificial Sequence
  mRNA product Design a-2 (A100) comprising derived and/or modified sequence from LASV(Lassa virus/H.sapiens-wt/NGA/2018/ISTH_0959;Clade II)__AVV65099__GPCmut13 (opt4)
aggagaguccgcucagccagguugcagaagcggcuuagcguguguccuaaucuucucucugcguguagguaggccugugccgcaaacaagcuuaccaugggccagaucaucaccuucuuccaggaggugccccacgugaucgaggaggugaugaacaucgugcugaucgcccugagccugcuggccauccugaagggcaucuacaacguggugaccugcggccuguucggccuggugagcuuccugcugcugugcggcagaagcugcagcaccaccuacaagggcguguacgagcugcagacccuggagcuggacauggccagccugaacaugaccaugccccugagcugcaccaagaacaacagccaccacuacaucauggugggcaacgagaccggccuggagcugacccugaccaacaccagcaucaucaaccacaaguucugcaaccugagcgacgcccacaagaagaaccuguacgaccacgcccugaugagcaucaucagcaccuuccaccugagcauccccaacuucaaccaguacgaggccaugagcugcgacuucaacggcggcaagaucagcgugcaguacaaccugagccacgccuacgccaucgacgccgccaaccacugcggcaccaucgccaacggcgugcugcagaccuucaugagaauggccuggggcggcagcuacaucgcccuggacagcggcaagggcagcugggacugcaucaugaccagcuaccaguaccugaucauccagaacaccaccugggaggaccacugccaguucagcagacccagccccaucggcuaccugggccugcugagccagagaaccagagacaucuacaucagcagaagacugcugggcaccuucaccuggacccugagcgacagcgagggcaacgagacccccggcggcuacugccugaccagauggaugcugaucgaggccgagcugaagugcuucggcaacaccgccguggccaagugcaacgagaagcacgacgaggaguucugcgacaugcugagacuguucgacuucaacaagcaggccaucagaagacugaagaccgaggcccagaugagcauccagcugaucaacaaggccgugaacgcccugaucaacgaccagcugaucaugaagaaccaccugagagacaucaugggcauccccuacugcaacuacagcaaguacugguaccugaaccacaccgugaccggcaagaccagccugcccagaugcuggcuggugagcaacggcagcuaccugaacgagacccacuucagcgacgacaucgagcagcaggccgacaacaugaucaccgagcugcugcagaaggaguacaucgacagacagggcaagaccccccugggccugguggaccuguucguguucagcaccagcuucuaccugaucagcaucuuccugcaccuggugaagauccccugaggacuagucccuguucccagagcccacuuuuuuuucuuuuuuugaaauaaaauagccugucuuucagaucuaaaaaaaaaaaaaaaaaaaaaaaaaaaaaaaaaaaaaaaaaaaaaaaaaaaaaaaaaaaaaaaaaaaaaaaaaaaaaaaaaaaaaaaaaaaaaaaaaaaa

SEQ ID NO: 42483 - RNA, 1626 nt, Artificial Sequence
  mRNA product Design a-2 (A100) comprising derived and/or modified sequence from LASV(LASV003-NIG-2008;Clade II)__AIT17580__GPCmut13 (opt4)
aggagaguccgcucagccagguugcagaagcggcuuagcguguguccuaaucuucucucugcguguagguaggccugugccgcaaacaagcuuaccaugggccagaucaucaccuucuuccaggaggugccccacgugaucgaggaggugaugaacaucgugcugaucgcccugagccugcuggccauccugaagggcaucuacaacguggccaccugcggccuguucggccuggugagcuuccugcugcugugcggcagaagcugcagcaccaccuacaagggcguguacgagcugcagacccuggagcuggacauggccagccugaacaugaccaugccccugagcugcaccaagaacaacagccaccacuacaucauggugggcaacgagaccggccuggagcugacccugaccaacaccagcaucaucaaccacaaguucugcaaccugagcgacgcccacaagaagaaccuguacgaccacgcccugaugagcaucaucagcaccuuccaccugagcauccccaacuucaaccaguacgaggccaugagcugcgacuucaacggcggcaagaucagcgugcaguacaaccugagccacaccuacgccguggacgccgccaaccacugcggcaccaucgccaacggcgugcugcagaccuucaugagaauggccuggggcggcagcuacaucgcccuggacagcggcaagggcagcugggacugcaucaugaccagcuaccaguaccugaucauccagaacaccaccugggaggaccacugccaguucagcagacccagccccaucggcuaccugggccugcugagccagagaaccagagacaucuacaucagcagaagacugcugggcaccuucaccuggacccugagcgacagcgagagcaacgagacccccggcggcuacugccugaccagauggaugcugaucgaggccgagcugaagugcuucggcaacaccgccguggccaagugcaacgagaagcacgacgaggaguucugcgacaugcugagacuguucgacuucaacaagcaggccaucagaagacugaaggccgaggcccagaugagcauccagcugaucaacaaggccgugaacgcccugaucaacgaccagcugaucaugaagaaccaccugagagacaucaugggcauccccuacugcaacuacagcaaguacugguaccugaaccacaccgugaccggcagaaccagccugcccagaugcuggcuggugagcaacggcagcuaccugaacgagacccacuucagcgacgacaucgagcagcaggccgacaacaugaucaccgagcugcugcagaaggaguacauggacagacagggcaagaccccccugggccugguggaccuguucguguucagcaccagcuucuaccugaucagcaucuuccugcaccuggugaagauccccugaggacuagucccuguucccagagcccacuuuuuuuucuuuuuuugaaauaaaauagccugucuuucagaucuaaaaaaaaaaaaaaaaaaaaaaaaaaaaaaaaaaaaaaaaaaaaaaaaaaaaaaaaaaaaaaaaaaaaaaaaaaaaaaaaaaaaaaaaaaaaaaaaaaaa

SEQ ID NO: 42484 - RNA, 1626 nt, Artificial Sequence
  mRNA product Design a-2 (A100) comprising derived and/or modified sequence from LASV(LASV035-NIG-2009;Clade II)__AIT17588__GPCmut13 (opt4)
aggagaguccgcucagccagguugcagaagcggcuuagcguguguccuaaucuucucucugcguguagguaggccugugccgcaaacaagcuuaccaugggccagaucaucaccuucuuccaggaggugccccacgugaucgaggaggugaugaacaucgugcugaucgcccugagccugcuggccauccugaagggcaucuacaacguggccaccugcggccuguucggccuggugagcuuccugcugcugugcggcagaagcugcagcaccaccuacaagggcguguacgagcugcagacccuggagcuggacauggccagccugaacaugaccaugccccugagcugcaccaagaacaacagccaccacuacaucauggugggcaacgagaccggccuggagcugacccugaccaacaccagcaucaucaaccacaaguucugcaaccugagcgacgcccacaagaagaaccuguacgaccacgcccugaugagcaucaucagcaccuuccaccugagcauccccaacuucaaccaguacgaggccaugagcugcgacuucaacggcggcaagaucagcgugcaguacaaccugagccacgccuacgccguggacgccgccaaccacugcggcaccaucgccaacggcgugcugcagaccuucaugagaauggccuggggcggcagcuacaucgcccuggacagcggcaagggcagcugggacugcaucaugaccagcuaccaguaccugaucauccagaacaccaccugggaggaccacugccaguucagcagacccagccccaucggcuaccugggccugcugagccagagaaccagagacaucuacaucagcagaagacugcugggcaccuucaccuggacccugagcgacagcgagggcaacgagacccccggcggcuacugccugaccagauggaugcugaucgaggccgagcugaagugcuucggcaacaccgccguggccaagugcaacgagaagcacgacgaggaguucugcgacaugcugagacuguucgacuucaacaagcaggccaucagaagacugaaggccgaggcccagaugagcauccagcugaucaacaaggccgugaacgcccugaucaacgaccagcugaucaugaagaaccaccugagagacaucaugggcauccccuacugcaacuacagcaaguacugguaccugaaccacaccgugaccggcaagaccagccugcccagaugcuggcuggugagcaacggcagcuaccugaacgagacccacuucagcgacgacaucgagcagcaggccgacaacaugaucaccgagcugcugcagaaggaguacaucgacagacagggcaagaccccccugggccugguggaccuguucguguucagcaccagcuucuaccugaucagcaucuuccugcaccuggugaagauccccugaggacuagucccuguucccagagcccacuuuuuuuucuuuuuuugaaauaaaauagccugucuuucagaucuaaaaaaaaaaaaaaaaaaaaaaaaaaaaaaaaaaaaaaaaaaaaaaaaaaaaaaaaaaaaaaaaaaaaaaaaaaaaaaaaaaaaaaaaaaaaaaaaaaaa

SEQ ID NO: 42485 - RNA, 1626 nt, Artificial Sequence
  mRNA product Design a-2 (A100) comprising derived and/or modified sequence from LASV(LASV1000-NIG-2009;Clade II)__AIT17782__GPCmut13 (opt4)
aggagaguccgcucagccagguugcagaagcggcuuagcguguguccuaaucuucucucugcguguagguaggccugugccgcaaacaagcuuaccaugggccagaucaucaccuucuuccaggaggugccccacgugaucgaggaggugaugaacaucgugcugaucgcccugagccugcuggccauccugaagggcaucuacaacguggccaccugcggccuguucggccuggugagcuuccugcugcugugcggcagaagcugcagcaccaccuacaagggcguguacgagcugcagacccuggagcuggacauggccagccugaacaugaccaugccccugagcugcaccaagaacaacagccaccacuacaucauggugggcaacgagaccggccuggagcugacccugaccaacaccagcaucaucaaccacaaguucugcaaccugagcgacgcccacaagaagaaccuguacgaccacgcccugaugagcaucaucagcaccuuccaccugagcauccccaacuucaaccaguacgaggccaugagcugcgacuucaacggcggcaagaucagcgugcaguacaaccugagccacaccuacgccguggacgccgccaaccacugcggcaccaucgccaacggcgugcugcagaccuucaugagaauggccuggggcggcagcuacaucgcccuggacagcggcaagggcagcugggacugcaucaugaccagcuaccaguaccugaucauccagaacaccaccugggaggaccacugccaguucagcagacccagccccaucggcuaccugggccugcugagccagagaaccagagacaucuacaucagcagaagacugcugggcaccuucaccuggacccugagcgacagcgagggcaacgagacccccggcggcuacugccugaccagauggaugcugaucgaggccgagcugaagugcuucggcaacaccgccguggccaagugcaacgagaagcacgacgaggaguucugcgacaugcugagacuguucgacuucaacaagcaggccaucaagagacugaagaccgaggcccagaugagcauccagcugaucaacaaggccgugaacgcccugaucaacgaccagcugaucaugaagaaccaccugagagacaucaugggcauccccuacugcaacuacagcaaguacugguaccugaaccacaccgugaccggcaagaccagccugcccagaugcuggcuggugagcaacggcagcuaccugaacgagacccacuucagcgacgacaucgagcagcaggccgacaacaugaucaccgagcugcugcagaaggaguacaucgacagacagggcaagaccccccugggccugguggaccuguucguguucagcaccagcuucuaccugaucagcaucuuccugcaccuggugaagauccccugaggacuagucccuguucccagagcccacuuuuuuuucuuuuuuugaaauaaaauagccugucuuucagaucuaaaaaaaaaaaaaaaaaaaaaaaaaaaaaaaaaaaaaaaaaaaaaaaaaaaaaaaaaaaaaaaaaaaaaaaaaaaaaaaaaaaaaaaaaaaaaaaaaaaa

SEQ ID NO: 42486 - RNA, 1626 nt, Artificial Sequence
  mRNA product Design a-2 (A100) comprising derived and/or modified sequence from LASV(LASV221-NIG-2010;Clade II)__AIT17624__GPCmut13 (opt4)
aggagaguccgcucagccagguugcagaagcggcuuagcguguguccuaaucuucucucugcguguagguaggccugugccgcaaacaagcuuaccaugggccagaucaucaccuucuuccaggaggugccccacgugaucgaggaggugaugaacaucgugcugaucgcccugagccugcuggccauccugaagggcaucuacaacguggccaccugcggccuguucggccuggugagcuuccugcugcugugcggcagaagcugcagcaccaccuacaagggcguguacgagcugcagacccuggagcuggacauggccagccugaacaugaccaugccccugagcugcaccaagaacaacagccaccacuacaucauggugggcaacgagaccggccuggagcugacccugaccaacaccagcaucaucaaccacaaguucugcaaccugagcgacgcccacaagaagaaccuguacgaccacgcccugaugagcaucaucagcaccuuccaccugagcauccccaacuucaaccaguacgaggccaugagcugcgacuucaacggcggcaagaucagcgugcaguacaaccugagccacaccuacgccaucgacgccgccaaccacugcggcaccaucgccaacggcgugcugcagaccuucaugagaauggccuggggcggcagcuacaucgcccuggacagcggcaagggcagcugggacugcaucaugaccagcuaccaguaccugaucauccagaacaccaccugggaggaccacugccaguucagcagacccagccccaucggcuaccugggccugcugagccagagaaccagagacaucuacaucagcagaagacugcugggcaccuucaccuggacccugagcgacagcgagggcaacgagacccccggcggcuacugccugaccagauggaugcugaucgaggccgagcugaagugcuucggcaacaccgccguggccaagugcaacgagaagcacgacgaggaguucugcgacaugcugagacuguucgacuucaacaagcaggccaucagaagacugaagaccgaggcccagaugagcauccagcugaucaacaaggccgugaacgcccugaucaacgaccagcugaucaugaagaaccaccugagagacaucaugggcauccccuacugcaacuacagcaaguacugguaccugaaccacaccgugaccggcaagaccagccugcccagaugcuggcuggugagcaacggcagcuaccugaacgagacccacuucagcgacgacaucgagcagcaggccgacaacaugaucaccgagaugcugcagaaggaguacauggacagacagggcaagaccccccugggccugguggaccuguucguguucagcaccagcuucuaccugaucagcaucuuccugcaccuggugaagauccccugaggacuagucccuguucccagagcccacuuuuuuuucuuuuuuugaaauaaaauagccugucuuucagaucuaaaaaaaaaaaaaaaaaaaaaaaaaaaaaaaaaaaaaaaaaaaaaaaaaaaaaaaaaaaaaaaaaaaaaaaaaaaaaaaaaaaaaaaaaaaaaaaaaaaa

SEQ ID NO: 42487 - RNA, 1626 nt, Artificial Sequence
  mRNA product Design a-2 (A100) comprising derived and/or modified sequence from LASV(LASV237-NIG-2010;Clade II)__AIT17638__GPCmut13 (opt4)
aggagaguccgcucagccagguugcagaagcggcuuagcguguguccuaaucuucucucugcguguagguaggccugugccgcaaacaagcuuaccaugggccagaucaucaccuucuuccaggaggugccccacgugaucgaggaggugaugaacaucgugcugaucgcccugagccugcuggccauccugaagggcaucuacaacguggccaccugcggccuguucggccuggugagcuuccugcugcugugcggcagaagcugcagcaccaccuacaagggcguguacgagcugcagacccuggagcuggacauggccagccugaacaugaccaugccccugagcugcaccaagaacaacagccaccacuacaucauggugggcaacgagaccggccuggagcugacccugaccaacaccagcaucaucaaccacaaguucugcaaccugagcgacgcccacaagaaggaccuguacgaccacgcccugaugagcaucaucagcaccuuccaccugagcauccccaacuucaaccaguacgaggccaugagcugcgacuucaacggcggcaagaucagcgugcaguacaaccugagccacaccuacgccguggacgccgccaaccacugcggcaccaucgccaacggcgugcugcagaccuucaugagaauggccuggggcggcagcuacaucgcccuggacagcggcaagggcagcugggacugcaucaugaccagcuaccaguaccugaucauccagaacaccaccugggaggaccacugccaguucagcagacccagccccaucggcuaccugggccugcugagccagagaaccagagacaucuacaucagcagaagacugcugggcaccuucaccuggacccugagcgacagcgagggcaacgagacccccggcggcuacugccugaccagauggaugcugaucgaggccgagcugaagugcuucggcaacaccgccguggccaagugcaacgagaagcacgacgaggaguucugcgacaugcugagacuguucgacuucaacaagcaggccaucagaagacugaagaccgaggcccagaugagcauccagcugaucaacaaggccgugaacgcccugaucaacgaccagcugaucaugaagaaccaccugagagacaucaugggcauccccuacugcaacuacagcaaguacugguaccugaaccacaccgugaccggcaagaccagccugcccagaugcuggcuggugagcaacggcagcuaccugaacgagacccacuucagcgacgacaucgagcagcaggccgacaacaugaucaccgagcugcugcagaaggaguacauggacagacagggcaagaccccccugggccugguggaccuguucguguucagcaccagcuucuaccugaucagcaucuuccugcaccugaucaagauccccugaggacuagucccuguucccagagcccacuuuuuuuucuuuuuuugaaauaaaauagccugucuuucagaucuaaaaaaaaaaaaaaaaaaaaaaaaaaaaaaaaaaaaaaaaaaaaaaaaaaaaaaaaaaaaaaaaaaaaaaaaaaaaaaaaaaaaaaaaaaaaaaaaaaaa

SEQ ID NO: 42488 - RNA, 1626 nt, Artificial Sequence
  mRNA product Design a-2 (A100) comprising derived and/or modified sequence from LASV(LASV253-NIG-2011;Clade II)__AIT17670__GPCmut13 (opt4)
aggagaguccgcucagccagguugcagaagcggcuuagcguguguccuaaucuucucucugcguguagguaggccugugccgcaaacaagcuuaccaugggccagaucaucaccuucuuccaggaggugccccacgugaucgaggaggugaugaacaucgugcugaucgcccugagccugcuggccauccugaagggcaucuacaacguggccaccugcggccuguucggccuggugagcuuccugcugcugugcggcagaagcugcagcaccaccuacaagggcguguacgagcugcagacccuggagcuggacauggccagccugaacaugaccaugccccugagcugcaccaagaacaacagccaccacuacaucauggugggcaacgagaccggccuggagcugacccugaccaacaccagcaucaucaaccacaaguucugcaaccugagcgacgcccacaagaagaaccuguacgaccacgcccugaugagcaucaucagcaccuuccaccugagcauccccaacuucaaccaguacgaggccaugagcugcgacuucaacggcggcaagaucagcgugcaguacaaccugagccacaccuacgccguggacgccgccaaccacugcggcaccaucgccaacggcgugcugcagaccuucaugagaauggccuggggcggcagcuacaucgcccuggacagcggcaagggcagcugggacugcaucaugaccagcuaccaguaccugaucauccagaacaccaccugggaggaccacugccaguucagcagacccagccccaucggcuaccugggccugcugagccagagaaccagagacaucuacaucagcagaagacugcugggcaccuucaccuggacccugagcgacagcgagggcaacgagacccccggcggcuacugccugaccagauggaugcugaucgaggccgagcugaagugcuucggcaacaccgccguggccaagugcaacgagaagcacgacgaggaguucugcgacaugcugagacuguucgacuucaacaagcaggccaucagaagacugaaggccgaggcccagaugagcauccagcugaucaacaaggccgugaacgcccugaucaacgaccagcugaucaugaagaaccaccugagagacaucaugggcauccccuacugcaacuacagcaaguacugguaccugaaccacaccgugaccggcagaaccagccugcccagaugcuggcuggugagcaacggcagcuaccugaacgagacccacuucagcgacgacaucgagcagcaggccgacaacaugaucaccgagcugcugcagaaggaguacaucgacagacagggcaagaccccccugggccugguggaccuguucguguucagcaccagcuucuaccugaucagcaucuuccugcaccuggugaagauccccugaggacuagucccuguucccagagcccacuuuuuuuucuuuuuuugaaauaaaauagccugucuuucagaucuaaaaaaaaaaaaaaaaaaaaaaaaaaaaaaaaaaaaaaaaaaaaaaaaaaaaaaaaaaaaaaaaaaaaaaaaaaaaaaaaaaaaaaaaaaaaaaaaaaaa

SEQ ID NO: 42489 - RNA, 1626 nt, Artificial Sequence
  mRNA product Design a-2 (A100) comprising derived and/or modified sequence from LASV(LASV254-NIG-2011;Clade II)__AIT17674__GPCmut13 (opt4)
aggagaguccgcucagccagguugcagaagcggcuuagcguguguccuaaucuucucucugcguguagguaggccugugccgcaaacaagcuuaccaugggccagaucaucaccuucuuccaggaggugccccacgugaucgaggaggugaugaacaucgugcugaucgcccugagccugcuggccauccugaagggcaucuacaacguggccaccugcggccuguucggccuggugagcuuccugcugcugugcggcagaagcugcagcaccaccuacaagggcguguacgagcugcagacccuggagcuggacaugaccaaccugaacaugaccaugccccugagcugcaccaagaacaacagccaccacuacaucauggugggcaacgagaccggccuggagcugacccugaccaacaccagcaucaucaaccacaaguucugcaaccugagcgacgcccacaagaagaaccuguacaaccacgcccugaugagcaucaucagcaccuuccaccugagcauccccaacuucaaccaguacgaggccaugagcugcgacuucaacggcggcaagaucagcgugcaguacaaccugagccacagcuacgccguggacgccgccaaccacugcggcaccaucgccaacggcgugcugcagaccuucaugagaauggccuggggcggcagcuacaucgcccuggacagcggcaagggcaacugggacugcaucaugaccagcuaccaguaccugaucauccagaacaccaccugggaggaccacugccaguucagcagacccagccccaucggcuaccugggccugcugagccagagaaccagagacaucuacaucagcagaagacugcugggcaccuucaccuggacccugagcgacagcgagggcaacgagacccccggcggcuacugccugaccagauggaugcugaucgaggccgagcugaagugcuucggcaacaccgccguggccaagugcaacgagaagcacgacgaggaguucugcgacaugcugagacuguucgacuucaacaagcaggccaucagaagacugaagaccgaggcccaggccaacauccagcugaucaacaaggccgugaacgcccugaucaacgaccagcugaucaugaagaaccaccugagagacaucaugggcauccccuacugcaacuacagcaaguacugguaccugaaccacaccgugaccggcaagaccagccugcccagaugcuggcuggugagcaacggcagcuaccugaacgagacccacuucagcgacgacaucgagcagcaggccgacaacaugaucaccgagcugcugcagaaggaguacauggacagacagggcaagaccccccugggccugguggaccuguucguguucagcaccagcuucuaccugaucagcaucuuccugcaccuggugaagauccccugaggacuagucccuguucccagagcccacuuuuuuuucuuuuuuugaaauaaaauagccugucuuucagaucuaaaaaaaaaaaaaaaaaaaaaaaaaaaaaaaaaaaaaaaaaaaaaaaaaaaaaaaaaaaaaaaaaaaaaaaaaaaaaaaaaaaaaaaaaaaaaaaaaaaa

SEQ ID NO: 42490 - RNA, 1626 nt, Artificial Sequence
  mRNA product Design a-2 (A100) comprising derived and/or modified sequence from LASV(Nig08-A19;Clade III)__ADU56618__GPCmut13 (opt4)
aggagaguccgcucagccagguugcagaagcggcuuagcguguguccuaaucuucucucugcguguagguaggccugugccgcaaacaagcuuaccaugggccagaucgugaccuucuuccaggaggugccccacgugaucgaggaggugaugaacaucgugcugaucgcccugagcauccuggccauccugaagggccuguacaacaucgccaccugcggccugaucggccuggugaccuuccugcugcugagcggcagaagcugcagcaugaccuacaagggcguguacgagcugcagacccuggagcugaacaugaacacccugaacaugaccaugccccugagcugcaccaagaacaacagccaccacuacaucauggugggcaacgagaccggccuggagcugacccugaccaacaccagccugcugcaccacaaguucugcaaccugagcgacgcccacaagaagaaccuguacgaccacacccugaugagcaucaucagcaccuuccaccugagcauccccaacuucaaccaguacgaggccaugagcugcgacuucaacggcggcaagaucaccgugcaguacaaccugagccacagcuacgccaucgacgccgccaaccacugcggcaccguggccaacggcgugcugcagaccuucaugagaauggccuggggcggcagcuacaucgcccuggacagcggcagaggcaagugggacugcaucaugaccagcuaccaguaccugaucauccagaacaccaccugggaggaccacugccaguucagcagacccagccccaucggcuaccugggccugcugagccagagaaccagagacaucuacaucagcagaagacugcugggcaccuucaccuggacccugagcgacagcgagggcaacgagacccccggcggcuacugccugaccagauggaugcugaucgaggccgagcugaagugcuucggcaacaccgccguggccaagugcaacgagaagcacgacgaggaguucugcgacaugcugagacuguucgacuucaacaagcaggccaucagaagacugaaggccgaggcccagaugagcauccagcugaucaacaaggccgugaacgcccugaucaacgaccagcugaucaugaagaaccaccugagagacaucaugggcauccccuacugcaacuacagcaaguacugguaccugaaccacaccagcaccggcagaaccagccugcccagaugcuggcuggugagcaacggcagcuaccugaacgagacccacuucagcgacgacaucgagcagcaggccgacaacaugaucaccgagaugcugcagaaggaguaccuggacagacagggcaagaccccccugggccugguggaccuguucguguucagcaccagcuucuaccugaucagcaucuuccugcaccuggugaagauccccugaggacuagucccuguucccagagcccacuuuuuuuucuuuuuuugaaauaaaauagccugucuuucagaucuaaaaaaaaaaaaaaaaaaaaaaaaaaaaaaaaaaaaaaaaaaaaaaaaaaaaaaaaaaaaaaaaaaaaaaaaaaaaaaaaaaaaaaaaaaaaaaaaaaaa

SEQ ID NO: 42491 - RNA, 1629 nt, Artificial Sequence
  mRNA product Design a-2 (A100) comprising derived and/or modified sequence from LASV(G1180-SLE-2010;Clade IV)__AIT17168__GPCmut13 (opt4)
aggagaguccgcucagccagguugcagaagcggcuuagcguguguccuaaucuucucucugcguguagguaggccugugccgcaaacaagcuuaccaugggccagaucgugaccuucuuccaggaggugccccacgugaucgaggaggugaugaacaucgugcugaucgcccugagcauccuggccgugcugaagggccuguacaacuucgccaccugcggccuggugggccugcugaccuuccugcugcugugcggcagaagcugcaccgccagcagauacaagggcguguacgagcugcagacccuggagcugaacauggagacccugaacaugaccaugccccugagcugcaccaagaacaacagccaccacuacaucauggugggcaacgagaccggccuggagcugacccugaccaacaccagcaucaucaaccacaaguucugcaaccugagcgacgcccacaagaagaaccuguacgaccacgcccugaugagcaucaucagcaccuuccaccugagcauccccaacuucaaccaguacgaggccaugagcugcgacuucaacggcggcaagaucagcgugcaguacaaccugagccacagcuacgccggcgacgccgccaaccacugcggcaccguggccaacggcgugcugcagaccuucaugagaauggccuggggcggcagcuacaucgcccuggacagcggccacggcagcugggacugcaucaugaccagcuaccaguaccugaucauccagaacaccaccugggaggaccacugccaguucagcagacccagccccaucggcuaccugggccugcugagccagagaaccagagacaucuacaucagcagaagacugcugggcaccuucaccuggacccugagcgacagcgagggcaaggacacccccggcggcuacugccugaccagauggaugcugaucgaggccgagcugaagugcuucggcaacaccgccguggccaagugcaacgagaagcacgacgaggaguucugcgacaugcugagacuguucgacuucaacaagcaggccauccagagacugaaggccgaggcccagaugagcauccagcugaucaacaaggccgugaacgcccugaucaacgaccagcugaucaugaagaaccaccugagagacaucaugggcauccccuacugcaacuacagcaaguacugguaccugaaccacaccaccaccggcaagaccagccugcccaagugcuggcuggugagcaacggcagcuaccugaacgagacccacuucagcgacgacaucgagcagcaggccgacaacaugaucaccgagaugcugcagaaggaguacauggagagacagggcaagaccccccugggccugguggaccuguucguguucagcaccagcuucuaccugaucagcaucuuccugcaccuggugaagauccccugaggacuagucccuguucccagagcccacuuuuuuuucuuuuuuugaaauaaaauagccugucuuucagaucuaaaaaaaaaaaaaaaaaaaaaaaaaaaaaaaaaaaaaaaaaaaaaaaaaaaaaaaaaaaaaaaaaaaaaaaaaaaaaaaaaaaaaaaaaaaaaaaaaaaa

SEQ ID NO: 42492 - RNA, 1629 nt, Artificial Sequence
  mRNA product Design a-2 (A100) comprising derived and/or modified sequence from LASV(G1442-SLE-2011;Clade IV)__AIT17180__GPCmut13 (opt4)
aggagaguccgcucagccagguugcagaagcggcuuagcguguguccuaaucuucucucugcguguagguaggccugugccgcaaacaagcuuaccaugggccagaucgugaccuucuuccaggaggugccccacgugaucgaggaggugaugaacaucgugcugaucgcccugagcauccuggccgugcugaagggccuguacaacguggccaccugcggccugaucggccuggugaccuuccugcugcugugcggcagaagcugcaccaccacccuguacaagggcguguacgagcugcagacccuggagcugaacauggagacccugaacaugaccaugccccugagcugcaccaagaacaacagccaccacuacaucagagugggcaacgagaccggccuggagcugacccugaccaacaccagcaucaucaaccacaaguucugcaaccugagcgacgcccacaagaagaaccuguacgaccacgcccugaugagcaucaucagcaccuuccaccugagcauccccaacuucaaccaguacgaggccaugagcugcgacuucaacggcggcaagaucagcgugcaguacaaccugagccacagcuacgccggcgacgccgccaaccacugcggcaccguggccaacggcgugcugcagaccuucaugagaauggccuggggcggcagcuacaucgcccuggacagcggcagaggcaacugggacugcaucaugaccagcuaccaguaccugaucauccagaacaccaccugggacgaccacugccaguucagcagacccagccccaucggcuaccugggccugcugagccagagaaccagagacguguacaucagcagaagacugcugggcaccuucaccuggacccugagcgacagcgagggcaaggacacccccggcggcuacugccugaccagauggaugcugaucgaggccgagcugaagugcuucggcaacaccgccguggccaagugcaacgagaagcacgacgaggaguucugcgacaugcugagacuguucgacuucaacaagcaggccauccagagacugaaggccgaggcccagaugagcauccagcugaucaacaaggccgugaacgcccugaucaacgaccagcugaucaugaagaaccaccugagagacaucaugggcauccccuacugcaacuacagcaaguacugguaccugaacaacaccgccaccggcaagaccagccugcccaagugcuggcugaucagcaacggcagcuaccugaacgagacccacuucagcgacgacaucgagcaggaggccgacaacaugaucaccgagaugcugcagaaggaguacauggagagacagggcaagaccccccugggccugguggaccuguucguguucagcaccagcuucuaccugaucagcaucuuccugcaccuggugaagauccccugaggacuagucccuguucccagagcccacuuuuuuuucuuuuuuugaaauaaaauagccugucuuucagaucuaaaaaaaaaaaaaaaaaaaaaaaaaaaaaaaaaaaaaaaaaaaaaaaaaaaaaaaaaaaaaaaaaaaaaaaaaaaaaaaaaaaaaaaaaaaaaaaaaaaa

SEQ ID NO: 42493 - RNA, 1629 nt, Artificial Sequence
  mRNA product Design a-2 (A100) comprising derived and/or modified sequence from LASV(G3010-SLE-2013;Clade IV)__AIT17344__GPCmut13 (opt4)
aggagaguccgcucagccagguugcagaagcggcuuagcguguguccuaaucuucucucugcguguagguaggccugugccgcaaacaagcuuaccaugggccagaucgugaccuucuuccaggaggugccccacgugaucgaggaggugaugaacaucgugcugaucgcccugagcauccuggccgugcugaagggccuguacaacuucgccaccugcggccuggugggccuggugaccuuccugcugcugugcggcagaagcugcaccaccagccuguacaagggcguguacgagcugcagacccuggagcugaacauggagacccugaacaugaccaugccccugagcugcaccaagaacaacagccaccacuacaucauggugggcaacgagaccggccuggagcugacccugaccaacaccagcaucaucaaccacaaguucugcaaccugagcgacgcccacaagaagaaccuguacaaccacgcccugaugagcaucaucagcaccuuccaccugagcauccccaacuucaaccaguacgaggccaugagcugcgacuucaacggcggcaagaucagcgugcaguacaaccugagccacagcuacgccggcgacgccgccagccacugcggcaccguggccaacggcgugcugcagaccuucaugagaauggccuggggcggcagcuacaucgcccuggacagcggcuacggcaagugggacugcaucaugaccagcuaccaguaccugaucauccagaacaccaccugggaggaccacugccaguucagcagacccagccccaucggcuaccugggccugcugagccagagaaccagagacaucuacaucagcagaagacugcugggcaccuucaccuggacccugagcgacagcgagggcaaggacacccccggcggcuacugccugaccagauggaugcugaucgaggccgagcugaagugcuucggcaacaccgccguggccaagugcaacgagaagcacgacgaggaguucugcgacaugcugagacuguucgacuucaacaagcaggccauccagagacugaagaccgaggcccagaugagcauccagcugaucaacaaggccgugaacgcccugaucaacgaccagcugaucaugaagaaccaccugagagacaucaugggcauccccuacugcaacuacagcaaguacugguaccugaaccacaccaccaccggcaagaccagccugcccaagugcuggcuggugagcaacggcagcuaccugaacgagacccacuucagcgacgacaucgagcagcaggccgacaacaugaucaccgagaugcugcagaaggaguacauggagagacagggcaagaccccccugggccugguggaccuguucguguucagcaccagcuucuaccugaucagcaucuuccugcaccuggugaagauccccugaggacuagucccuguucccagagcccacuuuuuuuucuuuuuuugaaauaaaauagccugucuuucagaucuaaaaaaaaaaaaaaaaaaaaaaaaaaaaaaaaaaaaaaaaaaaaaaaaaaaaaaaaaaaaaaaaaaaaaaaaaaaaaaaaaaaaaaaaaaaaaaaaaaaa

SEQ ID NO: 42494 - RNA, 1629 nt, Artificial Sequence
  mRNA product Design a-2 (A100) comprising derived and/or modified sequence from LASV(G502-SLE-2009;Clade IV)__AIT17126__GPCmut13 (opt4)
aggagaguccgcucagccagguugcagaagcggcuuagcguguguccuaaucuucucucugcguguagguaggccugugccgcaaacaagcuuaccaugggccagaucgugaccuucuuccaggaggugccccacgugaucgaggaggugaugaacaucgugcugaucgcccugagcauccuggccgugcugaagggccuguacaacuucgccaccugcggccuggugggccugcugaccuuccugcugcugugcggcagaagcugcaccaccggccuguacaagggcguguacgagcugcagacccuggagcugaacauggagacccugaacaugaccaugccccugagcugcaccaagaacaacagccaccacuacaucauggugggcaacgagaccggccuggagcugacccugaccaacaccagcaucaucaaccacaaguucugcaaccugagcgacgcccacaagaagaaccuguacgaccacgcccugaugagcaucaucagcaccuuccaccugagcauccccaacuucaaccaguacgaggccaugagcugcgacuucaacggcggcaagaucagcgugcaguacaaccugagccacagcuacgccggcgacgccgccgaccacugcggcaccguggccaacggcgugcugcagaccuucaugagaauggccuggggcggcagcuacaucgcccuggacagcggcagaggcagaugggacugcaucaugaccagcuaccaguaccugaucauccagaacaccaccugggaggaccacugccaguucagcagacccagccccaucggcuaccugggccugcugagccagagaaccagagacaucuacaucagcagaagacugcugggcaccuucaccuggacccugagcgacagcgagggcaaggacacccccggcggcuacugccugaccagauggaugcugaucgaggccgagcugaagugcuucggcaacaccgccguggccaagugcaacgagaagcacgacgaggaguucugcgacaugcugagacuguucgacuucaacaagcaggccauccagagacugaaggccgaggcccagaugagcauccagcugaucaacaaggccgugaacgcccugaucaacgaccagcuggugaugaagaaccaccugagagacaucaugggcauccccuacugcaacuacagcagauacugguaccugaaccacaccaccaccggcagaaccagccugcccaagugcuggcuggugagcaacggcagcuaccugaacgagacccacuucagcgacgacaucgagcagcaggccgacaacaugaucaccgagaugcugcagaaggaguacauggagagacagggcaagaccccccugggccugguggaccuguucguguucagcaccagcuucuaccugaucagcaucuuccugcaccuggugaagauccccugaggacuagucccuguucccagagcccacuuuuuuuucuuuuuuugaaauaaaauagccugucuuucagaucuaaaaaaaaaaaaaaaaaaaaaaaaaaaaaaaaaaaaaaaaaaaaaaaaaaaaaaaaaaaaaaaaaaaaaaaaaaaaaaaaaaaaaaaaaaaaaaaaaaaa

SEQ ID NO: 42495 - RNA, 1629 nt, Artificial Sequence
  mRNA product Design a-2 (A100) comprising derived and/or modified sequence from LASV(G733-SLE-2010;Clade IV)__AIT17154__GPCmut13 (opt4)
aggagaguccgcucagccagguugcagaagcggcuuagcguguguccuaaucuucucucugcguguagguaggccugugccgcaaacaagcuuaccaugggccagaucgugaccuucuuccaggaggugccccacgugaucgaggaggugaugaacaucgugcugaucgcccugagcauccuggccgugcugaagggccuguacaacuucgccaccugcggcaucgugggccuggugagcuuccugcugcugugcggcagaagcugcaccaccagccuguacaagggcguguacgagcugcagacccuggagcugaacauggagacccugaacaugaccaugccccugagcugcaccaagaacaacagccaccacuacaucauggugggcaacgagaccggccuggagcugacccugaccaacaccagcaucaucaaccacaaguucugcaaccugagcgacgcccacaagaagaaccuguacgaccacgcccugaugagcaucaucagcaccuuccaccugagcauccccaacuucaaccaguacgaggccaugagcugcgacuucaacggcggcaagaucagcgugcaguacaaccugagccacagcuacgccggcgacgccgccaaccacugcggcaccaucgccaacggcgugcugcagaccuucaugagaauggccuggggcggcagcuacaucgcccuggacagcggcagagacagaugggacugcaucaugaccagcuaccaguaccugaucauccagaacaccaccugggaggaccacugccaguucagcagacccagccccaucggcuaccugggccugcugagccagagaaccagagacaucuacaucagcagaagacugcugggcaccuucaccuggacccugagcgacagcgagggcaaggacacccccggcggcuacugccugaccagauggaugcugaucgaggccgagcugaagugcuucggcaacaccgccguggccaagugcaacgagaagcacgacgaggaguucugcgacaugcugagacuguucgacuucaacaagcaggccauccagagacugaaggccgaggcccagaugagcauccagcugaucaacaaggccgugaacgcccugaucaacgaccagcugaucaugaagaaccaccugagagacaucaugggcauccccuacugcaacuacagcaaguacugguaccugaaccacaccaccaccggcaagaccagccugcccaagugcuggcuggugagcaacggcagcuaccugaacgagacccacuucagcgacgacaucgagcagcaggccgacaacaugaucaccgagaugcugcagaaggaguacauggagagacagggcaagaccccccugggccugguggaccuguucguguucagcaccagcuucuaccugaucagcaucuuccugcaccuggugaagauccccugaggacuagucccuguucccagagcccacuuuuuuuucuuuuuuugaaauaaaauagccugucuuucagaucuaaaaaaaaaaaaaaaaaaaaaaaaaaaaaaaaaaaaaaaaaaaaaaaaaaaaaaaaaaaaaaaaaaaaaaaaaaaaaaaaaaaaaaaaaaaaaaaaaaaa

SEQ ID NO: 42496 - RNA, 1629 nt, Artificial Sequence
  mRNA product Design a-2 (A100) comprising derived and/or modified sequence from MOPV/LASV reassortant(IGS-1;Clade IV)__AFY05576__GPCmut13 (opt4)
aggagaguccgcucagccagguugcagaagcggcuuagcguguguccuaaucuucucucugcguguagguaggccugugccgcaaacaagcuuaccaugggccagaucgugaccuucuuccaggaggugccccacgugaucgaggaggugaugaacaucgugcugaucgcccugagcgugcuggccgugcugaagggccuguacaacuucgccaccugcggccuggugggccuggugaccuuccugcugcugugcggcagaagcugcaccaccagccuguacaagggcguguacgagcugcagacccuggagcugaacauggagacccugaacaugaccaugccccugagcugcaccaagaacaacagccaccacuacaucauggugggcaacgagaccggccuggagcugacccugaccaacaccagcaucaucaaccacaaguucugcaaccugagcgacgcccacaagaagaaccuguacgaccacgcccugaugagcaucaucagcaccuuccaccugagcauccccaacuucaaccaguacgaggccaugagcugcgacuucaacggcggcaagaucagcgugcaguacaaccugagccacagcuacgccggcgacgccgccaaccacugcggcaccguggccaacggcgugcugcagaccuucaugagaauggccuggggcggcagcuacaucgcccuggacagcggcagaggcaacugggacugcaucaugaccagcuaccaguaccugaucauccagaacaccaccugggaggaccacugccaguucagcagacccagccccaucggcuaccugggccugcugagccagagaaccagagacaucuacaucagcagaagacugcugggcaccuucaccuggacccugagcgacagcgagggcgaggacacccccggcggcuacugccugaccagauggaugcugaucgaggccgagcugaagugcuucggcaacaccgccguggccaagugcaacgagaagcacgacgaggaguucugcgacaugcugagacuguucgacuucaacaagcaggccauccagagacugaaggccgaggcccagaugagcauccagcugaucaacaaggccgugaacgcccugaucaacgaccagcugaucaugaagaaccaccugagagacaucaugggcauccccuacugcaacuacagcaaguacugguaccugaaccacaccaccaccggcagaaccagccugcccaagugcuggcuggugagcaacggcagcuaccugaacgagacccacuucagcgacgacaucgagcagcaggccgacaacaugaucaccgagaugcugcagaaggaguacauggagagacagggcaagaccccccugggccugguggaccuguucguguucagcaccagcuucuaccugaucagcaucuuccugcaccuggugaagauccccugaggacuagucccuguucccagagcccacuuuuuuuucuuuuuuugaaauaaaauagccugucuuucagaucuaaaaaaaaaaaaaaaaaaaaaaaaaaaaaaaaaaaaaaaaaaaaaaaaaaaaaaaaaaaaaaaaaaaaaaaaaaaaaaaaaaaaaaaaaaaaaaaaaaaa

SEQ ID NO: 42497 - RNA, 1629 nt, Artificial Sequence
  mRNA product Design a-2 (A100) comprising derived and/or modified sequence from LASV(LM765-SLE-2012;Clade IV)__AIT17814__GPCmut13 (opt4)
aggagaguccgcucagccagguugcagaagcggcuuagcguguguccuaaucuucucucugcguguagguaggccugugccgcaaacaagcuuaccaugggccagaucgugaccuucuuccaggaggugccccacgugaucgaggaggugaugaacaucgugcugaucgcccugagcauccuggccgugcugaagggccuguacaacuucgccaccugcggccuggugggccuggugaccuuccugcugcugugcggcagaagcugcaccaccagccuguacaagggcguguacgagcugcagacccuggagcugaacauggagacccugaacaugaccaugccccugagcugcaccaagaacaacagccaccacuacaucauggugggcaacgagaccggccuggagcugacccugaccaacaccagcaucaucgaccacaaguucugcaaccugagcgacgcccacagaaagaaccuguacgaccacgcccugaugagcaucaucagcaccuuccaccugagcauccccaacuucaaccaguacgaggccaugagcugcgacuucaacggcggcaagaucagcgugcaguacaaccugagccacagcuacgccaaggacgccgccgaccacugcggcaccguggccaacggcgugcugcagaccuucaugagaauggccuggggcggcagcuacaucgcccuggacagcggcagaggcagaugggacugcaucaugaccagcuaccaguaccugaucauccagaacaccaccugggaggaccacugccaguucagcagacccagccccaucggcuaccugggccugcugagccagagaaccagagacaucuacaucagcagaagacugcugggcaccuucaccuggacccugagcgacagcgagggcaaggacacccccggcggcuacugccugaccagauggaugcugaucgaggccgagcugaagugcuucggcaacaccgccguggccaagugcaacgagaagcacgacgaggaguucugcgacaugcugagacuguucgacuucaacaagcaggccauccagagacugaaggccgaggcccagaugagcauccagcugaucaacaaggccgugaacgcccugaucaacgaccagcugaucaugaagaaccaccugagagacaucaugggcauccccuacugcaacuacagcaaguacugguaccugaaccacaccaccaccggcaagaccagccugcccaagugcuggcuggugagcaacggcagcuaccugaacgagacccacuucagcgacgacaucgagcagcaggccgacaacaugaucaccgagaugcugcagaaggaguacauggagagacagggcaagaccccccugggccugguggaccuguucguguucagcaccagcuucuaccugaucagcaucuuccugcaccuggugaagauccccugaggacuagucccuguucccagagcccacuuuuuuuucuuuuuuugaaauaaaauagccugucuuucagaucuaaaaaaaaaaaaaaaaaaaaaaaaaaaaaaaaaaaaaaaaaaaaaaaaaaaaaaaaaaaaaaaaaaaaaaaaaaaaaaaaaaaaaaaaaaaaaaaaaaaa

SEQ ID NO: 42498 - RNA, 1629 nt, Artificial Sequence
  mRNA product Design a-2 (A100) comprising derived and/or modified sequence from LASV(LM776-SLE-2012;Clade IV)__AIT17824__GPCmut13 (opt4)
aggagaguccgcucagccagguugcagaagcggcuuagcguguguccuaaucuucucucugcguguagguaggccugugccgcaaacaagcuuaccaugggccagaucgugaccuucuuccaggaggugccccacgugaucgaggaggugaugaacaucgugcugaucgcccugagcauccuggccgugcugaagggccuguacaacuucgccaccugcggccuggugggccuggugaccuuccugcugcugugcggcagaagcugcaccaccagcguguacaagggcguguacgagcugcagacccuggagcugaacauggagacccugaacaugaccaugccccugagcugcaccaagaacaacagccaccacuacaucauggugggcaacgagaccggccuggagcugacccugaccaacaccagcaucaucaaccacaaguucugcaaccugagcgacgcccacaagaagaaccuguacgaccacgcccugaugagcaucaucagcaccuuccaccugagcauccccaacuucaaccaguacgaggccaugagcugcgacuucaacggcggcaagaucagcgugcaguacaaccugagccacagcuacgccggcgacgccgccaaccacugcggcaccguggccaacggcgugcugcagaccuucaugagaauggccuggggcggcagcuacaucgcccuggacagcggccacggcaagugggacugcaucaugaccagcuaccaguaccugaucauccagaacaccaccugggaggaccacugccaguucagcagacccagccccaucggcuaccugggccugcugagccagagaaccagagacaucuacaucagcagaagacugcugggcaccuucaccuggacccugagcgacagcgagggcaaggacacccccggcggcuacugccugaccagauggaugcugaucgaggccgagcugaagugcuucggcaacaccgccguggccaagugcaacgagaagcacgacgaggaguucugcgacaugcugagacuguucgacuucaacaagcaggccauccagagacugaaggccgaggcccagaugagcauccagcugaucaacaaggccgugaacgcccugaucaacgaccagcugaucaugaagaaccaccugagagacaucaugggcauccccuacugcaacuacagcaaguacugguaccugaaccacaccaccaccggcaagaccagccugcccaagugcuggcuggugagcaacggcagcuaccugaacgagacccacuucagcgacgacaucgagcagcaggccgacaacaugaucaccgagaugcugcagaaggaguacauggagagacagggcaagaccccccugggccugguggaccuguucguguucagcaccagcuucuaccugaucagcaucuuccugcaccuggugaagauccccugaggacuagucccuguucccagagcccacuuuuuuuucuuuuuuugaaauaaaauagccugucuuucagaucuaaaaaaaaaaaaaaaaaaaaaaaaaaaaaaaaaaaaaaaaaaaaaaaaaaaaaaaaaaaaaaaaaaaaaaaaaaaaaaaaaaaaaaaaaaaaaaaaaaaa

SEQ ID NO: 42499 - RNA, 1629 nt, Artificial Sequence
  mRNA product Design a-2 (A100) comprising derived and/or modified sequence from LASV(Mad39;Clade IV)__ANH09722__GPCmut13 (opt4)
aggagaguccgcucagccagguugcagaagcggcuuagcguguguccuaaucuucucucugcguguagguaggccugugccgcaaacaagcuuaccaugggccagaucgugaccuucuuccaggaggugccccacgugaucgaggaggugaugaacaucgugcugaucgcccugagcauccuggccgugcugaagggccuguacaacguggccaccugcggccugaucggccuggugaccuuccugcugcugugcggcagaagcugcaccaccacccuguacaagggcguguacgagcugcaggcccuggagcugaacauggagacccugaacaugaccaugccccugagcugcaccaagaacaacagccaccacuacaucagagugggcaacgagaccggccuggagcugacccugaccaacaccagccugaucaaccacaaguucugcaaccugagcgacgcccacaagaagaaccuguacgaccacgcccugaugagcaucaucagcaccuuccaccugagcauccccaacuucaaccaguacgaggccaugagcugcgacuucaacgacggcaagaucagcgugcaguacaaccugagccacaccuacgccggcgacaccgccaaccacugcggcaccguggccaacggcgugcugcagaccuucaugagaauggccuggggcggcagcuacaucgcccuggacagcggcagaggcggcugggacugcaucaugaccagcuaccaguaccugaucauccagaacaccaccugggaggaccacugccaguucagcagacccagccccaucggcuaccugggccugcugagccagagaaccagagacaucuacaucagcagaagacugcugggcaccuucaccuggacccugagcgacagcgagggcaaggacacccccggcggcuacugccugaccagauggaugcugaucgaggccgagcugaagugcuucggcaacaccgccguggccaagugcaacgagaagcacgacgaggaguucugcgacaugcugagacuguucgacuucaacaagcaggccauccagagacugaaggccgaggcccagaugagcauccagcugaucaacaaggccgugaacgcccugaucaacgaccagcugaucaugaagaaccaccugagagacaucaugggcauccccuacugcaacuacagcaaguacugguaccugaaccacaccgugaccggcaagaccagccugcccaagugcuggcuggugagcaacggcagcuaccugaacgagacccacuucagcgacgacaucgagcagcaggccgacaacaugaucaccgagaugcugcagaaggaguacauggagagacagggcaagaccccccugggccugguggaccuguucguguucagcaccagcuucuaccugaucagcaucuuccugcaccuggugaagauccccugaggacuagucccuguucccagagcccacuuuuuuuucuuuuuuugaaauaaaauagccugucuuucagaucuaaaaaaaaaaaaaaaaaaaaaaaaaaaaaaaaaaaaaaaaaaaaaaaaaaaaaaaaaaaaaaaaaaaaaaaaaaaaaaaaaaaaaaaaaaaaaaaaaaaa

SEQ ID NO: 42500 - RNA, 1629 nt, Artificial Sequence
  mRNA product Design a-2 (A100) comprising derived and/or modified sequence from LASV(Z0947-SLE-2011;Clade IV)__AIT17840__GPCmut13 (opt4)
aggagaguccgcucagccagguugcagaagcggcuuagcguguguccuaaucuucucucugcguguagguaggccugugccgcaaacaagcuuaccaugggccagaucgugaccuucuuccaggaggugccccacgugaucgaggaggugaugaacaucgugcugaucgcccugagcauccuggccgugcugaagggccuguacaacuucgccaccugcggccuggugggccuggugaccuuccugcugcugugcggcagaagcugcaccaucagccuguacaagggcguguacgagcugcagacccuggagcugaacauggagacccugaacaugaccaugccccugagcugcaccaagaacaacagccaccacuacaucauggugggcaacgagaccggccuggagcugacccugaccaacaccagcaucaucaaccacaaguucugcaaccugagcgacgcccacaagaagaaccuguacgaccacgcccugaugagcaucaucagcaccuuccaccugagcauccccaacuucaaccaguacgaggccaugagcugcgacuucaacggcggcaagaucagcgugcaguacaaccugagccacagcuacgccggcgacgccgccaaccacugcggcaccguggccaacggcgugcugcagaccuucaugagaauggccuggggcggcagcuacaucgcccuggacagcggcagagacagaugggacugcaucaugaccagcuaccaguaccugaucauccagaacaccaccugggaggaccacugccaguucagcagacccagccccaucggcuaccugggccugcugagccagagaaccagagacaucuacaucagcagaagacugcugggcaccuucaccuggacccugagcgacagcgagggcaaggacacccccggcggcuacugccugaccagauggaugcugaucgaggccgagcugaagugcuucggcaacaccgccguggccaagugcaacgagaagcacgacgaggaguucugcgacaugcugagacuguucgacuucaacaagcaggccauccagagacugaaggccgaggcccagaugagcauccagcugaucaacaaggccgugaacgcccugaucaacgaccagcugaucaugaagaaccaccugagagacaucaugggcauccccuacugcaacuacagcaaguacugguaccugaaccacaccaccaccggcaagaccagccugcccaagugcuggcuggugagcaacggcagcuaccugaacgagacccacuucagcgacgacaucgagcagcaggccgacaacaugaucaccgagaugcugcagaaggaguacauggagagacagggcaagaccccccugggccugguggaccuguucguguucagcaccagcuucuaccugaucagcaucuuccugcaccuggugaagauccccugaggacuagucccuguucccagagcccacuuuuuuuucuuuuuuugaaauaaaauagccugucuuucagaucuaaaaaaaaaaaaaaaaaaaaaaaaaaaaaaaaaaaaaaaaaaaaaaaaaaaaaaaaaaaaaaaaaaaaaaaaaaaaaaaaaaaaaaaaaaaaaaaaaaaa

SEQ ID NO: 42501 - RNA, 1629 nt, Artificial Sequence
  mRNA product Design a-2 (A100) comprising derived and/or modified sequence from LASV(Josiah;Clade IV)__NP_694870__GPCmut13 (opt5)
aggagaguccgcucagccagguugcagaagcggcuuagcguguguccuaaucuucucucugcguguagguaggccugugccgcaaacaagcuuaccaugggccagaucgugaccuucuuucaagaggucccccacguuauugaagaggugaugaacaucgugcugauugcccucagcguccuggcugugcuuaaggggcuguacaauuucgccacaugcggacucguuggccuggugacguuucuucugcucugugggagauccugcaccacaucucuguauaaaggagucuacgaacugcagacccucgagcugaacauggaaacacuuaauaugaccaugccucugagcuguacaaagaacaauucccaucacuauaucauggugggcaacgagaccgggcucgagcugacgcuuaccaauacaucuauuaucaaccauaaauucugcaaucugagcgacgcgcacaagaaaaaccucuacgaucaugcucugauguccaucauuucuaccuuucaccugagcaucccgaauuucaaccaguaugaagccauguccugugacuuuaauggaggcaagauuagcguucaguacaaccucucucacuccuaugccggcgaugcugccaaucauugcgggacaguggcuaacggaguccugcaaaccuucaugcggauggccuggggcgggagcuacaucgcgcuugacucuggacgcggcaacugggauuguauuaugacguccuaccaguaucugaucauucagaauacaaccugggaggaccacugccaguuuagcagacccucuccuaucggguaccucggacugcuuucccaacggacacgcgauaucuauauuagcagacggcugcucggcaccuucaccuggacacuguccgacucugaaggcaaggauacgcccgggggauacugucugacccgcuggaugcucaucgaggccgagcugaaaugcuuuggcaacacagcuguggccaaguguaaugaaaaacaugacgaggaguucugcgauaugcuuagacuguuugacuucaacaagcaggcuauucagcggcucaaagccgaagcgcagaugagcauccaacugauuaauaaggccgugaacgcucuuaucaaugaucagcugaucaugaagaaccaccuccgcgacauuauggggaucccuuauugcaauuacuccaaauauugguaccugaaccacaccacaaccggaagaacgagccugcccaaguguuggcucgucucuaauggcuccuaccugaacgaaacacauuucagcgacgauauugagcagcaagccgacaauaugaucaccgagaugcuucagaaagaauauauggagcggcaggggaagaccccucugggacucguugaucuguuuguguucucuaccagcuuuuaccugauuuccaucuuccuucaccucgugaaaaucccgugaggacuagucccuguucccagagcccacuuuuuuuucuuuuuuugaaauaaaauagccugucuuucagaucuaaaaaaaaaaaaaaaaaaaaaaaaaaaaaaaaaaaaaaaaaaaaaaaaaaaaaaaaaaaaaaaaaaaaaaaaaaaaaaaaaaaaaaaaaaaaaaaaaaaa

SEQ ID NO: 42502 - RNA, 1626 nt, Artificial Sequence
  mRNA product Design a-2 (A100) comprising derived and/or modified sequence from LASV(LP;Clade I)__AAF86701__GPCmut13 (opt5)
aggagaguccgcucagccagguugcagaagcggcuuagcguguguccuaaucuucucucugcguguagguaggccugugccgcaaacaagcuuaccaugggccagaucauuaccuucuuucaagaggugccccacgucaucgaagagguuaugaacauugugcugaucgcccucagccugcuugcuauucugaaggggcucuacaauaucgccacaugcggaaucauuggccugguggcguuccuuuuucugugugggaaauccugcucucucacgcugaagggaggcuaugaacugcagacccucgagcugaacauggaaacacuuaauaugaccaugccucugagcuguaccaaaaacuccucucaucacuacaucagagucgggaaugagacaggacucgagcugacacuuaccaacacgagcauuaucaaucauaaguucugcaaccuguccgacgcucacaaaaagaaucucuaugaucaugcccugaugucuauuaucagcaccuuucaccuguccauuccgaacuucaaucaguacgaagccaugagcugugacuuuaacggcggcaagaucucugugcaguauaaucucucccacagcuacgcuggggaugccgcugagcauugcggaacaguugccaacggcgugcugcaaaccuucaugcggauggcguggggagggcgcuauaucgcccuugacucuggcaaagggaauugggauuguauuaugacauccuaccaguaccugaucauucagaacaccacgugggaagaccacugccaguuuagcagacccucuccuaucggauaucucggccugcuuucccaacggacacgcgauauuuacaucagcagacggcugcucggcaccuucacauggacccuguccgacucugaggggaacgagacccccggaggcuauugucugacacgcuggaugcucaucgaagcugagcugaagugcuuugggaauacggccgucgcuaaauguaacgaaaagcaugaugaggaguucugcgacaugcuuagacuguuugauuucaauaaacaggccauucggcgccucaaggcggaagcccagaugagcauccagcugauuaacaaggcugugaaugcccuuaucaacgaccaacugauuaugaaaaaucaccucagagauaucaugggaaucccuuacugcaacuauuccaaguacugguaucugaaucacaccagcucuggccggacaucccugcccaaauguuggcucauuagcaacgggucuuaccugaaugagacccaguucagcgacgacaucgaacagcaagcugauaacaugauuacagagaugcuucagaaggaauacaucgagcgccagggaaaaaccccucugggccucguugacauuuuuaucuucuccacgucuuuuuaucugauuagcaucuuccugcaucuuaucaagauuccgugaggacuagucccuguucccagagcccacuuuuuuuucuuuuuuugaaauaaaauagccugucuuucagaucuaaaaaaaaaaaaaaaaaaaaaaaaaaaaaaaaaaaaaaaaaaaaaaaaaaaaaaaaaaaaaaaaaaaaaaaaaaaaaaaaaaaaaaaaaaaaaaaaaaaa

SEQ ID NO: 42503 - RNA, 1626 nt, Artificial Sequence
  mRNA product Design a-2 (A100) comprising derived and/or modified sequence from LASV(803213;Clade II)__AAF86703__GPCmut13 (opt5)
aggagaguccgcucagccagguugcagaagcggcuuagcguguguccuaaucuucucucugcguguagguaggccugugccgcaaacaagcuuaccaugggccagaucauuaccuucuuucaagaggugccccacgucaucgaagagguuaugaacauugugcugaucgcccucagccugcuugcuauucugaaggggaucuacaauguggccacaugcggacucuucggccugaucuccuuucuucugcucugugggagaucuugcagcgucacguauaaaggaguguacgaacugcagacccuggagcucaacauggcgaaucugaacaugacaaugccucuuuccuguaccaagaauaacucucaucacuauauuaugguuggcaaugaaacagggcuggagcucacccugacaaacaccagcaucauuaaucauaaauucugcaaccuuuccgacgcucacaagaaaaaucuguacgaucaugcccucaugucuaucauuagcacguuucaccuguccaucccgaacuucaaucaguaugaggccaugagcugugacuuuaacggaggcaagauuucugugcaguacaaucugucccacagcuucgcugucgaugccgcuaaccauugcggcaccaucgccaacggggugcuccaaacauuuaugcggauggcguggggaggcucuuauaucgcccuggacuccgggaagggaaauugggauuguauuaugaccagcuaccaguaccuuaucauucagaacacaaccugggaagaccacugccaguucucucgccccuccccuaucggcuaucuggggcuccugagccaaagaacgcgggauauuuacaucucccgcagacuucugggaacauuuaccuggacacucucugacagcgagggcaaugaagcucccggcggguauugucugacccgguggaugcugaucgaggccgagcucaaaugcuucggaaacaccgcuguugccaaguguaaugaaaaacaugaugaggaauuuugcgacaugcugcgccuuuucgauuucaacaagcaggcgauuaaaagacugaagacagaggcccagauguccauccagcucauuaauaaggcugugaacgcccugaucaaugaccaacuuauuaugaaaaaccaucugcgggauaucaugggcaucccuuacugcaauuauagccgcuacugguaucucaaccacacggucaccgggaagacaucucugcccagauguuggcugguguccaauggaagcuaccucaacgaaacccacuuuucugacgacauugagcagcaggcugauaauaugaucacagagaugcugcaaaaagaauacauggaccggcagggcaagaccccucuugggcugguggaucucuucgucuuuagcacguccuucuaucugauuucuaucuuucugcaccuuguuaaaauuccgugaggacuagucccuguucccagagcccacuuuuuuuucuuuuuuugaaauaaaauagccugucuuucagaucuaaaaaaaaaaaaaaaaaaaaaaaaaaaaaaaaaaaaaaaaaaaaaaaaaaaaaaaaaaaaaaaaaaaaaaaaaaaaaaaaaaaaaaaaaaaaaaaaaaaa

SEQ ID NO: 42504 - RNA, 1626 nt, Artificial Sequence
  mRNA product Design a-2 (A100) comprising derived and/or modified sequence from LASV(GA391;Clade III)__CAA36645__GPCmut13 (opt5)
aggagaguccgcucagccagguugcagaagcggcuuagcguguguccuaaucuucucucugcguguagguaggccugugccgcaaacaagcuuaccaugggccagaucgugaccuucuuucaagaggucccccacguuauugaagaggugaugaacaucgugcugauugcccucagcauccuggcuauucuuaaggggcuguacaaugucgccacaugcggacucaucggccuggugacguuccuucugcucuccgggagaucuuguagccugaucuauaaaggaaccuacgaacugcagacacucgagcugaacauggaaacccuuaauaugacaaugccucuguccugcaccaagaacaauucucaucacuauauucggguuggcaacgagacagggcucgagcugacccuuacgaauaccagcauccugaaccauaaauuuuguaaucucuccgacgcgcacaagcgcaaccuguacgaucauucucugaugagcauuaucuccacauuccaccucagcauuccgaauuuuaaccaguaugaagcuaugucuugcgacuucaauggaggcaaaaucaccgugcaguacaaccugucccacagcuuugccgucgaugccgcuggccauugugggacacuugccaauggagugcugcaaaccuucaugagaauggcuuggggcgggucuuauauugcccucgacuccggacggggcaacugggauugcaucaugacgagcuaccaguaccugaucauucagaacacaaccugggacgaucacugucaguuuucucgccccuccccuaucggguaucuuggacugcucagccaaagaacacgggacauuuacaucucccgcagacugcugggcaccuucaccuggacacucucugauagcgagggcaaugaaacgcccgggggauauugccugacccgguggaugcuuauugaggcggagcugaaguguuuuggcaacacagccguugcuaagugcaaugaaaaacaugacgaggaguucugugauaugcuccgccuguuugacuucaacaagcaggccaucagacggcuuaaaaccgaagcucagauguccauccagcugauuaauaaggccgugaacgcgcucaucaaugaucaacugauuaugaaaaaccaucugcgcgacaucauggggauuccuuacugcaauuauagcagauacugguaucucaaccacacaucuaccggaaagacgucccugccccggugcuggcuuaucagcaauggcucuuaccugaacgaaacaaaguucagcgacgauaucgagcagcaggccgacaauaugauuaccgagaugcuccaaaaagaauacaucgaucgccaggggaagaccccucugggacuggucgaccuuuuuguguucuccacaucuuuuuaucucauuagcaucuuccugcaccuggugaaaauuccgugaggacuagucccuguucccagagcccacuuuuuuuucuuuuuuugaaauaaaauagccugucuuucagaucuaaaaaaaaaaaaaaaaaaaaaaaaaaaaaaaaaaaaaaaaaaaaaaaaaaaaaaaaaaaaaaaaaaaaaaaaaaaaaaaaaaaaaaaaaaaaaaaaaaaa

SEQ ID NO: 42505 - RNA, 1629 nt, Artificial Sequence
  mRNA product Design a-2 (A100) comprising derived and/or modified sequence from LASV(AV;Clade V)__CCA30314__GPCmut13 (opt5)
aggagaguccgcucagccagguugcagaagcggcuuagcguguguccuaaucuucucucugcguguagguaggccugugccgcaaacaagcuuaccaugggccagaucgugaccuucuuucaagaggucccccacguuauugaagaggugaugaacaucgugcugauugcccucagcauccuggcuguccuuaaggggcuguacaauauugccacaugcggacucaucggccugaucacguuccuucugcucugugggagauccugcucuagcaaccuguauaaaggaguguacgaacugcagucccucgaccugaauauggagacccuuaacaugacaaugccucugucuuguaccaagaauaacagccaucacuauauucggguuggcaaugauacagggcucgaacugacccuuacaaacaccuccauccugaaucauaaauuuugcaaccucucugacgcgcacaagaaagaucuguacgaccaugcucugaugagcauuaucuccacguuccaccucagcauuccgaauuuuaaccaguaugaggccaugucuugugauuucaauggaggcaagaucuccgugcaguacaaccugagccacucuuaugccauugacgcugccaaucauugcggcaccgucgcuaacgggauccuucaaacauuuaugcgcauggccuggggaggcuccuacaucgcgcuggauagcgggagaggaaacugggacuguauuaugaccucuuaccaguaucucaucauucagaauacaaccugggagaaccacugccaguucucccggcccagcccuaucggcuaccuggggcuucugucccaacgcacgagagauauuuauaucucucggcgccuccugggaacauuuaccuggacacugagcgacuccgaaggcaaugccacccccggcggguacugucucaccagauggaugcugaucgaggcugaacuuaagugcuucggaaacacagccguggcuaaauguaaugagaagcaugaugaggaauuuugcgacaugcugcgccucuucgauuuuaacaaacaggccauuagccggcugaagucugaggcgcagauguccauccagcuuauuaauaaagccguuaacgcucugaucaaugaccaacucauuaugaagaaccaccugagagacaucaugggcaucccuuauugcaauuacagcaaguauugguaccugaaccacacgauuaccgggaaaacaucucuccccaaguguuggcuggugagcaauggauccuaccuuaacgaaacccauuucucugaugacaucgagcagcaggccgauaauaugauuacagaaaugcugcaaaaagaguauauggagcggcagggcaagaccccucucgggcuggucgaccuguucguguuuagcacguccuucuaccuuaucagcauuuuucuccgccuggugaaaaucccgugaggacuagucccuguucccagagcccacuuuuuuuucuuuuuuugaaauaaaauagccugucuuucagaucuaaaaaaaaaaaaaaaaaaaaaaaaaaaaaaaaaaaaaaaaaaaaaaaaaaaaaaaaaaaaaaaaaaaaaaaaaaaaaaaaaaaaaaaaaaaaaaaaaaaa

SEQ ID NO: 42506 - RNA, 1626 nt, Artificial Sequence
  mRNA product Design a-2 (A100) comprising derived and/or modified sequence from LASV(Togo/2016/7082;Clade VI)__AMR44577__GPCmut13 (opt5)
aggagaguccgcucagccagguugcagaagcggcuuagcguguguccuaaucuucucucugcguguagguaggccugugccgcaaacaagcuuaccaugggccagaucauuaccuucuuucaagaggugccccacgucaucgaagagguuaugaacauugugcugaucgcccucagccugcuugcuauucugaaggggguguacaaugucgccacaugcggaaucaucggccucgugacguuccuguuucuuugugggagauccugcucucugauuuauaaaggaagcuacgaacuccagacccuggagcugaacauggaaacacucaauaugaccaugccucuguccuguacaaagaacucuagccaucacuauauccggguuggcaaugagaccgggcuugagcugacacucaccaacacguccauuaucaaucauaaauucugcaaccugucugacgcgcacaagcgcaaucuuuacgaucaugcucugaugagcauucucuccaccuuucaccugagcaucccgaacuucaaucaguaugaagccaugucuugugacuuuaacggaggcaaaauuuccgugcaguacaaucugagccacgccuaugcugucgaugccgcugagcauugcggcacaguggccaacgggguucuccaaaccuucaugagaauggcguggggaggcucuuacaucgcccuggacuccgggcggggaaauugggauuguaucaugacaagcuaccaguaucuuauuauccagaacaccacgugggaagaccacugccaguuuucucgccccuccccuauuggcuaccuggggcuccugagccaaagaacacgggauaucuauauuucccgcagacuucugggaaccuucacauggacccucucugacagcgagggcaacgagacccccggcggguacugucugacacgguggaugcugaucgaagcugagcucaagugcuuuggaaauacggccguggcuaaguguaacgaaaaacaugaugaggaguucugcgacaugcugcgccuuuuugauuucaauaagcaggccauccagagacugaaauccgaagcgcagaugagcauucaacucaucaacaaggccgucaaugcucugauuaacgaccagcuuaucaugaaaaaucaucugcgggauaugaugggcauuccuuauugcaacuacucuaaguauugguaccucaaucacaccuccagcgggcgcacaucucugcccaaguguuggcuggugagcaacggauccuaccucaaugagacccacuucucugacgacaucgaacagcaagccgauaacaugaucacagagaugcugcagaaagaauauauugacagacagggcaagaccccucuugggcugguggaucucuuugucuucagcacguccuuuuaccugaucagcauuuuccugcaccuuaucaaaauuccgugaggacuagucccuguucccagagcccacuuuuuuuucuuuuuuugaaauaaaauagccugucuuucagaucuaaaaaaaaaaaaaaaaaaaaaaaaaaaaaaaaaaaaaaaaaaaaaaaaaaaaaaaaaaaaaaaaaaaaaaaaaaaaaaaaaaaaaaaaaaaaaaaaaaaa

SEQ ID NO: 42507 - RNA, 1626 nt, Artificial Sequence
  mRNA product Design a-2 (A100) comprising derived and/or modified sequence from LASV(KAK-428;Clade n.d. (VII))__ANH09740__GPCmut13 (opt5)
aggagaguccgcucagccagguugcagaagcggcuuagcguguguccuaaucuucucucugcguguagguaggccugugccgcaaacaagcuuaccaugggccagaucgugaccuucuuucaagaggucccccacguuauugaagaggugaugaacaucgugcugauugcccucagccugcuugcuauccugaaggggcucuacaauuucgccacaugcggagucauuggccugaucacguuucuucugcucugugggagauccugcucugcgaccuauaaaggacaguacgaacugcagacacuggagcucaacauggaaagccugaauaugaccaugccucuuuccuguacaaagaacaauucucaucacuauauccgggcuggcaacaauaccgggcuggagcucacacugaccaacacgagcauuaucucccauaaauucugcaaucuuucugacgcccacaagaaaaaccuguacgaucauacccucaugagcauuaucacaaccuuucaccuguccauuccgaauuucaaccaguaugaggccaugagcugugacuuuaauggaggcaagaucucuauucaauacaaccugucccacagcuaugcuggcgaugccgcucagcauugcgggacaguggccaauggaguucuccagaccuucaugcgcauggcguggggcgggucuuaccuggcccuugacuccggaagacggggcugggauuguaucaucagcucuuaccaguaucugauuauccaaaacacgacaugggacgaucacugccaguuuucccgccccagcccuauuggguaccucggauucgugucccagaagaccagagacaucuauauuucucggcgccugcuuggcacauuuaccuggacccugagcgauuccgaaggccaugacaugcccgggggauacugucucacaagauggaugcugaucgaggcugaucugaaaugcuucggcaacacggccgucgcuaaguguaaugaaaaacacgacgaggaguuuugcgauauguggcgccucuucgacuucaacaagcaggccauccaacggcugaaagcggaagcccagaugaauauucagcuuaucaacaaggcugugaaugcccugauuaacgaccaacucaugaugaagaaucaccugagagauaucauggggauuccuuauugcaacuacagcaaauuuugguaucuuaauaacaccacaaccggacggacaucucugccccgcuguuggcucaucuccaauggcagcuaccugaacgagacccauuucucugacgauaucgaacagcaggcugacaauaugauuacggagaugcugcagaaggaauacauggauagacaagggaaaacaccucucggacugguugaccuuuuuguguucagcaccuccuuuuaucugaucaccauuuuccuccaccuggucaagaucccgugaggacuagucccuguucccagagcccacuuuuuuuucuuuuuuugaaauaaaauagccugucuuucagaucuaaaaaaaaaaaaaaaaaaaaaaaaaaaaaaaaaaaaaaaaaaaaaaaaaaaaaaaaaaaaaaaaaaaaaaaaaaaaaaaaaaaaaaaaaaaaaaaaaaaa

SEQ ID NO: 42508 - RNA, 1626 nt, Artificial Sequence; identical to SEQ ID NO: 42502
  mRNA product Design a-2 (A100) comprising derived and/or modified sequence from LASV(Pinneo-NIG-1969;Clade I)__AIT17836__GPCmut13 (opt5)

SEQ ID NO: 42509 - RNA, 1626 nt, Artificial Sequence
  mRNA product Design a-2 (A100) comprising derived and/or modified sequence from LASV(ISTH0009-NIG-2011;Clade II)__AIT17404__GPCmut13 (opt5)
aggagaguccgcucagccagguugcagaagcggcuuagcguguguccuaaucuucucucugcguguagguaggccugugccgcaaacaagcuuaccaugggccagaucauuaccuucuuucaagaggugccccacgucaucgaagagguuaugaacauugugcugaucgcccucagccugcuugcuauucugaaggggaucuacaauguggccacaugcggacucuucggccuggucuccuuucuucugcucugugggagaucuugcagcacgaccuauaaaggaguguacgaacugcagacacuggagcucgacauggcgucccugaacaugaccaugccucuuucuuguacaaagaauaacagccaucacuauaucaugguuggcaaugaaaccgggcuggagcucacacugaccaacacguccauuaucaaucauaaauucugcaaccuuucugaugcucacaagaaaaaucuguacgaccaugcccucaugagcauuaucuccaccuuucaccugagcauuccgaacuucaaucaguaugaggccaugucuugugauuuuaacggaggcaagaucuccgugcaguacaaucugagccacgcuuaugccgucgacgcugccaaccauugcggcacaauugcgaauggggugcuccaaaccuucaugcggauggccuggggaggcucuuacaucgcucuggauuccgggaagggaagcugggacuguaucaugacaucuuaccaguaucuuauuauccagaacaccacgugggaagaucacugccaguuuucccgccccagcccuauuggcuaccuggggcuccugucccaaagaacacgggacaucuauauuucucgcagacuucugggaaccuucacauggacccucagcgauuccgagggcaacgaaacccccggcggguacugucugacacgguggaugcugaucgaggccgagcucaaaugcuuuggaaauacggcuguugccaaguguaacgaaaaacaugacgaggaguucugcgauaugcugcgccuuuuugacuucaauaagcaggcgaucagacggcugaaaaccgaagcccagaugagcauucagcucaucaacaaggcugugaaugcccugauuaacgaucaacuuaucaugaagaaucaucugcgcgacauuaugggcaucccuuauugcaacuacucuaaauauugguaccucaaucacacagucaccgggaagacaucccugcccagauguuggcuggugagcaacggaucuuaccucaaugaaacccacuucagcgacgauaucgagcagcaggcugacaacaugauuacggagcugcuucaaaaagaauauauggaucggcagggcaagacaccucuggggcucguggaccuguuugucuucuccaccucuuuuuaccugaucagcauuuuccuucaccucaucaaaauuccgugaggacuagucccuguucccagagcccacuuuuuuuucuuuuuuugaaauaaaauagccugucuuucagaucuaaaaaaaaaaaaaaaaaaaaaaaaaaaaaaaaaaaaaaaaaaaaaaaaaaaaaaaaaaaaaaaaaaaaaaaaaaaaaaaaaaaaaaaaaaaaaaaaaaaa

SEQ ID NO: 42510 - RNA, 1626 nt, Artificial Sequence
  mRNA product Design a-2 (A100) comprising derived and/or modified sequence from LASV(ISTH2010-NIG-2012;Clade II)__AIT17482__GPCmut13 (opt5)
aggagaguccgcucagccagguugcagaagcggcuuagcguguguccuaaucuucucucugcguguagguaggccugugccgcaaacaagcuuaccaugggccagaucauuaccuucuuucaagaggugccccacgucaucgaagagguuaugaacauugugcugaucgcccucagccugcuugcuauucugaaggggaucuacaauguggccacaugcggacucuucggccuggucuccuuucuucugcucugugggagaucuugcagcacgaccuauaaaggaguguacgaacugcagacacuggagcucgacauggcgucccugaacaugaccaugccucuuucuuguacaaagaauaacagccaucacuauaucaugguuggcaaugaaaccgggcuggagcucacacugaccaacacguccauuaucaaucauaaauucugcaaccuuucugaugcucacaagaaaaaucuguacgaccaugcccucaugagcauuaucuccaccuuucaccugagcauuccgaacuucaaucaguaugaggccaugucuugugauuuuaacggaggcaagaucuccgugcaguacaaucugagccacgcuuaugccgucgacgcugccaaccauugcggcacaauugcgaauggggugcuccaaaccuucaugcggauggccuggggaggcucuuacaucgcucuggauuccgggaagggaagcugggacuguaucaugacaucuuaccaguaucuuauuauccagaacauuaccugggaagaucacugccaguuuucccgccccagcccuaucggcuaccuggggcuccugucccaaagaacgcgggacauuuauaucucucgcagacuucugggaacauucaccuggacacucagcgauuccgagggcaacgaaacccccggcggguacugucugacccgguggaugcugaucgaggccgagcucaaaugcuuuggaaauacagcuguugccaaguguaacgaaaaacaugacgaggaguucugcgauaugcugcgccuuuuugacuucaauaagcaggcgauuagacggcugaaaacggaagcccagaugagcauccagcucauuaacaaggcugugaaugcccugaucaacgaucaacuuauuaugaagaaucaucugcgcgacaucaugggcaucccuuauugcaacuacucuaaauauugguaccucaaucacaccgucacagggaagaccucccugcccagauguuggcuggugagcaacggaucuuaccucaaugaaacacacuucagcgacgauauugagcagcaggcugacaacaugaucaccgagcugcuucaaaaagaauauauugaucggcagggcaagacgccucuggggcucguggaccuguuugucuucuccacaucuuuuuaccugaucagcauuuuccuucaccucguuaaaaucccgugaggacuagucccuguucccagagcccacuuuuuuuucuuuuuuugaaauaaaauagccugucuuucagaucuaaaaaaaaaaaaaaaaaaaaaaaaaaaaaaaaaaaaaaaaaaaaaaaaaaaaaaaaaaaaaaaaaaaaaaaaaaaaaaaaaaaaaaaaaaaaaaaaaaaa

SEQ ID NO: 42511 - RNA, 1626 nt, Artificial Sequence
  mRNA product Design a-2 (A100) comprising derived and/or modified sequence from LASV(Lassa virus/H.sapiens-wt/NGA/2015/ISTH_0543;Clade II)__AVO03639__GPCmut13 (opt5)
aggagaguccgcucagccagguugcagaagcggcuuagcguguguccuaaucuucucucugcguguagguaggccugugccgcaaacaagcuuaccaugggccagaucauuaccuucuuucaagaggugccccacgucaucgaagagguuaugaacauugugcugaucgcccucagccugcuugcuauucugaaggggaucuacaauguggccacaugcggacucuucggccuggucuccuuucuucugcucugugggagaucuugcagcacgaccuauaaaggaguguacgaacugcagacacuggagcucgacauggcgaaccugaauaugaccaugccucuuuccuguacaaagaacaauucucaucacuauaucaugguuggcaacgaaaccgggcuggagcucacacugaccaauacgagcauuaucaaccauaaauucugcaaucuuuccgaugcucacaagaaaaaccuguacgaccaugcccucaugucuauuaucagcaccuuucaccuguccauuccgaauuucaaccaguaugaggccaugagcugugauuuuaauggaggcaagaucucugugcaguacaaccugucccacacauaugcugucgacgccgcuaaucauugcggcaccauugccaacggggugcuccaaacauucaugcggauggcguggggaggcagcuacaucgcccuggauucugggaagggauccugggacuguaucaugaccagcuaccaguaucuuguuauucagaacacgacaugggaagaucacugccaguuuucucgccccuccccuaucggcuaccuggggcuccugagccaaagaacccgggacauuuauaucucccgcagacuucugggaacauucaccuggacccucucugauagcgagggcaaugaaacacccggcggguacugucugacgcgguggaugcugauugaggcugagcucaaaugcuuuggaaacaccgccguggcuaaguguaaugaaaaacaugacgaggaguucugcgauaugcugcgccuuuuugacuucaacaagcaggccaucagacggcugaaaacagaagcgcagauguccauccagcucauuaauaaggccgucaacgcucugaucaaugaucaacuuauuaugaagaaccaucugcgcgacaucaugggcauuccuuauugcaauuacagcaaauauugguaccucaaccacaccgugacagggaagaccucucugcccagauguuggcugguguccaauggaagcuaccucaacgaaacgcacuucucugacgauaucgagcagcaggccgacaauaugaucacagagcugcuucaaaaagaauauauugaucggcagggcaagaccccucuggggcucgucgaccuguuuguuuucagcaccuccuuuuaccugaucucuauuuuccuucaccucgugaaaaucccgugaggacuagucccuguucccagagcccacuuuuuuuucuuuuuuugaaauaaaauagccugucuuucagaucuaaaaaaaaaaaaaaaaaaaaaaaaaaaaaaaaaaaaaaaaaaaaaaaaaaaaaaaaaaaaaaaaaaaaaaaaaaaaaaaaaaaaaaaaaaaaaaaaaaaa

SEQ ID NO: 42512 - RNA, 1626 nt, Artificial Sequence
  mRNA product Design a-2 (A100) comprising derived and/or modified sequence from LASV(Lassa virus/H.sapiens-wt/NGA/2016/ISTH_0009;Clade II)__AVO03571__GPCmut13 (opt5)
aggagaguccgcucagccagguugcagaagcggcuuagcguguguccuaaucuucucucugcguguagguaggccugugccgcaaacaagcuuaccaugggccagaucauuaccuucuuucaagaggugccccacgucaucgaagagguuaugaacauugugcugaucgcccucagccugcuugcuauucugaaggggaucuacaauguggccacaugcggacuccugggccuugucuccuuccugcuccugugugggagaucuugcagcacgaccuauaaaggaguguacgaacugcagacacucgagcuggacauggcgucccuuaacaugaccaugccucugucuuguacaaagaauaacagccaucacuauaucaugguuggcaaugaaaccgggcucgagcugacacuuaccaacacguccauuaucaaucauaaauuuugcaaccugucugaugcucacaagaaaaaucucuacgaccaugcccugaugagcauuaucuccaccuuccaccugagcauuccgaacuuuaaucaguaugaggccaugucuugugauuucaacggaggccggaucuccgugcaguacaaucucagccacucuuaugcugucgacgccgcuaaccauugcggcacaauugccaauggggugcugcaaaccuuuaugcgcauggcguggggaggcuccuacaucgcccuugauagcgggaagggaucuugggacuguaucaugacauccuaccaguaucugauuauccagaacaccacgugggaagaucacugccaguucagcagacccuccccuauuggcuaccucgggcugcuuucucaacggacacgcgacaucuauauuagcagacggcugcucggaaccuuuacauggacccuguccgauagcgagggcaacgaaacccccggcggguacugucugacacgcuggaugcucaucgaggcugagcugaagugcuucggaaauacggccguugcuaaauguaacgaaaagcaugacgaggaauuuugcgauaugcuuagacuguucgacuuuaauaaacaggccauccggcgccucaagaccgaggcgcagaugucuauucagcugaucaacaaagccgugaaugcucuuauuaacgaucaacugaucaugaagaaucaccucagagacauuaugggcaucccuuauugcaacuacuccaaguauugguaccugaaucacacagucaccgggaaaacaagccugccccgguguuggcucgugucuaacggaagcuaccugaaugaaacccauuucuccgacgauaucgagcagcaggccgacaacaugauuacggagcuucugcaaaaggaauauaucgaucgccagggcaaaacaccucucgggcugguggaccuguucgucuuuucuaccagcuucuaccuuauuuccaucuuucuccaccugguuaagauuccgugaggacuagucccuguucccagagcccacuuuuuuuucuuuuuuugaaauaaaauagccugucuuucagaucuaaaaaaaaaaaaaaaaaaaaaaaaaaaaaaaaaaaaaaaaaaaaaaaaaaaaaaaaaaaaaaaaaaaaaaaaaaaaaaaaaaaaaaaaaaaaaaaaaaaa

SEQ ID NO: 42513 - RNA, 1626 nt, Artificial Sequence
  mRNA product Design a-2 (A100) comprising derived and/or modified sequence from LASV(Lassa virus/H.sapiens-wt/NGA/2016/ISTH_0017;Clade II)__AVO03567__GPCmut13 (opt5)
aggagaguccgcucagccagguugcagaagcggcuuagcguguguccuaaucuucucucugcguguagguaggccugugccgcaaacaagcuuaccaugggccagaucauuaccuucuuucaagaggugccccacgucaucgaagagguuaugaacauugugcugaucgcccucagccugcuugcuauucugaaggggaucuacaauguggccacaugcggacucuucggccuggucuccuuucuucugcucugugggagaucuugcagcacgaccuauaaaggaguguacgaacugcagacacuggagcucgacauggcgucccugaacaugaccaugccucuuucuuguacaaagaauaacagccaucacuauaucaugguuggcaaugaaaccgggcuggagcucacacugaccaacacguccauuaucaaucauaaauucugcaaccuuucugaugcucacaagaaaaaucuguacgaccaugcccucaugagcauuaucuccaccuuucaccugagcauuccgaacuucaaucaguaugaggccaugucuugugauuuuaacggaggcaagaucuccgugcaguacaaucugagccacacauaugcuauugacgccgcuaaccauugcggcaccaucgccaaugggguccuccaaacauucaugcggauggcguggggaggcucuuacaucgcccuggauuccgggaagggaagcugggacuguauuaugaccucuuaccaguaucuuaucauucagaacacgacaugggaagaucacugccaguuuucccgccccagcccuaucggcuaccuggggcuccugucccaaagaacccgggacauuuauaucucucgcagacuucugggaacauucaccuggacccucagcgauuccgagggcaacgaaacacccggcggguacugucugacgcgguggaugcugaucgaggcugagcucaaaugcuuuggaaauaccgccguggcuaaguguaacgaaaaacaugacgaggaguucugcgauaugcugcgccuuuuugacuucaauaagcaggccauuagacggcugaaaacagaagcgcagaugagcauccagcucauuaacaaggccguuaaugcucugaucaacgaucaacuuauuaugaagaaucaucugcgcgacaucaugggcaucccuuauugcaacuacucuaaauauugguaccucaaucacaccgugacagggaagaccucccugcccagauguuggcuggucagcaacggaucuuaccucaaugaaacgcacuucagcgacgauauugagcagcaggccgacaacaugaucacagagcugcuucaaaaagaauauauggaucggcagggcaagaccccucuggggcucguggaccuguuuguguucuccaccucuuuuuaccugauuagcaucuuccuucaccucguccgcauuccgugaggacuagucccuguucccagagcccacuuuuuuuucuuuuuuugaaauaaaauagccugucuuucagaucuaaaaaaaaaaaaaaaaaaaaaaaaaaaaaaaaaaaaaaaaaaaaaaaaaaaaaaaaaaaaaaaaaaaaaaaaaaaaaaaaaaaaaaaaaaaaaaaaaaaa

SEQ ID NO: 42514 - RNA, 1626 nt, Artificial Sequence
  mRNA product Design a-2 (A100) comprising derived and/or modified sequence from LASV(Lassa virus/H.sapiens-wt/NGA/2018/ISTH_0959;Clade II)__AVV65099__GPCmut13 (opt5)
aggagaguccgcucagccagguugcagaagcggcuuagcguguguccuaaucuucucucugcguguagguaggccugugccgcaaacaagcuuaccaugggccagaucauuaccuucuuucaagaggugccccacgucaucgaagagguuaugaacauugugcugaucgcccucagccugcuugcuauucugaaggggaucuacaauguggucacaugcggacucuucggccugguguccuuucuucugcucugugggagaucuugcagcacgaccuauaaaggaguuuacgaacugcagacacuggagcucgacauggccucccugaacaugaccaugccucuuucuuguacaaagaauaacagccaucacuauaucauggugggcaaugaaaccgggcuggagcucacacugaccaacacguccauuaucaaucauaaauucugcaaccuuucugaugcgcacaagaaaaaucuguacgaccaugcucucaugagcauuaucuccaccuuucaccugagcauuccgaacuucaaucaguaugaggccaugucuugugauuuuaacggaggcaagaucuccguccaguacaaucugagccacgccuaugcuauugacgccgcuaaccauugcggcacaaucgccaauggggugcuccaaaccuucaugcggauggcguggggaggcucuuacaucgcccuggauuccgggaagggaagcugggacuguauuaugacaucuuaccaguaucuuaucauucagaacaccacgugggaagaucacugccaguuuucccgccccagcccuaucggcuaccuggggcuccugucccaaagaacacgggacauuuauaucucucgcagacuucugggaaccuucacauggacccucagcgauuccgagggcaacgaaacccccggcggguacugucugacacgguggaugcugaucgaggcugagcucaaaugcuuuggaaauacggccguugcuaaguguaacgaaaaacaugacgaggaguucugcgauaugcugcgccuuuuugacuucaauaagcaggccauuagacggcugaaaaccgaagcgcagaugagcauccagcucauuaacaaggccgugaaugcucugaucaacgaucaacuuauuaugaagaaucaucugcgcgacaucaugggcaucccuuauugcaacuacucuaaauauugguaccucaaucacacagucaccgggaagacaucccugcccagauguuggcuggugagcaacggaucuuaccucaaugaaacccacuucagcgacgauauugagcagcaggccgacaacaugaucacggagcugcuucaaaaagaauauauugaucggcagggcaagacaccucuggggcucguggaccuguuugucuucuccaccucuuuuuaccugaucagcauuuuccuucaccucguuaaaaucccgugaggacuagucccuguucccagagcccacuuuuuuuucuuuuuuugaaauaaaauagccugucuuucagaucuaaaaaaaaaaaaaaaaaaaaaaaaaaaaaaaaaaaaaaaaaaaaaaaaaaaaaaaaaaaaaaaaaaaaaaaaaaaaaaaaaaaaaaaaaaaaaaaaaaaa

SEQ ID NO: 42515 - RNA, 1626 nt, Artificial Sequence
  mRNA product Design a-2 (A100) comprising derived and/or modified sequence from LASV(LASV003-NIG-2008;Clade II)__AIT17580__GPCmut13 (opt5)
aggagaguccgcucagccagguugcagaagcggcuuagcguguguccuaaucuucucucugcguguagguaggccugugccgcaaacaagcuuaccaugggccagaucauuaccuucuuucaagaggugccccacgucaucgaagagguuaugaacauugugcugaucgcccucagccugcuugcuauucugaaggggaucuacaauguggccacaugcggacucuucggccuggucuccuuucuucugcucugugggagaucuugcagcacgaccuauaaaggaguguacgaacugcagacacuggagcucgacauggcgucccugaacaugaccaugccucuuucuuguacaaagaauaacagccaucacuauaucaugguuggcaaugaaaccgggcuggagcucacacugaccaacacguccauuaucaaucauaaauucugcaaccuuucugaugcucacaagaaaaaucuguacgaccaugcccucaugagcauuaucuccaccuuucaccugagcauuccgaacuucaaucaguaugaggccaugucuugugauuuuaacggaggcaagaucuccgugcaguacaaucugagccacacauaugcugucgacgccgcuaaccauugcggcaccauugccaauggggugcuccaaacauucaugcggauggcguggggaggcucuuacaucgcccuggauuccgggaagggaagcugggacuguaucaugaccucuuaccaguaucuuauuauccagaacacgacaugggaagaucacugccaguuuucccgccccagcccuauuggcuaccuggggcuccugucccaaagaacccgggacaucuauauuucucgcagacuucugggaacauucaccuggacccucagcgauuccgagagcaacgaaacacccggcggcuacugucugacgcgguggaugcugaucgaggcugagcucaaaugcuuugggaauaccgccguugcuaaguguaacgaaaaacaugacgaggaguucugcgauaugcugcgccuuuuugacuucaauaagcaggccaucagacggcugaaagcggaagcccagaugucuauucagcucaucaacaaggcugugaaugcccugauuaacgaucaacuuaucaugaagaaucaucugcgcgacauuaugggaaucccuuauugcaacuacuccaaauauugguaccucaaucacacagucaccggcagaacaagccugccccgguguuggcuggugucuaacgggagcuaccucaaugaaacccacuucuccgacgauaucgagcagcaggcugacaacaugauuacggagcugcuucaaaaggaauauauggaucgccagggaaaaacaccucugggccucguggaccuguuugucuucucuaccagcuuuuaccugaucuccauuuuccuucaccucguuaagaucccgugaggacuagucccuguucccagagcccacuuuuuuuucuuuuuuugaaauaaaauagccugucuuucagaucuaaaaaaaaaaaaaaaaaaaaaaaaaaaaaaaaaaaaaaaaaaaaaaaaaaaaaaaaaaaaaaaaaaaaaaaaaaaaaaaaaaaaaaaaaaaaaaaaaaaa

SEQ ID NO: 42516 - RNA, 1626 nt, Artificial Sequence
  mRNA product Design a-2 (A100) comprising derived and/or modified sequence from LASV(LASV035-NIG-2009;Clade II)__AIT17588__GPCmut13 (opt5)
aggagaguccgcucagccagguugcagaagcggcuuagcguguguccuaaucuucucucugcguguagguaggccugugccgcaaacaagcuuaccaugggccagaucauuaccuucuuucaagaggugccccacgucaucgaagagguuaugaacauugugcugaucgcccucagccugcuugcuauucugaaggggaucuacaauguggccacaugcggacucuucggccuggucuccuuucuucugcucugugggagaucuugcagcacgaccuauaaaggaguguacgaacugcagacacuggagcucgacauggcgucccugaacaugaccaugccucuuucuuguacaaagaauaacagccaucacuauaucaugguuggcaaugaaaccgggcuggagcucacacugaccaacacguccauuaucaaucauaaauucugcaaccuuucugaugcucacaagaaaaaucuguacgaccaugcccucaugagcauuaucuccaccuuucaccugagcauuccgaacuucaaucaguaugaggccaugucuugugauuuuaacggaggcaagaucuccgugcaguacaaucugagccacgcuuaugccgucgacgcugccaaccauugcggcacaauugcgaauggggugcuccaaaccuucaugcggauggccuggggaggcucuuacaucgcucuggauuccgggaagggaagcugggacuguaucaugacaucuuaccaguaucuuauuauccagaacaccacgugggaagaucacugccaguuuucccgccccagcccuauuggcuaccuggggcuccugucccaaagaacacgggacaucuauauuucucgcagacuucugggaaccuucacauggacccucagcgauuccgagggcaacgaaacccccggcggguacugucugacacgguggaugcugaucgaggccgagcucaaaugcuuuggaaauacggcuguugccaaguguaacgaaaaacaugacgaggaguucugcgauaugcugcgccuuuuugacuucaauaagcaggcgaucagacggcugaaagccgaagcucagaugagcauucagcucaucaacaaggccgugaaugcucugauuaacgaucaacuuaucaugaagaaucaucugcgcgacauuaugggcaucccuuauugcaacuacucuaaauauugguaccucaaucacaccgucacagggaagaccucccugcccagauguuggcuggugagcaacggaucuuaccucaaugaaacacacuucagcgacgauaucgagcagcaggccgacaacaugauuaccgagcugcuucaaaaagaauauaucgaucggcagggcaagacgccucuggggcucguggaccuguuugucuucuccacaucuuuuuaccugauuagcaucuuccuucaccucguuaaaauuccgugaggacuagucccuguucccagagcccacuuuuuuuucuuuuuuugaaauaaaauagccugucuuucagaucuaaaaaaaaaaaaaaaaaaaaaaaaaaaaaaaaaaaaaaaaaaaaaaaaaaaaaaaaaaaaaaaaaaaaaaaaaaaaaaaaaaaaaaaaaaaaaaaaaaaa

SEQ ID NO: 42517 - RNA, 1626 nt, Artificial Sequence
  mRNA product Design a-2 (A100) comprising derived and/or modified sequence from LASV(LASV1000-NIG-2009;Clade II)__AIT17782__GPCmut13 (opt5)
aggagaguccgcucagccagguugcagaagcggcuuagcguguguccuaaucuucucucugcguguagguaggccugugccgcaaacaagcuuaccaugggccagaucauuaccuucuuucaagaggugccccacgucaucgaagagguuaugaacauugugcugaucgcccucagccugcuugcuauucugaaggggaucuacaauguggccacaugcggacucuucggccuggucuccuuucuucugcucugugggagaucuugcagcacgaccuauaaaggaguguacgaacugcagacacuggagcucgacauggcgucccugaacaugaccaugccucuuucuuguacaaagaauaacagccaucacuauaucaugguuggcaaugaaaccgggcuggagcucacacugaccaacacguccauuaucaaucauaaauucugcaaccuuucugaugcucacaagaaaaaucuguacgaccaugcccucaugagcauuaucuccaccuuucaccugagcauuccgaacuucaaucaguaugaggccaugucuugugauuuuaacggaggcaagaucuccgugcaguacaaucugagccacacauaugcugucgacgccgcuaaccauugcggcaccauugccaauggggugcuccaaacauucaugcggauggcguggggaggcucuuacaucgcccuggauuccgggaagggaagcugggacuguaucaugaccucuuaccaguaucuuauuauccagaacacgacaugggaagaucacugccaguuuucccgccccagcccuauuggcuaccuggggcuccugucccaaagaacccgggacaucuauauuucucgcagacuucugggaacauucaccuggacccucagcgauuccgagggcaacgaaacacccggcggguacugucugacgcgguggaugcugaucgaggcugagcucaaaugcuuuggaaauaccgccguugcuaaguguaacgaaaaacaugacgaggaguucugcgauaugcugcgccuuuuugacuucaauaagcaggccaucaaaagacugaagacagaagcgcagaugagcauucagcucaucaacaaggccgugaaugcucugauuaacgaucaacuuaucaugaaaaaucaucugcgggacauuaugggcaucccuuauugcaacuacucuaaguauugguaccucaaucacaccgucacagggaaaaccucccugccccgcuguuggcuggugagcaacggaucuuaccucaaugaaacgcacuucagcgacgauaucgagcagcaggccgacaacaugauuacagagcugcuucaaaaggaauauaucgauagacagggcaaaaccccucuggggcucguggaccuguuugucuucuccaccucuuuuuaccugauuagcaucuuccuucaccucguuaagauuccgugaggacuagucccuguucccagagcccacuuuuuuuucuuuuuuugaaauaaaauagccugucuuucagaucuaaaaaaaaaaaaaaaaaaaaaaaaaaaaaaaaaaaaaaaaaaaaaaaaaaaaaaaaaaaaaaaaaaaaaaaaaaaaaaaaaaaaaaaaaaaaaaaaaaaa

SEQ ID NO: 42518 - RNA, 1626 nt, Artificial Sequence
  mRNA product Design a-2 (A100) comprising derived and/or modified sequence from LASV(LASV221-NIG-2010;Clade II)__AIT17624__GPCmut13 (opt5)
aggagaguccgcucagccagguugcagaagcggcuuagcguguguccuaaucuucucucugcguguagguaggccugugccgcaaacaagcuuaccaugggccagaucauuaccuucuuucaagaggugccccacgucaucgaagagguuaugaacauugugcugaucgcccucagccugcuugcuauucugaaggggaucuacaauguggccacaugcggacucuucggccuggucuccuuucuucugcucugugggagaucuugcagcacgaccuauaaaggaguguacgaacugcagacacuggagcucgacauggcgucccugaacaugaccaugccucuuucuuguacaaagaauaacagccaucacuauaucaugguuggcaaugaaaccgggcuggagcucacacugaccaacacguccauuaucaaucauaaauucugcaaccuuucugaugcucacaagaaaaaucuguacgaccaugcccucaugagcauuaucuccaccuuucaccugagcauuccgaacuucaaucaguaugaggccaugucuugugauuuuaacggaggcaagaucuccgugcaguacaaucugagccacacauaugcuauugacgccgcuaaccauugcggcaccaucgccaaugggguccuccaaacauucaugcggauggcguggggaggcucuuacaucgcccuggauuccgggaagggaagcugggacuguauuaugaccucuuaccaguaucuuaucauucagaacacgacaugggaagaucacugccaguuuucccgccccagcccuaucggcuaccuggggcuccugucccaaagaacccgggacauuuauaucucucgcagacuucugggaacauucaccuggacccucagcgauuccgagggcaacgaaacacccggcggguacugucugacgcgguggaugcugaucgaggcugagcucaaaugcuuuggaaauaccgccguggcuaaguguaacgaaaaacaugacgaggaguucugcgauaugcugcgccuuuuugacuucaauaagcaggccauuagacggcugaaaacagaagcgcagaugagcauccagcucauuaacaaggccguuaaugcucugaucaacgaucaacuuauuaugaagaaucaucugcgcgacaucaugggcaucccuuauugcaacuacucuaaauauugguaccucaaucacaccgugacagggaagaccucccugcccagauguuggcuggucagcaacggaucuuaccucaaugaaacgcacuucagcgacgauauugagcagcaggccgacaacaugaucacagagaugcugcaaaaagaauauauggaucggcagggcaagaccccucuugggcugguggaccucuuuguguucuccaccucuuuuuaccugauuagcaucuuccugcaccuugucaaaauuccgugaggacuagucccuguucccagagcccacuuuuuuuucuuuuuuugaaauaaaauagccugucuuucagaucuaaaaaaaaaaaaaaaaaaaaaaaaaaaaaaaaaaaaaaaaaaaaaaaaaaaaaaaaaaaaaaaaaaaaaaaaaaaaaaaaaaaaaaaaaaaaaaaaaaaa

SEQ ID NO: 42519 - RNA, 1626 nt, Artificial Sequence
  mRNA product Design a-2 (A100) comprising derived and/or modified sequence from LASV(LASV237-NIG-2010;Clade II)__AIT17638__GPCmut13 (opt5)
aggagaguccgcucagccagguugcagaagcggcuuagcguguguccuaaucuucucucugcguguagguaggccugugccgcaaacaagcuuaccaugggccagaucauuaccuucuuucaagaggugccccacgucaucgaagagguuaugaacauugugcugaucgcccucagccugcuugcuauucugaaggggaucuacaauguggccacaugcggacucuucggccuggucuccuuucuucugcucugugggagaucuugcagcacgaccuauaaaggaguguacgaacugcagacacuggagcucgacauggcgucccugaacaugaccaugccucuuucuuguacaaagaauaacagccaucacuauaucaugguuggcaaugaaaccgggcuggagcucacacugaccaacacguccauuaucaaucauaaauucugcaaccuuucugaugcucacaagaaagaccuguacgaucaugcccucaugagcauuaucuccaccuuucaccugagcauuccgaauuucaaccaguaugaggccaugucuugugacuuuaauggaggcaagaucuccgugcaguacaaccugagccacacauaugcugucgaugccgcuaaucauugcggcaccauugccaacggggugcuccaaacauucaugcggauggcguggggaggcucuuacaucgcccuggacuccgggaagggaagcugggauuguaucaugaccucuuaccaguaucuuauuauccagaauacgacaugggaagaccacugccaguuuucccgccccagcccuauuggcuaccuggggcuccugucccaaagaacccgggauaucuauauuucucgcagacuucugggaacauucaccuggacccucagcgacuccgagggcaacgaaacacccggcggguacugucugacgcgguggaugcugaucgaggcugagcucaaaugcuuuggaaacaccgccguugcuaaguguaaugaaaaacaugaugaggaguucugcgacaugcugcgccuuuuugauuucaacaagcaggccaucagacggcugaaaacagaagcgcagaugagcauucagcucaucaauaaggccgugaacgcucugauuaaugaccaacuuaucaugaagaaccaucugcgcgacauuaugggcaucccuuauugcaauuacucuaaauauugguaccucaaccacaccgucacagggaagaccucccugcccagauguuggcuggugagcaauggaucuuaccucaacgaaacgcacuucagcgaugacaucgagcagcaggccgauaauaugauuacagagcugcuucaaaaagaauauauggaccggcagggcaagaccccucuggggcucguggaucuguuugucuucuccaccucuuuuuaccugaucagcauuuuccuucaccucaucaaaauuccgugaggacuagucccuguucccagagcccacuuuuuuuucuuuuuuugaaauaaaauagccugucuuucagaucuaaaaaaaaaaaaaaaaaaaaaaaaaaaaaaaaaaaaaaaaaaaaaaaaaaaaaaaaaaaaaaaaaaaaaaaaaaaaaaaaaaaaaaaaaaaaaaaaaaaa

SEQ ID NO: 42520 - RNA, 1626 nt, Artificial Sequence
  mRNA product Design a-2 (A100) comprising derived and/or modified sequence from LASV(LASV253-NIG-2011;Clade II)__AIT17670__GPCmut13 (opt5)
aggagaguccgcucagccagguugcagaagcggcuuagcguguguccuaaucuucucucugcguguagguaggccugugccgcaaacaagcuuaccaugggccagaucauuaccuucuuucaagaggugccccacgucaucgaagagguuaugaacauugugcugaucgcccucagccugcuugcuauucugaaggggaucuacaauguggccacaugcggacucuucggccuggucuccuuucuucugcucugugggagaucuugcagcacgaccuauaaaggaguguacgaacugcagacacuggagcucgacauggcgucccugaacaugaccaugccucuuucuuguacaaagaauaacagccaucacuauaucaugguuggcaaugaaaccgggcuggagcucacacugaccaacacguccauuaucaaucauaaauucugcaaccuuucugaugcucacaagaaaaaucuguacgaccaugcccucaugagcauuaucuccaccuuucaccugagcauuccgaacuucaaucaguaugaggccaugucuugugauuuuaacggaggcaagaucuccgugcaguacaaucugagccacacauaugcugucgacgccgcuaaccauugcggcaccauugccaauggggugcuccaaacauucaugcggauggcguggggaggcucuuacaucgcccuggauuccgggaagggaagcugggacuguaucaugaccucuuaccaguaucuuauuauccagaacacgacaugggaagaucacugccaguuuucccgccccagcccuauuggcuaccuggggcuccugucccaaagaacccgggacaucuauauuucucgcagacuucugggaacauucaccuggacccucagcgauuccgagggcaacgaaacacccggcggguacugucugacgcgguggaugcugaucgaggcugagcucaaaugcuuuggaaauaccgccguugcuaaguguaacgaaaaacaugacgaggaguucugcgauaugcugcgccuuuuugacuucaauaagcaggccaucagacggcugaaagcggaagcccagaugagcauucagcucaucaacaaggcugugaaugcccugauuaacgaucaacuuaucaugaagaaucaucugcgcgacauuaugggcaucccuuauugcaacuacucuaaauauugguaccucaaucacacagucaccgggagaacaucccugccccgguguuggcuggugagcaacggaucuuaccucaaugaaacccacuucagcgacgauaucgagcagcaggcugacaacaugauuacggagcugcuucaaaaggaauauaucgaucgccagggcaaaacaccucuggggcucguggaccuguuugucuucuccaccucuuuuuaccugauuagcaucuuccuucaccucguuaagauuccgugaggacuagucccuguucccagagcccacuuuuuuuucuuuuuuugaaauaaaauagccugucuuucagaucuaaaaaaaaaaaaaaaaaaaaaaaaaaaaaaaaaaaaaaaaaaaaaaaaaaaaaaaaaaaaaaaaaaaaaaaaaaaaaaaaaaaaaaaaaaaaaaaaaaaa

SEQ ID NO: 42521 - RNA, 1626 nt, Artificial Sequence
  mRNA product Design a-2 (A100) comprising derived and/or modified sequence from LASV(LASV254-NIG-2011;Clade II)__AIT17674__GPCmut13 (opt5)
aggagaguccgcucagccagguugcagaagcggcuuagcguguguccuaaucuucucucugcguguagguaggccugugccgcaaacaagcuuaccaugggccagaucauuaccuucuuucaagaggugccccacgucaucgaagagguuaugaacauugugcugaucgcccucagccugcuugcuauucugaaggggaucuacaauguggccacaugcggacucuucggccuggucuccuuucuucugcucugugggagaucuugcagcacgaccuauaaaggaguguacgaacugcagacacuggagcucgacaugaccaaccugaauaugacaaugccucuuuccuguaccaagaacaauucucaucacuauaucaugguuggcaacgaaacagggcuggagcucacccugacgaauaccagcauuaucaaccauaaauucugcaaucuuuccgaugcgcacaagaaaaaccuguacaaucaugcucucaugucuauuaucagcacauuucaccuguccauuccgaacuucaaucaguaugaggccaugagcugugacuuuaacggaggcaagaucucugugcaguacaaucugucccacagcuaugccgucgaugcugccaaccauugcggcaccauugcuaacggggugcuccaaacauucaugcggauggccuggggaggcucuuacaucgcgcuggacuccgggaagggaaauugggauuguaucaugaccagcuaccaguaucuuauuauccagaacacgacaugggaagaccacugccaguuuucucgccccuccccuauuggcuaccuggggcuccugagccaaagaacccgggauaucuauauuucccgcagacuucugggaacauucaccuggacccucucugacagcgagggcaaugaaacacccggcggguacugucugacgcgguggaugcugaucgaggccgagcucaaaugcuuuggaaacaccgcuguugccaaguguaaugaaaaacaugaugaggaguucugcgacaugcugcgccuuuuugauuucaacaagcaggcuaucagacggcugaaaacagaagcccaggcgaauauucagcucaucaacaaggccgugaaugcucugauuaacgaccaacuuaucaugaagaaucaucugcgcgauauuaugggcaucccuuauugcaacuacuccaaauauugguaccucaaucacaccgucacagggaagaccagccugcccagauguuggcuggugucuaacggauccuaccucaaugaaacgcacuucagcgacgacaucgagcagcaggccgauaacaugauuacagagcugcuucaaaaagaauauauggaccggcagggcaagaccccucuggggcucguggaucuguuugucuucucuaccagcuuuuaccugaucuccauuuuccuucaccucguuaaaaucccgugaggacuagucccuguucccagagcccacuuuuuuuucuuuuuuugaaauaaaauagccugucuuucagaucuaaaaaaaaaaaaaaaaaaaaaaaaaaaaaaaaaaaaaaaaaaaaaaaaaaaaaaaaaaaaaaaaaaaaaaaaaaaaaaaaaaaaaaaaaaaaaaaaaaaa

SEQ ID NO: 42522 - RNA, 1626 nt, Artificial Sequence
  mRNA product Design a-2 (A100) comprising derived and/or modified sequence from LASV(Nig08-A19;Clade III)__ADU56618__GPCmut13 (opt5)
aggagaguccgcucagccagguugcagaagcggcuuagcguguguccuaaucuucucucugcguguagguaggccugugccgcaaacaagcuuaccaugggccagaucgugaccuucuuucaagaggucccccacguuauugaagaggugaugaacaucgugcugauugcccucagcauccuggcuauucuuaaggggcuguacaauaucgccacaugcggacucaucggccuggucacguuccuucugcucuccgggagaucuuguagcaugaccuauaaaggaguguacgaacugcagacacuggagcucaacaugaauacccugaacaugacaaugccucuuuccugcaccaagaauaacucucaucacuauauuaugguuggcaaugaaacagggcuggagcucacccugacgaacaccagccuucugcaucacaaauuuuguaaucucuccgacgcgcauaagaaaaaccuguacgaucacacacugaugucuaucauuagcaccuuccaccucuccaucccgaauuuuaaccaguaugaggcuaugagcugcgacuucaauggaggcaagauuacagugcaguacaaccugucucauuccuaugccaucgaugccgcuaaucacuguggcaccgucgccaacggggugcuucaaacguuuaugcggauggcuuggggaggcagcuacauugcccuggacucugggcgcggaaagugggauugcaucaugacauccuaccaguaucucaucauucagaacaccacaugggaagaccauugucaguucagcagacccucuccuaucggcuaccuggggcuucugucccaacggacccgcgauauuuauaucagcagacggcuccugggaaccuuuacauggacgcuguccgacucugagggcaaugaaacccccggcggguacugccucacacgcuggaugcugauugaggcggagcuuaaauguuucggaaacaccgccguugcuaagugcaaugaaaaacacgaugaggaauuuugugacaugcugagacucuucgauuuuaacaagcaggccauccggcgccugaaagcugaggcccagaugagcauccagcuuauuaauaaggcggugaacgcccugaucaaugaccaacucauuaugaagaaccaccugagagauaucaugggcauuccuuauugcaauuacuccaaauauugguaccugaaccauacaagcaccgggcggacgucucucccccgcugcuggcuggucuccaauggaagcuaccuuaacgaaacacacuucucugacgacaucgagcagcaggcugauaauaugaucaccgagaugcugcaaaaggaauaucucgacagacagggcaaaaccccucuggggcugguggaucuuuucguguuuagcacauccuucuaccucauuucuaucuuucugcaucuggucaagauuccgugaggacuagucccuguucccagagcccacuuuuuuuucuuuuuuugaaauaaaauagccugucuuucagaucuaaaaaaaaaaaaaaaaaaaaaaaaaaaaaaaaaaaaaaaaaaaaaaaaaaaaaaaaaaaaaaaaaaaaaaaaaaaaaaaaaaaaaaaaaaaaaaaaaaaa

SEQ ID NO: 42523 - RNA, 1629 nt, Artificial Sequence
  mRNA product Design a-2 (A100) comprising derived and/or modified sequence from LASV(G1180-SLE-2010;Clade IV)__AIT17168__GPCmut13 (opt5)
aggagaguccgcucagccagguugcagaagcggcuuagcguguguccuaaucuucucucugcguguagguaggccugugccgcaaacaagcuuaccaugggccagaucgugaccuucuuucaagaggucccccacguuauugaagaggugaugaacaucgugcugauugcccucagcauccuggcuguccuuaaggggcuguacaauuucgccacaugcggacucgugggccugcuuacguuucugcuccugugugggagauccugcaccgcgucucgguauaaaggaguuuacgaacugcagacacucgagcugaacauggaaacccuuaauaugacaaugccucugagcuguaccaagaacaauucccaucacuauauuauggugggcaacgagacagggcucgagcugacccuuacgaauaccucuaucaucaaccauaaauucugcaaucugagcgacgcucacaagaaaaaccucuacgaucaugcccugauguccauuaucucuacauuucaccugagcauuccgaauuucaaccaguaugaagccauguccugugacuuuaauggaggcaagaucagcguccaguacaaccucucucacuccuaugcuggcgaugccgcuaaucauugcgggaccguggccaacggaguucugcaaacauucaugcgcauggcguggggcgggagcuacauugcccuugacucuggacacggcuccugggauuguaucaugaccagcuaccaguaucugauuauccagaacacgacaugggaggaccauugccaguuuucuagacccuccccuaucggguaccucggacugcuuagccaacggacccgcgauauuuauaucuccagacggcugcucggcacauucaccuggacccugucugacagcgaaggcaaggauacacccgggggauacugucugacgcgcuggaugcucauugaggcugagcugaaaugcuuuggcaauaccgccguggcuaaguguaacgaaaaacacgacgaggaguucugcgauaugcuuagacuguuugacuucaauaagcaggccauccagcggcucaaagcggaagcccagauguccauucaacugaucaacaaggcugucaaugcccuuaucaacgaucagcugauuaugaagaaucaccuccgcgacaucauggggauuccuuauugcaacuacagcaaauauugguaccugaaucauacaaccacaggaaagaccucucugcccaaauguuggcucguguccaacggcagcuaccugaaugaaacgcacuucucugacgauaucgagcagcaagcugacaacaugauuacagagaugcuucagaaggaauauauggagagacaggggaaaaccccucugggacucguggaucuguuugucuucagcaccuccuuuuaccugaucucuaucuuccuucaucucguuaagauuccgugaggacuagucccuguucccagagcccacuuuuuuuucuuuuuuugaaauaaaauagccugucuuucagaucuaaaaaaaaaaaaaaaaaaaaaaaaaaaaaaaaaaaaaaaaaaaaaaaaaaaaaaaaaaaaaaaaaaaaaaaaaaaaaaaaaaaaaaaaaaaaaaaaaaaa

SEQ ID NO: 42524 - RNA, 1629 nt, Artificial Sequence
  mRNA product Design a-2 (A100) comprising derived and/or modified sequence from LASV(G1442-SLE-2011;Clade IV)__AIT17180__GPCmut13 (opt5)
aggagaguccgcucagccagguugcagaagcggcuuagcguguguccuaaucuucucucugcguguagguaggccugugccgcaaacaagcuuaccaugggccagaucgugaccuucuuucaagaggucccccacguuauugaagaggugaugaacaucgugcugauugcccucagcauccuggcuguccuuaaggggcuguacaauguggccacaugcggacucauuggccugguuacguuccuucugcucugugggagauccugcaccacaacccuguauaaaggaguguacgaacugcagacacucgagcugaacauggaaacccuuaauaugacaaugccucugucuuguaccaagaacaauagccaucacuauauccgggucggcaacgagacggggcucgagcugacccuuacaaauaccuccaucauuaaccauaaauuuugcaaucugucugacgcgcacaagaaaaaccucuacgaucaugcucugaugagcaucauuuccacauuccaccugucuaucccgaauuuuaaccaguaugaagccaugagcugugacuucaauggaggcaagauuuccgugcaguacaaccucagccacucuuaugccggcgaugcugccaaucauugcgggaccguugcuaacggagugcugcaaacguuuaugcgcauggccuggggcggguccuacaucgcgcuugacagcggaagaggcaacugggauuguauuaugacaucuuaccaguaucugaucauccagaauaccacaugggacgaucacugccaguucucccggcccagcccuauuggguaccucggacugcuuucucaacgcaccagagacgucuauaucucccggcgccugcucggcaccuuuacauggacgcugagcgauuccgagggcaaggacacccccgggggauacugucugacaagauggaugcucauugaagccgagcugaaaugcuucggcaacaccgcuguggccaaguguaaugagaaacaugaugaagaguuuugcgacaugcuucggcuguucgauuuuaacaagcaggcuauccagcgccucaaagccgaagcgcagaugucuauucaacugaucaauaaggccgugaacgcucuuaucaaugaccagcugauuaugaagaaccaccucagagacaucauggggauuccuuauugcaauuacagcaaauauugguaccugaacaauacagccaccggaaagacgucccugcccaaauguuggcucaucagcaacggcucuuaccugaaugagacacacuucuccgaugacauugaacaggaggcugauaacaugaucaccgagaugcuucaaaaggaauauauggagcggcaggggaaaaccccucugggacucgucgaccuguucguuuuuagcacaucuuucuaccugaucagcauuuuucuucaucucgugaagaucccgugaggacuagucccuguucccagagcccacuuuuuuuucuuuuuuugaaauaaaauagccugucuuucagaucuaaaaaaaaaaaaaaaaaaaaaaaaaaaaaaaaaaaaaaaaaaaaaaaaaaaaaaaaaaaaaaaaaaaaaaaaaaaaaaaaaaaaaaaaaaaaaaaaaaaa

SEQ ID NO: 42525 - RNA, 1629 nt, Artificial Sequence
  mRNA product Design a-2 (A100) comprising derived and/or modified sequence from LASV(G3010-SLE-2013;Clade IV)__AIT17344__GPCmut13 (opt5)
aggagaguccgcucagccagguugcagaagcggcuuagcguguguccuaaucuucucucugcguguagguaggccugugccgcaaacaagcuuaccaugggccagaucgugaccuucuuucaagaggucccccacguuauugaagaggugaugaacaucgugcugauugcccucagcauccuggcuguccuuaaggggcuguacaauuucgccacaugcggacucgugggccugguuacguuucuucugcucugugggagauccugcaccacaucucuguauaaaggaguguacgaacugcagacccucgagcugaacauggaaacacuuaauaugaccaugccucugagcuguacaaagaacaauucccaucacuauauuauggucggcaacgagaccgggcucgagcugacgcuuaccaauacaucuaucaucaaccauaaauucugcaaucugagcgacgcgcacaagaaaaaccucuacaaucaugcucugauguccauuaucucuaccuuucaccugagcauuccgaacuucaaucaguaugaagccauguccugugauuuuaacggaggcaagaucagcgugcaguacaaucucucucacuccuaugccggcgacgcugccagccauugcgggacaguugcuaacggagugcugcaaaccuucaugcggauggccuggggcgggucuuacauugcgcuugauuccggauacggcaagugggacuguaucaugacgagcuaucaguaccugauuauccagaacacaaccugggaggaucacugccaguuuucucgccccuccccuaucggguaucucggacugcuuagccaaagaacacgggacauuuacaucucccgcagacugcucggcaccuucaccuggacacugucugauagcgaaggcaaagacacgcccgggggauauugucugacccgguggaugcucauugaggccgagcugaagugcuuuggcaauacagcugucgccaaauguaacgaaaagcaugaugaggaguucugcgacaugcuucgccuguuugauuucaauaaacaggcuauccagagacucaagaccgaagcccagauguccauucaacugaucaacaaggcggugaaugcccuuaucaacgaccagcugauuaugaaaaaucaccuccgggauaucauggggauuccuuacugcaacuauagcaaguacugguaccugaaucacacaaccacgggaaaaacaucucugcccaaguguuggcucguguccaacggcagcuaucugaaugaaacccauuucucugacgacaucgagcagcaagcugauaacaugauuaccgagaugcuucagaaagaauacauggagcgccaggggaagacaccucugggacucgucgaccuguuuguuuucagcaccuccuuuuaucugaucucuaucuuccuucaccucgugaaaauuccgugaggacuagucccuguucccagagcccacuuuuuuuucuuuuuuugaaauaaaauagccugucuuucagaucuaaaaaaaaaaaaaaaaaaaaaaaaaaaaaaaaaaaaaaaaaaaaaaaaaaaaaaaaaaaaaaaaaaaaaaaaaaaaaaaaaaaaaaaaaaaaaaaaaaaa

SEQ ID NO: 42526 - RNA, 1629 nt, Artificial Sequence
  mRNA product Design a-2 (A100) comprising derived and/or modified sequence from LASV(G502-SLE-2009;Clade IV)__AIT17126__GPCmut13 (opt5)
aggagaguccgcucagccagguugcagaagcggcuuagcguguguccuaaucuucucucugcguguagguaggccugugccgcaaacaagcuuaccaugggccagaucgugaccuucuuucaagaggucccccacguuauugaagaggugaugaacaucgugcugauugcccucagcauccuggcuguccuuaaggggcuguacaauuucgccacaugcggacucgugggccugcuuacguuucugcuccugugugggagauccugcaccacaggacuguauaaaggcguuuacgaacuccagacccuggagcuuaacauggaaacacugaauaugaccaugccucucucuuguacaaagaacaauagccaucacuauauuaugguggggaacgagaccggacuggagcuuacgcugaccaauacauccaucaucaaccauaaauucugcaaucucucugacgcgcacaagaaaaaccuguacgaucaugcucugaugagcauuaucuccaccuuucaccucucuauuccgaauuucaaccaguaugaagccaugagcugugacuuuaauggcggcaagaucuccguccaguacaaccugagccacucuuaugccggggaugcugccgaccauugcggaacaguggcuaauggcguucuucaaaccuucaugcggauggccuggggaggguccuacauugcgcuggauagcggccgcgggagaugggacuguaucaugacgucuuaccaguaucucauuauccagaacacaaccugggaggaucacugccaguuuucccggcccagcccuaucggauaccugggccuucugucucaacgcacaagagacauuuauaucucccggcgccuccugggcaccuucaccuggacacugagcgauuccgaagggaaggacacgcccggaggcuacugucucaccagauggaugcugauugaggccgagcuuaaaugcuuugggaacacagcuguggccaaguguaaugaaaaacaugaugaggaguucugcgacaugcugcggcucuuugauuucaacaagcaggcuauccagcgccugaaagccgaagcgcagaugucuauucaacuuaucaauaaggccgucaacgcucugaucaaugaccagcucgugaugaagaaccaccugagagacauuaugggaaucccuuauugcaauuacagccgguauugguaccugaaccacaccacaaccggccgcacgucccuccccaaauguuggcuggugagcaaugggucuuaccuuaacgaaacacauuucuccgaugacauugagcagcaagccgauaauaugaucaccgagaugcugcagaaggaauauauggagagacagggaaaaaccccucucggccuggucgaccuguuuguuuucagcacaucuuuuuaccuuauuagcaucuuccuccaccuggugaagaucccgugaggacuagucccuguucccagagcccacuuuuuuuucuuuuuuugaaauaaaauagccugucuuucagaucuaaaaaaaaaaaaaaaaaaaaaaaaaaaaaaaaaaaaaaaaaaaaaaaaaaaaaaaaaaaaaaaaaaaaaaaaaaaaaaaaaaaaaaaaaaaaaaaaaaaa

SEQ ID NO: 42527 - RNA, 1629 nt, Artificial Sequence
  mRNA product Design a-2 (A100) comprising derived and/or modified sequence from LASV(G733-SLE-2010;Clade IV)__AIT17154__GPCmut13 (opt5)
aggagaguccgcucagccagguugcagaagcggcuuagcguguguccuaaucuucucucugcguguagguaggccugugccgcaaacaagcuuaccaugggccagaucgugaccuucuuucaagaggucccccacguuauugaagaggugaugaacaucgugcugauugcccucagcauccuggcuguccuuaaggggcuguacaauuucgccacaugcggaauugugggccucguuuccuuucugcuucugugugggagaucuugcacgaccagccucuauaaaggaguguacgaacugcagacacuggagcucaacauggaaacccugaauaugacaaugccucuuuccuguaccaagaacaauucucaucacuauaucauggucggcaacgagacagggcuggagcucacccugacgaauaccagcaucauuaaccauaaauucugcaaucuuuccgacgcgcacaagaaaaaccuguacgaucaugcucucaugucuaucauuagcacauuucaccuguccaucccgaauuucaaccaguaugaagccaugagcugugacuuuaauggaggcaagauuucugugcaguacaaccugucccacagcuaugccggcgaugcugccaaucauugcgggaccaucgcuaacggaguucuccaaacauucaugcggauggccuggggcgggucuuacauugcgcuggacuccggacgcgauagaugggacuguaucaugaccagcuaccaguaucuuaucauucagaacacgacaugggaggaucacugccaguuuucucggcccuccccuaucggcuaccuggggcuccugagccaacgcaccagagacauuuauaucucccggcgccuucugggaacauucaccuggacccucucugauagcgaaggcaaggacacacccggcggguacugucugacgagauggaugcugauugaggccgagcucaaaugcuuuggaaauaccgcuguggccaaguguaacgaaaaacaugaugaggaguucugcgacaugcugcggcuuuuugauuucaauaagcaggcuauccagcgccugaaagccgaagcgcagauguccauccaacucauuaacaaggccgucaaugcucugaucaacgaccagcuuauuaugaagaaucaccugagagacaucaugggcauuccuuauugcaacuacagcaaauauugguaccucaaucacacaaccacagggaagaccucucugcccaaauguuggcugguguccaacggaagcuaccucaaugaaacgcauuucucugaugacaucgagcagcaagccgauaacaugaucacagagaugcugcagaaggaauauauggagcggcagggcaaaaccccucuugggcugguggaccucuuugucuucagcaccuccuuuuaccugauuucuaucuuccugcaccuuguuaagauuccgugaggacuagucccuguucccagagcccacuuuuuuuucuuuuuuugaaauaaaauagccugucuuucagaucuaaaaaaaaaaaaaaaaaaaaaaaaaaaaaaaaaaaaaaaaaaaaaaaaaaaaaaaaaaaaaaaaaaaaaaaaaaaaaaaaaaaaaaaaaaaaaaaaaaaa

SEQ ID NO: 42528 - RNA, 1629 nt, Artificial Sequence
  mRNA product Design a-2 (A100) comprising derived and/or modified sequence from MOPV/LASV reassortant(IGS-1;Clade IV)__AFY05576__GPCmut13 (opt5)
aggagaguccgcucagccagguugcagaagcggcuuagcguguguccuaaucuucucucugcguguagguaggccugugccgcaaacaagcuuaccaugggccagaucgugaccuucuuucaagaggucccccacguuauugaagaggugaugaacaucgugcugauugcccucagcguccuggcugugcuuaaggggcuguacaauuucgccacaugcggacucguuggccuggugacguuucuucugcucugugggagauccugcaccacaucucuguauaaaggagucuacgaacugcagacccucgagcugaacauggaaacacuuaauaugaccaugccucugagcuguacaaagaacaauucccaucacuauaucauggugggcaacgagaccgggcucgagcugacgcuuaccaauacaucuauuaucaaccauaaauucugcaaucugagcgacgcgcacaagaaaaaccucuacgaucaugcucugauguccaucauuucuaccuuucaccugagcaucccgaauuucaaccaguaugaagccauguccugugacuuuaauggaggcaagauuagcguucaguacaaccucucucacuccuaugccggcgaugcugccaaucauugcgggacaguggcuaacggaguccugcaaaccuucaugcggauggccuggggcgggagcuacaucgcgcuugacucuggacgcggcaacugggauuguauuaugacguccuaccaguaucugaucauucagaauacaaccugggaggaccacugccaguuuagcagacccucuccuaucggguaccucggacugcuuucccaacggacacgcgauaucuauauuagcagacggcugcucggcaccuucaccuggacacuguccgacucugaaggcgaggauacgcccgggggauacugucugacccgcuggaugcucaucgaggccgaacugaagugcuuuggcaacacagcuguggccaaauguaaugagaagcaugacgaagaguucugcgauaugcuuagacuguuugacuucaacaaacaggcuauucagcggcucaaggccgaagcgcagaugagcauccaacugauuaauaaagccgugaacgcucuuaucaaugaucagcugaucaugaagaaccaccuccgcgacauuauggggaucccuuauugcaauuacuccaaguauugguaccugaaccacaccacaaccggaagaacgagccugcccaaauguuggcucgucucuaauggcuccuaccugaacgagacacauuucagcgacgauauugagcagcaagccgacaauaugaucaccgaaaugcuucagaaggaguauauggaacggcaggggaaaaccccucugggacucguugaucuguuuguguucucuaccagcuuuuaccugauuuccaucuuccuucaccucgugaagaucccgugaggacuagucccuguucccagagcccacuuuuuuuucuuuuuuugaaauaaaauagccugucuuucagaucuaaaaaaaaaaaaaaaaaaaaaaaaaaaaaaaaaaaaaaaaaaaaaaaaaaaaaaaaaaaaaaaaaaaaaaaaaaaaaaaaaaaaaaaaaaaaaaaaaaaa

SEQ ID NO: 42529 - RNA, 1629 nt, Artificial Sequence
  mRNA product Design a-2 (A100) comprising derived and/or modified sequence from LASV(LM765-SLE-2012;Clade IV)__AIT17814__GPCmut13 (opt5)
aggagaguccgcucagccagguugcagaagcggcuuagcguguguccuaaucuucucucugcguguagguaggccugugccgcaaacaagcuuaccaugggccagaucgugaccuucuuucaagaggucccccacguuauugaagaggugaugaacaucgugcugauugcccucagcauccuggcuguccuuaaggggcuguacaauuucgccacaugcggacucgugggccugguuacguuucuucugcucugugggagauccugcaccacaucucuguauaaaggaguguacgaacugcagacccucgagcugaacauggaaacacuuaauaugaccaugccucugagcuguacaaagaacaauucccaucacuauauuauggucggcaacgagaccgggcucgagcugacgcuuaccaauacaucuaucaucgaccauaaauucugcaaccugagcgaugcgcaccggaagaaucucuacgaccaugcucugauguccauuaucucuaccuuucaccugagcauuccgaacuucaaucaguaugaagccauguccugugauuuuaacggaggcaaaaucagcgugcaguacaaucucucucacuccuaugccaaggacgcugccgaucauugcggcacaguugcuaacggggugcugcaaaccuucaugcgcauggccuggggaggcagcuacauugcgcuugacucugggagaggacggugggauuguaucaugacguccuaccaguaucugauuauccagaauacaaccugggaggaccacugccaguuuagccgccccucuccuaucggcuaccucgggcugcuuucccaaagaacacgggauauuuauaucagccgcagacugcucggaaccuucaccuggacacuguccgacucugaaggcaaggauacgcccggcggguacugucugacccgguggaugcucauugaggccgagcugaaaugcuuuggaaacacagcugucgccaaguguaacgaaaaacaugacgaggaguucugcgauaugcuucgccuguuugacuucaauaagcaggcuauccagagacucaaagccgaagcgcagaugagcauucaacugaucaacaaggccgugaaugcucuuaucaacgaccagcugauuaugaagaaucaccuccgggauaucaugggcauuccuuauugcaacuacuccaaauauugguaccugaaucacaccacaaccgggaagacgagccugcccaaauguuggcucgugucuaacggauccuaccugaaugaaacacauuucagcgacgauaucgagcagcaagccgacaacaugauuaccgagaugcuucagaaggaauauauggagcgccagggcaaaaccccucuggggcucgucgaucuguuuguuuucucuaccagcuuuuaccugaucuccaucuuccuucaccucgugaagauuccgugaggacuagucccuguucccagagcccacuuuuuuuucuuuuuuugaaauaaaauagccugucuuucagaucuaaaaaaaaaaaaaaaaaaaaaaaaaaaaaaaaaaaaaaaaaaaaaaaaaaaaaaaaaaaaaaaaaaaaaaaaaaaaaaaaaaaaaaaaaaaaaaaaaaaa

SEQ ID NO: 42530 - RNA, 1629 nt, Artificial Sequence
  mRNA product Design a-2 (A100) comprising derived and/or modified sequence from LASV(LM776-SLE-2012;Clade IV)__AIT17824__GPCmut13 (opt5)
aggagaguccgcucagccagguugcagaagcggcuuagcguguguccuaaucuucucucugcguguagguaggccugugccgcaaacaagcuuaccaugggccagaucgugaccuucuuucaagaggucccccacguuauugaagaggugaugaacaucgugcugauugcccucagcauccuggcuguccuuaaggggcuguacaauuucgccacaugcggacucgugggccugguuacguuucuucugcucugugggagauccugcaccacaucuguguauaaaggagucuacgaacugcagacccuggagcucaacauggaaacacugaauaugaccaugccucuuagcuguacaaagaacaauucccaucacuauauuauggugggcaacgagaccgggcuggagcucacgcugaccaauacaucuaucaucaaccauaaauucugcaaucuuagcgacgcgcacaagaaaaaccuguacgaucaugcucucauguccauuaucucuaccuuucaccugagcauuccgaauuucaaccaguaugaagccauguccugugacuuuaauggaggcaagaucagcguucaguacaaccugucucacuccuaugccggcgaugcugccaaucauugcgggacaguggcuaacggaguccuccaaaccuucaugcggauggccuggggcgggagcuacauugcgcuggacucuggacacggcaagugggauuguaucaugacguccuaccaguaucuuauuauccagaacacaaccugggaggaccauugccaguuuagccgccccucuccuaucggguaccugggacuccugucccaaagaacacgggauauuuauaucagccgcagacuucugggcaccuucaccuggacacucuccgacucugaaggcaaagauacgcccgggggauacugucugacccgguggaugcugauugaggccgagcucaagugcuuuggcaauacagcuguggccaaauguaacgaaaagcacgacgaggaguucugcgauaugcugcgccuuuuugacuucaauaaacaggcuauccagagacugaaggccgaagcgcagaugagcauucaacucaucaacaaggccgugaaugcucugaucaacgaucagcuuauuaugaaaaaucaucugcgggacaucauggggauuccuuauugcaacuacuccaaguauugguaccucaaucacaccacaaccggaaaaacgagccugcccaaguguuggcuggucucuaacggcuccuaccucaaugaaacacacuucagcgacgauaucgagcagcaagccgacaacaugauuaccgagaugcugcagaaagaauauauggagcgccaggggaagaccccucuuggacugguugaucucuuuguguucucuaccagcuuuuaccugaucuccaucuuccugcaucuugugaaaauuccgugaggacuagucccuguucccagagcccacuuuuuuuucuuuuuuugaaauaaaauagccugucuuucagaucuaaaaaaaaaaaaaaaaaaaaaaaaaaaaaaaaaaaaaaaaaaaaaaaaaaaaaaaaaaaaaaaaaaaaaaaaaaaaaaaaaaaaaaaaaaaaaaaaaaaa

SEQ ID NO: 42531 - RNA, 1629 nt, Artificial Sequence
  mRNA product Design a-2 (A100) comprising derived and/or modified sequence from LASV(Mad39;Clade IV)__ANH09722__GPCmut13 (opt5)
aggagaguccgcucagccagguugcagaagcggcuuagcguguguccuaaucuucucucugcguguagguaggccugugccgcaaacaagcuuaccaugggccagaucgugaccuucuuucaagaggucccccacguuauugaagaggugaugaacaucgugcugauugcccucagcauccuggcuguccuuaaggggcuguacaauguggccacaugcggacucauuggccugguuacguuccuucugcucugugggagauccugcaccacaacccuguauaaaggaguguacgaacugcaggcgcucgagcugaacauggaaacacuuaauaugaccaugccucugucuuguacaaagaacaauagccaucacuauauccgggucggcaacgagaccgggcucgagcugacgcuuaccaauacaucccugaucaaccauaaauuuugcaaucucucugacgcucacaagaaaaaccuguacgaucaugcccugaugagcauuaucuccaccuuccaccucucuauuccgaauuuuaaccaguaugaagccaugagcugugacuucaaugauggaaagaucuccgugcaguacaaccugagccacacauaugcuggcgacaccgccaaucauugcggcacgguugcuaacggggugcuucaaacauuuaugcgcauggccuggggaggcucuuacauugcgcuggauuccgggagaggaggcugggacuguaucaugaccagcuaccaguaucucauuauccagaacacaaccugggaggaucacugccaguucucucggcccuccccuaucggguaccugggacuucugagccaacgcaccagagacauuuauaucucucggcgccuccugggcacauuuacguggacccuguccgauagcgaaggcaaggacacacccgggggauacugucucaccagauggaugcugauugaggccgagcuuaaaugcuucggcaauacagcugucgccaaguguaacgaaaaacaugaugaggaauuuugcgacaugcugcgccucuucgauuuuaauaagcaggcuauccagcggcugaaagccgaggcgcagauguccauucaacuuaucaacaaggccgugaaugcucugaucaacgaccagcucauuaugaagaaucaccugagagacaucauggggauuccuuauugcaacuacucuaaauauugguaccugaaucacaccgugacgggaaagacaagccuccccaaauguuggcuggucuccaacggcagcuaccuuaaugaaacccauuucucugaugacaucgagcagcaagccgauaacaugauuaccgagaugcugcagaaggaauauauggagcggcaggggaaaacaccucucggacugguugaccuguucguguuuuccaccagcuucuaccuuaucucuaucuuucuccaccuggugaagauuccgugaggacuagucccuguucccagagcccacuuuuuuuucuuuuuuugaaauaaaauagccugucuuucagaucuaaaaaaaaaaaaaaaaaaaaaaaaaaaaaaaaaaaaaaaaaaaaaaaaaaaaaaaaaaaaaaaaaaaaaaaaaaaaaaaaaaaaaaaaaaaaaaaaaaaa

SEQ ID NO: 42532 - RNA, 1629 nt, Artificial Sequence
  mRNA product Design a-2 (A100) comprising derived and/or modified sequence from LASV(Z0947-SLE-2011;Clade IV)__AIT17840__GPCmut13 (opt5)
aggagaguccgcucagccagguugcagaagcggcuuagcguguguccuaaucuucucucugcguguagguaggccugugccgcaaacaagcuuaccaugggccagaucgugaccuucuuucaagaggucccccacguuauugaagaggugaugaacaucgugcugauugcccucagcauccuggcuguccuuaaggggcuguacaauuucgccacaugcggacucgugggccugguuacguuucuucugcucugugggagauccugcaccauuucucuguauaaaggaguguacgaacugcagacacucgagcugaacauggaaacccuuaauaugacaaugccucugagcuguaccaagaacaauucccaucacuauaucauggucggcaacgagacagggcucgagcugacccuuacgaauaccucuaucauuaaccauaaauucugcaaucugagcgacgcgcacaagaaaaaccucuacgaucaugcucugauguccaucauuucuacauuucaccugagcaucccgaauuucaaccaguaugaagccauguccugugacuuuaauggaggcaagauuagcgugcaguacaaccucucucacuccuaugccggcgaugcugccaaucauugcgggaccguugcuaacggagugcugcaaacauucaugcggauggccuggggcgggagcuacaucgcgcuugacucuggacgcgauagaugggacuguauuaugaccuccuaccaguaucugaucauccagaacacgacaugggaggaucacugccaguuuagccggcccucuccuauuggcuaccucgggcugcuuucccaacgcaccagagacaucuauauuagccggcgccugcucggaacauucaccuggacccuguccgauucugaaggcaaggacacacccggcggguacugucugacgagauggaugcucaucgaggccgagcugaaaugcuuuggaaauaccgcugucgccaaguguaacgaaaaacaugaugaggaguucugcgacaugcuucggcuguuugauuucaauaagcaggcuauucagcgccucaaagccgaagcgcagaugagcauccaacugaucaacaaggccgugaaugcucuuauuaacgaccagcugaucaugaagaaucaccucagagacauuaugggcaucccuuauugcaacuacuccaaauauugguaccugaaucacacaaccacagggaagaccagccugcccaaauguuggcucgugucuaacggauccuaccugaaugaaacgcauuucagcgaugacauugagcagcaagccgauaacaugaucacagagaugcuucagaaggaauauauggagcggcagggcaaaaccccucuggggcucgucgaccuguuuguuuucucuaccagcuuuuaccugaucuccauuuuccuucaccucgugaagaucccgugaggacuagucccuguucccagagcccacuuuuuuuucuuuuuuugaaauaaaauagccugucuuucagaucuaaaaaaaaaaaaaaaaaaaaaaaaaaaaaaaaaaaaaaaaaaaaaaaaaaaaaaaaaaaaaaaaaaaaaaaaaaaaaaaaaaaaaaaaaaaaaaaaaaaa

SEQ ID NO: 42533 - RNA, 1667 nt, Artificial Sequence
  mRNA product Design b-4 (hSL-A64-N5) comprising derived and/or modified sequence from LASV(Josiah;Clade IV)__NP_694870__GPCmut13 (opt1)
aggagagucccgcagucggcguccagcggcucugcuuguucgugugugugucguugcaggccuuauucaagcuuaccaugggccagaucgugaccuucuuccaggaggucccccacgugaucgaggaggugaugaacaucguccugaucgcccucagcgugcuggccgugcugaaggggcucuacaacuucgcgaccugcggccuggucgggcuggugacguuccuccugcugugcggccgcuccugcaccaccagccucuacaaggggguguacgagcugcagacccuggagcucaacauggagacgcugaacaugaccaugccgcuguccugcaccaagaacaacagccaccacuacaucauggucggcaacgagaccggccucgagcugacgcugaccaacaccuccaucaucaaccacaaguucugcaaccucagcgacgcccacaagaagaaccuguacgaccacgcccugauguccaucaucagcaccuuccaccucuccauccccaacuucaaccaguacgaggccaugagcugcgacuucaacgggggcaagaucuccgugcaguacaaccugagccacuccuacgccggggacgcggccaaccacugcggcacgguggccaacgggguccugcagaccuucaugcggauggccuggggcggcagcuacaucgcgcucgacuccgggcgcggcaacugggacugcaucaugaccagcuaccaguaccugaucauccagaacaccacgugggaggaccacugccaguucucccggcccagccccaucggguaccugggccuccugucccagcgcacccgggacaucuacaucagccgccggcugcucggcaccuucaccuggacgcugagcgacuccgaggggaaggacaccccgggcggguacugccugacccgcuggaugcucaucgaggccgagcugaagugcuucggcaacaccgccguggccaagugcaacgagaagcacgacgaggaguucugcgacaugcugcggcuguucgacuucaacaagcaggccauccagcgccugaaggcggaggcccagaugagcauccagcugaucaacaaggccgugaacgcccucaucaacgaccagcugaucaugaagaaccaccuccgggacaucauggggauccccuacugcaacuacuccaaguacugguaccucaaccacacgaccaccggccgcaccagccugcccaagugcuggcuggucuccaacggcagcuaccucaacgagacgcacuucuccgacgacaucgagcagcaggccgacaacaugaucaccgagaugcugcagaaggaguacauggagcggcaggggaagacgccccugggccucguggaccuguucguguucagcaccuccuucuaccugaucagcaucuuccugcaccucgucaagaucccgugaggacuaguaauaaggaaacuguaugaaugucugugggcaggaagugaagagauccuucuguaaagguuuuuggaauuaugucugcugaauaauaaacuuuuuugaaauaauaaaucugguagaaaaaugagaucucaaaggcucuuuucagagccaccaaaaaaaaaaaaaaaaaaaaaaaaaaaaaaaaaaaaaaaaaaaaaaaaaaaaaaaaaaaaaaaaagaauu

SEQ ID NO: 42534 - RNA, 1664 nt, Artificial Sequence
  mRNA product Design b-4 (hSL-A64-N5) comprising derived and/or modified sequence from LASV(LP;Clade I)__AAF86701__GPCmut13 (opt1)
aggagagucccgcagucggcguccagcggcucugcuuguucgugugugugucguugcaggccuuauucaagcuuaccaugggccagaucaucaccuucuuccaggaggugccccacgucaucgaggaggugaugaacaucgugcugaucgcccucagccugcuggccauccucaaggggcuguacaacaucgcgaccugcggcaucaucgggcuggucgccuuccucuuccugugcggcaaguccugcagccugacgcucaagggcggguacgagcugcagacccuggagcucaacauggagacccugaacaugaccaugccgcuguccugcacgaagaacagcucccaccacuacauccgcgugggcaacgagaccgggcucgagcugacccugaccaacacgagcaucaucaaccacaaguucugcaaccucuccgacgcccacaagaagaaccuguacgaccacgcccugaugagcaucaucuccaccuuccaccucagcauccccaacuucaaccaguacgaggccauguccugcgacuucaacggcgggaagaucagcgugcaguacaaccugucccacagcuacgcgggcgacgccgccgagcacugcgggaccgucgccaacggcgugcugcagaccuucaugcggauggcguggggcgggcgcuacaucgcccucgacuccggcaaggggaacugggacugcaucaugacgagcuaccaguaccugaucauccagaacaccaccugggaggaccacugccaguucucccggcccagccccaucggcuaccugggccuccugucccagcgcacccgggacaucuacaucagccgccggcugcucgggacguucaccuggacccugagcgacuccgagggcaacgagacccccgggggcuacugccugacgcgcuggaugcucaucgaggccgagcugaagugcuucgggaacaccgccguggccaagugcaacgagaagcacgacgaggaguucugcgacaugcugcggcuguucgacuucaacaagcaggcgauccgccggcugaaggccgaggcccagaugagcauccagcugaucaacaaggccgucaacgcccucaucaacgaccagcugaucaugaagaaccaccuccgcgacaucaugggcauccccuacugcaacuacuccaaguacugguaccucaaccacaccagcuccggccggaccagccugcccaagugcuggcugaucuccaacgggagcuaccucaacgagacgcaguucuccgacgacaucgagcagcaggcggacaacaugaucaccgagaugcugcagaaggaguacaucgagcgccagggcaagaccccgcuggggcucguggacaucuucaucuucagcaccuccuucuaccugaucagcaucuuccugcaccugaucaagaucccgugaggacuaguaauaaggaaacuguaugaaugucugugggcaggaagugaagagauccuucuguaaagguuuuuggaauuaugucugcugaauaauaaacuuuuuugaaauaauaaaucugguagaaaaaugagaucucaaaggcucuuuucagagccaccaaaaaaaaaaaaaaaaaaaaaaaaaaaaaaaaaaaaaaaaaaaaaaaaaaaaaaaaaaaaaaaaagaauu

SEQ ID NO: 42535 - RNA, 1664 nt, Artificial Sequence
  mRNA product Design b-4 (hSL-A64-N5) comprising derived and/or modified sequence from LASV(803213;Clade II)__AAF86703__GPCmut13 (opt1)
aggagagucccgcagucggcguccagcggcucugcuuguucgugugugugucguugcaggccuuauucaagcuuaccaugggccagaucaucaccuucuuccaggaggugccccacgucaucgaggaggugaugaacaucgugcugaucgcccucagccugcuggccauccucaaggggaucuacaacgucgcgaccugcggccuguucgggcugaucuccuuccuccugcugugcggccgcagcugcuccgugacguacaaggggguguacgagcuccagacccuggagcugaacauggccaaccucaacaugaccaugccgcugagcugcaccaagaacaacucccaccacuacaucauggucggcaacgagacgggccuggagcucacccugaccaacaccagcaucaucaaccacaaguucugcaaccuguccgacgcccacaagaagaaccucuacgaccacgcccugaugagcaucaucuccacguuccaccugagcauccccaacuucaaccaguacgaggccauguccugcgacuucaacgggggcaagaucagcgugcaguacaaccucucccacagcuucgcgguggacgccgccaaccacugcgggaccaucgccaacggcguccugcagaccuucaugcggauggcguggggcggguccuacaucgcccuggacagcggcaaggggaacugggacugcaucaugaccuccuaccaguaccucaucauccagaacacgaccugggaggaccacugccaguucagccgccccucccccaucggcuaccuggggcugcucagccagcggacccgcgacaucuacaucagccggcgccugcugggcaccuucacguggacccucuccgacagcgagggcaacgaggcccccgggggcuacugccugacccgguggaugcugaucgaggccgagcucaagugcuucgggaacaccgccguggcgaagugcaacgagaagcacgacgaggaguucugcgacaugcugcgccuguucgacuucaacaagcaggccaucaagcggcucaagacggaggcccagauguccauccagcugaucaacaaggccgugaacgcccugaucaacgaccagcucaucaugaagaaccaccuccgcgacaucaugggcauccccuacugcaacuacagccgguacugguaccugaaccacaccgucaccgggaagaccucccugccccgcugcuggcuggugagcaacggcuccuaccugaacgagacgcacuucagcgacgacaucgagcagcaggcggacaacaugaucaccgagaugcuccagaaggaguacauggaccggcagggcaagaccccgcuggggcugguggaccucuucgucuucuccaccagcuucuaccugaucuccaucuuccugcaccuggugaagaucccgugaggacuaguaauaaggaaacuguaugaaugucugugggcaggaagugaagagauccuucuguaaagguuuuuggaauuaugucugcugaauaauaaacuuuuuugaaauaauaaaucugguagaaaaaugagaucucaaaggcucuuuucagagccaccaaaaaaaaaaaaaaaaaaaaaaaaaaaaaaaaaaaaaaaaaaaaaaaaaaaaaaaaaaaaaaaaagaauu

SEQ ID NO: 42536 - RNA, 1664 nt, Artificial Sequence
  mRNA product Design b-4 (hSL-A64-N5) comprising derived and/or modified sequence from LASV(GA391;Clade III)__CAA36645__GPCmut13 (opt1)
aggagagucccgcagucggcguccagcggcucugcuuguucgugugugugucguugcaggccuuauucaagcuuaccaugggccagaucgugaccuucuuccaggaggucccccacgugaucgaggaggugaugaacaucguccugaucgcccucagcauccuggccauccugaaggggcucuacaacguggcgaccugcggccugaucgggcuggugacguuccuccugcuguccggccgcagcugcucccucaucuacaaggggaccuacgagcugcagacccuggagcucaacauggagacccugaacaugacgaugccgcugagcugcaccaagaacaacucccaccacuacauccgggucggcaacgagaccggccucgagcugacccugacgaacaccagcauccucaaccacaaguucugcaaccuguccgacgcccacaagcgcaaccuguacgaccacagccucauguccaucaucagcaccuuccaccuguccauccccaacuucaaccaguacgaggccaugagcugcgacuucaacgggggcaagaucaccgugcaguacaaccugucccacagcuucgccguggacgccgcggggcacugcggcacgcucgccaacgggguccugcagaccuucaugcggauggccuggggcggcuccuacaucgcccuggacagcgggcgcggcaacugggacugcaucaugaccuccuaccaguaccucaucauccagaacaccacgugggacgaccacugccaguucagccggcccucccccaucggguaccugggccugcucagccagcgcacccgggacaucuacaucagccgccggcugcugggcaccuucaccuggacgcucuccgacagcgaggggaacgagaccccgggcggguacugccugacccgcuggaugcugaucgaggcggagcucaagugcuucggcaacaccgccguggccaagugcaacgagaagcacgacgaggaguucugcgacaugcugcggcuguucgacuucaacaagcaggccauccgccggcucaagacggaggcccagauguccauccagcugaucaacaaggcggugaacgcccugaucaacgaccagcucaucaugaagaaccaccuccgcgacaucauggggauccccuacugcaacuacagccgguacugguaccugaaccacaccuccaccggcaagaccagccugccccgcugcuggcugaucuccaacggcagcuaccugaacgagacgaaguucuccgacgacaucgagcagcaggccgacaacaugaucaccgagaugcuccagaaggaguacaucgaccggcaggggaagacgccccugggccuggucgaccuguucguguucagcaccuccuucuaccucaucagcaucuuccugcaccuggugaagaucccgugaggacuaguaauaaggaaacuguaugaaugucugugggcaggaagugaagagauccuucuguaaagguuuuuggaauuaugucugcugaauaauaaacuuuuuugaaauaauaaaucugguagaaaaaugagaucucaaaggcucuuuucagagccaccaaaaaaaaaaaaaaaaaaaaaaaaaaaaaaaaaaaaaaaaaaaaaaaaaaaaaaaaaaaaaaaaagaauu

SEQ ID NO: 42537 - RNA, 1667 nt, Artificial Sequence
  mRNA product Design b-4 (hSL-A64-N5) comprising derived and/or modified sequence from LASV(AV;Clade V)__CCA30314__GPCmut13 (opt1)
aggagagucccgcagucggcguccagcggcucugcuuguucgugugugugucguugcaggccuuauucaagcuuaccaugggccagaucgugaccuucuuccaggaggucccccacgugaucgaggaggugaugaacaucguccugaucgcccucagcauccuggccgugcugaaggggcucuacaacaucgcgaccugcggccugaucgggcugaucacguuccuccugcugugcggccgcuccugcagcuccaaccucuacaaggggguguacgagcugcagagccuggaccucaacauggagacccugaacaugaccaugccgcuguccugcaccaagaacaacagccaccacuacauccgggucggcaacgacacgggccucgagcugacccugaccaacaccuccauccucaaccacaaguucugcaaccugagcgacgcccacaagaaggaccuguacgaccacgcccucauguccaucaucagcacguuccaccuguccauccccaacuucaaccaguacgaggccaugagcugcgacuucaacgggggcaagaucuccgugcaguacaaccugagccacuccuacgccaucgacgcggccaaccacugcgggaccguggccaacggcauccuccagaccuucaugcgcauggccuggggcgggagcuacaucgcgcuggacuccggccgggggaacugggacugcaucaugaccagcuaccaguaccugaucauccagaacacgaccugggagaaccacugccaguucucccgccccagccccaucggcuaccucgggcugcugagccagcggacccgcgacaucuacaucucccggcgccuccugggcaccuucacguggacccugagcgacuccgagggcaacgccacccccgggggcuacugccucacccgguggaugcugaucgaggccgagcugaagugcuucgggaacacggccgucgccaagugcaacgagaagcacgacgaggaguucugcgacaugcuccgccuguucgacuucaacaagcaggcgaucagccggcugaaguccgaggcccagaugagcauccagcucaucaacaaggccgugaacgcccugaucaacgaccagcugaucaugaagaaccaccuccgcgacaucaugggcauccccuacugcaacuacuccaaguacugguaccugaaccacaccaucaccgggaagaccagccugcccaagugcuggcucguguccaacggcagcuaccugaacgagacgcacuucuccgacgacaucgagcagcaggccgacaacaugaucaccgagaugcugcagaaggaguacauggagcggcagggcaagaccccgcucgggcuggucgaccuguucguguucagcaccuccuucuaccugaucagcaucuuccuccgccuggugaagaucccgugaggacuaguaauaaggaaacuguaugaaugucugugggcaggaagugaagagauccuucuguaaagguuuuuggaauuaugucugcugaauaauaaacuuuuuugaaauaauaaaucugguagaaaaaugagaucucaaaggcucuuuucagagccaccaaaaaaaaaaaaaaaaaaaaaaaaaaaaaaaaaaaaaaaaaaaaaaaaaaaaaaaaaaaaaaaaagaauu

SEQ ID NO: 42538 - RNA, 1664 nt, Artificial Sequence
  mRNA product Design b-4 (hSL-A64-N5) comprising derived and/or modified sequence from LASV(Togo/2016/7082;Clade VI)__AMR44577__GPCmut13 (opt1)
aggagagucccgcagucggcguccagcggcucugcuuguucgugugugugucguugcaggccuuauucaagcuuaccaugggccagaucaucaccuucuuccaggaggugccccacgucaucgaggaggugaugaacaucgugcugaucgcccucagccugcuggccauccucaagggggucuacaacguggcgaccugcggcaucaucgggcuggugacguuccuguuccucugcggccgcuccugcagccugaucuacaagggguccuacgagcugcagacccucgagcugaacauggagacccugaacaugaccaugccgcucagcugcacgaagaacuccagccaccacuacauccgggucggcaacgagaccggccuggagcugacccucaccaacacguccaucaucaaccacaaguucugcaaccugagcgacgcccacaagcgcaaccuguacgaccacgcccucauguccauccugagcaccuuccaccuguccauccccaacuucaaccaguacgaggccaugagcugcgacuucaacgggggcaagaucuccgugcaguacaaccucagccacgccuacgcgguggacgccgccgagcacugcgggaccgucgccaacggcgugcugcagaccuucaugcggauggcguggggcggguccuacaucgcccuggacagcggccgcgggaacugggacugcaucaugacguccuaccaguaccucaucauccagaacaccaccugggaggaccacugccaguucagccggcccucccccaucggcuaccuggggcugcucagccagcgcacccgggacaucuacaucagccgccggcugcugggcacguucaccuggacccucuccgacagcgagggcaacgagacccccgggggcuacugccugacgcgcuggaugcugaucgaggccgagcucaagugcuucgggaacaccgccguggccaagugcaacgagaagcacgacgaggaguucugcgacaugcugcggcuguucgacuucaacaagcaggcgauccagcgccucaaguccgaggcccagaugagcauccagcugaucaacaaggccgucaacgcccugaucaacgaccagcucaucaugaagaaccaccuccgggacaugaugggcauccccuacugcaacuacuccaaguacugguaccugaaccacaccagcuccgggcgcaccagccugcccaagugcuggcugguguccaacggcagcuaccugaacgagacgcacuucuccgacgacaucgagcagcaggccgacaacaugaucaccgagaugcuccagaaggaguacaucgaccggcagggcaagaccccgcuggggcugguggaccucuucgucuucagcaccuccuucuaccugaucagcaucuuccugcaccugaucaagaucccgugaggacuaguaauaaggaaacuguaugaaugucugugggcaggaagugaagagauccuucuguaaagguuuuuggaauuaugucugcugaauaauaaacuuuuuugaaauaauaaaucugguagaaaaaugagaucucaaaggcucuuuucagagccaccaaaaaaaaaaaaaaaaaaaaaaaaaaaaaaaaaaaaaaaaaaaaaaaaaaaaaaaaaaaaaaaaagaauu

SEQ ID NO: 42539 - RNA, 1664 nt, Artificial Sequence
  mRNA product Design b-4 (hSL-A64-N5) comprising derived and/or modified sequence from LASV(KAK-428;Clade n.d. (VII))__ANH09740__GPCmut13 (opt1)
aggagagucccgcagucggcguccagcggcucugcuuguucgugugugugucguugcaggccuuauucaagcuuaccaugggccagaucgugaccuucuuccaggaggucccccacgugaucgaggaggugaugaacaucguccugaucgcccucagccugcuggccauccucaaggggcuguacaacuucgcgaccugcggcgugaucgggcugaucacguuccuccugcugugcggccgcuccugcagcgccaccuacaaggggcaguacgagcuccagacccuggagcugaacauggagucccucaacaugaccaugccgcugagcugcacgaagaacaacucccaccacuacauccgggccggcaacaacaccggccuggagcucacccugaccaacacgagcaucaucucccacaaguucugcaaccugagcgacgcccacaagaagaaccucuacgaccacacccugauguccaucaucaccaccuuccaccugagcauccccaacuucaaccaguacgaggccauguccugcgacuucaacgggggcaagaucagcauccaguacaaccucucccacagcuacgcgggggacgccgcccagcacugcggcacgguggccaacgggguccugcagaccuucaugcgcauggcguggggcggcuccuaccuggcccucgacagcgggcggcgcggcugggacugcaucaucuccagcuaccaguaccugaucauccagaacaccaccugggacgaccacugccaguucucccggcccagccccaucggguaccugggcuucgugagccagaagacgcgcgacaucuacaucucccggcgccuccugggcaccuucaccuggacccugagcgacuccgaggggcacgacaugccgggcggguacugccucacgcgguggaugcugaucgaggccgaccugaagugcuucggcaacaccgccguggccaagugcaacgagaagcacgacgaggaguucugcgacauguggcgccucuucgacuucaacaagcaggcgauccagcggcugaaggccgaggcccagaugaacauccagcugaucaacaaggccgucaacgcccucaucaacgaccagcugaugaugaagaaccaccuccgcgacaucauggggauccccuacugcaacuacagcaaguucugguaccugaacaacaccaccacgggccggaccucccugccccgcugcuggcugaucagcaacggcuccuaccucaacgagacccacuucagcgacgacaucgagcagcaggcggacaacaugaucaccgagaugcugcagaaggaguacauggaccggcaggggaagacgccccugggccucguggaccuguucguguucuccaccagcuucuaccugaucaccaucuuccuccaccuggucaagaucccgugaggacuaguaauaaggaaacuguaugaaugucugugggcaggaagugaagagauccuucuguaaagguuuuuggaauuaugucugcugaauaauaaacuuuuuugaaauaauaaaucugguagaaaaaugagaucucaaaggcucuuuucagagccaccaaaaaaaaaaaaaaaaaaaaaaaaaaaaaaaaaaaaaaaaaaaaaaaaaaaaaaaaaaaaaaaaagaauu

SEQ ID NO: 42540 - RNA, 1664 nt, Artificial Sequence; identical to SEQ ID NO: 42534
  mRNA product Design b-4 (hSL-A64-N5) comprising derived and/or modified sequence from LASV(Pinneo-NIG-1969;Clade I)__AIT17836__GPCmut13 (opt1)

SEQ ID NO: 42541 - RNA, 1664 nt, Artificial Sequence
  mRNA product Design b-4 (hSL-A64-N5) comprising derived and/or modified sequence from LASV(ISTH0009-NIG-2011;Clade II)__AIT17404__GPCmut13 (opt1)
aggagagucccgcagucggcguccagcggcucugcuuguucgugugugugucguugcaggccuuauucaagcuuaccaugggccagaucaucaccuucuuccaggaggugccccacgucaucgaggaggugaugaacaucgugcugaucgcccucagccugcuggccauccucaaggggaucuacaacgucgcgaccugcggccuguucgggcugguguccuuccuccugcugugcggccgcagcugcuccacgaccuacaaggggguguacgagcuccagacccuggagcuggacauggccagccucaacaugaccaugccgcuguccugcacgaagaacaacagccaccacuacaucauggucggcaacgagaccggccuggagcucacccugaccaacacguccaucaucaaccacaaguucugcaaccugagcgacgcccacaagaagaaccucuacgaccacgcccugauguccaucaucagcaccuuccaccuguccauccccaacuucaaccaguacgaggccaugagcugcgacuucaacgggggcaagaucuccgugcaguacaaccucagccacgcguacgccguggacgccgccaaccacugcgggaccaucgcgaacggcguccugcagaccuucaugcggauggccuggggcggguccuacaucgcccuggacagcggcaagggguccugggacugcaucaugacgagcuaccaguaccucaucauccagaacaccaccugggaggaccacugccaguucucccgccccagccccaucggcuaccuggggcugcucagccagcggacccgcgacaucuacaucucccggcgccugcugggcacguucaccuggacccucagcgacuccgagggcaacgagacccccgggggcuacugccugacgcgguggaugcugaucgaggccgagcucaagugcuucgggaacaccgccguggcgaagugcaacgagaagcacgacgaggaguucugcgacaugcugcgccuguucgacuucaacaagcaggccauccggcgccucaagaccgaggcccagaugagcauccagcugaucaacaaggccgugaacgcccugaucaacgaccagcucaucaugaagaaccaccuccgggacaucaugggcaucccguacugcaacuacuccaaguacugguaccugaaccacaccgucacggggaagaccagccugccccgcugcuggcugguguccaacggcagcuaccugaacgagacccacuucuccgacgacaucgagcagcaggcggacaacaugaucaccgagcuccugcagaaggaguacauggaccggcagggcaagacgccccuggggcucguggaccuguucgucuucagcaccuccuucuaccugaucagcaucuuccugcaccucaucaagaucccgugaggacuaguaauaaggaaacuguaugaaugucugugggcaggaagugaagagauccuucuguaaagguuuuuggaauuaugucugcugaauaauaaacuuuuuugaaauaauaaaucugguagaaaaaugagaucucaaaggcucuuuucagagccaccaaaaaaaaaaaaaaaaaaaaaaaaaaaaaaaaaaaaaaaaaaaaaaaaaaaaaaaaaaaaaaaaagaauu

SEQ ID NO: 42542 - RNA, 1664 nt, Artificial Sequence
  mRNA product Design b-4 (hSL-A64-N5) comprising derived and/or modified sequence from LASV(ISTH2010-NIG-2012;Clade II)__AIT17482__GPCmut13 (opt1)
aggagagucccgcagucggcguccagcggcucugcuuguucgugugugugucguugcaggccuuauucaagcuuaccaugggccagaucaucaccuucuuccaggaggugccccacgucaucgaggaggugaugaacaucgugcugaucgcccucagccugcuggccauccucaaggggaucuacaacgucgcgaccugcggccuguucgggcugguguccuuccuccugcugugcggccgcagcugcuccacgaccuacaaggggguguacgagcuccagacccuggagcuggacauggccagccucaacaugaccaugccgcuguccugcacgaagaacaacagccaccacuacaucauggucggcaacgagaccggccuggagcucacccugaccaacacguccaucaucaaccacaaguucugcaaccugagcgacgcccacaagaagaaccucuacgaccacgcccugauguccaucaucagcaccuuccaccuguccauccccaacuucaaccaguacgaggccaugagcugcgacuucaacgggggcaagaucuccgugcaguacaaccucagccacgcguacgccguggacgccgccaaccacugcgggaccaucgcgaacggcguccugcagaccuucaugcggauggccuggggcggguccuacaucgcccuggacagcggcaagggguccugggacugcaucaugacgagcuaccaguaccucaucauccagaacaucaccugggaggaccacugccaguucucccgccccagccccaucggcuaccuggggcugcucagccagcggacccgcgacaucuacaucucccggcgccugcugggcaccuucacguggacccucagcgacuccgagggcaacgagacccccgggggcuacugccugacccgguggaugcugaucgaggccgagcucaagugcuucgggaacacggccguggcgaagugcaacgagaagcacgacgaggaguucugcgacaugcugcgccuguucgacuucaacaagcaggccauccggcgccucaagaccgaggcccagaugagcauccagcugaucaacaaggccgugaacgcccugaucaacgaccagcucaucaugaagaaccaccuccgggacaucaugggcauccccuacugcaacuacuccaaguacugguaccugaaccacaccgucaccgggaagacgagccugccccgcugcuggcugguguccaacggcagcuaccugaacgagacccacuucuccgacgacaucgagcagcaggcggacaacaugaucaccgagcuccugcagaaggaguacaucgaccggcagggcaagaccccgcuggggcucguggaccuguucgucuucagcacguccuucuaccugaucagcaucuuccugcaccucgugaagaucccgugaggacuaguaauaaggaaacuguaugaaugucugugggcaggaagugaagagauccuucuguaaagguuuuuggaauuaugucugcugaauaauaaacuuuuuugaaauaauaaaucugguagaaaaaugagaucucaaaggcucuuuucagagccaccaaaaaaaaaaaaaaaaaaaaaaaaaaaaaaaaaaaaaaaaaaaaaaaaaaaaaaaaaaaaaaaaagaauu

SEQ ID NO: 42543 - RNA, 1664 nt, Artificial Sequence
  mRNA product Design b-4 (hSL-A64-N5) comprising derived and/or modified sequence from LASV(Lassa virus/H.sapiens-wt/NGA/2015/ISTH_0543;Clade II)__AVO03639__GPCmut13 (opt1)
aggagagucccgcagucggcguccagcggcucugcuuguucgugugugugucguugcaggccuuauucaagcuuaccaugggccagaucaucaccuucuuccaggaggugccccacgucaucgaggaggugaugaacaucgugcugaucgcccucagccugcuggccauccucaaggggaucuacaacgucgcgaccugcggccuguucgggcugguguccuuccuccugcugugcggccgcagcugcuccacgaccuacaaggggguguacgagcuccagacccuggagcuggacauggccaaccucaacaugaccaugccgcugagcugcacgaagaacaacucccaccacuacaucauggucggcaacgagaccggccuggagcucacccugaccaacacgagcaucaucaaccacaaguucugcaaccuguccgacgcccacaagaagaaccucuacgaccacgcccugaugagcaucaucuccaccuuccaccugagcauccccaacuucaaccaguacgaggccauguccugcgacuucaacgggggcaagaucagcgugcaguacaaccucucccacaccuacgcgguggacgccgccaaccacugcgggaccaucgccaacggcguccugcagacguucaugcggauggcguggggcgggagcuacaucgcccuggacuccggcaaggggagcugggacugcaucaugaccuccuaccaguaccucgugauccagaacaccaccugggaggaccacugccaguucagccgccccucccccaucggcuaccuggggcugcucagccagcggacgcgcgacaucuacaucagccggcgccugcugggcaccuucaccuggacccucuccgacagcgagggcaacgagacgcccgggggcuacugccugacccgguggaugcugaucgaggccgagcucaagugcuucgggaacaccgccguggccaagugcaacgagaagcacgacgaggaguucugcgacaugcugcgccuguucgacuucaacaagcaggcgauccggcgccucaagaccgaggcccagauguccauccagcugaucaacaaggccgucaacgcccugaucaacgaccagcucaucaugaagaaccaccuccgggacaucaugggcauccccuacugcaacuacagcaaguacugguaccugaaccacacggugaccgggaagaccucccugccccgcugcuggcuggugagcaacggcuccuaccugaacgagacccacuucagcgacgacaucgagcagcaggccgacaacaugaucacggagcuccugcagaaggaguacaucgaccggcagggcaagaccccgcuggggcucgucgaccuguucguguucuccaccagcuucuaccugaucuccaucuuccugcaccucgugaagaucccgugaggacuaguaauaaggaaacuguaugaaugucugugggcaggaagugaagagauccuucuguaaagguuuuuggaauuaugucugcugaauaauaaacuuuuuugaaauaauaaaucugguagaaaaaugagaucucaaaggcucuuuucagagccaccaaaaaaaaaaaaaaaaaaaaaaaaaaaaaaaaaaaaaaaaaaaaaaaaaaaaaaaaaaaaaaaaagaauu

SEQ ID NO: 42544 - RNA, 1664 nt, Artificial Sequence
  mRNA product Design b-4 (hSL-A64-N5) comprising derived and/or modified sequence from LASV(Lassa virus/H.sapiens-wt/NGA/2016/ISTH_0009;Clade II)__AVO03571__GPCmut13 (opt1)
aggagagucccgcagucggcguccagcggcucugcuuguucgugugugugucguugcaggccuuauucaagcuuaccaugggccagaucaucaccuucuuccaggaggugccccacgucaucgaggaggugaugaacaucgugcugaucgcccucagccugcuggccauccucaaggggaucuacaacgucgcgaccugcggccugcuggggcucguguccuuccugcugcucugcggccgcagcugcuccacgaccuacaaggggguguacgagcugcagacccuggagcucgacauggccagccugaacaugaccaugccgcuguccugcacgaagaacaacagccaccacuacaucauggucggcaacgagaccggccucgagcugacccugaccaacacguccaucaucaaccacaaguucugcaaccucagcgacgcccacaagaagaaccuguacgaccacgcccugauguccaucaucagcaccuuccaccucuccauccccaacuucaaccaguacgaggccaugagcugcgacuucaacgggggccggaucuccgugcaguacaaccugagccacuccuacgcgguggacgccgccaaccacugcgggaccaucgccaacggcguccugcagaccuucaugcgcauggcguggggcgggagcuacaucgcccucgacuccggcaaggggagcugggacugcaucaugacguccuaccaguaccugaucauccagaacaccaccugggaggaccacugccaguucagccggcccagccccaucggcuaccuggggcuccugucccagcgcacccgggacaucuacaucagccgccggcugcucggcacguucaccuggacccuguccgacagcgagggcaacgagacccccgggggcuacugccugacgcgcuggaugcucaucgaggccgagcugaagugcuucgggaacaccgccguggccaagugcaacgagaagcacgacgaggaguucugcgacaugcugcggcuguucgacuucaacaagcaggcgauccgccggcugaagaccgaggcccagauguccauccagcugaucaacaaggccgugaacgcccucaucaacgaccagcugaucaugaagaaccaccuccgcgacaucaugggcaucccguacugcaacuacagcaaguacugguaccucaaccacaccgucacggggaagaccucccugccccggugcuggcuggugagcaacggcuccuaccucaacgagacccacuucagcgacgacaucgagcagcaggccgacaacaugaucaccgagcugcugcagaaggaguacaucgaccgccagggcaagacgccccucgggcugguggaccuguucgucuucuccaccagcuucuaccugaucuccaucuuccuccaccuggugaagaucccgugaggacuaguaauaaggaaacuguaugaaugucugugggcaggaagugaagagauccuucuguaaagguuuuuggaauuaugucugcugaauaauaaacuuuuuugaaauaauaaaucugguagaaaaaugagaucucaaaggcucuuuucagagccaccaaaaaaaaaaaaaaaaaaaaaaaaaaaaaaaaaaaaaaaaaaaaaaaaaaaaaaaaaaaaaaaaagaauu

SEQ ID NO: 42545 - RNA, 1664 nt, Artificial Sequence
  mRNA product Design b-4 (hSL-A64-N5) comprising derived and/or modified sequence from LASV(Lassa virus/H.sapiens-wt/NGA/2016/ISTH_0017;Clade II)__AVO03567__GPCmut13 (opt1)
aggagagucccgcagucggcguccagcggcucugcuuguucgugugugugucguugcaggccuuauucaagcuuaccaugggccagaucaucaccuucuuccaggaggugccccacgucaucgaggaggugaugaacaucgugcugaucgcccucagccugcuggccauccucaaggggaucuacaacgucgcgaccugcggccuguucgggcugguguccuuccuccugcugugcggccgcagcugcuccacgaccuacaaggggguguacgagcuccagacccuggagcuggacauggccagccucaacaugaccaugccgcuguccugcacgaagaacaacagccaccacuacaucauggucggcaacgagaccggccuggagcucacccugaccaacacguccaucaucaaccacaaguucugcaaccugagcgacgcccacaagaagaaccucuacgaccacgcccugauguccaucaucagcaccuuccaccuguccauccccaacuucaaccaguacgaggccaugagcugcgacuucaacgggggcaagaucuccgugcaguacaaccucagccacaccuacgcgaucgacgccgccaaccacugcgggaccaucgccaacggcgugcugcagacguucaugcggauggcguggggcggguccuacaucgcccuggacagcggcaagggguccugggacugcaucaugaccagcuaccaguaccucaucauccagaacaccaccugggaggaccacugccaguucucccgccccagccccaucggcuaccuggggcugcucagccagcggacgcgcgacaucuacaucucccggcgccugcugggcaccuucaccuggacccucagcgacuccgagggcaacgagacgcccgggggcuacugccugacccgguggaugcugaucgaggccgagcucaagugcuucgggaacaccgccgucgccaagugcaacgagaagcacgacgaggaguucugcgacaugcugcgccuguucgacuucaacaagcaggcgauccggcgccucaagaccgaggcccagaugagcauccagcugaucaacaaggccgugaacgcccugaucaacgaccagcucaucaugaagaaccaccuccgggacaucaugggcauccccuacugcaacuacuccaaguacugguaccugaaccacacggugaccgggaagaccagccugccccgcugcuggcuggucuccaacggcagcuaccugaacgagacccacuucuccgacgacaucgagcagcaggccgacaacaugaucacggagcuccugcagaaggaguacauggaccggcagggcaagaccccgcuggggcucguggaccuguucguguucagcaccuccuucuaccugaucagcaucuuccugcaccucguccgcaucccgugaggacuaguaauaaggaaacuguaugaaugucugugggcaggaagugaagagauccuucuguaaagguuuuuggaauuaugucugcugaauaauaaacuuuuuugaaauaauaaaucugguagaaaaaugagaucucaaaggcucuuuucagagccaccaaaaaaaaaaaaaaaaaaaaaaaaaaaaaaaaaaaaaaaaaaaaaaaaaaaaaaaaaaaaaaaaagaauu

SEQ ID NO: 42546 - RNA, 1664 nt, Artificial Sequence
  mRNA product Design b-4 (hSL-A64-N5) comprising derived and/or modified sequence from LASV(Lassa virus/H.sapiens-wt/NGA/2018/ISTH_0959;Clade II)__AVV65099__GPCmut13 (opt1)
aggagagucccgcagucggcguccagcggcucugcuuguucgugugugugucguugcaggccuuauucaagcuuaccaugggccagaucaucaccuucuuccaggaggugccccacgucaucgaggaggugaugaacaucgugcugaucgcccucagccugcuggccauccucaaggggaucuacaacgucgugaccugcggccuguucgggcugguguccuuccuccugcugugcggccgcagcugcuccacgaccuacaagggggucuacgagcuccagacccuggagcuggacauggcgagccucaacaugaccaugccgcuguccugcacgaagaacaacagccaccacuacaucauggugggcaacgagaccggccuggagcucacccugaccaacacguccaucaucaaccacaaguucugcaaccugagcgacgcccacaagaagaaccucuacgaccacgcccugauguccaucaucagcaccuuccaccuguccauccccaacuucaaccaguacgaggccaugagcugcgacuucaacgggggcaagaucuccgugcaguacaaccucagccacgccuacgcgaucgacgccgccaaccacugcgggaccaucgccaacggcguccugcagaccuucaugcggauggcguggggcggguccuacaucgcccuggacagcggcaagggguccugggacugcaucaugacgagcuaccaguaccucaucauccagaacaccaccugggaggaccacugccaguucucccgccccagccccaucggcuaccuggggcugcucagccagcggacccgcgacaucuacaucucccggcgccugcugggcacguucaccuggacccucagcgacuccgagggcaacgagacccccgggggcuacugccugacgcgguggaugcugaucgaggccgagcucaagugcuucgggaacaccgccguggccaagugcaacgagaagcacgacgaggaguucugcgacaugcugcgccuguucgacuucaacaagcaggcgauccggcgccucaagaccgaggcccagaugagcauccagcugaucaacaaggccgugaacgcccugaucaacgaccagcucaucaugaagaaccaccuccgggacaucaugggcaucccguacugcaacuacuccaaguacugguaccugaaccacaccgucacggggaagaccagccugccccgcugcuggcugguguccaacggcagcuaccugaacgagacccacuucuccgacgacaucgagcagcaggccgacaacaugaucaccgagcuccugcagaaggaguacaucgaccggcagggcaagacgccccuggggcucguggaccuguucgucuucagcaccuccuucuaccugaucagcaucuuccugcaccucgugaagaucccgugaggacuaguaauaaggaaacuguaugaaugucugugggcaggaagugaagagauccuucuguaaagguuuuuggaauuaugucugcugaauaauaaacuuuuuugaaauaauaaaucugguagaaaaaugagaucucaaaggcucuuuucagagccaccaaaaaaaaaaaaaaaaaaaaaaaaaaaaaaaaaaaaaaaaaaaaaaaaaaaaaaaaaaaaaaaaagaauu

SEQ ID NO: 42547 - RNA, 1664 nt, Artificial Sequence
  mRNA product Design b-4 (hSL-A64-N5) comprising derived and/or modified sequence from LASV(LASV003-NIG-2008;Clade II)__AIT17580__GPCmut13 (opt1)
aggagagucccgcagucggcguccagcggcucugcuuguucgugugugugucguugcaggccuuauucaagcuuaccaugggccagaucaucaccuucuuccaggaggugccccacgucaucgaggaggugaugaacaucgugcugaucgcccucagccugcuggccauccucaaggggaucuacaacgucgcgaccugcggccuguucgggcugguguccuuccuccugcugugcggccgcagcugcuccacgaccuacaaggggguguacgagcuccagacccuggagcuggacauggccagccucaacaugaccaugccgcuguccugcacgaagaacaacagccaccacuacaucauggucggcaacgagaccggccuggagcucacccugaccaacacguccaucaucaaccacaaguucugcaaccugagcgacgcccacaagaagaaccucuacgaccacgcccugauguccaucaucagcaccuuccaccuguccauccccaacuucaaccaguacgaggccaugagcugcgacuucaacgggggcaagaucuccgugcaguacaaccucagccacaccuacgcgguggacgccgccaaccacugcgggaccaucgccaacggcguccugcagacguucaugcggauggcguggggcggguccuacaucgcccuggacagcggcaagggguccugggacugcaucaugaccagcuaccaguaccucaucauccagaacaccaccugggaggaccacugccaguucucccgccccagccccaucggcuaccuggggcugcucagccagcggacgcgcgacaucuacaucucccggcgccugcugggcaccuucaccuggacccucagcgacuccgagagcaacgagacgccgggcggguacugccugacccgguggaugcugaucgaggccgagcucaagugcuucggcaacaccgccguggccaagugcaacgagaagcacgacgaggaguucugcgacaugcugcgccuguucgacuucaacaagcaggcgauccggcgccucaaggccgaggcccagauguccauccagcugaucaacaaggccgugaacgcccugaucaacgaccagcucaucaugaagaaccaccuccgggacaucauggggauccccuacugcaacuacagcaaguacugguaccugaaccacaccgucacgggccgcaccucccugccccggugcuggcuggugagcaacggguccuaccugaacgagacccacuucagcgacgacaucgagcagcaggcggacaacaugaucaccgagcuccugcagaaggaguacauggaccgccagggcaagacgccccugggccucguggaccuguucgucuucuccaccagcuucuaccugaucuccaucuuccugcaccucgugaagaucccgugaggacuaguaauaaggaaacuguaugaaugucugugggcaggaagugaagagauccuucuguaaagguuuuuggaauuaugucugcugaauaauaaacuuuuuugaaauaauaaaucugguagaaaaaugagaucucaaaggcucuuuucagagccaccaaaaaaaaaaaaaaaaaaaaaaaaaaaaaaaaaaaaaaaaaaaaaaaaaaaaaaaaaaaaaaaaagaauu

SEQ ID NO: 42548 - RNA, 1664 nt, Artificial Sequence
  mRNA product Design b-4 (hSL-A64-N5) comprising derived and/or modified sequence from LASV(LASV035-NIG-2009;Clade II)__AIT17588__GPCmut13 (opt1)
aggagagucccgcagucggcguccagcggcucugcuuguucgugugugugucguugcaggccuuauucaagcuuaccaugggccagaucaucaccuucuuccaggaggugccccacgucaucgaggaggugaugaacaucgugcugaucgcccucagccugcuggccauccucaaggggaucuacaacgucgcgaccugcggccuguucgggcugguguccuuccuccugcugugcggccgcagcugcuccacgaccuacaaggggguguacgagcuccagacccuggagcuggacauggccagccucaacaugaccaugccgcuguccugcacgaagaacaacagccaccacuacaucauggucggcaacgagaccggccuggagcucacccugaccaacacguccaucaucaaccacaaguucugcaaccugagcgacgcccacaagaagaaccucuacgaccacgcccugauguccaucaucagcaccuuccaccuguccauccccaacuucaaccaguacgaggccaugagcugcgacuucaacgggggcaagaucuccgugcaguacaaccucagccacgcguacgccguggacgccgccaaccacugcgggaccaucgcgaacggcguccugcagaccuucaugcggauggccuggggcggguccuacaucgcccuggacagcggcaagggguccugggacugcaucaugacgagcuaccaguaccucaucauccagaacaccaccugggaggaccacugccaguucucccgccccagccccaucggcuaccuggggcugcucagccagcggacccgcgacaucuacaucucccggcgccugcugggcacguucaccuggacccucagcgacuccgagggcaacgagacccccgggggcuacugccugacgcgguggaugcugaucgaggccgagcucaagugcuucgggaacaccgccguggcgaagugcaacgagaagcacgacgaggaguucugcgacaugcugcgccuguucgacuucaacaagcaggccauccggcgccucaaggccgaggcccagaugagcauccagcugaucaacaaggccgugaacgcgcugaucaacgaccagcucaucaugaagaaccaccuccgggacaucaugggcauccccuacugcaacuacuccaaguacugguaccugaaccacaccgucaccgggaagacgagccugccccgcugcuggcugguguccaacggcagcuaccugaacgagacccacuucuccgacgacaucgagcagcaggccgacaacaugaucaccgagcuccugcagaaggaguacaucgaccggcagggcaagaccccgcuggggcucguggaccuguucgucuucagcacguccuucuaccugaucagcaucuuccugcaccucgugaagaucccgugaggacuaguaauaaggaaacuguaugaaugucugugggcaggaagugaagagauccuucuguaaagguuuuuggaauuaugucugcugaauaauaaacuuuuuugaaauaauaaaucugguagaaaaaugagaucucaaaggcucuuuucagagccaccaaaaaaaaaaaaaaaaaaaaaaaaaaaaaaaaaaaaaaaaaaaaaaaaaaaaaaaaaaaaaaaaagaauu

SEQ ID NO: 42549 - RNA, 1664 nt, Artificial Sequence
  mRNA product Design b-4 (hSL-A64-N5) comprising derived and/or modified sequence from LASV(LASV1000-NIG-2009;Clade II)__AIT17782__GPCmut13 (opt1)
aggagagucccgcagucggcguccagcggcucugcuuguucgugugugugucguugcaggccuuauucaagcuuaccaugggccagaucaucaccuucuuccaggaggugccccacgucaucgaggaggugaugaacaucgugcugaucgcccucagccugcuggccauccucaaggggaucuacaacgucgcgaccugcggccuguucgggcugguguccuuccuccugcugugcggccgcagcugcuccacgaccuacaaggggguguacgagcuccagacccuggagcuggacauggccagccucaacaugaccaugccgcuguccugcacgaagaacaacagccaccacuacaucauggucggcaacgagaccggccuggagcucacccugaccaacacguccaucaucaaccacaaguucugcaaccugagcgacgcccacaagaagaaccucuacgaccacgcccugauguccaucaucagcaccuuccaccuguccauccccaacuucaaccaguacgaggccaugagcugcgacuucaacgggggcaagaucuccgugcaguacaaccucagccacaccuacgcgguggacgccgccaaccacugcgggaccaucgccaacggcguccugcagacguucaugcggauggcguggggcggguccuacaucgcccuggacagcggcaagggguccugggacugcaucaugaccagcuaccaguaccucaucauccagaacaccaccugggaggaccacugccaguucucccgccccagccccaucggcuaccuggggcugcucagccagcggacgcgcgacaucuacaucucccggcgccugcugggcaccuucaccuggacccucagcgacuccgagggcaacgagacgcccgggggcuacugccugacccgguggaugcugaucgaggccgagcucaagugcuucgggaacaccgccguggccaagugcaacgagaagcacgacgaggaguucugcgacaugcugcgccuguucgacuucaacaagcaggcgaucaagcggcucaagaccgaggcccagaugagcauccagcugaucaacaaggccgugaacgcccugaucaacgaccagcucaucaugaagaaccaccuccgcgacaucaugggcauccccuacugcaacuacuccaaguacugguaccugaaccacacggucaccgggaagaccagccugccccggugcuggcugguguccaacggcagcuaccugaacgagacccacuucuccgacgacaucgagcagcaggccgacaacaugaucacggagcuccugcagaaggaguacaucgaccgccagggcaagaccccgcuggggcucguggaccuguucgucuucagcaccuccuucuaccugaucagcaucuuccugcaccucgugaagaucccgugaggacuaguaauaaggaaacuguaugaaugucugugggcaggaagugaagagauccuucuguaaagguuuuuggaauuaugucugcugaauaauaaacuuuuuugaaauaauaaaucugguagaaaaaugagaucucaaaggcucuuuucagagccaccaaaaaaaaaaaaaaaaaaaaaaaaaaaaaaaaaaaaaaaaaaaaaaaaaaaaaaaaaaaaaaaaagaauu

SEQ ID NO: 42550 - RNA, 1664 nt, Artificial Sequence
  mRNA product Design b-4 (hSL-A64-N5) comprising derived and/or modified sequence from LASV(LASV221-NIG-2010;Clade II)__AIT17624__GPCmut13 (opt1)
aggagagucccgcagucggcguccagcggcucugcuuguucgugugugugucguugcaggccuuauucaagcuuaccaugggccagaucaucaccuucuuccaggaggugccccacgucaucgaggaggugaugaacaucgugcugaucgcccucagccugcuggccauccucaaggggaucuacaacgucgcgaccugcggccuguucgggcugguguccuuccuccugcugugcggccgcagcugcuccacgaccuacaaggggguguacgagcuccagacccuggagcuggacauggccagccucaacaugaccaugccgcuguccugcacgaagaacaacagccaccacuacaucauggucggcaacgagaccggccuggagcucacccugaccaacacguccaucaucaaccacaaguucugcaaccugagcgacgcccacaagaagaaccucuacgaccacgcccugauguccaucaucagcaccuuccaccuguccauccccaacuucaaccaguacgaggccaugagcugcgacuucaacgggggcaagaucuccgugcaguacaaccucagccacaccuacgcgaucgacgccgccaaccacugcgggaccaucgccaacggcgugcugcagacguucaugcggauggcguggggcggguccuacaucgcccuggacagcggcaagggguccugggacugcaucaugaccagcuaccaguaccucaucauccagaacaccaccugggaggaccacugccaguucucccgccccagccccaucggcuaccuggggcugcucagccagcggacgcgcgacaucuacaucucccggcgccugcugggcaccuucaccuggacccucagcgacuccgagggcaacgagacgcccgggggcuacugccugacccgguggaugcugaucgaggccgagcucaagugcuucgggaacaccgccgucgccaagugcaacgagaagcacgacgaggaguucugcgacaugcugcgccuguucgacuucaacaagcaggcgauccggcgccucaagaccgaggcccagaugagcauccagcugaucaacaaggccgugaacgcccugaucaacgaccagcucaucaugaagaaccaccuccgggacaucaugggcauccccuacugcaacuacuccaaguacugguaccugaaccacacggugaccgggaagaccagccugccccgcugcuggcuggucuccaacggcagcuaccugaacgagacccacuucuccgacgacaucgagcagcaggccgacaacaugaucacggagaugcuccagaaggaguacauggaccggcagggcaagaccccgcuggggcugguggaccucuucguguucagcaccuccuucuaccugaucagcaucuuccugcaccuggucaagaucccgugaggacuaguaauaaggaaacuguaugaaugucugugggcaggaagugaagagauccuucuguaaagguuuuuggaauuaugucugcugaauaauaaacuuuuuugaaauaauaaaucugguagaaaaaugagaucucaaaggcucuuuucagagccaccaaaaaaaaaaaaaaaaaaaaaaaaaaaaaaaaaaaaaaaaaaaaaaaaaaaaaaaaaaaaaaaaagaauu

SEQ ID NO: 42551 - RNA, 1664 nt, Artificial Sequence
  mRNA product Design b-4 (hSL-A64-N5) comprising derived and/or modified sequence from LASV(LASV237-NIG-2010;Clade II)__AIT17638__GPCmut13 (opt1)
aggagagucccgcagucggcguccagcggcucugcuuguucgugugugugucguugcaggccuuauucaagcuuaccaugggccagaucaucaccuucuuccaggaggugccccacgucaucgaggaggugaugaacaucgugcugaucgcccucagccugcuggccauccucaaggggaucuacaacgucgcgaccugcggccuguucgggcugguguccuuccuccugcugugcggccgcagcugcuccacgaccuacaaggggguguacgagcuccagacccuggagcuggacauggccagccucaacaugaccaugccgcuguccugcacgaagaacaacagccaccacuacaucauggucggcaacgagaccggccuggagcucacccugaccaacacguccaucaucaaccacaaguucugcaaccugagcgacgcccacaagaaggaccucuacgaccacgcccugauguccaucaucagcaccuuccaccuguccauccccaacuucaaccaguacgaggccaugagcugcgacuucaacgggggcaagaucuccgugcaguacaaccucagccacaccuacgcgguggacgccgccaaccacugcgggaccaucgccaacggcguccugcagacguucaugcggauggcguggggcggguccuacaucgcccuggacagcggcaagggguccugggacugcaucaugaccagcuaccaguaccucaucauccagaacaccaccugggaggaccacugccaguucucccgccccagccccaucggcuaccuggggcugcucagccagcggacgcgcgacaucuacaucucccggcgccugcugggcaccuucaccuggacccucagcgacuccgagggcaacgagacgcccgggggcuacugccugacccgguggaugcugaucgaggccgagcucaagugcuucgggaacaccgccguggccaagugcaacgagaagcacgacgaggaguucugcgacaugcugcgccuguucgacuucaacaagcaggcgauccggcgccucaagaccgaggcccagaugagcauccagcugaucaacaaggccgugaacgcccugaucaacgaccagcucaucaugaagaaccaccuccgggacaucaugggcauccccuacugcaacuacuccaaguacugguaccugaaccacacggucaccgggaagaccagccugccccgcugcuggcugguguccaacggcagcuaccugaacgagacccacuucuccgacgacaucgagcagcaggccgacaacaugaucacggagcuccugcagaaggaguacauggaccggcagggcaagaccccgcuggggcucguggaccuguucgucuucagcaccuccuucuaccugaucagcaucuuccugcaccucaucaagaucccgugaggacuaguaauaaggaaacuguaugaaugucugugggcaggaagugaagagauccuucuguaaagguuuuuggaauuaugucugcugaauaauaaacuuuuuugaaauaauaaaucugguagaaaaaugagaucucaaaggcucuuuucagagccaccaaaaaaaaaaaaaaaaaaaaaaaaaaaaaaaaaaaaaaaaaaaaaaaaaaaaaaaaaaaaaaaaagaauu

SEQ ID NO: 42552 - RNA, 1664 nt, Artificial Sequence
  mRNA product Design b-4 (hSL-A64-N5) comprising derived and/or modified sequence from LASV(LASV253-NIG-2011;Clade II)__AIT17670__GPCmut13 (opt1)
aggagagucccgcagucggcguccagcggcucugcuuguucgugugugugucguugcaggccuuauucaagcuuaccaugggccagaucaucaccuucuuccaggaggugccccacgucaucgaggaggugaugaacaucgugcugaucgcccucagccugcuggccauccucaaggggaucuacaacgucgcgaccugcggccuguucgggcugguguccuuccuccugcugugcggccgcagcugcuccacgaccuacaaggggguguacgagcuccagacccuggagcuggacauggccagccucaacaugaccaugccgcuguccugcacgaagaacaacagccaccacuacaucauggucggcaacgagaccggccuggagcucacccugaccaacacguccaucaucaaccacaaguucugcaaccugagcgacgcccacaagaagaaccucuacgaccacgcccugauguccaucaucagcaccuuccaccuguccauccccaacuucaaccaguacgaggccaugagcugcgacuucaacgggggcaagaucuccgugcaguacaaccucagccacaccuacgcgguggacgccgccaaccacugcgggaccaucgccaacggcguccugcagacguucaugcggauggcguggggcggguccuacaucgcccuggacagcggcaagggguccugggacugcaucaugaccagcuaccaguaccucaucauccagaacaccaccugggaggaccacugccaguucucccgccccagccccaucggcuaccuggggcugcucagccagcggacgcgcgacaucuacaucucccggcgccugcugggcaccuucaccuggacccucagcgacuccgagggcaacgagacgcccgggggcuacugccugacccgguggaugcugaucgaggccgagcucaagugcuucgggaacaccgccguggccaagugcaacgagaagcacgacgaggaguucugcgacaugcugcgccuguucgacuucaacaagcaggcgauccggcgccucaaggccgaggcccagaugagcauccagcugaucaacaaggccgugaacgcccugaucaacgaccagcucaucaugaagaaccaccuccgggacaucaugggcaucccguacugcaacuacuccaaguacugguaccugaaccacaccgucacggggcgcaccagccugccccggugcuggcugguguccaacggcagcuaccugaacgagacccacuucuccgacgacaucgagcagcaggcggacaacaugaucaccgagcuccugcagaaggaguacaucgaccgccagggcaagacgccccuggggcucguggaccuguucgucuucagcaccuccuucuaccugaucagcaucuuccugcaccucgugaagaucccgugaggacuaguaauaaggaaacuguaugaaugucugugggcaggaagugaagagauccuucuguaaagguuuuuggaauuaugucugcugaauaauaaacuuuuuugaaauaauaaaucugguagaaaaaugagaucucaaaggcucuuuucagagccaccaaaaaaaaaaaaaaaaaaaaaaaaaaaaaaaaaaaaaaaaaaaaaaaaaaaaaaaaaaaaaaaaagaauu

SEQ ID NO: 42553 - RNA, 1664 nt, Artificial Sequence
  mRNA product Design b-4 (hSL-A64-N5) comprising derived and/or modified sequence from LASV(LASV254-NIG-2011;Clade II)__AIT17674__GPCmut13 (opt1)
aggagagucccgcagucggcguccagcggcucugcuuguucgugugugugucguugcaggccuuauucaagcuuaccaugggccagaucaucaccuucuuccaggaggugccccacgucaucgaggaggugaugaacaucgugcugaucgcccucagccugcuggccauccucaaggggaucuacaacgucgcgaccugcggccuguucgggcugguguccuuccuccugcugugcggccgcagcugcuccacgaccuacaaggggguguacgagcuccagacccuggagcuggacaugaccaaccucaacaugacgaugccgcugagcugcaccaagaacaacucccaccacuacaucauggucggcaacgagaccggccuggagcucacccugacgaacaccagcaucaucaaccacaaguucugcaaccuguccgacgcccacaagaagaaccucuacaaccacgcccugaugagcaucaucuccaccuuccaccugagcauccccaacuucaaccaguacgaggccauguccugcgacuucaacgggggcaagaucagcgugcaguacaaccucucccacagcuacgccguggacgcggccaaccacugcgggaccaucgccaacggcguccugcagacguucaugcggauggccuggggcggguccuacaucgcgcuggacagcggcaaggggaacugggacugcaucaugaccuccuaccaguaccucaucauccagaacaccaccugggaggaccacugccaguucagccgccccucccccaucggcuaccuggggcugcucagccagcggacgcgcgacaucuacaucagccggcgccugcugggcaccuucaccuggacccucuccgacagcgagggcaacgagacgcccgggggcuacugccugacccgguggaugcugaucgaggccgagcucaagugcuucgggaacaccgccguggccaagugcaacgagaagcacgacgaggaguucugcgacaugcugcgccuguucgacuucaacaagcaggccauccggcgccucaagaccgaggcgcaggccaacauccagcugaucaacaaggccgugaacgcccugaucaacgaccagcucaucaugaagaaccaccuccgggacaucaugggcauccccuacugcaacuacuccaaguacugguaccugaaccacacggucaccgggaagaccagccugccccgcugcuggcugguguccaacggcagcuaccugaacgagacccacuucuccgacgacaucgagcagcaggccgacaacaugaucacggagcuccugcagaaggaguacauggaccggcagggcaagaccccgcuggggcucguggaccuguucgucuucagcaccuccuucuaccugaucagcaucuuccugcaccucgugaagaucccgugaggacuaguaauaaggaaacuguaugaaugucugugggcaggaagugaagagauccuucuguaaagguuuuuggaauuaugucugcugaauaauaaacuuuuuugaaauaauaaaucugguagaaaaaugagaucucaaaggcucuuuucagagccaccaaaaaaaaaaaaaaaaaaaaaaaaaaaaaaaaaaaaaaaaaaaaaaaaaaaaaaaaaaaaaaaaagaauu

SEQ ID NO: 42554 - RNA, 1664 nt, Artificial Sequence
  mRNA product Design b-4 (hSL-A64-N5) comprising derived and/or modified sequence from LASV(Nig08-A19;Clade III)__ADU56618__GPCmut13 (opt1)
aggagagucccgcagucggcguccagcggcucugcuuguucgugugugugucguugcaggccuuauucaagcuuaccaugggccagaucgugaccuucuuccaggaggucccccacgugaucgaggaggugaugaacaucguccugaucgcccucagcauccuggccauccugaaggggcucuacaacaucgcgaccugcggccugaucgggcuggugacguuccuccugcuguccggccgcagcugcuccaugaccuacaaggggguguacgagcuccagacccuggagcugaacaugaacacccucaacaugacgaugccgcugagcugcaccaagaacaacucccaccacuacaucauggucggcaacgagaccggccuggagcucacccugacgaacaccagccugcuccaccacaaguucugcaaccuguccgacgcccacaagaagaaccuguacgaccacacccucaugagcaucaucuccaccuuccaccugagcauccccaacuucaaccaguacgaggccauguccugcgacuucaacgggggcaagaucacggugcaguacaaccugagccacuccuacgccaucgacgccgcgaaccacugcgggaccguggccaacggcguccuccagaccuucaugcggauggccuggggcgggagcuacaucgcccuggacuccggccgcgggaagugggacugcaucaugaccagcuaccaguaccugaucauccagaacacgaccugggaggaccacugccaguucucccggcccagccccaucggcuaccucgggcugcugucccagcgcacccgggacaucuacaucagccgccggcuccugggcaccuucacguggacccugagcgacuccgagggcaacgagacccccgggggcuacugccucacccgcuggaugcugaucgaggcggagcugaagugcuucgggaacacggccguggccaagugcaacgagaagcacgacgaggaguucugcgacaugcuccggcuguucgacuucaacaagcaggccauccgccggcugaaggccgaggcgcagaugagcauccagcucaucaacaaggccgugaacgcccugaucaacgaccagcugaucaugaagaaccaccuccgcgacaucaugggcauccccuacugcaacuacuccaaguacugguaccugaaccacaccagcaccgggcggaccucccugccccgcugcuggcucgucagcaacggcuccuaccugaacgagacgcacuucagcgacgacaucgagcagcaggccgacaacaugaucaccgagaugcugcagaaggaguaccucgaccggcagggcaagaccccgcuggggcugguggaccuguucguguucuccaccagcuucuaccucaucuccaucuuccugcaccuggucaagaucccgugaggacuaguaauaaggaaacuguaugaaugucugugggcaggaagugaagagauccuucuguaaagguuuuuggaauuaugucugcugaauaauaaacuuuuuugaaauaauaaaucugguagaaaaaugagaucucaaaggcucuuuucagagccaccaaaaaaaaaaaaaaaaaaaaaaaaaaaaaaaaaaaaaaaaaaaaaaaaaaaaaaaaaaaaaaaaagaauu

SEQ ID NO: 42555 - RNA, 1667 nt, Artificial Sequence
  mRNA product Design b-4 (hSL-A64-N5) comprising derived and/or modified sequence from LASV(G1180-SLE-2010;Clade IV)__AIT17168__GPCmut13 (opt1)
aggagagucccgcagucggcguccagcggcucugcuuguucgugugugugucguugcaggccuuauucaagcuuaccaugggccagaucgugaccuucuuccaggaggucccccacgugaucgaggaggugaugaacaucguccugaucgcccucagcauccuggccgugcugaaggggcucuacaacuucgcgaccugcggccugguggggcugcucaccuuccugcugcucugcggccgcuccugcaccgccagccgguacaagggggucuacgagcugcagacccuggagcucaacauggagacccugaacaugacgaugccgcuguccugcaccaagaacaacagccaccacuacaucauggugggcaacgagaccggccucgagcugacccugacgaacaccuccaucaucaaccacaaguucugcaaccucagcgacgcccacaagaagaaccuguacgaccacgcccugauguccaucaucagcaccuuccaccucuccauccccaacuucaaccaguacgaggccaugagcugcgacuucaacgggggcaagaucuccgugcaguacaaccugagccacuccuacgcgggggacgccgccaaccacugcggcaccgucgccaacggggugcugcagacguucaugcgcauggcguggggcggcagcuacaucgcccucgacuccgggcacggcagcugggacugcaucaugaccuccuaccaguaccugaucauccagaacaccaccugggaggaccacugccaguucagccggcccucccccaucggguaccugggccuccugagccagcgcacgcgggacaucuacaucagccgccggcugcucggcaccuucaccuggacccuguccgacagcgaggggaaggacacgccgggcggguacugccugacccgcuggaugcucaucgaggccgagcugaagugcuucggcaacaccgccguggccaagugcaacgagaagcacgacgaggaguucugcgacaugcugcggcuguucgacuucaacaagcaggcgauccagcgccugaaggccgaggcccagauguccauccagcugaucaacaaggccgucaacgcccucaucaacgaccagcugaucaugaagaaccaccuccgggacaucauggggauccccuacugcaacuacagcaaguacugguaccucaaccacaccacgaccggcaagaccucccugcccaagugcuggcuggugagcaacggcuccuaccucaacgagacccacuucagcgacgacaucgagcagcaggcggacaacaugaucacggagaugcugcagaaggaguacauggagcgccaggggaagacgccccugggccucguggaccuguucgucuucuccaccagcuucuaccugaucuccaucuuccugcaccucgugaagaucccgugaggacuaguaauaaggaaacuguaugaaugucugugggcaggaagugaagagauccuucuguaaagguuuuuggaauuaugucugcugaauaauaaacuuuuuugaaauaauaaaucugguagaaaaaugagaucucaaaggcucuuuucagagccaccaaaaaaaaaaaaaaaaaaaaaaaaaaaaaaaaaaaaaaaaaaaaaaaaaaaaaaaaaaaaaaaaagaauu

SEQ ID NO: 42556 - RNA, 1667 nt, Artificial Sequence
  mRNA product Design b-4 (hSL-A64-N5) comprising derived and/or modified sequence from LASV(G1442-SLE-2011;Clade IV)__AIT17180__GPCmut13 (opt1)
aggagagucccgcagucggcguccagcggcucugcuuguucgugugugugucguugcaggccuuauucaagcuuaccaugggccagaucgugaccuucuuccaggaggucccccacgugaucgaggaggugaugaacaucguccugaucgcccucagcauccuggccgugcugaaggggcucuacaacguggcgaccugcggccugaucgggcuggucacguuccuccugcugugcggccgcuccugcaccaccacccucuacaaggggguguacgagcugcagacgcuggagcucaacauggagacccugaacaugaccaugccgcugagcugcaccaagaacaacucccaccacuacauccgggugggcaacgagacgggccucgagcugacccugaccaacaccagcaucaucaaccacaaguucugcaaccucuccgacgcccacaagaagaaccuguacgaccacgcccugaugagcaucaucuccacguuccaccucagcauccccaacuucaaccaguacgaggccauguccugcgacuucaacgggggcaagaucagcguccaguacaaccugucccacagcuacgccggggacgcggccaaccacugcggcaccguggccaacggggugcugcagaccuucaugcgcauggccuggggcggcuccuacaucgcgcucgacagcgggcggggcaacugggacugcaucaugaccuccuaccaguaccugaucauccagaacacgaccugggacgaccacugccaguucagccgccccucccccaucggguaccugggccuccugagccagcggacccgcgacgucuacaucucccggcgccugcucggcaccuucacguggacccugagcgacagcgaggggaaggacaccccgggcggguacugccugacccgguggaugcucaucgaggccgagcugaagugcuucggcaacacggccguggccaagugcaacgagaagcacgacgaggaguucugcgacaugcugcgccucuucgacuucaacaagcaggccauccagcggcugaaggcggaggcccagauguccauccagcugaucaacaaggccgugaacgcccucaucaacgaccagcugaucaugaagaaccaccuccgcgacaucauggggauccccuacugcaacuacagcaaguacugguaccugaacaacaccgccaccggcaagaccucccugcccaagugcuggcugaucagcaacggcuccuaccucaacgagacgcacuucagcgacgacaucgagcaggaggcggacaacaugaucaccgagaugcugcagaaggaguacauggagcggcaggggaagacgccccugggccucgucgaccuguucguguucuccaccagcuucuaccugaucuccaucuuccugcaccucgugaagaucccgugaggacuaguaauaaggaaacuguaugaaugucugugggcaggaagugaagagauccuucuguaaagguuuuuggaauuaugucugcugaauaauaaacuuuuuugaaauaauaaaucugguagaaaaaugagaucucaaaggcucuuuucagagccaccaaaaaaaaaaaaaaaaaaaaaaaaaaaaaaaaaaaaaaaaaaaaaaaaaaaaaaaaaaaaaaaaagaauu

SEQ ID NO: 42557 - RNA, 1667 nt, Artificial Sequence
  mRNA product Design b-4 (hSL-A64-N5) comprising derived and/or modified sequence from LASV(G3010-SLE-2013;Clade IV)__AIT17344__GPCmut13 (opt1)
aggagagucccgcagucggcguccagcggcucugcuuguucgugugugugucguugcaggccuuauucaagcuuaccaugggccagaucgugaccuucuuccaggaggucccccacgugaucgaggaggugaugaacaucguccugaucgcccucagcauccuggccgugcugaaggggcucuacaacuucgcgaccugcggccugguggggcuggucacguuccuccugcugugcggccgcuccugcaccaccagccucuacaaggggguguacgagcugcagacccuggagcucaacauggagacgcugaacaugaccaugccgcuguccugcaccaagaacaacagccaccacuacaucauggugggcaacgagaccggccucgagcugacgcugaccaacaccuccaucaucaaccacaaguucugcaaccucagcgacgcccacaagaagaaccuguacaaccacgcccugauguccaucaucagcaccuuccaccucuccauccccaacuucaaccaguacgaggccaugagcugcgacuucaacgggggcaagaucuccguccaguacaaccugagccacuccuacgccggggacgcggccagccacugcggcacgguggccaacggggugcugcagaccuucaugcggauggccuggggcggcuccuacaucgcgcucgacagcggguacggcaagugggacugcaucaugaccuccuaccaguaccugaucauccagaacaccacgugggaggaccacugccaguucagccgccccucccccaucggguaccugggccuccugagccagcggacccgcgacaucuacaucagccggcgccugcucggcaccuucaccuggacgcuguccgacagcgaggggaaggacaccccgggcggguacugccugacccgguggaugcucaucgaggccgagcugaagugcuucggcaacaccgccgucgccaagugcaacgagaagcacgacgaggaguucugcgacaugcugcgccucuucgacuucaacaagcaggccauccagcggcugaagacggaggcgcagauguccauccagcugaucaacaaggccgugaacgcccucaucaacgaccagcugaucaugaagaaccaccuccgcgacaucauggggauccccuacugcaacuacagcaaguacugguaccugaaccacaccaccaccggcaagacgucccugcccaagugcuggcuggugagcaacggcuccuaccucaacgagacccacuucagcgacgacaucgagcagcaggccgacaacaugaucaccgagaugcugcagaaggaguacauggagcggcaggggaagacgccccugggccucgucgaccuguucguguucuccaccagcuucuaccugaucuccaucuuccugcaccucgugaagaucccgugaggacuaguaauaaggaaacuguaugaaugucugugggcaggaagugaagagauccuucuguaaagguuuuuggaauuaugucugcugaauaauaaacuuuuuugaaauaauaaaucugguagaaaaaugagaucucaaaggcucuuuucagagccaccaaaaaaaaaaaaaaaaaaaaaaaaaaaaaaaaaaaaaaaaaaaaaaaaaaaaaaaaaaaaaaaaagaauu

SEQ ID NO: 42558 - RNA, 1667 nt, Artificial Sequence
  mRNA product Design b-4 (hSL-A64-N5) comprising derived and/or modified sequence from LASV(G502-SLE-2009;Clade IV)__AIT17126__GPCmut13 (opt1)
aggagagucccgcagucggcguccagcggcucugcuuguucgugugugugucguugcaggccuuauucaagcuuaccaugggccagaucgugaccuucuuccaggaggucccccacgugaucgaggaggugaugaacaucguccugaucgcccucagcauccuggccgugcugaaggggcucuacaacuucgcgaccugcggccugguggggcugcucacguuccugcugcucugcggccgcuccugcaccaccgggcuguacaagggcgucuacgagcugcagacccucgagcugaacauggagacgcugaacaugaccaugccgcucagcugcaccaagaacaacucccaccacuacaucauggugggcaacgagaccgggcuggagcugacgcucaccaacaccagcaucaucaaccacaaguucugcaaccuguccgacgcccacaagaagaaccuguacgaccacgcccucaugagcaucaucuccaccuuccaccugagcauccccaacuucaaccaguacgaggccauguccugcgacuucaacggcgggaagaucagcgugcaguacaaccugucccacagcuacgccggcgacgcggccgaccacugcgggacggucgccaacggcgugcuccagaccuucaugcggauggccuggggcggguccuacaucgcgcuggacagcggccgcgggcggugggacugcaucaugaccuccuaccaguaccugaucauccagaacaccacgugggaggaccacugccaguucagccgccccucccccaucggcuaccucggccugcugagccagcggacccgcgacaucuacaucucccggcgccuccuggggaccuucaccuggacgcugagcgacagcgagggcaaggacacccccgggggcuacugccucacccgguggaugcugaucgaggccgagcugaagugcuucgggaacaccgccguggccaagugcaacgagaagcacgacgaggaguucugcgacaugcuccgccuguucgacuucaacaagcaggccauccagcggcugaaggcggaggcccagauguccauccagcucaucaacaaggccgucaacgcccugaucaacgaccagcuggugaugaagaaccaccuccgcgacaucaugggcauccccuacugcaacuacagccgguacugguaccugaaccacacgaccaccggccgcaccucccugcccaagugcuggcucgugagcaacggguccuaccugaacgagacgcacuucagcgacgacaucgagcagcaggccgacaacaugaucaccgagaugcugcagaaggaguacauggagcggcagggcaagaccccgcucgggcuggucgaccuguucguguucuccaccagcuucuaccugaucuccaucuuccuccaccuggugaagaucccgugaggacuaguaauaaggaaacuguaugaaugucugugggcaggaagugaagagauccuucuguaaagguuuuuggaauuaugucugcugaauaauaaacuuuuuugaaauaauaaaucugguagaaaaaugagaucucaaaggcucuuuucagagccaccaaaaaaaaaaaaaaaaaaaaaaaaaaaaaaaaaaaaaaaaaaaaaaaaaaaaaaaaaaaaaaaaagaauu

SEQ ID NO: 42559 - RNA, 1667 nt, Artificial Sequence
  mRNA product Design b-4 (hSL-A64-N5) comprising derived and/or modified sequence from LASV(G733-SLE-2010;Clade IV)__AIT17154__GPCmut13 (opt1)
aggagagucccgcagucggcguccagcggcucugcuuguucgugugugugucguugcaggccuuauucaagcuuaccaugggccagaucgugaccuucuuccaggaggucccccacgugaucgaggaggugaugaacaucguccugaucgcccucagcauccuggccgugcugaaggggcucuacaacuucgcgaccugcggcaucguggggcuggucuccuuccugcuccugugcggccgcagcugcacgaccucccuguacaaggggguguacgagcuccagacccuggagcugaacauggagacccucaacaugacgaugccgcugagcugcaccaagaacaacucccaccacuacaucauggugggcaacgagaccggccuggagcucacccugacgaacaccagcaucaucaaccacaaguucugcaaccuguccgacgcccacaagaagaaccucuacgaccacgcccugaugagcaucaucuccaccuuccaccugagcauccccaacuucaaccaguacgaggccauguccugcgacuucaacgggggcaagaucagcguccaguacaaccucucccacagcuacgccggggacgcggccaaccacugcggcaccaucgccaacggggugcugcagacguucaugcggauggccuggggcggcuccuacaucgcgcuggacagcgggcgcgaccggugggacugcaucaugaccuccuaccaguaccucaucauccagaacaccaccugggaggaccacugccaguucagccgccccucccccaucggcuaccuggggcugcucagccagcggacgcgcgacaucuacaucagccggcgccugcugggcaccuucaccuggacccucuccgacagcgagggcaaggacacgcccgggggcuacugccugacccgguggaugcugaucgaggccgagcucaagugcuucgggaacaccgccguggccaagugcaacgagaagcacgacgaggaguucugcgacaugcugcgccuguucgacuucaacaagcaggccauccagcggcucaaggcggaggcccagauguccauccagcugaucaacaaggccgucaacgcccugaucaacgaccagcucaucaugaagaaccaccuccgcgacaucaugggcauccccuacugcaacuacagcaaguacugguaccugaaccacaccacgaccgggaagaccucccugcccaagugcuggcuggugagcaacggcuccuaccugaacgagacccacuucagcgacgacaucgagcagcaggccgacaacaugaucacggagaugcuccagaaggaguacauggagcggcagggcaagaccccgcuggggcugguggaccucuucgucuucuccaccagcuucuaccugaucuccaucuuccugcaccuggugaagaucccgugaggacuaguaauaaggaaacuguaugaaugucugugggcaggaagugaagagauccuucuguaaagguuuuuggaauuaugucugcugaauaauaaacuuuuuugaaauaauaaaucugguagaaaaaugagaucucaaaggcucuuuucagagccaccaaaaaaaaaaaaaaaaaaaaaaaaaaaaaaaaaaaaaaaaaaaaaaaaaaaaaaaaaaaaaaaaagaauu

SEQ ID NO: 42560 - RNA, 1667 nt, Artificial Sequence
  mRNA product Design b-4 (hSL-A64-N5) comprising derived and/or modified sequence from MOPV/LASV reassortant(IGS-1;Clade IV)__AFY05576__GPCmut13 (opt1)
aggagagucccgcagucggcguccagcggcucugcuuguucgugugugugucguugcaggccuuauucaagcuuaccaugggccagaucgugaccuucuuccaggaggucccccacgugaucgaggaggugaugaacaucguccugaucgcccucagcgugcuggccgugcugaaggggcucuacaacuucgcgaccugcggccuggucgggcuggugacguuccuccugcugugcggccgcuccugcaccaccagccucuacaaggggguguacgagcugcagacccuggagcucaacauggagacgcugaacaugaccaugccgcuguccugcaccaagaacaacagccaccacuacaucauggucggcaacgagaccggccucgagcugacgcugaccaacaccuccaucaucaaccacaaguucugcaaccucagcgacgcccacaagaagaaccuguacgaccacgcccugauguccaucaucagcaccuuccaccucuccauccccaacuucaaccaguacgaggccaugagcugcgacuucaacgggggcaagaucuccgugcaguacaaccugagccacuccuacgccggggacgcggccaaccacugcggcacgguggccaacgggguccugcagaccuucaugcggauggccuggggcggcagcuacaucgcgcucgacuccgggcgcggcaacugggacugcaucaugaccagcuaccaguaccugaucauccagaacaccacgugggaggaccacugccaguucucccggcccagccccaucggguaccugggccuccugucccagcgcacccgggacaucuacaucagccgccggcugcucggcaccuucaccuggacgcugagcgacuccgagggggaggacaccccgggcggguacugccugacccgcuggaugcucaucgaggccgagcugaagugcuucggcaacaccgccguggccaagugcaacgagaagcacgacgaggaguucugcgacaugcugcggcuguucgacuucaacaagcaggccauccagcgccugaaggcggaggcccagaugagcauccagcugaucaacaaggccgugaacgcccucaucaacgaccagcugaucaugaagaaccaccuccgggacaucauggggauccccuacugcaacuacuccaaguacugguaccucaaccacacgaccaccggccgcaccagccugcccaagugcuggcuggucuccaacggcagcuaccucaacgagacgcacuucuccgacgacaucgagcagcaggccgacaacaugaucaccgagaugcugcagaaggaguacauggagcggcaggggaagacgccccugggccucguggaccuguucguguucagcaccuccuucuaccugaucagcaucuuccugcaccucgucaagaucccgugaggacuaguaauaaggaaacuguaugaaugucugugggcaggaagugaagagauccuucuguaaagguuuuuggaauuaugucugcugaauaauaaacuuuuuugaaauaauaaaucugguagaaaaaugagaucucaaaggcucuuuucagagccaccaaaaaaaaaaaaaaaaaaaaaaaaaaaaaaaaaaaaaaaaaaaaaaaaaaaaaaaaaaaaaaaaagaauu

SEQ ID NO: 42561 - RNA, 1667 nt, Artificial Sequence
  mRNA product Design b-4 (hSL-A64-N5) comprising derived and/or modified sequence from LASV(LM765-SLE-2012;Clade IV)__AIT17814__GPCmut13 (opt1)
aggagagucccgcagucggcguccagcggcucugcuuguucgugugugugucguugcaggccuuauucaagcuuaccaugggccagaucgugaccuucuuccaggaggucccccacgugaucgaggaggugaugaacaucguccugaucgcccucagcauccuggccgugcugaaggggcucuacaacuucgcgaccugcggccugguggggcuggucacguuccuccugcugugcggccgcuccugcaccaccagccucuacaaggggguguacgagcugcagacccuggagcucaacauggagacgcugaacaugaccaugccgcuguccugcaccaagaacaacagccaccacuacaucauggugggcaacgagaccggccucgagcugacgcugaccaacaccuccaucaucgaccacaaguucugcaaccucagcgacgcccaccggaagaaccuguacgaccacgcccugauguccaucaucagcaccuuccaccucuccauccccaacuucaaccaguacgaggccaugagcugcgacuucaacgggggcaagaucuccguccaguacaaccugagccacuccuacgccaaggacgcggccgaccacugcgggacgguggccaacggcgugcugcagaccuucaugcgcauggccuggggcgggagcuacaucgcgcucgacuccggccgggggcgcugggacugcaucaugaccagcuaccaguaccugaucauccagaacaccacgugggaggaccacugccaguucucccggcccagccccaucggcuaccuggggcuccugucccagcgcacccgggacaucuacaucagccgccggcugcucggcaccuucaccuggacgcugagcgacuccgagggcaaggacacccccgggggcuacugccugacccgcuggaugcucaucgaggccgagcugaagugcuucgggaacaccgccgucgccaagugcaacgagaagcacgacgaggaguucugcgacaugcugcggcuguucgacuucaacaagcaggccauccagcgccugaaggcggaggcccagaugagcauccagcugaucaacaaggccgugaacgcccucaucaacgaccagcugaucaugaagaaccaccuccgggacaucaugggcauccccuacugcaacuacuccaaguacugguaccucaaccacacgaccaccgggaagaccagccugcccaagugcuggcugguguccaacggcagcuaccucaacgagacgcacuucuccgacgacaucgagcagcaggccgacaacaugaucaccgagaugcugcagaaggaguacauggagcgccagggcaagaccccgcuggggcucgucgaccuguucguguucagcaccuccuucuaccugaucagcaucuuccugcaccucgugaagaucccgugaggacuaguaauaaggaaacuguaugaaugucugugggcaggaagugaagagauccuucuguaaagguuuuuggaauuaugucugcugaauaauaaacuuuuuugaaauaauaaaucugguagaaaaaugagaucucaaaggcucuuuucagagccaccaaaaaaaaaaaaaaaaaaaaaaaaaaaaaaaaaaaaaaaaaaaaaaaaaaaaaaaaaaaaaaaaagaauu

SEQ ID NO: 42562 - RNA, 1667 nt, Artificial Sequence
  mRNA product Design b-4 (hSL-A64-N5) comprising derived and/or modified sequence from LASV(LM776-SLE-2012;Clade IV)__AIT17824__GPCmut13 (opt1)
aggagagucccgcagucggcguccagcggcucugcuuguucgugugugugucguugcaggccuuauucaagcuuaccaugggccagaucgugaccuucuuccaggaggucccccacgugaucgaggaggugaugaacaucguccugaucgcccucagcauccuggccgugcugaaggggcucuacaacuucgcgaccugcggccugguggggcuggucacguuccuccugcugugcggccgcuccugcaccaccagcguguacaaggggguguacgagcuccagacccuggagcugaacauggagacgcucaacaugaccaugccgcuguccugcaccaagaacaacagccaccacuacaucauggucggcaacgagaccggccuggagcucacgcugaccaacaccuccaucaucaaccacaaguucugcaaccugagcgacgcccacaagaagaaccucuacgaccacgcccugauguccaucaucagcaccuuccaccuguccauccccaacuucaaccaguacgaggccaugagcugcgacuucaacgggggcaagaucuccgugcaguacaaccucagccacuccuacgccggggacgcggccaaccacugcggcacgguggccaacgggguccugcagaccuucaugcggauggccuggggcggcagcuacaucgcgcuggacuccgggcacggcaagugggacugcaucaugaccagcuaccaguaccucaucauccagaacaccacgugggaggaccacugccaguucucccgccccagccccaucggguaccugggccugcucucccagcggacccgcgacaucuacaucagccggcgccugcugggcaccuucaccuggacgcucagcgacuccgaggggaaggacaccccgggcggguacugccugacccgguggaugcugaucgaggccgagcucaagugcuucggcaacaccgccguggccaagugcaacgagaagcacgacgaggaguucugcgacaugcugcgccuguucgacuucaacaagcaggccauccagcggcucaaggcggaggcccagaugagcauccagcugaucaacaaggccgugaacgcccugaucaacgaccagcucaucaugaagaaccaccuccgcgacaucauggggauccccuacugcaacuacuccaaguacugguaccugaaccacacgaccaccggcaagaccagccugcccaagugcuggcuggucuccaacggcagcuaccugaacgagacgcacuucuccgacgacaucgagcagcaggccgacaacaugaucaccgagaugcuccagaaggaguacauggagcggcaggggaagacgccccugggccugguggaccucuucguguucagcaccuccuucuaccugaucagcaucuuccugcaccuggucaagaucccgugaggacuaguaauaaggaaacuguaugaaugucugugggcaggaagugaagagauccuucuguaaagguuuuuggaauuaugucugcugaauaauaaacuuuuuugaaauaauaaaucugguagaaaaaugagaucucaaaggcucuuuucagagccaccaaaaaaaaaaaaaaaaaaaaaaaaaaaaaaaaaaaaaaaaaaaaaaaaaaaaaaaaaaaaaaaaagaauu

SEQ ID NO: 42563 - RNA, 1667 nt, Artificial Sequence
  mRNA product Design b-4 (hSL-A64-N5) comprising derived and/or modified sequence from LASV(Mad39;Clade IV)__ANH09722__GPCmut13 (opt1)
aggagagucccgcagucggcguccagcggcucugcuuguucgugugugugucguugcaggccuuauucaagcuuaccaugggccagaucgugaccuucuuccaggaggucccccacgugaucgaggaggugaugaacaucguccugaucgcccucagcauccuggccgugcugaaggggcucuacaacguggcgaccugcggccugaucgggcuggucacguuccuccugcugugcggccgcuccugcaccaccacccucuacaaggggguguacgagcugcaggcccuggagcucaacauggagacgcugaacaugaccaugccgcugagcugcaccaagaacaacucccaccacuacauccgggugggcaacgagaccggccucgagcugacgcugaccaacaccagccucaucaaccacaaguucugcaaccuguccgacgcccacaagaagaaccuguacgaccacgcccucaugagcaucaucuccaccuuccaccugagcauccccaacuucaaccaguacgaggccauguccugcgacuucaacgacgggaagaucagcguccaguacaaccugucccacacguacgcgggcgacaccgccaaccacugcgggaccguggccaacggcgugcuccagaccuucaugcgcauggccuggggcgggagcuacaucgcgcuggacuccggccgcgggggcugggacugcaucaugacgagcuaccaguaccugaucauccagaacaccaccugggaggaccacugccaguucucccggcccagccccaucggguaccucggccugcugucccagcggacccgcgacaucuacaucagccggcgccuccugggcacguucaccuggacccuguccgacagcgaggggaaggacaccccgggcggguacugccucacgcgguggaugcugaucgaggccgagcugaagugcuucggcaacaccgccgucgccaagugcaacgagaagcacgacgaggaguucugcgacaugcuccgccuguucgacuucaacaagcaggccauccagcggcugaaggcggaggcccagaugagcauccagcucaucaacaaggccgugaacgcccugaucaacgaccagcugaucaugaagaaccaccuccgcgacaucauggggauccccuacugcaacuacuccaaguacugguaccugaaccacaccgugaccggcaagacgagccugcccaagugcuggcucgucuccaacggcagcuaccugaacgagacccacuucuccgacgacaucgagcagcaggccgacaacaugaucaccgagaugcugcagaaggaguacauggagcggcaggggaagacgccccucggccugguggaccuguucguguucagcaccuccuucuaccugaucagcaucuuccuccaccuggucaagaucccgugaggacuaguaauaaggaaacuguaugaaugucugugggcaggaagugaagagauccuucuguaaagguuuuuggaauuaugucugcugaauaauaaacuuuuuugaaauaauaaaucugguagaaaaaugagaucucaaaggcucuuuucagagccaccaaaaaaaaaaaaaaaaaaaaaaaaaaaaaaaaaaaaaaaaaaaaaaaaaaaaaaaaaaaaaaaaagaauu

SEQ ID NO: 42564 - RNA, 1667 nt, Artificial Sequence
  mRNA product Design b-4 (hSL-A64-N5) comprising derived and/or modified sequence from LASV(Z0947-SLE-2011;Clade IV)__AIT17840__GPCmut13 (opt1)
aggagagucccgcagucggcguccagcggcucugcuuguucgugugugugucguugcaggccuuauucaagcuuaccaugggccagaucgugaccuucuuccaggaggucccccacgugaucgaggaggugaugaacaucguccugaucgcccucagcauccuggccgugcugaaggggcucuacaacuucgcgaccugcggccugguggggcuggucacguuccuccugcugugcggccgcuccugcaccaucagccucuacaaggggguguacgagcugcagacccuggagcucaacauggagacccugaacaugacgaugccgcuguccugcaccaagaacaacagccaccacuacaucauggugggcaacgagaccggccucgagcugacccugacgaacaccuccaucaucaaccacaaguucugcaaccucagcgacgcccacaagaagaaccuguacgaccacgcccugauguccaucaucagcaccuuccaccucuccauccccaacuucaaccaguacgaggccaugagcugcgacuucaacgggggcaagaucuccguccaguacaaccugagccacuccuacgccggggacgcggccaaccacugcggcaccguggccaacggggugcugcagacguucaugcggauggccuggggcggcagcuacaucgcgcucgacuccgggcgcgaccggugggacugcaucaugaccagcuaccaguaccugaucauccagaacaccaccugggaggaccacugccaguucucccgccccagccccaucggcuaccuggggcuccugucccagcggacgcgcgacaucuacaucagccggcgccugcucggcaccuucaccuggacccugagcgacuccgagggcaaggacacgcccgggggcuacugccugacccgguggaugcucaucgaggccgagcugaagugcuucgggaacaccgccgucgccaagugcaacgagaagcacgacgaggaguucugcgacaugcugcgccucuucgacuucaacaagcaggccauccagcggcugaaggcggaggcccagaugagcauccagcugaucaacaaggccgugaacgcccucaucaacgaccagcugaucaugaagaaccaccuccgcgacaucaugggcauccccuacugcaacuacuccaaguacugguaccugaaccacaccacgaccgggaagaccagccugcccaagugcuggcugguguccaacggcagcuaccucaacgagacccacuucuccgacgacaucgagcagcaggccgacaacaugaucacggagaugcugcagaaggaguacauggagcggcagggcaagaccccgcuggggcucgucgaccuguucguguucagcaccuccuucuaccugaucagcaucuuccugcaccucgugaagaucccgugaggacuaguaauaaggaaacuguaugaaugucugugggcaggaagugaagagauccuucuguaaagguuuuuggaauuaugucugcugaauaauaaacuuuuuugaaauaauaaaucugguagaaaaaugagaucucaaaggcucuuuucagagccaccaaaaaaaaaaaaaaaaaaaaaaaaaaaaaaaaaaaaaaaaaaaaaaaaaaaaaaaaaaaaaaaaagaauu

SEQ ID NO: 42565 - RNA, 1667 nt, Artificial Sequence
  mRNA product Design b-4 (hSL-A64-N5) comprising derived and/or modified sequence from LASV(Josiah;Clade IV)__NP_694870__GPCmut13 (opt1)
aggagagucccgcagucggcguccagcggcucugcuuguucgugugugugucguugcaggccuuauucaagcuuaccaugggccagaucgugaccuucuuccaggaggucccccacgugaucgaggaggugaugaacaucguccugaucgcccucagcgugcuggccgugcugaaggggcucuacaacuucgcgaccugcggccuggucgggcuggugacguuccuccugcugugcggccgcuccugcaccaccagccucuacaaggggguguacgagcugcagacccuggagcucaacauggagacgcugaacaugaccaugccgcuguccugcaccaagaacaacagccaccacuacaucauggucggcaacgagaccggccucgagcugacgcugaccaacaccuccaucaucaaccacaaguucugcaaccucagcgacgcccacaagaagaaccuguacgaccacgcccugauguccaucaucagcaccuuccaccucuccauccccaacuucaaccaguacgaggccaugagcugcgacuucaacgggggcaagaucuccgugcaguacaaccugagccacuccuacgccggggacgcggccaaccacugcggcacgguggccaacgggguccugcagaccuucaugcggauggccuggggcggcagcuacaucgcgcucgacuccgggcgcggcaacugggacugcaucaugaccagcuaccaguaccugaucauccagaacaccacgugggaggaccacugccaguucucccggcccagccccaucggguaccugggccuccugucccagcgcacccgggacaucuacaucagccgccggcugcucggcaccuucaccuggacgcugagcgacuccgaggggaaggacaccccgggcggguacugccugacccgcuggaugcucaucgaggccgagcugaagugcuucggcaacaccgccguggccaagugcaacgagaagcacgacgaggaguucugcgacaugcugcggcuguucgacuucaacaagcaggccauccagcgccugaaggcggaggcccagaugagcauccagcugaucaacaaggccgugaacgcccucaucaacgaccagcugaucaugaagaaccaccuccgggacaucauggggauccccuacugcaacuacuccaaguacugguaccucaaccacacgaccaccggccgcaccagccugcccaagugcuggcuggucuccaacggcagcuaccucaacgagacgcacuucuccgacgacaucgagcagcaggccgacaacaugaucaccgagaugcugcagaaggaguacauggagcggcaggggaagacgccccugggccugguggaccucuucguguucagcaccuccuucuaccugaucagcaucuuccugcaccucgucaagaucccgugaggacuaguaauaaggaaacuguaugaaugucugugggcaggaagugaagagauccuucuguaaagguuuuuggaauuaugucugcugaauaauaaacuuuuuugaaauaauaaaucugguagaaaaaugagaucucaaaggcucuuuucagagccaccaaaaaaaaaaaaaaaaaaaaaaaaaaaaaaaaaaaaaaaaaaaaaaaaaaaaaaaaaaaaaaaaagaauu

SEQ ID NO: 42566 - RNA, 1664 nt, Artificial Sequence
  mRNA product Design b-4 (hSL-A64-N5) comprising derived and/or modified sequence from LASV(LP;Clade I)__AAF86701__GPCmut13 (opt1)
aggagagucccgcagucggcguccagcggcucugcuuguucgugugugugucguugcaggccuuauucaagcuuaccaugggccagaucaucaccuucuuccaggaggugccccacgucaucgaggaggugaugaacaucgugcugaucgcccucagccugcuggccauccucaaggggcuguacaacaucgcgaccugcggcaucaucgggcuggucgccuuccucuuccugugcggcaaguccugcagccugacgcucaagggcggguacgagcugcagacccuggagcucaacauggagacccugaacaugaccaugccgcuguccugcacgaagaacagcucccaccacuacauccgcgugggcaacgagaccgggcucgagcugacccugaccaacacgagcaucaucaaccacaaguucugcaaccucuccgacgcccacaagaagaaccuguacgaccacgcccugaugagcaucaucuccaccuuccaccucagcauccccaacuucaaccaguacgaggccauguccugcgacuucaacggcgggaagaucagcgugcaguacaaccugucccacagcuacgcgggcgacgccgccgagcacugcgggaccgucgccaacggcgugcugcagaccuucaugcggauggcguggggcgggcgcuacaucgcccucgacuccggcaaggggaacugggacugcaucaugacgagcuaccaguaccugaucauccagaacaccaccugggaggaccacugccaguucucccggcccagccccaucggcuaccugggccuccugucccagcgcacccgggacaucuacaucagccgccggcugcucgggacguucaccuggacccugagcgacuccgagggcaacgagacccccgggggcuacugccugacgcgcuggaugcucaucgaggccgagcugaagugcuucgggaacaccgccguggccaagugcaacgagaagcacgacgaggaguucugcgacaugcugcggcuguucgacuucaacaagcaggcgauccgccggcugaaggccgaggcccagaugagcauccagcugaucaacaaggccgucaacgcccucaucaacgaccagcugaucaugaagaaccaccuccgcgacaucaugggcauccccuacugcaacuacuccaaguacugguaccucaaccacaccagcuccggccggaccagccugcccaagugcuggcugaucuccaacgggagcuaccucaacgagacgcaguucuccgacgacaucgagcagcaggcggacaacaugaucaccgagaugcugcagaaggaguacaucgagcgccagggcaagaccccgcuggggcugguggacaucuucaucuucagcaccuccuucuaccucaucagcaucuuccugcaccugaucaagaucccgugaggacuaguaauaaggaaacuguaugaaugucugugggcaggaagugaagagauccuucuguaaagguuuuuggaauuaugucugcugaauaauaaacuuuuuugaaauaauaaaucugguagaaaaaugagaucucaaaggcucuuuucagagccaccaaaaaaaaaaaaaaaaaaaaaaaaaaaaaaaaaaaaaaaaaaaaaaaaaaaaaaaaaaaaaaaaagaauu

SEQ ID NO: 42567 - RNA, 1664 nt, Artificial Sequence
  mRNA product Design b-4 (hSL-A64-N5) comprising derived and/or modified sequence from LASV(803213;Clade II)__AAF86703__GPCmut13 (opt1)
aggagagucccgcagucggcguccagcggcucugcuuguucgugugugugucguugcaggccuuauucaagcuuaccaugggccagaucaucaccuucuuccaggaggugccccacgucaucgaggaggugaugaacaucgugcugaucgcccucagccugcuggccauccucaaggggaucuacaacgucgcgaccugcggccuguucgggcugaucuccuuccuccugcugugcggccgcagcugcuccgugacguacaaggggguguacgagcuccagacccuggagcugaacauggccaaccucaacaugaccaugccgcugagcugcaccaagaacaacucccaccacuacaucauggucggcaacgagacgggccuggagcucacccugaccaacaccagcaucaucaaccacaaguucugcaaccuguccgacgcccacaagaagaaccucuacgaccacgcccugaugagcaucaucuccacguuccaccugagcauccccaacuucaaccaguacgaggccauguccugcgacuucaacgggggcaagaucagcgugcaguacaaccucucccacagcuucgcgguggacgccgccaaccacugcgggaccaucgccaacggcguccugcagaccuucaugcggauggcguggggcggguccuacaucgcccuggacagcggcaaggggaacugggacugcaucaugaccuccuaccaguaccucaucauccagaacacgaccugggaggaccacugccaguucagccgccccucccccaucggcuaccuggggcugcucagccagcggacccgcgacaucuacaucagccggcgccugcugggcaccuucacguggacccucuccgacagcgagggcaacgaggcccccgggggcuacugccugacccgguggaugcugaucgaggccgagcucaagugcuucgggaacaccgccguggcgaagugcaacgagaagcacgacgaggaguucugcgacaugcugcgccuguucgacuucaacaagcaggccaucaagcggcucaagacggaggcccagauguccauccagcugaucaacaaggccgugaacgcccugaucaacgaccagcucaucaugaagaaccaccuccgcgacaucaugggcauccccuacugcaacuacagccgguacugguaccugaaccacaccgucaccgggaagaccucccugccccgcugcuggcuggugagcaacggcuccuaccugaacgagacgcacuucagcgacgacaucgagcagcaggcggacaacaugaucaccgagaugcuccagaaggaguacauggaccggcagggcaagaccccgcuggggcugguggaccuguucgucuucuccaccagcuucuaccucaucuccaucuuccugcaccuggugaagaucccgugaggacuaguaauaaggaaacuguaugaaugucugugggcaggaagugaagagauccuucuguaaagguuuuuggaauuaugucugcugaauaauaaacuuuuuugaaauaauaaaucugguagaaaaaugagaucucaaaggcucuuuucagagccaccaaaaaaaaaaaaaaaaaaaaaaaaaaaaaaaaaaaaaaaaaaaaaaaaaaaaaaaaaaaaaaaaagaauu

SEQ ID NO: 42568 - RNA, 1664 nt, Artificial Sequence
  mRNA product Design b-4 (hSL-A64-N5) comprising derived and/or modified sequence from LASV(GA391;Clade III)__CAA36645__GPCmut13 (opt1)
aggagagucccgcagucggcguccagcggcucugcuuguucgugugugugucguugcaggccuuauucaagcuuaccaugggccagaucgugaccuucuuccaggaggucccccacgugaucgaggaggugaugaacaucguccugaucgcccucagcauccuggccauccugaaggggcucuacaacguggcgaccugcggccugaucgggcuggugacguuccuccugcuguccggccgcagcugcucccucaucuacaaggggaccuacgagcugcagacccuggagcucaacauggagacccugaacaugacgaugccgcugagcugcaccaagaacaacucccaccacuacauccgggucggcaacgagaccggccucgagcugacccugacgaacaccagcauccucaaccacaaguucugcaaccuguccgacgcccacaagcgcaaccuguacgaccacagccucauguccaucaucagcaccuuccaccuguccauccccaacuucaaccaguacgaggccaugagcugcgacuucaacgggggcaagaucaccgugcaguacaaccugucccacagcuucgccguggacgccgcggggcacugcggcacgcucgccaacgggguccugcagaccuucaugcggauggccuggggcggcuccuacaucgcccuggacagcgggcgcggcaacugggacugcaucaugaccuccuaccaguaccucaucauccagaacaccacgugggacgaccacugccaguucagccggcccucccccaucggguaccugggccugcucagccagcgcacccgggacaucuacaucagccgccggcugcugggcaccuucaccuggacgcucuccgacagcgaggggaacgagaccccgggcggguacugccugacccgcuggaugcugaucgaggcggagcucaagugcuucggcaacaccgccguggccaagugcaacgagaagcacgacgaggaguucugcgacaugcugcggcuguucgacuucaacaagcaggccauccgccggcucaagacggaggcccagauguccauccagcugaucaacaaggcggugaacgcccugaucaacgaccagcucaucaugaagaaccaccuccgcgacaucauggggauccccuacugcaacuacagccgguacugguaccugaaccacaccuccaccggcaagaccagccugccccgcugcuggcugaucuccaacggcagcuaccugaacgagacgaaguucuccgacgacaucgagcagcaggccgacaacaugaucaccgagaugcugcagaaggaguacaucgaccggcaggggaagacgccccucggccuggucgaccuguucguguucagcaccuccuucuaccucaucagcaucuuccugcaccuggugaagaucccgugaggacuaguaauaaggaaacuguaugaaugucugugggcaggaagugaagagauccuucuguaaagguuuuuggaauuaugucugcugaauaauaaacuuuuuugaaauaauaaaucugguagaaaaaugagaucucaaaggcucuuuucagagccaccaaaaaaaaaaaaaaaaaaaaaaaaaaaaaaaaaaaaaaaaaaaaaaaaaaaaaaaaaaaaaaaaagaauu

SEQ ID NO: 42569 - RNA, 1667 nt, Artificial Sequence
  mRNA product Design b-4 (hSL-A64-N5) comprising derived and/or modified sequence from LASV(AV;Clade V)__CCA30314__GPCmut13 (opt1)
aggagagucccgcagucggcguccagcggcucugcuuguucgugugugugucguugcaggccuuauucaagcuuaccaugggccagaucgugaccuucuuccaggaggucccccacgugaucgaggaggugaugaacaucguccugaucgcccucagcauccuggccgugcugaaggggcucuacaacaucgcgaccugcggccugaucgggcugaucacguuccuccugcugugcggccgcuccugcagcuccaaccucuacaaggggguguacgagcugcagagccuggaccucaacauggagacccugaacaugaccaugccgcuguccugcaccaagaacaacagccaccacuacauccgggucggcaacgacacgggccucgagcugacccugaccaacaccuccauccucaaccacaaguucugcaaccugagcgacgcccacaagaaggaccuguacgaccacgcccucauguccaucaucagcacguuccaccuguccauccccaacuucaaccaguacgaggccaugagcugcgacuucaacgggggcaagaucuccgugcaguacaaccugagccacuccuacgccaucgacgcggccaaccacugcgggaccguggccaacggcauccuccagaccuucaugcgcauggccuggggcgggagcuacaucgcgcuggacuccggccgggggaacugggacugcaucaugaccagcuaccaguaccugaucauccagaacacgaccugggagaaccacugccaguucucccgccccagccccaucggcuaccucgggcugcugagccagcggacccgcgacaucuacaucucccggcgccuccugggcaccuucacguggacccugagcgacuccgagggcaacgccacccccgggggcuacugccucacccgguggaugcugaucgaggccgagcugaagugcuucgggaacacggccgucgccaagugcaacgagaagcacgacgaggaguucugcgacaugcuccgccuguucgacuucaacaagcaggcgaucagccggcugaaguccgaggcccagaugagcauccagcucaucaacaaggccgugaacgcccugaucaacgaccagcugaucaugaagaaccaccuccgcgacaucaugggcauccccuacugcaacuacuccaaguacugguaccugaaccacaccaucaccgggaagaccagccugcccaagugcuggcucguguccaacggcagcuaccugaacgagacgcacuucuccgacgacaucgagcagcaggccgacaacaugaucaccgagaugcugcagaaggaguacauggagcggcagggcaagaccccgcuggggcucgucgaccuguucguguucagcaccuccuucuaccugaucagcaucuuccuccgccuggugaagaucccgugaggacuaguaauaaggaaacuguaugaaugucugugggcaggaagugaagagauccuucuguaaagguuuuuggaauuaugucugcugaauaauaaacuuuuuugaaauaauaaaucugguagaaaaaugagaucucaaaggcucuuuucagagccaccaaaaaaaaaaaaaaaaaaaaaaaaaaaaaaaaaaaaaaaaaaaaaaaaaaaaaaaaaaaaaaaaagaauu

SEQ ID NO: 42570 - RNA, 1664 nt, Artificial Sequence
  mRNA product Design b-4 (hSL-A64-N5) comprising derived and/or modified sequence from LASV(Togo/2016/7082;Clade VI)__AMR44577__GPCmut13 (opt1)
aggagagucccgcagucggcguccagcggcucugcuuguucgugugugugucguugcaggccuuauucaagcuuaccaugggccagaucaucaccuucuuccaggaggugccccacgucaucgaggaggugaugaacaucgugcugaucgcccucagccugcuggccauccucaagggggucuacaacguggcgaccugcggcaucaucgggcuggugacguuccuguuccucugcggccgcuccugcagccugaucuacaagggguccuacgagcugcagacccucgagcugaacauggagacccugaacaugaccaugccgcucagcugcacgaagaacuccagccaccacuacauccgggucggcaacgagaccggccuggagcugacccucaccaacacguccaucaucaaccacaaguucugcaaccugagcgacgcccacaagcgcaaccuguacgaccacgcccucauguccauccugagcaccuuccaccuguccauccccaacuucaaccaguacgaggccaugagcugcgacuucaacgggggcaagaucuccgugcaguacaaccucagccacgccuacgcgguggacgccgccgagcacugcgggaccgucgccaacggcgugcugcagaccuucaugcggauggcguggggcggguccuacaucgcccuggacagcggccgcgggaacugggacugcaucaugacguccuaccaguaccucaucauccagaacaccaccugggaggaccacugccaguucagccggcccucccccaucggcuaccuggggcugcucagccagcgcacccgggacaucuacaucagccgccggcugcugggcacguucaccuggacccucuccgacagcgagggcaacgagacccccgggggcuacugccugacgcgcuggaugcugaucgaggccgagcucaagugcuucgggaacaccgccguggccaagugcaacgagaagcacgacgaggaguucugcgacaugcugcggcuguucgacuucaacaagcaggcgauccagcgccucaaguccgaggcccagaugagcauccagcugaucaacaaggccgucaacgcccugaucaacgaccagcucaucaugaagaaccaccuccgggacaugaugggcauccccuacugcaacuacuccaaguacugguaccugaaccacaccagcuccgggcgcaccagccugcccaagugcuggcugguguccaacggcagcuaccugaacgagacgcacuucuccgacgacaucgagcagcaggccgacaacaugaucaccgagaugcuccagaaggaguacaucgaccggcagggcaagaccccgcuggggcugguggaccuguucgucuucagcaccuccuucuaccucaucagcaucuuccugcaccugaucaagaucccgugaggacuaguaauaaggaaacuguaugaaugucugugggcaggaagugaagagauccuucuguaaagguuuuuggaauuaugucugcugaauaauaaacuuuuuugaaauaauaaaucugguagaaaaaugagaucucaaaggcucuuuucagagccaccaaaaaaaaaaaaaaaaaaaaaaaaaaaaaaaaaaaaaaaaaaaaaaaaaaaaaaaaaaaaaaaaagaauu

SEQ ID NO: 42571 - RNA, 1664 nt, Artificial Sequence
  mRNA product Design b-4 (hSL-A64-N5) comprising derived and/or modified sequence from LASV(KAK-428;Clade n.d. (VII))__ANH09740__GPCmut13 (opt1)
aggagagucccgcagucggcguccagcggcucugcuuguucgugugugugucguugcaggccuuauucaagcuuaccaugggccagaucgugaccuucuuccaggaggucccccacgugaucgaggaggugaugaacaucguccugaucgcccucagccugcuggccauccucaaggggcuguacaacuucgcgaccugcggcgugaucgggcugaucacguuccuccugcugugcggccgcuccugcagcgccaccuacaaggggcaguacgagcuccagacccuggagcugaacauggagucccucaacaugaccaugccgcugagcugcacgaagaacaacucccaccacuacauccgggccggcaacaacaccggccuggagcucacccugaccaacacgagcaucaucucccacaaguucugcaaccugagcgacgcccacaagaagaaccucuacgaccacacccugauguccaucaucaccaccuuccaccugagcauccccaacuucaaccaguacgaggccauguccugcgacuucaacgggggcaagaucagcauccaguacaaccucucccacagcuacgcgggggacgccgcccagcacugcggcacgguggccaacgggguccugcagaccuucaugcgcauggcguggggcggcuccuaccuggcccucgacagcgggcggcgcggcugggacugcaucaucuccagcuaccaguaccugaucauccagaacaccaccugggacgaccacugccaguucucccggcccagccccaucggguaccugggcuucgugagccagaagacgcgcgacaucuacaucucccggcgccuccugggcaccuucaccuggacccugagcgacuccgaggggcacgacaugccgggcggguacugccucacgcgguggaugcugaucgaggccgaccugaagugcuucggcaacaccgccguggccaagugcaacgagaagcacgacgaggaguucugcgacauguggcgccucuucgacuucaacaagcaggcgauccagcggcugaaggccgaggcccagaugaacauccagcugaucaacaaggccgucaacgcccucaucaacgaccagcugaugaugaagaaccaccuccgcgacaucauggggauccccuacugcaacuacagcaaguucugguaccugaacaacaccaccacgggccggaccucccugccccgcugcuggcugaucagcaacggcuccuaccucaacgagacccacuucagcgacgacaucgagcagcaggcggacaacaugaucaccgagaugcugcagaaggaguacauggaccggcaggggaagacgccccugggccucguggaccuguucguguucuccaccagcuucuaccugaucaccaucuuccugcaccucgucaagaucccgugaggacuaguaauaaggaaacuguaugaaugucugugggcaggaagugaagagauccuucuguaaagguuuuuggaauuaugucugcugaauaauaaacuuuuuugaaauaauaaaucugguagaaaaaugagaucucaaaggcucuuuucagagccaccaaaaaaaaaaaaaaaaaaaaaaaaaaaaaaaaaaaaaaaaaaaaaaaaaaaaaaaaaaaaaaaaagaauu

SEQ ID NO: 42572 - RNA, 1664 nt, Artificial Sequence; identical to SEQ ID NO: 42566
  mRNA product Design b-4 (hSL-A64-N5) comprising derived and/or modified sequence from LASV(Pinneo-NIG-1969;Clade I)__AIT17836__GPCmut13 (opt1)

SEQ ID NO: 42573 - RNA, 1664 nt, Artificial Sequence
  mRNA product Design b-4 (hSL-A64-N5) comprising derived and/or modified sequence from LASV(ISTH0009-NIG-2011;Clade II)__AIT17404__GPCmut13 (opt1)
aggagagucccgcagucggcguccagcggcucugcuuguucgugugugugucguugcaggccuuauucaagcuuaccaugggccagaucaucaccuucuuccaggaggugccccacgucaucgaggaggugaugaacaucgugcugaucgcccucagccugcuggccauccucaaggggaucuacaacgucgcgaccugcggccuguucgggcugguguccuuccuccugcugugcggccgcagcugcuccacgaccuacaaggggguguacgagcuccagacccuggagcuggacauggccagccucaacaugaccaugccgcuguccugcacgaagaacaacagccaccacuacaucauggucggcaacgagaccggccuggagcucacccugaccaacacguccaucaucaaccacaaguucugcaaccugagcgacgcccacaagaagaaccucuacgaccacgcccugauguccaucaucagcaccuuccaccuguccauccccaacuucaaccaguacgaggccaugagcugcgacuucaacgggggcaagaucuccgugcaguacaaccucagccacgcguacgccguggacgccgccaaccacugcgggaccaucgcgaacggcguccugcagaccuucaugcggauggccuggggcggguccuacaucgcccuggacagcggcaagggguccugggacugcaucaugacgagcuaccaguaccucaucauccagaacaccaccugggaggaccacugccaguucucccgccccagccccaucggcuaccuggggcugcucagccagcggacccgcgacaucuacaucucccggcgccugcugggcacguucaccuggacccucagcgacuccgagggcaacgagacccccgggggcuacugccugacgcgguggaugcugaucgaggccgagcucaagugcuucgggaacaccgccguggcgaagugcaacgagaagcacgacgaggaguucugcgacaugcugcgccuguucgacuucaacaagcaggccauccggcgccucaagaccgaggcccagaugagcauccagcugaucaacaaggccgugaacgcccugaucaacgaccagcucaucaugaagaaccaccuccgggacaucaugggcaucccguacugcaacuacuccaaguacugguaccugaaccacaccgucacggggaagaccagccugccccgcugcuggcugguguccaacggcagcuaccugaacgagacccacuucuccgacgacaucgagcagcaggcggacaacaugaucaccgagcuccugcagaaggaguacauggaccggcagggcaagacgccccuggggcugguggaccucuucgucuucagcaccuccuucuaccugaucagcaucuuccugcaccucaucaagaucccgugaggacuaguaauaaggaaacuguaugaaugucugugggcaggaagugaagagauccuucuguaaagguuuuuggaauuaugucugcugaauaauaaacuuuuuugaaauaauaaaucugguagaaaaaugagaucucaaaggcucuuuucagagccaccaaaaaaaaaaaaaaaaaaaaaaaaaaaaaaaaaaaaaaaaaaaaaaaaaaaaaaaaaaaaaaaaagaauu

SEQ ID NO: 42574 - RNA, 1664 nt, Artificial Sequence
  mRNA product Design b-4 (hSL-A64-N5) comprising derived and/or modified sequence from LASV(ISTH2010-NIG-2012;Clade II)__AIT17482__GPCmut13 (opt1)
aggagagucccgcagucggcguccagcggcucugcuuguucgugugugugucguugcaggccuuauucaagcuuaccaugggccagaucaucaccuucuuccaggaggugccccacgucaucgaggaggugaugaacaucgugcugaucgcccucagccugcuggccauccucaaggggaucuacaacgucgcgaccugcggccuguucgggcugguguccuuccuccugcugugcggccgcagcugcuccacgaccuacaaggggguguacgagcuccagacccuggagcuggacauggccagccucaacaugaccaugccgcuguccugcacgaagaacaacagccaccacuacaucauggucggcaacgagaccggccuggagcucacccugaccaacacguccaucaucaaccacaaguucugcaaccugagcgacgcccacaagaagaaccucuacgaccacgcccugauguccaucaucagcaccuuccaccuguccauccccaacuucaaccaguacgaggccaugagcugcgacuucaacgggggcaagaucuccgugcaguacaaccucagccacgcguacgccguggacgccgccaaccacugcgggaccaucgcgaacggcguccugcagaccuucaugcggauggccuggggcggguccuacaucgcccuggacagcggcaagggguccugggacugcaucaugacgagcuaccaguaccucaucauccagaacaucaccugggaggaccacugccaguucucccgccccagccccaucggcuaccuggggcugcucagccagcggacccgcgacaucuacaucucccggcgccugcugggcaccuucacguggacccucagcgacuccgagggcaacgagacccccgggggcuacugccugacccgguggaugcugaucgaggccgagcucaagugcuucgggaacacggccguggcgaagugcaacgagaagcacgacgaggaguucugcgacaugcugcgccuguucgacuucaacaagcaggccauccggcgccucaagaccgaggcccagaugagcauccagcugaucaacaaggccgugaacgcccugaucaacgaccagcucaucaugaagaaccaccuccgggacaucaugggcauccccuacugcaacuacuccaaguacugguaccugaaccacaccgucaccgggaagacgagccugccccgcugcuggcugguguccaacggcagcuaccugaacgagacccacuucuccgacgacaucgagcagcaggcggacaacaugaucaccgagcuccugcagaaggaguacaucgaccggcagggcaagaccccgcuggggcugguggaccucuucgucuucagcacguccuucuaccugaucagcaucuuccugcaccucgugaagaucccgugaggacuaguaauaaggaaacuguaugaaugucugugggcaggaagugaagagauccuucuguaaagguuuuuggaauuaugucugcugaauaauaaacuuuuuugaaauaauaaaucugguagaaaaaugagaucucaaaggcucuuuucagagccaccaaaaaaaaaaaaaaaaaaaaaaaaaaaaaaaaaaaaaaaaaaaaaaaaaaaaaaaaaaaaaaaaagaauu

SEQ ID NO: 42575 - RNA, 1664 nt, Artificial Sequence
  mRNA product Design b-4 (hSL-A64-N5) comprising derived and/or modified sequence from LASV(Lassa virus/H.sapiens-wt/NGA/2015/ISTH_0543;Clade II)__AVO03639__GPCmut13 (opt1)
aggagagucccgcagucggcguccagcggcucugcuuguucgugugugugucguugcaggccuuauucaagcuuaccaugggccagaucaucaccuucuuccaggaggugccccacgucaucgaggaggugaugaacaucgugcugaucgcccucagccugcuggccauccucaaggggaucuacaacgucgcgaccugcggccuguucgggcugguguccuuccuccugcugugcggccgcagcugcuccacgaccuacaaggggguguacgagcuccagacccuggagcuggacauggccaaccucaacaugaccaugccgcugagcugcacgaagaacaacucccaccacuacaucauggucggcaacgagaccggccuggagcucacccugaccaacacgagcaucaucaaccacaaguucugcaaccuguccgacgcccacaagaagaaccucuacgaccacgcccugaugagcaucaucuccaccuuccaccugagcauccccaacuucaaccaguacgaggccauguccugcgacuucaacgggggcaagaucagcgugcaguacaaccucucccacaccuacgcgguggacgccgccaaccacugcgggaccaucgccaacggcguccugcagacguucaugcggauggcguggggcgggagcuacaucgcccuggacuccggcaaggggagcugggacugcaucaugaccuccuaccaguaccucgugauccagaacaccaccugggaggaccacugccaguucagccgccccucccccaucggcuaccuggggcugcucagccagcggacgcgcgacaucuacaucagccggcgccugcugggcaccuucaccuggacccucuccgacagcgagggcaacgagacgcccgggggcuacugccugacccgguggaugcugaucgaggccgagcucaagugcuucgggaacaccgccguggccaagugcaacgagaagcacgacgaggaguucugcgacaugcugcgccuguucgacuucaacaagcaggcgauccggcgccucaagaccgaggcccagauguccauccagcugaucaacaaggccgucaacgcccugaucaacgaccagcucaucaugaagaaccaccuccgggacaucaugggcauccccuacugcaacuacagcaaguacugguaccugaaccacacggugaccgggaagaccucccugccccgcugcuggcuggugagcaacggcuccuaccugaacgagacccacuucagcgacgacaucgagcagcaggccgacaacaugaucacggagcuccugcagaaggaguacaucgaccggcagggcaagaccccgcuggggcuggucgaccucuucguguucuccaccagcuucuaccugaucuccaucuuccugcaccucgugaagaucccgugaggacuaguaauaaggaaacuguaugaaugucugugggcaggaagugaagagauccuucuguaaagguuuuuggaauuaugucugcugaauaauaaacuuuuuugaaauaauaaaucugguagaaaaaugagaucucaaaggcucuuuucagagccaccaaaaaaaaaaaaaaaaaaaaaaaaaaaaaaaaaaaaaaaaaaaaaaaaaaaaaaaaaaaaaaaaagaauu

SEQ ID NO: 42576 - RNA, 1664 nt, Artificial Sequence
  mRNA product Design b-4 (hSL-A64-N5) comprising derived and/or modified sequence from LASV(Lassa virus/H.sapiens-wt/NGA/2016/ISTH_0009;Clade II)__AVO03571__GPCmut13 (opt1)
aggagagucccgcagucggcguccagcggcucugcuuguucgugugugugucguugcaggccuuauucaagcuuaccaugggccagaucaucaccuucuuccaggaggugccccacgucaucgaggaggugaugaacaucgugcugaucgcccucagccugcuggccauccucaaggggaucuacaacgucgcgaccugcggccugcuggggcucguguccuuccugcugcucugcggccgcagcugcuccacgaccuacaaggggguguacgagcugcagacccuggagcucgacauggccagccugaacaugaccaugccgcuguccugcacgaagaacaacagccaccacuacaucauggucggcaacgagaccggccucgagcugacccugaccaacacguccaucaucaaccacaaguucugcaaccucagcgacgcccacaagaagaaccuguacgaccacgcccugauguccaucaucagcaccuuccaccucuccauccccaacuucaaccaguacgaggccaugagcugcgacuucaacgggggccggaucuccgugcaguacaaccugagccacuccuacgcgguggacgccgccaaccacugcgggaccaucgccaacggcguccugcagaccuucaugcgcauggcguggggcgggagcuacaucgcccucgacuccggcaaggggagcugggacugcaucaugacguccuaccaguaccugaucauccagaacaccaccugggaggaccacugccaguucagccggcccagccccaucggcuaccuggggcuccugucccagcgcacccgggacaucuacaucagccgccggcugcucggcacguucaccuggacccuguccgacagcgagggcaacgagacccccgggggcuacugccugacgcgcuggaugcucaucgaggccgagcugaagugcuucgggaacaccgccguggccaagugcaacgagaagcacgacgaggaguucugcgacaugcugcggcuguucgacuucaacaagcaggcgauccgccggcugaagaccgaggcccagauguccauccagcugaucaacaaggccgugaacgcccucaucaacgaccagcugaucaugaagaaccaccuccgcgacaucaugggcaucccguacugcaacuacagcaaguacugguaccucaaccacaccgucacggggaagaccucccugccccggugcuggcuggugagcaacggcuccuaccucaacgagacccacuucagcgacgacaucgagcagcaggccgacaacaugaucaccgagcugcugcagaaggaguacaucgaccgccagggcaagacgccccuggggcucguggaccuguucgucuucuccaccagcuucuaccugaucuccaucuuccuccaccuggugaagaucccgugaggacuaguaauaaggaaacuguaugaaugucugugggcaggaagugaagagauccuucuguaaagguuuuuggaauuaugucugcugaauaauaaacuuuuuugaaauaauaaaucugguagaaaaaugagaucucaaaggcucuuuucagagccaccaaaaaaaaaaaaaaaaaaaaaaaaaaaaaaaaaaaaaaaaaaaaaaaaaaaaaaaaaaaaaaaaagaauu

SEQ ID NO: 42577 - RNA, 1664 nt, Artificial Sequence
  mRNA product Design b-4 (hSL-A64-N5) comprising derived and/or modified sequence from LASV(Lassa virus/H.sapiens-wt/NGA/2016/ISTH_0017;Clade II)__AVO03567__GPCmut13 (opt1)
aggagagucccgcagucggcguccagcggcucugcuuguucgugugugugucguugcaggccuuauucaagcuuaccaugggccagaucaucaccuucuuccaggaggugccccacgucaucgaggaggugaugaacaucgugcugaucgcccucagccugcuggccauccucaaggggaucuacaacgucgcgaccugcggccuguucgggcugguguccuuccuccugcugugcggccgcagcugcuccacgaccuacaaggggguguacgagcuccagacccuggagcuggacauggccagccucaacaugaccaugccgcuguccugcacgaagaacaacagccaccacuacaucauggucggcaacgagaccggccuggagcucacccugaccaacacguccaucaucaaccacaaguucugcaaccugagcgacgcccacaagaagaaccucuacgaccacgcccugauguccaucaucagcaccuuccaccuguccauccccaacuucaaccaguacgaggccaugagcugcgacuucaacgggggcaagaucuccgugcaguacaaccucagccacaccuacgcgaucgacgccgccaaccacugcgggaccaucgccaacggcgugcugcagacguucaugcggauggcguggggcggguccuacaucgcccuggacagcggcaagggguccugggacugcaucaugaccagcuaccaguaccucaucauccagaacaccaccugggaggaccacugccaguucucccgccccagccccaucggcuaccuggggcugcucagccagcggacgcgcgacaucuacaucucccggcgccugcugggcaccuucaccuggacccucagcgacuccgagggcaacgagacgcccgggggcuacugccugacccgguggaugcugaucgaggccgagcucaagugcuucgggaacaccgccgucgccaagugcaacgagaagcacgacgaggaguucugcgacaugcugcgccuguucgacuucaacaagcaggcgauccggcgccucaagaccgaggcccagaugagcauccagcugaucaacaaggccgugaacgcccugaucaacgaccagcucaucaugaagaaccaccuccgggacaucaugggcauccccuacugcaacuacuccaaguacugguaccugaaccacacggugaccgggaagaccagccugccccgcugcuggcuggucuccaacggcagcuaccugaacgagacccacuucuccgacgacaucgagcagcaggccgacaacaugaucacggagcuccugcagaaggaguacauggaccggcagggcaagaccccgcuggggcugguggaccucuucguguucagcaccuccuucuaccugaucagcaucuuccugcaccucguccgcaucccgugaggacuaguaauaaggaaacuguaugaaugucugugggcaggaagugaagagauccuucuguaaagguuuuuggaauuaugucugcugaauaauaaacuuuuuugaaauaauaaaucugguagaaaaaugagaucucaaaggcucuuuucagagccaccaaaaaaaaaaaaaaaaaaaaaaaaaaaaaaaaaaaaaaaaaaaaaaaaaaaaaaaaaaaaaaaaagaauu

SEQ ID NO: 42578 - RNA, 1664 nt, Artificial Sequence
  mRNA product Design b-4 (hSL-A64-N5) comprising derived and/or modified sequence from LASV(Lassa virus/H.sapiens-wt/NGA/2018/ISTH_0959;Clade II)__AVV65099__GPCmut13 (opt1)
aggagagucccgcagucggcguccagcggcucugcuuguucgugugugugucguugcaggccuuauucaagcuuaccaugggccagaucaucaccuucuuccaggaggugccccacgucaucgaggaggugaugaacaucgugcugaucgcccucagccugcuggccauccucaaggggaucuacaacgucgugaccugcggccuguucgggcugguguccuuccuccugcugugcggccgcagcugcuccacgaccuacaagggggucuacgagcuccagacccuggagcuggacauggcgagccucaacaugaccaugccgcuguccugcacgaagaacaacagccaccacuacaucauggugggcaacgagaccggccuggagcucacccugaccaacacguccaucaucaaccacaaguucugcaaccugagcgacgcccacaagaagaaccucuacgaccacgcccugauguccaucaucagcaccuuccaccuguccauccccaacuucaaccaguacgaggccaugagcugcgacuucaacgggggcaagaucuccgugcaguacaaccucagccacgccuacgcgaucgacgccgccaaccacugcgggaccaucgccaacggcguccugcagaccuucaugcggauggcguggggcggguccuacaucgcccuggacagcggcaagggguccugggacugcaucaugacgagcuaccaguaccucaucauccagaacaccaccugggaggaccacugccaguucucccgccccagccccaucggcuaccuggggcugcucagccagcggacccgcgacaucuacaucucccggcgccugcugggcacguucaccuggacccucagcgacuccgagggcaacgagacccccgggggcuacugccugacgcgguggaugcugaucgaggccgagcucaagugcuucgggaacaccgccguggccaagugcaacgagaagcacgacgaggaguucugcgacaugcugcgccuguucgacuucaacaagcaggcgauccggcgccucaagaccgaggcccagaugagcauccagcugaucaacaaggccgugaacgcccugaucaacgaccagcucaucaugaagaaccaccuccgggacaucaugggcaucccguacugcaacuacuccaaguacugguaccugaaccacaccgucacggggaagaccagccugccccgcugcuggcugguguccaacggcagcuaccugaacgagacccacuucuccgacgacaucgagcagcaggccgacaacaugaucaccgagcuccugcagaaggaguacaucgaccggcagggcaagacgccccuggggcugguggaccucuucgucuucagcaccuccuucuaccugaucagcaucuuccugcaccucgugaagaucccgugaggacuaguaauaaggaaacuguaugaaugucugugggcaggaagugaagagauccuucuguaaagguuuuuggaauuaugucugcugaauaauaaacuuuuuugaaauaauaaaucugguagaaaaaugagaucucaaaggcucuuuucagagccaccaaaaaaaaaaaaaaaaaaaaaaaaaaaaaaaaaaaaaaaaaaaaaaaaaaaaaaaaaaaaaaaaagaauu

SEQ ID NO: 42579 - RNA, 1664 nt, Artificial Sequence
  mRNA product Design b-4 (hSL-A64-N5) comprising derived and/or modified sequence from LASV(LASV003-NIG-2008;Clade II)__AIT17580__GPCmut13 (opt1)
aggagagucccgcagucggcguccagcggcucugcuuguucgugugugugucguugcaggccuuauucaagcuuaccaugggccagaucaucaccuucuuccaggaggugccccacgucaucgaggaggugaugaacaucgugcugaucgcccucagccugcuggccauccucaaggggaucuacaacgucgcgaccugcggccuguucgggcugguguccuuccuccugcugugcggccgcagcugcuccacgaccuacaaggggguguacgagcuccagacccuggagcuggacauggccagccucaacaugaccaugccgcuguccugcacgaagaacaacagccaccacuacaucauggucggcaacgagaccggccuggagcucacccugaccaacacguccaucaucaaccacaaguucugcaaccugagcgacgcccacaagaagaaccucuacgaccacgcccugauguccaucaucagcaccuuccaccuguccauccccaacuucaaccaguacgaggccaugagcugcgacuucaacgggggcaagaucuccgugcaguacaaccucagccacaccuacgcgguggacgccgccaaccacugcgggaccaucgccaacggcguccugcagacguucaugcggauggcguggggcggguccuacaucgcccuggacagcggcaagggguccugggacugcaucaugaccagcuaccaguaccucaucauccagaacaccaccugggaggaccacugccaguucucccgccccagccccaucggcuaccuggggcugcucagccagcggacgcgcgacaucuacaucucccggcgccugcugggcaccuucaccuggacccucagcgacuccgagagcaacgagacgccgggcggguacugccugacccgguggaugcugaucgaggccgagcucaagugcuucggcaacaccgccguggccaagugcaacgagaagcacgacgaggaguucugcgacaugcugcgccuguucgacuucaacaagcaggcgauccggcgccucaaggccgaggcccagauguccauccagcugaucaacaaggccgugaacgcccugaucaacgaccagcucaucaugaagaaccaccuccgggacaucauggggauccccuacugcaacuacagcaaguacugguaccugaaccacaccgucacgggccgcaccucccugccccggugcuggcuggugagcaacggguccuaccugaacgagacccacuucagcgacgacaucgagcagcaggcggacaacaugaucaccgagcuccugcagaaggaguacauggaccgccagggcaagacgccccugggccugguggaccucuucgucuucuccaccagcuucuaccugaucuccaucuuccugcaccucgugaagaucccgugaggacuaguaauaaggaaacuguaugaaugucugugggcaggaagugaagagauccuucuguaaagguuuuuggaauuaugucugcugaauaauaaacuuuuuugaaauaauaaaucugguagaaaaaugagaucucaaaggcucuuuucagagccaccaaaaaaaaaaaaaaaaaaaaaaaaaaaaaaaaaaaaaaaaaaaaaaaaaaaaaaaaaaaaaaaaagaauu

SEQ ID NO: 42580 - RNA, 1664 nt, Artificial Sequence
  mRNA product Design b-4 (hSL-A64-N5) comprising derived and/or modified sequence from LASV(LASV035-NIG-2009;Clade II)__AIT17588__GPCmut13 (opt1)
aggagagucccgcagucggcguccagcggcucugcuuguucgugugugugucguugcaggccuuauucaagcuuaccaugggccagaucaucaccuucuuccaggaggugccccacgucaucgaggaggugaugaacaucgugcugaucgcccucagccugcuggccauccucaaggggaucuacaacgucgcgaccugcggccuguucgggcugguguccuuccuccugcugugcggccgcagcugcuccacgaccuacaaggggguguacgagcuccagacccuggagcuggacauggccagccucaacaugaccaugccgcuguccugcacgaagaacaacagccaccacuacaucauggucggcaacgagaccggccuggagcucacccugaccaacacguccaucaucaaccacaaguucugcaaccugagcgacgcccacaagaagaaccucuacgaccacgcccugauguccaucaucagcaccuuccaccuguccauccccaacuucaaccaguacgaggccaugagcugcgacuucaacgggggcaagaucuccgugcaguacaaccucagccacgcguacgccguggacgccgccaaccacugcgggaccaucgcgaacggcguccugcagaccuucaugcggauggccuggggcggguccuacaucgcccuggacagcggcaagggguccugggacugcaucaugacgagcuaccaguaccucaucauccagaacaccaccugggaggaccacugccaguucucccgccccagccccaucggcuaccuggggcugcucagccagcggacccgcgacaucuacaucucccggcgccugcugggcacguucaccuggacccucagcgacuccgagggcaacgagacccccgggggcuacugccugacgcgguggaugcugaucgaggccgagcucaagugcuucgggaacaccgccguggcgaagugcaacgagaagcacgacgaggaguucugcgacaugcugcgccuguucgacuucaacaagcaggccauccggcgccucaaggccgaggcccagaugagcauccagcugaucaacaaggccgugaacgcgcugaucaacgaccagcucaucaugaagaaccaccuccgggacaucaugggcauccccuacugcaacuacuccaaguacugguaccugaaccacaccgucaccgggaagacgagccugccccgcugcuggcugguguccaacggcagcuaccugaacgagacccacuucuccgacgacaucgagcagcaggccgacaacaugaucaccgagcuccugcagaaggaguacaucgaccggcagggcaagaccccgcuggggcugguggaccucuucgucuucagcacguccuucuaccugaucagcaucuuccugcaccucgugaagaucccgugaggacuaguaauaaggaaacuguaugaaugucugugggcaggaagugaagagauccuucuguaaagguuuuuggaauuaugucugcugaauaauaaacuuuuuugaaauaauaaaucugguagaaaaaugagaucucaaaggcucuuuucagagccaccaaaaaaaaaaaaaaaaaaaaaaaaaaaaaaaaaaaaaaaaaaaaaaaaaaaaaaaaaaaaaaaaagaauu

SEQ ID NO: 42581 - RNA, 1664 nt, Artificial Sequence
  mRNA product Design b-4 (hSL-A64-N5) comprising derived and/or modified sequence from LASV(LASV1000-NIG-2009;Clade II)__AIT17782__GPCmut13 (opt1)
aggagagucccgcagucggcguccagcggcucugcuuguucgugugugugucguugcaggccuuauucaagcuuaccaugggccagaucaucaccuucuuccaggaggugccccacgucaucgaggaggugaugaacaucgugcugaucgcccucagccugcuggccauccucaaggggaucuacaacgucgcgaccugcggccuguucgggcugguguccuuccuccugcugugcggccgcagcugcuccacgaccuacaaggggguguacgagcuccagacccuggagcuggacauggccagccucaacaugaccaugccgcuguccugcacgaagaacaacagccaccacuacaucauggucggcaacgagaccggccuggagcucacccugaccaacacguccaucaucaaccacaaguucugcaaccugagcgacgcccacaagaagaaccucuacgaccacgcccugauguccaucaucagcaccuuccaccuguccauccccaacuucaaccaguacgaggccaugagcugcgacuucaacgggggcaagaucuccgugcaguacaaccucagccacaccuacgcgguggacgccgccaaccacugcgggaccaucgccaacggcguccugcagacguucaugcggauggcguggggcggguccuacaucgcccuggacagcggcaagggguccugggacugcaucaugaccagcuaccaguaccucaucauccagaacaccaccugggaggaccacugccaguucucccgccccagccccaucggcuaccuggggcugcucagccagcggacgcgcgacaucuacaucucccggcgccugcugggcaccuucaccuggacccucagcgacuccgagggcaacgagacgcccgggggcuacugccugacccgguggaugcugaucgaggccgagcucaagugcuucgggaacaccgccguggccaagugcaacgagaagcacgacgaggaguucugcgacaugcugcgccuguucgacuucaacaagcaggcgaucaagcggcucaagaccgaggcccagaugagcauccagcugaucaacaaggccgugaacgcccugaucaacgaccagcucaucaugaagaaccaccuccgcgacaucaugggcauccccuacugcaacuacuccaaguacugguaccugaaccacacggucaccgggaagaccagccugccccggugcuggcugguguccaacggcagcuaccugaacgagacccacuucuccgacgacaucgagcagcaggccgacaacaugaucacggagcuccugcagaaggaguacaucgaccgccagggcaagaccccgcuggggcugguggaccucuucgucuucagcaccuccuucuaccugaucagcaucuuccugcaccucgugaagaucccgugaggacuaguaauaaggaaacuguaugaaugucugugggcaggaagugaagagauccuucuguaaagguuuuuggaauuaugucugcugaauaauaaacuuuuuugaaauaauaaaucugguagaaaaaugagaucucaaaggcucuuuucagagccaccaaaaaaaaaaaaaaaaaaaaaaaaaaaaaaaaaaaaaaaaaaaaaaaaaaaaaaaaaaaaaaaaagaauu

SEQ ID NO: 42582 - RNA, 1664 nt, Artificial Sequence
  mRNA product Design b-4 (hSL-A64-N5) comprising derived and/or modified sequence from LASV(LASV221-NIG-2010;Clade II)__AIT17624__GPCmut13 (opt1)
aggagagucccgcagucggcguccagcggcucugcuuguucgugugugugucguugcaggccuuauucaagcuuaccaugggccagaucaucaccuucuuccaggaggugccccacgucaucgaggaggugaugaacaucgugcugaucgcccucagccugcuggccauccucaaggggaucuacaacgucgcgaccugcggccuguucgggcugguguccuuccuccugcugugcggccgcagcugcuccacgaccuacaaggggguguacgagcuccagacccuggagcuggacauggccagccucaacaugaccaugccgcuguccugcacgaagaacaacagccaccacuacaucauggucggcaacgagaccggccuggagcucacccugaccaacacguccaucaucaaccacaaguucugcaaccugagcgacgcccacaagaagaaccucuacgaccacgcccugauguccaucaucagcaccuuccaccuguccauccccaacuucaaccaguacgaggccaugagcugcgacuucaacgggggcaagaucuccgugcaguacaaccucagccacaccuacgcgaucgacgccgccaaccacugcgggaccaucgccaacggcgugcugcagacguucaugcggauggcguggggcggguccuacaucgcccuggacagcggcaagggguccugggacugcaucaugaccagcuaccaguaccucaucauccagaacaccaccugggaggaccacugccaguucucccgccccagccccaucggcuaccuggggcugcucagccagcggacgcgcgacaucuacaucucccggcgccugcugggcaccuucaccuggacccucagcgacuccgagggcaacgagacgcccgggggcuacugccugacccgguggaugcugaucgaggccgagcucaagugcuucgggaacaccgccgucgccaagugcaacgagaagcacgacgaggaguucugcgacaugcugcgccuguucgacuucaacaagcaggcgauccggcgccucaagaccgaggcccagaugagcauccagcugaucaacaaggccgugaacgcccugaucaacgaccagcucaucaugaagaaccaccuccgggacaucaugggcauccccuacugcaacuacuccaaguacugguaccugaaccacacggugaccgggaagaccagccugccccgcugcuggcuggucuccaacggcagcuaccugaacgagacccacuucuccgacgacaucgagcagcaggccgacaacaugaucacggagaugcuccagaaggaguacauggaccggcagggcaagaccccgcuggggcugguggaccuguucguguucagcaccuccuucuaccucaucagcaucuuccugcaccuggucaagaucccgugaggacuaguaauaaggaaacuguaugaaugucugugggcaggaagugaagagauccuucuguaaagguuuuuggaauuaugucugcugaauaauaaacuuuuuugaaauaauaaaucugguagaaaaaugagaucucaaaggcucuuuucagagccaccaaaaaaaaaaaaaaaaaaaaaaaaaaaaaaaaaaaaaaaaaaaaaaaaaaaaaaaaaaaaaaaaagaauu

SEQ ID NO: 42583 - RNA, 1664 nt, Artificial Sequence
  mRNA product Design b-4 (hSL-A64-N5) comprising derived and/or modified sequence from LASV(LASV237-NIG-2010;Clade II)__AIT17638__GPCmut13 (opt1)
aggagagucccgcagucggcguccagcggcucugcuuguucgugugugugucguugcaggccuuauucaagcuuaccaugggccagaucaucaccuucuuccaggaggugccccacgucaucgaggaggugaugaacaucgugcugaucgcccucagccugcuggccauccucaaggggaucuacaacgucgcgaccugcggccuguucgggcugguguccuuccuccugcugugcggccgcagcugcuccacgaccuacaaggggguguacgagcuccagacccuggagcuggacauggccagccucaacaugaccaugccgcuguccugcacgaagaacaacagccaccacuacaucauggucggcaacgagaccggccuggagcucacccugaccaacacguccaucaucaaccacaaguucugcaaccugagcgacgcccacaagaaggaccucuacgaccacgcccugauguccaucaucagcaccuuccaccuguccauccccaacuucaaccaguacgaggccaugagcugcgacuucaacgggggcaagaucuccgugcaguacaaccucagccacaccuacgcgguggacgccgccaaccacugcgggaccaucgccaacggcguccugcagacguucaugcggauggcguggggcggguccuacaucgcccuggacagcggcaagggguccugggacugcaucaugaccagcuaccaguaccucaucauccagaacaccaccugggaggaccacugccaguucucccgccccagccccaucggcuaccuggggcugcucagccagcggacgcgcgacaucuacaucucccggcgccugcugggcaccuucaccuggacccucagcgacuccgagggcaacgagacgcccgggggcuacugccugacccgguggaugcugaucgaggccgagcucaagugcuucgggaacaccgccguggccaagugcaacgagaagcacgacgaggaguucugcgacaugcugcgccuguucgacuucaacaagcaggcgauccggcgccucaagaccgaggcccagaugagcauccagcugaucaacaaggccgugaacgcccugaucaacgaccagcucaucaugaagaaccaccuccgggacaucaugggcauccccuacugcaacuacuccaaguacugguaccugaaccacacggucaccgggaagaccagccugccccgcugcuggcugguguccaacggcagcuaccugaacgagacccacuucuccgacgacaucgagcagcaggccgacaacaugaucacggagcuccugcagaaggaguacauggaccggcagggcaagaccccgcuggggcugguggaccucuucgucuucagcaccuccuucuaccugaucagcaucuuccugcaccucaucaagaucccgugaggacuaguaauaaggaaacuguaugaaugucugugggcaggaagugaagagauccuucuguaaagguuuuuggaauuaugucugcugaauaauaaacuuuuuugaaauaauaaaucugguagaaaaaugagaucucaaaggcucuuuucagagccaccaaaaaaaaaaaaaaaaaaaaaaaaaaaaaaaaaaaaaaaaaaaaaaaaaaaaaaaaaaaaaaaaagaauu

SEQ ID NO: 42584 - RNA, 1664 nt, Artificial Sequence
  mRNA product Design b-4 (hSL-A64-N5) comprising derived and/or modified sequence from LASV(LASV253-NIG-2011;Clade II)__AIT17670__GPCmut13 (opt1)
aggagagucccgcagucggcguccagcggcucugcuuguucgugugugugucguugcaggccuuauucaagcuuaccaugggccagaucaucaccuucuuccaggaggugccccacgucaucgaggaggugaugaacaucgugcugaucgcccucagccugcuggccauccucaaggggaucuacaacgucgcgaccugcggccuguucgggcugguguccuuccuccugcugugcggccgcagcugcuccacgaccuacaaggggguguacgagcuccagacccuggagcuggacauggccagccucaacaugaccaugccgcuguccugcacgaagaacaacagccaccacuacaucauggucggcaacgagaccggccuggagcucacccugaccaacacguccaucaucaaccacaaguucugcaaccugagcgacgcccacaagaagaaccucuacgaccacgcccugauguccaucaucagcaccuuccaccuguccauccccaacuucaaccaguacgaggccaugagcugcgacuucaacgggggcaagaucuccgugcaguacaaccucagccacaccuacgcgguggacgccgccaaccacugcgggaccaucgccaacggcguccugcagacguucaugcggauggcguggggcggguccuacaucgcccuggacagcggcaagggguccugggacugcaucaugaccagcuaccaguaccucaucauccagaacaccaccugggaggaccacugccaguucucccgccccagccccaucggcuaccuggggcugcucagccagcggacgcgcgacaucuacaucucccggcgccugcugggcaccuucaccuggacccucagcgacuccgagggcaacgagacgcccgggggcuacugccugacccgguggaugcugaucgaggccgagcucaagugcuucgggaacaccgccguggccaagugcaacgagaagcacgacgaggaguucugcgacaugcugcgccuguucgacuucaacaagcaggcgauccggcgccucaaggccgaggcccagaugagcauccagcugaucaacaaggccgugaacgcccugaucaacgaccagcucaucaugaagaaccaccuccgggacaucaugggcaucccguacugcaacuacuccaaguacugguaccugaaccacaccgucacggggcgcaccagccugccccggugcuggcugguguccaacggcagcuaccugaacgagacccacuucuccgacgacaucgagcagcaggcggacaacaugaucaccgagcuccugcagaaggaguacaucgaccgccagggcaagacgccccuggggcugguggaccucuucgucuucagcaccuccuucuaccugaucagcaucuuccugcaccucgugaagaucccgugaggacuaguaauaaggaaacuguaugaaugucugugggcaggaagugaagagauccuucuguaaagguuuuuggaauuaugucugcugaauaauaaacuuuuuugaaauaauaaaucugguagaaaaaugagaucucaaaggcucuuuucagagccaccaaaaaaaaaaaaaaaaaaaaaaaaaaaaaaaaaaaaaaaaaaaaaaaaaaaaaaaaaaaaaaaaagaauu

SEQ ID NO: 42585 - RNA, 1664 nt, Artificial Sequence
  mRNA product Design b-4 (hSL-A64-N5) comprising derived and/or modified sequence from LASV(LASV254-NIG-2011;Clade II)__AIT17674__GPCmut13 (opt1)
aggagagucccgcagucggcguccagcggcucugcuuguucgugugugugucguugcaggccuuauucaagcuuaccaugggccagaucaucaccuucuuccaggaggugccccacgucaucgaggaggugaugaacaucgugcugaucgcccucagccugcuggccauccucaaggggaucuacaacgucgcgaccugcggccuguucgggcugguguccuuccuccugcugugcggccgcagcugcuccacgaccuacaaggggguguacgagcuccagacccuggagcuggacaugaccaaccucaacaugacgaugccgcugagcugcaccaagaacaacucccaccacuacaucauggucggcaacgagaccggccuggagcucacccugacgaacaccagcaucaucaaccacaaguucugcaaccuguccgacgcccacaagaagaaccucuacaaccacgcccugaugagcaucaucuccaccuuccaccugagcauccccaacuucaaccaguacgaggccauguccugcgacuucaacgggggcaagaucagcgugcaguacaaccucucccacagcuacgccguggacgcggccaaccacugcgggaccaucgccaacggcguccugcagacguucaugcggauggccuggggcggguccuacaucgcgcuggacagcggcaaggggaacugggacugcaucaugaccuccuaccaguaccucaucauccagaacaccaccugggaggaccacugccaguucagccgccccucccccaucggcuaccuggggcugcucagccagcggacgcgcgacaucuacaucagccggcgccugcugggcaccuucaccuggacccucuccgacagcgagggcaacgagacgcccgggggcuacugccugacccgguggaugcugaucgaggccgagcucaagugcuucgggaacaccgccguggccaagugcaacgagaagcacgacgaggaguucugcgacaugcugcgccuguucgacuucaacaagcaggccauccggcgccucaagaccgaggcgcaggccaacauccagcugaucaacaaggccgugaacgcccugaucaacgaccagcucaucaugaagaaccaccuccgggacaucaugggcauccccuacugcaacuacuccaaguacugguaccugaaccacacggucaccgggaagaccagccugccccgcugcuggcugguguccaacggcagcuaccugaacgagacccacuucuccgacgacaucgagcagcaggccgacaacaugaucacggagcuccugcagaaggaguacauggaccggcagggcaagaccccgcuggggcugguggaccucuucgucuucagcaccuccuucuaccugaucagcaucuuccugcaccucgugaagaucccgugaggacuaguaauaaggaaacuguaugaaugucugugggcaggaagugaagagauccuucuguaaagguuuuuggaauuaugucugcugaauaauaaacuuuuuugaaauaauaaaucugguagaaaaaugagaucucaaaggcucuuuucagagccaccaaaaaaaaaaaaaaaaaaaaaaaaaaaaaaaaaaaaaaaaaaaaaaaaaaaaaaaaaaaaaaaaagaauu

SEQ ID NO: 42586 - RNA, 1664 nt, Artificial Sequence
  mRNA product Design b-4 (hSL-A64-N5) comprising derived and/or modified sequence from LASV(Nig08-A19;Clade III)__ADU56618__GPCmut13 (opt1)
aggagagucccgcagucggcguccagcggcucugcuuguucgugugugugucguugcaggccuuauucaagcuuaccaugggccagaucgugaccuucuuccaggaggucccccacgugaucgaggaggugaugaacaucguccugaucgcccucagcauccuggccauccugaaggggcucuacaacaucgcgaccugcggccugaucgggcuggugacguuccuccugcuguccggccgcagcugcuccaugaccuacaaggggguguacgagcuccagacccuggagcugaacaugaacacccucaacaugacgaugccgcugagcugcaccaagaacaacucccaccacuacaucauggucggcaacgagaccggccuggagcucacccugacgaacaccagccugcuccaccacaaguucugcaaccuguccgacgcccacaagaagaaccuguacgaccacacccucaugagcaucaucuccaccuuccaccugagcauccccaacuucaaccaguacgaggccauguccugcgacuucaacgggggcaagaucacggugcaguacaaccugagccacuccuacgccaucgacgccgcgaaccacugcgggaccguggccaacggcguccuccagaccuucaugcggauggccuggggcgggagcuacaucgcccuggacuccggccgcgggaagugggacugcaucaugaccagcuaccaguaccugaucauccagaacacgaccugggaggaccacugccaguucucccggcccagccccaucggcuaccucgggcugcugucccagcgcacccgggacaucuacaucagccgccggcuccugggcaccuucacguggacccugagcgacuccgagggcaacgagacccccgggggcuacugccucacccgcuggaugcugaucgaggcggagcugaagugcuucgggaacacggccguggccaagugcaacgagaagcacgacgaggaguucugcgacaugcuccggcuguucgacuucaacaagcaggccauccgccggcugaaggccgaggcgcagaugagcauccagcucaucaacaaggccgugaacgcccugaucaacgaccagcugaucaugaagaaccaccuccgcgacaucaugggcauccccuacugcaacuacuccaaguacugguaccugaaccacaccagcaccgggcggaccucccugccccgcugcuggcucgucagcaacggcuccuaccugaacgagacgcacuucagcgacgacaucgagcagcaggccgacaacaugaucaccgagaugcugcagaaggaguaccuggaccggcagggcaagaccccgcucgggcugguggaccuguucguguucuccaccagcuucuaccucaucuccaucuuccugcaccuggucaagaucccgugaggacuaguaauaaggaaacuguaugaaugucugugggcaggaagugaagagauccuucuguaaagguuuuuggaauuaugucugcugaauaauaaacuuuuuugaaauaauaaaucugguagaaaaaugagaucucaaaggcucuuuucagagccaccaaaaaaaaaaaaaaaaaaaaaaaaaaaaaaaaaaaaaaaaaaaaaaaaaaaaaaaaaaaaaaaaagaauu

SEQ ID NO: 42587 - RNA, 1667 nt, Artificial Sequence
  mRNA product Design b-4 (hSL-A64-N5) comprising derived and/or modified sequence from LASV(G1180-SLE-2010;Clade IV)__AIT17168__GPCmut13 (opt1)
aggagagucccgcagucggcguccagcggcucugcuuguucgugugugugucguugcaggccuuauucaagcuuaccaugggccagaucgugaccuucuuccaggaggucccccacgugaucgaggaggugaugaacaucguccugaucgcccucagcauccuggccgugcugaaggggcucuacaacuucgcgaccugcggccugguggggcugcucaccuuccugcugcucugcggccgcuccugcaccgccagccgguacaagggggucuacgagcugcagacccuggagcucaacauggagacccugaacaugacgaugccgcuguccugcaccaagaacaacagccaccacuacaucauggugggcaacgagaccggccucgagcugacccugacgaacaccuccaucaucaaccacaaguucugcaaccucagcgacgcccacaagaagaaccuguacgaccacgcccugauguccaucaucagcaccuuccaccucuccauccccaacuucaaccaguacgaggccaugagcugcgacuucaacgggggcaagaucuccgugcaguacaaccugagccacuccuacgcgggggacgccgccaaccacugcggcaccgucgccaacggggugcugcagacguucaugcgcauggcguggggcggcagcuacaucgcccucgacuccgggcacggcagcugggacugcaucaugaccuccuaccaguaccugaucauccagaacaccaccugggaggaccacugccaguucagccggcccucccccaucggguaccugggccuccugagccagcgcacgcgggacaucuacaucagccgccggcugcucggcaccuucaccuggacccuguccgacagcgaggggaaggacacgccgggcggguacugccugacccgcuggaugcucaucgaggccgagcugaagugcuucggcaacaccgccguggccaagugcaacgagaagcacgacgaggaguucugcgacaugcugcggcuguucgacuucaacaagcaggcgauccagcgccugaaggccgaggcccagauguccauccagcugaucaacaaggccgucaacgcccucaucaacgaccagcugaucaugaagaaccaccuccgggacaucauggggauccccuacugcaacuacagcaaguacugguaccucaaccacaccacgaccggcaagaccucccugcccaagugcuggcuggugagcaacggcuccuaccucaacgagacccacuucagcgacgacaucgagcagcaggcggacaacaugaucacggagaugcugcagaaggaguacauggagcgccaggggaagacgccccugggccugguggaccucuucgucuucuccaccagcuucuaccugaucuccaucuuccugcaccucgugaagaucccgugaggacuaguaauaaggaaacuguaugaaugucugugggcaggaagugaagagauccuucuguaaagguuuuuggaauuaugucugcugaauaauaaacuuuuuugaaauaauaaaucugguagaaaaaugagaucucaaaggcucuuuucagagccaccaaaaaaaaaaaaaaaaaaaaaaaaaaaaaaaaaaaaaaaaaaaaaaaaaaaaaaaaaaaaaaaaagaauu

SEQ ID NO: 42588 - RNA, 1667 nt, Artificial Sequence
  mRNA product Design b-4 (hSL-A64-N5) comprising derived and/or modified sequence from LASV(G1442-SLE-2011;Clade IV)__AIT17180__GPCmut13 (opt1)
aggagagucccgcagucggcguccagcggcucugcuuguucgugugugugucguugcaggccuuauucaagcuuaccaugggccagaucgugaccuucuuccaggaggucccccacgugaucgaggaggugaugaacaucguccugaucgcccucagcauccuggccgugcugaaggggcucuacaacguggcgaccugcggccugaucgggcuggucacguuccuccugcugugcggccgcuccugcaccaccacccucuacaaggggguguacgagcugcagacgcuggagcucaacauggagacccugaacaugaccaugccgcugagcugcaccaagaacaacucccaccacuacauccgggugggcaacgagacgggccucgagcugacccugaccaacaccagcaucaucaaccacaaguucugcaaccucuccgacgcccacaagaagaaccuguacgaccacgcccugaugagcaucaucuccacguuccaccucagcauccccaacuucaaccaguacgaggccauguccugcgacuucaacgggggcaagaucagcguccaguacaaccugucccacagcuacgccggggacgcggccaaccacugcggcaccguggccaacggggugcugcagaccuucaugcgcauggccuggggcggcuccuacaucgcgcucgacagcgggcggggcaacugggacugcaucaugaccuccuaccaguaccugaucauccagaacacgaccugggacgaccacugccaguucagccgccccucccccaucggguaccugggccuccugagccagcggacccgcgacgucuacaucucccggcgccugcucggcaccuucacguggacccugagcgacagcgaggggaaggacaccccgggcggguacugccugacccgguggaugcucaucgaggccgagcugaagugcuucggcaacacggccguggccaagugcaacgagaagcacgacgaggaguucugcgacaugcugcgccucuucgacuucaacaagcaggccauccagcggcugaaggcggaggcccagauguccauccagcugaucaacaaggccgugaacgcccucaucaacgaccagcugaucaugaagaaccaccuccgcgacaucauggggauccccuacugcaacuacagcaaguacugguaccugaacaacaccgccaccggcaagaccucccugcccaagugcuggcugaucagcaacggcuccuaccucaacgagacgcacuucagcgacgacaucgagcaggaggcggacaacaugaucaccgagaugcugcagaaggaguacauggagcggcaggggaagacgccccugggccuggucgaccucuucguguucuccaccagcuucuaccugaucuccaucuuccugcaccucgugaagaucccgugaggacuaguaauaaggaaacuguaugaaugucugugggcaggaagugaagagauccuucuguaaagguuuuuggaauuaugucugcugaauaauaaacuuuuuugaaauaauaaaucugguagaaaaaugagaucucaaaggcucuuuucagagccaccaaaaaaaaaaaaaaaaaaaaaaaaaaaaaaaaaaaaaaaaaaaaaaaaaaaaaaaaaaaaaaaaagaauu

SEQ ID NO: 42589 - RNA, 1667 nt, Artificial Sequence
  mRNA product Design b-4 (hSL-A64-N5) comprising derived and/or modified sequence from LASV(G3010-SLE-2013;Clade IV)__AIT17344__GPCmut13 (opt1)
aggagagucccgcagucggcguccagcggcucugcuuguucgugugugugucguugcaggccuuauucaagcuuaccaugggccagaucgugaccuucuuccaggaggucccccacgugaucgaggaggugaugaacaucguccugaucgcccucagcauccuggccgugcugaaggggcucuacaacuucgcgaccugcggccugguggggcuggucacguuccuccugcugugcggccgcuccugcaccaccagccucuacaaggggguguacgagcugcagacccuggagcucaacauggagacgcugaacaugaccaugccgcuguccugcaccaagaacaacagccaccacuacaucauggugggcaacgagaccggccucgagcugacgcugaccaacaccuccaucaucaaccacaaguucugcaaccucagcgacgcccacaagaagaaccuguacaaccacgcccugauguccaucaucagcaccuuccaccucuccauccccaacuucaaccaguacgaggccaugagcugcgacuucaacgggggcaagaucuccguccaguacaaccugagccacuccuacgccggggacgcggccagccacugcggcacgguggccaacggggugcugcagaccuucaugcggauggccuggggcggcuccuacaucgcgcucgacagcggguacggcaagugggacugcaucaugaccuccuaccaguaccugaucauccagaacaccacgugggaggaccacugccaguucagccgccccucccccaucggguaccugggccuccugagccagcggacccgcgacaucuacaucagccggcgccugcucggcaccuucaccuggacgcuguccgacagcgaggggaaggacaccccgggcggguacugccugacccgguggaugcucaucgaggccgagcugaagugcuucggcaacaccgccgucgccaagugcaacgagaagcacgacgaggaguucugcgacaugcugcgccucuucgacuucaacaagcaggccauccagcggcugaagacggaggcgcagauguccauccagcugaucaacaaggccgugaacgcccucaucaacgaccagcugaucaugaagaaccaccuccgcgacaucauggggauccccuacugcaacuacagcaaguacugguaccugaaccacaccaccaccggcaagacgucccugcccaagugcuggcuggugagcaacggcuccuaccucaacgagacccacuucagcgacgacaucgagcagcaggccgacaacaugaucaccgagaugcugcagaaggaguacauggagcggcaggggaagacgccccugggccuggucgaccucuucguguucuccaccagcuucuaccugaucuccaucuuccugcaccucgugaagaucccgugaggacuaguaauaaggaaacuguaugaaugucugugggcaggaagugaagagauccuucuguaaagguuuuuggaauuaugucugcugaauaauaaacuuuuuugaaauaauaaaucugguagaaaaaugagaucucaaaggcucuuuucagagccaccaaaaaaaaaaaaaaaaaaaaaaaaaaaaaaaaaaaaaaaaaaaaaaaaaaaaaaaaaaaaaaaaagaauu

SEQ ID NO: 42590 - RNA, 1667 nt, Artificial Sequence
  mRNA product Design b-4 (hSL-A64-N5) comprising derived and/or modified sequence from LASV(G502-SLE-2009;Clade IV)__AIT17126__GPCmut13 (opt1)
aggagagucccgcagucggcguccagcggcucugcuuguucgugugugugucguugcaggccuuauucaagcuuaccaugggccagaucgugaccuucuuccaggaggucccccacgugaucgaggaggugaugaacaucguccugaucgcccucagcauccuggccgugcugaaggggcucuacaacuucgcgaccugcggccugguggggcugcucacguuccugcugcucugcggccgcuccugcaccaccgggcuguacaagggcgucuacgagcugcagacccucgagcugaacauggagacgcugaacaugaccaugccgcucagcugcaccaagaacaacucccaccacuacaucauggugggcaacgagaccgggcuggagcugacgcucaccaacaccagcaucaucaaccacaaguucugcaaccuguccgacgcccacaagaagaaccuguacgaccacgcccucaugagcaucaucuccaccuuccaccugagcauccccaacuucaaccaguacgaggccauguccugcgacuucaacggcgggaagaucagcgugcaguacaaccugucccacagcuacgccggcgacgcggccgaccacugcgggacggucgccaacggcgugcuccagaccuucaugcggauggccuggggcggguccuacaucgcgcuggacagcggccgcgggcggugggacugcaucaugaccuccuaccaguaccugaucauccagaacaccacgugggaggaccacugccaguucagccgccccucccccaucggcuaccucggccugcugagccagcggacccgcgacaucuacaucucccggcgccuccuggggaccuucaccuggacgcugagcgacagcgagggcaaggacacccccgggggcuacugccucacccgguggaugcugaucgaggccgagcugaagugcuucgggaacaccgccguggccaagugcaacgagaagcacgacgaggaguucugcgacaugcuccgccuguucgacuucaacaagcaggccauccagcggcugaaggcggaggcccagauguccauccagcucaucaacaaggccgucaacgcccugaucaacgaccagcuggugaugaagaaccaccuccgcgacaucaugggcauccccuacugcaacuacagccgguacugguaccugaaccacacgaccaccggccgcaccucccugcccaagugcuggcucgugagcaacggguccuaccugaacgagacgcacuucagcgacgacaucgagcagcaggccgacaacaugaucaccgagaugcugcagaaggaguacauggagcggcagggcaagaccccgcuggggcucgucgaccuguucguguucuccaccagcuucuaccugaucuccaucuuccuccaccuggugaagaucccgugaggacuaguaauaaggaaacuguaugaaugucugugggcaggaagugaagagauccuucuguaaagguuuuuggaauuaugucugcugaauaauaaacuuuuuugaaauaauaaaucugguagaaaaaugagaucucaaaggcucuuuucagagccaccaaaaaaaaaaaaaaaaaaaaaaaaaaaaaaaaaaaaaaaaaaaaaaaaaaaaaaaaaaaaaaaaagaauu

SEQ ID NO: 42591 - RNA, 1667 nt, Artificial Sequence
  mRNA product Design b-4 (hSL-A64-N5) comprising derived and/or modified sequence from LASV(G733-SLE-2010;Clade IV)__AIT17154__GPCmut13 (opt1)
aggagagucccgcagucggcguccagcggcucugcuuguucgugugugugucguugcaggccuuauucaagcuuaccaugggccagaucgugaccuucuuccaggaggucccccacgugaucgaggaggugaugaacaucguccugaucgcccucagcauccuggccgugcugaaggggcucuacaacuucgcgaccugcggcaucguggggcuggucuccuuccugcuccugugcggccgcagcugcacgaccucccuguacaaggggguguacgagcuccagacccuggagcugaacauggagacccucaacaugacgaugccgcugagcugcaccaagaacaacucccaccacuacaucauggugggcaacgagaccggccuggagcucacccugacgaacaccagcaucaucaaccacaaguucugcaaccuguccgacgcccacaagaagaaccucuacgaccacgcccugaugagcaucaucuccaccuuccaccugagcauccccaacuucaaccaguacgaggccauguccugcgacuucaacgggggcaagaucagcguccaguacaaccucucccacagcuacgccggggacgcggccaaccacugcggcaccaucgccaacggggugcugcagacguucaugcggauggccuggggcggcuccuacaucgcgcuggacagcgggcgcgaccggugggacugcaucaugaccuccuaccaguaccucaucauccagaacaccaccugggaggaccacugccaguucagccgccccucccccaucggcuaccuggggcugcucagccagcggacgcgcgacaucuacaucagccggcgccugcugggcaccuucaccuggacccucuccgacagcgagggcaaggacacgcccgggggcuacugccugacccgguggaugcugaucgaggccgagcucaagugcuucgggaacaccgccguggccaagugcaacgagaagcacgacgaggaguucugcgacaugcugcgccuguucgacuucaacaagcaggccauccagcggcucaaggcggaggcccagauguccauccagcugaucaacaaggccgucaacgcccugaucaacgaccagcucaucaugaagaaccaccuccgcgacaucaugggcauccccuacugcaacuacagcaaguacugguaccugaaccacaccacgaccgggaagaccucccugcccaagugcuggcuggugagcaacggcuccuaccugaacgagacccacuucagcgacgacaucgagcagcaggccgacaacaugaucacggagaugcuccagaaggaguacauggagcggcagggcaagaccccgcuggggcugguggaccuguucgucuucuccaccagcuucuaccucaucuccaucuuccugcaccuggugaagaucccgugaggacuaguaauaaggaaacuguaugaaugucugugggcaggaagugaagagauccuucuguaaagguuuuuggaauuaugucugcugaauaauaaacuuuuuugaaauaauaaaucugguagaaaaaugagaucucaaaggcucuuuucagagccaccaaaaaaaaaaaaaaaaaaaaaaaaaaaaaaaaaaaaaaaaaaaaaaaaaaaaaaaaaaaaaaaaagaauu

SEQ ID NO: 42592 - RNA, 1667 nt, Artificial Sequence
  mRNA product Design b-4 (hSL-A64-N5) comprising derived and/or modified sequence from MOPV/LASV reassortant(IGS-1;Clade IV)__AFY05576__GPCmut13 (opt1)
aggagagucccgcagucggcguccagcggcucugcuuguucgugugugugucguugcaggccuuauucaagcuuaccaugggccagaucgugaccuucuuccaggaggucccccacgugaucgaggaggugaugaacaucguccugaucgcccucagcgugcuggccgugcugaaggggcucuacaacuucgcgaccugcggccuggucgggcuggugacguuccuccugcugugcggccgcuccugcaccaccagccucuacaaggggguguacgagcugcagacccuggagcucaacauggagacgcugaacaugaccaugccgcuguccugcaccaagaacaacagccaccacuacaucauggucggcaacgagaccggccucgagcugacgcugaccaacaccuccaucaucaaccacaaguucugcaaccucagcgacgcccacaagaagaaccuguacgaccacgcccugauguccaucaucagcaccuuccaccucuccauccccaacuucaaccaguacgaggccaugagcugcgacuucaacgggggcaagaucuccgugcaguacaaccugagccacuccuacgccggggacgcggccaaccacugcggcacgguggccaacgggguccugcagaccuucaugcggauggccuggggcggcagcuacaucgcgcucgacuccgggcgcggcaacugggacugcaucaugaccagcuaccaguaccugaucauccagaacaccacgugggaggaccacugccaguucucccggcccagccccaucggguaccugggccuccugucccagcgcacccgggacaucuacaucagccgccggcugcucggcaccuucaccuggacgcugagcgacuccgagggggaggacaccccgggcggguacugccugacccgcuggaugcucaucgaggccgagcugaagugcuucggcaacaccgccguggccaagugcaacgagaagcacgacgaggaguucugcgacaugcugcggcuguucgacuucaacaagcaggccauccagcgccugaaggcggaggcccagaugagcauccagcugaucaacaaggccgugaacgcccucaucaacgaccagcugaucaugaagaaccaccuccgggacaucauggggauccccuacugcaacuacuccaaguacugguaccucaaccacacgaccaccggccgcaccagccugcccaagugcuggcuggucuccaacggcagcuaccucaacgagacgcacuucuccgacgacaucgagcagcaggccgacaacaugaucaccgagaugcugcagaaggaguacauggagcggcaggggaagacgccccugggccugguggaccucuucguguucagcaccuccuucuaccugaucagcaucuuccugcaccucgucaagaucccgugaggacuaguaauaaggaaacuguaugaaugucugugggcaggaagugaagagauccuucuguaaagguuuuuggaauuaugucugcugaauaauaaacuuuuuugaaauaauaaaucugguagaaaaaugagaucucaaaggcucuuuucagagccaccaaaaaaaaaaaaaaaaaaaaaaaaaaaaaaaaaaaaaaaaaaaaaaaaaaaaaaaaaaaaaaaaagaauu

SEQ ID NO: 42593 - RNA, 1667 nt, Artificial Sequence
  mRNA product Design b-4 (hSL-A64-N5) comprising derived and/or modified sequence from LASV(LM765-SLE-2012;Clade IV)__AIT17814__GPCmut13 (opt1)
aggagagucccgcagucggcguccagcggcucugcuuguucgugugugugucguugcaggccuuauucaagcuuaccaugggccagaucgugaccuucuuccaggaggucccccacgugaucgaggaggugaugaacaucguccugaucgcccucagcauccuggccgugcugaaggggcucuacaacuucgcgaccugcggccugguggggcuggucacguuccuccugcugugcggccgcuccugcaccaccagccucuacaaggggguguacgagcugcagacccuggagcucaacauggagacgcugaacaugaccaugccgcuguccugcaccaagaacaacagccaccacuacaucauggugggcaacgagaccggccucgagcugacgcugaccaacaccuccaucaucgaccacaaguucugcaaccucagcgacgcccaccggaagaaccuguacgaccacgcccugauguccaucaucagcaccuuccaccucuccauccccaacuucaaccaguacgaggccaugagcugcgacuucaacgggggcaagaucuccguccaguacaaccugagccacuccuacgccaaggacgcggccgaccacugcgggacgguggccaacggcgugcugcagaccuucaugcgcauggccuggggcgggagcuacaucgcgcucgacuccggccgggggcgcugggacugcaucaugaccagcuaccaguaccugaucauccagaacaccacgugggaggaccacugccaguucucccggcccagccccaucggcuaccuggggcuccugucccagcgcacccgggacaucuacaucagccgccggcugcucggcaccuucaccuggacgcugagcgacuccgagggcaaggacacccccgggggcuacugccugacccgcuggaugcucaucgaggccgagcugaagugcuucgggaacaccgccgucgccaagugcaacgagaagcacgacgaggaguucugcgacaugcugcggcuguucgacuucaacaagcaggccauccagcgccugaaggcggaggcccagaugagcauccagcugaucaacaaggccgugaacgcccucaucaacgaccagcugaucaugaagaaccaccuccgggacaucaugggcauccccuacugcaacuacuccaaguacugguaccucaaccacacgaccaccgggaagaccagccugcccaagugcuggcugguguccaacggcagcuaccucaacgagacgcacuucuccgacgacaucgagcagcaggccgacaacaugaucaccgagaugcugcagaaggaguacauggagcgccagggcaagaccccgcuggggcuggucgaccucuucguguucagcaccuccuucuaccugaucagcaucuuccugcaccucgugaagaucccgugaggacuaguaauaaggaaacuguaugaaugucugugggcaggaagugaagagauccuucuguaaagguuuuuggaauuaugucugcugaauaauaaacuuuuuugaaauaauaaaucugguagaaaaaugagaucucaaaggcucuuuucagagccaccaaaaaaaaaaaaaaaaaaaaaaaaaaaaaaaaaaaaaaaaaaaaaaaaaaaaaaaaaaaaaaaaagaauu

SEQ ID NO: 42594 - RNA, 1667 nt, Artificial Sequence
  mRNA product Design b-4 (hSL-A64-N5) comprising derived and/or modified sequence from LASV(LM776-SLE-2012;Clade IV)__AIT17824__GPCmut13 (opt1)
aggagagucccgcagucggcguccagcggcucugcuuguucgugugugugucguugcaggccuuauucaagcuuaccaugggccagaucgugaccuucuuccaggaggucccccacgugaucgaggaggugaugaacaucguccugaucgcccucagcauccuggccgugcugaaggggcucuacaacuucgcgaccugcggccugguggggcuggucacguuccuccugcugugcggccgcuccugcaccaccagcguguacaaggggguguacgagcuccagacccuggagcugaacauggagacgcucaacaugaccaugccgcuguccugcaccaagaacaacagccaccacuacaucauggucggcaacgagaccggccuggagcucacgcugaccaacaccuccaucaucaaccacaaguucugcaaccugagcgacgcccacaagaagaaccucuacgaccacgcccugauguccaucaucagcaccuuccaccuguccauccccaacuucaaccaguacgaggccaugagcugcgacuucaacgggggcaagaucuccgugcaguacaaccucagccacuccuacgccggggacgcggccaaccacugcggcacgguggccaacgggguccugcagaccuucaugcggauggccuggggcggcagcuacaucgcgcuggacuccgggcacggcaagugggacugcaucaugaccagcuaccaguaccucaucauccagaacaccacgugggaggaccacugccaguucucccgccccagccccaucggguaccugggccugcucucccagcggacccgcgacaucuacaucagccggcgccugcugggcaccuucaccuggacgcucagcgacuccgaggggaaggacaccccgggcggguacugccugacccgguggaugcugaucgaggccgagcucaagugcuucggcaacaccgccguggccaagugcaacgagaagcacgacgaggaguucugcgacaugcugcgccuguucgacuucaacaagcaggccauccagcggcucaaggcggaggcccagaugagcauccagcugaucaacaaggccgugaacgcccugaucaacgaccagcucaucaugaagaaccaccuccgcgacaucauggggauccccuacugcaacuacuccaaguacugguaccugaaccacacgaccaccggcaagaccagccugcccaagugcuggcuggucuccaacggcagcuaccugaacgagacgcacuucuccgacgacaucgagcagcaggccgacaacaugaucaccgagaugcuccagaaggaguacauggagcggcaggggaagacgccccugggccugguggaccuguucguguucagcaccuccuucuaccucaucagcaucuuccugcaccuggucaagaucccgugaggacuaguaauaaggaaacuguaugaaugucugugggcaggaagugaagagauccuucuguaaagguuuuuggaauuaugucugcugaauaauaaacuuuuuugaaauaauaaaucugguagaaaaaugagaucucaaaggcucuuuucagagccaccaaaaaaaaaaaaaaaaaaaaaaaaaaaaaaaaaaaaaaaaaaaaaaaaaaaaaaaaaaaaaaaaagaauu

SEQ ID NO: 42595 - RNA, 1667 nt, Artificial Sequence
  mRNA product Design b-4 (hSL-A64-N5) comprising derived and/or modified sequence from LASV(Mad39;Clade IV)__ANH09722__GPCmut13 (opt1)
aggagagucccgcagucggcguccagcggcucugcuuguucgugugugugucguugcaggccuuauucaagcuuaccaugggccagaucgugaccuucuuccaggaggucccccacgugaucgaggaggugaugaacaucguccugaucgcccucagcauccuggccgugcugaaggggcucuacaacguggcgaccugcggccugaucgggcuggucacguuccuccugcugugcggccgcuccugcaccaccacccucuacaaggggguguacgagcugcaggcccuggagcucaacauggagacgcugaacaugaccaugccgcugagcugcaccaagaacaacucccaccacuacauccgggugggcaacgagaccggccucgagcugacgcugaccaacaccagccucaucaaccacaaguucugcaaccuguccgacgcccacaagaagaaccuguacgaccacgcccucaugagcaucaucuccaccuuccaccugagcauccccaacuucaaccaguacgaggccauguccugcgacuucaacgacgggaagaucagcguccaguacaaccugucccacacguacgcgggcgacaccgccaaccacugcgggaccguggccaacggcgugcuccagaccuucaugcgcauggccuggggcgggagcuacaucgcgcuggacuccggccgcgggggcugggacugcaucaugacgagcuaccaguaccugaucauccagaacaccaccugggaggaccacugccaguucucccggcccagccccaucggguaccucggccugcugucccagcggacccgcgacaucuacaucagccggcgccuccugggcacguucaccuggacccuguccgacagcgaggggaaggacaccccgggcggguacugccucacgcgguggaugcugaucgaggccgagcugaagugcuucggcaacaccgccgucgccaagugcaacgagaagcacgacgaggaguucugcgacaugcuccgccuguucgacuucaacaagcaggccauccagcggcugaaggcggaggcccagaugagcauccagcucaucaacaaggccgugaacgcccugaucaacgaccagcugaucaugaagaaccaccuccgcgacaucauggggauccccuacugcaacuacuccaaguacugguaccugaaccacaccgugaccggcaagacgagccugcccaagugcuggcucgucuccaacggcagcuaccugaacgagacccacuucuccgacgacaucgagcagcaggccgacaacaugaucaccgagaugcugcagaaggaguacauggagcggcaggggaagacgccccugggccucguggaccuguucguguucagcaccuccuucuaccugaucagcaucuuccuccaccuggucaagaucccgugaggacuaguaauaaggaaacuguaugaaugucugugggcaggaagugaagagauccuucuguaaagguuuuuggaauuaugucugcugaauaauaaacuuuuuugaaauaauaaaucugguagaaaaaugagaucucaaaggcucuuuucagagccaccaaaaaaaaaaaaaaaaaaaaaaaaaaaaaaaaaaaaaaaaaaaaaaaaaaaaaaaaaaaaaaaaagaauu

SEQ ID NO: 42596 - RNA, 1667 nt, Artificial Sequence
  mRNA product Design b-4 (hSL-A64-N5) comprising derived and/or modified sequence from LASV(Z0947-SLE-2011;Clade IV)__AIT17840__GPCmut13 (opt1)
aggagagucccgcagucggcguccagcggcucugcuuguucgugugugugucguugcaggccuuauucaagcuuaccaugggccagaucgugaccuucuuccaggaggucccccacgugaucgaggaggugaugaacaucguccugaucgcccucagcauccuggccgugcugaaggggcucuacaacuucgcgaccugcggccugguggggcuggucacguuccuccugcugugcggccgcuccugcaccaucagccucuacaaggggguguacgagcugcagacccuggagcucaacauggagacccugaacaugacgaugccgcuguccugcaccaagaacaacagccaccacuacaucauggugggcaacgagaccggccucgagcugacccugacgaacaccuccaucaucaaccacaaguucugcaaccucagcgacgcccacaagaagaaccuguacgaccacgcccugauguccaucaucagcaccuuccaccucuccauccccaacuucaaccaguacgaggccaugagcugcgacuucaacgggggcaagaucuccguccaguacaaccugagccacuccuacgccggggacgcggccaaccacugcggcaccguggccaacggggugcugcagacguucaugcggauggccuggggcggcagcuacaucgcgcucgacuccgggcgcgaccggugggacugcaucaugaccagcuaccaguaccugaucauccagaacaccaccugggaggaccacugccaguucucccgccccagccccaucggcuaccuggggcuccugucccagcggacgcgcgacaucuacaucagccggcgccugcucggcaccuucaccuggacccugagcgacuccgagggcaaggacacgcccgggggcuacugccugacccgguggaugcucaucgaggccgagcugaagugcuucgggaacaccgccgucgccaagugcaacgagaagcacgacgaggaguucugcgacaugcugcgccucuucgacuucaacaagcaggccauccagcggcugaaggcggaggcccagaugagcauccagcugaucaacaaggccgugaacgcccucaucaacgaccagcugaucaugaagaaccaccuccgcgacaucaugggcauccccuacugcaacuacuccaaguacugguaccugaaccacaccacgaccgggaagaccagccugcccaagugcuggcugguguccaacggcagcuaccucaacgagacccacuucuccgacgacaucgagcagcaggccgacaacaugaucacggagaugcugcagaaggaguacauggagcggcagggcaagaccccgcuggggcuggucgaccucuucguguucagcaccuccuucuaccugaucagcaucuuccugcaccucgugaagaucccgugaggacuaguaauaaggaaacuguaugaaugucugugggcaggaagugaagagauccuucuguaaagguuuuuggaauuaugucugcugaauaauaaacuuuuuugaaauaauaaaucugguagaaaaaugagaucucaaaggcucuuuucagagccaccaaaaaaaaaaaaaaaaaaaaaaaaaaaaaaaaaaaaaaaaaaaaaaaaaaaaaaaaaaaaaaaaagaauu

SEQ ID NO: 42597 - RNA, 1667 nt, Artificial Sequence
  mRNA product Design b-4 (hSL-A64-N5) comprising derived and/or modified sequence from LASV(Josiah;Clade IV)__NP_694870__GPCmut13 (opt4)
aggagagucccgcagucggcguccagcggcucugcuuguucgugugugugucguugcaggccuuauucaagcuuaccaugggccagaucgugaccuucuuccaggaggugccccacgugaucgaggaggugaugaacaucgugcugaucgcccugagcgugcuggccgugcugaagggccuguacaacuucgccaccugcggccuggugggccuggugaccuuccugcugcugugcggcagaagcugcaccaccagccuguacaagggcguguacgagcugcagacccuggagcugaacauggagacccugaacaugaccaugccccugagcugcaccaagaacaacagccaccacuacaucauggugggcaacgagaccggccuggagcugacccugaccaacaccagcaucaucaaccacaaguucugcaaccugagcgacgcccacaagaagaaccuguacgaccacgcccugaugagcaucaucagcaccuuccaccugagcauccccaacuucaaccaguacgaggccaugagcugcgacuucaacggcggcaagaucagcgugcaguacaaccugagccacagcuacgccggcgacgccgccaaccacugcggcaccguggccaacggcgugcugcagaccuucaugagaauggccuggggcggcagcuacaucgcccuggacagcggcagaggcaacugggacugcaucaugaccagcuaccaguaccugaucauccagaacaccaccugggaggaccacugccaguucagcagacccagccccaucggcuaccugggccugcugagccagagaaccagagacaucuacaucagcagaagacugcugggcaccuucaccuggacccugagcgacagcgagggcaaggacacccccggcggcuacugccugaccagauggaugcugaucgaggccgagcugaagugcuucggcaacaccgccguggccaagugcaacgagaagcacgacgaggaguucugcgacaugcugagacuguucgacuucaacaagcaggccauccagagacugaaggccgaggcccagaugagcauccagcugaucaacaaggccgugaacgcccugaucaacgaccagcugaucaugaagaaccaccugagagacaucaugggcauccccuacugcaacuacagcaaguacugguaccugaaccacaccaccaccggcagaaccagccugcccaagugcuggcuggugagcaacggcagcuaccugaacgagacccacuucagcgacgacaucgagcagcaggccgacaacaugaucaccgagaugcugcagaaggaguacauggagagacagggcaagaccccccugggccugguggaccuguucguguucagcaccagcuucuaccugaucagcaucuuccugcaccuggugaagauccccugaggacuaguaauaaggaaacuguaugaaugucugugggcaggaagugaagagauccuucuguaaagguuuuuggaauuaugucugcugaauaauaaacuuuuuugaaauaauaaaucugguagaaaaaugagaucucaaaggcucuuuucagagccaccaaaaaaaaaaaaaaaaaaaaaaaaaaaaaaaaaaaaaaaaaaaaaaaaaaaaaaaaaaaaaaaaagaauu

SEQ ID NO: 42598 - RNA, 1664 nt, Artificial Sequence
  mRNA product Design b-4 (hSL-A64-N5) comprising derived and/or modified sequence from LASV(LP;Clade I)__AAF86701__GPCmut13 (opt4)
aggagagucccgcagucggcguccagcggcucugcuuguucgugugugugucguugcaggccuuauucaagcuuaccaugggccagaucaucaccuucuuccaggaggugccccacgugaucgaggaggugaugaacaucgugcugaucgcccugagccugcuggccauccugaagggccuguacaacaucgccaccugcggcaucaucggccugguggccuuccuguuccugugcggcaagagcugcagccugacccugaagggcggcuacgagcugcagacccuggagcugaacauggagacccugaacaugaccaugccccugagcugcaccaagaacagcagccaccacuacaucagagugggcaacgagaccggccuggagcugacccugaccaacaccagcaucaucaaccacaaguucugcaaccugagcgacgcccacaagaagaaccuguacgaccacgcccugaugagcaucaucagcaccuuccaccugagcauccccaacuucaaccaguacgaggccaugagcugcgacuucaacggcggcaagaucagcgugcaguacaaccugagccacagcuacgccggcgacgccgccgagcacugcggcaccguggccaacggcgugcugcagaccuucaugagaauggccuggggcggcagauacaucgcccuggacagcggcaagggcaacugggacugcaucaugaccagcuaccaguaccugaucauccagaacaccaccugggaggaccacugccaguucagcagacccagccccaucggcuaccugggccugcugagccagagaaccagagacaucuacaucagcagaagacugcugggcaccuucaccuggacccugagcgacagcgagggcaacgagacccccggcggcuacugccugaccagauggaugcugaucgaggccgagcugaagugcuucggcaacaccgccguggccaagugcaacgagaagcacgacgaggaguucugcgacaugcugagacuguucgacuucaacaagcaggccaucagaagacugaaggccgaggcccagaugagcauccagcugaucaacaaggccgugaacgcccugaucaacgaccagcugaucaugaagaaccaccugagagacaucaugggcauccccuacugcaacuacagcaaguacugguaccugaaccacaccagcagcggcagaaccagccugcccaagugcuggcugaucagcaacggcagcuaccugaacgagacccaguucagcgacgacaucgagcagcaggccgacaacaugaucaccgagaugcugcagaaggaguacaucgagagacagggcaagaccccccugggccugguggacaucuucaucuucagcaccagcuucuaccugaucagcaucuuccugcaccugaucaagauccccugaggacuaguaauaaggaaacuguaugaaugucugugggcaggaagugaagagauccuucuguaaagguuuuuggaauuaugucugcugaauaauaaacuuuuuugaaauaauaaaucugguagaaaaaugagaucucaaaggcucuuuucagagccaccaaaaaaaaaaaaaaaaaaaaaaaaaaaaaaaaaaaaaaaaaaaaaaaaaaaaaaaaaaaaaaaaagaauu

SEQ ID NO: 42599 - RNA, 1664 nt, Artificial Sequence
  mRNA product Design b-4 (hSL-A64-N5) comprising derived and/or modified sequence from LASV(803213;Clade II)__AAF86703__GPCmut13 (opt4)
aggagagucccgcagucggcguccagcggcucugcuuguucgugugugugucguugcaggccuuauucaagcuuaccaugggccagaucaucaccuucuuccaggaggugccccacgugaucgaggaggugaugaacaucgugcugaucgcccugagccugcuggccauccugaagggcaucuacaacguggccaccugcggccuguucggccugaucagcuuccugcugcugugcggcagaagcugcagcgugaccuacaagggcguguacgagcugcagacccuggagcugaacauggccaaccugaacaugaccaugccccugagcugcaccaagaacaacagccaccacuacaucauggugggcaacgagaccggccuggagcugacccugaccaacaccagcaucaucaaccacaaguucugcaaccugagcgacgcccacaagaagaaccuguacgaccacgcccugaugagcaucaucagcaccuuccaccugagcauccccaacuucaaccaguacgaggccaugagcugcgacuucaacggcggcaagaucagcgugcaguacaaccugagccacagcuucgccguggacgccgccaaccacugcggcaccaucgccaacggcgugcugcagaccuucaugagaauggccuggggcggcagcuacaucgcccuggacagcggcaagggcaacugggacugcaucaugaccagcuaccaguaccugaucauccagaacaccaccugggaggaccacugccaguucagcagacccagccccaucggcuaccugggccugcugagccagagaaccagagacaucuacaucagcagaagacugcugggcaccuucaccuggacccugagcgacagcgagggcaacgaggcccccggcggcuacugccugaccagauggaugcugaucgaggccgagcugaagugcuucggcaacaccgccguggccaagugcaacgagaagcacgacgaggaguucugcgacaugcugagacuguucgacuucaacaagcaggccaucaagagacugaagaccgaggcccagaugagcauccagcugaucaacaaggccgugaacgcccugaucaacgaccagcugaucaugaagaaccaccugagagacaucaugggcauccccuacugcaacuacagcagauacugguaccugaaccacaccgugaccggcaagaccagccugcccagaugcuggcuggugagcaacggcagcuaccugaacgagacccacuucagcgacgacaucgagcagcaggccgacaacaugaucaccgagaugcugcagaaggaguacauggacagacagggcaagaccccccugggccugguggaccuguucguguucagcaccagcuucuaccugaucagcaucuuccugcaccuggugaagauccccugaggacuaguaauaaggaaacuguaugaaugucugugggcaggaagugaagagauccuucuguaaagguuuuuggaauuaugucugcugaauaauaaacuuuuuugaaauaauaaaucugguagaaaaaugagaucucaaaggcucuuuucagagccaccaaaaaaaaaaaaaaaaaaaaaaaaaaaaaaaaaaaaaaaaaaaaaaaaaaaaaaaaaaaaaaaaagaauu

SEQ ID NO: 42600 - RNA, 1664 nt, Artificial Sequence
  mRNA product Design b-4 (hSL-A64-N5) comprising derived and/or modified sequence from LASV(GA391;Clade III)__CAA36645__GPCmut13 (opt4)
aggagagucccgcagucggcguccagcggcucugcuuguucgugugugugucguugcaggccuuauucaagcuuaccaugggccagaucgugaccuucuuccaggaggugccccacgugaucgaggaggugaugaacaucgugcugaucgcccugagcauccuggccauccugaagggccuguacaacguggccaccugcggccugaucggccuggugaccuuccugcugcugagcggcagaagcugcagccugaucuacaagggcaccuacgagcugcagacccuggagcugaacauggagacccugaacaugaccaugccccugagcugcaccaagaacaacagccaccacuacaucagagugggcaacgagaccggccuggagcugacccugaccaacaccagcauccugaaccacaaguucugcaaccugagcgacgcccacaagagaaaccuguacgaccacagccugaugagcaucaucagcaccuuccaccugagcauccccaacuucaaccaguacgaggccaugagcugcgacuucaacggcggcaagaucaccgugcaguacaaccugagccacagcuucgccguggacgccgccggccacugcggcacccuggccaacggcgugcugcagaccuucaugagaauggccuggggcggcagcuacaucgcccuggacagcggcagaggcaacugggacugcaucaugaccagcuaccaguaccugaucauccagaacaccaccugggacgaccacugccaguucagcagacccagccccaucggcuaccugggccugcugagccagagaaccagagacaucuacaucagcagaagacugcugggcaccuucaccuggacccugagcgacagcgagggcaacgagacccccggcggcuacugccugaccagauggaugcugaucgaggccgagcugaagugcuucggcaacaccgccguggccaagugcaacgagaagcacgacgaggaguucugcgacaugcugagacuguucgacuucaacaagcaggccaucagaagacugaagaccgaggcccagaugagcauccagcugaucaacaaggccgugaacgcccugaucaacgaccagcugaucaugaagaaccaccugagagacaucaugggcauccccuacugcaacuacagcagauacugguaccugaaccacaccagcaccggcaagaccagccugcccagaugcuggcugaucagcaacggcagcuaccugaacgagaccaaguucagcgacgacaucgagcagcaggccgacaacaugaucaccgagaugcugcagaaggaguacaucgacagacagggcaagaccccccugggccugguggaccuguucguguucagcaccagcuucuaccugaucagcaucuuccugcaccuggugaagauccccugaggacuaguaauaaggaaacuguaugaaugucugugggcaggaagugaagagauccuucuguaaagguuuuuggaauuaugucugcugaauaauaaacuuuuuugaaauaauaaaucugguagaaaaaugagaucucaaaggcucuuuucagagccaccaaaaaaaaaaaaaaaaaaaaaaaaaaaaaaaaaaaaaaaaaaaaaaaaaaaaaaaaaaaaaaaaagaauu

SEQ ID NO: 42601 - RNA, 1667 nt, Artificial Sequence
  mRNA product Design b-4 (hSL-A64-N5) comprising derived and/or modified sequence from LASV(AV;Clade V)__CCA30314__GPCmut13 (opt4)
aggagagucccgcagucggcguccagcggcucugcuuguucgugugugugucguugcaggccuuauucaagcuuaccaugggccagaucgugaccuucuuccaggaggugccccacgugaucgaggaggugaugaacaucgugcugaucgcccugagcauccuggccgugcugaagggccuguacaacaucgccaccugcggccugaucggccugaucaccuuccugcugcugugcggcagaagcugcagcagcaaccuguacaagggcguguacgagcugcagagccuggaccugaacauggagacccugaacaugaccaugccccugagcugcaccaagaacaacagccaccacuacaucagagugggcaacgacaccggccuggagcugacccugaccaacaccagcauccugaaccacaaguucugcaaccugagcgacgcccacaagaaggaccuguacgaccacgcccugaugagcaucaucagcaccuuccaccugagcauccccaacuucaaccaguacgaggccaugagcugcgacuucaacggcggcaagaucagcgugcaguacaaccugagccacagcuacgccaucgacgccgccaaccacugcggcaccguggccaacggcauccugcagaccuucaugagaauggccuggggcggcagcuacaucgcccuggacagcggcagaggcaacugggacugcaucaugaccagcuaccaguaccugaucauccagaacaccaccugggagaaccacugccaguucagcagacccagccccaucggcuaccugggccugcugagccagagaaccagagacaucuacaucagcagaagacugcugggcaccuucaccuggacccugagcgacagcgagggcaacgccacccccggcggcuacugccugaccagauggaugcugaucgaggccgagcugaagugcuucggcaacaccgccguggccaagugcaacgagaagcacgacgaggaguucugcgacaugcugagacuguucgacuucaacaagcaggccaucagcagacugaagagcgaggcccagaugagcauccagcugaucaacaaggccgugaacgcccugaucaacgaccagcugaucaugaagaaccaccugagagacaucaugggcauccccuacugcaacuacagcaaguacugguaccugaaccacaccaucaccggcaagaccagccugcccaagugcuggcuggugagcaacggcagcuaccugaacgagacccacuucagcgacgacaucgagcagcaggccgacaacaugaucaccgagaugcugcagaaggaguacauggagagacagggcaagaccccccugggccugguggaccuguucguguucagcaccagcuucuaccugaucagcaucuuccugagacuggugaagauccccugaggacuaguaauaaggaaacuguaugaaugucugugggcaggaagugaagagauccuucuguaaagguuuuuggaauuaugucugcugaauaauaaacuuuuuugaaauaauaaaucugguagaaaaaugagaucucaaaggcucuuuucagagccaccaaaaaaaaaaaaaaaaaaaaaaaaaaaaaaaaaaaaaaaaaaaaaaaaaaaaaaaaaaaaaaaaagaauu

SEQ ID NO: 42602 - RNA, 1664 nt, Artificial Sequence
  mRNA product Design b-4 (hSL-A64-N5) comprising derived and/or modified sequence from LASV(Togo/2016/7082;Clade VI)__AMR44577__GPCmut13 (opt4)
aggagagucccgcagucggcguccagcggcucugcuuguucgugugugugucguugcaggccuuauucaagcuuaccaugggccagaucaucaccuucuuccaggaggugccccacgugaucgaggaggugaugaacaucgugcugaucgcccugagccugcuggccauccugaagggcguguacaacguggccaccugcggcaucaucggccuggugaccuuccuguuccugugcggcagaagcugcagccugaucuacaagggcagcuacgagcugcagacccuggagcugaacauggagacccugaacaugaccaugccccugagcugcaccaagaacagcagccaccacuacaucagagugggcaacgagaccggccuggagcugacccugaccaacaccagcaucaucaaccacaaguucugcaaccugagcgacgcccacaagagaaaccuguacgaccacgcccugaugagcauccugagcaccuuccaccugagcauccccaacuucaaccaguacgaggccaugagcugcgacuucaacggcggcaagaucagcgugcaguacaaccugagccacgccuacgccguggacgccgccgagcacugcggcaccguggccaacggcgugcugcagaccuucaugagaauggccuggggcggcagcuacaucgcccuggacagcggcagaggcaacugggacugcaucaugaccagcuaccaguaccugaucauccagaacaccaccugggaggaccacugccaguucagcagacccagccccaucggcuaccugggccugcugagccagagaaccagagacaucuacaucagcagaagacugcugggcaccuucaccuggacccugagcgacagcgagggcaacgagacccccggcggcuacugccugaccagauggaugcugaucgaggccgagcugaagugcuucggcaacaccgccguggccaagugcaacgagaagcacgacgaggaguucugcgacaugcugagacuguucgacuucaacaagcaggccauccagagacugaagagcgaggcccagaugagcauccagcugaucaacaaggccgugaacgcccugaucaacgaccagcugaucaugaagaaccaccugagagacaugaugggcauccccuacugcaacuacagcaaguacugguaccugaaccacaccagcagcggcagaaccagccugcccaagugcuggcuggugagcaacggcagcuaccugaacgagacccacuucagcgacgacaucgagcagcaggccgacaacaugaucaccgagaugcugcagaaggaguacaucgacagacagggcaagaccccccugggccugguggaccuguucguguucagcaccagcuucuaccugaucagcaucuuccugcaccugaucaagauccccugaggacuaguaauaaggaaacuguaugaaugucugugggcaggaagugaagagauccuucuguaaagguuuuuggaauuaugucugcugaauaauaaacuuuuuugaaauaauaaaucugguagaaaaaugagaucucaaaggcucuuuucagagccaccaaaaaaaaaaaaaaaaaaaaaaaaaaaaaaaaaaaaaaaaaaaaaaaaaaaaaaaaaaaaaaaaagaauu

SEQ ID NO: 42603 - RNA, 1664 nt, Artificial Sequence
  mRNA product Design b-4 (hSL-A64-N5) comprising derived and/or modified sequence from LASV(KAK-428;Clade n.d. (VII))__ANH09740__GPCmut13 (opt4)
aggagagucccgcagucggcguccagcggcucugcuuguucgugugugugucguugcaggccuuauucaagcuuaccaugggccagaucgugaccuucuuccaggaggugccccacgugaucgaggaggugaugaacaucgugcugaucgcccugagccugcuggccauccugaagggccuguacaacuucgccaccugcggcgugaucggccugaucaccuuccugcugcugugcggcagaagcugcagcgccaccuacaagggccaguacgagcugcagacccuggagcugaacauggagagccugaacaugaccaugccccugagcugcaccaagaacaacagccaccacuacaucagagccggcaacaacaccggccuggagcugacccugaccaacaccagcaucaucagccacaaguucugcaaccugagcgacgcccacaagaagaaccuguacgaccacacccugaugagcaucaucaccaccuuccaccugagcauccccaacuucaaccaguacgaggccaugagcugcgacuucaacggcggcaagaucagcauccaguacaaccugagccacagcuacgccggcgacgccgcccagcacugcggcaccguggccaacggcgugcugcagaccuucaugagaauggccuggggcggcagcuaccuggcccuggacagcggcagaagaggcugggacugcaucaucagcagcuaccaguaccugaucauccagaacaccaccugggacgaccacugccaguucagcagacccagccccaucggcuaccugggcuucgugagccagaagaccagagacaucuacaucagcagaagacugcugggcaccuucaccuggacccugagcgacagcgagggccacgacaugcccggcggcuacugccugaccagauggaugcugaucgaggccgaccugaagugcuucggcaacaccgccguggccaagugcaacgagaagcacgacgaggaguucugcgacauguggagacuguucgacuucaacaagcaggccauccagagacugaaggccgaggcccagaugaacauccagcugaucaacaaggccgugaacgcccugaucaacgaccagcugaugaugaagaaccaccugagagacaucaugggcauccccuacugcaacuacagcaaguucugguaccugaacaacaccaccaccggcagaaccagccugcccagaugcuggcugaucagcaacggcagcuaccugaacgagacccacuucagcgacgacaucgagcagcaggccgacaacaugaucaccgagaugcugcagaaggaguacauggacagacagggcaagaccccccugggccugguggaccuguucguguucagcaccagcuucuaccugaucaccaucuuccugcaccuggugaagauccccugaggacuaguaauaaggaaacuguaugaaugucugugggcaggaagugaagagauccuucuguaaagguuuuuggaauuaugucugcugaauaauaaacuuuuuugaaauaauaaaucugguagaaaaaugagaucucaaaggcucuuuucagagccaccaaaaaaaaaaaaaaaaaaaaaaaaaaaaaaaaaaaaaaaaaaaaaaaaaaaaaaaaaaaaaaaaagaauu

SEQ ID NO: 42604 - RNA, 1664 nt, Artificial Sequence; identical to SEQ ID NO: 42598
  mRNA product Design b-4 (hSL-A64-N5) comprising derived and/or modified sequence from LASV(Pinneo-NIG-1969;Clade I)__AIT17836__GPCmut13 (opt4)

SEQ ID NO: 42605 - RNA, 1664 nt, Artificial Sequence
  mRNA product Design b-4 (hSL-A64-N5) comprising derived and/or modified sequence from LASV(ISTH0009-NIG-2011;Clade II)__AIT17404__GPCmut13 (opt4)
aggagagucccgcagucggcguccagcggcucugcuuguucgugugugugucguugcaggccuuauucaagcuuaccaugggccagaucaucaccuucuuccaggaggugccccacgugaucgaggaggugaugaacaucgugcugaucgcccugagccugcuggccauccugaagggcaucuacaacguggccaccugcggccuguucggccuggugagcuuccugcugcugugcggcagaagcugcagcaccaccuacaagggcguguacgagcugcagacccuggagcuggacauggccagccugaacaugaccaugccccugagcugcaccaagaacaacagccaccacuacaucauggugggcaacgagaccggccuggagcugacccugaccaacaccagcaucaucaaccacaaguucugcaaccugagcgacgcccacaagaagaaccuguacgaccacgcccugaugagcaucaucagcaccuuccaccugagcauccccaacuucaaccaguacgaggccaugagcugcgacuucaacggcggcaagaucagcgugcaguacaaccugagccacgccuacgccguggacgccgccaaccacugcggcaccaucgccaacggcgugcugcagaccuucaugagaauggccuggggcggcagcuacaucgcccuggacagcggcaagggcagcugggacugcaucaugaccagcuaccaguaccugaucauccagaacaccaccugggaggaccacugccaguucagcagacccagccccaucggcuaccugggccugcugagccagagaaccagagacaucuacaucagcagaagacugcugggcaccuucaccuggacccugagcgacagcgagggcaacgagacccccggcggcuacugccugaccagauggaugcugaucgaggccgagcugaagugcuucggcaacaccgccguggccaagugcaacgagaagcacgacgaggaguucugcgacaugcugagacuguucgacuucaacaagcaggccaucagaagacugaagaccgaggcccagaugagcauccagcugaucaacaaggccgugaacgcccugaucaacgaccagcugaucaugaagaaccaccugagagacaucaugggcauccccuacugcaacuacagcaaguacugguaccugaaccacaccgugaccggcaagaccagccugcccagaugcuggcuggugagcaacggcagcuaccugaacgagacccacuucagcgacgacaucgagcagcaggccgacaacaugaucaccgagcugcugcagaaggaguacauggacagacagggcaagaccccccugggccugguggaccuguucguguucagcaccagcuucuaccugaucagcaucuuccugcaccugaucaagauccccugaggacuaguaauaaggaaacuguaugaaugucugugggcaggaagugaagagauccuucuguaaagguuuuuggaauuaugucugcugaauaauaaacuuuuuugaaauaauaaaucugguagaaaaaugagaucucaaaggcucuuuucagagccaccaaaaaaaaaaaaaaaaaaaaaaaaaaaaaaaaaaaaaaaaaaaaaaaaaaaaaaaaaaaaaaaaagaauu

SEQ ID NO: 42606 - RNA, 1664 nt, Artificial Sequence
  mRNA product Design b-4 (hSL-A64-N5) comprising derived and/or modified sequence from LASV(ISTH2010-NIG-2012;Clade II)__AIT17482__GPCmut13 (opt4)
aggagagucccgcagucggcguccagcggcucugcuuguucgugugugugucguugcaggccuuauucaagcuuaccaugggccagaucaucaccuucuuccaggaggugccccacgugaucgaggaggugaugaacaucgugcugaucgcccugagccugcuggccauccugaagggcaucuacaacguggccaccugcggccuguucggccuggugagcuuccugcugcugugcggcagaagcugcagcaccaccuacaagggcguguacgagcugcagacccuggagcuggacauggccagccugaacaugaccaugccccugagcugcaccaagaacaacagccaccacuacaucauggugggcaacgagaccggccuggagcugacccugaccaacaccagcaucaucaaccacaaguucugcaaccugagcgacgcccacaagaagaaccuguacgaccacgcccugaugagcaucaucagcaccuuccaccugagcauccccaacuucaaccaguacgaggccaugagcugcgacuucaacggcggcaagaucagcgugcaguacaaccugagccacgccuacgccguggacgccgccaaccacugcggcaccaucgccaacggcgugcugcagaccuucaugagaauggccuggggcggcagcuacaucgcccuggacagcggcaagggcagcugggacugcaucaugaccagcuaccaguaccugaucauccagaacaucaccugggaggaccacugccaguucagcagacccagccccaucggcuaccugggccugcugagccagagaaccagagacaucuacaucagcagaagacugcugggcaccuucaccuggacccugagcgacagcgagggcaacgagacccccggcggcuacugccugaccagauggaugcugaucgaggccgagcugaagugcuucggcaacaccgccguggccaagugcaacgagaagcacgacgaggaguucugcgacaugcugagacuguucgacuucaacaagcaggccaucagaagacugaagaccgaggcccagaugagcauccagcugaucaacaaggccgugaacgcccugaucaacgaccagcugaucaugaagaaccaccugagagacaucaugggcauccccuacugcaacuacagcaaguacugguaccugaaccacaccgugaccggcaagaccagccugcccagaugcuggcuggugagcaacggcagcuaccugaacgagacccacuucagcgacgacaucgagcagcaggccgacaacaugaucaccgagcugcugcagaaggaguacaucgacagacagggcaagaccccccugggccugguggaccuguucguguucagcaccagcuucuaccugaucagcaucuuccugcaccuggugaagauccccugaggacuaguaauaaggaaacuguaugaaugucugugggcaggaagugaagagauccuucuguaaagguuuuuggaauuaugucugcugaauaauaaacuuuuuugaaauaauaaaucugguagaaaaaugagaucucaaaggcucuuuucagagccaccaaaaaaaaaaaaaaaaaaaaaaaaaaaaaaaaaaaaaaaaaaaaaaaaaaaaaaaaaaaaaaaaagaauu

SEQ ID NO: 42607 - RNA, 1664 nt, Artificial Sequence
  mRNA product Design b-4 (hSL-A64-N5) comprising derived and/or modified sequence from LASV(Lassa virus/H.sapiens-wt/NGA/2015/ISTH_0543;Clade II)__AVO03639__GPCmut13 (opt4)
aggagagucccgcagucggcguccagcggcucugcuuguucgugugugugucguugcaggccuuauucaagcuuaccaugggccagaucaucaccuucuuccaggaggugccccacgugaucgaggaggugaugaacaucgugcugaucgcccugagccugcuggccauccugaagggcaucuacaacguggccaccugcggccuguucggccuggugagcuuccugcugcugugcggcagaagcugcagcaccaccuacaagggcguguacgagcugcagacccuggagcuggacauggccaaccugaacaugaccaugccccugagcugcaccaagaacaacagccaccacuacaucauggugggcaacgagaccggccuggagcugacccugaccaacaccagcaucaucaaccacaaguucugcaaccugagcgacgcccacaagaagaaccuguacgaccacgcccugaugagcaucaucagcaccuuccaccugagcauccccaacuucaaccaguacgaggccaugagcugcgacuucaacggcggcaagaucagcgugcaguacaaccugagccacaccuacgccguggacgccgccaaccacugcggcaccaucgccaacggcgugcugcagaccuucaugagaauggccuggggcggcagcuacaucgcccuggacagcggcaagggcagcugggacugcaucaugaccagcuaccaguaccuggugauccagaacaccaccugggaggaccacugccaguucagcagacccagccccaucggcuaccugggccugcugagccagagaaccagagacaucuacaucagcagaagacugcugggcaccuucaccuggacccugagcgacagcgagggcaacgagacccccggcggcuacugccugaccagauggaugcugaucgaggccgagcugaagugcuucggcaacaccgccguggccaagugcaacgagaagcacgacgaggaguucugcgacaugcugagacuguucgacuucaacaagcaggccaucagaagacugaagaccgaggcccagaugagcauccagcugaucaacaaggccgugaacgcccugaucaacgaccagcugaucaugaagaaccaccugagagacaucaugggcauccccuacugcaacuacagcaaguacugguaccugaaccacaccgugaccggcaagaccagccugcccagaugcuggcuggugagcaacggcagcuaccugaacgagacccacuucagcgacgacaucgagcagcaggccgacaacaugaucaccgagcugcugcagaaggaguacaucgacagacagggcaagaccccccugggccugguggaccuguucguguucagcaccagcuucuaccugaucagcaucuuccugcaccuggugaagauccccugaggacuaguaauaaggaaacuguaugaaugucugugggcaggaagugaagagauccuucuguaaagguuuuuggaauuaugucugcugaauaauaaacuuuuuugaaauaauaaaucugguagaaaaaugagaucucaaaggcucuuuucagagccaccaaaaaaaaaaaaaaaaaaaaaaaaaaaaaaaaaaaaaaaaaaaaaaaaaaaaaaaaaaaaaaaaagaauu

SEQ ID NO: 42608 - RNA, 1664 nt, Artificial Sequence
  mRNA product Design b-4 (hSL-A64-N5) comprising derived and/or modified sequence from LASV(Lassa virus/H.sapiens-wt/NGA/2016/ISTH_0009;Clade II)__AVO03571__GPCmut13 (opt4)
aggagagucccgcagucggcguccagcggcucugcuuguucgugugugugucguugcaggccuuauucaagcuuaccaugggccagaucaucaccuucuuccaggaggugccccacgugaucgaggaggugaugaacaucgugcugaucgcccugagccugcuggccauccugaagggcaucuacaacguggccaccugcggccugcugggccuggugagcuuccugcugcugugcggcagaagcugcagcaccaccuacaagggcguguacgagcugcagacccuggagcuggacauggccagccugaacaugaccaugccccugagcugcaccaagaacaacagccaccacuacaucauggugggcaacgagaccggccuggagcugacccugaccaacaccagcaucaucaaccacaaguucugcaaccugagcgacgcccacaagaagaaccuguacgaccacgcccugaugagcaucaucagcaccuuccaccugagcauccccaacuucaaccaguacgaggccaugagcugcgacuucaacggcggcagaaucagcgugcaguacaaccugagccacagcuacgccguggacgccgccaaccacugcggcaccaucgccaacggcgugcugcagaccuucaugagaauggccuggggcggcagcuacaucgcccuggacagcggcaagggcagcugggacugcaucaugaccagcuaccaguaccugaucauccagaacaccaccugggaggaccacugccaguucagcagacccagccccaucggcuaccugggccugcugagccagagaaccagagacaucuacaucagcagaagacugcugggcaccuucaccuggacccugagcgacagcgagggcaacgagacccccggcggcuacugccugaccagauggaugcugaucgaggccgagcugaagugcuucggcaacaccgccguggccaagugcaacgagaagcacgacgaggaguucugcgacaugcugagacuguucgacuucaacaagcaggccaucagaagacugaagaccgaggcccagaugagcauccagcugaucaacaaggccgugaacgcccugaucaacgaccagcugaucaugaagaaccaccugagagacaucaugggcauccccuacugcaacuacagcaaguacugguaccugaaccacaccgugaccggcaagaccagccugcccagaugcuggcuggugagcaacggcagcuaccugaacgagacccacuucagcgacgacaucgagcagcaggccgacaacaugaucaccgagcugcugcagaaggaguacaucgacagacagggcaagaccccccugggccugguggaccuguucguguucagcaccagcuucuaccugaucagcaucuuccugcaccuggugaagauccccugaggacuaguaauaaggaaacuguaugaaugucugugggcaggaagugaagagauccuucuguaaagguuuuuggaauuaugucugcugaauaauaaacuuuuuugaaauaauaaaucugguagaaaaaugagaucucaaaggcucuuuucagagccaccaaaaaaaaaaaaaaaaaaaaaaaaaaaaaaaaaaaaaaaaaaaaaaaaaaaaaaaaaaaaaaaaagaauu

SEQ ID NO: 42609 - RNA, 1664 nt, Artificial Sequence
  mRNA product Design b-4 (hSL-A64-N5) comprising derived and/or modified sequence from LASV(Lassa virus/H.sapiens-wt/NGA/2016/ISTH_0017;Clade II)__AVO03567__GPCmut13 (opt4)
aggagagucccgcagucggcguccagcggcucugcuuguucgugugugugucguugcaggccuuauucaagcuuaccaugggccagaucaucaccuucuuccaggaggugccccacgugaucgaggaggugaugaacaucgugcugaucgcccugagccugcuggccauccugaagggcaucuacaacguggccaccugcggccuguucggccuggugagcuuccugcugcugugcggcagaagcugcagcaccaccuacaagggcguguacgagcugcagacccuggagcuggacauggccagccugaacaugaccaugccccugagcugcaccaagaacaacagccaccacuacaucauggugggcaacgagaccggccuggagcugacccugaccaacaccagcaucaucaaccacaaguucugcaaccugagcgacgcccacaagaagaaccuguacgaccacgcccugaugagcaucaucagcaccuuccaccugagcauccccaacuucaaccaguacgaggccaugagcugcgacuucaacggcggcaagaucagcgugcaguacaaccugagccacaccuacgccaucgacgccgccaaccacugcggcaccaucgccaacggcgugcugcagaccuucaugagaauggccuggggcggcagcuacaucgcccuggacagcggcaagggcagcugggacugcaucaugaccagcuaccaguaccugaucauccagaacaccaccugggaggaccacugccaguucagcagacccagccccaucggcuaccugggccugcugagccagagaaccagagacaucuacaucagcagaagacugcugggcaccuucaccuggacccugagcgacagcgagggcaacgagacccccggcggcuacugccugaccagauggaugcugaucgaggccgagcugaagugcuucggcaacaccgccguggccaagugcaacgagaagcacgacgaggaguucugcgacaugcugagacuguucgacuucaacaagcaggccaucagaagacugaagaccgaggcccagaugagcauccagcugaucaacaaggccgugaacgcccugaucaacgaccagcugaucaugaagaaccaccugagagacaucaugggcauccccuacugcaacuacagcaaguacugguaccugaaccacaccgugaccggcaagaccagccugcccagaugcuggcuggugagcaacggcagcuaccugaacgagacccacuucagcgacgacaucgagcagcaggccgacaacaugaucaccgagcugcugcagaaggaguacauggacagacagggcaagaccccccugggccugguggaccuguucguguucagcaccagcuucuaccugaucagcaucuuccugcaccuggugagaauccccugaggacuaguaauaaggaaacuguaugaaugucugugggcaggaagugaagagauccuucuguaaagguuuuuggaauuaugucugcugaauaauaaacuuuuuugaaauaauaaaucugguagaaaaaugagaucucaaaggcucuuuucagagccaccaaaaaaaaaaaaaaaaaaaaaaaaaaaaaaaaaaaaaaaaaaaaaaaaaaaaaaaaaaaaaaaaagaauu

SEQ ID NO: 42610 - RNA, 1664 nt, Artificial Sequence
  mRNA product Design b-4 (hSL-A64-N5) comprising derived and/or modified sequence from LASV(Lassa virus/H.sapiens-wt/NGA/2018/ISTH_0959;Clade II)__AVV65099__GPCmut13 (opt4)
aggagagucccgcagucggcguccagcggcucugcuuguucgugugugugucguugcaggccuuauucaagcuuaccaugggccagaucaucaccuucuuccaggaggugccccacgugaucgaggaggugaugaacaucgugcugaucgcccugagccugcuggccauccugaagggcaucuacaacguggugaccugcggccuguucggccuggugagcuuccugcugcugugcggcagaagcugcagcaccaccuacaagggcguguacgagcugcagacccuggagcuggacauggccagccugaacaugaccaugccccugagcugcaccaagaacaacagccaccacuacaucauggugggcaacgagaccggccuggagcugacccugaccaacaccagcaucaucaaccacaaguucugcaaccugagcgacgcccacaagaagaaccuguacgaccacgcccugaugagcaucaucagcaccuuccaccugagcauccccaacuucaaccaguacgaggccaugagcugcgacuucaacggcggcaagaucagcgugcaguacaaccugagccacgccuacgccaucgacgccgccaaccacugcggcaccaucgccaacggcgugcugcagaccuucaugagaauggccuggggcggcagcuacaucgcccuggacagcggcaagggcagcugggacugcaucaugaccagcuaccaguaccugaucauccagaacaccaccugggaggaccacugccaguucagcagacccagccccaucggcuaccugggccugcugagccagagaaccagagacaucuacaucagcagaagacugcugggcaccuucaccuggacccugagcgacagcgagggcaacgagacccccggcggcuacugccugaccagauggaugcugaucgaggccgagcugaagugcuucggcaacaccgccguggccaagugcaacgagaagcacgacgaggaguucugcgacaugcugagacuguucgacuucaacaagcaggccaucagaagacugaagaccgaggcccagaugagcauccagcugaucaacaaggccgugaacgcccugaucaacgaccagcugaucaugaagaaccaccugagagacaucaugggcauccccuacugcaacuacagcaaguacugguaccugaaccacaccgugaccggcaagaccagccugcccagaugcuggcuggugagcaacggcagcuaccugaacgagacccacuucagcgacgacaucgagcagcaggccgacaacaugaucaccgagcugcugcagaaggaguacaucgacagacagggcaagaccccccugggccugguggaccuguucguguucagcaccagcuucuaccugaucagcaucuuccugcaccuggugaagauccccugaggacuaguaauaaggaaacuguaugaaugucugugggcaggaagugaagagauccuucuguaaagguuuuuggaauuaugucugcugaauaauaaacuuuuuugaaauaauaaaucugguagaaaaaugagaucucaaaggcucuuuucagagccaccaaaaaaaaaaaaaaaaaaaaaaaaaaaaaaaaaaaaaaaaaaaaaaaaaaaaaaaaaaaaaaaaagaauu

SEQ ID NO: 42611 - RNA, 1664 nt, Artificial Sequence
  mRNA product Design b-4 (hSL-A64-N5) comprising derived and/or modified sequence from LASV(LASV003-NIG-2008;Clade II)__AIT17580__GPCmut13 (opt4)
aggagagucccgcagucggcguccagcggcucugcuuguucgugugugugucguugcaggccuuauucaagcuuaccaugggccagaucaucaccuucuuccaggaggugccccacgugaucgaggaggugaugaacaucgugcugaucgcccugagccugcuggccauccugaagggcaucuacaacguggccaccugcggccuguucggccuggugagcuuccugcugcugugcggcagaagcugcagcaccaccuacaagggcguguacgagcugcagacccuggagcuggacauggccagccugaacaugaccaugccccugagcugcaccaagaacaacagccaccacuacaucauggugggcaacgagaccggccuggagcugacccugaccaacaccagcaucaucaaccacaaguucugcaaccugagcgacgcccacaagaagaaccuguacgaccacgcccugaugagcaucaucagcaccuuccaccugagcauccccaacuucaaccaguacgaggccaugagcugcgacuucaacggcggcaagaucagcgugcaguacaaccugagccacaccuacgccguggacgccgccaaccacugcggcaccaucgccaacggcgugcugcagaccuucaugagaauggccuggggcggcagcuacaucgcccuggacagcggcaagggcagcugggacugcaucaugaccagcuaccaguaccugaucauccagaacaccaccugggaggaccacugccaguucagcagacccagccccaucggcuaccugggccugcugagccagagaaccagagacaucuacaucagcagaagacugcugggcaccuucaccuggacccugagcgacagcgagagcaacgagacccccggcggcuacugccugaccagauggaugcugaucgaggccgagcugaagugcuucggcaacaccgccguggccaagugcaacgagaagcacgacgaggaguucugcgacaugcugagacuguucgacuucaacaagcaggccaucagaagacugaaggccgaggcccagaugagcauccagcugaucaacaaggccgugaacgcccugaucaacgaccagcugaucaugaagaaccaccugagagacaucaugggcauccccuacugcaacuacagcaaguacugguaccugaaccacaccgugaccggcagaaccagccugcccagaugcuggcuggugagcaacggcagcuaccugaacgagacccacuucagcgacgacaucgagcagcaggccgacaacaugaucaccgagcugcugcagaaggaguacauggacagacagggcaagaccccccugggccugguggaccuguucguguucagcaccagcuucuaccugaucagcaucuuccugcaccuggugaagauccccugaggacuaguaauaaggaaacuguaugaaugucugugggcaggaagugaagagauccuucuguaaagguuuuuggaauuaugucugcugaauaauaaacuuuuuugaaauaauaaaucugguagaaaaaugagaucucaaaggcucuuuucagagccaccaaaaaaaaaaaaaaaaaaaaaaaaaaaaaaaaaaaaaaaaaaaaaaaaaaaaaaaaaaaaaaaaagaauu

SEQ ID NO: 42612 - RNA, 1664 nt, Artificial Sequence
  mRNA product Design b-4 (hSL-A64-N5) comprising derived and/or modified sequence from LASV(LASV035-NIG-2009;Clade II)__AIT17588__GPCmut13 (opt4)
aggagagucccgcagucggcguccagcggcucugcuuguucgugugugugucguugcaggccuuauucaagcuuaccaugggccagaucaucaccuucuuccaggaggugccccacgugaucgaggaggugaugaacaucgugcugaucgcccugagccugcuggccauccugaagggcaucuacaacguggccaccugcggccuguucggccuggugagcuuccugcugcugugcggcagaagcugcagcaccaccuacaagggcguguacgagcugcagacccuggagcuggacauggccagccugaacaugaccaugccccugagcugcaccaagaacaacagccaccacuacaucauggugggcaacgagaccggccuggagcugacccugaccaacaccagcaucaucaaccacaaguucugcaaccugagcgacgcccacaagaagaaccuguacgaccacgcccugaugagcaucaucagcaccuuccaccugagcauccccaacuucaaccaguacgaggccaugagcugcgacuucaacggcggcaagaucagcgugcaguacaaccugagccacgccuacgccguggacgccgccaaccacugcggcaccaucgccaacggcgugcugcagaccuucaugagaauggccuggggcggcagcuacaucgcccuggacagcggcaagggcagcugggacugcaucaugaccagcuaccaguaccugaucauccagaacaccaccugggaggaccacugccaguucagcagacccagccccaucggcuaccugggccugcugagccagagaaccagagacaucuacaucagcagaagacugcugggcaccuucaccuggacccugagcgacagcgagggcaacgagacccccggcggcuacugccugaccagauggaugcugaucgaggccgagcugaagugcuucggcaacaccgccguggccaagugcaacgagaagcacgacgaggaguucugcgacaugcugagacuguucgacuucaacaagcaggccaucagaagacugaaggccgaggcccagaugagcauccagcugaucaacaaggccgugaacgcccugaucaacgaccagcugaucaugaagaaccaccugagagacaucaugggcauccccuacugcaacuacagcaaguacugguaccugaaccacaccgugaccggcaagaccagccugcccagaugcuggcuggugagcaacggcagcuaccugaacgagacccacuucagcgacgacaucgagcagcaggccgacaacaugaucaccgagcugcugcagaaggaguacaucgacagacagggcaagaccccccugggccugguggaccuguucguguucagcaccagcuucuaccugaucagcaucuuccugcaccuggugaagauccccugaggacuaguaauaaggaaacuguaugaaugucugugggcaggaagugaagagauccuucuguaaagguuuuuggaauuaugucugcugaauaauaaacuuuuuugaaauaauaaaucugguagaaaaaugagaucucaaaggcucuuuucagagccaccaaaaaaaaaaaaaaaaaaaaaaaaaaaaaaaaaaaaaaaaaaaaaaaaaaaaaaaaaaaaaaaaagaauu

SEQ ID NO: 42613 - RNA, 1664 nt, Artificial Sequence
  mRNA product Design b-4 (hSL-A64-N5) comprising derived and/or modified sequence from LASV(LASV1000-NIG-2009;Clade II)__AIT17782__GPCmut13 (opt4)
aggagagucccgcagucggcguccagcggcucugcuuguucgugugugugucguugcaggccuuauucaagcuuaccaugggccagaucaucaccuucuuccaggaggugccccacgugaucgaggaggugaugaacaucgugcugaucgcccugagccugcuggccauccugaagggcaucuacaacguggccaccugcggccuguucggccuggugagcuuccugcugcugugcggcagaagcugcagcaccaccuacaagggcguguacgagcugcagacccuggagcuggacauggccagccugaacaugaccaugccccugagcugcaccaagaacaacagccaccacuacaucauggugggcaacgagaccggccuggagcugacccugaccaacaccagcaucaucaaccacaaguucugcaaccugagcgacgcccacaagaagaaccuguacgaccacgcccugaugagcaucaucagcaccuuccaccugagcauccccaacuucaaccaguacgaggccaugagcugcgacuucaacggcggcaagaucagcgugcaguacaaccugagccacaccuacgccguggacgccgccaaccacugcggcaccaucgccaacggcgugcugcagaccuucaugagaauggccuggggcggcagcuacaucgcccuggacagcggcaagggcagcugggacugcaucaugaccagcuaccaguaccugaucauccagaacaccaccugggaggaccacugccaguucagcagacccagccccaucggcuaccugggccugcugagccagagaaccagagacaucuacaucagcagaagacugcugggcaccuucaccuggacccugagcgacagcgagggcaacgagacccccggcggcuacugccugaccagauggaugcugaucgaggccgagcugaagugcuucggcaacaccgccguggccaagugcaacgagaagcacgacgaggaguucugcgacaugcugagacuguucgacuucaacaagcaggccaucaagagacugaagaccgaggcccagaugagcauccagcugaucaacaaggccgugaacgcccugaucaacgaccagcugaucaugaagaaccaccugagagacaucaugggcauccccuacugcaacuacagcaaguacugguaccugaaccacaccgugaccggcaagaccagccugcccagaugcuggcuggugagcaacggcagcuaccugaacgagacccacuucagcgacgacaucgagcagcaggccgacaacaugaucaccgagcugcugcagaaggaguacaucgacagacagggcaagaccccccugggccugguggaccuguucguguucagcaccagcuucuaccugaucagcaucuuccugcaccuggugaagauccccugaggacuaguaauaaggaaacuguaugaaugucugugggcaggaagugaagagauccuucuguaaagguuuuuggaauuaugucugcugaauaauaaacuuuuuugaaauaauaaaucugguagaaaaaugagaucucaaaggcucuuuucagagccaccaaaaaaaaaaaaaaaaaaaaaaaaaaaaaaaaaaaaaaaaaaaaaaaaaaaaaaaaaaaaaaaaagaauu

SEQ ID NO: 42614 - RNA, 1664 nt, Artificial Sequence
  mRNA product Design b-4 (hSL-A64-N5) comprising derived and/or modified sequence from LASV(LASV221-NIG-2010;Clade II)__AIT17624__GPCmut13 (opt4)
aggagagucccgcagucggcguccagcggcucugcuuguucgugugugugucguugcaggccuuauucaagcuuaccaugggccagaucaucaccuucuuccaggaggugccccacgugaucgaggaggugaugaacaucgugcugaucgcccugagccugcuggccauccugaagggcaucuacaacguggccaccugcggccuguucggccuggugagcuuccugcugcugugcggcagaagcugcagcaccaccuacaagggcguguacgagcugcagacccuggagcuggacauggccagccugaacaugaccaugccccugagcugcaccaagaacaacagccaccacuacaucauggugggcaacgagaccggccuggagcugacccugaccaacaccagcaucaucaaccacaaguucugcaaccugagcgacgcccacaagaagaaccuguacgaccacgcccugaugagcaucaucagcaccuuccaccugagcauccccaacuucaaccaguacgaggccaugagcugcgacuucaacggcggcaagaucagcgugcaguacaaccugagccacaccuacgccaucgacgccgccaaccacugcggcaccaucgccaacggcgugcugcagaccuucaugagaauggccuggggcggcagcuacaucgcccuggacagcggcaagggcagcugggacugcaucaugaccagcuaccaguaccugaucauccagaacaccaccugggaggaccacugccaguucagcagacccagccccaucggcuaccugggccugcugagccagagaaccagagacaucuacaucagcagaagacugcugggcaccuucaccuggacccugagcgacagcgagggcaacgagacccccggcggcuacugccugaccagauggaugcugaucgaggccgagcugaagugcuucggcaacaccgccguggccaagugcaacgagaagcacgacgaggaguucugcgacaugcugagacuguucgacuucaacaagcaggccaucagaagacugaagaccgaggcccagaugagcauccagcugaucaacaaggccgugaacgcccugaucaacgaccagcugaucaugaagaaccaccugagagacaucaugggcauccccuacugcaacuacagcaaguacugguaccugaaccacaccgugaccggcaagaccagccugcccagaugcuggcuggugagcaacggcagcuaccugaacgagacccacuucagcgacgacaucgagcagcaggccgacaacaugaucaccgagaugcugcagaaggaguacauggacagacagggcaagaccccccugggccugguggaccuguucguguucagcaccagcuucuaccugaucagcaucuuccugcaccuggugaagauccccugaggacuaguaauaaggaaacuguaugaaugucugugggcaggaagugaagagauccuucuguaaagguuuuuggaauuaugucugcugaauaauaaacuuuuuugaaauaauaaaucugguagaaaaaugagaucucaaaggcucuuuucagagccaccaaaaaaaaaaaaaaaaaaaaaaaaaaaaaaaaaaaaaaaaaaaaaaaaaaaaaaaaaaaaaaaaagaauu

SEQ ID NO: 42615 - RNA, 1664 nt, Artificial Sequence
  mRNA product Design b-4 (hSL-A64-N5) comprising derived and/or modified sequence from LASV(LASV237-NIG-2010;Clade II)__AIT17638__GPCmut13 (opt4)
aggagagucccgcagucggcguccagcggcucugcuuguucgugugugugucguugcaggccuuauucaagcuuaccaugggccagaucaucaccuucuuccaggaggugccccacgugaucgaggaggugaugaacaucgugcugaucgcccugagccugcuggccauccugaagggcaucuacaacguggccaccugcggccuguucggccuggugagcuuccugcugcugugcggcagaagcugcagcaccaccuacaagggcguguacgagcugcagacccuggagcuggacauggccagccugaacaugaccaugccccugagcugcaccaagaacaacagccaccacuacaucauggugggcaacgagaccggccuggagcugacccugaccaacaccagcaucaucaaccacaaguucugcaaccugagcgacgcccacaagaaggaccuguacgaccacgcccugaugagcaucaucagcaccuuccaccugagcauccccaacuucaaccaguacgaggccaugagcugcgacuucaacggcggcaagaucagcgugcaguacaaccugagccacaccuacgccguggacgccgccaaccacugcggcaccaucgccaacggcgugcugcagaccuucaugagaauggccuggggcggcagcuacaucgcccuggacagcggcaagggcagcugggacugcaucaugaccagcuaccaguaccugaucauccagaacaccaccugggaggaccacugccaguucagcagacccagccccaucggcuaccugggccugcugagccagagaaccagagacaucuacaucagcagaagacugcugggcaccuucaccuggacccugagcgacagcgagggcaacgagacccccggcggcuacugccugaccagauggaugcugaucgaggccgagcugaagugcuucggcaacaccgccguggccaagugcaacgagaagcacgacgaggaguucugcgacaugcugagacuguucgacuucaacaagcaggccaucagaagacugaagaccgaggcccagaugagcauccagcugaucaacaaggccgugaacgcccugaucaacgaccagcugaucaugaagaaccaccugagagacaucaugggcauccccuacugcaacuacagcaaguacugguaccugaaccacaccgugaccggcaagaccagccugcccagaugcuggcuggugagcaacggcagcuaccugaacgagacccacuucagcgacgacaucgagcagcaggccgacaacaugaucaccgagcugcugcagaaggaguacauggacagacagggcaagaccccccugggccugguggaccuguucguguucagcaccagcuucuaccugaucagcaucuuccugcaccugaucaagauccccugaggacuaguaauaaggaaacuguaugaaugucugugggcaggaagugaagagauccuucuguaaagguuuuuggaauuaugucugcugaauaauaaacuuuuuugaaauaauaaaucugguagaaaaaugagaucucaaaggcucuuuucagagccaccaaaaaaaaaaaaaaaaaaaaaaaaaaaaaaaaaaaaaaaaaaaaaaaaaaaaaaaaaaaaaaaaagaauu

SEQ ID NO: 42616 - RNA, 1664 nt, Artificial Sequence
  mRNA product Design b-4 (hSL-A64-N5) comprising derived and/or modified sequence from LASV(LASV253-NIG-2011;Clade II)__AIT17670__GPCmut13 (opt4)
aggagagucccgcagucggcguccagcggcucugcuuguucgugugugugucguugcaggccuuauucaagcuuaccaugggccagaucaucaccuucuuccaggaggugccccacgugaucgaggaggugaugaacaucgugcugaucgcccugagccugcuggccauccugaagggcaucuacaacguggccaccugcggccuguucggccuggugagcuuccugcugcugugcggcagaagcugcagcaccaccuacaagggcguguacgagcugcagacccuggagcuggacauggccagccugaacaugaccaugccccugagcugcaccaagaacaacagccaccacuacaucauggugggcaacgagaccggccuggagcugacccugaccaacaccagcaucaucaaccacaaguucugcaaccugagcgacgcccacaagaagaaccuguacgaccacgcccugaugagcaucaucagcaccuuccaccugagcauccccaacuucaaccaguacgaggccaugagcugcgacuucaacggcggcaagaucagcgugcaguacaaccugagccacaccuacgccguggacgccgccaaccacugcggcaccaucgccaacggcgugcugcagaccuucaugagaauggccuggggcggcagcuacaucgcccuggacagcggcaagggcagcugggacugcaucaugaccagcuaccaguaccugaucauccagaacaccaccugggaggaccacugccaguucagcagacccagccccaucggcuaccugggccugcugagccagagaaccagagacaucuacaucagcagaagacugcugggcaccuucaccuggacccugagcgacagcgagggcaacgagacccccggcggcuacugccugaccagauggaugcugaucgaggccgagcugaagugcuucggcaacaccgccguggccaagugcaacgagaagcacgacgaggaguucugcgacaugcugagacuguucgacuucaacaagcaggccaucagaagacugaaggccgaggcccagaugagcauccagcugaucaacaaggccgugaacgcccugaucaacgaccagcugaucaugaagaaccaccugagagacaucaugggcauccccuacugcaacuacagcaaguacugguaccugaaccacaccgugaccggcagaaccagccugcccagaugcuggcuggugagcaacggcagcuaccugaacgagacccacuucagcgacgacaucgagcagcaggccgacaacaugaucaccgagcugcugcagaaggaguacaucgacagacagggcaagaccccccugggccugguggaccuguucguguucagcaccagcuucuaccugaucagcaucuuccugcaccuggugaagauccccugaggacuaguaauaaggaaacuguaugaaugucugugggcaggaagugaagagauccuucuguaaagguuuuuggaauuaugucugcugaauaauaaacuuuuuugaaauaauaaaucugguagaaaaaugagaucucaaaggcucuuuucagagccaccaaaaaaaaaaaaaaaaaaaaaaaaaaaaaaaaaaaaaaaaaaaaaaaaaaaaaaaaaaaaaaaaagaauu

SEQ ID NO: 42617 - RNA, 1664 nt, Artificial Sequence
  mRNA product Design b-4 (hSL-A64-N5) comprising derived and/or modified sequence from LASV(LASV254-NIG-2011;Clade II)__AIT17674__GPCmut13 (opt4)
aggagagucccgcagucggcguccagcggcucugcuuguucgugugugugucguugcaggccuuauucaagcuuaccaugggccagaucaucaccuucuuccaggaggugccccacgugaucgaggaggugaugaacaucgugcugaucgcccugagccugcuggccauccugaagggcaucuacaacguggccaccugcggccuguucggccuggugagcuuccugcugcugugcggcagaagcugcagcaccaccuacaagggcguguacgagcugcagacccuggagcuggacaugaccaaccugaacaugaccaugccccugagcugcaccaagaacaacagccaccacuacaucauggugggcaacgagaccggccuggagcugacccugaccaacaccagcaucaucaaccacaaguucugcaaccugagcgacgcccacaagaagaaccuguacaaccacgcccugaugagcaucaucagcaccuuccaccugagcauccccaacuucaaccaguacgaggccaugagcugcgacuucaacggcggcaagaucagcgugcaguacaaccugagccacagcuacgccguggacgccgccaaccacugcggcaccaucgccaacggcgugcugcagaccuucaugagaauggccuggggcggcagcuacaucgcccuggacagcggcaagggcaacugggacugcaucaugaccagcuaccaguaccugaucauccagaacaccaccugggaggaccacugccaguucagcagacccagccccaucggcuaccugggccugcugagccagagaaccagagacaucuacaucagcagaagacugcugggcaccuucaccuggacccugagcgacagcgagggcaacgagacccccggcggcuacugccugaccagauggaugcugaucgaggccgagcugaagugcuucggcaacaccgccguggccaagugcaacgagaagcacgacgaggaguucugcgacaugcugagacuguucgacuucaacaagcaggccaucagaagacugaagaccgaggcccaggccaacauccagcugaucaacaaggccgugaacgcccugaucaacgaccagcugaucaugaagaaccaccugagagacaucaugggcauccccuacugcaacuacagcaaguacugguaccugaaccacaccgugaccggcaagaccagccugcccagaugcuggcuggugagcaacggcagcuaccugaacgagacccacuucagcgacgacaucgagcagcaggccgacaacaugaucaccgagcugcugcagaaggaguacauggacagacagggcaagaccccccugggccugguggaccuguucguguucagcaccagcuucuaccugaucagcaucuuccugcaccuggugaagauccccugaggacuaguaauaaggaaacuguaugaaugucugugggcaggaagugaagagauccuucuguaaagguuuuuggaauuaugucugcugaauaauaaacuuuuuugaaauaauaaaucugguagaaaaaugagaucucaaaggcucuuuucagagccaccaaaaaaaaaaaaaaaaaaaaaaaaaaaaaaaaaaaaaaaaaaaaaaaaaaaaaaaaaaaaaaaaagaauu

SEQ ID NO: 42618 - RNA, 1664 nt, Artificial Sequence
  mRNA product Design b-4 (hSL-A64-N5) comprising derived and/or modified sequence from LASV(Nig08-A19;Clade III)__ADU56618__GPCmut13 (opt4)
aggagagucccgcagucggcguccagcggcucugcuuguucgugugugugucguugcaggccuuauucaagcuuaccaugggccagaucgugaccuucuuccaggaggugccccacgugaucgaggaggugaugaacaucgugcugaucgcccugagcauccuggccauccugaagggccuguacaacaucgccaccugcggccugaucggccuggugaccuuccugcugcugagcggcagaagcugcagcaugaccuacaagggcguguacgagcugcagacccuggagcugaacaugaacacccugaacaugaccaugccccugagcugcaccaagaacaacagccaccacuacaucauggugggcaacgagaccggccuggagcugacccugaccaacaccagccugcugcaccacaaguucugcaaccugagcgacgcccacaagaagaaccuguacgaccacacccugaugagcaucaucagcaccuuccaccugagcauccccaacuucaaccaguacgaggccaugagcugcgacuucaacggcggcaagaucaccgugcaguacaaccugagccacagcuacgccaucgacgccgccaaccacugcggcaccguggccaacggcgugcugcagaccuucaugagaauggccuggggcggcagcuacaucgcccuggacagcggcagaggcaagugggacugcaucaugaccagcuaccaguaccugaucauccagaacaccaccugggaggaccacugccaguucagcagacccagccccaucggcuaccugggccugcugagccagagaaccagagacaucuacaucagcagaagacugcugggcaccuucaccuggacccugagcgacagcgagggcaacgagacccccggcggcuacugccugaccagauggaugcugaucgaggccgagcugaagugcuucggcaacaccgccguggccaagugcaacgagaagcacgacgaggaguucugcgacaugcugagacuguucgacuucaacaagcaggccaucagaagacugaaggccgaggcccagaugagcauccagcugaucaacaaggccgugaacgcccugaucaacgaccagcugaucaugaagaaccaccugagagacaucaugggcauccccuacugcaacuacagcaaguacugguaccugaaccacaccagcaccggcagaaccagccugcccagaugcuggcuggugagcaacggcagcuaccugaacgagacccacuucagcgacgacaucgagcagcaggccgacaacaugaucaccgagaugcugcagaaggaguaccuggacagacagggcaagaccccccugggccugguggaccuguucguguucagcaccagcuucuaccugaucagcaucuuccugcaccuggugaagauccccugaggacuaguaauaaggaaacuguaugaaugucugugggcaggaagugaagagauccuucuguaaagguuuuuggaauuaugucugcugaauaauaaacuuuuuugaaauaauaaaucugguagaaaaaugagaucucaaaggcucuuuucagagccaccaaaaaaaaaaaaaaaaaaaaaaaaaaaaaaaaaaaaaaaaaaaaaaaaaaaaaaaaaaaaaaaaagaauu

SEQ ID NO: 42619 - RNA, 1667 nt, Artificial Sequence
  mRNA product Design b-4 (hSL-A64-N5) comprising derived and/or modified sequence from LASV(G1180-SLE-2010;Clade IV)__AIT17168__GPCmut13 (opt4)
aggagagucccgcagucggcguccagcggcucugcuuguucgugugugugucguugcaggccuuauucaagcuuaccaugggccagaucgugaccuucuuccaggaggugccccacgugaucgaggaggugaugaacaucgugcugaucgcccugagcauccuggccgugcugaagggccuguacaacuucgccaccugcggccuggugggccugcugaccuuccugcugcugugcggcagaagcugcaccgccagcagauacaagggcguguacgagcugcagacccuggagcugaacauggagacccugaacaugaccaugccccugagcugcaccaagaacaacagccaccacuacaucauggugggcaacgagaccggccuggagcugacccugaccaacaccagcaucaucaaccacaaguucugcaaccugagcgacgcccacaagaagaaccuguacgaccacgcccugaugagcaucaucagcaccuuccaccugagcauccccaacuucaaccaguacgaggccaugagcugcgacuucaacggcggcaagaucagcgugcaguacaaccugagccacagcuacgccggcgacgccgccaaccacugcggcaccguggccaacggcgugcugcagaccuucaugagaauggccuggggcggcagcuacaucgcccuggacagcggccacggcagcugggacugcaucaugaccagcuaccaguaccugaucauccagaacaccaccugggaggaccacugccaguucagcagacccagccccaucggcuaccugggccugcugagccagagaaccagagacaucuacaucagcagaagacugcugggcaccuucaccuggacccugagcgacagcgagggcaaggacacccccggcggcuacugccugaccagauggaugcugaucgaggccgagcugaagugcuucggcaacaccgccguggccaagugcaacgagaagcacgacgaggaguucugcgacaugcugagacuguucgacuucaacaagcaggccauccagagacugaaggccgaggcccagaugagcauccagcugaucaacaaggccgugaacgcccugaucaacgaccagcugaucaugaagaaccaccugagagacaucaugggcauccccuacugcaacuacagcaaguacugguaccugaaccacaccaccaccggcaagaccagccugcccaagugcuggcuggugagcaacggcagcuaccugaacgagacccacuucagcgacgacaucgagcagcaggccgacaacaugaucaccgagaugcugcagaaggaguacauggagagacagggcaagaccccccugggccugguggaccuguucguguucagcaccagcuucuaccugaucagcaucuuccugcaccuggugaagauccccugaggacuaguaauaaggaaacuguaugaaugucugugggcaggaagugaagagauccuucuguaaagguuuuuggaauuaugucugcugaauaauaaacuuuuuugaaauaauaaaucugguagaaaaaugagaucucaaaggcucuuuucagagccaccaaaaaaaaaaaaaaaaaaaaaaaaaaaaaaaaaaaaaaaaaaaaaaaaaaaaaaaaaaaaaaaaagaauu

SEQ ID NO: 42620 - RNA, 1667 nt, Artificial Sequence
  mRNA product Design b-4 (hSL-A64-N5) comprising derived and/or modified sequence from LASV(G1442-SLE-2011;Clade IV)__AIT17180__GPCmut13 (opt4)
aggagagucccgcagucggcguccagcggcucugcuuguucgugugugugucguugcaggccuuauucaagcuuaccaugggccagaucgugaccuucuuccaggaggugccccacgugaucgaggaggugaugaacaucgugcugaucgcccugagcauccuggccgugcugaagggccuguacaacguggccaccugcggccugaucggccuggugaccuuccugcugcugugcggcagaagcugcaccaccacccuguacaagggcguguacgagcugcagacccuggagcugaacauggagacccugaacaugaccaugccccugagcugcaccaagaacaacagccaccacuacaucagagugggcaacgagaccggccuggagcugacccugaccaacaccagcaucaucaaccacaaguucugcaaccugagcgacgcccacaagaagaaccuguacgaccacgcccugaugagcaucaucagcaccuuccaccugagcauccccaacuucaaccaguacgaggccaugagcugcgacuucaacggcggcaagaucagcgugcaguacaaccugagccacagcuacgccggcgacgccgccaaccacugcggcaccguggccaacggcgugcugcagaccuucaugagaauggccuggggcggcagcuacaucgcccuggacagcggcagaggcaacugggacugcaucaugaccagcuaccaguaccugaucauccagaacaccaccugggacgaccacugccaguucagcagacccagccccaucggcuaccugggccugcugagccagagaaccagagacguguacaucagcagaagacugcugggcaccuucaccuggacccugagcgacagcgagggcaaggacacccccggcggcuacugccugaccagauggaugcugaucgaggccgagcugaagugcuucggcaacaccgccguggccaagugcaacgagaagcacgacgaggaguucugcgacaugcugagacuguucgacuucaacaagcaggccauccagagacugaaggccgaggcccagaugagcauccagcugaucaacaaggccgugaacgcccugaucaacgaccagcugaucaugaagaaccaccugagagacaucaugggcauccccuacugcaacuacagcaaguacugguaccugaacaacaccgccaccggcaagaccagccugcccaagugcuggcugaucagcaacggcagcuaccugaacgagacccacuucagcgacgacaucgagcaggaggccgacaacaugaucaccgagaugcugcagaaggaguacauggagagacagggcaagaccccccugggccugguggaccuguucguguucagcaccagcuucuaccugaucagcaucuuccugcaccuggugaagauccccugaggacuaguaauaaggaaacuguaugaaugucugugggcaggaagugaagagauccuucuguaaagguuuuuggaauuaugucugcugaauaauaaacuuuuuugaaauaauaaaucugguagaaaaaugagaucucaaaggcucuuuucagagccaccaaaaaaaaaaaaaaaaaaaaaaaaaaaaaaaaaaaaaaaaaaaaaaaaaaaaaaaaaaaaaaaaagaauu

SEQ ID NO: 42621 - RNA, 1667 nt, Artificial Sequence
  mRNA product Design b-4 (hSL-A64-N5) comprising derived and/or modified sequence from LASV(G3010-SLE-2013;Clade IV)__AIT17344__GPCmut13 (opt4)
aggagagucccgcagucggcguccagcggcucugcuuguucgugugugugucguugcaggccuuauucaagcuuaccaugggccagaucgugaccuucuuccaggaggugccccacgugaucgaggaggugaugaacaucgugcugaucgcccugagcauccuggccgugcugaagggccuguacaacuucgccaccugcggccuggugggccuggugaccuuccugcugcugugcggcagaagcugcaccaccagccuguacaagggcguguacgagcugcagacccuggagcugaacauggagacccugaacaugaccaugccccugagcugcaccaagaacaacagccaccacuacaucauggugggcaacgagaccggccuggagcugacccugaccaacaccagcaucaucaaccacaaguucugcaaccugagcgacgcccacaagaagaaccuguacaaccacgcccugaugagcaucaucagcaccuuccaccugagcauccccaacuucaaccaguacgaggccaugagcugcgacuucaacggcggcaagaucagcgugcaguacaaccugagccacagcuacgccggcgacgccgccagccacugcggcaccguggccaacggcgugcugcagaccuucaugagaauggccuggggcggcagcuacaucgcccuggacagcggcuacggcaagugggacugcaucaugaccagcuaccaguaccugaucauccagaacaccaccugggaggaccacugccaguucagcagacccagccccaucggcuaccugggccugcugagccagagaaccagagacaucuacaucagcagaagacugcugggcaccuucaccuggacccugagcgacagcgagggcaaggacacccccggcggcuacugccugaccagauggaugcugaucgaggccgagcugaagugcuucggcaacaccgccguggccaagugcaacgagaagcacgacgaggaguucugcgacaugcugagacuguucgacuucaacaagcaggccauccagagacugaagaccgaggcccagaugagcauccagcugaucaacaaggccgugaacgcccugaucaacgaccagcugaucaugaagaaccaccugagagacaucaugggcauccccuacugcaacuacagcaaguacugguaccugaaccacaccaccaccggcaagaccagccugcccaagugcuggcuggugagcaacggcagcuaccugaacgagacccacuucagcgacgacaucgagcagcaggccgacaacaugaucaccgagaugcugcagaaggaguacauggagagacagggcaagaccccccugggccugguggaccuguucguguucagcaccagcuucuaccugaucagcaucuuccugcaccuggugaagauccccugaggacuaguaauaaggaaacuguaugaaugucugugggcaggaagugaagagauccuucuguaaagguuuuuggaauuaugucugcugaauaauaaacuuuuuugaaauaauaaaucugguagaaaaaugagaucucaaaggcucuuuucagagccaccaaaaaaaaaaaaaaaaaaaaaaaaaaaaaaaaaaaaaaaaaaaaaaaaaaaaaaaaaaaaaaaaagaauu

SEQ ID NO: 42622 - RNA, 1667 nt, Artificial Sequence
  mRNA product Design b-4 (hSL-A64-N5) comprising derived and/or modified sequence from LASV(G502-SLE-2009;Clade IV)__AIT17126__GPCmut13 (opt4)
aggagagucccgcagucggcguccagcggcucugcuuguucgugugugugucguugcaggccuuauucaagcuuaccaugggccagaucgugaccuucuuccaggaggugccccacgugaucgaggaggugaugaacaucgugcugaucgcccugagcauccuggccgugcugaagggccuguacaacuucgccaccugcggccuggugggccugcugaccuuccugcugcugugcggcagaagcugcaccaccggccuguacaagggcguguacgagcugcagacccuggagcugaacauggagacccugaacaugaccaugccccugagcugcaccaagaacaacagccaccacuacaucauggugggcaacgagaccggccuggagcugacccugaccaacaccagcaucaucaaccacaaguucugcaaccugagcgacgcccacaagaagaaccuguacgaccacgcccugaugagcaucaucagcaccuuccaccugagcauccccaacuucaaccaguacgaggccaugagcugcgacuucaacggcggcaagaucagcgugcaguacaaccugagccacagcuacgccggcgacgccgccgaccacugcggcaccguggccaacggcgugcugcagaccuucaugagaauggccuggggcggcagcuacaucgcccuggacagcggcagaggcagaugggacugcaucaugaccagcuaccaguaccugaucauccagaacaccaccugggaggaccacugccaguucagcagacccagccccaucggcuaccugggccugcugagccagagaaccagagacaucuacaucagcagaagacugcugggcaccuucaccuggacccugagcgacagcgagggcaaggacacccccggcggcuacugccugaccagauggaugcugaucgaggccgagcugaagugcuucggcaacaccgccguggccaagugcaacgagaagcacgacgaggaguucugcgacaugcugagacuguucgacuucaacaagcaggccauccagagacugaaggccgaggcccagaugagcauccagcugaucaacaaggccgugaacgcccugaucaacgaccagcuggugaugaagaaccaccugagagacaucaugggcauccccuacugcaacuacagcagauacugguaccugaaccacaccaccaccggcagaaccagccugcccaagugcuggcuggugagcaacggcagcuaccugaacgagacccacuucagcgacgacaucgagcagcaggccgacaacaugaucaccgagaugcugcagaaggaguacauggagagacagggcaagaccccccugggccugguggaccuguucguguucagcaccagcuucuaccugaucagcaucuuccugcaccuggugaagauccccugaggacuaguaauaaggaaacuguaugaaugucugugggcaggaagugaagagauccuucuguaaagguuuuuggaauuaugucugcugaauaauaaacuuuuuugaaauaauaaaucugguagaaaaaugagaucucaaaggcucuuuucagagccaccaaaaaaaaaaaaaaaaaaaaaaaaaaaaaaaaaaaaaaaaaaaaaaaaaaaaaaaaaaaaaaaaagaauu

SEQ ID NO: 42623 - RNA, 1667 nt, Artificial Sequence
  mRNA product Design b-4 (hSL-A64-N5) comprising derived and/or modified sequence from LASV(G733-SLE-2010;Clade IV)__AIT17154__GPCmut13 (opt4)
aggagagucccgcagucggcguccagcggcucugcuuguucgugugugugucguugcaggccuuauucaagcuuaccaugggccagaucgugaccuucuuccaggaggugccccacgugaucgaggaggugaugaacaucgugcugaucgcccugagcauccuggccgugcugaagggccuguacaacuucgccaccugcggcaucgugggccuggugagcuuccugcugcugugcggcagaagcugcaccaccagccuguacaagggcguguacgagcugcagacccuggagcugaacauggagacccugaacaugaccaugccccugagcugcaccaagaacaacagccaccacuacaucauggugggcaacgagaccggccuggagcugacccugaccaacaccagcaucaucaaccacaaguucugcaaccugagcgacgcccacaagaagaaccuguacgaccacgcccugaugagcaucaucagcaccuuccaccugagcauccccaacuucaaccaguacgaggccaugagcugcgacuucaacggcggcaagaucagcgugcaguacaaccugagccacagcuacgccggcgacgccgccaaccacugcggcaccaucgccaacggcgugcugcagaccuucaugagaauggccuggggcggcagcuacaucgcccuggacagcggcagagacagaugggacugcaucaugaccagcuaccaguaccugaucauccagaacaccaccugggaggaccacugccaguucagcagacccagccccaucggcuaccugggccugcugagccagagaaccagagacaucuacaucagcagaagacugcugggcaccuucaccuggacccugagcgacagcgagggcaaggacacccccggcggcuacugccugaccagauggaugcugaucgaggccgagcugaagugcuucggcaacaccgccguggccaagugcaacgagaagcacgacgaggaguucugcgacaugcugagacuguucgacuucaacaagcaggccauccagagacugaaggccgaggcccagaugagcauccagcugaucaacaaggccgugaacgcccugaucaacgaccagcugaucaugaagaaccaccugagagacaucaugggcauccccuacugcaacuacagcaaguacugguaccugaaccacaccaccaccggcaagaccagccugcccaagugcuggcuggugagcaacggcagcuaccugaacgagacccacuucagcgacgacaucgagcagcaggccgacaacaugaucaccgagaugcugcagaaggaguacauggagagacagggcaagaccccccugggccugguggaccuguucguguucagcaccagcuucuaccugaucagcaucuuccugcaccuggugaagauccccugaggacuaguaauaaggaaacuguaugaaugucugugggcaggaagugaagagauccuucuguaaagguuuuuggaauuaugucugcugaauaauaaacuuuuuugaaauaauaaaucugguagaaaaaugagaucucaaaggcucuuuucagagccaccaaaaaaaaaaaaaaaaaaaaaaaaaaaaaaaaaaaaaaaaaaaaaaaaaaaaaaaaaaaaaaaaagaauu

SEQ ID NO: 42624 - RNA, 1667 nt, Artificial Sequence
  mRNA product Design b-4 (hSL-A64-N5) comprising derived and/or modified sequence from MOPV/LASV reassortant(IGS-1;Clade IV)__AFY05576__GPCmut13 (opt4)
aggagagucccgcagucggcguccagcggcucugcuuguucgugugugugucguugcaggccuuauucaagcuuaccaugggccagaucgugaccuucuuccaggaggugccccacgugaucgaggaggugaugaacaucgugcugaucgcccugagcgugcuggccgugcugaagggccuguacaacuucgccaccugcggccuggugggccuggugaccuuccugcugcugugcggcagaagcugcaccaccagccuguacaagggcguguacgagcugcagacccuggagcugaacauggagacccugaacaugaccaugccccugagcugcaccaagaacaacagccaccacuacaucauggugggcaacgagaccggccuggagcugacccugaccaacaccagcaucaucaaccacaaguucugcaaccugagcgacgcccacaagaagaaccuguacgaccacgcccugaugagcaucaucagcaccuuccaccugagcauccccaacuucaaccaguacgaggccaugagcugcgacuucaacggcggcaagaucagcgugcaguacaaccugagccacagcuacgccggcgacgccgccaaccacugcggcaccguggccaacggcgugcugcagaccuucaugagaauggccuggggcggcagcuacaucgcccuggacagcggcagaggcaacugggacugcaucaugaccagcuaccaguaccugaucauccagaacaccaccugggaggaccacugccaguucagcagacccagccccaucggcuaccugggccugcugagccagagaaccagagacaucuacaucagcagaagacugcugggcaccuucaccuggacccugagcgacagcgagggcgaggacacccccggcggcuacugccugaccagauggaugcugaucgaggccgagcugaagugcuucggcaacaccgccguggccaagugcaacgagaagcacgacgaggaguucugcgacaugcugagacuguucgacuucaacaagcaggccauccagagacugaaggccgaggcccagaugagcauccagcugaucaacaaggccgugaacgcccugaucaacgaccagcugaucaugaagaaccaccugagagacaucaugggcauccccuacugcaacuacagcaaguacugguaccugaaccacaccaccaccggcagaaccagccugcccaagugcuggcuggugagcaacggcagcuaccugaacgagacccacuucagcgacgacaucgagcagcaggccgacaacaugaucaccgagaugcugcagaaggaguacauggagagacagggcaagaccccccugggccugguggaccuguucguguucagcaccagcuucuaccugaucagcaucuuccugcaccuggugaagauccccugaggacuaguaauaaggaaacuguaugaaugucugugggcaggaagugaagagauccuucuguaaagguuuuuggaauuaugucugcugaauaauaaacuuuuuugaaauaauaaaucugguagaaaaaugagaucucaaaggcucuuuucagagccaccaaaaaaaaaaaaaaaaaaaaaaaaaaaaaaaaaaaaaaaaaaaaaaaaaaaaaaaaaaaaaaaaagaauu

SEQ ID NO: 42625 - RNA, 1667 nt, Artificial Sequence
  mRNA product Design b-4 (hSL-A64-N5) comprising derived and/or modified sequence from LASV(LM765-SLE-2012;Clade IV)__AIT17814__GPCmut13 (opt4)
aggagagucccgcagucggcguccagcggcucugcuuguucgugugugugucguugcaggccuuauucaagcuuaccaugggccagaucgugaccuucuuccaggaggugccccacgugaucgaggaggugaugaacaucgugcugaucgcccugagcauccuggccgugcugaagggccuguacaacuucgccaccugcggccuggugggccuggugaccuuccugcugcugugcggcagaagcugcaccaccagccuguacaagggcguguacgagcugcagacccuggagcugaacauggagacccugaacaugaccaugccccugagcugcaccaagaacaacagccaccacuacaucauggugggcaacgagaccggccuggagcugacccugaccaacaccagcaucaucgaccacaaguucugcaaccugagcgacgcccacagaaagaaccuguacgaccacgcccugaugagcaucaucagcaccuuccaccugagcauccccaacuucaaccaguacgaggccaugagcugcgacuucaacggcggcaagaucagcgugcaguacaaccugagccacagcuacgccaaggacgccgccgaccacugcggcaccguggccaacggcgugcugcagaccuucaugagaauggccuggggcggcagcuacaucgcccuggacagcggcagaggcagaugggacugcaucaugaccagcuaccaguaccugaucauccagaacaccaccugggaggaccacugccaguucagcagacccagccccaucggcuaccugggccugcugagccagagaaccagagacaucuacaucagcagaagacugcugggcaccuucaccuggacccugagcgacagcgagggcaaggacacccccggcggcuacugccugaccagauggaugcugaucgaggccgagcugaagugcuucggcaacaccgccguggccaagugcaacgagaagcacgacgaggaguucugcgacaugcugagacuguucgacuucaacaagcaggccauccagagacugaaggccgaggcccagaugagcauccagcugaucaacaaggccgugaacgcccugaucaacgaccagcugaucaugaagaaccaccugagagacaucaugggcauccccuacugcaacuacagcaaguacugguaccugaaccacaccaccaccggcaagaccagccugcccaagugcuggcuggugagcaacggcagcuaccugaacgagacccacuucagcgacgacaucgagcagcaggccgacaacaugaucaccgagaugcugcagaaggaguacauggagagacagggcaagaccccccugggccugguggaccuguucguguucagcaccagcuucuaccugaucagcaucuuccugcaccuggugaagauccccugaggacuaguaauaaggaaacuguaugaaugucugugggcaggaagugaagagauccuucuguaaagguuuuuggaauuaugucugcugaauaauaaacuuuuuugaaauaauaaaucugguagaaaaaugagaucucaaaggcucuuuucagagccaccaaaaaaaaaaaaaaaaaaaaaaaaaaaaaaaaaaaaaaaaaaaaaaaaaaaaaaaaaaaaaaaaagaauu

SEQ ID NO: 42626 - RNA, 1667 nt, Artificial Sequence
  mRNA product Design b-4 (hSL-A64-N5) comprising derived and/or modified sequence from LASV(LM776-SLE-2012;Clade IV)__AIT17824__GPCmut13 (opt4)
aggagagucccgcagucggcguccagcggcucugcuuguucgugugugugucguugcaggccuuauucaagcuuaccaugggccagaucgugaccuucuuccaggaggugccccacgugaucgaggaggugaugaacaucgugcugaucgcccugagcauccuggccgugcugaagggccuguacaacuucgccaccugcggccuggugggccuggugaccuuccugcugcugugcggcagaagcugcaccaccagcguguacaagggcguguacgagcugcagacccuggagcugaacauggagacccugaacaugaccaugccccugagcugcaccaagaacaacagccaccacuacaucauggugggcaacgagaccggccuggagcugacccugaccaacaccagcaucaucaaccacaaguucugcaaccugagcgacgcccacaagaagaaccuguacgaccacgcccugaugagcaucaucagcaccuuccaccugagcauccccaacuucaaccaguacgaggccaugagcugcgacuucaacggcggcaagaucagcgugcaguacaaccugagccacagcuacgccggcgacgccgccaaccacugcggcaccguggccaacggcgugcugcagaccuucaugagaauggccuggggcggcagcuacaucgcccuggacagcggccacggcaagugggacugcaucaugaccagcuaccaguaccugaucauccagaacaccaccugggaggaccacugccaguucagcagacccagccccaucggcuaccugggccugcugagccagagaaccagagacaucuacaucagcagaagacugcugggcaccuucaccuggacccugagcgacagcgagggcaaggacacccccggcggcuacugccugaccagauggaugcugaucgaggccgagcugaagugcuucggcaacaccgccguggccaagugcaacgagaagcacgacgaggaguucugcgacaugcugagacuguucgacuucaacaagcaggccauccagagacugaaggccgaggcccagaugagcauccagcugaucaacaaggccgugaacgcccugaucaacgaccagcugaucaugaagaaccaccugagagacaucaugggcauccccuacugcaacuacagcaaguacugguaccugaaccacaccaccaccggcaagaccagccugcccaagugcuggcuggugagcaacggcagcuaccugaacgagacccacuucagcgacgacaucgagcagcaggccgacaacaugaucaccgagaugcugcagaaggaguacauggagagacagggcaagaccccccugggccugguggaccuguucguguucagcaccagcuucuaccugaucagcaucuuccugcaccuggugaagauccccugaggacuaguaauaaggaaacuguaugaaugucugugggcaggaagugaagagauccuucuguaaagguuuuuggaauuaugucugcugaauaauaaacuuuuuugaaauaauaaaucugguagaaaaaugagaucucaaaggcucuuuucagagccaccaaaaaaaaaaaaaaaaaaaaaaaaaaaaaaaaaaaaaaaaaaaaaaaaaaaaaaaaaaaaaaaaagaauu

SEQ ID NO: 42627 - RNA, 1667 nt, Artificial Sequence
  mRNA product Design b-4 (hSL-A64-N5) comprising derived and/or modified sequence from LASV(Mad39;Clade IV)__ANH09722__GPCmut13 (opt4)
aggagagucccgcagucggcguccagcggcucugcuuguucgugugugugucguugcaggccuuauucaagcuuaccaugggccagaucgugaccuucuuccaggaggugccccacgugaucgaggaggugaugaacaucgugcugaucgcccugagcauccuggccgugcugaagggccuguacaacguggccaccugcggccugaucggccuggugaccuuccugcugcugugcggcagaagcugcaccaccacccuguacaagggcguguacgagcugcaggcccuggagcugaacauggagacccugaacaugaccaugccccugagcugcaccaagaacaacagccaccacuacaucagagugggcaacgagaccggccuggagcugacccugaccaacaccagccugaucaaccacaaguucugcaaccugagcgacgcccacaagaagaaccuguacgaccacgcccugaugagcaucaucagcaccuuccaccugagcauccccaacuucaaccaguacgaggccaugagcugcgacuucaacgacggcaagaucagcgugcaguacaaccugagccacaccuacgccggcgacaccgccaaccacugcggcaccguggccaacggcgugcugcagaccuucaugagaauggccuggggcggcagcuacaucgcccuggacagcggcagaggcggcugggacugcaucaugaccagcuaccaguaccugaucauccagaacaccaccugggaggaccacugccaguucagcagacccagccccaucggcuaccugggccugcugagccagagaaccagagacaucuacaucagcagaagacugcugggcaccuucaccuggacccugagcgacagcgagggcaaggacacccccggcggcuacugccugaccagauggaugcugaucgaggccgagcugaagugcuucggcaacaccgccguggccaagugcaacgagaagcacgacgaggaguucugcgacaugcugagacuguucgacuucaacaagcaggccauccagagacugaaggccgaggcccagaugagcauccagcugaucaacaaggccgugaacgcccugaucaacgaccagcugaucaugaagaaccaccugagagacaucaugggcauccccuacugcaacuacagcaaguacugguaccugaaccacaccgugaccggcaagaccagccugcccaagugcuggcuggugagcaacggcagcuaccugaacgagacccacuucagcgacgacaucgagcagcaggccgacaacaugaucaccgagaugcugcagaaggaguacauggagagacagggcaagaccccccugggccugguggaccuguucguguucagcaccagcuucuaccugaucagcaucuuccugcaccuggugaagauccccugaggacuaguaauaaggaaacuguaugaaugucugugggcaggaagugaagagauccuucuguaaagguuuuuggaauuaugucugcugaauaauaaacuuuuuugaaauaauaaaucugguagaaaaaugagaucucaaaggcucuuuucagagccaccaaaaaaaaaaaaaaaaaaaaaaaaaaaaaaaaaaaaaaaaaaaaaaaaaaaaaaaaaaaaaaaaagaauu

SEQ ID NO: 42628 - RNA, 1667 nt, Artificial Sequence
  mRNA product Design b-4 (hSL-A64-N5) comprising derived and/or modified sequence from LASV(Z0947-SLE-2011;Clade IV)__AIT17840__GPCmut13 (opt4)
aggagagucccgcagucggcguccagcggcucugcuuguucgugugugugucguugcaggccuuauucaagcuuaccaugggccagaucgugaccuucuuccaggaggugccccacgugaucgaggaggugaugaacaucgugcugaucgcccugagcauccuggccgugcugaagggccuguacaacuucgccaccugcggccuggugggccuggugaccuuccugcugcugugcggcagaagcugcaccaucagccuguacaagggcguguacgagcugcagacccuggagcugaacauggagacccugaacaugaccaugccccugagcugcaccaagaacaacagccaccacuacaucauggugggcaacgagaccggccuggagcugacccugaccaacaccagcaucaucaaccacaaguucugcaaccugagcgacgcccacaagaagaaccuguacgaccacgcccugaugagcaucaucagcaccuuccaccugagcauccccaacuucaaccaguacgaggccaugagcugcgacuucaacggcggcaagaucagcgugcaguacaaccugagccacagcuacgccggcgacgccgccaaccacugcggcaccguggccaacggcgugcugcagaccuucaugagaauggccuggggcggcagcuacaucgcccuggacagcggcagagacagaugggacugcaucaugaccagcuaccaguaccugaucauccagaacaccaccugggaggaccacugccaguucagcagacccagccccaucggcuaccugggccugcugagccagagaaccagagacaucuacaucagcagaagacugcugggcaccuucaccuggacccugagcgacagcgagggcaaggacacccccggcggcuacugccugaccagauggaugcugaucgaggccgagcugaagugcuucggcaacaccgccguggccaagugcaacgagaagcacgacgaggaguucugcgacaugcugagacuguucgacuucaacaagcaggccauccagagacugaaggccgaggcccagaugagcauccagcugaucaacaaggccgugaacgcccugaucaacgaccagcugaucaugaagaaccaccugagagacaucaugggcauccccuacugcaacuacagcaaguacugguaccugaaccacaccaccaccggcaagaccagccugcccaagugcuggcuggugagcaacggcagcuaccugaacgagacccacuucagcgacgacaucgagcagcaggccgacaacaugaucaccgagaugcugcagaaggaguacauggagagacagggcaagaccccccugggccugguggaccuguucguguucagcaccagcuucuaccugaucagcaucuuccugcaccuggugaagauccccugaggacuaguaauaaggaaacuguaugaaugucugugggcaggaagugaagagauccuucuguaaagguuuuuggaauuaugucugcugaauaauaaacuuuuuugaaauaauaaaucugguagaaaaaugagaucucaaaggcucuuuucagagccaccaaaaaaaaaaaaaaaaaaaaaaaaaaaaaaaaaaaaaaaaaaaaaaaaaaaaaaaaaaaaaaaaagaauu

SEQ ID NO: 42629 - RNA, 1667 nt, Artificial Sequence
  mRNA product Design b-4 (hSL-A64-N5) comprising derived and/or modified sequence from LASV(Josiah;Clade IV)__NP_694870__GPCmut13 (opt5)
aggagagucccgcagucggcguccagcggcucugcuuguucgugugugugucguugcaggccuuauucaagcuuaccaugggccagaucgugaccuucuuucaagaggucccccacguuauugaagaggugaugaacaucgugcugauugcccucagcguccuggcugugcuuaaggggcuguacaauuucgccacaugcggacucguuggccuggugacguuucuucugcucugugggagauccugcaccacaucucuguauaaaggagucuacgaacugcagacccucgagcugaacauggaaacacuuaauaugaccaugccucugagcuguacaaagaacaauucccaucacuauaucauggugggcaacgagaccgggcucgagcugacgcuuaccaauacaucuauuaucaaccauaaauucugcaaucugagcgacgcgcacaagaaaaaccucuacgaucaugcucugauguccaucauuucuaccuuucaccugagcaucccgaauuucaaccaguaugaagccauguccugugacuuuaauggaggcaagauuagcguucaguacaaccucucucacuccuaugccggcgaugcugccaaucauugcgggacaguggcuaacggaguccugcaaaccuucaugcggauggccuggggcgggagcuacaucgcgcuugacucuggacgcggcaacugggauuguauuaugacguccuaccaguaucugaucauucagaauacaaccugggaggaccacugccaguuuagcagacccucuccuaucggguaccucggacugcuuucccaacggacacgcgauaucuauauuagcagacggcugcucggcaccuucaccuggacacuguccgacucugaaggcaaggauacgcccgggggauacugucugacccgcuggaugcucaucgaggccgagcugaaaugcuuuggcaacacagcuguggccaaguguaaugaaaaacaugacgaggaguucugcgauaugcuuagacuguuugacuucaacaagcaggcuauucagcggcucaaagccgaagcgcagaugagcauccaacugauuaauaaggccgugaacgcucuuaucaaugaucagcugaucaugaagaaccaccuccgcgacauuauggggaucccuuauugcaauuacuccaaauauugguaccugaaccacaccacaaccggaagaacgagccugcccaaguguuggcucgucucuaauggcuccuaccugaacgaaacacauuucagcgacgauauugagcagcaagccgacaauaugaucaccgagaugcuucagaaagaauauauggagcggcaggggaagaccccucugggacucguugaucuguuuguguucucuaccagcuuuuaccugauuuccaucuuccuucaccucgugaaaaucccgugaggacuaguaauaaggaaacuguaugaaugucugugggcaggaagugaagagauccuucuguaaagguuuuuggaauuaugucugcugaauaauaaacuuuuuugaaauaauaaaucugguagaaaaaugagaucucaaaggcucuuuucagagccaccaaaaaaaaaaaaaaaaaaaaaaaaaaaaaaaaaaaaaaaaaaaaaaaaaaaaaaaaaaaaaaaaagaauu

SEQ ID NO: 42630 - RNA, 1664 nt, Artificial Sequence
  mRNA product Design b-4 (hSL-A64-N5) comprising derived and/or modified sequence from LASV(LP;Clade I)__AAF86701__GPCmut13 (opt5)
aggagagucccgcagucggcguccagcggcucugcuuguucgugugugugucguugcaggccuuauucaagcuuaccaugggccagaucauuaccuucuuucaagaggugccccacgucaucgaagagguuaugaacauugugcugaucgcccucagccugcuugcuauucugaaggggcucuacaauaucgccacaugcggaaucauuggccugguggcguuccuuuuucugugugggaaauccugcucucucacgcugaagggaggcuaugaacugcagacccucgagcugaacauggaaacacuuaauaugaccaugccucugagcuguaccaaaaacuccucucaucacuacaucagagucgggaaugagacaggacucgagcugacacuuaccaacacgagcauuaucaaucauaaguucugcaaccuguccgacgcucacaaaaagaaucucuaugaucaugcccugaugucuauuaucagcaccuuucaccuguccauuccgaacuucaaucaguacgaagccaugagcugugacuuuaacggcggcaagaucucugugcaguauaaucucucccacagcuacgcuggggaugccgcugagcauugcggaacaguugccaacggcgugcugcaaaccuucaugcggauggcguggggagggcgcuauaucgcccuugacucuggcaaagggaauugggauuguauuaugacauccuaccaguaccugaucauucagaacaccacgugggaagaccacugccaguuuagcagacccucuccuaucggauaucucggccugcuuucccaacggacacgcgauauuuacaucagcagacggcugcucggcaccuucacauggacccuguccgacucugaggggaacgagacccccggaggcuauugucugacacgcuggaugcucaucgaagcugagcugaagugcuuugggaauacggccgucgcuaaauguaacgaaaagcaugaugaggaguucugcgacaugcuuagacuguuugauuucaauaaacaggccauucggcgccucaaggcggaagcccagaugagcauccagcugauuaacaaggcugugaaugcccuuaucaacgaccaacugauuaugaaaaaucaccucagagauaucaugggaaucccuuacugcaacuauuccaaguacugguaucugaaucacaccagcucuggccggacaucccugcccaaauguuggcucauuagcaacgggucuuaccugaaugagacccaguucagcgacgacaucgaacagcaagcugauaacaugauuacagagaugcuucagaaggaauacaucgagcgccagggaaaaaccccucugggccucguugacauuuuuaucuucuccacgucuuuuuaucugauuagcaucuuccugcaucuuaucaagauuccgugaggacuaguaauaaggaaacuguaugaaugucugugggcaggaagugaagagauccuucuguaaagguuuuuggaauuaugucugcugaauaauaaacuuuuuugaaauaauaaaucugguagaaaaaugagaucucaaaggcucuuuucagagccaccaaaaaaaaaaaaaaaaaaaaaaaaaaaaaaaaaaaaaaaaaaaaaaaaaaaaaaaaaaaaaaaaagaauu

SEQ ID NO: 42631 - RNA, 1664 nt, Artificial Sequence
  mRNA product Design b-4 (hSL-A64-N5) comprising derived and/or modified sequence from LASV(803213;Clade II)__AAF86703__GPCmut13 (opt5)
aggagagucccgcagucggcguccagcggcucugcuuguucgugugugugucguugcaggccuuauucaagcuuaccaugggccagaucauuaccuucuuucaagaggugccccacgucaucgaagagguuaugaacauugugcugaucgcccucagccugcuugcuauucugaaggggaucuacaauguggccacaugcggacucuucggccugaucuccuuucuucugcucugugggagaucuugcagcgucacguauaaaggaguguacgaacugcagacccuggagcucaacauggcgaaucugaacaugacaaugccucuuuccuguaccaagaauaacucucaucacuauauuaugguuggcaaugaaacagggcuggagcucacccugacaaacaccagcaucauuaaucauaaauucugcaaccuuuccgacgcucacaagaaaaaucuguacgaucaugcccucaugucuaucauuagcacguuucaccuguccaucccgaacuucaaucaguaugaggccaugagcugugacuuuaacggaggcaagauuucugugcaguacaaucugucccacagcuucgcugucgaugccgcuaaccauugcggcaccaucgccaacggggugcuccaaacauuuaugcggauggcguggggaggcucuuauaucgcccuggacuccgggaagggaaauugggauuguauuaugaccagcuaccaguaccuuaucauucagaacacaaccugggaagaccacugccaguucucucgccccuccccuaucggcuaucuggggcuccugagccaaagaacgcgggauauuuacaucucccgcagacuucugggaacauuuaccuggacacucucugacagcgagggcaaugaagcucccggcggguauugucugacccgguggaugcugaucgaggccgagcucaaaugcuucggaaacaccgcuguugccaaguguaaugaaaaacaugaugaggaauuuugcgacaugcugcgccuuuucgauuucaacaagcaggcgauuaaaagacugaagacagaggcccagauguccauccagcucauuaauaaggcugugaacgcccugaucaaugaccaacuuauuaugaaaaaccaucugcgggauaucaugggcaucccuuacugcaauuauagccgcuacugguaucucaaccacacggucaccgggaagacaucucugcccagauguuggcugguguccaauggaagcuaccucaacgaaacccacuuuucugacgacauugagcagcaggcugauaauaugaucacagagaugcugcaaaaagaauacauggaccggcagggcaagaccccucuugggcugguggaucucuucgucuuuagcacguccuucuaucugauuucuaucuuucugcaccuuguuaaaauuccgugaggacuaguaauaaggaaacuguaugaaugucugugggcaggaagugaagagauccuucuguaaagguuuuuggaauuaugucugcugaauaauaaacuuuuuugaaauaauaaaucugguagaaaaaugagaucucaaaggcucuuuucagagccaccaaaaaaaaaaaaaaaaaaaaaaaaaaaaaaaaaaaaaaaaaaaaaaaaaaaaaaaaaaaaaaaaagaauu

SEQ ID NO: 42632 - RNA, 1664 nt, Artificial Sequence
  mRNA product Design b-4 (hSL-A64-N5) comprising derived and/or modified sequence from LASV(GA391;Clade III)__CAA36645__GPCmut13 (opt5)
aggagagucccgcagucggcguccagcggcucugcuuguucgugugugugucguugcaggccuuauucaagcuuaccaugggccagaucgugaccuucuuucaagaggucccccacguuauugaagaggugaugaacaucgugcugauugcccucagcauccuggcuauucuuaaggggcuguacaaugucgccacaugcggacucaucggccuggugacguuccuucugcucuccgggagaucuuguagccugaucuauaaaggaaccuacgaacugcagacacucgagcugaacauggaaacccuuaauaugacaaugccucuguccugcaccaagaacaauucucaucacuauauucggguuggcaacgagacagggcucgagcugacccuuacgaauaccagcauccugaaccauaaauuuuguaaucucuccgacgcgcacaagcgcaaccuguacgaucauucucugaugagcauuaucuccacauuccaccucagcauuccgaauuuuaaccaguaugaagcuaugucuugcgacuucaauggaggcaaaaucaccgugcaguacaaccugucccacagcuuugccgucgaugccgcuggccauugugggacacuugccaauggagugcugcaaaccuucaugagaauggcuuggggcgggucuuauauugcccucgacuccggacggggcaacugggauugcaucaugacgagcuaccaguaccugaucauucagaacacaaccugggacgaucacugucaguuuucucgccccuccccuaucggguaucuuggacugcucagccaaagaacacgggacauuuacaucucccgcagacugcugggcaccuucaccuggacacucucugauagcgagggcaaugaaacgcccgggggauauugccugacccgguggaugcuuauugaggcggagcugaaguguuuuggcaacacagccguugcuaagugcaaugaaaaacaugacgaggaguucugugauaugcuccgccuguuugacuucaacaagcaggccaucagacggcuuaaaaccgaagcucagauguccauccagcugauuaauaaggccgugaacgcgcucaucaaugaucaacugauuaugaaaaaccaucugcgcgacaucauggggauuccuuacugcaauuauagcagauacugguaucucaaccacacaucuaccggaaagacgucccugccccggugcuggcuuaucagcaauggcucuuaccugaacgaaacaaaguucagcgacgauaucgagcagcaggccgacaauaugauuaccgagaugcuccaaaaagaauacaucgaucgccaggggaagaccccucugggacuggucgaccuuuuuguguucuccacaucuuuuuaucucauuagcaucuuccugcaccuggugaaaauuccgugaggacuaguaauaaggaaacuguaugaaugucugugggcaggaagugaagagauccuucuguaaagguuuuuggaauuaugucugcugaauaauaaacuuuuuugaaauaauaaaucugguagaaaaaugagaucucaaaggcucuuuucagagccaccaaaaaaaaaaaaaaaaaaaaaaaaaaaaaaaaaaaaaaaaaaaaaaaaaaaaaaaaaaaaaaaaagaauu

SEQ ID NO: 42633 - RNA, 1667 nt, Artificial Sequence
  mRNA product Design b-4 (hSL-A64-N5) comprising derived and/or modified sequence from LASV(AV;Clade V)__CCA30314__GPCmut13 (opt5)
aggagagucccgcagucggcguccagcggcucugcuuguucgugugugugucguugcaggccuuauucaagcuuaccaugggccagaucgugaccuucuuucaagaggucccccacguuauugaagaggugaugaacaucgugcugauugcccucagcauccuggcuguccuuaaggggcuguacaauauugccacaugcggacucaucggccugaucacguuccuucugcucugugggagauccugcucuagcaaccuguauaaaggaguguacgaacugcagucccucgaccugaauauggagacccuuaacaugacaaugccucugucuuguaccaagaauaacagccaucacuauauucggguuggcaaugauacagggcucgaacugacccuuacaaacaccuccauccugaaucauaaauuuugcaaccucucugacgcgcacaagaaagaucuguacgaccaugcucugaugagcauuaucuccacguuccaccucagcauuccgaauuuuaaccaguaugaggccaugucuugugauuucaauggaggcaagaucuccgugcaguacaaccugagccacucuuaugccauugacgcugccaaucauugcggcaccgucgcuaacgggauccuucaaacauuuaugcgcauggccuggggaggcuccuacaucgcgcuggauagcgggagaggaaacugggacuguauuaugaccucuuaccaguaucucaucauucagaauacaaccugggagaaccacugccaguucucccggcccagcccuaucggcuaccuggggcuucugucccaacgcacgagagauauuuauaucucucggcgccuccugggaacauuuaccuggacacugagcgacuccgaaggcaaugccacccccggcggguacugucucaccagauggaugcugaucgaggcugaacuuaagugcuucggaaacacagccguggcuaaauguaaugagaagcaugaugaggaauuuugcgacaugcugcgccucuucgauuuuaacaaacaggccauuagccggcugaagucugaggcgcagauguccauccagcuuauuaauaaagccguuaacgcucugaucaaugaccaacucauuaugaagaaccaccugagagacaucaugggcaucccuuauugcaauuacagcaaguauugguaccugaaccacacgauuaccgggaaaacaucucuccccaaguguuggcuggugagcaauggauccuaccuuaacgaaacccauuucucugaugacaucgagcagcaggccgauaauaugauuacagaaaugcugcaaaaagaguauauggagcggcagggcaagaccccucucgggcuggucgaccuguucguguuuagcacguccuucuaccuuaucagcauuuuucuccgccuggugaaaaucccgugaggacuaguaauaaggaaacuguaugaaugucugugggcaggaagugaagagauccuucuguaaagguuuuuggaauuaugucugcugaauaauaaacuuuuuugaaauaauaaaucugguagaaaaaugagaucucaaaggcucuuuucagagccaccaaaaaaaaaaaaaaaaaaaaaaaaaaaaaaaaaaaaaaaaaaaaaaaaaaaaaaaaaaaaaaaaagaauu

SEQ ID NO: 42634 - RNA, 1664 nt, Artificial Sequence
  mRNA product Design b-4 (hSL-A64-N5) comprising derived and/or modified sequence from LASV(Togo/2016/7082;Clade VI)__AMR44577__GPCmut13 (opt5)
aggagagucccgcagucggcguccagcggcucugcuuguucgugugugugucguugcaggccuuauucaagcuuaccaugggccagaucauuaccuucuuucaagaggugccccacgucaucgaagagguuaugaacauugugcugaucgcccucagccugcuugcuauucugaaggggguguacaaugucgccacaugcggaaucaucggccucgugacguuccuguuucuuugugggagauccugcucucugauuuauaaaggaagcuacgaacuccagacccuggagcugaacauggaaacacucaauaugaccaugccucuguccuguacaaagaacucuagccaucacuauauccggguuggcaaugagaccgggcuugagcugacacucaccaacacguccauuaucaaucauaaauucugcaaccugucugacgcgcacaagcgcaaucuuuacgaucaugcucugaugagcauucucuccaccuuucaccugagcaucccgaacuucaaucaguaugaagccaugucuugugacuuuaacggaggcaaaauuuccgugcaguacaaucugagccacgccuaugcugucgaugccgcugagcauugcggcacaguggccaacgggguucuccaaaccuucaugagaauggcguggggaggcucuuacaucgcccuggacuccgggcggggaaauugggauuguaucaugacaagcuaccaguaucuuauuauccagaacaccacgugggaagaccacugccaguuuucucgccccuccccuauuggcuaccuggggcuccugagccaaagaacacgggauaucuauauuucccgcagacuucugggaaccuucacauggacccucucugacagcgagggcaacgagacccccggcggguacugucugacacgguggaugcugaucgaagcugagcucaagugcuuuggaaauacggccguggcuaaguguaacgaaaaacaugaugaggaguucugcgacaugcugcgccuuuuugauuucaauaagcaggccauccagagacugaaauccgaagcgcagaugagcauucaacucaucaacaaggccgucaaugcucugauuaacgaccagcuuaucaugaaaaaucaucugcgggauaugaugggcauuccuuauugcaacuacucuaaguauugguaccucaaucacaccuccagcgggcgcacaucucugcccaaguguuggcuggugagcaacggauccuaccucaaugagacccacuucucugacgacaucgaacagcaagccgauaacaugaucacagagaugcugcagaaagaauauauugacagacagggcaagaccccucuugggcugguggaucucuuugucuucagcacguccuuuuaccugaucagcauuuuccugcaccuuaucaaaauuccgugaggacuaguaauaaggaaacuguaugaaugucugugggcaggaagugaagagauccuucuguaaagguuuuuggaauuaugucugcugaauaauaaacuuuuuugaaauaauaaaucugguagaaaaaugagaucucaaaggcucuuuucagagccaccaaaaaaaaaaaaaaaaaaaaaaaaaaaaaaaaaaaaaaaaaaaaaaaaaaaaaaaaaaaaaaaaagaauu

SEQ ID NO: 42635 - RNA, 1664 nt, Artificial Sequence
  mRNA product Design b-4 (hSL-A64-N5) comprising derived and/or modified sequence from LASV(KAK-428;Clade n.d. (VII))__ANH09740__GPCmut13 (opt5)
aggagagucccgcagucggcguccagcggcucugcuuguucgugugugugucguugcaggccuuauucaagcuuaccaugggccagaucgugaccuucuuucaagaggucccccacguuauugaagaggugaugaacaucgugcugauugcccucagccugcuugcuauccugaaggggcucuacaauuucgccacaugcggagucauuggccugaucacguuucuucugcucugugggagauccugcucugcgaccuauaaaggacaguacgaacugcagacacuggagcucaacauggaaagccugaauaugaccaugccucuuuccuguacaaagaacaauucucaucacuauauccgggcuggcaacaauaccgggcuggagcucacacugaccaacacgagcauuaucucccauaaauucugcaaucuuucugacgcccacaagaaaaaccuguacgaucauacccucaugagcauuaucacaaccuuucaccuguccauuccgaauuucaaccaguaugaggccaugagcugugacuuuaauggaggcaagaucucuauucaauacaaccugucccacagcuaugcuggcgaugccgcucagcauugcgggacaguggccaauggaguucuccagaccuucaugcgcauggcguggggcgggucuuaccuggcccuugacuccggaagacggggcugggauuguaucaucagcucuuaccaguaucugauuauccaaaacacgacaugggacgaucacugccaguuuucccgccccagcccuauuggguaccucggauucgugucccagaagaccagagacaucuauauuucucggcgccugcuuggcacauuuaccuggacccugagcgauuccgaaggccaugacaugcccgggggauacugucucacaagauggaugcugaucgaggcugaucugaaaugcuucggcaacacggccgucgcuaaguguaaugaaaaacacgacgaggaguuuugcgauauguggcgccucuucgacuucaacaagcaggccauccaacggcugaaagcggaagcccagaugaauauucagcuuaucaacaaggcugugaaugcccugauuaacgaccaacucaugaugaagaaucaccugagagauaucauggggauuccuuauugcaacuacagcaaauuuugguaucuuaauaacaccacaaccggacggacaucucugccccgcuguuggcucaucuccaauggcagcuaccugaacgagacccauuucucugacgauaucgaacagcaggcugacaauaugauuacggagaugcugcagaaggaauacauggauagacaagggaaaacaccucucggacugguugaccuuuuuguguucagcaccuccuuuuaucugaucaccauuuuccuccaccuggucaagaucccgugaggacuaguaauaaggaaacuguaugaaugucugugggcaggaagugaagagauccuucuguaaagguuuuuggaauuaugucugcugaauaauaaacuuuuuugaaauaauaaaucugguagaaaaaugagaucucaaaggcucuuuucagagccaccaaaaaaaaaaaaaaaaaaaaaaaaaaaaaaaaaaaaaaaaaaaaaaaaaaaaaaaaaaaaaaaaagaauu

SEQ ID NO: 42636 - RNA, 1664 nt, Artificial Sequence; identical to SEQ ID NO: 42630
  mRNA product Design b-4 (hSL-A64-N5) comprising derived and/or modified sequence from LASV(Pinneo-NIG-1969;Clade I)__AIT17836__GPCmut13 (opt5)

SEQ ID NO: 42637 - RNA, 1664 nt, Artificial Sequence
  mRNA product Design b-4 (hSL-A64-N5) comprising derived and/or modified sequence from LASV(ISTH0009-NIG-2011;Clade II)__AIT17404__GPCmut13 (opt5)
aggagagucccgcagucggcguccagcggcucugcuuguucgugugugugucguugcaggccuuauucaagcuuaccaugggccagaucauuaccuucuuucaagaggugccccacgucaucgaagagguuaugaacauugugcugaucgcccucagccugcuugcuauucugaaggggaucuacaauguggccacaugcggacucuucggccuggucuccuuucuucugcucugugggagaucuugcagcacgaccuauaaaggaguguacgaacugcagacacuggagcucgacauggcgucccugaacaugaccaugccucuuucuuguacaaagaauaacagccaucacuauaucaugguuggcaaugaaaccgggcuggagcucacacugaccaacacguccauuaucaaucauaaauucugcaaccuuucugaugcucacaagaaaaaucuguacgaccaugcccucaugagcauuaucuccaccuuucaccugagcauuccgaacuucaaucaguaugaggccaugucuugugauuuuaacggaggcaagaucuccgugcaguacaaucugagccacgcuuaugccgucgacgcugccaaccauugcggcacaauugcgaauggggugcuccaaaccuucaugcggauggccuggggaggcucuuacaucgcucuggauuccgggaagggaagcugggacuguaucaugacaucuuaccaguaucuuauuauccagaacaccacgugggaagaucacugccaguuuucccgccccagcccuauuggcuaccuggggcuccugucccaaagaacacgggacaucuauauuucucgcagacuucugggaaccuucacauggacccucagcgauuccgagggcaacgaaacccccggcggguacugucugacacgguggaugcugaucgaggccgagcucaaaugcuuuggaaauacggcuguugccaaguguaacgaaaaacaugacgaggaguucugcgauaugcugcgccuuuuugacuucaauaagcaggcgaucagacggcugaaaaccgaagcccagaugagcauucagcucaucaacaaggcugugaaugcccugauuaacgaucaacuuaucaugaagaaucaucugcgcgacauuaugggcaucccuuauugcaacuacucuaaauauugguaccucaaucacacagucaccgggaagacaucccugcccagauguuggcuggugagcaacggaucuuaccucaaugaaacccacuucagcgacgauaucgagcagcaggcugacaacaugauuacggagcugcuucaaaaagaauauauggaucggcagggcaagacaccucuggggcucguggaccuguuugucuucuccaccucuuuuuaccugaucagcauuuuccuucaccucaucaaaauuccgugaggacuaguaauaaggaaacuguaugaaugucugugggcaggaagugaagagauccuucuguaaagguuuuuggaauuaugucugcugaauaauaaacuuuuuugaaauaauaaaucugguagaaaaaugagaucucaaaggcucuuuucagagccaccaaaaaaaaaaaaaaaaaaaaaaaaaaaaaaaaaaaaaaaaaaaaaaaaaaaaaaaaaaaaaaaaagaauu

SEQ ID NO: 42638 - RNA, 1664 nt, Artificial Sequence
  mRNA product Design b-4 (hSL-A64-N5) comprising derived and/or modified sequence from LASV(ISTH2010-NIG-2012;Clade II)__AIT17482__GPCmut13 (opt5)
aggagagucccgcagucggcguccagcggcucugcuuguucgugugugugucguugcaggccuuauucaagcuuaccaugggccagaucauuaccuucuuucaagaggugccccacgucaucgaagagguuaugaacauugugcugaucgcccucagccugcuugcuauucugaaggggaucuacaauguggccacaugcggacucuucggccuggucuccuuucuucugcucugugggagaucuugcagcacgaccuauaaaggaguguacgaacugcagacacuggagcucgacauggcgucccugaacaugaccaugccucuuucuuguacaaagaauaacagccaucacuauaucaugguuggcaaugaaaccgggcuggagcucacacugaccaacacguccauuaucaaucauaaauucugcaaccuuucugaugcucacaagaaaaaucuguacgaccaugcccucaugagcauuaucuccaccuuucaccugagcauuccgaacuucaaucaguaugaggccaugucuugugauuuuaacggaggcaagaucuccgugcaguacaaucugagccacgcuuaugccgucgacgcugccaaccauugcggcacaauugcgaauggggugcuccaaaccuucaugcggauggccuggggaggcucuuacaucgcucuggauuccgggaagggaagcugggacuguaucaugacaucuuaccaguaucuuauuauccagaacauuaccugggaagaucacugccaguuuucccgccccagcccuaucggcuaccuggggcuccugucccaaagaacgcgggacauuuauaucucucgcagacuucugggaacauucaccuggacacucagcgauuccgagggcaacgaaacccccggcggguacugucugacccgguggaugcugaucgaggccgagcucaaaugcuuuggaaauacagcuguugccaaguguaacgaaaaacaugacgaggaguucugcgauaugcugcgccuuuuugacuucaauaagcaggcgauuagacggcugaaaacggaagcccagaugagcauccagcucauuaacaaggcugugaaugcccugaucaacgaucaacuuauuaugaagaaucaucugcgcgacaucaugggcaucccuuauugcaacuacucuaaauauugguaccucaaucacaccgucacagggaagaccucccugcccagauguuggcuggugagcaacggaucuuaccucaaugaaacacacuucagcgacgauauugagcagcaggcugacaacaugaucaccgagcugcuucaaaaagaauauauugaucggcagggcaagacgccucuggggcucguggaccuguuugucuucuccacaucuuuuuaccugaucagcauuuuccuucaccucguuaaaaucccgugaggacuaguaauaaggaaacuguaugaaugucugugggcaggaagugaagagauccuucuguaaagguuuuuggaauuaugucugcugaauaauaaacuuuuuugaaauaauaaaucugguagaaaaaugagaucucaaaggcucuuuucagagccaccaaaaaaaaaaaaaaaaaaaaaaaaaaaaaaaaaaaaaaaaaaaaaaaaaaaaaaaaaaaaaaaaagaauu

SEQ ID NO: 42639 - RNA, 1664 nt, Artificial Sequence
  mRNA product Design b-4 (hSL-A64-N5) comprising derived and/or modified sequence from LASV(Lassa virus/H.sapiens-wt/NGA/2015/ISTH_0543;Clade II)__AVO03639__GPCmut13 (opt5)
aggagagucccgcagucggcguccagcggcucugcuuguucgugugugugucguugcaggccuuauucaagcuuaccaugggccagaucauuaccuucuuucaagaggugccccacgucaucgaagagguuaugaacauugugcugaucgcccucagccugcuugcuauucugaaggggaucuacaauguggccacaugcggacucuucggccuggucuccuuucuucugcucugugggagaucuugcagcacgaccuauaaaggaguguacgaacugcagacacuggagcucgacauggcgaaccugaauaugaccaugccucuuuccuguacaaagaacaauucucaucacuauaucaugguuggcaacgaaaccgggcuggagcucacacugaccaauacgagcauuaucaaccauaaauucugcaaucuuuccgaugcucacaagaaaaaccuguacgaccaugcccucaugucuauuaucagcaccuuucaccuguccauuccgaauuucaaccaguaugaggccaugagcugugauuuuaauggaggcaagaucucugugcaguacaaccugucccacacauaugcugucgacgccgcuaaucauugcggcaccauugccaacggggugcuccaaacauucaugcggauggcguggggaggcagcuacaucgcccuggauucugggaagggauccugggacuguaucaugaccagcuaccaguaucuuguuauucagaacacgacaugggaagaucacugccaguuuucucgccccuccccuaucggcuaccuggggcuccugagccaaagaacccgggacauuuauaucucccgcagacuucugggaacauucaccuggacccucucugauagcgagggcaaugaaacacccggcggguacugucugacgcgguggaugcugauugaggcugagcucaaaugcuuuggaaacaccgccguggcuaaguguaaugaaaaacaugacgaggaguucugcgauaugcugcgccuuuuugacuucaacaagcaggccaucagacggcugaaaacagaagcgcagauguccauccagcucauuaauaaggccgucaacgcucugaucaaugaucaacuuauuaugaagaaccaucugcgcgacaucaugggcauuccuuauugcaauuacagcaaauauugguaccucaaccacaccgugacagggaagaccucucugcccagauguuggcugguguccaauggaagcuaccucaacgaaacgcacuucucugacgauaucgagcagcaggccgacaauaugaucacagagcugcuucaaaaagaauauauugaucggcagggcaagaccccucuggggcucgucgaccuguuuguuuucagcaccuccuuuuaccugaucucuauuuuccuucaccucgugaaaaucccgugaggacuaguaauaaggaaacuguaugaaugucugugggcaggaagugaagagauccuucuguaaagguuuuuggaauuaugucugcugaauaauaaacuuuuuugaaauaauaaaucugguagaaaaaugagaucucaaaggcucuuuucagagccaccaaaaaaaaaaaaaaaaaaaaaaaaaaaaaaaaaaaaaaaaaaaaaaaaaaaaaaaaaaaaaaaaagaauu

SEQ ID NO: 42640 - RNA, 1664 nt, Artificial Sequence
  mRNA product Design b-4 (hSL-A64-N5) comprising derived and/or modified sequence from LASV(Lassa virus/H.sapiens-wt/NGA/2016/ISTH_0009;Clade II)__AVO03571__GPCmut13 (opt5)
aggagagucccgcagucggcguccagcggcucugcuuguucgugugugugucguugcaggccuuauucaagcuuaccaugggccagaucauuaccuucuuucaagaggugccccacgucaucgaagagguuaugaacauugugcugaucgcccucagccugcuugcuauucugaaggggaucuacaauguggccacaugcggacuccugggccuugucuccuuccugcuccugugugggagaucuugcagcacgaccuauaaaggaguguacgaacugcagacacucgagcuggacauggcgucccuuaacaugaccaugccucugucuuguacaaagaauaacagccaucacuauaucaugguuggcaaugaaaccgggcucgagcugacacuuaccaacacguccauuaucaaucauaaauuuugcaaccugucugaugcucacaagaaaaaucucuacgaccaugcccugaugagcauuaucuccaccuuccaccugagcauuccgaacuuuaaucaguaugaggccaugucuugugauuucaacggaggccggaucuccgugcaguacaaucucagccacucuuaugcugucgacgccgcuaaccauugcggcacaauugccaauggggugcugcaaaccuuuaugcgcauggcguggggaggcuccuacaucgcccuugauagcgggaagggaucuugggacuguaucaugacauccuaccaguaucugauuauccagaacaccacgugggaagaucacugccaguucagcagacccuccccuauuggcuaccucgggcugcuuucucaacggacacgcgacaucuauauuagcagacggcugcucggaaccuuuacauggacccuguccgauagcgagggcaacgaaacccccggcggguacugucugacacgcuggaugcucaucgaggcugagcugaagugcuucggaaauacggccguugcuaaauguaacgaaaagcaugacgaggaauuuugcgauaugcuuagacuguucgacuuuaauaaacaggccauccggcgccucaagaccgaggcgcagaugucuauucagcugaucaacaaagccgugaaugcucuuauuaacgaucaacugaucaugaagaaucaccucagagacauuaugggcaucccuuauugcaacuacuccaaguauugguaccugaaucacacagucaccgggaaaacaagccugccccgguguuggcucgugucuaacggaagcuaccugaaugaaacccauuucuccgacgauaucgagcagcaggccgacaacaugauuacggagcuucugcaaaaggaauauaucgaucgccagggcaaaacaccucucgggcugguggaccuguucgucuuuucuaccagcuucuaccuuauuuccaucuuucuccaccugguuaagauuccgugaggacuaguaauaaggaaacuguaugaaugucugugggcaggaagugaagagauccuucuguaaagguuuuuggaauuaugucugcugaauaauaaacuuuuuugaaauaauaaaucugguagaaaaaugagaucucaaaggcucuuuucagagccaccaaaaaaaaaaaaaaaaaaaaaaaaaaaaaaaaaaaaaaaaaaaaaaaaaaaaaaaaaaaaaaaaagaauu

SEQ ID NO: 42641 - RNA, 1664 nt, Artificial Sequence
  mRNA product Design b-4 (hSL-A64-N5) comprising derived and/or modified sequence from LASV(Lassa virus/H.sapiens-wt/NGA/2016/ISTH_0017;Clade II)__AVO03567__GPCmut13 (opt5)
aggagagucccgcagucggcguccagcggcucugcuuguucgugugugugucguugcaggccuuauucaagcuuaccaugggccagaucauuaccuucuuucaagaggugccccacgucaucgaagagguuaugaacauugugcugaucgcccucagccugcuugcuauucugaaggggaucuacaauguggccacaugcggacucuucggccuggucuccuuucuucugcucugugggagaucuugcagcacgaccuauaaaggaguguacgaacugcagacacuggagcucgacauggcgucccugaacaugaccaugccucuuucuuguacaaagaauaacagccaucacuauaucaugguuggcaaugaaaccgggcuggagcucacacugaccaacacguccauuaucaaucauaaauucugcaaccuuucugaugcucacaagaaaaaucuguacgaccaugcccucaugagcauuaucuccaccuuucaccugagcauuccgaacuucaaucaguaugaggccaugucuugugauuuuaacggaggcaagaucuccgugcaguacaaucugagccacacauaugcuauugacgccgcuaaccauugcggcaccaucgccaaugggguccuccaaacauucaugcggauggcguggggaggcucuuacaucgcccuggauuccgggaagggaagcugggacuguauuaugaccucuuaccaguaucuuaucauucagaacacgacaugggaagaucacugccaguuuucccgccccagcccuaucggcuaccuggggcuccugucccaaagaacccgggacauuuauaucucucgcagacuucugggaacauucaccuggacccucagcgauuccgagggcaacgaaacacccggcggguacugucugacgcgguggaugcugaucgaggcugagcucaaaugcuuuggaaauaccgccguggcuaaguguaacgaaaaacaugacgaggaguucugcgauaugcugcgccuuuuugacuucaauaagcaggccauuagacggcugaaaacagaagcgcagaugagcauccagcucauuaacaaggccguuaaugcucugaucaacgaucaacuuauuaugaagaaucaucugcgcgacaucaugggcaucccuuauugcaacuacucuaaauauugguaccucaaucacaccgugacagggaagaccucccugcccagauguuggcuggucagcaacggaucuuaccucaaugaaacgcacuucagcgacgauauugagcagcaggccgacaacaugaucacagagcugcuucaaaaagaauauauggaucggcagggcaagaccccucuggggcucguggaccuguuuguguucuccaccucuuuuuaccugauuagcaucuuccuucaccucguccgcauuccgugaggacuaguaauaaggaaacuguaugaaugucugugggcaggaagugaagagauccuucuguaaagguuuuuggaauuaugucugcugaauaauaaacuuuuuugaaauaauaaaucugguagaaaaaugagaucucaaaggcucuuuucagagccaccaaaaaaaaaaaaaaaaaaaaaaaaaaaaaaaaaaaaaaaaaaaaaaaaaaaaaaaaaaaaaaaaagaauu

SEQ ID NO: 42642 - RNA, 1664 nt, Artificial Sequence
  mRNA product Design b-4 (hSL-A64-N5) comprising derived and/or modified sequence from LASV(Lassa virus/H.sapiens-wt/NGA/2018/ISTH_0959;Clade II)__AVV65099__GPCmut13 (opt5)
aggagagucccgcagucggcguccagcggcucugcuuguucgugugugugucguugcaggccuuauucaagcuuaccaugggccagaucauuaccuucuuucaagaggugccccacgucaucgaagagguuaugaacauugugcugaucgcccucagccugcuugcuauucugaaggggaucuacaauguggucacaugcggacucuucggccugguguccuuucuucugcucugugggagaucuugcagcacgaccuauaaaggaguuuacgaacugcagacacuggagcucgacauggccucccugaacaugaccaugccucuuucuuguacaaagaauaacagccaucacuauaucauggugggcaaugaaaccgggcuggagcucacacugaccaacacguccauuaucaaucauaaauucugcaaccuuucugaugcgcacaagaaaaaucuguacgaccaugcucucaugagcauuaucuccaccuuucaccugagcauuccgaacuucaaucaguaugaggccaugucuugugauuuuaacggaggcaagaucuccguccaguacaaucugagccacgccuaugcuauugacgccgcuaaccauugcggcacaaucgccaauggggugcuccaaaccuucaugcggauggcguggggaggcucuuacaucgcccuggauuccgggaagggaagcugggacuguauuaugacaucuuaccaguaucuuaucauucagaacaccacgugggaagaucacugccaguuuucccgccccagcccuaucggcuaccuggggcuccugucccaaagaacacgggacauuuauaucucucgcagacuucugggaaccuucacauggacccucagcgauuccgagggcaacgaaacccccggcggguacugucugacacgguggaugcugaucgaggcugagcucaaaugcuuuggaaauacggccguugcuaaguguaacgaaaaacaugacgaggaguucugcgauaugcugcgccuuuuugacuucaauaagcaggccauuagacggcugaaaaccgaagcgcagaugagcauccagcucauuaacaaggccgugaaugcucugaucaacgaucaacuuauuaugaagaaucaucugcgcgacaucaugggcaucccuuauugcaacuacucuaaauauugguaccucaaucacacagucaccgggaagacaucccugcccagauguuggcuggugagcaacggaucuuaccucaaugaaacccacuucagcgacgauauugagcagcaggccgacaacaugaucacggagcugcuucaaaaagaauauauugaucggcagggcaagacaccucuggggcucguggaccuguuugucuucuccaccucuuuuuaccugaucagcauuuuccuucaccucguuaaaaucccgugaggacuaguaauaaggaaacuguaugaaugucugugggcaggaagugaagagauccuucuguaaagguuuuuggaauuaugucugcugaauaauaaacuuuuuugaaauaauaaaucugguagaaaaaugagaucucaaaggcucuuuucagagccaccaaaaaaaaaaaaaaaaaaaaaaaaaaaaaaaaaaaaaaaaaaaaaaaaaaaaaaaaaaaaaaaaagaauu

SEQ ID NO: 42643 - RNA, 1664 nt, Artificial Sequence
  mRNA product Design b-4 (hSL-A64-N5) comprising derived and/or modified sequence from LASV(LASV003-NIG-2008;Clade II)__AIT17580__GPCmut13 (opt5)
aggagagucccgcagucggcguccagcggcucugcuuguucgugugugugucguugcaggccuuauucaagcuuaccaugggccagaucauuaccuucuuucaagaggugccccacgucaucgaagagguuaugaacauugugcugaucgcccucagccugcuugcuauucugaaggggaucuacaauguggccacaugcggacucuucggccuggucuccuuucuucugcucugugggagaucuugcagcacgaccuauaaaggaguguacgaacugcagacacuggagcucgacauggcgucccugaacaugaccaugccucuuucuuguacaaagaauaacagccaucacuauaucaugguuggcaaugaaaccgggcuggagcucacacugaccaacacguccauuaucaaucauaaauucugcaaccuuucugaugcucacaagaaaaaucuguacgaccaugcccucaugagcauuaucuccaccuuucaccugagcauuccgaacuucaaucaguaugaggccaugucuugugauuuuaacggaggcaagaucuccgugcaguacaaucugagccacacauaugcugucgacgccgcuaaccauugcggcaccauugccaauggggugcuccaaacauucaugcggauggcguggggaggcucuuacaucgcccuggauuccgggaagggaagcugggacuguaucaugaccucuuaccaguaucuuauuauccagaacacgacaugggaagaucacugccaguuuucccgccccagcccuauuggcuaccuggggcuccugucccaaagaacccgggacaucuauauuucucgcagacuucugggaacauucaccuggacccucagcgauuccgagagcaacgaaacacccggcggcuacugucugacgcgguggaugcugaucgaggcugagcucaaaugcuuugggaauaccgccguugcuaaguguaacgaaaaacaugacgaggaguucugcgauaugcugcgccuuuuugacuucaauaagcaggccaucagacggcugaaagcggaagcccagaugucuauucagcucaucaacaaggcugugaaugcccugauuaacgaucaacuuaucaugaagaaucaucugcgcgacauuaugggaaucccuuauugcaacuacuccaaauauugguaccucaaucacacagucaccggcagaacaagccugccccgguguuggcuggugucuaacgggagcuaccucaaugaaacccacuucuccgacgauaucgagcagcaggcugacaacaugauuacggagcugcuucaaaaggaauauauggaucgccagggaaaaacaccucugggccucguggaccuguuugucuucucuaccagcuuuuaccugaucuccauuuuccuucaccucguuaagaucccgugaggacuaguaauaaggaaacuguaugaaugucugugggcaggaagugaagagauccuucuguaaagguuuuuggaauuaugucugcugaauaauaaacuuuuuugaaauaauaaaucugguagaaaaaugagaucucaaaggcucuuuucagagccaccaaaaaaaaaaaaaaaaaaaaaaaaaaaaaaaaaaaaaaaaaaaaaaaaaaaaaaaaaaaaaaaaagaauu

SEQ ID NO: 42644 - RNA, 1664 nt, Artificial Sequence
  mRNA product Design b-4 (hSL-A64-N5) comprising derived and/or modified sequence from LASV(LASV035-NIG-2009;Clade II)__AIT17588__GPCmut13 (opt5)
aggagagucccgcagucggcguccagcggcucugcuuguucgugugugugucguugcaggccuuauucaagcuuaccaugggccagaucauuaccuucuuucaagaggugccccacgucaucgaagagguuaugaacauugugcugaucgcccucagccugcuugcuauucugaaggggaucuacaauguggccacaugcggacucuucggccuggucuccuuucuucugcucugugggagaucuugcagcacgaccuauaaaggaguguacgaacugcagacacuggagcucgacauggcgucccugaacaugaccaugccucuuucuuguacaaagaauaacagccaucacuauaucaugguuggcaaugaaaccgggcuggagcucacacugaccaacacguccauuaucaaucauaaauucugcaaccuuucugaugcucacaagaaaaaucuguacgaccaugcccucaugagcauuaucuccaccuuucaccugagcauuccgaacuucaaucaguaugaggccaugucuugugauuuuaacggaggcaagaucuccgugcaguacaaucugagccacgcuuaugccgucgacgcugccaaccauugcggcacaauugcgaauggggugcuccaaaccuucaugcggauggccuggggaggcucuuacaucgcucuggauuccgggaagggaagcugggacuguaucaugacaucuuaccaguaucuuauuauccagaacaccacgugggaagaucacugccaguuuucccgccccagcccuauuggcuaccuggggcuccugucccaaagaacacgggacaucuauauuucucgcagacuucugggaaccuucacauggacccucagcgauuccgagggcaacgaaacccccggcggguacugucugacacgguggaugcugaucgaggccgagcucaaaugcuuuggaaauacggcuguugccaaguguaacgaaaaacaugacgaggaguucugcgauaugcugcgccuuuuugacuucaauaagcaggcgaucagacggcugaaagccgaagcucagaugagcauucagcucaucaacaaggccgugaaugcucugauuaacgaucaacuuaucaugaagaaucaucugcgcgacauuaugggcaucccuuauugcaacuacucuaaauauugguaccucaaucacaccgucacagggaagaccucccugcccagauguuggcuggugagcaacggaucuuaccucaaugaaacacacuucagcgacgauaucgagcagcaggccgacaacaugauuaccgagcugcuucaaaaagaauauaucgaucggcagggcaagacgccucuggggcucguggaccuguuugucuucuccacaucuuuuuaccugauuagcaucuuccuucaccucguuaaaauuccgugaggacuaguaauaaggaaacuguaugaaugucugugggcaggaagugaagagauccuucuguaaagguuuuuggaauuaugucugcugaauaauaaacuuuuuugaaauaauaaaucugguagaaaaaugagaucucaaaggcucuuuucagagccaccaaaaaaaaaaaaaaaaaaaaaaaaaaaaaaaaaaaaaaaaaaaaaaaaaaaaaaaaaaaaaaaaagaauu

SEQ ID NO: 42645 - RNA, 1664 nt, Artificial Sequence
  mRNA product Design b-4 (hSL-A64-N5) comprising derived and/or modified sequence from LASV(LASV1000-NIG-2009;Clade II)__AIT17782__GPCmut13 (opt5)
aggagagucccgcagucggcguccagcggcucugcuuguucgugugugugucguugcaggccuuauucaagcuuaccaugggccagaucauuaccuucuuucaagaggugccccacgucaucgaagagguuaugaacauugugcugaucgcccucagccugcuugcuauucugaaggggaucuacaauguggccacaugcggacucuucggccuggucuccuuucuucugcucugugggagaucuugcagcacgaccuauaaaggaguguacgaacugcagacacuggagcucgacauggcgucccugaacaugaccaugccucuuucuuguacaaagaauaacagccaucacuauaucaugguuggcaaugaaaccgggcuggagcucacacugaccaacacguccauuaucaaucauaaauucugcaaccuuucugaugcucacaagaaaaaucuguacgaccaugcccucaugagcauuaucuccaccuuucaccugagcauuccgaacuucaaucaguaugaggccaugucuugugauuuuaacggaggcaagaucuccgugcaguacaaucugagccacacauaugcugucgacgccgcuaaccauugcggcaccauugccaauggggugcuccaaacauucaugcggauggcguggggaggcucuuacaucgcccuggauuccgggaagggaagcugggacuguaucaugaccucuuaccaguaucuuauuauccagaacacgacaugggaagaucacugccaguuuucccgccccagcccuauuggcuaccuggggcuccugucccaaagaacccgggacaucuauauuucucgcagacuucugggaacauucaccuggacccucagcgauuccgagggcaacgaaacacccggcggguacugucugacgcgguggaugcugaucgaggcugagcucaaaugcuuuggaaauaccgccguugcuaaguguaacgaaaaacaugacgaggaguucugcgauaugcugcgccuuuuugacuucaauaagcaggccaucaaaagacugaagacagaagcgcagaugagcauucagcucaucaacaaggccgugaaugcucugauuaacgaucaacuuaucaugaaaaaucaucugcgggacauuaugggcaucccuuauugcaacuacucuaaguauugguaccucaaucacaccgucacagggaaaaccucccugccccgcuguuggcuggugagcaacggaucuuaccucaaugaaacgcacuucagcgacgauaucgagcagcaggccgacaacaugauuacagagcugcuucaaaaggaauauaucgauagacagggcaaaaccccucuggggcucguggaccuguuugucuucuccaccucuuuuuaccugauuagcaucuuccuucaccucguuaagauuccgugaggacuaguaauaaggaaacuguaugaaugucugugggcaggaagugaagagauccuucuguaaagguuuuuggaauuaugucugcugaauaauaaacuuuuuugaaauaauaaaucugguagaaaaaugagaucucaaaggcucuuuucagagccaccaaaaaaaaaaaaaaaaaaaaaaaaaaaaaaaaaaaaaaaaaaaaaaaaaaaaaaaaaaaaaaaaagaauu

SEQ ID NO: 42646 - RNA, 1664 nt, Artificial Sequence
  mRNA product Design b-4 (hSL-A64-N5) comprising derived and/or modified sequence from LASV(LASV221-NIG-2010;Clade II)__AIT17624__GPCmut13 (opt5)
aggagagucccgcagucggcguccagcggcucugcuuguucgugugugugucguugcaggccuuauucaagcuuaccaugggccagaucauuaccuucuuucaagaggugccccacgucaucgaagagguuaugaacauugugcugaucgcccucagccugcuugcuauucugaaggggaucuacaauguggccacaugcggacucuucggccuggucuccuuucuucugcucugugggagaucuugcagcacgaccuauaaaggaguguacgaacugcagacacuggagcucgacauggcgucccugaacaugaccaugccucuuucuuguacaaagaauaacagccaucacuauaucaugguuggcaaugaaaccgggcuggagcucacacugaccaacacguccauuaucaaucauaaauucugcaaccuuucugaugcucacaagaaaaaucuguacgaccaugcccucaugagcauuaucuccaccuuucaccugagcauuccgaacuucaaucaguaugaggccaugucuugugauuuuaacggaggcaagaucuccgugcaguacaaucugagccacacauaugcuauugacgccgcuaaccauugcggcaccaucgccaaugggguccuccaaacauucaugcggauggcguggggaggcucuuacaucgcccuggauuccgggaagggaagcugggacuguauuaugaccucuuaccaguaucuuaucauucagaacacgacaugggaagaucacugccaguuuucccgccccagcccuaucggcuaccuggggcuccugucccaaagaacccgggacauuuauaucucucgcagacuucugggaacauucaccuggacccucagcgauuccgagggcaacgaaacacccggcggguacugucugacgcgguggaugcugaucgaggcugagcucaaaugcuuuggaaauaccgccguggcuaaguguaacgaaaaacaugacgaggaguucugcgauaugcugcgccuuuuugacuucaauaagcaggccauuagacggcugaaaacagaagcgcagaugagcauccagcucauuaacaaggccguuaaugcucugaucaacgaucaacuuauuaugaagaaucaucugcgcgacaucaugggcaucccuuauugcaacuacucuaaauauugguaccucaaucacaccgugacagggaagaccucccugcccagauguuggcuggucagcaacggaucuuaccucaaugaaacgcacuucagcgacgauauugagcagcaggccgacaacaugaucacagagaugcugcaaaaagaauauauggaucggcagggcaagaccccucuugggcugguggaccucuuuguguucuccaccucuuuuuaccugauuagcaucuuccugcaccuugucaaaauuccgugaggacuaguaauaaggaaacuguaugaaugucugugggcaggaagugaagagauccuucuguaaagguuuuuggaauuaugucugcugaauaauaaacuuuuuugaaauaauaaaucugguagaaaaaugagaucucaaaggcucuuuucagagccaccaaaaaaaaaaaaaaaaaaaaaaaaaaaaaaaaaaaaaaaaaaaaaaaaaaaaaaaaaaaaaaaaagaauu

SEQ ID NO: 42647 - RNA, 1664 nt, Artificial Sequence
  mRNA product Design b-4 (hSL-A64-N5) comprising derived and/or modified sequence from LASV(LASV237-NIG-2010;Clade II)__AIT17638__GPCmut13 (opt5)
aggagagucccgcagucggcguccagcggcucugcuuguucgugugugugucguugcaggccuuauucaagcuuaccaugggccagaucauuaccuucuuucaagaggugccccacgucaucgaagagguuaugaacauugugcugaucgcccucagccugcuugcuauucugaaggggaucuacaauguggccacaugcggacucuucggccuggucuccuuucuucugcucugugggagaucuugcagcacgaccuauaaaggaguguacgaacugcagacacuggagcucgacauggcgucccugaacaugaccaugccucuuucuuguacaaagaauaacagccaucacuauaucaugguuggcaaugaaaccgggcuggagcucacacugaccaacacguccauuaucaaucauaaauucugcaaccuuucugaugcucacaagaaagaccuguacgaucaugcccucaugagcauuaucuccaccuuucaccugagcauuccgaauuucaaccaguaugaggccaugucuugugacuuuaauggaggcaagaucuccgugcaguacaaccugagccacacauaugcugucgaugccgcuaaucauugcggcaccauugccaacggggugcuccaaacauucaugcggauggcguggggaggcucuuacaucgcccuggacuccgggaagggaagcugggauuguaucaugaccucuuaccaguaucuuauuauccagaauacgacaugggaagaccacugccaguuuucccgccccagcccuauuggcuaccuggggcuccugucccaaagaacccgggauaucuauauuucucgcagacuucugggaacauucaccuggacccucagcgacuccgagggcaacgaaacacccggcggguacugucugacgcgguggaugcugaucgaggcugagcucaaaugcuuuggaaacaccgccguugcuaaguguaaugaaaaacaugaugaggaguucugcgacaugcugcgccuuuuugauuucaacaagcaggccaucagacggcugaaaacagaagcgcagaugagcauucagcucaucaauaaggccgugaacgcucugauuaaugaccaacuuaucaugaagaaccaucugcgcgacauuaugggcaucccuuauugcaauuacucuaaauauugguaccucaaccacaccgucacagggaagaccucccugcccagauguuggcuggugagcaauggaucuuaccucaacgaaacgcacuucagcgaugacaucgagcagcaggccgauaauaugauuacagagcugcuucaaaaagaauauauggaccggcagggcaagaccccucuggggcucguggaucuguuugucuucuccaccucuuuuuaccugaucagcauuuuccuucaccucaucaaaauuccgugaggacuaguaauaaggaaacuguaugaaugucugugggcaggaagugaagagauccuucuguaaagguuuuuggaauuaugucugcugaauaauaaacuuuuuugaaauaauaaaucugguagaaaaaugagaucucaaaggcucuuuucagagccaccaaaaaaaaaaaaaaaaaaaaaaaaaaaaaaaaaaaaaaaaaaaaaaaaaaaaaaaaaaaaaaaaagaauu

SEQ ID NO: 42648 - RNA, 1664 nt, Artificial Sequence
  mRNA product Design b-4 (hSL-A64-N5) comprising derived and/or modified sequence from LASV(LASV253-NIG-2011;Clade II)__AIT17670__GPCmut13 (opt5)
aggagagucccgcagucggcguccagcggcucugcuuguucgugugugugucguugcaggccuuauucaagcuuaccaugggccagaucauuaccuucuuucaagaggugccccacgucaucgaagagguuaugaacauugugcugaucgcccucagccugcuugcuauucugaaggggaucuacaauguggccacaugcggacucuucggccuggucuccuuucuucugcucugugggagaucuugcagcacgaccuauaaaggaguguacgaacugcagacacuggagcucgacauggcgucccugaacaugaccaugccucuuucuuguacaaagaauaacagccaucacuauaucaugguuggcaaugaaaccgggcuggagcucacacugaccaacacguccauuaucaaucauaaauucugcaaccuuucugaugcucacaagaaaaaucuguacgaccaugcccucaugagcauuaucuccaccuuucaccugagcauuccgaacuucaaucaguaugaggccaugucuugugauuuuaacggaggcaagaucuccgugcaguacaaucugagccacacauaugcugucgacgccgcuaaccauugcggcaccauugccaauggggugcuccaaacauucaugcggauggcguggggaggcucuuacaucgcccuggauuccgggaagggaagcugggacuguaucaugaccucuuaccaguaucuuauuauccagaacacgacaugggaagaucacugccaguuuucccgccccagcccuauuggcuaccuggggcuccugucccaaagaacccgggacaucuauauuucucgcagacuucugggaacauucaccuggacccucagcgauuccgagggcaacgaaacacccggcggguacugucugacgcgguggaugcugaucgaggcugagcucaaaugcuuuggaaauaccgccguugcuaaguguaacgaaaaacaugacgaggaguucugcgauaugcugcgccuuuuugacuucaauaagcaggccaucagacggcugaaagcggaagcccagaugagcauucagcucaucaacaaggcugugaaugcccugauuaacgaucaacuuaucaugaagaaucaucugcgcgacauuaugggcaucccuuauugcaacuacucuaaauauugguaccucaaucacacagucaccgggagaacaucccugccccgguguuggcuggugagcaacggaucuuaccucaaugaaacccacuucagcgacgauaucgagcagcaggcugacaacaugauuacggagcugcuucaaaaggaauauaucgaucgccagggcaaaacaccucuggggcucguggaccuguuugucuucuccaccucuuuuuaccugauuagcaucuuccuucaccucguuaagauuccgugaggacuaguaauaaggaaacuguaugaaugucugugggcaggaagugaagagauccuucuguaaagguuuuuggaauuaugucugcugaauaauaaacuuuuuugaaauaauaaaucugguagaaaaaugagaucucaaaggcucuuuucagagccaccaaaaaaaaaaaaaaaaaaaaaaaaaaaaaaaaaaaaaaaaaaaaaaaaaaaaaaaaaaaaaaaaagaauu

SEQ ID NO: 42649 - RNA, 1664 nt, Artificial Sequence
  mRNA product Design b-4 (hSL-A64-N5) comprising derived and/or modified sequence from LASV(LASV254-NIG-2011;Clade II)__AIT17674__GPCmut13 (opt5)
aggagagucccgcagucggcguccagcggcucugcuuguucgugugugugucguugcaggccuuauucaagcuuaccaugggccagaucauuaccuucuuucaagaggugccccacgucaucgaagagguuaugaacauugugcugaucgcccucagccugcuugcuauucugaaggggaucuacaauguggccacaugcggacucuucggccuggucuccuuucuucugcucugugggagaucuugcagcacgaccuauaaaggaguguacgaacugcagacacuggagcucgacaugaccaaccugaauaugacaaugccucuuuccuguaccaagaacaauucucaucacuauaucaugguuggcaacgaaacagggcuggagcucacccugacgaauaccagcauuaucaaccauaaauucugcaaucuuuccgaugcgcacaagaaaaaccuguacaaucaugcucucaugucuauuaucagcacauuucaccuguccauuccgaacuucaaucaguaugaggccaugagcugugacuuuaacggaggcaagaucucugugcaguacaaucugucccacagcuaugccgucgaugcugccaaccauugcggcaccauugcuaacggggugcuccaaacauucaugcggauggccuggggaggcucuuacaucgcgcuggacuccgggaagggaaauugggauuguaucaugaccagcuaccaguaucuuauuauccagaacacgacaugggaagaccacugccaguuuucucgccccuccccuauuggcuaccuggggcuccugagccaaagaacccgggauaucuauauuucccgcagacuucugggaacauucaccuggacccucucugacagcgagggcaaugaaacacccggcggguacugucugacgcgguggaugcugaucgaggccgagcucaaaugcuuuggaaacaccgcuguugccaaguguaaugaaaaacaugaugaggaguucugcgacaugcugcgccuuuuugauuucaacaagcaggcuaucagacggcugaaaacagaagcccaggcgaauauucagcucaucaacaaggccgugaaugcucugauuaacgaccaacuuaucaugaagaaucaucugcgcgauauuaugggcaucccuuauugcaacuacuccaaauauugguaccucaaucacaccgucacagggaagaccagccugcccagauguuggcuggugucuaacggauccuaccucaaugaaacgcacuucagcgacgacaucgagcagcaggccgauaacaugauuacagagcugcuucaaaaagaauauauggaccggcagggcaagaccccucuggggcucguggaucuguuugucuucucuaccagcuuuuaccugaucuccauuuuccuucaccucguuaaaaucccgugaggacuaguaauaaggaaacuguaugaaugucugugggcaggaagugaagagauccuucuguaaagguuuuuggaauuaugucugcugaauaauaaacuuuuuugaaauaauaaaucugguagaaaaaugagaucucaaaggcucuuuucagagccaccaaaaaaaaaaaaaaaaaaaaaaaaaaaaaaaaaaaaaaaaaaaaaaaaaaaaaaaaaaaaaaaaagaauu

SEQ ID NO: 42650 - RNA, 1664 nt, Artificial Sequence
  mRNA product Design b-4 (hSL-A64-N5) comprising derived and/or modified sequence from LASV(Nig08-A19;Clade III)__ADU56618__GPCmut13 (opt5)
aggagagucccgcagucggcguccagcggcucugcuuguucgugugugugucguugcaggccuuauucaagcuuaccaugggccagaucgugaccuucuuucaagaggucccccacguuauugaagaggugaugaacaucgugcugauugcccucagcauccuggcuauucuuaaggggcuguacaauaucgccacaugcggacucaucggccuggucacguuccuucugcucuccgggagaucuuguagcaugaccuauaaaggaguguacgaacugcagacacuggagcucaacaugaauacccugaacaugacaaugccucuuuccugcaccaagaauaacucucaucacuauauuaugguuggcaaugaaacagggcuggagcucacccugacgaacaccagccuucugcaucacaaauuuuguaaucucuccgacgcgcauaagaaaaaccuguacgaucacacacugaugucuaucauuagcaccuuccaccucuccaucccgaauuuuaaccaguaugaggcuaugagcugcgacuucaauggaggcaagauuacagugcaguacaaccugucucauuccuaugccaucgaugccgcuaaucacuguggcaccgucgccaacggggugcuucaaacguuuaugcggauggcuuggggaggcagcuacauugcccuggacucugggcgcggaaagugggauugcaucaugacauccuaccaguaucucaucauucagaacaccacaugggaagaccauugucaguucagcagacccucuccuaucggcuaccuggggcuucugucccaacggacccgcgauauuuauaucagcagacggcuccugggaaccuuuacauggacgcuguccgacucugagggcaaugaaacccccggcggguacugccucacacgcuggaugcugauugaggcggagcuuaaauguuucggaaacaccgccguugcuaagugcaaugaaaaacacgaugaggaauuuugugacaugcugagacucuucgauuuuaacaagcaggccauccggcgccugaaagcugaggcccagaugagcauccagcuuauuaauaaggcggugaacgcccugaucaaugaccaacucauuaugaagaaccaccugagagauaucaugggcauuccuuauugcaauuacuccaaauauugguaccugaaccauacaagcaccgggcggacgucucucccccgcugcuggcuggucuccaauggaagcuaccuuaacgaaacacacuucucugacgacaucgagcagcaggcugauaauaugaucaccgagaugcugcaaaaggaauaucucgacagacagggcaaaaccccucuggggcugguggaucuuuucguguuuagcacauccuucuaccucauuucuaucuuucugcaucuggucaagauuccgugaggacuaguaauaaggaaacuguaugaaugucugugggcaggaagugaagagauccuucuguaaagguuuuuggaauuaugucugcugaauaauaaacuuuuuugaaauaauaaaucugguagaaaaaugagaucucaaaggcucuuuucagagccaccaaaaaaaaaaaaaaaaaaaaaaaaaaaaaaaaaaaaaaaaaaaaaaaaaaaaaaaaaaaaaaaaagaauu

SEQ ID NO: 42651 - RNA, 1667 nt, Artificial Sequence
  mRNA product Design b-4 (hSL-A64-N5) comprising derived and/or modified sequence from LASV(G1180-SLE-2010;Clade IV)__AIT17168__GPCmut13 (opt5)
aggagagucccgcagucggcguccagcggcucugcuuguucgugugugugucguugcaggccuuauucaagcuuaccaugggccagaucgugaccuucuuucaagaggucccccacguuauugaagaggugaugaacaucgugcugauugcccucagcauccuggcuguccuuaaggggcuguacaauuucgccacaugcggacucgugggccugcuuacguuucugcuccugugugggagauccugcaccgcgucucgguauaaaggaguuuacgaacugcagacacucgagcugaacauggaaacccuuaauaugacaaugccucugagcuguaccaagaacaauucccaucacuauauuauggugggcaacgagacagggcucgagcugacccuuacgaauaccucuaucaucaaccauaaauucugcaaucugagcgacgcucacaagaaaaaccucuacgaucaugcccugauguccauuaucucuacauuucaccugagcauuccgaauuucaaccaguaugaagccauguccugugacuuuaauggaggcaagaucagcguccaguacaaccucucucacuccuaugcuggcgaugccgcuaaucauugcgggaccguggccaacggaguucugcaaacauucaugcgcauggcguggggcgggagcuacauugcccuugacucuggacacggcuccugggauuguaucaugaccagcuaccaguaucugauuauccagaacacgacaugggaggaccauugccaguuuucuagacccuccccuaucggguaccucggacugcuuagccaacggacccgcgauauuuauaucuccagacggcugcucggcacauucaccuggacccugucugacagcgaaggcaaggauacacccgggggauacugucugacgcgcuggaugcucauugaggcugagcugaaaugcuuuggcaauaccgccguggcuaaguguaacgaaaaacacgacgaggaguucugcgauaugcuuagacuguuugacuucaauaagcaggccauccagcggcucaaagcggaagcccagauguccauucaacugaucaacaaggcugucaaugcccuuaucaacgaucagcugauuaugaagaaucaccuccgcgacaucauggggauuccuuauugcaacuacagcaaauauugguaccugaaucauacaaccacaggaaagaccucucugcccaaauguuggcucguguccaacggcagcuaccugaaugaaacgcacuucucugacgauaucgagcagcaagcugacaacaugauuacagagaugcuucagaaggaauauauggagagacaggggaaaaccccucugggacucguggaucuguuugucuucagcaccuccuuuuaccugaucucuaucuuccuucaucucguuaagauuccgugaggacuaguaauaaggaaacuguaugaaugucugugggcaggaagugaagagauccuucuguaaagguuuuuggaauuaugucugcugaauaauaaacuuuuuugaaauaauaaaucugguagaaaaaugagaucucaaaggcucuuuucagagccaccaaaaaaaaaaaaaaaaaaaaaaaaaaaaaaaaaaaaaaaaaaaaaaaaaaaaaaaaaaaaaaaaagaauu

SEQ ID NO: 42652 - RNA, 1667 nt, Artificial Sequence
  mRNA product Design b-4 (hSL-A64-N5) comprising derived and/or modified sequence from LASV(G1442-SLE-2011;Clade IV)__AIT17180__GPCmut13 (opt5)
aggagagucccgcagucggcguccagcggcucugcuuguucgugugugugucguugcaggccuuauucaagcuuaccaugggccagaucgugaccuucuuucaagaggucccccacguuauugaagaggugaugaacaucgugcugauugcccucagcauccuggcuguccuuaaggggcuguacaauguggccacaugcggacucauuggccugguuacguuccuucugcucugugggagauccugcaccacaacccuguauaaaggaguguacgaacugcagacacucgagcugaacauggaaacccuuaauaugacaaugccucugucuuguaccaagaacaauagccaucacuauauccgggucggcaacgagacggggcucgagcugacccuuacaaauaccuccaucauuaaccauaaauuuugcaaucugucugacgcgcacaagaaaaaccucuacgaucaugcucugaugagcaucauuuccacauuccaccugucuaucccgaauuuuaaccaguaugaagccaugagcugugacuucaauggaggcaagauuuccgugcaguacaaccucagccacucuuaugccggcgaugcugccaaucauugcgggaccguugcuaacggagugcugcaaacguuuaugcgcauggccuggggcggguccuacaucgcgcuugacagcggaagaggcaacugggauuguauuaugacaucuuaccaguaucugaucauccagaauaccacaugggacgaucacugccaguucucccggcccagcccuauuggguaccucggacugcuuucucaacgcaccagagacgucuauaucucccggcgccugcucggcaccuuuacauggacgcugagcgauuccgagggcaaggacacccccgggggauacugucugacaagauggaugcucauugaagccgagcugaaaugcuucggcaacaccgcuguggccaaguguaaugagaaacaugaugaagaguuuugcgacaugcuucggcuguucgauuuuaacaagcaggcuauccagcgccucaaagccgaagcgcagaugucuauucaacugaucaauaaggccgugaacgcucuuaucaaugaccagcugauuaugaagaaccaccucagagacaucauggggauuccuuauugcaauuacagcaaauauugguaccugaacaauacagccaccggaaagacgucccugcccaaauguuggcucaucagcaacggcucuuaccugaaugagacacacuucuccgaugacauugaacaggaggcugauaacaugaucaccgagaugcuucaaaaggaauauauggagcggcaggggaaaaccccucugggacucgucgaccuguucguuuuuagcacaucuuucuaccugaucagcauuuuucuucaucucgugaagaucccgugaggacuaguaauaaggaaacuguaugaaugucugugggcaggaagugaagagauccuucuguaaagguuuuuggaauuaugucugcugaauaauaaacuuuuuugaaauaauaaaucugguagaaaaaugagaucucaaaggcucuuuucagagccaccaaaaaaaaaaaaaaaaaaaaaaaaaaaaaaaaaaaaaaaaaaaaaaaaaaaaaaaaaaaaaaaaagaauu

SEQ ID NO: 42653 - RNA, 1667 nt, Artificial Sequence
  mRNA product Design b-4 (hSL-A64-N5) comprising derived and/or modified sequence from LASV(G3010-SLE-2013;Clade IV)__AIT17344__GPCmut13 (opt5)
aggagagucccgcagucggcguccagcggcucugcuuguucgugugugugucguugcaggccuuauucaagcuuaccaugggccagaucgugaccuucuuucaagaggucccccacguuauugaagaggugaugaacaucgugcugauugcccucagcauccuggcuguccuuaaggggcuguacaauuucgccacaugcggacucgugggccugguuacguuucuucugcucugugggagauccugcaccacaucucuguauaaaggaguguacgaacugcagacccucgagcugaacauggaaacacuuaauaugaccaugccucugagcuguacaaagaacaauucccaucacuauauuauggucggcaacgagaccgggcucgagcugacgcuuaccaauacaucuaucaucaaccauaaauucugcaaucugagcgacgcgcacaagaaaaaccucuacaaucaugcucugauguccauuaucucuaccuuucaccugagcauuccgaacuucaaucaguaugaagccauguccugugauuuuaacggaggcaagaucagcgugcaguacaaucucucucacuccuaugccggcgacgcugccagccauugcgggacaguugcuaacggagugcugcaaaccuucaugcggauggccuggggcgggucuuacauugcgcuugauuccggauacggcaagugggacuguaucaugacgagcuaucaguaccugauuauccagaacacaaccugggaggaucacugccaguuuucucgccccuccccuaucggguaucucggacugcuuagccaaagaacacgggacauuuacaucucccgcagacugcucggcaccuucaccuggacacugucugauagcgaaggcaaagacacgcccgggggauauugucugacccgguggaugcucauugaggccgagcugaagugcuuuggcaauacagcugucgccaaauguaacgaaaagcaugaugaggaguucugcgacaugcuucgccuguuugauuucaauaaacaggcuauccagagacucaagaccgaagcccagauguccauucaacugaucaacaaggcggugaaugcccuuaucaacgaccagcugauuaugaaaaaucaccuccgggauaucauggggauuccuuacugcaacuauagcaaguacugguaccugaaucacacaaccacgggaaaaacaucucugcccaaguguuggcucguguccaacggcagcuaucugaaugaaacccauuucucugacgacaucgagcagcaagcugauaacaugauuaccgagaugcuucagaaagaauacauggagcgccaggggaagacaccucugggacucgucgaccuguuuguuuucagcaccuccuuuuaucugaucucuaucuuccuucaccucgugaaaauuccgugaggacuaguaauaaggaaacuguaugaaugucugugggcaggaagugaagagauccuucuguaaagguuuuuggaauuaugucugcugaauaauaaacuuuuuugaaauaauaaaucugguagaaaaaugagaucucaaaggcucuuuucagagccaccaaaaaaaaaaaaaaaaaaaaaaaaaaaaaaaaaaaaaaaaaaaaaaaaaaaaaaaaaaaaaaaaagaauu

SEQ ID NO: 42654 - RNA, 1667 nt, Artificial Sequence
  mRNA product Design b-4 (hSL-A64-N5) comprising derived and/or modified sequence from LASV(G502-SLE-2009;Clade IV)__AIT17126__GPCmut13 (opt5)
aggagagucccgcagucggcguccagcggcucugcuuguucgugugugugucguugcaggccuuauucaagcuuaccaugggccagaucgugaccuucuuucaagaggucccccacguuauugaagaggugaugaacaucgugcugauugcccucagcauccuggcuguccuuaaggggcuguacaauuucgccacaugcggacucgugggccugcuuacguuucugcuccugugugggagauccugcaccacaggacuguauaaaggcguuuacgaacuccagacccuggagcuuaacauggaaacacugaauaugaccaugccucucucuuguacaaagaacaauagccaucacuauauuaugguggggaacgagaccggacuggagcuuacgcugaccaauacauccaucaucaaccauaaauucugcaaucucucugacgcgcacaagaaaaaccuguacgaucaugcucugaugagcauuaucuccaccuuucaccucucuauuccgaauuucaaccaguaugaagccaugagcugugacuuuaauggcggcaagaucuccguccaguacaaccugagccacucuuaugccggggaugcugccgaccauugcggaacaguggcuaauggcguucuucaaaccuucaugcggauggccuggggaggguccuacauugcgcuggauagcggccgcgggagaugggacuguaucaugacgucuuaccaguaucucauuauccagaacacaaccugggaggaucacugccaguuuucccggcccagcccuaucggauaccugggccuucugucucaacgcacaagagacauuuauaucucccggcgccuccugggcaccuucaccuggacacugagcgauuccgaagggaaggacacgcccggaggcuacugucucaccagauggaugcugauugaggccgagcuuaaaugcuuugggaacacagcuguggccaaguguaaugaaaaacaugaugaggaguucugcgacaugcugcggcucuuugauuucaacaagcaggcuauccagcgccugaaagccgaagcgcagaugucuauucaacuuaucaauaaggccgucaacgcucugaucaaugaccagcucgugaugaagaaccaccugagagacauuaugggaaucccuuauugcaauuacagccgguauugguaccugaaccacaccacaaccggccgcacgucccuccccaaauguuggcuggugagcaaugggucuuaccuuaacgaaacacauuucuccgaugacauugagcagcaagccgauaauaugaucaccgagaugcugcagaaggaauauauggagagacagggaaaaaccccucucggccuggucgaccuguuuguuuucagcacaucuuuuuaccuuauuagcaucuuccuccaccuggugaagaucccgugaggacuaguaauaaggaaacuguaugaaugucugugggcaggaagugaagagauccuucuguaaagguuuuuggaauuaugucugcugaauaauaaacuuuuuugaaauaauaaaucugguagaaaaaugagaucucaaaggcucuuuucagagccaccaaaaaaaaaaaaaaaaaaaaaaaaaaaaaaaaaaaaaaaaaaaaaaaaaaaaaaaaaaaaaaaaagaauu

SEQ ID NO: 42655 - RNA, 1667 nt, Artificial Sequence
  mRNA product Design b-4 (hSL-A64-N5) comprising derived and/or modified sequence from LASV(G733-SLE-2010;Clade IV)__AIT17154__GPCmut13 (opt5)
aggagagucccgcagucggcguccagcggcucugcuuguucgugugugugucguugcaggccuuauucaagcuuaccaugggccagaucgugaccuucuuucaagaggucccccacguuauugaagaggugaugaacaucgugcugauugcccucagcauccuggcuguccuuaaggggcuguacaauuucgccacaugcggaauugugggccucguuuccuuucugcuucugugugggagaucuugcacgaccagccucuauaaaggaguguacgaacugcagacacuggagcucaacauggaaacccugaauaugacaaugccucuuuccuguaccaagaacaauucucaucacuauaucauggucggcaacgagacagggcuggagcucacccugacgaauaccagcaucauuaaccauaaauucugcaaucuuuccgacgcgcacaagaaaaaccuguacgaucaugcucucaugucuaucauuagcacauuucaccuguccaucccgaauuucaaccaguaugaagccaugagcugugacuuuaauggaggcaagauuucugugcaguacaaccugucccacagcuaugccggcgaugcugccaaucauugcgggaccaucgcuaacggaguucuccaaacauucaugcggauggccuggggcgggucuuacauugcgcuggacuccggacgcgauagaugggacuguaucaugaccagcuaccaguaucuuaucauucagaacacgacaugggaggaucacugccaguuuucucggcccuccccuaucggcuaccuggggcuccugagccaacgcaccagagacauuuauaucucccggcgccuucugggaacauucaccuggacccucucugauagcgaaggcaaggacacacccggcggguacugucugacgagauggaugcugauugaggccgagcucaaaugcuuuggaaauaccgcuguggccaaguguaacgaaaaacaugaugaggaguucugcgacaugcugcggcuuuuugauuucaauaagcaggcuauccagcgccugaaagccgaagcgcagauguccauccaacucauuaacaaggccgucaaugcucugaucaacgaccagcuuauuaugaagaaucaccugagagacaucaugggcauuccuuauugcaacuacagcaaauauugguaccucaaucacacaaccacagggaagaccucucugcccaaauguuggcugguguccaacggaagcuaccucaaugaaacgcauuucucugaugacaucgagcagcaagccgauaacaugaucacagagaugcugcagaaggaauauauggagcggcagggcaaaaccccucuugggcugguggaccucuuugucuucagcaccuccuuuuaccugauuucuaucuuccugcaccuuguuaagauuccgugaggacuaguaauaaggaaacuguaugaaugucugugggcaggaagugaagagauccuucuguaaagguuuuuggaauuaugucugcugaauaauaaacuuuuuugaaauaauaaaucugguagaaaaaugagaucucaaaggcucuuuucagagccaccaaaaaaaaaaaaaaaaaaaaaaaaaaaaaaaaaaaaaaaaaaaaaaaaaaaaaaaaaaaaaaaaagaauu

SEQ ID NO: 42656 - RNA, 1667 nt, Artificial Sequence
  mRNA product Design b-4 (hSL-A64-N5) comprising derived and/or modified sequence from MOPV/LASV reassortant(IGS-1;Clade IV)__AFY05576__GPCmut13 (opt5)
aggagagucccgcagucggcguccagcggcucugcuuguucgugugugugucguugcaggccuuauucaagcuuaccaugggccagaucgugaccuucuuucaagaggucccccacguuauugaagaggugaugaacaucgugcugauugcccucagcguccuggcugugcuuaaggggcuguacaauuucgccacaugcggacucguuggccuggugacguuucuucugcucugugggagauccugcaccacaucucuguauaaaggagucuacgaacugcagacccucgagcugaacauggaaacacuuaauaugaccaugccucugagcuguacaaagaacaauucccaucacuauaucauggugggcaacgagaccgggcucgagcugacgcuuaccaauacaucuauuaucaaccauaaauucugcaaucugagcgacgcgcacaagaaaaaccucuacgaucaugcucugauguccaucauuucuaccuuucaccugagcaucccgaauuucaaccaguaugaagccauguccugugacuuuaauggaggcaagauuagcguucaguacaaccucucucacuccuaugccggcgaugcugccaaucauugcgggacaguggcuaacggaguccugcaaaccuucaugcggauggccuggggcgggagcuacaucgcgcuugacucuggacgcggcaacugggauuguauuaugacguccuaccaguaucugaucauucagaauacaaccugggaggaccacugccaguuuagcagacccucuccuaucggguaccucggacugcuuucccaacggacacgcgauaucuauauuagcagacggcugcucggcaccuucaccuggacacuguccgacucugaaggcgaggauacgcccgggggauacugucugacccgcuggaugcucaucgaggccgaacugaagugcuuuggcaacacagcuguggccaaauguaaugagaagcaugacgaagaguucugcgauaugcuuagacuguuugacuucaacaaacaggcuauucagcggcucaaggccgaagcgcagaugagcauccaacugauuaauaaagccgugaacgcucuuaucaaugaucagcugaucaugaagaaccaccuccgcgacauuauggggaucccuuauugcaauuacuccaaguauugguaccugaaccacaccacaaccggaagaacgagccugcccaaauguuggcucgucucuaauggcuccuaccugaacgagacacauuucagcgacgauauugagcagcaagccgacaauaugaucaccgaaaugcuucagaaggaguauauggaacggcaggggaaaaccccucugggacucguugaucuguuuguguucucuaccagcuuuuaccugauuuccaucuuccuucaccucgugaagaucccgugaggacuaguaauaaggaaacuguaugaaugucugugggcaggaagugaagagauccuucuguaaagguuuuuggaauuaugucugcugaauaauaaacuuuuuugaaauaauaaaucugguagaaaaaugagaucucaaaggcucuuuucagagccaccaaaaaaaaaaaaaaaaaaaaaaaaaaaaaaaaaaaaaaaaaaaaaaaaaaaaaaaaaaaaaaaaagaauu

SEQ ID NO: 42657 - RNA, 1667 nt, Artificial Sequence
  mRNA product Design b-4 (hSL-A64-N5) comprising derived and/or modified sequence from LASV(LM765-SLE-2012;Clade IV)__AIT17814__GPCmut13 (opt5)
aggagagucccgcagucggcguccagcggcucugcuuguucgugugugugucguugcaggccuuauucaagcuuaccaugggccagaucgugaccuucuuucaagaggucccccacguuauugaagaggugaugaacaucgugcugauugcccucagcauccuggcuguccuuaaggggcuguacaauuucgccacaugcggacucgugggccugguuacguuucuucugcucugugggagauccugcaccacaucucuguauaaaggaguguacgaacugcagacccucgagcugaacauggaaacacuuaauaugaccaugccucugagcuguacaaagaacaauucccaucacuauauuauggucggcaacgagaccgggcucgagcugacgcuuaccaauacaucuaucaucgaccauaaauucugcaaccugagcgaugcgcaccggaagaaucucuacgaccaugcucugauguccauuaucucuaccuuucaccugagcauuccgaacuucaaucaguaugaagccauguccugugauuuuaacggaggcaaaaucagcgugcaguacaaucucucucacuccuaugccaaggacgcugccgaucauugcggcacaguugcuaacggggugcugcaaaccuucaugcgcauggccuggggaggcagcuacauugcgcuugacucugggagaggacggugggauuguaucaugacguccuaccaguaucugauuauccagaauacaaccugggaggaccacugccaguuuagccgccccucuccuaucggcuaccucgggcugcuuucccaaagaacacgggauauuuauaucagccgcagacugcucggaaccuucaccuggacacuguccgacucugaaggcaaggauacgcccggcggguacugucugacccgguggaugcucauugaggccgagcugaaaugcuuuggaaacacagcugucgccaaguguaacgaaaaacaugacgaggaguucugcgauaugcuucgccuguuugacuucaauaagcaggcuauccagagacucaaagccgaagcgcagaugagcauucaacugaucaacaaggccgugaaugcucuuaucaacgaccagcugauuaugaagaaucaccuccgggauaucaugggcauuccuuauugcaacuacuccaaauauugguaccugaaucacaccacaaccgggaagacgagccugcccaaauguuggcucgugucuaacggauccuaccugaaugaaacacauuucagcgacgauaucgagcagcaagccgacaacaugauuaccgagaugcuucagaaggaauauauggagcgccagggcaaaaccccucuggggcucgucgaucuguuuguuuucucuaccagcuuuuaccugaucuccaucuuccuucaccucgugaagauuccgugaggacuaguaauaaggaaacuguaugaaugucugugggcaggaagugaagagauccuucuguaaagguuuuuggaauuaugucugcugaauaauaaacuuuuuugaaauaauaaaucugguagaaaaaugagaucucaaaggcucuuuucagagccaccaaaaaaaaaaaaaaaaaaaaaaaaaaaaaaaaaaaaaaaaaaaaaaaaaaaaaaaaaaaaaaaaagaauu

SEQ ID NO: 42658 - RNA, 1667 nt, Artificial Sequence
  mRNA product Design b-4 (hSL-A64-N5) comprising derived and/or modified sequence from LASV(LM776-SLE-2012;Clade IV)__AIT17824__GPCmut13 (opt5)
aggagagucccgcagucggcguccagcggcucugcuuguucgugugugugucguugcaggccuuauucaagcuuaccaugggccagaucgugaccuucuuucaagaggucccccacguuauugaagaggugaugaacaucgugcugauugcccucagcauccuggcuguccuuaaggggcuguacaauuucgccacaugcggacucgugggccugguuacguuucuucugcucugugggagauccugcaccacaucuguguauaaaggagucuacgaacugcagacccuggagcucaacauggaaacacugaauaugaccaugccucuuagcuguacaaagaacaauucccaucacuauauuauggugggcaacgagaccgggcuggagcucacgcugaccaauacaucuaucaucaaccauaaauucugcaaucuuagcgacgcgcacaagaaaaaccuguacgaucaugcucucauguccauuaucucuaccuuucaccugagcauuccgaauuucaaccaguaugaagccauguccugugacuuuaauggaggcaagaucagcguucaguacaaccugucucacuccuaugccggcgaugcugccaaucauugcgggacaguggcuaacggaguccuccaaaccuucaugcggauggccuggggcgggagcuacauugcgcuggacucuggacacggcaagugggauuguaucaugacguccuaccaguaucuuauuauccagaacacaaccugggaggaccauugccaguuuagccgccccucuccuaucggguaccugggacuccugucccaaagaacacgggauauuuauaucagccgcagacuucugggcaccuucaccuggacacucuccgacucugaaggcaaagauacgcccgggggauacugucugacccgguggaugcugauugaggccgagcucaagugcuuuggcaauacagcuguggccaaauguaacgaaaagcacgacgaggaguucugcgauaugcugcgccuuuuugacuucaauaaacaggcuauccagagacugaaggccgaagcgcagaugagcauucaacucaucaacaaggccgugaaugcucugaucaacgaucagcuuauuaugaaaaaucaucugcgggacaucauggggauuccuuauugcaacuacuccaaguauugguaccucaaucacaccacaaccggaaaaacgagccugcccaaguguuggcuggucucuaacggcuccuaccucaaugaaacacacuucagcgacgauaucgagcagcaagccgacaacaugauuaccgagaugcugcagaaagaauauauggagcgccaggggaagaccccucuuggacugguugaucucuuuguguucucuaccagcuuuuaccugaucuccaucuuccugcaucuugugaaaauuccgugaggacuaguaauaaggaaacuguaugaaugucugugggcaggaagugaagagauccuucuguaaagguuuuuggaauuaugucugcugaauaauaaacuuuuuugaaauaauaaaucugguagaaaaaugagaucucaaaggcucuuuucagagccaccaaaaaaaaaaaaaaaaaaaaaaaaaaaaaaaaaaaaaaaaaaaaaaaaaaaaaaaaaaaaaaaaagaauu

SEQ ID NO: 42659 - RNA, 1667 nt, Artificial Sequence
  mRNA product Design b-4 (hSL-A64-N5) comprising derived and/or modified sequence from LASV(Mad39;Clade IV)__ANH09722__GPCmut13 (opt5)
aggagagucccgcagucggcguccagcggcucugcuuguucgugugugugucguugcaggccuuauucaagcuuaccaugggccagaucgugaccuucuuucaagaggucccccacguuauugaagaggugaugaacaucgugcugauugcccucagcauccuggcuguccuuaaggggcuguacaauguggccacaugcggacucauuggccugguuacguuccuucugcucugugggagauccugcaccacaacccuguauaaaggaguguacgaacugcaggcgcucgagcugaacauggaaacacuuaauaugaccaugccucugucuuguacaaagaacaauagccaucacuauauccgggucggcaacgagaccgggcucgagcugacgcuuaccaauacaucccugaucaaccauaaauuuugcaaucucucugacgcucacaagaaaaaccuguacgaucaugcccugaugagcauuaucuccaccuuccaccucucuauuccgaauuuuaaccaguaugaagccaugagcugugacuucaaugauggaaagaucuccgugcaguacaaccugagccacacauaugcuggcgacaccgccaaucauugcggcacgguugcuaacggggugcuucaaacauuuaugcgcauggccuggggaggcucuuacauugcgcuggauuccgggagaggaggcugggacuguaucaugaccagcuaccaguaucucauuauccagaacacaaccugggaggaucacugccaguucucucggcccuccccuaucggguaccugggacuucugagccaacgcaccagagacauuuauaucucucggcgccuccugggcacauuuacguggacccuguccgauagcgaaggcaaggacacacccgggggauacugucucaccagauggaugcugauugaggccgagcuuaaaugcuucggcaauacagcugucgccaaguguaacgaaaaacaugaugaggaauuuugcgacaugcugcgccucuucgauuuuaauaagcaggcuauccagcggcugaaagccgaggcgcagauguccauucaacuuaucaacaaggccgugaaugcucugaucaacgaccagcucauuaugaagaaucaccugagagacaucauggggauuccuuauugcaacuacucuaaauauugguaccugaaucacaccgugacgggaaagacaagccuccccaaauguuggcuggucuccaacggcagcuaccuuaaugaaacccauuucucugaugacaucgagcagcaagccgauaacaugauuaccgagaugcugcagaaggaauauauggagcggcaggggaaaacaccucucggacugguugaccuguucguguuuuccaccagcuucuaccuuaucucuaucuuucuccaccuggugaagauuccgugaggacuaguaauaaggaaacuguaugaaugucugugggcaggaagugaagagauccuucuguaaagguuuuuggaauuaugucugcugaauaauaaacuuuuuugaaauaauaaaucugguagaaaaaugagaucucaaaggcucuuuucagagccaccaaaaaaaaaaaaaaaaaaaaaaaaaaaaaaaaaaaaaaaaaaaaaaaaaaaaaaaaaaaaaaaaagaauu

SEQ ID NO: 42660 - RNA, 1667 nt, Artificial Sequence
  mRNA product Design b-4 (hSL-A64-N5) comprising derived and/or modified sequence from LASV(Z0947-SLE-2011;Clade IV)__AIT17840__GPCmut13 (opt5)
aggagagucccgcagucggcguccagcggcucugcuuguucgugugugugucguugcaggccuuauucaagcuuaccaugggccagaucgugaccuucuuucaagaggucccccacguuauugaagaggugaugaacaucgugcugauugcccucagcauccuggcuguccuuaaggggcuguacaauuucgccacaugcggacucgugggccugguuacguuucuucugcucugugggagauccugcaccauuucucuguauaaaggaguguacgaacugcagacacucgagcugaacauggaaacccuuaauaugacaaugccucugagcuguaccaagaacaauucccaucacuauaucauggucggcaacgagacagggcucgagcugacccuuacgaauaccucuaucauuaaccauaaauucugcaaucugagcgacgcgcacaagaaaaaccucuacgaucaugcucugauguccaucauuucuacauuucaccugagcaucccgaauuucaaccaguaugaagccauguccugugacuuuaauggaggcaagauuagcgugcaguacaaccucucucacuccuaugccggcgaugcugccaaucauugcgggaccguugcuaacggagugcugcaaacauucaugcggauggccuggggcgggagcuacaucgcgcuugacucuggacgcgauagaugggacuguauuaugaccuccuaccaguaucugaucauccagaacacgacaugggaggaucacugccaguuuagccggcccucuccuauuggcuaccucgggcugcuuucccaacgcaccagagacaucuauauuagccggcgccugcucggaacauucaccuggacccuguccgauucugaaggcaaggacacacccggcggguacugucugacgagauggaugcucaucgaggccgagcugaaaugcuuuggaaauaccgcugucgccaaguguaacgaaaaacaugaugaggaguucugcgacaugcuucggcuguuugauuucaauaagcaggcuauucagcgccucaaagccgaagcgcagaugagcauccaacugaucaacaaggccgugaaugcucuuauuaacgaccagcugaucaugaagaaucaccucagagacauuaugggcaucccuuauugcaacuacuccaaauauugguaccugaaucacacaaccacagggaagaccagccugcccaaauguuggcucgugucuaacggauccuaccugaaugaaacgcauuucagcgaugacauugagcagcaagccgauaacaugaucacagagaugcuucagaaggaauauauggagcggcagggcaaaaccccucuggggcucgucgaccuguuuguuuucucuaccagcuuuuaccugaucuccauuuuccuucaccucgugaagaucccgugaggacuaguaauaaggaaacuguaugaaugucugugggcaggaagugaagagauccuucuguaaagguuuuuggaauuaugucugcugaauaauaaacuuuuuugaaauaauaaaucugguagaaaaaugagaucucaaaggcucuuuucagagccaccaaaaaaaaaaaaaaaaaaaaaaaaaaaaaaaaaaaaaaaaaaaaaaaaaaaaaaaaaaaaaaaaagaauu

SEQ ID NO: 42661 - RNA, 1698 nt, Artificial Sequence
  mRNA product Design b-4 (hSL-A100) comprising derived and/or modified sequence from LASV(Josiah;Clade IV)__NP_694870__GPCmut13 (opt1)
aggagagucccgcagucggcguccagcggcucugcuuguucgugugugugucguugcaggccuuauucaagcuuaccaugggccagaucgugaccuucuuccaggaggucccccacgugaucgaggaggugaugaacaucguccugaucgcccucagcgugcuggccgugcugaaggggcucuacaacuucgcgaccugcggccuggucgggcuggugacguuccuccugcugugcggccgcuccugcaccaccagccucuacaaggggguguacgagcugcagacccuggagcucaacauggagacgcugaacaugaccaugccgcuguccugcaccaagaacaacagccaccacuacaucauggucggcaacgagaccggccucgagcugacgcugaccaacaccuccaucaucaaccacaaguucugcaaccucagcgacgcccacaagaagaaccuguacgaccacgcccugauguccaucaucagcaccuuccaccucuccauccccaacuucaaccaguacgaggccaugagcugcgacuucaacgggggcaagaucuccgugcaguacaaccugagccacuccuacgccggggacgcggccaaccacugcggcacgguggccaacgggguccugcagaccuucaugcggauggccuggggcggcagcuacaucgcgcucgacuccgggcgcggcaacugggacugcaucaugaccagcuaccaguaccugaucauccagaacaccacgugggaggaccacugccaguucucccggcccagccccaucggguaccugggccuccugucccagcgcacccgggacaucuacaucagccgccggcugcucggcaccuucaccuggacgcugagcgacuccgaggggaaggacaccccgggcggguacugccugacccgcuggaugcucaucgaggccgagcugaagugcuucggcaacaccgccguggccaagugcaacgagaagcacgacgaggaguucugcgacaugcugcggcuguucgacuucaacaagcaggccauccagcgccugaaggcggaggcccagaugagcauccagcugaucaacaaggccgugaacgcccucaucaacgaccagcugaucaugaagaaccaccuccgggacaucauggggauccccuacugcaacuacuccaaguacugguaccucaaccacacgaccaccggccgcaccagccugcccaagugcuggcuggucuccaacggcagcuaccucaacgagacgcacuucuccgacgacaucgagcagcaggccgacaacaugaucaccgagaugcugcagaaggaguacauggagcggcaggggaagacgccccugggccucguggaccuguucguguucagcaccuccuucuaccugaucagcaucuuccugcaccucgucaagaucccgugaggacuaguaauaaggaaacuguaugaaugucugugggcaggaagugaagagauccuucuguaaagguuuuuggaauuaugucugcugaauaauaaacuuuuuugaaauaauaaaucugguagaaaaaugagaucucaaaggcucuuuucagagccaccaaaaaaaaaaaaaaaaaaaaaaaaaaaaaaaaaaaaaaaaaaaaaaaaaaaaaaaaaaaaaaaaaaaaaaaaaaaaaaaaaaaaaaaaaaaaaaaaaaaaa

SEQ ID NO: 42662 - RNA, 1695 nt, Artificial Sequence
  mRNA product Design b-4 (hSL-A100) comprising derived and/or modified sequence from LASV(LP;Clade I)__AAF86701__GPCmut13 (opt1)
aggagagucccgcagucggcguccagcggcucugcuuguucgugugugugucguugcaggccuuauucaagcuuaccaugggccagaucaucaccuucuuccaggaggugccccacgucaucgaggaggugaugaacaucgugcugaucgcccucagccugcuggccauccucaaggggcuguacaacaucgcgaccugcggcaucaucgggcuggucgccuuccucuuccugugcggcaaguccugcagccugacgcucaagggcggguacgagcugcagacccuggagcucaacauggagacccugaacaugaccaugccgcuguccugcacgaagaacagcucccaccacuacauccgcgugggcaacgagaccgggcucgagcugacccugaccaacacgagcaucaucaaccacaaguucugcaaccucuccgacgcccacaagaagaaccuguacgaccacgcccugaugagcaucaucuccaccuuccaccucagcauccccaacuucaaccaguacgaggccauguccugcgacuucaacggcgggaagaucagcgugcaguacaaccugucccacagcuacgcgggcgacgccgccgagcacugcgggaccgucgccaacggcgugcugcagaccuucaugcggauggcguggggcgggcgcuacaucgcccucgacuccggcaaggggaacugggacugcaucaugacgagcuaccaguaccugaucauccagaacaccaccugggaggaccacugccaguucucccggcccagccccaucggcuaccugggccuccugucccagcgcacccgggacaucuacaucagccgccggcugcucgggacguucaccuggacccugagcgacuccgagggcaacgagacccccgggggcuacugccugacgcgcuggaugcucaucgaggccgagcugaagugcuucgggaacaccgccguggccaagugcaacgagaagcacgacgaggaguucugcgacaugcugcggcuguucgacuucaacaagcaggcgauccgccggcugaaggccgaggcccagaugagcauccagcugaucaacaaggccgucaacgcccucaucaacgaccagcugaucaugaagaaccaccuccgcgacaucaugggcauccccuacugcaacuacuccaaguacugguaccucaaccacaccagcuccggccggaccagccugcccaagugcuggcugaucuccaacgggagcuaccucaacgagacgcaguucuccgacgacaucgagcagcaggcggacaacaugaucaccgagaugcugcagaaggaguacaucgagcgccagggcaagaccccgcuggggcucguggacaucuucaucuucagcaccuccuucuaccugaucagcaucuuccugcaccugaucaagaucccgugaggacuaguaauaaggaaacuguaugaaugucugugggcaggaagugaagagauccuucuguaaagguuuuuggaauuaugucugcugaauaauaaacuuuuuugaaauaauaaaucugguagaaaaaugagaucucaaaggcucuuuucagagccaccaaaaaaaaaaaaaaaaaaaaaaaaaaaaaaaaaaaaaaaaaaaaaaaaaaaaaaaaaaaaaaaaaaaaaaaaaaaaaaaaaaaaaaaaaaaaaaaaaaaaa

SEQ ID NO: 42663 - RNA, 1695 nt, Artificial Sequence
  mRNA product Design b-4 (hSL-A100) comprising derived and/or modified sequence from LASV(803213;Clade II)__AAF86703__GPCmut13 (opt1)
aggagagucccgcagucggcguccagcggcucugcuuguucgugugugugucguugcaggccuuauucaagcuuaccaugggccagaucaucaccuucuuccaggaggugccccacgucaucgaggaggugaugaacaucgugcugaucgcccucagccugcuggccauccucaaggggaucuacaacgucgcgaccugcggccuguucgggcugaucuccuuccuccugcugugcggccgcagcugcuccgugacguacaaggggguguacgagcuccagacccuggagcugaacauggccaaccucaacaugaccaugccgcugagcugcaccaagaacaacucccaccacuacaucauggucggcaacgagacgggccuggagcucacccugaccaacaccagcaucaucaaccacaaguucugcaaccuguccgacgcccacaagaagaaccucuacgaccacgcccugaugagcaucaucuccacguuccaccugagcauccccaacuucaaccaguacgaggccauguccugcgacuucaacgggggcaagaucagcgugcaguacaaccucucccacagcuucgcgguggacgccgccaaccacugcgggaccaucgccaacggcguccugcagaccuucaugcggauggcguggggcggguccuacaucgcccuggacagcggcaaggggaacugggacugcaucaugaccuccuaccaguaccucaucauccagaacacgaccugggaggaccacugccaguucagccgccccucccccaucggcuaccuggggcugcucagccagcggacccgcgacaucuacaucagccggcgccugcugggcaccuucacguggacccucuccgacagcgagggcaacgaggcccccgggggcuacugccugacccgguggaugcugaucgaggccgagcucaagugcuucgggaacaccgccguggcgaagugcaacgagaagcacgacgaggaguucugcgacaugcugcgccuguucgacuucaacaagcaggccaucaagcggcucaagacggaggcccagauguccauccagcugaucaacaaggccgugaacgcccugaucaacgaccagcucaucaugaagaaccaccuccgcgacaucaugggcauccccuacugcaacuacagccgguacugguaccugaaccacaccgucaccgggaagaccucccugccccgcugcuggcuggugagcaacggcuccuaccugaacgagacgcacuucagcgacgacaucgagcagcaggcggacaacaugaucaccgagaugcuccagaaggaguacauggaccggcagggcaagaccccgcuggggcugguggaccucuucgucuucuccaccagcuucuaccugaucuccaucuuccugcaccuggugaagaucccgugaggacuaguaauaaggaaacuguaugaaugucugugggcaggaagugaagagauccuucuguaaagguuuuuggaauuaugucugcugaauaauaaacuuuuuugaaauaauaaaucugguagaaaaaugagaucucaaaggcucuuuucagagccaccaaaaaaaaaaaaaaaaaaaaaaaaaaaaaaaaaaaaaaaaaaaaaaaaaaaaaaaaaaaaaaaaaaaaaaaaaaaaaaaaaaaaaaaaaaaaaaaaaaaaa

SEQ ID NO: 42664 - RNA, 1695 nt, Artificial Sequence
  mRNA product Design b-4 (hSL-A100) comprising derived and/or modified sequence from LASV(GA391;Clade III)__CAA36645__GPCmut13 (opt1)
aggagagucccgcagucggcguccagcggcucugcuuguucgugugugugucguugcaggccuuauucaagcuuaccaugggccagaucgugaccuucuuccaggaggucccccacgugaucgaggaggugaugaacaucguccugaucgcccucagcauccuggccauccugaaggggcucuacaacguggcgaccugcggccugaucgggcuggugacguuccuccugcuguccggccgcagcugcucccucaucuacaaggggaccuacgagcugcagacccuggagcucaacauggagacccugaacaugacgaugccgcugagcugcaccaagaacaacucccaccacuacauccgggucggcaacgagaccggccucgagcugacccugacgaacaccagcauccucaaccacaaguucugcaaccuguccgacgcccacaagcgcaaccuguacgaccacagccucauguccaucaucagcaccuuccaccuguccauccccaacuucaaccaguacgaggccaugagcugcgacuucaacgggggcaagaucaccgugcaguacaaccugucccacagcuucgccguggacgccgcggggcacugcggcacgcucgccaacgggguccugcagaccuucaugcggauggccuggggcggcuccuacaucgcccuggacagcgggcgcggcaacugggacugcaucaugaccuccuaccaguaccucaucauccagaacaccacgugggacgaccacugccaguucagccggcccucccccaucggguaccugggccugcucagccagcgcacccgggacaucuacaucagccgccggcugcugggcaccuucaccuggacgcucuccgacagcgaggggaacgagaccccgggcggguacugccugacccgcuggaugcugaucgaggcggagcucaagugcuucggcaacaccgccguggccaagugcaacgagaagcacgacgaggaguucugcgacaugcugcggcuguucgacuucaacaagcaggccauccgccggcucaagacggaggcccagauguccauccagcugaucaacaaggcggugaacgcccugaucaacgaccagcucaucaugaagaaccaccuccgcgacaucauggggauccccuacugcaacuacagccgguacugguaccugaaccacaccuccaccggcaagaccagccugccccgcugcuggcugaucuccaacggcagcuaccugaacgagacgaaguucuccgacgacaucgagcagcaggccgacaacaugaucaccgagaugcuccagaaggaguacaucgaccggcaggggaagacgccccugggccuggucgaccuguucguguucagcaccuccuucuaccucaucagcaucuuccugcaccuggugaagaucccgugaggacuaguaauaaggaaacuguaugaaugucugugggcaggaagugaagagauccuucuguaaagguuuuuggaauuaugucugcugaauaauaaacuuuuuugaaauaauaaaucugguagaaaaaugagaucucaaaggcucuuuucagagccaccaaaaaaaaaaaaaaaaaaaaaaaaaaaaaaaaaaaaaaaaaaaaaaaaaaaaaaaaaaaaaaaaaaaaaaaaaaaaaaaaaaaaaaaaaaaaaaaaaaaaa

SEQ ID NO: 42665 - RNA, 1698 nt, Artificial Sequence
  mRNA product Design b-4 (hSL-A100) comprising derived and/or modified sequence from LASV(AV;Clade V)__CCA30314__GPCmut13 (opt1)
aggagagucccgcagucggcguccagcggcucugcuuguucgugugugugucguugcaggccuuauucaagcuuaccaugggccagaucgugaccuucuuccaggaggucccccacgugaucgaggaggugaugaacaucguccugaucgcccucagcauccuggccgugcugaaggggcucuacaacaucgcgaccugcggccugaucgggcugaucacguuccuccugcugugcggccgcuccugcagcuccaaccucuacaaggggguguacgagcugcagagccuggaccucaacauggagacccugaacaugaccaugccgcuguccugcaccaagaacaacagccaccacuacauccgggucggcaacgacacgggccucgagcugacccugaccaacaccuccauccucaaccacaaguucugcaaccugagcgacgcccacaagaaggaccuguacgaccacgcccucauguccaucaucagcacguuccaccuguccauccccaacuucaaccaguacgaggccaugagcugcgacuucaacgggggcaagaucuccgugcaguacaaccugagccacuccuacgccaucgacgcggccaaccacugcgggaccguggccaacggcauccuccagaccuucaugcgcauggccuggggcgggagcuacaucgcgcuggacuccggccgggggaacugggacugcaucaugaccagcuaccaguaccugaucauccagaacacgaccugggagaaccacugccaguucucccgccccagccccaucggcuaccucgggcugcugagccagcggacccgcgacaucuacaucucccggcgccuccugggcaccuucacguggacccugagcgacuccgagggcaacgccacccccgggggcuacugccucacccgguggaugcugaucgaggccgagcugaagugcuucgggaacacggccgucgccaagugcaacgagaagcacgacgaggaguucugcgacaugcuccgccuguucgacuucaacaagcaggcgaucagccggcugaaguccgaggcccagaugagcauccagcucaucaacaaggccgugaacgcccugaucaacgaccagcugaucaugaagaaccaccuccgcgacaucaugggcauccccuacugcaacuacuccaaguacugguaccugaaccacaccaucaccgggaagaccagccugcccaagugcuggcucguguccaacggcagcuaccugaacgagacgcacuucuccgacgacaucgagcagcaggccgacaacaugaucaccgagaugcugcagaaggaguacauggagcggcagggcaagaccccgcucgggcuggucgaccuguucguguucagcaccuccuucuaccugaucagcaucuuccuccgccuggugaagaucccgugaggacuaguaauaaggaaacuguaugaaugucugugggcaggaagugaagagauccuucuguaaagguuuuuggaauuaugucugcugaauaauaaacuuuuuugaaauaauaaaucugguagaaaaaugagaucucaaaggcucuuuucagagccaccaaaaaaaaaaaaaaaaaaaaaaaaaaaaaaaaaaaaaaaaaaaaaaaaaaaaaaaaaaaaaaaaaaaaaaaaaaaaaaaaaaaaaaaaaaaaaaaaaaaaa

SEQ ID NO: 42666 - RNA, 1695 nt, Artificial Sequence
  mRNA product Design b-4 (hSL-A100) comprising derived and/or modified sequence from LASV(Togo/2016/7082;Clade VI)__AMR44577__GPCmut13 (opt1)
aggagagucccgcagucggcguccagcggcucugcuuguucgugugugugucguugcaggccuuauucaagcuuaccaugggccagaucaucaccuucuuccaggaggugccccacgucaucgaggaggugaugaacaucgugcugaucgcccucagccugcuggccauccucaagggggucuacaacguggcgaccugcggcaucaucgggcuggugacguuccuguuccucugcggccgcuccugcagccugaucuacaagggguccuacgagcugcagacccucgagcugaacauggagacccugaacaugaccaugccgcucagcugcacgaagaacuccagccaccacuacauccgggucggcaacgagaccggccuggagcugacccucaccaacacguccaucaucaaccacaaguucugcaaccugagcgacgcccacaagcgcaaccuguacgaccacgcccucauguccauccugagcaccuuccaccuguccauccccaacuucaaccaguacgaggccaugagcugcgacuucaacgggggcaagaucuccgugcaguacaaccucagccacgccuacgcgguggacgccgccgagcacugcgggaccgucgccaacggcgugcugcagaccuucaugcggauggcguggggcggguccuacaucgcccuggacagcggccgcgggaacugggacugcaucaugacguccuaccaguaccucaucauccagaacaccaccugggaggaccacugccaguucagccggcccucccccaucggcuaccuggggcugcucagccagcgcacccgggacaucuacaucagccgccggcugcugggcacguucaccuggacccucuccgacagcgagggcaacgagacccccgggggcuacugccugacgcgcuggaugcugaucgaggccgagcucaagugcuucgggaacaccgccguggccaagugcaacgagaagcacgacgaggaguucugcgacaugcugcggcuguucgacuucaacaagcaggcgauccagcgccucaaguccgaggcccagaugagcauccagcugaucaacaaggccgucaacgcccugaucaacgaccagcucaucaugaagaaccaccuccgggacaugaugggcauccccuacugcaacuacuccaaguacugguaccugaaccacaccagcuccgggcgcaccagccugcccaagugcuggcugguguccaacggcagcuaccugaacgagacgcacuucuccgacgacaucgagcagcaggccgacaacaugaucaccgagaugcuccagaaggaguacaucgaccggcagggcaagaccccgcuggggcugguggaccucuucgucuucagcaccuccuucuaccugaucagcaucuuccugcaccugaucaagaucccgugaggacuaguaauaaggaaacuguaugaaugucugugggcaggaagugaagagauccuucuguaaagguuuuuggaauuaugucugcugaauaauaaacuuuuuugaaauaauaaaucugguagaaaaaugagaucucaaaggcucuuuucagagccaccaaaaaaaaaaaaaaaaaaaaaaaaaaaaaaaaaaaaaaaaaaaaaaaaaaaaaaaaaaaaaaaaaaaaaaaaaaaaaaaaaaaaaaaaaaaaaaaaaaaaa

SEQ ID NO: 42667 - RNA, 1695 nt, Artificial Sequence
  mRNA product Design b-4 (hSL-A100) comprising derived and/or modified sequence from LASV(KAK-428;Clade n.d. (VII))__ANH09740__GPCmut13 (opt1)
aggagagucccgcagucggcguccagcggcucugcuuguucgugugugugucguugcaggccuuauucaagcuuaccaugggccagaucgugaccuucuuccaggaggucccccacgugaucgaggaggugaugaacaucguccugaucgcccucagccugcuggccauccucaaggggcuguacaacuucgcgaccugcggcgugaucgggcugaucacguuccuccugcugugcggccgcuccugcagcgccaccuacaaggggcaguacgagcuccagacccuggagcugaacauggagucccucaacaugaccaugccgcugagcugcacgaagaacaacucccaccacuacauccgggccggcaacaacaccggccuggagcucacccugaccaacacgagcaucaucucccacaaguucugcaaccugagcgacgcccacaagaagaaccucuacgaccacacccugauguccaucaucaccaccuuccaccugagcauccccaacuucaaccaguacgaggccauguccugcgacuucaacgggggcaagaucagcauccaguacaaccucucccacagcuacgcgggggacgccgcccagcacugcggcacgguggccaacgggguccugcagaccuucaugcgcauggcguggggcggcuccuaccuggcccucgacagcgggcggcgcggcugggacugcaucaucuccagcuaccaguaccugaucauccagaacaccaccugggacgaccacugccaguucucccggcccagccccaucggguaccugggcuucgugagccagaagacgcgcgacaucuacaucucccggcgccuccugggcaccuucaccuggacccugagcgacuccgaggggcacgacaugccgggcggguacugccucacgcgguggaugcugaucgaggccgaccugaagugcuucggcaacaccgccguggccaagugcaacgagaagcacgacgaggaguucugcgacauguggcgccucuucgacuucaacaagcaggcgauccagcggcugaaggccgaggcccagaugaacauccagcugaucaacaaggccgucaacgcccucaucaacgaccagcugaugaugaagaaccaccuccgcgacaucauggggauccccuacugcaacuacagcaaguucugguaccugaacaacaccaccacgggccggaccucccugccccgcugcuggcugaucagcaacggcuccuaccucaacgagacccacuucagcgacgacaucgagcagcaggcggacaacaugaucaccgagaugcugcagaaggaguacauggaccggcaggggaagacgccccugggccucguggaccuguucguguucuccaccagcuucuaccugaucaccaucuuccuccaccuggucaagaucccgugaggacuaguaauaaggaaacuguaugaaugucugugggcaggaagugaagagauccuucuguaaagguuuuuggaauuaugucugcugaauaauaaacuuuuuugaaauaauaaaucugguagaaaaaugagaucucaaaggcucuuuucagagccaccaaaaaaaaaaaaaaaaaaaaaaaaaaaaaaaaaaaaaaaaaaaaaaaaaaaaaaaaaaaaaaaaaaaaaaaaaaaaaaaaaaaaaaaaaaaaaaaaaaaaa

SEQ ID NO: 42668 - RNA, 1695 nt, Artificial Sequence; identical to SEQ ID NO: 42662
  mRNA product Design b-4 (hSL-A100) comprising derived and/or modified sequence from LASV(Pinneo-NIG-1969;Clade I)__AIT17836__GPCmut13 (opt1)

SEQ ID NO: 42669 - RNA, 1695 nt, Artificial Sequence
  mRNA product Design b-4 (hSL-A100) comprising derived and/or modified sequence from LASV(ISTH0009-NIG-2011;Clade II)__AIT17404__GPCmut13 (opt1)
aggagagucccgcagucggcguccagcggcucugcuuguucgugugugugucguugcaggccuuauucaagcuuaccaugggccagaucaucaccuucuuccaggaggugccccacgucaucgaggaggugaugaacaucgugcugaucgcccucagccugcuggccauccucaaggggaucuacaacgucgcgaccugcggccuguucgggcugguguccuuccuccugcugugcggccgcagcugcuccacgaccuacaaggggguguacgagcuccagacccuggagcuggacauggccagccucaacaugaccaugccgcuguccugcacgaagaacaacagccaccacuacaucauggucggcaacgagaccggccuggagcucacccugaccaacacguccaucaucaaccacaaguucugcaaccugagcgacgcccacaagaagaaccucuacgaccacgcccugauguccaucaucagcaccuuccaccuguccauccccaacuucaaccaguacgaggccaugagcugcgacuucaacgggggcaagaucuccgugcaguacaaccucagccacgcguacgccguggacgccgccaaccacugcgggaccaucgcgaacggcguccugcagaccuucaugcggauggccuggggcggguccuacaucgcccuggacagcggcaagggguccugggacugcaucaugacgagcuaccaguaccucaucauccagaacaccaccugggaggaccacugccaguucucccgccccagccccaucggcuaccuggggcugcucagccagcggacccgcgacaucuacaucucccggcgccugcugggcacguucaccuggacccucagcgacuccgagggcaacgagacccccgggggcuacugccugacgcgguggaugcugaucgaggccgagcucaagugcuucgggaacaccgccguggcgaagugcaacgagaagcacgacgaggaguucugcgacaugcugcgccuguucgacuucaacaagcaggccauccggcgccucaagaccgaggcccagaugagcauccagcugaucaacaaggccgugaacgcccugaucaacgaccagcucaucaugaagaaccaccuccgggacaucaugggcaucccguacugcaacuacuccaaguacugguaccugaaccacaccgucacggggaagaccagccugccccgcugcuggcugguguccaacggcagcuaccugaacgagacccacuucuccgacgacaucgagcagcaggcggacaacaugaucaccgagcuccugcagaaggaguacauggaccggcagggcaagacgccccuggggcucguggaccuguucgucuucagcaccuccuucuaccugaucagcaucuuccugcaccucaucaagaucccgugaggacuaguaauaaggaaacuguaugaaugucugugggcaggaagugaagagauccuucuguaaagguuuuuggaauuaugucugcugaauaauaaacuuuuuugaaauaauaaaucugguagaaaaaugagaucucaaaggcucuuuucagagccaccaaaaaaaaaaaaaaaaaaaaaaaaaaaaaaaaaaaaaaaaaaaaaaaaaaaaaaaaaaaaaaaaaaaaaaaaaaaaaaaaaaaaaaaaaaaaaaaaaaaaa

SEQ ID NO: 42670 - RNA, 1695 nt, Artificial Sequence
  mRNA product Design b-4 (hSL-A100) comprising derived and/or modified sequence from LASV(ISTH2010-NIG-2012;Clade II)__AIT17482__GPCmut13 (opt1)
aggagagucccgcagucggcguccagcggcucugcuuguucgugugugugucguugcaggccuuauucaagcuuaccaugggccagaucaucaccuucuuccaggaggugccccacgucaucgaggaggugaugaacaucgugcugaucgcccucagccugcuggccauccucaaggggaucuacaacgucgcgaccugcggccuguucgggcugguguccuuccuccugcugugcggccgcagcugcuccacgaccuacaaggggguguacgagcuccagacccuggagcuggacauggccagccucaacaugaccaugccgcuguccugcacgaagaacaacagccaccacuacaucauggucggcaacgagaccggccuggagcucacccugaccaacacguccaucaucaaccacaaguucugcaaccugagcgacgcccacaagaagaaccucuacgaccacgcccugauguccaucaucagcaccuuccaccuguccauccccaacuucaaccaguacgaggccaugagcugcgacuucaacgggggcaagaucuccgugcaguacaaccucagccacgcguacgccguggacgccgccaaccacugcgggaccaucgcgaacggcguccugcagaccuucaugcggauggccuggggcggguccuacaucgcccuggacagcggcaagggguccugggacugcaucaugacgagcuaccaguaccucaucauccagaacaucaccugggaggaccacugccaguucucccgccccagccccaucggcuaccuggggcugcucagccagcggacccgcgacaucuacaucucccggcgccugcugggcaccuucacguggacccucagcgacuccgagggcaacgagacccccgggggcuacugccugacccgguggaugcugaucgaggccgagcucaagugcuucgggaacacggccguggcgaagugcaacgagaagcacgacgaggaguucugcgacaugcugcgccuguucgacuucaacaagcaggccauccggcgccucaagaccgaggcccagaugagcauccagcugaucaacaaggccgugaacgcccugaucaacgaccagcucaucaugaagaaccaccuccgggacaucaugggcauccccuacugcaacuacuccaaguacugguaccugaaccacaccgucaccgggaagacgagccugccccgcugcuggcugguguccaacggcagcuaccugaacgagacccacuucuccgacgacaucgagcagcaggcggacaacaugaucaccgagcuccugcagaaggaguacaucgaccggcagggcaagaccccgcuggggcucguggaccuguucgucuucagcacguccuucuaccugaucagcaucuuccugcaccucgugaagaucccgugaggacuaguaauaaggaaacuguaugaaugucugugggcaggaagugaagagauccuucuguaaagguuuuuggaauuaugucugcugaauaauaaacuuuuuugaaauaauaaaucugguagaaaaaugagaucucaaaggcucuuuucagagccaccaaaaaaaaaaaaaaaaaaaaaaaaaaaaaaaaaaaaaaaaaaaaaaaaaaaaaaaaaaaaaaaaaaaaaaaaaaaaaaaaaaaaaaaaaaaaaaaaaaaaa

SEQ ID NO: 42671 - RNA, 1695 nt, Artificial Sequence
  mRNA product Design b-4 (hSL-A100) comprising derived and/or modified sequence from LASV(Lassa virus/H.sapiens-wt/NGA/2015/ISTH_0543;Clade II)__AVO03639__GPCmut13 (opt1)
aggagagucccgcagucggcguccagcggcucugcuuguucgugugugugucguugcaggccuuauucaagcuuaccaugggccagaucaucaccuucuuccaggaggugccccacgucaucgaggaggugaugaacaucgugcugaucgcccucagccugcuggccauccucaaggggaucuacaacgucgcgaccugcggccuguucgggcugguguccuuccuccugcugugcggccgcagcugcuccacgaccuacaaggggguguacgagcuccagacccuggagcuggacauggccaaccucaacaugaccaugccgcugagcugcacgaagaacaacucccaccacuacaucauggucggcaacgagaccggccuggagcucacccugaccaacacgagcaucaucaaccacaaguucugcaaccuguccgacgcccacaagaagaaccucuacgaccacgcccugaugagcaucaucuccaccuuccaccugagcauccccaacuucaaccaguacgaggccauguccugcgacuucaacgggggcaagaucagcgugcaguacaaccucucccacaccuacgcgguggacgccgccaaccacugcgggaccaucgccaacggcguccugcagacguucaugcggauggcguggggcgggagcuacaucgcccuggacuccggcaaggggagcugggacugcaucaugaccuccuaccaguaccucgugauccagaacaccaccugggaggaccacugccaguucagccgccccucccccaucggcuaccuggggcugcucagccagcggacgcgcgacaucuacaucagccggcgccugcugggcaccuucaccuggacccucuccgacagcgagggcaacgagacgcccgggggcuacugccugacccgguggaugcugaucgaggccgagcucaagugcuucgggaacaccgccguggccaagugcaacgagaagcacgacgaggaguucugcgacaugcugcgccuguucgacuucaacaagcaggcgauccggcgccucaagaccgaggcccagauguccauccagcugaucaacaaggccgucaacgcccugaucaacgaccagcucaucaugaagaaccaccuccgggacaucaugggcauccccuacugcaacuacagcaaguacugguaccugaaccacacggugaccgggaagaccucccugccccgcugcuggcuggugagcaacggcuccuaccugaacgagacccacuucagcgacgacaucgagcagcaggccgacaacaugaucacggagcuccugcagaaggaguacaucgaccggcagggcaagaccccgcuggggcucgucgaccuguucguguucuccaccagcuucuaccugaucuccaucuuccugcaccucgugaagaucccgugaggacuaguaauaaggaaacuguaugaaugucugugggcaggaagugaagagauccuucuguaaagguuuuuggaauuaugucugcugaauaauaaacuuuuuugaaauaauaaaucugguagaaaaaugagaucucaaaggcucuuuucagagccaccaaaaaaaaaaaaaaaaaaaaaaaaaaaaaaaaaaaaaaaaaaaaaaaaaaaaaaaaaaaaaaaaaaaaaaaaaaaaaaaaaaaaaaaaaaaaaaaaaaaaa

SEQ ID NO: 42672 - RNA, 1695 nt, Artificial Sequence
  mRNA product Design b-4 (hSL-A100) comprising derived and/or modified sequence from LASV(Lassa virus/H.sapiens-wt/NGA/2016/ISTH_0009;Clade II)__AVO03571__GPCmut13 (opt1)
aggagagucccgcagucggcguccagcggcucugcuuguucgugugugugucguugcaggccuuauucaagcuuaccaugggccagaucaucaccuucuuccaggaggugccccacgucaucgaggaggugaugaacaucgugcugaucgcccucagccugcuggccauccucaaggggaucuacaacgucgcgaccugcggccugcuggggcucguguccuuccugcugcucugcggccgcagcugcuccacgaccuacaaggggguguacgagcugcagacccuggagcucgacauggccagccugaacaugaccaugccgcuguccugcacgaagaacaacagccaccacuacaucauggucggcaacgagaccggccucgagcugacccugaccaacacguccaucaucaaccacaaguucugcaaccucagcgacgcccacaagaagaaccuguacgaccacgcccugauguccaucaucagcaccuuccaccucuccauccccaacuucaaccaguacgaggccaugagcugcgacuucaacgggggccggaucuccgugcaguacaaccugagccacuccuacgcgguggacgccgccaaccacugcgggaccaucgccaacggcguccugcagaccuucaugcgcauggcguggggcgggagcuacaucgcccucgacuccggcaaggggagcugggacugcaucaugacguccuaccaguaccugaucauccagaacaccaccugggaggaccacugccaguucagccggcccagccccaucggcuaccuggggcuccugucccagcgcacccgggacaucuacaucagccgccggcugcucggcacguucaccuggacccuguccgacagcgagggcaacgagacccccgggggcuacugccugacgcgcuggaugcucaucgaggccgagcugaagugcuucgggaacaccgccguggccaagugcaacgagaagcacgacgaggaguucugcgacaugcugcggcuguucgacuucaacaagcaggcgauccgccggcugaagaccgaggcccagauguccauccagcugaucaacaaggccgugaacgcccucaucaacgaccagcugaucaugaagaaccaccuccgcgacaucaugggcaucccguacugcaacuacagcaaguacugguaccucaaccacaccgucacggggaagaccucccugccccggugcuggcuggugagcaacggcuccuaccucaacgagacccacuucagcgacgacaucgagcagcaggccgacaacaugaucaccgagcugcugcagaaggaguacaucgaccgccagggcaagacgccccucgggcugguggaccuguucgucuucuccaccagcuucuaccugaucuccaucuuccuccaccuggugaagaucccgugaggacuaguaauaaggaaacuguaugaaugucugugggcaggaagugaagagauccuucuguaaagguuuuuggaauuaugucugcugaauaauaaacuuuuuugaaauaauaaaucugguagaaaaaugagaucucaaaggcucuuuucagagccaccaaaaaaaaaaaaaaaaaaaaaaaaaaaaaaaaaaaaaaaaaaaaaaaaaaaaaaaaaaaaaaaaaaaaaaaaaaaaaaaaaaaaaaaaaaaaaaaaaaaaa

SEQ ID NO: 42673 - RNA, 1695 nt, Artificial Sequence
  mRNA product Design b-4 (hSL-A100) comprising derived and/or modified sequence from LASV(Lassa virus/H.sapiens-wt/NGA/2016/ISTH_0017;Clade II)__AVO03567__GPCmut13 (opt1)
aggagagucccgcagucggcguccagcggcucugcuuguucgugugugugucguugcaggccuuauucaagcuuaccaugggccagaucaucaccuucuuccaggaggugccccacgucaucgaggaggugaugaacaucgugcugaucgcccucagccugcuggccauccucaaggggaucuacaacgucgcgaccugcggccuguucgggcugguguccuuccuccugcugugcggccgcagcugcuccacgaccuacaaggggguguacgagcuccagacccuggagcuggacauggccagccucaacaugaccaugccgcuguccugcacgaagaacaacagccaccacuacaucauggucggcaacgagaccggccuggagcucacccugaccaacacguccaucaucaaccacaaguucugcaaccugagcgacgcccacaagaagaaccucuacgaccacgcccugauguccaucaucagcaccuuccaccuguccauccccaacuucaaccaguacgaggccaugagcugcgacuucaacgggggcaagaucuccgugcaguacaaccucagccacaccuacgcgaucgacgccgccaaccacugcgggaccaucgccaacggcgugcugcagacguucaugcggauggcguggggcggguccuacaucgcccuggacagcggcaagggguccugggacugcaucaugaccagcuaccaguaccucaucauccagaacaccaccugggaggaccacugccaguucucccgccccagccccaucggcuaccuggggcugcucagccagcggacgcgcgacaucuacaucucccggcgccugcugggcaccuucaccuggacccucagcgacuccgagggcaacgagacgcccgggggcuacugccugacccgguggaugcugaucgaggccgagcucaagugcuucgggaacaccgccgucgccaagugcaacgagaagcacgacgaggaguucugcgacaugcugcgccuguucgacuucaacaagcaggcgauccggcgccucaagaccgaggcccagaugagcauccagcugaucaacaaggccgugaacgcccugaucaacgaccagcucaucaugaagaaccaccuccgggacaucaugggcauccccuacugcaacuacuccaaguacugguaccugaaccacacggugaccgggaagaccagccugccccgcugcuggcuggucuccaacggcagcuaccugaacgagacccacuucuccgacgacaucgagcagcaggccgacaacaugaucacggagcuccugcagaaggaguacauggaccggcagggcaagaccccgcuggggcucguggaccuguucguguucagcaccuccuucuaccugaucagcaucuuccugcaccucguccgcaucccgugaggacuaguaauaaggaaacuguaugaaugucugugggcaggaagugaagagauccuucuguaaagguuuuuggaauuaugucugcugaauaauaaacuuuuuugaaauaauaaaucugguagaaaaaugagaucucaaaggcucuuuucagagccaccaaaaaaaaaaaaaaaaaaaaaaaaaaaaaaaaaaaaaaaaaaaaaaaaaaaaaaaaaaaaaaaaaaaaaaaaaaaaaaaaaaaaaaaaaaaaaaaaaaaaa

SEQ ID NO: 42674 - RNA, 1695 nt, Artificial Sequence
  mRNA product Design b-4 (hSL-A100) comprising derived and/or modified sequence from LASV(Lassa virus/H.sapiens-wt/NGA/2018/ISTH_0959;Clade II)__AVV65099__GPCmut13 (opt1)
aggagagucccgcagucggcguccagcggcucugcuuguucgugugugugucguugcaggccuuauucaagcuuaccaugggccagaucaucaccuucuuccaggaggugccccacgucaucgaggaggugaugaacaucgugcugaucgcccucagccugcuggccauccucaaggggaucuacaacgucgugaccugcggccuguucgggcugguguccuuccuccugcugugcggccgcagcugcuccacgaccuacaagggggucuacgagcuccagacccuggagcuggacauggcgagccucaacaugaccaugccgcuguccugcacgaagaacaacagccaccacuacaucauggugggcaacgagaccggccuggagcucacccugaccaacacguccaucaucaaccacaaguucugcaaccugagcgacgcccacaagaagaaccucuacgaccacgcccugauguccaucaucagcaccuuccaccuguccauccccaacuucaaccaguacgaggccaugagcugcgacuucaacgggggcaagaucuccgugcaguacaaccucagccacgccuacgcgaucgacgccgccaaccacugcgggaccaucgccaacggcguccugcagaccuucaugcggauggcguggggcggguccuacaucgcccuggacagcggcaagggguccugggacugcaucaugacgagcuaccaguaccucaucauccagaacaccaccugggaggaccacugccaguucucccgccccagccccaucggcuaccuggggcugcucagccagcggacccgcgacaucuacaucucccggcgccugcugggcacguucaccuggacccucagcgacuccgagggcaacgagacccccgggggcuacugccugacgcgguggaugcugaucgaggccgagcucaagugcuucgggaacaccgccguggccaagugcaacgagaagcacgacgaggaguucugcgacaugcugcgccuguucgacuucaacaagcaggcgauccggcgccucaagaccgaggcccagaugagcauccagcugaucaacaaggccgugaacgcccugaucaacgaccagcucaucaugaagaaccaccuccgggacaucaugggcaucccguacugcaacuacuccaaguacugguaccugaaccacaccgucacggggaagaccagccugccccgcugcuggcugguguccaacggcagcuaccugaacgagacccacuucuccgacgacaucgagcagcaggccgacaacaugaucaccgagcuccugcagaaggaguacaucgaccggcagggcaagacgccccuggggcucguggaccuguucgucuucagcaccuccuucuaccugaucagcaucuuccugcaccucgugaagaucccgugaggacuaguaauaaggaaacuguaugaaugucugugggcaggaagugaagagauccuucuguaaagguuuuuggaauuaugucugcugaauaauaaacuuuuuugaaauaauaaaucugguagaaaaaugagaucucaaaggcucuuuucagagccaccaaaaaaaaaaaaaaaaaaaaaaaaaaaaaaaaaaaaaaaaaaaaaaaaaaaaaaaaaaaaaaaaaaaaaaaaaaaaaaaaaaaaaaaaaaaaaaaaaaaaa

SEQ ID NO: 42675 - RNA, 1695 nt, Artificial Sequence
  mRNA product Design b-4 (hSL-A100) comprising derived and/or modified sequence from LASV(LASV003-NIG-2008;Clade II)__AIT17580__GPCmut13 (opt1)
aggagagucccgcagucggcguccagcggcucugcuuguucgugugugugucguugcaggccuuauucaagcuuaccaugggccagaucaucaccuucuuccaggaggugccccacgucaucgaggaggugaugaacaucgugcugaucgcccucagccugcuggccauccucaaggggaucuacaacgucgcgaccugcggccuguucgggcugguguccuuccuccugcugugcggccgcagcugcuccacgaccuacaaggggguguacgagcuccagacccuggagcuggacauggccagccucaacaugaccaugccgcuguccugcacgaagaacaacagccaccacuacaucauggucggcaacgagaccggccuggagcucacccugaccaacacguccaucaucaaccacaaguucugcaaccugagcgacgcccacaagaagaaccucuacgaccacgcccugauguccaucaucagcaccuuccaccuguccauccccaacuucaaccaguacgaggccaugagcugcgacuucaacgggggcaagaucuccgugcaguacaaccucagccacaccuacgcgguggacgccgccaaccacugcgggaccaucgccaacggcguccugcagacguucaugcggauggcguggggcggguccuacaucgcccuggacagcggcaagggguccugggacugcaucaugaccagcuaccaguaccucaucauccagaacaccaccugggaggaccacugccaguucucccgccccagccccaucggcuaccuggggcugcucagccagcggacgcgcgacaucuacaucucccggcgccugcugggcaccuucaccuggacccucagcgacuccgagagcaacgagacgccgggcggguacugccugacccgguggaugcugaucgaggccgagcucaagugcuucggcaacaccgccguggccaagugcaacgagaagcacgacgaggaguucugcgacaugcugcgccuguucgacuucaacaagcaggcgauccggcgccucaaggccgaggcccagauguccauccagcugaucaacaaggccgugaacgcccugaucaacgaccagcucaucaugaagaaccaccuccgggacaucauggggauccccuacugcaacuacagcaaguacugguaccugaaccacaccgucacgggccgcaccucccugccccggugcuggcuggugagcaacggguccuaccugaacgagacccacuucagcgacgacaucgagcagcaggcggacaacaugaucaccgagcuccugcagaaggaguacauggaccgccagggcaagacgccccugggccucguggaccuguucgucuucuccaccagcuucuaccugaucuccaucuuccugcaccucgugaagaucccgugaggacuaguaauaaggaaacuguaugaaugucugugggcaggaagugaagagauccuucuguaaagguuuuuggaauuaugucugcugaauaauaaacuuuuuugaaauaauaaaucugguagaaaaaugagaucucaaaggcucuuuucagagccaccaaaaaaaaaaaaaaaaaaaaaaaaaaaaaaaaaaaaaaaaaaaaaaaaaaaaaaaaaaaaaaaaaaaaaaaaaaaaaaaaaaaaaaaaaaaaaaaaaaaaa

SEQ ID NO: 42676 - RNA, 1695 nt, Artificial Sequence
  mRNA product Design b-4 (hSL-A100) comprising derived and/or modified sequence from LASV(LASV035-NIG-2009;Clade II)__AIT17588__GPCmut13 (opt1)
aggagagucccgcagucggcguccagcggcucugcuuguucgugugugugucguugcaggccuuauucaagcuuaccaugggccagaucaucaccuucuuccaggaggugccccacgucaucgaggaggugaugaacaucgugcugaucgcccucagccugcuggccauccucaaggggaucuacaacgucgcgaccugcggccuguucgggcugguguccuuccuccugcugugcggccgcagcugcuccacgaccuacaaggggguguacgagcuccagacccuggagcuggacauggccagccucaacaugaccaugccgcuguccugcacgaagaacaacagccaccacuacaucauggucggcaacgagaccggccuggagcucacccugaccaacacguccaucaucaaccacaaguucugcaaccugagcgacgcccacaagaagaaccucuacgaccacgcccugauguccaucaucagcaccuuccaccuguccauccccaacuucaaccaguacgaggccaugagcugcgacuucaacgggggcaagaucuccgugcaguacaaccucagccacgcguacgccguggacgccgccaaccacugcgggaccaucgcgaacggcguccugcagaccuucaugcggauggccuggggcggguccuacaucgcccuggacagcggcaagggguccugggacugcaucaugacgagcuaccaguaccucaucauccagaacaccaccugggaggaccacugccaguucucccgccccagccccaucggcuaccuggggcugcucagccagcggacccgcgacaucuacaucucccggcgccugcugggcacguucaccuggacccucagcgacuccgagggcaacgagacccccgggggcuacugccugacgcgguggaugcugaucgaggccgagcucaagugcuucgggaacaccgccguggcgaagugcaacgagaagcacgacgaggaguucugcgacaugcugcgccuguucgacuucaacaagcaggccauccggcgccucaaggccgaggcccagaugagcauccagcugaucaacaaggccgugaacgcgcugaucaacgaccagcucaucaugaagaaccaccuccgggacaucaugggcauccccuacugcaacuacuccaaguacugguaccugaaccacaccgucaccgggaagacgagccugccccgcugcuggcugguguccaacggcagcuaccugaacgagacccacuucuccgacgacaucgagcagcaggccgacaacaugaucaccgagcuccugcagaaggaguacaucgaccggcagggcaagaccccgcuggggcucguggaccuguucgucuucagcacguccuucuaccugaucagcaucuuccugcaccucgugaagaucccgugaggacuaguaauaaggaaacuguaugaaugucugugggcaggaagugaagagauccuucuguaaagguuuuuggaauuaugucugcugaauaauaaacuuuuuugaaauaauaaaucugguagaaaaaugagaucucaaaggcucuuuucagagccaccaaaaaaaaaaaaaaaaaaaaaaaaaaaaaaaaaaaaaaaaaaaaaaaaaaaaaaaaaaaaaaaaaaaaaaaaaaaaaaaaaaaaaaaaaaaaaaaaaaaaa

SEQ ID NO: 42677 - RNA, 1695 nt, Artificial Sequence
  mRNA product Design b-4 (hSL-A100) comprising derived and/or modified sequence from LASV(LASV1000-NIG-2009;Clade II)__AIT17782__GPCmut13 (opt1)
aggagagucccgcagucggcguccagcggcucugcuuguucgugugugugucguugcaggccuuauucaagcuuaccaugggccagaucaucaccuucuuccaggaggugccccacgucaucgaggaggugaugaacaucgugcugaucgcccucagccugcuggccauccucaaggggaucuacaacgucgcgaccugcggccuguucgggcugguguccuuccuccugcugugcggccgcagcugcuccacgaccuacaaggggguguacgagcuccagacccuggagcuggacauggccagccucaacaugaccaugccgcuguccugcacgaagaacaacagccaccacuacaucauggucggcaacgagaccggccuggagcucacccugaccaacacguccaucaucaaccacaaguucugcaaccugagcgacgcccacaagaagaaccucuacgaccacgcccugauguccaucaucagcaccuuccaccuguccauccccaacuucaaccaguacgaggccaugagcugcgacuucaacgggggcaagaucuccgugcaguacaaccucagccacaccuacgcgguggacgccgccaaccacugcgggaccaucgccaacggcguccugcagacguucaugcggauggcguggggcggguccuacaucgcccuggacagcggcaagggguccugggacugcaucaugaccagcuaccaguaccucaucauccagaacaccaccugggaggaccacugccaguucucccgccccagccccaucggcuaccuggggcugcucagccagcggacgcgcgacaucuacaucucccggcgccugcugggcaccuucaccuggacccucagcgacuccgagggcaacgagacgcccgggggcuacugccugacccgguggaugcugaucgaggccgagcucaagugcuucgggaacaccgccguggccaagugcaacgagaagcacgacgaggaguucugcgacaugcugcgccuguucgacuucaacaagcaggcgaucaagcggcucaagaccgaggcccagaugagcauccagcugaucaacaaggccgugaacgcccugaucaacgaccagcucaucaugaagaaccaccuccgcgacaucaugggcauccccuacugcaacuacuccaaguacugguaccugaaccacacggucaccgggaagaccagccugccccggugcuggcugguguccaacggcagcuaccugaacgagacccacuucuccgacgacaucgagcagcaggccgacaacaugaucacggagcuccugcagaaggaguacaucgaccgccagggcaagaccccgcuggggcucguggaccuguucgucuucagcaccuccuucuaccugaucagcaucuuccugcaccucgugaagaucccgugaggacuaguaauaaggaaacuguaugaaugucugugggcaggaagugaagagauccuucuguaaagguuuuuggaauuaugucugcugaauaauaaacuuuuuugaaauaauaaaucugguagaaaaaugagaucucaaaggcucuuuucagagccaccaaaaaaaaaaaaaaaaaaaaaaaaaaaaaaaaaaaaaaaaaaaaaaaaaaaaaaaaaaaaaaaaaaaaaaaaaaaaaaaaaaaaaaaaaaaaaaaaaaaaa

SEQ ID NO: 42678 - RNA, 1695 nt, Artificial Sequence
  mRNA product Design b-4 (hSL-A100) comprising derived and/or modified sequence from LASV(LASV221-NIG-2010;Clade II)__AIT17624__GPCmut13 (opt1)
aggagagucccgcagucggcguccagcggcucugcuuguucgugugugugucguugcaggccuuauucaagcuuaccaugggccagaucaucaccuucuuccaggaggugccccacgucaucgaggaggugaugaacaucgugcugaucgcccucagccugcuggccauccucaaggggaucuacaacgucgcgaccugcggccuguucgggcugguguccuuccuccugcugugcggccgcagcugcuccacgaccuacaaggggguguacgagcuccagacccuggagcuggacauggccagccucaacaugaccaugccgcuguccugcacgaagaacaacagccaccacuacaucauggucggcaacgagaccggccuggagcucacccugaccaacacguccaucaucaaccacaaguucugcaaccugagcgacgcccacaagaagaaccucuacgaccacgcccugauguccaucaucagcaccuuccaccuguccauccccaacuucaaccaguacgaggccaugagcugcgacuucaacgggggcaagaucuccgugcaguacaaccucagccacaccuacgcgaucgacgccgccaaccacugcgggaccaucgccaacggcgugcugcagacguucaugcggauggcguggggcggguccuacaucgcccuggacagcggcaagggguccugggacugcaucaugaccagcuaccaguaccucaucauccagaacaccaccugggaggaccacugccaguucucccgccccagccccaucggcuaccuggggcugcucagccagcggacgcgcgacaucuacaucucccggcgccugcugggcaccuucaccuggacccucagcgacuccgagggcaacgagacgcccgggggcuacugccugacccgguggaugcugaucgaggccgagcucaagugcuucgggaacaccgccgucgccaagugcaacgagaagcacgacgaggaguucugcgacaugcugcgccuguucgacuucaacaagcaggcgauccggcgccucaagaccgaggcccagaugagcauccagcugaucaacaaggccgugaacgcccugaucaacgaccagcucaucaugaagaaccaccuccgggacaucaugggcauccccuacugcaacuacuccaaguacugguaccugaaccacacggugaccgggaagaccagccugccccgcugcuggcuggucuccaacggcagcuaccugaacgagacccacuucuccgacgacaucgagcagcaggccgacaacaugaucacggagaugcuccagaaggaguacauggaccggcagggcaagaccccgcuggggcugguggaccucuucguguucagcaccuccuucuaccugaucagcaucuuccugcaccuggucaagaucccgugaggacuaguaauaaggaaacuguaugaaugucugugggcaggaagugaagagauccuucuguaaagguuuuuggaauuaugucugcugaauaauaaacuuuuuugaaauaauaaaucugguagaaaaaugagaucucaaaggcucuuuucagagccaccaaaaaaaaaaaaaaaaaaaaaaaaaaaaaaaaaaaaaaaaaaaaaaaaaaaaaaaaaaaaaaaaaaaaaaaaaaaaaaaaaaaaaaaaaaaaaaaaaaaaa

SEQ ID NO: 42679 - RNA, 1695 nt, Artificial Sequence
  mRNA product Design b-4 (hSL-A100) comprising derived and/or modified sequence from LASV(LASV237-NIG-2010;Clade II)__AIT17638__GPCmut13 (opt1)
aggagagucccgcagucggcguccagcggcucugcuuguucgugugugugucguugcaggccuuauucaagcuuaccaugggccagaucaucaccuucuuccaggaggugccccacgucaucgaggaggugaugaacaucgugcugaucgcccucagccugcuggccauccucaaggggaucuacaacgucgcgaccugcggccuguucgggcugguguccuuccuccugcugugcggccgcagcugcuccacgaccuacaaggggguguacgagcuccagacccuggagcuggacauggccagccucaacaugaccaugccgcuguccugcacgaagaacaacagccaccacuacaucauggucggcaacgagaccggccuggagcucacccugaccaacacguccaucaucaaccacaaguucugcaaccugagcgacgcccacaagaaggaccucuacgaccacgcccugauguccaucaucagcaccuuccaccuguccauccccaacuucaaccaguacgaggccaugagcugcgacuucaacgggggcaagaucuccgugcaguacaaccucagccacaccuacgcgguggacgccgccaaccacugcgggaccaucgccaacggcguccugcagacguucaugcggauggcguggggcggguccuacaucgcccuggacagcggcaagggguccugggacugcaucaugaccagcuaccaguaccucaucauccagaacaccaccugggaggaccacugccaguucucccgccccagccccaucggcuaccuggggcugcucagccagcggacgcgcgacaucuacaucucccggcgccugcugggcaccuucaccuggacccucagcgacuccgagggcaacgagacgcccgggggcuacugccugacccgguggaugcugaucgaggccgagcucaagugcuucgggaacaccgccguggccaagugcaacgagaagcacgacgaggaguucugcgacaugcugcgccuguucgacuucaacaagcaggcgauccggcgccucaagaccgaggcccagaugagcauccagcugaucaacaaggccgugaacgcccugaucaacgaccagcucaucaugaagaaccaccuccgggacaucaugggcauccccuacugcaacuacuccaaguacugguaccugaaccacacggucaccgggaagaccagccugccccgcugcuggcugguguccaacggcagcuaccugaacgagacccacuucuccgacgacaucgagcagcaggccgacaacaugaucacggagcuccugcagaaggaguacauggaccggcagggcaagaccccgcuggggcucguggaccuguucgucuucagcaccuccuucuaccugaucagcaucuuccugcaccucaucaagaucccgugaggacuaguaauaaggaaacuguaugaaugucugugggcaggaagugaagagauccuucuguaaagguuuuuggaauuaugucugcugaauaauaaacuuuuuugaaauaauaaaucugguagaaaaaugagaucucaaaggcucuuuucagagccaccaaaaaaaaaaaaaaaaaaaaaaaaaaaaaaaaaaaaaaaaaaaaaaaaaaaaaaaaaaaaaaaaaaaaaaaaaaaaaaaaaaaaaaaaaaaaaaaaaaaaa

SEQ ID NO: 42680 - RNA, 1695 nt, Artificial Sequence
  mRNA product Design b-4 (hSL-A100) comprising derived and/or modified sequence from LASV(LASV253-NIG-2011;Clade II)__AIT17670__GPCmut13 (opt1)
aggagagucccgcagucggcguccagcggcucugcuuguucgugugugugucguugcaggccuuauucaagcuuaccaugggccagaucaucaccuucuuccaggaggugccccacgucaucgaggaggugaugaacaucgugcugaucgcccucagccugcuggccauccucaaggggaucuacaacgucgcgaccugcggccuguucgggcugguguccuuccuccugcugugcggccgcagcugcuccacgaccuacaaggggguguacgagcuccagacccuggagcuggacauggccagccucaacaugaccaugccgcuguccugcacgaagaacaacagccaccacuacaucauggucggcaacgagaccggccuggagcucacccugaccaacacguccaucaucaaccacaaguucugcaaccugagcgacgcccacaagaagaaccucuacgaccacgcccugauguccaucaucagcaccuuccaccuguccauccccaacuucaaccaguacgaggccaugagcugcgacuucaacgggggcaagaucuccgugcaguacaaccucagccacaccuacgcgguggacgccgccaaccacugcgggaccaucgccaacggcguccugcagacguucaugcggauggcguggggcggguccuacaucgcccuggacagcggcaagggguccugggacugcaucaugaccagcuaccaguaccucaucauccagaacaccaccugggaggaccacugccaguucucccgccccagccccaucggcuaccuggggcugcucagccagcggacgcgcgacaucuacaucucccggcgccugcugggcaccuucaccuggacccucagcgacuccgagggcaacgagacgcccgggggcuacugccugacccgguggaugcugaucgaggccgagcucaagugcuucgggaacaccgccguggccaagugcaacgagaagcacgacgaggaguucugcgacaugcugcgccuguucgacuucaacaagcaggcgauccggcgccucaaggccgaggcccagaugagcauccagcugaucaacaaggccgugaacgcccugaucaacgaccagcucaucaugaagaaccaccuccgggacaucaugggcaucccguacugcaacuacuccaaguacugguaccugaaccacaccgucacggggcgcaccagccugccccggugcuggcugguguccaacggcagcuaccugaacgagacccacuucuccgacgacaucgagcagcaggcggacaacaugaucaccgagcuccugcagaaggaguacaucgaccgccagggcaagacgccccuggggcucguggaccuguucgucuucagcaccuccuucuaccugaucagcaucuuccugcaccucgugaagaucccgugaggacuaguaauaaggaaacuguaugaaugucugugggcaggaagugaagagauccuucuguaaagguuuuuggaauuaugucugcugaauaauaaacuuuuuugaaauaauaaaucugguagaaaaaugagaucucaaaggcucuuuucagagccaccaaaaaaaaaaaaaaaaaaaaaaaaaaaaaaaaaaaaaaaaaaaaaaaaaaaaaaaaaaaaaaaaaaaaaaaaaaaaaaaaaaaaaaaaaaaaaaaaaaaaa

SEQ ID NO: 42681 - RNA, 1695 nt, Artificial Sequence
  mRNA product Design b-4 (hSL-A100) comprising derived and/or modified sequence from LASV(LASV254-NIG-2011;Clade II)__AIT17674__GPCmut13 (opt1)
aggagagucccgcagucggcguccagcggcucugcuuguucgugugugugucguugcaggccuuauucaagcuuaccaugggccagaucaucaccuucuuccaggaggugccccacgucaucgaggaggugaugaacaucgugcugaucgcccucagccugcuggccauccucaaggggaucuacaacgucgcgaccugcggccuguucgggcugguguccuuccuccugcugugcggccgcagcugcuccacgaccuacaaggggguguacgagcuccagacccuggagcuggacaugaccaaccucaacaugacgaugccgcugagcugcaccaagaacaacucccaccacuacaucauggucggcaacgagaccggccuggagcucacccugacgaacaccagcaucaucaaccacaaguucugcaaccuguccgacgcccacaagaagaaccucuacaaccacgcccugaugagcaucaucuccaccuuccaccugagcauccccaacuucaaccaguacgaggccauguccugcgacuucaacgggggcaagaucagcgugcaguacaaccucucccacagcuacgccguggacgcggccaaccacugcgggaccaucgccaacggcguccugcagacguucaugcggauggccuggggcggguccuacaucgcgcuggacagcggcaaggggaacugggacugcaucaugaccuccuaccaguaccucaucauccagaacaccaccugggaggaccacugccaguucagccgccccucccccaucggcuaccuggggcugcucagccagcggacgcgcgacaucuacaucagccggcgccugcugggcaccuucaccuggacccucuccgacagcgagggcaacgagacgcccgggggcuacugccugacccgguggaugcugaucgaggccgagcucaagugcuucgggaacaccgccguggccaagugcaacgagaagcacgacgaggaguucugcgacaugcugcgccuguucgacuucaacaagcaggccauccggcgccucaagaccgaggcgcaggccaacauccagcugaucaacaaggccgugaacgcccugaucaacgaccagcucaucaugaagaaccaccuccgggacaucaugggcauccccuacugcaacuacuccaaguacugguaccugaaccacacggucaccgggaagaccagccugccccgcugcuggcugguguccaacggcagcuaccugaacgagacccacuucuccgacgacaucgagcagcaggccgacaacaugaucacggagcuccugcagaaggaguacauggaccggcagggcaagaccccgcuggggcucguggaccuguucgucuucagcaccuccuucuaccugaucagcaucuuccugcaccucgugaagaucccgugaggacuaguaauaaggaaacuguaugaaugucugugggcaggaagugaagagauccuucuguaaagguuuuuggaauuaugucugcugaauaauaaacuuuuuugaaauaauaaaucugguagaaaaaugagaucucaaaggcucuuuucagagccaccaaaaaaaaaaaaaaaaaaaaaaaaaaaaaaaaaaaaaaaaaaaaaaaaaaaaaaaaaaaaaaaaaaaaaaaaaaaaaaaaaaaaaaaaaaaaaaaaaaaaa

SEQ ID NO: 42682 - RNA, 1695 nt, Artificial Sequence
  mRNA product Design b-4 (hSL-A100) comprising derived and/or modified sequence from LASV(Nig08-A19;Clade III)__ADU56618__GPCmut13 (opt1)
aggagagucccgcagucggcguccagcggcucugcuuguucgugugugugucguugcaggccuuauucaagcuuaccaugggccagaucgugaccuucuuccaggaggucccccacgugaucgaggaggugaugaacaucguccugaucgcccucagcauccuggccauccugaaggggcucuacaacaucgcgaccugcggccugaucgggcuggugacguuccuccugcuguccggccgcagcugcuccaugaccuacaaggggguguacgagcuccagacccuggagcugaacaugaacacccucaacaugacgaugccgcugagcugcaccaagaacaacucccaccacuacaucauggucggcaacgagaccggccuggagcucacccugacgaacaccagccugcuccaccacaaguucugcaaccuguccgacgcccacaagaagaaccuguacgaccacacccucaugagcaucaucuccaccuuccaccugagcauccccaacuucaaccaguacgaggccauguccugcgacuucaacgggggcaagaucacggugcaguacaaccugagccacuccuacgccaucgacgccgcgaaccacugcgggaccguggccaacggcguccuccagaccuucaugcggauggccuggggcgggagcuacaucgcccuggacuccggccgcgggaagugggacugcaucaugaccagcuaccaguaccugaucauccagaacacgaccugggaggaccacugccaguucucccggcccagccccaucggcuaccucgggcugcugucccagcgcacccgggacaucuacaucagccgccggcuccugggcaccuucacguggacccugagcgacuccgagggcaacgagacccccgggggcuacugccucacccgcuggaugcugaucgaggcggagcugaagugcuucgggaacacggccguggccaagugcaacgagaagcacgacgaggaguucugcgacaugcuccggcuguucgacuucaacaagcaggccauccgccggcugaaggccgaggcgcagaugagcauccagcucaucaacaaggccgugaacgcccugaucaacgaccagcugaucaugaagaaccaccuccgcgacaucaugggcauccccuacugcaacuacuccaaguacugguaccugaaccacaccagcaccgggcggaccucccugccccgcugcuggcucgucagcaacggcuccuaccugaacgagacgcacuucagcgacgacaucgagcagcaggccgacaacaugaucaccgagaugcugcagaaggaguaccucgaccggcagggcaagaccccgcuggggcugguggaccuguucguguucuccaccagcuucuaccucaucuccaucuuccugcaccuggucaagaucccgugaggacuaguaauaaggaaacuguaugaaugucugugggcaggaagugaagagauccuucuguaaagguuuuuggaauuaugucugcugaauaauaaacuuuuuugaaauaauaaaucugguagaaaaaugagaucucaaaggcucuuuucagagccaccaaaaaaaaaaaaaaaaaaaaaaaaaaaaaaaaaaaaaaaaaaaaaaaaaaaaaaaaaaaaaaaaaaaaaaaaaaaaaaaaaaaaaaaaaaaaaaaaaaaaa

SEQ ID NO: 42683 - RNA, 1698 nt, Artificial Sequence
  mRNA product Design b-4 (hSL-A100) comprising derived and/or modified sequence from LASV(G1180-SLE-2010;Clade IV)__AIT17168__GPCmut13 (opt1)
aggagagucccgcagucggcguccagcggcucugcuuguucgugugugugucguugcaggccuuauucaagcuuaccaugggccagaucgugaccuucuuccaggaggucccccacgugaucgaggaggugaugaacaucguccugaucgcccucagcauccuggccgugcugaaggggcucuacaacuucgcgaccugcggccugguggggcugcucaccuuccugcugcucugcggccgcuccugcaccgccagccgguacaagggggucuacgagcugcagacccuggagcucaacauggagacccugaacaugacgaugccgcuguccugcaccaagaacaacagccaccacuacaucauggugggcaacgagaccggccucgagcugacccugacgaacaccuccaucaucaaccacaaguucugcaaccucagcgacgcccacaagaagaaccuguacgaccacgcccugauguccaucaucagcaccuuccaccucuccauccccaacuucaaccaguacgaggccaugagcugcgacuucaacgggggcaagaucuccgugcaguacaaccugagccacuccuacgcgggggacgccgccaaccacugcggcaccgucgccaacggggugcugcagacguucaugcgcauggcguggggcggcagcuacaucgcccucgacuccgggcacggcagcugggacugcaucaugaccuccuaccaguaccugaucauccagaacaccaccugggaggaccacugccaguucagccggcccucccccaucggguaccugggccuccugagccagcgcacgcgggacaucuacaucagccgccggcugcucggcaccuucaccuggacccuguccgacagcgaggggaaggacacgccgggcggguacugccugacccgcuggaugcucaucgaggccgagcugaagugcuucggcaacaccgccguggccaagugcaacgagaagcacgacgaggaguucugcgacaugcugcggcuguucgacuucaacaagcaggcgauccagcgccugaaggccgaggcccagauguccauccagcugaucaacaaggccgucaacgcccucaucaacgaccagcugaucaugaagaaccaccuccgggacaucauggggauccccuacugcaacuacagcaaguacugguaccucaaccacaccacgaccggcaagaccucccugcccaagugcuggcuggugagcaacggcuccuaccucaacgagacccacuucagcgacgacaucgagcagcaggcggacaacaugaucacggagaugcugcagaaggaguacauggagcgccaggggaagacgccccugggccucguggaccuguucgucuucuccaccagcuucuaccugaucuccaucuuccugcaccucgugaagaucccgugaggacuaguaauaaggaaacuguaugaaugucugugggcaggaagugaagagauccuucuguaaagguuuuuggaauuaugucugcugaauaauaaacuuuuuugaaauaauaaaucugguagaaaaaugagaucucaaaggcucuuuucagagccaccaaaaaaaaaaaaaaaaaaaaaaaaaaaaaaaaaaaaaaaaaaaaaaaaaaaaaaaaaaaaaaaaaaaaaaaaaaaaaaaaaaaaaaaaaaaaaaaaaaaaa

SEQ ID NO: 42684 - RNA, 1698 nt, Artificial Sequence
  mRNA product Design b-4 (hSL-A100) comprising derived and/or modified sequence from LASV(G1442-SLE-2011;Clade IV)__AIT17180__GPCmut13 (opt1)
aggagagucccgcagucggcguccagcggcucugcuuguucgugugugugucguugcaggccuuauucaagcuuaccaugggccagaucgugaccuucuuccaggaggucccccacgugaucgaggaggugaugaacaucguccugaucgcccucagcauccuggccgugcugaaggggcucuacaacguggcgaccugcggccugaucgggcuggucacguuccuccugcugugcggccgcuccugcaccaccacccucuacaaggggguguacgagcugcagacgcuggagcucaacauggagacccugaacaugaccaugccgcugagcugcaccaagaacaacucccaccacuacauccgggugggcaacgagacgggccucgagcugacccugaccaacaccagcaucaucaaccacaaguucugcaaccucuccgacgcccacaagaagaaccuguacgaccacgcccugaugagcaucaucuccacguuccaccucagcauccccaacuucaaccaguacgaggccauguccugcgacuucaacgggggcaagaucagcguccaguacaaccugucccacagcuacgccggggacgcggccaaccacugcggcaccguggccaacggggugcugcagaccuucaugcgcauggccuggggcggcuccuacaucgcgcucgacagcgggcggggcaacugggacugcaucaugaccuccuaccaguaccugaucauccagaacacgaccugggacgaccacugccaguucagccgccccucccccaucggguaccugggccuccugagccagcggacccgcgacgucuacaucucccggcgccugcucggcaccuucacguggacccugagcgacagcgaggggaaggacaccccgggcggguacugccugacccgguggaugcucaucgaggccgagcugaagugcuucggcaacacggccguggccaagugcaacgagaagcacgacgaggaguucugcgacaugcugcgccucuucgacuucaacaagcaggccauccagcggcugaaggcggaggcccagauguccauccagcugaucaacaaggccgugaacgcccucaucaacgaccagcugaucaugaagaaccaccuccgcgacaucauggggauccccuacugcaacuacagcaaguacugguaccugaacaacaccgccaccggcaagaccucccugcccaagugcuggcugaucagcaacggcuccuaccucaacgagacgcacuucagcgacgacaucgagcaggaggcggacaacaugaucaccgagaugcugcagaaggaguacauggagcggcaggggaagacgccccugggccucgucgaccuguucguguucuccaccagcuucuaccugaucuccaucuuccugcaccucgugaagaucccgugaggacuaguaauaaggaaacuguaugaaugucugugggcaggaagugaagagauccuucuguaaagguuuuuggaauuaugucugcugaauaauaaacuuuuuugaaauaauaaaucugguagaaaaaugagaucucaaaggcucuuuucagagccaccaaaaaaaaaaaaaaaaaaaaaaaaaaaaaaaaaaaaaaaaaaaaaaaaaaaaaaaaaaaaaaaaaaaaaaaaaaaaaaaaaaaaaaaaaaaaaaaaaaaaa

SEQ ID NO: 42685 - RNA, 1698 nt, Artificial Sequence
  mRNA product Design b-4 (hSL-A100) comprising derived and/or modified sequence from LASV(G3010-SLE-2013;Clade IV)__AIT17344__GPCmut13 (opt1)
aggagagucccgcagucggcguccagcggcucugcuuguucgugugugugucguugcaggccuuauucaagcuuaccaugggccagaucgugaccuucuuccaggaggucccccacgugaucgaggaggugaugaacaucguccugaucgcccucagcauccuggccgugcugaaggggcucuacaacuucgcgaccugcggccugguggggcuggucacguuccuccugcugugcggccgcuccugcaccaccagccucuacaaggggguguacgagcugcagacccuggagcucaacauggagacgcugaacaugaccaugccgcuguccugcaccaagaacaacagccaccacuacaucauggugggcaacgagaccggccucgagcugacgcugaccaacaccuccaucaucaaccacaaguucugcaaccucagcgacgcccacaagaagaaccuguacaaccacgcccugauguccaucaucagcaccuuccaccucuccauccccaacuucaaccaguacgaggccaugagcugcgacuucaacgggggcaagaucuccguccaguacaaccugagccacuccuacgccggggacgcggccagccacugcggcacgguggccaacggggugcugcagaccuucaugcggauggccuggggcggcuccuacaucgcgcucgacagcggguacggcaagugggacugcaucaugaccuccuaccaguaccugaucauccagaacaccacgugggaggaccacugccaguucagccgccccucccccaucggguaccugggccuccugagccagcggacccgcgacaucuacaucagccggcgccugcucggcaccuucaccuggacgcuguccgacagcgaggggaaggacaccccgggcggguacugccugacccgguggaugcucaucgaggccgagcugaagugcuucggcaacaccgccgucgccaagugcaacgagaagcacgacgaggaguucugcgacaugcugcgccucuucgacuucaacaagcaggccauccagcggcugaagacggaggcgcagauguccauccagcugaucaacaaggccgugaacgcccucaucaacgaccagcugaucaugaagaaccaccuccgcgacaucauggggauccccuacugcaacuacagcaaguacugguaccugaaccacaccaccaccggcaagacgucccugcccaagugcuggcuggugagcaacggcuccuaccucaacgagacccacuucagcgacgacaucgagcagcaggccgacaacaugaucaccgagaugcugcagaaggaguacauggagcggcaggggaagacgccccugggccucgucgaccuguucguguucuccaccagcuucuaccugaucuccaucuuccugcaccucgugaagaucccgugaggacuaguaauaaggaaacuguaugaaugucugugggcaggaagugaagagauccuucuguaaagguuuuuggaauuaugucugcugaauaauaaacuuuuuugaaauaauaaaucugguagaaaaaugagaucucaaaggcucuuuucagagccaccaaaaaaaaaaaaaaaaaaaaaaaaaaaaaaaaaaaaaaaaaaaaaaaaaaaaaaaaaaaaaaaaaaaaaaaaaaaaaaaaaaaaaaaaaaaaaaaaaaaaa

SEQ ID NO: 42686 - RNA, 1698 nt, Artificial Sequence
  mRNA product Design b-4 (hSL-A100) comprising derived and/or modified sequence from LASV(G502-SLE-2009;Clade IV)__AIT17126__GPCmut13 (opt1)
aggagagucccgcagucggcguccagcggcucugcuuguucgugugugugucguugcaggccuuauucaagcuuaccaugggccagaucgugaccuucuuccaggaggucccccacgugaucgaggaggugaugaacaucguccugaucgcccucagcauccuggccgugcugaaggggcucuacaacuucgcgaccugcggccugguggggcugcucacguuccugcugcucugcggccgcuccugcaccaccgggcuguacaagggcgucuacgagcugcagacccucgagcugaacauggagacgcugaacaugaccaugccgcucagcugcaccaagaacaacucccaccacuacaucauggugggcaacgagaccgggcuggagcugacgcucaccaacaccagcaucaucaaccacaaguucugcaaccuguccgacgcccacaagaagaaccuguacgaccacgcccucaugagcaucaucuccaccuuccaccugagcauccccaacuucaaccaguacgaggccauguccugcgacuucaacggcgggaagaucagcgugcaguacaaccugucccacagcuacgccggcgacgcggccgaccacugcgggacggucgccaacggcgugcuccagaccuucaugcggauggccuggggcggguccuacaucgcgcuggacagcggccgcgggcggugggacugcaucaugaccuccuaccaguaccugaucauccagaacaccacgugggaggaccacugccaguucagccgccccucccccaucggcuaccucggccugcugagccagcggacccgcgacaucuacaucucccggcgccuccuggggaccuucaccuggacgcugagcgacagcgagggcaaggacacccccgggggcuacugccucacccgguggaugcugaucgaggccgagcugaagugcuucgggaacaccgccguggccaagugcaacgagaagcacgacgaggaguucugcgacaugcuccgccuguucgacuucaacaagcaggccauccagcggcugaaggcggaggcccagauguccauccagcucaucaacaaggccgucaacgcccugaucaacgaccagcuggugaugaagaaccaccuccgcgacaucaugggcauccccuacugcaacuacagccgguacugguaccugaaccacacgaccaccggccgcaccucccugcccaagugcuggcucgugagcaacggguccuaccugaacgagacgcacuucagcgacgacaucgagcagcaggccgacaacaugaucaccgagaugcugcagaaggaguacauggagcggcagggcaagaccccgcucgggcuggucgaccuguucguguucuccaccagcuucuaccugaucuccaucuuccuccaccuggugaagaucccgugaggacuaguaauaaggaaacuguaugaaugucugugggcaggaagugaagagauccuucuguaaagguuuuuggaauuaugucugcugaauaauaaacuuuuuugaaauaauaaaucugguagaaaaaugagaucucaaaggcucuuuucagagccaccaaaaaaaaaaaaaaaaaaaaaaaaaaaaaaaaaaaaaaaaaaaaaaaaaaaaaaaaaaaaaaaaaaaaaaaaaaaaaaaaaaaaaaaaaaaaaaaaaaaaa

SEQ ID NO: 42687 - RNA, 1698 nt, Artificial Sequence
  mRNA product Design b-4 (hSL-A100) comprising derived and/or modified sequence from LASV(G733-SLE-2010;Clade IV)__AIT17154__GPCmut13 (opt1)
aggagagucccgcagucggcguccagcggcucugcuuguucgugugugugucguugcaggccuuauucaagcuuaccaugggccagaucgugaccuucuuccaggaggucccccacgugaucgaggaggugaugaacaucguccugaucgcccucagcauccuggccgugcugaaggggcucuacaacuucgcgaccugcggcaucguggggcuggucuccuuccugcuccugugcggccgcagcugcacgaccucccuguacaaggggguguacgagcuccagacccuggagcugaacauggagacccucaacaugacgaugccgcugagcugcaccaagaacaacucccaccacuacaucauggugggcaacgagaccggccuggagcucacccugacgaacaccagcaucaucaaccacaaguucugcaaccuguccgacgcccacaagaagaaccucuacgaccacgcccugaugagcaucaucuccaccuuccaccugagcauccccaacuucaaccaguacgaggccauguccugcgacuucaacgggggcaagaucagcguccaguacaaccucucccacagcuacgccggggacgcggccaaccacugcggcaccaucgccaacggggugcugcagacguucaugcggauggccuggggcggcuccuacaucgcgcuggacagcgggcgcgaccggugggacugcaucaugaccuccuaccaguaccucaucauccagaacaccaccugggaggaccacugccaguucagccgccccucccccaucggcuaccuggggcugcucagccagcggacgcgcgacaucuacaucagccggcgccugcugggcaccuucaccuggacccucuccgacagcgagggcaaggacacgcccgggggcuacugccugacccgguggaugcugaucgaggccgagcucaagugcuucgggaacaccgccguggccaagugcaacgagaagcacgacgaggaguucugcgacaugcugcgccuguucgacuucaacaagcaggccauccagcggcucaaggcggaggcccagauguccauccagcugaucaacaaggccgucaacgcccugaucaacgaccagcucaucaugaagaaccaccuccgcgacaucaugggcauccccuacugcaacuacagcaaguacugguaccugaaccacaccacgaccgggaagaccucccugcccaagugcuggcuggugagcaacggcuccuaccugaacgagacccacuucagcgacgacaucgagcagcaggccgacaacaugaucacggagaugcuccagaaggaguacauggagcggcagggcaagaccccgcuggggcugguggaccucuucgucuucuccaccagcuucuaccugaucuccaucuuccugcaccuggugaagaucccgugaggacuaguaauaaggaaacuguaugaaugucugugggcaggaagugaagagauccuucuguaaagguuuuuggaauuaugucugcugaauaauaaacuuuuuugaaauaauaaaucugguagaaaaaugagaucucaaaggcucuuuucagagccaccaaaaaaaaaaaaaaaaaaaaaaaaaaaaaaaaaaaaaaaaaaaaaaaaaaaaaaaaaaaaaaaaaaaaaaaaaaaaaaaaaaaaaaaaaaaaaaaaaaaaa

SEQ ID NO: 42688 - RNA, 1698 nt, Artificial Sequence
  mRNA product Design b-4 (hSL-A100) comprising derived and/or modified sequence from MOPV/LASV reassortant(IGS-1;Clade IV)__AFY05576__GPCmut13 (opt1)
aggagagucccgcagucggcguccagcggcucugcuuguucgugugugugucguugcaggccuuauucaagcuuaccaugggccagaucgugaccuucuuccaggaggucccccacgugaucgaggaggugaugaacaucguccugaucgcccucagcgugcuggccgugcugaaggggcucuacaacuucgcgaccugcggccuggucgggcuggugacguuccuccugcugugcggccgcuccugcaccaccagccucuacaaggggguguacgagcugcagacccuggagcucaacauggagacgcugaacaugaccaugccgcuguccugcaccaagaacaacagccaccacuacaucauggucggcaacgagaccggccucgagcugacgcugaccaacaccuccaucaucaaccacaaguucugcaaccucagcgacgcccacaagaagaaccuguacgaccacgcccugauguccaucaucagcaccuuccaccucuccauccccaacuucaaccaguacgaggccaugagcugcgacuucaacgggggcaagaucuccgugcaguacaaccugagccacuccuacgccggggacgcggccaaccacugcggcacgguggccaacgggguccugcagaccuucaugcggauggccuggggcggcagcuacaucgcgcucgacuccgggcgcggcaacugggacugcaucaugaccagcuaccaguaccugaucauccagaacaccacgugggaggaccacugccaguucucccggcccagccccaucggguaccugggccuccugucccagcgcacccgggacaucuacaucagccgccggcugcucggcaccuucaccuggacgcugagcgacuccgagggggaggacaccccgggcggguacugccugacccgcuggaugcucaucgaggccgagcugaagugcuucggcaacaccgccguggccaagugcaacgagaagcacgacgaggaguucugcgacaugcugcggcuguucgacuucaacaagcaggccauccagcgccugaaggcggaggcccagaugagcauccagcugaucaacaaggccgugaacgcccucaucaacgaccagcugaucaugaagaaccaccuccgggacaucauggggauccccuacugcaacuacuccaaguacugguaccucaaccacacgaccaccggccgcaccagccugcccaagugcuggcuggucuccaacggcagcuaccucaacgagacgcacuucuccgacgacaucgagcagcaggccgacaacaugaucaccgagaugcugcagaaggaguacauggagcggcaggggaagacgccccugggccucguggaccuguucguguucagcaccuccuucuaccugaucagcaucuuccugcaccucgucaagaucccgugaggacuaguaauaaggaaacuguaugaaugucugugggcaggaagugaagagauccuucuguaaagguuuuuggaauuaugucugcugaauaauaaacuuuuuugaaauaauaaaucugguagaaaaaugagaucucaaaggcucuuuucagagccaccaaaaaaaaaaaaaaaaaaaaaaaaaaaaaaaaaaaaaaaaaaaaaaaaaaaaaaaaaaaaaaaaaaaaaaaaaaaaaaaaaaaaaaaaaaaaaaaaaaaaa

SEQ ID NO: 42689 - RNA, 1698 nt, Artificial Sequence
  mRNA product Design b-4 (hSL-A100) comprising derived and/or modified sequence from LASV(LM765-SLE-2012;Clade IV)__AIT17814__GPCmut13 (opt1)
aggagagucccgcagucggcguccagcggcucugcuuguucgugugugugucguugcaggccuuauucaagcuuaccaugggccagaucgugaccuucuuccaggaggucccccacgugaucgaggaggugaugaacaucguccugaucgcccucagcauccuggccgugcugaaggggcucuacaacuucgcgaccugcggccugguggggcuggucacguuccuccugcugugcggccgcuccugcaccaccagccucuacaaggggguguacgagcugcagacccuggagcucaacauggagacgcugaacaugaccaugccgcuguccugcaccaagaacaacagccaccacuacaucauggugggcaacgagaccggccucgagcugacgcugaccaacaccuccaucaucgaccacaaguucugcaaccucagcgacgcccaccggaagaaccuguacgaccacgcccugauguccaucaucagcaccuuccaccucuccauccccaacuucaaccaguacgaggccaugagcugcgacuucaacgggggcaagaucuccguccaguacaaccugagccacuccuacgccaaggacgcggccgaccacugcgggacgguggccaacggcgugcugcagaccuucaugcgcauggccuggggcgggagcuacaucgcgcucgacuccggccgggggcgcugggacugcaucaugaccagcuaccaguaccugaucauccagaacaccacgugggaggaccacugccaguucucccggcccagccccaucggcuaccuggggcuccugucccagcgcacccgggacaucuacaucagccgccggcugcucggcaccuucaccuggacgcugagcgacuccgagggcaaggacacccccgggggcuacugccugacccgcuggaugcucaucgaggccgagcugaagugcuucgggaacaccgccgucgccaagugcaacgagaagcacgacgaggaguucugcgacaugcugcggcuguucgacuucaacaagcaggccauccagcgccugaaggcggaggcccagaugagcauccagcugaucaacaaggccgugaacgcccucaucaacgaccagcugaucaugaagaaccaccuccgggacaucaugggcauccccuacugcaacuacuccaaguacugguaccucaaccacacgaccaccgggaagaccagccugcccaagugcuggcugguguccaacggcagcuaccucaacgagacgcacuucuccgacgacaucgagcagcaggccgacaacaugaucaccgagaugcugcagaaggaguacauggagcgccagggcaagaccccgcuggggcucgucgaccuguucguguucagcaccuccuucuaccugaucagcaucuuccugcaccucgugaagaucccgugaggacuaguaauaaggaaacuguaugaaugucugugggcaggaagugaagagauccuucuguaaagguuuuuggaauuaugucugcugaauaauaaacuuuuuugaaauaauaaaucugguagaaaaaugagaucucaaaggcucuuuucagagccaccaaaaaaaaaaaaaaaaaaaaaaaaaaaaaaaaaaaaaaaaaaaaaaaaaaaaaaaaaaaaaaaaaaaaaaaaaaaaaaaaaaaaaaaaaaaaaaaaaaaaa

SEQ ID NO: 42690 - RNA, 1698 nt, Artificial Sequence
  mRNA product Design b-4 (hSL-A100) comprising derived and/or modified sequence from LASV(LM776-SLE-2012;Clade IV)__AIT17824__GPCmut13 (opt1)
aggagagucccgcagucggcguccagcggcucugcuuguucgugugugugucguugcaggccuuauucaagcuuaccaugggccagaucgugaccuucuuccaggaggucccccacgugaucgaggaggugaugaacaucguccugaucgcccucagcauccuggccgugcugaaggggcucuacaacuucgcgaccugcggccugguggggcuggucacguuccuccugcugugcggccgcuccugcaccaccagcguguacaaggggguguacgagcuccagacccuggagcugaacauggagacgcucaacaugaccaugccgcuguccugcaccaagaacaacagccaccacuacaucauggucggcaacgagaccggccuggagcucacgcugaccaacaccuccaucaucaaccacaaguucugcaaccugagcgacgcccacaagaagaaccucuacgaccacgcccugauguccaucaucagcaccuuccaccuguccauccccaacuucaaccaguacgaggccaugagcugcgacuucaacgggggcaagaucuccgugcaguacaaccucagccacuccuacgccggggacgcggccaaccacugcggcacgguggccaacgggguccugcagaccuucaugcggauggccuggggcggcagcuacaucgcgcuggacuccgggcacggcaagugggacugcaucaugaccagcuaccaguaccucaucauccagaacaccacgugggaggaccacugccaguucucccgccccagccccaucggguaccugggccugcucucccagcggacccgcgacaucuacaucagccggcgccugcugggcaccuucaccuggacgcucagcgacuccgaggggaaggacaccccgggcggguacugccugacccgguggaugcugaucgaggccgagcucaagugcuucggcaacaccgccguggccaagugcaacgagaagcacgacgaggaguucugcgacaugcugcgccuguucgacuucaacaagcaggccauccagcggcucaaggcggaggcccagaugagcauccagcugaucaacaaggccgugaacgcccugaucaacgaccagcucaucaugaagaaccaccuccgcgacaucauggggauccccuacugcaacuacuccaaguacugguaccugaaccacacgaccaccggcaagaccagccugcccaagugcuggcuggucuccaacggcagcuaccugaacgagacgcacuucuccgacgacaucgagcagcaggccgacaacaugaucaccgagaugcuccagaaggaguacauggagcggcaggggaagacgccccugggccugguggaccucuucguguucagcaccuccuucuaccugaucagcaucuuccugcaccuggucaagaucccgugaggacuaguaauaaggaaacuguaugaaugucugugggcaggaagugaagagauccuucuguaaagguuuuuggaauuaugucugcugaauaauaaacuuuuuugaaauaauaaaucugguagaaaaaugagaucucaaaggcucuuuucagagccaccaaaaaaaaaaaaaaaaaaaaaaaaaaaaaaaaaaaaaaaaaaaaaaaaaaaaaaaaaaaaaaaaaaaaaaaaaaaaaaaaaaaaaaaaaaaaaaaaaaaaa

SEQ ID NO: 42691 - RNA, 1698 nt, Artificial Sequence
  mRNA product Design b-4 (hSL-A100) comprising derived and/or modified sequence from LASV(Mad39;Clade IV)__ANH09722__GPCmut13 (opt1)
aggagagucccgcagucggcguccagcggcucugcuuguucgugugugugucguugcaggccuuauucaagcuuaccaugggccagaucgugaccuucuuccaggaggucccccacgugaucgaggaggugaugaacaucguccugaucgcccucagcauccuggccgugcugaaggggcucuacaacguggcgaccugcggccugaucgggcuggucacguuccuccugcugugcggccgcuccugcaccaccacccucuacaaggggguguacgagcugcaggcccuggagcucaacauggagacgcugaacaugaccaugccgcugagcugcaccaagaacaacucccaccacuacauccgggugggcaacgagaccggccucgagcugacgcugaccaacaccagccucaucaaccacaaguucugcaaccuguccgacgcccacaagaagaaccuguacgaccacgcccucaugagcaucaucuccaccuuccaccugagcauccccaacuucaaccaguacgaggccauguccugcgacuucaacgacgggaagaucagcguccaguacaaccugucccacacguacgcgggcgacaccgccaaccacugcgggaccguggccaacggcgugcuccagaccuucaugcgcauggccuggggcgggagcuacaucgcgcuggacuccggccgcgggggcugggacugcaucaugacgagcuaccaguaccugaucauccagaacaccaccugggaggaccacugccaguucucccggcccagccccaucggguaccucggccugcugucccagcggacccgcgacaucuacaucagccggcgccuccugggcacguucaccuggacccuguccgacagcgaggggaaggacaccccgggcggguacugccucacgcgguggaugcugaucgaggccgagcugaagugcuucggcaacaccgccgucgccaagugcaacgagaagcacgacgaggaguucugcgacaugcuccgccuguucgacuucaacaagcaggccauccagcggcugaaggcggaggcccagaugagcauccagcucaucaacaaggccgugaacgcccugaucaacgaccagcugaucaugaagaaccaccuccgcgacaucauggggauccccuacugcaacuacuccaaguacugguaccugaaccacaccgugaccggcaagacgagccugcccaagugcuggcucgucuccaacggcagcuaccugaacgagacccacuucuccgacgacaucgagcagcaggccgacaacaugaucaccgagaugcugcagaaggaguacauggagcggcaggggaagacgccccucggccugguggaccuguucguguucagcaccuccuucuaccugaucagcaucuuccuccaccuggucaagaucccgugaggacuaguaauaaggaaacuguaugaaugucugugggcaggaagugaagagauccuucuguaaagguuuuuggaauuaugucugcugaauaauaaacuuuuuugaaauaauaaaucugguagaaaaaugagaucucaaaggcucuuuucagagccaccaaaaaaaaaaaaaaaaaaaaaaaaaaaaaaaaaaaaaaaaaaaaaaaaaaaaaaaaaaaaaaaaaaaaaaaaaaaaaaaaaaaaaaaaaaaaaaaaaaaaa

SEQ ID NO: 42692 - RNA, 1698 nt, Artificial Sequence
  mRNA product Design b-4 (hSL-A100) comprising derived and/or modified sequence from LASV(Z0947-SLE-2011;Clade IV)__AIT17840__GPCmut13 (opt1)
aggagagucccgcagucggcguccagcggcucugcuuguucgugugugugucguugcaggccuuauucaagcuuaccaugggccagaucgugaccuucuuccaggaggucccccacgugaucgaggaggugaugaacaucguccugaucgcccucagcauccuggccgugcugaaggggcucuacaacuucgcgaccugcggccugguggggcuggucacguuccuccugcugugcggccgcuccugcaccaucagccucuacaaggggguguacgagcugcagacccuggagcucaacauggagacccugaacaugacgaugccgcuguccugcaccaagaacaacagccaccacuacaucauggugggcaacgagaccggccucgagcugacccugacgaacaccuccaucaucaaccacaaguucugcaaccucagcgacgcccacaagaagaaccuguacgaccacgcccugauguccaucaucagcaccuuccaccucuccauccccaacuucaaccaguacgaggccaugagcugcgacuucaacgggggcaagaucuccguccaguacaaccugagccacuccuacgccggggacgcggccaaccacugcggcaccguggccaacggggugcugcagacguucaugcggauggccuggggcggcagcuacaucgcgcucgacuccgggcgcgaccggugggacugcaucaugaccagcuaccaguaccugaucauccagaacaccaccugggaggaccacugccaguucucccgccccagccccaucggcuaccuggggcuccugucccagcggacgcgcgacaucuacaucagccggcgccugcucggcaccuucaccuggacccugagcgacuccgagggcaaggacacgcccgggggcuacugccugacccgguggaugcucaucgaggccgagcugaagugcuucgggaacaccgccgucgccaagugcaacgagaagcacgacgaggaguucugcgacaugcugcgccucuucgacuucaacaagcaggccauccagcggcugaaggcggaggcccagaugagcauccagcugaucaacaaggccgugaacgcccucaucaacgaccagcugaucaugaagaaccaccuccgcgacaucaugggcauccccuacugcaacuacuccaaguacugguaccugaaccacaccacgaccgggaagaccagccugcccaagugcuggcugguguccaacggcagcuaccucaacgagacccacuucuccgacgacaucgagcagcaggccgacaacaugaucacggagaugcugcagaaggaguacauggagcggcagggcaagaccccgcuggggcucgucgaccuguucguguucagcaccuccuucuaccugaucagcaucuuccugcaccucgugaagaucccgugaggacuaguaauaaggaaacuguaugaaugucugugggcaggaagugaagagauccuucuguaaagguuuuuggaauuaugucugcugaauaauaaacuuuuuugaaauaauaaaucugguagaaaaaugagaucucaaaggcucuuuucagagccaccaaaaaaaaaaaaaaaaaaaaaaaaaaaaaaaaaaaaaaaaaaaaaaaaaaaaaaaaaaaaaaaaaaaaaaaaaaaaaaaaaaaaaaaaaaaaaaaaaaaaa

SEQ ID NO: 42693 - RNA, 1698 nt, Artificial Sequence
  mRNA product Design b-4 (hSL-A100) comprising derived and/or modified sequence from LASV(Josiah;Clade IV)__NP_694870__GPCmut13 (opt1)
aggagagucccgcagucggcguccagcggcucugcuuguucgugugugugucguugcaggccuuauucaagcuuaccaugggccagaucgugaccuucuuccaggaggucccccacgugaucgaggaggugaugaacaucguccugaucgcccucagcgugcuggccgugcugaaggggcucuacaacuucgcgaccugcggccuggucgggcuggugacguuccuccugcugugcggccgcuccugcaccaccagccucuacaaggggguguacgagcugcagacccuggagcucaacauggagacgcugaacaugaccaugccgcuguccugcaccaagaacaacagccaccacuacaucauggucggcaacgagaccggccucgagcugacgcugaccaacaccuccaucaucaaccacaaguucugcaaccucagcgacgcccacaagaagaaccuguacgaccacgcccugauguccaucaucagcaccuuccaccucuccauccccaacuucaaccaguacgaggccaugagcugcgacuucaacgggggcaagaucuccgugcaguacaaccugagccacuccuacgccggggacgcggccaaccacugcggcacgguggccaacgggguccugcagaccuucaugcggauggccuggggcggcagcuacaucgcgcucgacuccgggcgcggcaacugggacugcaucaugaccagcuaccaguaccugaucauccagaacaccacgugggaggaccacugccaguucucccggcccagccccaucggguaccugggccuccugucccagcgcacccgggacaucuacaucagccgccggcugcucggcaccuucaccuggacgcugagcgacuccgaggggaaggacaccccgggcggguacugccugacccgcuggaugcucaucgaggccgagcugaagugcuucggcaacaccgccguggccaagugcaacgagaagcacgacgaggaguucugcgacaugcugcggcuguucgacuucaacaagcaggccauccagcgccugaaggcggaggcccagaugagcauccagcugaucaacaaggccgugaacgcccucaucaacgaccagcugaucaugaagaaccaccuccgggacaucauggggauccccuacugcaacuacuccaaguacugguaccucaaccacacgaccaccggccgcaccagccugcccaagugcuggcuggucuccaacggcagcuaccucaacgagacgcacuucuccgacgacaucgagcagcaggccgacaacaugaucaccgagaugcugcagaaggaguacauggagcggcaggggaagacgccccugggccugguggaccucuucguguucagcaccuccuucuaccugaucagcaucuuccugcaccucgucaagaucccgugaggacuaguaauaaggaaacuguaugaaugucugugggcaggaagugaagagauccuucuguaaagguuuuuggaauuaugucugcugaauaauaaacuuuuuugaaauaauaaaucugguagaaaaaugagaucucaaaggcucuuuucagagccaccaaaaaaaaaaaaaaaaaaaaaaaaaaaaaaaaaaaaaaaaaaaaaaaaaaaaaaaaaaaaaaaaaaaaaaaaaaaaaaaaaaaaaaaaaaaaaaaaaaaaa

SEQ ID NO: 42694 - RNA, 1695 nt, Artificial Sequence
  mRNA product Design b-4 (hSL-A100) comprising derived and/or modified sequence from LASV(LP;Clade I)__AAF86701__GPCmut13 (opt1)
aggagagucccgcagucggcguccagcggcucugcuuguucgugugugugucguugcaggccuuauucaagcuuaccaugggccagaucaucaccuucuuccaggaggugccccacgucaucgaggaggugaugaacaucgugcugaucgcccucagccugcuggccauccucaaggggcuguacaacaucgcgaccugcggcaucaucgggcuggucgccuuccucuuccugugcggcaaguccugcagccugacgcucaagggcggguacgagcugcagacccuggagcucaacauggagacccugaacaugaccaugccgcuguccugcacgaagaacagcucccaccacuacauccgcgugggcaacgagaccgggcucgagcugacccugaccaacacgagcaucaucaaccacaaguucugcaaccucuccgacgcccacaagaagaaccuguacgaccacgcccugaugagcaucaucuccaccuuccaccucagcauccccaacuucaaccaguacgaggccauguccugcgacuucaacggcgggaagaucagcgugcaguacaaccugucccacagcuacgcgggcgacgccgccgagcacugcgggaccgucgccaacggcgugcugcagaccuucaugcggauggcguggggcgggcgcuacaucgcccucgacuccggcaaggggaacugggacugcaucaugacgagcuaccaguaccugaucauccagaacaccaccugggaggaccacugccaguucucccggcccagccccaucggcuaccugggccuccugucccagcgcacccgggacaucuacaucagccgccggcugcucgggacguucaccuggacccugagcgacuccgagggcaacgagacccccgggggcuacugccugacgcgcuggaugcucaucgaggccgagcugaagugcuucgggaacaccgccguggccaagugcaacgagaagcacgacgaggaguucugcgacaugcugcggcuguucgacuucaacaagcaggcgauccgccggcugaaggccgaggcccagaugagcauccagcugaucaacaaggccgucaacgcccucaucaacgaccagcugaucaugaagaaccaccuccgcgacaucaugggcauccccuacugcaacuacuccaaguacugguaccucaaccacaccagcuccggccggaccagccugcccaagugcuggcugaucuccaacgggagcuaccucaacgagacgcaguucuccgacgacaucgagcagcaggcggacaacaugaucaccgagaugcugcagaaggaguacaucgagcgccagggcaagaccccgcuggggcugguggacaucuucaucuucagcaccuccuucuaccucaucagcaucuuccugcaccugaucaagaucccgugaggacuaguaauaaggaaacuguaugaaugucugugggcaggaagugaagagauccuucuguaaagguuuuuggaauuaugucugcugaauaauaaacuuuuuugaaauaauaaaucugguagaaaaaugagaucucaaaggcucuuuucagagccaccaaaaaaaaaaaaaaaaaaaaaaaaaaaaaaaaaaaaaaaaaaaaaaaaaaaaaaaaaaaaaaaaaaaaaaaaaaaaaaaaaaaaaaaaaaaaaaaaaaaaa

SEQ ID NO: 42695 - RNA, 1695 nt, Artificial Sequence
  mRNA product Design b-4 (hSL-A100) comprising derived and/or modified sequence from LASV(803213;Clade II)__AAF86703__GPCmut13 (opt1)
aggagagucccgcagucggcguccagcggcucugcuuguucgugugugugucguugcaggccuuauucaagcuuaccaugggccagaucaucaccuucuuccaggaggugccccacgucaucgaggaggugaugaacaucgugcugaucgcccucagccugcuggccauccucaaggggaucuacaacgucgcgaccugcggccuguucgggcugaucuccuuccuccugcugugcggccgcagcugcuccgugacguacaaggggguguacgagcuccagacccuggagcugaacauggccaaccucaacaugaccaugccgcugagcugcaccaagaacaacucccaccacuacaucauggucggcaacgagacgggccuggagcucacccugaccaacaccagcaucaucaaccacaaguucugcaaccuguccgacgcccacaagaagaaccucuacgaccacgcccugaugagcaucaucuccacguuccaccugagcauccccaacuucaaccaguacgaggccauguccugcgacuucaacgggggcaagaucagcgugcaguacaaccucucccacagcuucgcgguggacgccgccaaccacugcgggaccaucgccaacggcguccugcagaccuucaugcggauggcguggggcggguccuacaucgcccuggacagcggcaaggggaacugggacugcaucaugaccuccuaccaguaccucaucauccagaacacgaccugggaggaccacugccaguucagccgccccucccccaucggcuaccuggggcugcucagccagcggacccgcgacaucuacaucagccggcgccugcugggcaccuucacguggacccucuccgacagcgagggcaacgaggcccccgggggcuacugccugacccgguggaugcugaucgaggccgagcucaagugcuucgggaacaccgccguggcgaagugcaacgagaagcacgacgaggaguucugcgacaugcugcgccuguucgacuucaacaagcaggccaucaagcggcucaagacggaggcccagauguccauccagcugaucaacaaggccgugaacgcccugaucaacgaccagcucaucaugaagaaccaccuccgcgacaucaugggcauccccuacugcaacuacagccgguacugguaccugaaccacaccgucaccgggaagaccucccugccccgcugcuggcuggugagcaacggcuccuaccugaacgagacgcacuucagcgacgacaucgagcagcaggcggacaacaugaucaccgagaugcuccagaaggaguacauggaccggcagggcaagaccccgcuggggcugguggaccuguucgucuucuccaccagcuucuaccucaucuccaucuuccugcaccuggugaagaucccgugaggacuaguaauaaggaaacuguaugaaugucugugggcaggaagugaagagauccuucuguaaagguuuuuggaauuaugucugcugaauaauaaacuuuuuugaaauaauaaaucugguagaaaaaugagaucucaaaggcucuuuucagagccaccaaaaaaaaaaaaaaaaaaaaaaaaaaaaaaaaaaaaaaaaaaaaaaaaaaaaaaaaaaaaaaaaaaaaaaaaaaaaaaaaaaaaaaaaaaaaaaaaaaaaa

SEQ ID NO: 42696 - RNA, 1695 nt, Artificial Sequence
  mRNA product Design b-4 (hSL-A100) comprising derived and/or modified sequence from LASV(GA391;Clade III)__CAA36645__GPCmut13 (opt1)
aggagagucccgcagucggcguccagcggcucugcuuguucgugugugugucguugcaggccuuauucaagcuuaccaugggccagaucgugaccuucuuccaggaggucccccacgugaucgaggaggugaugaacaucguccugaucgcccucagcauccuggccauccugaaggggcucuacaacguggcgaccugcggccugaucgggcuggugacguuccuccugcuguccggccgcagcugcucccucaucuacaaggggaccuacgagcugcagacccuggagcucaacauggagacccugaacaugacgaugccgcugagcugcaccaagaacaacucccaccacuacauccgggucggcaacgagaccggccucgagcugacccugacgaacaccagcauccucaaccacaaguucugcaaccuguccgacgcccacaagcgcaaccuguacgaccacagccucauguccaucaucagcaccuuccaccuguccauccccaacuucaaccaguacgaggccaugagcugcgacuucaacgggggcaagaucaccgugcaguacaaccugucccacagcuucgccguggacgccgcggggcacugcggcacgcucgccaacgggguccugcagaccuucaugcggauggccuggggcggcuccuacaucgcccuggacagcgggcgcggcaacugggacugcaucaugaccuccuaccaguaccucaucauccagaacaccacgugggacgaccacugccaguucagccggcccucccccaucggguaccugggccugcucagccagcgcacccgggacaucuacaucagccgccggcugcugggcaccuucaccuggacgcucuccgacagcgaggggaacgagaccccgggcggguacugccugacccgcuggaugcugaucgaggcggagcucaagugcuucggcaacaccgccguggccaagugcaacgagaagcacgacgaggaguucugcgacaugcugcggcuguucgacuucaacaagcaggccauccgccggcucaagacggaggcccagauguccauccagcugaucaacaaggcggugaacgcccugaucaacgaccagcucaucaugaagaaccaccuccgcgacaucauggggauccccuacugcaacuacagccgguacugguaccugaaccacaccuccaccggcaagaccagccugccccgcugcuggcugaucuccaacggcagcuaccugaacgagacgaaguucuccgacgacaucgagcagcaggccgacaacaugaucaccgagaugcugcagaaggaguacaucgaccggcaggggaagacgccccucggccuggucgaccuguucguguucagcaccuccuucuaccucaucagcaucuuccugcaccuggugaagaucccgugaggacuaguaauaaggaaacuguaugaaugucugugggcaggaagugaagagauccuucuguaaagguuuuuggaauuaugucugcugaauaauaaacuuuuuugaaauaauaaaucugguagaaaaaugagaucucaaaggcucuuuucagagccaccaaaaaaaaaaaaaaaaaaaaaaaaaaaaaaaaaaaaaaaaaaaaaaaaaaaaaaaaaaaaaaaaaaaaaaaaaaaaaaaaaaaaaaaaaaaaaaaaaaaaa

SEQ ID NO: 42697 - RNA, 1698 nt, Artificial Sequence
  mRNA product Design b-4 (hSL-A100) comprising derived and/or modified sequence from LASV(AV;Clade V)__CCA30314__GPCmut13 (opt1)
aggagagucccgcagucggcguccagcggcucugcuuguucgugugugugucguugcaggccuuauucaagcuuaccaugggccagaucgugaccuucuuccaggaggucccccacgugaucgaggaggugaugaacaucguccugaucgcccucagcauccuggccgugcugaaggggcucuacaacaucgcgaccugcggccugaucgggcugaucacguuccuccugcugugcggccgcuccugcagcuccaaccucuacaaggggguguacgagcugcagagccuggaccucaacauggagacccugaacaugaccaugccgcuguccugcaccaagaacaacagccaccacuacauccgggucggcaacgacacgggccucgagcugacccugaccaacaccuccauccucaaccacaaguucugcaaccugagcgacgcccacaagaaggaccuguacgaccacgcccucauguccaucaucagcacguuccaccuguccauccccaacuucaaccaguacgaggccaugagcugcgacuucaacgggggcaagaucuccgugcaguacaaccugagccacuccuacgccaucgacgcggccaaccacugcgggaccguggccaacggcauccuccagaccuucaugcgcauggccuggggcgggagcuacaucgcgcuggacuccggccgggggaacugggacugcaucaugaccagcuaccaguaccugaucauccagaacacgaccugggagaaccacugccaguucucccgccccagccccaucggcuaccucgggcugcugagccagcggacccgcgacaucuacaucucccggcgccuccugggcaccuucacguggacccugagcgacuccgagggcaacgccacccccgggggcuacugccucacccgguggaugcugaucgaggccgagcugaagugcuucgggaacacggccgucgccaagugcaacgagaagcacgacgaggaguucugcgacaugcuccgccuguucgacuucaacaagcaggcgaucagccggcugaaguccgaggcccagaugagcauccagcucaucaacaaggccgugaacgcccugaucaacgaccagcugaucaugaagaaccaccuccgcgacaucaugggcauccccuacugcaacuacuccaaguacugguaccugaaccacaccaucaccgggaagaccagccugcccaagugcuggcucguguccaacggcagcuaccugaacgagacgcacuucuccgacgacaucgagcagcaggccgacaacaugaucaccgagaugcugcagaaggaguacauggagcggcagggcaagaccccgcuggggcucgucgaccuguucguguucagcaccuccuucuaccugaucagcaucuuccuccgccuggugaagaucccgugaggacuaguaauaaggaaacuguaugaaugucugugggcaggaagugaagagauccuucuguaaagguuuuuggaauuaugucugcugaauaauaaacuuuuuugaaauaauaaaucugguagaaaaaugagaucucaaaggcucuuuucagagccaccaaaaaaaaaaaaaaaaaaaaaaaaaaaaaaaaaaaaaaaaaaaaaaaaaaaaaaaaaaaaaaaaaaaaaaaaaaaaaaaaaaaaaaaaaaaaaaaaaaaaa

SEQ ID NO: 42698 - RNA, 1695 nt, Artificial Sequence
  mRNA product Design b-4 (hSL-A100) comprising derived and/or modified sequence from LASV(Togo/2016/7082;Clade VI)__AMR44577__GPCmut13 (opt1)
aggagagucccgcagucggcguccagcggcucugcuuguucgugugugugucguugcaggccuuauucaagcuuaccaugggccagaucaucaccuucuuccaggaggugccccacgucaucgaggaggugaugaacaucgugcugaucgcccucagccugcuggccauccucaagggggucuacaacguggcgaccugcggcaucaucgggcuggugacguuccuguuccucugcggccgcuccugcagccugaucuacaagggguccuacgagcugcagacccucgagcugaacauggagacccugaacaugaccaugccgcucagcugcacgaagaacuccagccaccacuacauccgggucggcaacgagaccggccuggagcugacccucaccaacacguccaucaucaaccacaaguucugcaaccugagcgacgcccacaagcgcaaccuguacgaccacgcccucauguccauccugagcaccuuccaccuguccauccccaacuucaaccaguacgaggccaugagcugcgacuucaacgggggcaagaucuccgugcaguacaaccucagccacgccuacgcgguggacgccgccgagcacugcgggaccgucgccaacggcgugcugcagaccuucaugcggauggcguggggcggguccuacaucgcccuggacagcggccgcgggaacugggacugcaucaugacguccuaccaguaccucaucauccagaacaccaccugggaggaccacugccaguucagccggcccucccccaucggcuaccuggggcugcucagccagcgcacccgggacaucuacaucagccgccggcugcugggcacguucaccuggacccucuccgacagcgagggcaacgagacccccgggggcuacugccugacgcgcuggaugcugaucgaggccgagcucaagugcuucgggaacaccgccguggccaagugcaacgagaagcacgacgaggaguucugcgacaugcugcggcuguucgacuucaacaagcaggcgauccagcgccucaaguccgaggcccagaugagcauccagcugaucaacaaggccgucaacgcccugaucaacgaccagcucaucaugaagaaccaccuccgggacaugaugggcauccccuacugcaacuacuccaaguacugguaccugaaccacaccagcuccgggcgcaccagccugcccaagugcuggcugguguccaacggcagcuaccugaacgagacgcacuucuccgacgacaucgagcagcaggccgacaacaugaucaccgagaugcuccagaaggaguacaucgaccggcagggcaagaccccgcuggggcugguggaccuguucgucuucagcaccuccuucuaccucaucagcaucuuccugcaccugaucaagaucccgugaggacuaguaauaaggaaacuguaugaaugucugugggcaggaagugaagagauccuucuguaaagguuuuuggaauuaugucugcugaauaauaaacuuuuuugaaauaauaaaucugguagaaaaaugagaucucaaaggcucuuuucagagccaccaaaaaaaaaaaaaaaaaaaaaaaaaaaaaaaaaaaaaaaaaaaaaaaaaaaaaaaaaaaaaaaaaaaaaaaaaaaaaaaaaaaaaaaaaaaaaaaaaaaaa

SEQ ID NO: 42699 - RNA, 1695 nt, Artificial Sequence
  mRNA product Design b-4 (hSL-A100) comprising derived and/or modified sequence from LASV(KAK-428;Clade n.d. (VII))__ANH09740__GPCmut13 (opt1)
aggagagucccgcagucggcguccagcggcucugcuuguucgugugugugucguugcaggccuuauucaagcuuaccaugggccagaucgugaccuucuuccaggaggucccccacgugaucgaggaggugaugaacaucguccugaucgcccucagccugcuggccauccucaaggggcuguacaacuucgcgaccugcggcgugaucgggcugaucacguuccuccugcugugcggccgcuccugcagcgccaccuacaaggggcaguacgagcuccagacccuggagcugaacauggagucccucaacaugaccaugccgcugagcugcacgaagaacaacucccaccacuacauccgggccggcaacaacaccggccuggagcucacccugaccaacacgagcaucaucucccacaaguucugcaaccugagcgacgcccacaagaagaaccucuacgaccacacccugauguccaucaucaccaccuuccaccugagcauccccaacuucaaccaguacgaggccauguccugcgacuucaacgggggcaagaucagcauccaguacaaccucucccacagcuacgcgggggacgccgcccagcacugcggcacgguggccaacgggguccugcagaccuucaugcgcauggcguggggcggcuccuaccuggcccucgacagcgggcggcgcggcugggacugcaucaucuccagcuaccaguaccugaucauccagaacaccaccugggacgaccacugccaguucucccggcccagccccaucggguaccugggcuucgugagccagaagacgcgcgacaucuacaucucccggcgccuccugggcaccuucaccuggacccugagcgacuccgaggggcacgacaugccgggcggguacugccucacgcgguggaugcugaucgaggccgaccugaagugcuucggcaacaccgccguggccaagugcaacgagaagcacgacgaggaguucugcgacauguggcgccucuucgacuucaacaagcaggcgauccagcggcugaaggccgaggcccagaugaacauccagcugaucaacaaggccgucaacgcccucaucaacgaccagcugaugaugaagaaccaccuccgcgacaucauggggauccccuacugcaacuacagcaaguucugguaccugaacaacaccaccacgggccggaccucccugccccgcugcuggcugaucagcaacggcuccuaccucaacgagacccacuucagcgacgacaucgagcagcaggcggacaacaugaucaccgagaugcugcagaaggaguacauggaccggcaggggaagacgccccugggccucguggaccuguucguguucuccaccagcuucuaccugaucaccaucuuccugcaccucgucaagaucccgugaggacuaguaauaaggaaacuguaugaaugucugugggcaggaagugaagagauccuucuguaaagguuuuuggaauuaugucugcugaauaauaaacuuuuuugaaauaauaaaucugguagaaaaaugagaucucaaaggcucuuuucagagccaccaaaaaaaaaaaaaaaaaaaaaaaaaaaaaaaaaaaaaaaaaaaaaaaaaaaaaaaaaaaaaaaaaaaaaaaaaaaaaaaaaaaaaaaaaaaaaaaaaaaaa

SEQ ID NO: 42700 - RNA, 1695 nt, Artificial Sequence; identical to SEQ ID NO: 42694
  mRNA product Design b-4 (hSL-A100) comprising derived and/or modified sequence from LASV(Pinneo-NIG-1969;Clade I)__AIT17836__GPCmut13 (opt1)

SEQ ID NO: 42701 - RNA, 1695 nt, Artificial Sequence
  mRNA product Design b-4 (hSL-A100) comprising derived and/or modified sequence from LASV(ISTH0009-NIG-2011;Clade II)__AIT17404__GPCmut13 (opt1)
aggagagucccgcagucggcguccagcggcucugcuuguucgugugugugucguugcaggccuuauucaagcuuaccaugggccagaucaucaccuucuuccaggaggugccccacgucaucgaggaggugaugaacaucgugcugaucgcccucagccugcuggccauccucaaggggaucuacaacgucgcgaccugcggccuguucgggcugguguccuuccuccugcugugcggccgcagcugcuccacgaccuacaaggggguguacgagcuccagacccuggagcuggacauggccagccucaacaugaccaugccgcuguccugcacgaagaacaacagccaccacuacaucauggucggcaacgagaccggccuggagcucacccugaccaacacguccaucaucaaccacaaguucugcaaccugagcgacgcccacaagaagaaccucuacgaccacgcccugauguccaucaucagcaccuuccaccuguccauccccaacuucaaccaguacgaggccaugagcugcgacuucaacgggggcaagaucuccgugcaguacaaccucagccacgcguacgccguggacgccgccaaccacugcgggaccaucgcgaacggcguccugcagaccuucaugcggauggccuggggcggguccuacaucgcccuggacagcggcaagggguccugggacugcaucaugacgagcuaccaguaccucaucauccagaacaccaccugggaggaccacugccaguucucccgccccagccccaucggcuaccuggggcugcucagccagcggacccgcgacaucuacaucucccggcgccugcugggcacguucaccuggacccucagcgacuccgagggcaacgagacccccgggggcuacugccugacgcgguggaugcugaucgaggccgagcucaagugcuucgggaacaccgccguggcgaagugcaacgagaagcacgacgaggaguucugcgacaugcugcgccuguucgacuucaacaagcaggccauccggcgccucaagaccgaggcccagaugagcauccagcugaucaacaaggccgugaacgcccugaucaacgaccagcucaucaugaagaaccaccuccgggacaucaugggcaucccguacugcaacuacuccaaguacugguaccugaaccacaccgucacggggaagaccagccugccccgcugcuggcugguguccaacggcagcuaccugaacgagacccacuucuccgacgacaucgagcagcaggcggacaacaugaucaccgagcuccugcagaaggaguacauggaccggcagggcaagacgccccuggggcugguggaccucuucgucuucagcaccuccuucuaccugaucagcaucuuccugcaccucaucaagaucccgugaggacuaguaauaaggaaacuguaugaaugucugugggcaggaagugaagagauccuucuguaaagguuuuuggaauuaugucugcugaauaauaaacuuuuuugaaauaauaaaucugguagaaaaaugagaucucaaaggcucuuuucagagccaccaaaaaaaaaaaaaaaaaaaaaaaaaaaaaaaaaaaaaaaaaaaaaaaaaaaaaaaaaaaaaaaaaaaaaaaaaaaaaaaaaaaaaaaaaaaaaaaaaaaaa

SEQ ID NO: 42702 - RNA, 1695 nt, Artificial Sequence
  mRNA product Design b-4 (hSL-A100) comprising derived and/or modified sequence from LASV(ISTH2010-NIG-2012;Clade II)__AIT17482__GPCmut13 (opt1)
aggagagucccgcagucggcguccagcggcucugcuuguucgugugugugucguugcaggccuuauucaagcuuaccaugggccagaucaucaccuucuuccaggaggugccccacgucaucgaggaggugaugaacaucgugcugaucgcccucagccugcuggccauccucaaggggaucuacaacgucgcgaccugcggccuguucgggcugguguccuuccuccugcugugcggccgcagcugcuccacgaccuacaaggggguguacgagcuccagacccuggagcuggacauggccagccucaacaugaccaugccgcuguccugcacgaagaacaacagccaccacuacaucauggucggcaacgagaccggccuggagcucacccugaccaacacguccaucaucaaccacaaguucugcaaccugagcgacgcccacaagaagaaccucuacgaccacgcccugauguccaucaucagcaccuuccaccuguccauccccaacuucaaccaguacgaggccaugagcugcgacuucaacgggggcaagaucuccgugcaguacaaccucagccacgcguacgccguggacgccgccaaccacugcgggaccaucgcgaacggcguccugcagaccuucaugcggauggccuggggcggguccuacaucgcccuggacagcggcaagggguccugggacugcaucaugacgagcuaccaguaccucaucauccagaacaucaccugggaggaccacugccaguucucccgccccagccccaucggcuaccuggggcugcucagccagcggacccgcgacaucuacaucucccggcgccugcugggcaccuucacguggacccucagcgacuccgagggcaacgagacccccgggggcuacugccugacccgguggaugcugaucgaggccgagcucaagugcuucgggaacacggccguggcgaagugcaacgagaagcacgacgaggaguucugcgacaugcugcgccuguucgacuucaacaagcaggccauccggcgccucaagaccgaggcccagaugagcauccagcugaucaacaaggccgugaacgcccugaucaacgaccagcucaucaugaagaaccaccuccgggacaucaugggcauccccuacugcaacuacuccaaguacugguaccugaaccacaccgucaccgggaagacgagccugccccgcugcuggcugguguccaacggcagcuaccugaacgagacccacuucuccgacgacaucgagcagcaggcggacaacaugaucaccgagcuccugcagaaggaguacaucgaccggcagggcaagaccccgcuggggcugguggaccucuucgucuucagcacguccuucuaccugaucagcaucuuccugcaccucgugaagaucccgugaggacuaguaauaaggaaacuguaugaaugucugugggcaggaagugaagagauccuucuguaaagguuuuuggaauuaugucugcugaauaauaaacuuuuuugaaauaauaaaucugguagaaaaaugagaucucaaaggcucuuuucagagccaccaaaaaaaaaaaaaaaaaaaaaaaaaaaaaaaaaaaaaaaaaaaaaaaaaaaaaaaaaaaaaaaaaaaaaaaaaaaaaaaaaaaaaaaaaaaaaaaaaaaaa

SEQ ID NO: 42703 - RNA, 1695 nt, Artificial Sequence
  mRNA product Design b-4 (hSL-A100) comprising derived and/or modified sequence from LASV(Lassa virus/H.sapiens-wt/NGA/2015/ISTH_0543;Clade II)__AVO03639__GPCmut13 (opt1)
aggagagucccgcagucggcguccagcggcucugcuuguucgugugugugucguugcaggccuuauucaagcuuaccaugggccagaucaucaccuucuuccaggaggugccccacgucaucgaggaggugaugaacaucgugcugaucgcccucagccugcuggccauccucaaggggaucuacaacgucgcgaccugcggccuguucgggcugguguccuuccuccugcugugcggccgcagcugcuccacgaccuacaaggggguguacgagcuccagacccuggagcuggacauggccaaccucaacaugaccaugccgcugagcugcacgaagaacaacucccaccacuacaucauggucggcaacgagaccggccuggagcucacccugaccaacacgagcaucaucaaccacaaguucugcaaccuguccgacgcccacaagaagaaccucuacgaccacgcccugaugagcaucaucuccaccuuccaccugagcauccccaacuucaaccaguacgaggccauguccugcgacuucaacgggggcaagaucagcgugcaguacaaccucucccacaccuacgcgguggacgccgccaaccacugcgggaccaucgccaacggcguccugcagacguucaugcggauggcguggggcgggagcuacaucgcccuggacuccggcaaggggagcugggacugcaucaugaccuccuaccaguaccucgugauccagaacaccaccugggaggaccacugccaguucagccgccccucccccaucggcuaccuggggcugcucagccagcggacgcgcgacaucuacaucagccggcgccugcugggcaccuucaccuggacccucuccgacagcgagggcaacgagacgcccgggggcuacugccugacccgguggaugcugaucgaggccgagcucaagugcuucgggaacaccgccguggccaagugcaacgagaagcacgacgaggaguucugcgacaugcugcgccuguucgacuucaacaagcaggcgauccggcgccucaagaccgaggcccagauguccauccagcugaucaacaaggccgucaacgcccugaucaacgaccagcucaucaugaagaaccaccuccgggacaucaugggcauccccuacugcaacuacagcaaguacugguaccugaaccacacggugaccgggaagaccucccugccccgcugcuggcuggugagcaacggcuccuaccugaacgagacccacuucagcgacgacaucgagcagcaggccgacaacaugaucacggagcuccugcagaaggaguacaucgaccggcagggcaagaccccgcuggggcuggucgaccucuucguguucuccaccagcuucuaccugaucuccaucuuccugcaccucgugaagaucccgugaggacuaguaauaaggaaacuguaugaaugucugugggcaggaagugaagagauccuucuguaaagguuuuuggaauuaugucugcugaauaauaaacuuuuuugaaauaauaaaucugguagaaaaaugagaucucaaaggcucuuuucagagccaccaaaaaaaaaaaaaaaaaaaaaaaaaaaaaaaaaaaaaaaaaaaaaaaaaaaaaaaaaaaaaaaaaaaaaaaaaaaaaaaaaaaaaaaaaaaaaaaaaaaaa

SEQ ID NO: 42704 - RNA, 1695 nt, Artificial Sequence
  mRNA product Design b-4 (hSL-A100) comprising derived and/or modified sequence from LASV(Lassa virus/H.sapiens-wt/NGA/2016/ISTH_0009;Clade II)__AVO03571__GPCmut13 (opt1)
aggagagucccgcagucggcguccagcggcucugcuuguucgugugugugucguugcaggccuuauucaagcuuaccaugggccagaucaucaccuucuuccaggaggugccccacgucaucgaggaggugaugaacaucgugcugaucgcccucagccugcuggccauccucaaggggaucuacaacgucgcgaccugcggccugcuggggcucguguccuuccugcugcucugcggccgcagcugcuccacgaccuacaaggggguguacgagcugcagacccuggagcucgacauggccagccugaacaugaccaugccgcuguccugcacgaagaacaacagccaccacuacaucauggucggcaacgagaccggccucgagcugacccugaccaacacguccaucaucaaccacaaguucugcaaccucagcgacgcccacaagaagaaccuguacgaccacgcccugauguccaucaucagcaccuuccaccucuccauccccaacuucaaccaguacgaggccaugagcugcgacuucaacgggggccggaucuccgugcaguacaaccugagccacuccuacgcgguggacgccgccaaccacugcgggaccaucgccaacggcguccugcagaccuucaugcgcauggcguggggcgggagcuacaucgcccucgacuccggcaaggggagcugggacugcaucaugacguccuaccaguaccugaucauccagaacaccaccugggaggaccacugccaguucagccggcccagccccaucggcuaccuggggcuccugucccagcgcacccgggacaucuacaucagccgccggcugcucggcacguucaccuggacccuguccgacagcgagggcaacgagacccccgggggcuacugccugacgcgcuggaugcucaucgaggccgagcugaagugcuucgggaacaccgccguggccaagugcaacgagaagcacgacgaggaguucugcgacaugcugcggcuguucgacuucaacaagcaggcgauccgccggcugaagaccgaggcccagauguccauccagcugaucaacaaggccgugaacgcccucaucaacgaccagcugaucaugaagaaccaccuccgcgacaucaugggcaucccguacugcaacuacagcaaguacugguaccucaaccacaccgucacggggaagaccucccugccccggugcuggcuggugagcaacggcuccuaccucaacgagacccacuucagcgacgacaucgagcagcaggccgacaacaugaucaccgagcugcugcagaaggaguacaucgaccgccagggcaagacgccccuggggcucguggaccuguucgucuucuccaccagcuucuaccugaucuccaucuuccuccaccuggugaagaucccgugaggacuaguaauaaggaaacuguaugaaugucugugggcaggaagugaagagauccuucuguaaagguuuuuggaauuaugucugcugaauaauaaacuuuuuugaaauaauaaaucugguagaaaaaugagaucucaaaggcucuuuucagagccaccaaaaaaaaaaaaaaaaaaaaaaaaaaaaaaaaaaaaaaaaaaaaaaaaaaaaaaaaaaaaaaaaaaaaaaaaaaaaaaaaaaaaaaaaaaaaaaaaaaaaa

SEQ ID NO: 42705 - RNA, 1695 nt, Artificial Sequence
  mRNA product Design b-4 (hSL-A100) comprising derived and/or modified sequence from LASV(Lassa virus/H.sapiens-wt/NGA/2016/ISTH_0017;Clade II)__AVO03567__GPCmut13 (opt1)
aggagagucccgcagucggcguccagcggcucugcuuguucgugugugugucguugcaggccuuauucaagcuuaccaugggccagaucaucaccuucuuccaggaggugccccacgucaucgaggaggugaugaacaucgugcugaucgcccucagccugcuggccauccucaaggggaucuacaacgucgcgaccugcggccuguucgggcugguguccuuccuccugcugugcggccgcagcugcuccacgaccuacaaggggguguacgagcuccagacccuggagcuggacauggccagccucaacaugaccaugccgcuguccugcacgaagaacaacagccaccacuacaucauggucggcaacgagaccggccuggagcucacccugaccaacacguccaucaucaaccacaaguucugcaaccugagcgacgcccacaagaagaaccucuacgaccacgcccugauguccaucaucagcaccuuccaccuguccauccccaacuucaaccaguacgaggccaugagcugcgacuucaacgggggcaagaucuccgugcaguacaaccucagccacaccuacgcgaucgacgccgccaaccacugcgggaccaucgccaacggcgugcugcagacguucaugcggauggcguggggcggguccuacaucgcccuggacagcggcaagggguccugggacugcaucaugaccagcuaccaguaccucaucauccagaacaccaccugggaggaccacugccaguucucccgccccagccccaucggcuaccuggggcugcucagccagcggacgcgcgacaucuacaucucccggcgccugcugggcaccuucaccuggacccucagcgacuccgagggcaacgagacgcccgggggcuacugccugacccgguggaugcugaucgaggccgagcucaagugcuucgggaacaccgccgucgccaagugcaacgagaagcacgacgaggaguucugcgacaugcugcgccuguucgacuucaacaagcaggcgauccggcgccucaagaccgaggcccagaugagcauccagcugaucaacaaggccgugaacgcccugaucaacgaccagcucaucaugaagaaccaccuccgggacaucaugggcauccccuacugcaacuacuccaaguacugguaccugaaccacacggugaccgggaagaccagccugccccgcugcuggcuggucuccaacggcagcuaccugaacgagacccacuucuccgacgacaucgagcagcaggccgacaacaugaucacggagcuccugcagaaggaguacauggaccggcagggcaagaccccgcuggggcugguggaccucuucguguucagcaccuccuucuaccugaucagcaucuuccugcaccucguccgcaucccgugaggacuaguaauaaggaaacuguaugaaugucugugggcaggaagugaagagauccuucuguaaagguuuuuggaauuaugucugcugaauaauaaacuuuuuugaaauaauaaaucugguagaaaaaugagaucucaaaggcucuuuucagagccaccaaaaaaaaaaaaaaaaaaaaaaaaaaaaaaaaaaaaaaaaaaaaaaaaaaaaaaaaaaaaaaaaaaaaaaaaaaaaaaaaaaaaaaaaaaaaaaaaaaaaa

SEQ ID NO: 42706 - RNA, 1695 nt, Artificial Sequence
  mRNA product Design b-4 (hSL-A100) comprising derived and/or modified sequence from LASV(Lassa virus/H.sapiens-wt/NGA/2018/ISTH_0959;Clade II)__AVV65099__GPCmut13 (opt1)
aggagagucccgcagucggcguccagcggcucugcuuguucgugugugugucguugcaggccuuauucaagcuuaccaugggccagaucaucaccuucuuccaggaggugccccacgucaucgaggaggugaugaacaucgugcugaucgcccucagccugcuggccauccucaaggggaucuacaacgucgugaccugcggccuguucgggcugguguccuuccuccugcugugcggccgcagcugcuccacgaccuacaagggggucuacgagcuccagacccuggagcuggacauggcgagccucaacaugaccaugccgcuguccugcacgaagaacaacagccaccacuacaucauggugggcaacgagaccggccuggagcucacccugaccaacacguccaucaucaaccacaaguucugcaaccugagcgacgcccacaagaagaaccucuacgaccacgcccugauguccaucaucagcaccuuccaccuguccauccccaacuucaaccaguacgaggccaugagcugcgacuucaacgggggcaagaucuccgugcaguacaaccucagccacgccuacgcgaucgacgccgccaaccacugcgggaccaucgccaacggcguccugcagaccuucaugcggauggcguggggcggguccuacaucgcccuggacagcggcaagggguccugggacugcaucaugacgagcuaccaguaccucaucauccagaacaccaccugggaggaccacugccaguucucccgccccagccccaucggcuaccuggggcugcucagccagcggacccgcgacaucuacaucucccggcgccugcugggcacguucaccuggacccucagcgacuccgagggcaacgagacccccgggggcuacugccugacgcgguggaugcugaucgaggccgagcucaagugcuucgggaacaccgccguggccaagugcaacgagaagcacgacgaggaguucugcgacaugcugcgccuguucgacuucaacaagcaggcgauccggcgccucaagaccgaggcccagaugagcauccagcugaucaacaaggccgugaacgcccugaucaacgaccagcucaucaugaagaaccaccuccgggacaucaugggcaucccguacugcaacuacuccaaguacugguaccugaaccacaccgucacggggaagaccagccugccccgcugcuggcugguguccaacggcagcuaccugaacgagacccacuucuccgacgacaucgagcagcaggccgacaacaugaucaccgagcuccugcagaaggaguacaucgaccggcagggcaagacgccccuggggcugguggaccucuucgucuucagcaccuccuucuaccugaucagcaucuuccugcaccucgugaagaucccgugaggacuaguaauaaggaaacuguaugaaugucugugggcaggaagugaagagauccuucuguaaagguuuuuggaauuaugucugcugaauaauaaacuuuuuugaaauaauaaaucugguagaaaaaugagaucucaaaggcucuuuucagagccaccaaaaaaaaaaaaaaaaaaaaaaaaaaaaaaaaaaaaaaaaaaaaaaaaaaaaaaaaaaaaaaaaaaaaaaaaaaaaaaaaaaaaaaaaaaaaaaaaaaaaa

SEQ ID NO: 42707 - RNA, 1695 nt, Artificial Sequence
  mRNA product Design b-4 (hSL-A100) comprising derived and/or modified sequence from LASV(LASV003-NIG-2008;Clade II)__AIT17580__GPCmut13 (opt1)
aggagagucccgcagucggcguccagcggcucugcuuguucgugugugugucguugcaggccuuauucaagcuuaccaugggccagaucaucaccuucuuccaggaggugccccacgucaucgaggaggugaugaacaucgugcugaucgcccucagccugcuggccauccucaaggggaucuacaacgucgcgaccugcggccuguucgggcugguguccuuccuccugcugugcggccgcagcugcuccacgaccuacaaggggguguacgagcuccagacccuggagcuggacauggccagccucaacaugaccaugccgcuguccugcacgaagaacaacagccaccacuacaucauggucggcaacgagaccggccuggagcucacccugaccaacacguccaucaucaaccacaaguucugcaaccugagcgacgcccacaagaagaaccucuacgaccacgcccugauguccaucaucagcaccuuccaccuguccauccccaacuucaaccaguacgaggccaugagcugcgacuucaacgggggcaagaucuccgugcaguacaaccucagccacaccuacgcgguggacgccgccaaccacugcgggaccaucgccaacggcguccugcagacguucaugcggauggcguggggcggguccuacaucgcccuggacagcggcaagggguccugggacugcaucaugaccagcuaccaguaccucaucauccagaacaccaccugggaggaccacugccaguucucccgccccagccccaucggcuaccuggggcugcucagccagcggacgcgcgacaucuacaucucccggcgccugcugggcaccuucaccuggacccucagcgacuccgagagcaacgagacgccgggcggguacugccugacccgguggaugcugaucgaggccgagcucaagugcuucggcaacaccgccguggccaagugcaacgagaagcacgacgaggaguucugcgacaugcugcgccuguucgacuucaacaagcaggcgauccggcgccucaaggccgaggcccagauguccauccagcugaucaacaaggccgugaacgcccugaucaacgaccagcucaucaugaagaaccaccuccgggacaucauggggauccccuacugcaacuacagcaaguacugguaccugaaccacaccgucacgggccgcaccucccugccccggugcuggcuggugagcaacggguccuaccugaacgagacccacuucagcgacgacaucgagcagcaggcggacaacaugaucaccgagcuccugcagaaggaguacauggaccgccagggcaagacgccccugggccugguggaccucuucgucuucuccaccagcuucuaccugaucuccaucuuccugcaccucgugaagaucccgugaggacuaguaauaaggaaacuguaugaaugucugugggcaggaagugaagagauccuucuguaaagguuuuuggaauuaugucugcugaauaauaaacuuuuuugaaauaauaaaucugguagaaaaaugagaucucaaaggcucuuuucagagccaccaaaaaaaaaaaaaaaaaaaaaaaaaaaaaaaaaaaaaaaaaaaaaaaaaaaaaaaaaaaaaaaaaaaaaaaaaaaaaaaaaaaaaaaaaaaaaaaaaaaaa

SEQ ID NO: 42708 - RNA, 1695 nt, Artificial Sequence
  mRNA product Design b-4 (hSL-A100) comprising derived and/or modified sequence from LASV(LASV035-NIG-2009;Clade II)__AIT17588__GPCmut13 (opt1)
aggagagucccgcagucggcguccagcggcucugcuuguucgugugugugucguugcaggccuuauucaagcuuaccaugggccagaucaucaccuucuuccaggaggugccccacgucaucgaggaggugaugaacaucgugcugaucgcccucagccugcuggccauccucaaggggaucuacaacgucgcgaccugcggccuguucgggcugguguccuuccuccugcugugcggccgcagcugcuccacgaccuacaaggggguguacgagcuccagacccuggagcuggacauggccagccucaacaugaccaugccgcuguccugcacgaagaacaacagccaccacuacaucauggucggcaacgagaccggccuggagcucacccugaccaacacguccaucaucaaccacaaguucugcaaccugagcgacgcccacaagaagaaccucuacgaccacgcccugauguccaucaucagcaccuuccaccuguccauccccaacuucaaccaguacgaggccaugagcugcgacuucaacgggggcaagaucuccgugcaguacaaccucagccacgcguacgccguggacgccgccaaccacugcgggaccaucgcgaacggcguccugcagaccuucaugcggauggccuggggcggguccuacaucgcccuggacagcggcaagggguccugggacugcaucaugacgagcuaccaguaccucaucauccagaacaccaccugggaggaccacugccaguucucccgccccagccccaucggcuaccuggggcugcucagccagcggacccgcgacaucuacaucucccggcgccugcugggcacguucaccuggacccucagcgacuccgagggcaacgagacccccgggggcuacugccugacgcgguggaugcugaucgaggccgagcucaagugcuucgggaacaccgccguggcgaagugcaacgagaagcacgacgaggaguucugcgacaugcugcgccuguucgacuucaacaagcaggccauccggcgccucaaggccgaggcccagaugagcauccagcugaucaacaaggccgugaacgcgcugaucaacgaccagcucaucaugaagaaccaccuccgggacaucaugggcauccccuacugcaacuacuccaaguacugguaccugaaccacaccgucaccgggaagacgagccugccccgcugcuggcugguguccaacggcagcuaccugaacgagacccacuucuccgacgacaucgagcagcaggccgacaacaugaucaccgagcuccugcagaaggaguacaucgaccggcagggcaagaccccgcuggggcugguggaccucuucgucuucagcacguccuucuaccugaucagcaucuuccugcaccucgugaagaucccgugaggacuaguaauaaggaaacuguaugaaugucugugggcaggaagugaagagauccuucuguaaagguuuuuggaauuaugucugcugaauaauaaacuuuuuugaaauaauaaaucugguagaaaaaugagaucucaaaggcucuuuucagagccaccaaaaaaaaaaaaaaaaaaaaaaaaaaaaaaaaaaaaaaaaaaaaaaaaaaaaaaaaaaaaaaaaaaaaaaaaaaaaaaaaaaaaaaaaaaaaaaaaaaaaa

SEQ ID NO: 42709 - RNA, 1695 nt, Artificial Sequence
  mRNA product Design b-4 (hSL-A100) comprising derived and/or modified sequence from LASV(LASV1000-NIG-2009;Clade II)__AIT17782__GPCmut13 (opt1)
aggagagucccgcagucggcguccagcggcucugcuuguucgugugugugucguugcaggccuuauucaagcuuaccaugggccagaucaucaccuucuuccaggaggugccccacgucaucgaggaggugaugaacaucgugcugaucgcccucagccugcuggccauccucaaggggaucuacaacgucgcgaccugcggccuguucgggcugguguccuuccuccugcugugcggccgcagcugcuccacgaccuacaaggggguguacgagcuccagacccuggagcuggacauggccagccucaacaugaccaugccgcuguccugcacgaagaacaacagccaccacuacaucauggucggcaacgagaccggccuggagcucacccugaccaacacguccaucaucaaccacaaguucugcaaccugagcgacgcccacaagaagaaccucuacgaccacgcccugauguccaucaucagcaccuuccaccuguccauccccaacuucaaccaguacgaggccaugagcugcgacuucaacgggggcaagaucuccgugcaguacaaccucagccacaccuacgcgguggacgccgccaaccacugcgggaccaucgccaacggcguccugcagacguucaugcggauggcguggggcggguccuacaucgcccuggacagcggcaagggguccugggacugcaucaugaccagcuaccaguaccucaucauccagaacaccaccugggaggaccacugccaguucucccgccccagccccaucggcuaccuggggcugcucagccagcggacgcgcgacaucuacaucucccggcgccugcugggcaccuucaccuggacccucagcgacuccgagggcaacgagacgcccgggggcuacugccugacccgguggaugcugaucgaggccgagcucaagugcuucgggaacaccgccguggccaagugcaacgagaagcacgacgaggaguucugcgacaugcugcgccuguucgacuucaacaagcaggcgaucaagcggcucaagaccgaggcccagaugagcauccagcugaucaacaaggccgugaacgcccugaucaacgaccagcucaucaugaagaaccaccuccgcgacaucaugggcauccccuacugcaacuacuccaaguacugguaccugaaccacacggucaccgggaagaccagccugccccggugcuggcugguguccaacggcagcuaccugaacgagacccacuucuccgacgacaucgagcagcaggccgacaacaugaucacggagcuccugcagaaggaguacaucgaccgccagggcaagaccccgcuggggcugguggaccucuucgucuucagcaccuccuucuaccugaucagcaucuuccugcaccucgugaagaucccgugaggacuaguaauaaggaaacuguaugaaugucugugggcaggaagugaagagauccuucuguaaagguuuuuggaauuaugucugcugaauaauaaacuuuuuugaaauaauaaaucugguagaaaaaugagaucucaaaggcucuuuucagagccaccaaaaaaaaaaaaaaaaaaaaaaaaaaaaaaaaaaaaaaaaaaaaaaaaaaaaaaaaaaaaaaaaaaaaaaaaaaaaaaaaaaaaaaaaaaaaaaaaaaaaa

SEQ ID NO: 42710 - RNA, 1695 nt, Artificial Sequence
  mRNA product Design b-4 (hSL-A100) comprising derived and/or modified sequence from LASV(LASV221-NIG-2010;Clade II)__AIT17624__GPCmut13 (opt1)
aggagagucccgcagucggcguccagcggcucugcuuguucgugugugugucguugcaggccuuauucaagcuuaccaugggccagaucaucaccuucuuccaggaggugccccacgucaucgaggaggugaugaacaucgugcugaucgcccucagccugcuggccauccucaaggggaucuacaacgucgcgaccugcggccuguucgggcugguguccuuccuccugcugugcggccgcagcugcuccacgaccuacaaggggguguacgagcuccagacccuggagcuggacauggccagccucaacaugaccaugccgcuguccugcacgaagaacaacagccaccacuacaucauggucggcaacgagaccggccuggagcucacccugaccaacacguccaucaucaaccacaaguucugcaaccugagcgacgcccacaagaagaaccucuacgaccacgcccugauguccaucaucagcaccuuccaccuguccauccccaacuucaaccaguacgaggccaugagcugcgacuucaacgggggcaagaucuccgugcaguacaaccucagccacaccuacgcgaucgacgccgccaaccacugcgggaccaucgccaacggcgugcugcagacguucaugcggauggcguggggcggguccuacaucgcccuggacagcggcaagggguccugggacugcaucaugaccagcuaccaguaccucaucauccagaacaccaccugggaggaccacugccaguucucccgccccagccccaucggcuaccuggggcugcucagccagcggacgcgcgacaucuacaucucccggcgccugcugggcaccuucaccuggacccucagcgacuccgagggcaacgagacgcccgggggcuacugccugacccgguggaugcugaucgaggccgagcucaagugcuucgggaacaccgccgucgccaagugcaacgagaagcacgacgaggaguucugcgacaugcugcgccuguucgacuucaacaagcaggcgauccggcgccucaagaccgaggcccagaugagcauccagcugaucaacaaggccgugaacgcccugaucaacgaccagcucaucaugaagaaccaccuccgggacaucaugggcauccccuacugcaacuacuccaaguacugguaccugaaccacacggugaccgggaagaccagccugccccgcugcuggcuggucuccaacggcagcuaccugaacgagacccacuucuccgacgacaucgagcagcaggccgacaacaugaucacggagaugcuccagaaggaguacauggaccggcagggcaagaccccgcuggggcugguggaccuguucguguucagcaccuccuucuaccucaucagcaucuuccugcaccuggucaagaucccgugaggacuaguaauaaggaaacuguaugaaugucugugggcaggaagugaagagauccuucuguaaagguuuuuggaauuaugucugcugaauaauaaacuuuuuugaaauaauaaaucugguagaaaaaugagaucucaaaggcucuuuucagagccaccaaaaaaaaaaaaaaaaaaaaaaaaaaaaaaaaaaaaaaaaaaaaaaaaaaaaaaaaaaaaaaaaaaaaaaaaaaaaaaaaaaaaaaaaaaaaaaaaaaaaa

SEQ ID NO: 42711 - RNA, 1695 nt, Artificial Sequence
  mRNA product Design b-4 (hSL-A100) comprising derived and/or modified sequence from LASV(LASV237-NIG-2010;Clade II)__AIT17638__GPCmut13 (opt1)
aggagagucccgcagucggcguccagcggcucugcuuguucgugugugugucguugcaggccuuauucaagcuuaccaugggccagaucaucaccuucuuccaggaggugccccacgucaucgaggaggugaugaacaucgugcugaucgcccucagccugcuggccauccucaaggggaucuacaacgucgcgaccugcggccuguucgggcugguguccuuccuccugcugugcggccgcagcugcuccacgaccuacaaggggguguacgagcuccagacccuggagcuggacauggccagccucaacaugaccaugccgcuguccugcacgaagaacaacagccaccacuacaucauggucggcaacgagaccggccuggagcucacccugaccaacacguccaucaucaaccacaaguucugcaaccugagcgacgcccacaagaaggaccucuacgaccacgcccugauguccaucaucagcaccuuccaccuguccauccccaacuucaaccaguacgaggccaugagcugcgacuucaacgggggcaagaucuccgugcaguacaaccucagccacaccuacgcgguggacgccgccaaccacugcgggaccaucgccaacggcguccugcagacguucaugcggauggcguggggcggguccuacaucgcccuggacagcggcaagggguccugggacugcaucaugaccagcuaccaguaccucaucauccagaacaccaccugggaggaccacugccaguucucccgccccagccccaucggcuaccuggggcugcucagccagcggacgcgcgacaucuacaucucccggcgccugcugggcaccuucaccuggacccucagcgacuccgagggcaacgagacgcccgggggcuacugccugacccgguggaugcugaucgaggccgagcucaagugcuucgggaacaccgccguggccaagugcaacgagaagcacgacgaggaguucugcgacaugcugcgccuguucgacuucaacaagcaggcgauccggcgccucaagaccgaggcccagaugagcauccagcugaucaacaaggccgugaacgcccugaucaacgaccagcucaucaugaagaaccaccuccgggacaucaugggcauccccuacugcaacuacuccaaguacugguaccugaaccacacggucaccgggaagaccagccugccccgcugcuggcugguguccaacggcagcuaccugaacgagacccacuucuccgacgacaucgagcagcaggccgacaacaugaucacggagcuccugcagaaggaguacauggaccggcagggcaagaccccgcuggggcugguggaccucuucgucuucagcaccuccuucuaccugaucagcaucuuccugcaccucaucaagaucccgugaggacuaguaauaaggaaacuguaugaaugucugugggcaggaagugaagagauccuucuguaaagguuuuuggaauuaugucugcugaauaauaaacuuuuuugaaauaauaaaucugguagaaaaaugagaucucaaaggcucuuuucagagccaccaaaaaaaaaaaaaaaaaaaaaaaaaaaaaaaaaaaaaaaaaaaaaaaaaaaaaaaaaaaaaaaaaaaaaaaaaaaaaaaaaaaaaaaaaaaaaaaaaaaaa

SEQ ID NO: 42712 - RNA, 1695 nt, Artificial Sequence
  mRNA product Design b-4 (hSL-A100) comprising derived and/or modified sequence from LASV(LASV253-NIG-2011;Clade II)__AIT17670__GPCmut13 (opt1)
aggagagucccgcagucggcguccagcggcucugcuuguucgugugugugucguugcaggccuuauucaagcuuaccaugggccagaucaucaccuucuuccaggaggugccccacgucaucgaggaggugaugaacaucgugcugaucgcccucagccugcuggccauccucaaggggaucuacaacgucgcgaccugcggccuguucgggcugguguccuuccuccugcugugcggccgcagcugcuccacgaccuacaaggggguguacgagcuccagacccuggagcuggacauggccagccucaacaugaccaugccgcuguccugcacgaagaacaacagccaccacuacaucauggucggcaacgagaccggccuggagcucacccugaccaacacguccaucaucaaccacaaguucugcaaccugagcgacgcccacaagaagaaccucuacgaccacgcccugauguccaucaucagcaccuuccaccuguccauccccaacuucaaccaguacgaggccaugagcugcgacuucaacgggggcaagaucuccgugcaguacaaccucagccacaccuacgcgguggacgccgccaaccacugcgggaccaucgccaacggcguccugcagacguucaugcggauggcguggggcggguccuacaucgcccuggacagcggcaagggguccugggacugcaucaugaccagcuaccaguaccucaucauccagaacaccaccugggaggaccacugccaguucucccgccccagccccaucggcuaccuggggcugcucagccagcggacgcgcgacaucuacaucucccggcgccugcugggcaccuucaccuggacccucagcgacuccgagggcaacgagacgcccgggggcuacugccugacccgguggaugcugaucgaggccgagcucaagugcuucgggaacaccgccguggccaagugcaacgagaagcacgacgaggaguucugcgacaugcugcgccuguucgacuucaacaagcaggcgauccggcgccucaaggccgaggcccagaugagcauccagcugaucaacaaggccgugaacgcccugaucaacgaccagcucaucaugaagaaccaccuccgggacaucaugggcaucccguacugcaacuacuccaaguacugguaccugaaccacaccgucacggggcgcaccagccugccccggugcuggcugguguccaacggcagcuaccugaacgagacccacuucuccgacgacaucgagcagcaggcggacaacaugaucaccgagcuccugcagaaggaguacaucgaccgccagggcaagacgccccuggggcugguggaccucuucgucuucagcaccuccuucuaccugaucagcaucuuccugcaccucgugaagaucccgugaggacuaguaauaaggaaacuguaugaaugucugugggcaggaagugaagagauccuucuguaaagguuuuuggaauuaugucugcugaauaauaaacuuuuuugaaauaauaaaucugguagaaaaaugagaucucaaaggcucuuuucagagccaccaaaaaaaaaaaaaaaaaaaaaaaaaaaaaaaaaaaaaaaaaaaaaaaaaaaaaaaaaaaaaaaaaaaaaaaaaaaaaaaaaaaaaaaaaaaaaaaaaaaaa

SEQ ID NO: 42713 - RNA, 1695 nt, Artificial Sequence
  mRNA product Design b-4 (hSL-A100) comprising derived and/or modified sequence from LASV(LASV254-NIG-2011;Clade II)__AIT17674__GPCmut13 (opt1)
aggagagucccgcagucggcguccagcggcucugcuuguucgugugugugucguugcaggccuuauucaagcuuaccaugggccagaucaucaccuucuuccaggaggugccccacgucaucgaggaggugaugaacaucgugcugaucgcccucagccugcuggccauccucaaggggaucuacaacgucgcgaccugcggccuguucgggcugguguccuuccuccugcugugcggccgcagcugcuccacgaccuacaaggggguguacgagcuccagacccuggagcuggacaugaccaaccucaacaugacgaugccgcugagcugcaccaagaacaacucccaccacuacaucauggucggcaacgagaccggccuggagcucacccugacgaacaccagcaucaucaaccacaaguucugcaaccuguccgacgcccacaagaagaaccucuacaaccacgcccugaugagcaucaucuccaccuuccaccugagcauccccaacuucaaccaguacgaggccauguccugcgacuucaacgggggcaagaucagcgugcaguacaaccucucccacagcuacgccguggacgcggccaaccacugcgggaccaucgccaacggcguccugcagacguucaugcggauggccuggggcggguccuacaucgcgcuggacagcggcaaggggaacugggacugcaucaugaccuccuaccaguaccucaucauccagaacaccaccugggaggaccacugccaguucagccgccccucccccaucggcuaccuggggcugcucagccagcggacgcgcgacaucuacaucagccggcgccugcugggcaccuucaccuggacccucuccgacagcgagggcaacgagacgcccgggggcuacugccugacccgguggaugcugaucgaggccgagcucaagugcuucgggaacaccgccguggccaagugcaacgagaagcacgacgaggaguucugcgacaugcugcgccuguucgacuucaacaagcaggccauccggcgccucaagaccgaggcgcaggccaacauccagcugaucaacaaggccgugaacgcccugaucaacgaccagcucaucaugaagaaccaccuccgggacaucaugggcauccccuacugcaacuacuccaaguacugguaccugaaccacacggucaccgggaagaccagccugccccgcugcuggcugguguccaacggcagcuaccugaacgagacccacuucuccgacgacaucgagcagcaggccgacaacaugaucacggagcuccugcagaaggaguacauggaccggcagggcaagaccccgcuggggcugguggaccucuucgucuucagcaccuccuucuaccugaucagcaucuuccugcaccucgugaagaucccgugaggacuaguaauaaggaaacuguaugaaugucugugggcaggaagugaagagauccuucuguaaagguuuuuggaauuaugucugcugaauaauaaacuuuuuugaaauaauaaaucugguagaaaaaugagaucucaaaggcucuuuucagagccaccaaaaaaaaaaaaaaaaaaaaaaaaaaaaaaaaaaaaaaaaaaaaaaaaaaaaaaaaaaaaaaaaaaaaaaaaaaaaaaaaaaaaaaaaaaaaaaaaaaaaa

SEQ ID NO: 42714 - RNA, 1695 nt, Artificial Sequence
  mRNA product Design b-4 (hSL-A100) comprising derived and/or modified sequence from LASV(Nig08-A19;Clade III)__ADU56618__GPCmut13 (opt1)
aggagagucccgcagucggcguccagcggcucugcuuguucgugugugugucguugcaggccuuauucaagcuuaccaugggccagaucgugaccuucuuccaggaggucccccacgugaucgaggaggugaugaacaucguccugaucgcccucagcauccuggccauccugaaggggcucuacaacaucgcgaccugcggccugaucgggcuggugacguuccuccugcuguccggccgcagcugcuccaugaccuacaaggggguguacgagcuccagacccuggagcugaacaugaacacccucaacaugacgaugccgcugagcugcaccaagaacaacucccaccacuacaucauggucggcaacgagaccggccuggagcucacccugacgaacaccagccugcuccaccacaaguucugcaaccuguccgacgcccacaagaagaaccuguacgaccacacccucaugagcaucaucuccaccuuccaccugagcauccccaacuucaaccaguacgaggccauguccugcgacuucaacgggggcaagaucacggugcaguacaaccugagccacuccuacgccaucgacgccgcgaaccacugcgggaccguggccaacggcguccuccagaccuucaugcggauggccuggggcgggagcuacaucgcccuggacuccggccgcgggaagugggacugcaucaugaccagcuaccaguaccugaucauccagaacacgaccugggaggaccacugccaguucucccggcccagccccaucggcuaccucgggcugcugucccagcgcacccgggacaucuacaucagccgccggcuccugggcaccuucacguggacccugagcgacuccgagggcaacgagacccccgggggcuacugccucacccgcuggaugcugaucgaggcggagcugaagugcuucgggaacacggccguggccaagugcaacgagaagcacgacgaggaguucugcgacaugcuccggcuguucgacuucaacaagcaggccauccgccggcugaaggccgaggcgcagaugagcauccagcucaucaacaaggccgugaacgcccugaucaacgaccagcugaucaugaagaaccaccuccgcgacaucaugggcauccccuacugcaacuacuccaaguacugguaccugaaccacaccagcaccgggcggaccucccugccccgcugcuggcucgucagcaacggcuccuaccugaacgagacgcacuucagcgacgacaucgagcagcaggccgacaacaugaucaccgagaugcugcagaaggaguaccuggaccggcagggcaagaccccgcucgggcugguggaccuguucguguucuccaccagcuucuaccucaucuccaucuuccugcaccuggucaagaucccgugaggacuaguaauaaggaaacuguaugaaugucugugggcaggaagugaagagauccuucuguaaagguuuuuggaauuaugucugcugaauaauaaacuuuuuugaaauaauaaaucugguagaaaaaugagaucucaaaggcucuuuucagagccaccaaaaaaaaaaaaaaaaaaaaaaaaaaaaaaaaaaaaaaaaaaaaaaaaaaaaaaaaaaaaaaaaaaaaaaaaaaaaaaaaaaaaaaaaaaaaaaaaaaaaa

SEQ ID NO: 42715 - RNA, 1698 nt, Artificial Sequence
  mRNA product Design b-4 (hSL-A100) comprising derived and/or modified sequence from LASV(G1180-SLE-2010;Clade IV)__AIT17168__GPCmut13 (opt1)
aggagagucccgcagucggcguccagcggcucugcuuguucgugugugugucguugcaggccuuauucaagcuuaccaugggccagaucgugaccuucuuccaggaggucccccacgugaucgaggaggugaugaacaucguccugaucgcccucagcauccuggccgugcugaaggggcucuacaacuucgcgaccugcggccugguggggcugcucaccuuccugcugcucugcggccgcuccugcaccgccagccgguacaagggggucuacgagcugcagacccuggagcucaacauggagacccugaacaugacgaugccgcuguccugcaccaagaacaacagccaccacuacaucauggugggcaacgagaccggccucgagcugacccugacgaacaccuccaucaucaaccacaaguucugcaaccucagcgacgcccacaagaagaaccuguacgaccacgcccugauguccaucaucagcaccuuccaccucuccauccccaacuucaaccaguacgaggccaugagcugcgacuucaacgggggcaagaucuccgugcaguacaaccugagccacuccuacgcgggggacgccgccaaccacugcggcaccgucgccaacggggugcugcagacguucaugcgcauggcguggggcggcagcuacaucgcccucgacuccgggcacggcagcugggacugcaucaugaccuccuaccaguaccugaucauccagaacaccaccugggaggaccacugccaguucagccggcccucccccaucggguaccugggccuccugagccagcgcacgcgggacaucuacaucagccgccggcugcucggcaccuucaccuggacccuguccgacagcgaggggaaggacacgccgggcggguacugccugacccgcuggaugcucaucgaggccgagcugaagugcuucggcaacaccgccguggccaagugcaacgagaagcacgacgaggaguucugcgacaugcugcggcuguucgacuucaacaagcaggcgauccagcgccugaaggccgaggcccagauguccauccagcugaucaacaaggccgucaacgcccucaucaacgaccagcugaucaugaagaaccaccuccgggacaucauggggauccccuacugcaacuacagcaaguacugguaccucaaccacaccacgaccggcaagaccucccugcccaagugcuggcuggugagcaacggcuccuaccucaacgagacccacuucagcgacgacaucgagcagcaggcggacaacaugaucacggagaugcugcagaaggaguacauggagcgccaggggaagacgccccugggccugguggaccucuucgucuucuccaccagcuucuaccugaucuccaucuuccugcaccucgugaagaucccgugaggacuaguaauaaggaaacuguaugaaugucugugggcaggaagugaagagauccuucuguaaagguuuuuggaauuaugucugcugaauaauaaacuuuuuugaaauaauaaaucugguagaaaaaugagaucucaaaggcucuuuucagagccaccaaaaaaaaaaaaaaaaaaaaaaaaaaaaaaaaaaaaaaaaaaaaaaaaaaaaaaaaaaaaaaaaaaaaaaaaaaaaaaaaaaaaaaaaaaaaaaaaaaaaa

SEQ ID NO: 42716 - RNA, 1698 nt, Artificial Sequence
  mRNA product Design b-4 (hSL-A100) comprising derived and/or modified sequence from LASV(G1442-SLE-2011;Clade IV)__AIT17180__GPCmut13 (opt1)
aggagagucccgcagucggcguccagcggcucugcuuguucgugugugugucguugcaggccuuauucaagcuuaccaugggccagaucgugaccuucuuccaggaggucccccacgugaucgaggaggugaugaacaucguccugaucgcccucagcauccuggccgugcugaaggggcucuacaacguggcgaccugcggccugaucgggcuggucacguuccuccugcugugcggccgcuccugcaccaccacccucuacaaggggguguacgagcugcagacgcuggagcucaacauggagacccugaacaugaccaugccgcugagcugcaccaagaacaacucccaccacuacauccgggugggcaacgagacgggccucgagcugacccugaccaacaccagcaucaucaaccacaaguucugcaaccucuccgacgcccacaagaagaaccuguacgaccacgcccugaugagcaucaucuccacguuccaccucagcauccccaacuucaaccaguacgaggccauguccugcgacuucaacgggggcaagaucagcguccaguacaaccugucccacagcuacgccggggacgcggccaaccacugcggcaccguggccaacggggugcugcagaccuucaugcgcauggccuggggcggcuccuacaucgcgcucgacagcgggcggggcaacugggacugcaucaugaccuccuaccaguaccugaucauccagaacacgaccugggacgaccacugccaguucagccgccccucccccaucggguaccugggccuccugagccagcggacccgcgacgucuacaucucccggcgccugcucggcaccuucacguggacccugagcgacagcgaggggaaggacaccccgggcggguacugccugacccgguggaugcucaucgaggccgagcugaagugcuucggcaacacggccguggccaagugcaacgagaagcacgacgaggaguucugcgacaugcugcgccucuucgacuucaacaagcaggccauccagcggcugaaggcggaggcccagauguccauccagcugaucaacaaggccgugaacgcccucaucaacgaccagcugaucaugaagaaccaccuccgcgacaucauggggauccccuacugcaacuacagcaaguacugguaccugaacaacaccgccaccggcaagaccucccugcccaagugcuggcugaucagcaacggcuccuaccucaacgagacgcacuucagcgacgacaucgagcaggaggcggacaacaugaucaccgagaugcugcagaaggaguacauggagcggcaggggaagacgccccugggccuggucgaccucuucguguucuccaccagcuucuaccugaucuccaucuuccugcaccucgugaagaucccgugaggacuaguaauaaggaaacuguaugaaugucugugggcaggaagugaagagauccuucuguaaagguuuuuggaauuaugucugcugaauaauaaacuuuuuugaaauaauaaaucugguagaaaaaugagaucucaaaggcucuuuucagagccaccaaaaaaaaaaaaaaaaaaaaaaaaaaaaaaaaaaaaaaaaaaaaaaaaaaaaaaaaaaaaaaaaaaaaaaaaaaaaaaaaaaaaaaaaaaaaaaaaaaaaa

SEQ ID NO: 42717 - RNA, 1698 nt, Artificial Sequence
  mRNA product Design b-4 (hSL-A100) comprising derived and/or modified sequence from LASV(G3010-SLE-2013;Clade IV)__AIT17344__GPCmut13 (opt1)
aggagagucccgcagucggcguccagcggcucugcuuguucgugugugugucguugcaggccuuauucaagcuuaccaugggccagaucgugaccuucuuccaggaggucccccacgugaucgaggaggugaugaacaucguccugaucgcccucagcauccuggccgugcugaaggggcucuacaacuucgcgaccugcggccugguggggcuggucacguuccuccugcugugcggccgcuccugcaccaccagccucuacaaggggguguacgagcugcagacccuggagcucaacauggagacgcugaacaugaccaugccgcuguccugcaccaagaacaacagccaccacuacaucauggugggcaacgagaccggccucgagcugacgcugaccaacaccuccaucaucaaccacaaguucugcaaccucagcgacgcccacaagaagaaccuguacaaccacgcccugauguccaucaucagcaccuuccaccucuccauccccaacuucaaccaguacgaggccaugagcugcgacuucaacgggggcaagaucuccguccaguacaaccugagccacuccuacgccggggacgcggccagccacugcggcacgguggccaacggggugcugcagaccuucaugcggauggccuggggcggcuccuacaucgcgcucgacagcggguacggcaagugggacugcaucaugaccuccuaccaguaccugaucauccagaacaccacgugggaggaccacugccaguucagccgccccucccccaucggguaccugggccuccugagccagcggacccgcgacaucuacaucagccggcgccugcucggcaccuucaccuggacgcuguccgacagcgaggggaaggacaccccgggcggguacugccugacccgguggaugcucaucgaggccgagcugaagugcuucggcaacaccgccgucgccaagugcaacgagaagcacgacgaggaguucugcgacaugcugcgccucuucgacuucaacaagcaggccauccagcggcugaagacggaggcgcagauguccauccagcugaucaacaaggccgugaacgcccucaucaacgaccagcugaucaugaagaaccaccuccgcgacaucauggggauccccuacugcaacuacagcaaguacugguaccugaaccacaccaccaccggcaagacgucccugcccaagugcuggcuggugagcaacggcuccuaccucaacgagacccacuucagcgacgacaucgagcagcaggccgacaacaugaucaccgagaugcugcagaaggaguacauggagcggcaggggaagacgccccugggccuggucgaccucuucguguucuccaccagcuucuaccugaucuccaucuuccugcaccucgugaagaucccgugaggacuaguaauaaggaaacuguaugaaugucugugggcaggaagugaagagauccuucuguaaagguuuuuggaauuaugucugcugaauaauaaacuuuuuugaaauaauaaaucugguagaaaaaugagaucucaaaggcucuuuucagagccaccaaaaaaaaaaaaaaaaaaaaaaaaaaaaaaaaaaaaaaaaaaaaaaaaaaaaaaaaaaaaaaaaaaaaaaaaaaaaaaaaaaaaaaaaaaaaaaaaaaaaa

SEQ ID NO: 42718 - RNA, 1698 nt, Artificial Sequence
  mRNA product Design b-4 (hSL-A100) comprising derived and/or modified sequence from LASV(G502-SLE-2009;Clade IV)__AIT17126__GPCmut13 (opt1)
aggagagucccgcagucggcguccagcggcucugcuuguucgugugugugucguugcaggccuuauucaagcuuaccaugggccagaucgugaccuucuuccaggaggucccccacgugaucgaggaggugaugaacaucguccugaucgcccucagcauccuggccgugcugaaggggcucuacaacuucgcgaccugcggccugguggggcugcucacguuccugcugcucugcggccgcuccugcaccaccgggcuguacaagggcgucuacgagcugcagacccucgagcugaacauggagacgcugaacaugaccaugccgcucagcugcaccaagaacaacucccaccacuacaucauggugggcaacgagaccgggcuggagcugacgcucaccaacaccagcaucaucaaccacaaguucugcaaccuguccgacgcccacaagaagaaccuguacgaccacgcccucaugagcaucaucuccaccuuccaccugagcauccccaacuucaaccaguacgaggccauguccugcgacuucaacggcgggaagaucagcgugcaguacaaccugucccacagcuacgccggcgacgcggccgaccacugcgggacggucgccaacggcgugcuccagaccuucaugcggauggccuggggcggguccuacaucgcgcuggacagcggccgcgggcggugggacugcaucaugaccuccuaccaguaccugaucauccagaacaccacgugggaggaccacugccaguucagccgccccucccccaucggcuaccucggccugcugagccagcggacccgcgacaucuacaucucccggcgccuccuggggaccuucaccuggacgcugagcgacagcgagggcaaggacacccccgggggcuacugccucacccgguggaugcugaucgaggccgagcugaagugcuucgggaacaccgccguggccaagugcaacgagaagcacgacgaggaguucugcgacaugcuccgccuguucgacuucaacaagcaggccauccagcggcugaaggcggaggcccagauguccauccagcucaucaacaaggccgucaacgcccugaucaacgaccagcuggugaugaagaaccaccuccgcgacaucaugggcauccccuacugcaacuacagccgguacugguaccugaaccacacgaccaccggccgcaccucccugcccaagugcuggcucgugagcaacggguccuaccugaacgagacgcacuucagcgacgacaucgagcagcaggccgacaacaugaucaccgagaugcugcagaaggaguacauggagcggcagggcaagaccccgcuggggcucgucgaccuguucguguucuccaccagcuucuaccugaucuccaucuuccuccaccuggugaagaucccgugaggacuaguaauaaggaaacuguaugaaugucugugggcaggaagugaagagauccuucuguaaagguuuuuggaauuaugucugcugaauaauaaacuuuuuugaaauaauaaaucugguagaaaaaugagaucucaaaggcucuuuucagagccaccaaaaaaaaaaaaaaaaaaaaaaaaaaaaaaaaaaaaaaaaaaaaaaaaaaaaaaaaaaaaaaaaaaaaaaaaaaaaaaaaaaaaaaaaaaaaaaaaaaaaa

SEQ ID NO: 42719 - RNA, 1698 nt, Artificial Sequence
  mRNA product Design b-4 (hSL-A100) comprising derived and/or modified sequence from LASV(G733-SLE-2010;Clade IV)__AIT17154__GPCmut13 (opt1)
aggagagucccgcagucggcguccagcggcucugcuuguucgugugugugucguugcaggccuuauucaagcuuaccaugggccagaucgugaccuucuuccaggaggucccccacgugaucgaggaggugaugaacaucguccugaucgcccucagcauccuggccgugcugaaggggcucuacaacuucgcgaccugcggcaucguggggcuggucuccuuccugcuccugugcggccgcagcugcacgaccucccuguacaaggggguguacgagcuccagacccuggagcugaacauggagacccucaacaugacgaugccgcugagcugcaccaagaacaacucccaccacuacaucauggugggcaacgagaccggccuggagcucacccugacgaacaccagcaucaucaaccacaaguucugcaaccuguccgacgcccacaagaagaaccucuacgaccacgcccugaugagcaucaucuccaccuuccaccugagcauccccaacuucaaccaguacgaggccauguccugcgacuucaacgggggcaagaucagcguccaguacaaccucucccacagcuacgccggggacgcggccaaccacugcggcaccaucgccaacggggugcugcagacguucaugcggauggccuggggcggcuccuacaucgcgcuggacagcgggcgcgaccggugggacugcaucaugaccuccuaccaguaccucaucauccagaacaccaccugggaggaccacugccaguucagccgccccucccccaucggcuaccuggggcugcucagccagcggacgcgcgacaucuacaucagccggcgccugcugggcaccuucaccuggacccucuccgacagcgagggcaaggacacgcccgggggcuacugccugacccgguggaugcugaucgaggccgagcucaagugcuucgggaacaccgccguggccaagugcaacgagaagcacgacgaggaguucugcgacaugcugcgccuguucgacuucaacaagcaggccauccagcggcucaaggcggaggcccagauguccauccagcugaucaacaaggccgucaacgcccugaucaacgaccagcucaucaugaagaaccaccuccgcgacaucaugggcauccccuacugcaacuacagcaaguacugguaccugaaccacaccacgaccgggaagaccucccugcccaagugcuggcuggugagcaacggcuccuaccugaacgagacccacuucagcgacgacaucgagcagcaggccgacaacaugaucacggagaugcuccagaaggaguacauggagcggcagggcaagaccccgcuggggcugguggaccuguucgucuucuccaccagcuucuaccucaucuccaucuuccugcaccuggugaagaucccgugaggacuaguaauaaggaaacuguaugaaugucugugggcaggaagugaagagauccuucuguaaagguuuuuggaauuaugucugcugaauaauaaacuuuuuugaaauaauaaaucugguagaaaaaugagaucucaaaggcucuuuucagagccaccaaaaaaaaaaaaaaaaaaaaaaaaaaaaaaaaaaaaaaaaaaaaaaaaaaaaaaaaaaaaaaaaaaaaaaaaaaaaaaaaaaaaaaaaaaaaaaaaaaaaa

SEQ ID NO: 42720 - RNA, 1698 nt, Artificial Sequence
  mRNA product Design b-4 (hSL-A100) comprising derived and/or modified sequence from MOPV/LASV reassortant(IGS-1;Clade IV)__AFY05576__GPCmut13 (opt1)
aggagagucccgcagucggcguccagcggcucugcuuguucgugugugugucguugcaggccuuauucaagcuuaccaugggccagaucgugaccuucuuccaggaggucccccacgugaucgaggaggugaugaacaucguccugaucgcccucagcgugcuggccgugcugaaggggcucuacaacuucgcgaccugcggccuggucgggcuggugacguuccuccugcugugcggccgcuccugcaccaccagccucuacaaggggguguacgagcugcagacccuggagcucaacauggagacgcugaacaugaccaugccgcuguccugcaccaagaacaacagccaccacuacaucauggucggcaacgagaccggccucgagcugacgcugaccaacaccuccaucaucaaccacaaguucugcaaccucagcgacgcccacaagaagaaccuguacgaccacgcccugauguccaucaucagcaccuuccaccucuccauccccaacuucaaccaguacgaggccaugagcugcgacuucaacgggggcaagaucuccgugcaguacaaccugagccacuccuacgccggggacgcggccaaccacugcggcacgguggccaacgggguccugcagaccuucaugcggauggccuggggcggcagcuacaucgcgcucgacuccgggcgcggcaacugggacugcaucaugaccagcuaccaguaccugaucauccagaacaccacgugggaggaccacugccaguucucccggcccagccccaucggguaccugggccuccugucccagcgcacccgggacaucuacaucagccgccggcugcucggcaccuucaccuggacgcugagcgacuccgagggggaggacaccccgggcggguacugccugacccgcuggaugcucaucgaggccgagcugaagugcuucggcaacaccgccguggccaagugcaacgagaagcacgacgaggaguucugcgacaugcugcggcuguucgacuucaacaagcaggccauccagcgccugaaggcggaggcccagaugagcauccagcugaucaacaaggccgugaacgcccucaucaacgaccagcugaucaugaagaaccaccuccgggacaucauggggauccccuacugcaacuacuccaaguacugguaccucaaccacacgaccaccggccgcaccagccugcccaagugcuggcuggucuccaacggcagcuaccucaacgagacgcacuucuccgacgacaucgagcagcaggccgacaacaugaucaccgagaugcugcagaaggaguacauggagcggcaggggaagacgccccugggccugguggaccucuucguguucagcaccuccuucuaccugaucagcaucuuccugcaccucgucaagaucccgugaggacuaguaauaaggaaacuguaugaaugucugugggcaggaagugaagagauccuucuguaaagguuuuuggaauuaugucugcugaauaauaaacuuuuuugaaauaauaaaucugguagaaaaaugagaucucaaaggcucuuuucagagccaccaaaaaaaaaaaaaaaaaaaaaaaaaaaaaaaaaaaaaaaaaaaaaaaaaaaaaaaaaaaaaaaaaaaaaaaaaaaaaaaaaaaaaaaaaaaaaaaaaaaaa

SEQ ID NO: 42721 - RNA, 1698 nt, Artificial Sequence
  mRNA product Design b-4 (hSL-A100) comprising derived and/or modified sequence from LASV(LM765-SLE-2012;Clade IV)__AIT17814__GPCmut13 (opt1)
aggagagucccgcagucggcguccagcggcucugcuuguucgugugugugucguugcaggccuuauucaagcuuaccaugggccagaucgugaccuucuuccaggaggucccccacgugaucgaggaggugaugaacaucguccugaucgcccucagcauccuggccgugcugaaggggcucuacaacuucgcgaccugcggccugguggggcuggucacguuccuccugcugugcggccgcuccugcaccaccagccucuacaaggggguguacgagcugcagacccuggagcucaacauggagacgcugaacaugaccaugccgcuguccugcaccaagaacaacagccaccacuacaucauggugggcaacgagaccggccucgagcugacgcugaccaacaccuccaucaucgaccacaaguucugcaaccucagcgacgcccaccggaagaaccuguacgaccacgcccugauguccaucaucagcaccuuccaccucuccauccccaacuucaaccaguacgaggccaugagcugcgacuucaacgggggcaagaucuccguccaguacaaccugagccacuccuacgccaaggacgcggccgaccacugcgggacgguggccaacggcgugcugcagaccuucaugcgcauggccuggggcgggagcuacaucgcgcucgacuccggccgggggcgcugggacugcaucaugaccagcuaccaguaccugaucauccagaacaccacgugggaggaccacugccaguucucccggcccagccccaucggcuaccuggggcuccugucccagcgcacccgggacaucuacaucagccgccggcugcucggcaccuucaccuggacgcugagcgacuccgagggcaaggacacccccgggggcuacugccugacccgcuggaugcucaucgaggccgagcugaagugcuucgggaacaccgccgucgccaagugcaacgagaagcacgacgaggaguucugcgacaugcugcggcuguucgacuucaacaagcaggccauccagcgccugaaggcggaggcccagaugagcauccagcugaucaacaaggccgugaacgcccucaucaacgaccagcugaucaugaagaaccaccuccgggacaucaugggcauccccuacugcaacuacuccaaguacugguaccucaaccacacgaccaccgggaagaccagccugcccaagugcuggcugguguccaacggcagcuaccucaacgagacgcacuucuccgacgacaucgagcagcaggccgacaacaugaucaccgagaugcugcagaaggaguacauggagcgccagggcaagaccccgcuggggcuggucgaccucuucguguucagcaccuccuucuaccugaucagcaucuuccugcaccucgugaagaucccgugaggacuaguaauaaggaaacuguaugaaugucugugggcaggaagugaagagauccuucuguaaagguuuuuggaauuaugucugcugaauaauaaacuuuuuugaaauaauaaaucugguagaaaaaugagaucucaaaggcucuuuucagagccaccaaaaaaaaaaaaaaaaaaaaaaaaaaaaaaaaaaaaaaaaaaaaaaaaaaaaaaaaaaaaaaaaaaaaaaaaaaaaaaaaaaaaaaaaaaaaaaaaaaaaa

SEQ ID NO: 42722 - RNA, 1698 nt, Artificial Sequence
  mRNA product Design b-4 (hSL-A100) comprising derived and/or modified sequence from LASV(LM776-SLE-2012;Clade IV)__AIT17824__GPCmut13 (opt1)
aggagagucccgcagucggcguccagcggcucugcuuguucgugugugugucguugcaggccuuauucaagcuuaccaugggccagaucgugaccuucuuccaggaggucccccacgugaucgaggaggugaugaacaucguccugaucgcccucagcauccuggccgugcugaaggggcucuacaacuucgcgaccugcggccugguggggcuggucacguuccuccugcugugcggccgcuccugcaccaccagcguguacaaggggguguacgagcuccagacccuggagcugaacauggagacgcucaacaugaccaugccgcuguccugcaccaagaacaacagccaccacuacaucauggucggcaacgagaccggccuggagcucacgcugaccaacaccuccaucaucaaccacaaguucugcaaccugagcgacgcccacaagaagaaccucuacgaccacgcccugauguccaucaucagcaccuuccaccuguccauccccaacuucaaccaguacgaggccaugagcugcgacuucaacgggggcaagaucuccgugcaguacaaccucagccacuccuacgccggggacgcggccaaccacugcggcacgguggccaacgggguccugcagaccuucaugcggauggccuggggcggcagcuacaucgcgcuggacuccgggcacggcaagugggacugcaucaugaccagcuaccaguaccucaucauccagaacaccacgugggaggaccacugccaguucucccgccccagccccaucggguaccugggccugcucucccagcggacccgcgacaucuacaucagccggcgccugcugggcaccuucaccuggacgcucagcgacuccgaggggaaggacaccccgggcggguacugccugacccgguggaugcugaucgaggccgagcucaagugcuucggcaacaccgccguggccaagugcaacgagaagcacgacgaggaguucugcgacaugcugcgccuguucgacuucaacaagcaggccauccagcggcucaaggcggaggcccagaugagcauccagcugaucaacaaggccgugaacgcccugaucaacgaccagcucaucaugaagaaccaccuccgcgacaucauggggauccccuacugcaacuacuccaaguacugguaccugaaccacacgaccaccggcaagaccagccugcccaagugcuggcuggucuccaacggcagcuaccugaacgagacgcacuucuccgacgacaucgagcagcaggccgacaacaugaucaccgagaugcuccagaaggaguacauggagcggcaggggaagacgccccugggccugguggaccuguucguguucagcaccuccuucuaccucaucagcaucuuccugcaccuggucaagaucccgugaggacuaguaauaaggaaacuguaugaaugucugugggcaggaagugaagagauccuucuguaaagguuuuuggaauuaugucugcugaauaauaaacuuuuuugaaauaauaaaucugguagaaaaaugagaucucaaaggcucuuuucagagccaccaaaaaaaaaaaaaaaaaaaaaaaaaaaaaaaaaaaaaaaaaaaaaaaaaaaaaaaaaaaaaaaaaaaaaaaaaaaaaaaaaaaaaaaaaaaaaaaaaaaaa

SEQ ID NO: 42723 - RNA, 1698 nt, Artificial Sequence
  mRNA product Design b-4 (hSL-A100) comprising derived and/or modified sequence from LASV(Mad39;Clade IV)__ANH09722__GPCmut13 (opt1)
aggagagucccgcagucggcguccagcggcucugcuuguucgugugugugucguugcaggccuuauucaagcuuaccaugggccagaucgugaccuucuuccaggaggucccccacgugaucgaggaggugaugaacaucguccugaucgcccucagcauccuggccgugcugaaggggcucuacaacguggcgaccugcggccugaucgggcuggucacguuccuccugcugugcggccgcuccugcaccaccacccucuacaaggggguguacgagcugcaggcccuggagcucaacauggagacgcugaacaugaccaugccgcugagcugcaccaagaacaacucccaccacuacauccgggugggcaacgagaccggccucgagcugacgcugaccaacaccagccucaucaaccacaaguucugcaaccuguccgacgcccacaagaagaaccuguacgaccacgcccucaugagcaucaucuccaccuuccaccugagcauccccaacuucaaccaguacgaggccauguccugcgacuucaacgacgggaagaucagcguccaguacaaccugucccacacguacgcgggcgacaccgccaaccacugcgggaccguggccaacggcgugcuccagaccuucaugcgcauggccuggggcgggagcuacaucgcgcuggacuccggccgcgggggcugggacugcaucaugacgagcuaccaguaccugaucauccagaacaccaccugggaggaccacugccaguucucccggcccagccccaucggguaccucggccugcugucccagcggacccgcgacaucuacaucagccggcgccuccugggcacguucaccuggacccuguccgacagcgaggggaaggacaccccgggcggguacugccucacgcgguggaugcugaucgaggccgagcugaagugcuucggcaacaccgccgucgccaagugcaacgagaagcacgacgaggaguucugcgacaugcuccgccuguucgacuucaacaagcaggccauccagcggcugaaggcggaggcccagaugagcauccagcucaucaacaaggccgugaacgcccugaucaacgaccagcugaucaugaagaaccaccuccgcgacaucauggggauccccuacugcaacuacuccaaguacugguaccugaaccacaccgugaccggcaagacgagccugcccaagugcuggcucgucuccaacggcagcuaccugaacgagacccacuucuccgacgacaucgagcagcaggccgacaacaugaucaccgagaugcugcagaaggaguacauggagcggcaggggaagacgccccugggccucguggaccuguucguguucagcaccuccuucuaccugaucagcaucuuccuccaccuggucaagaucccgugaggacuaguaauaaggaaacuguaugaaugucugugggcaggaagugaagagauccuucuguaaagguuuuuggaauuaugucugcugaauaauaaacuuuuuugaaauaauaaaucugguagaaaaaugagaucucaaaggcucuuuucagagccaccaaaaaaaaaaaaaaaaaaaaaaaaaaaaaaaaaaaaaaaaaaaaaaaaaaaaaaaaaaaaaaaaaaaaaaaaaaaaaaaaaaaaaaaaaaaaaaaaaaaaa

SEQ ID NO: 42724 - RNA, 1698 nt, Artificial Sequence
  mRNA product Design b-4 (hSL-A100) comprising derived and/or modified sequence from LASV(Z0947-SLE-2011;Clade IV)__AIT17840__GPCmut13 (opt1)
aggagagucccgcagucggcguccagcggcucugcuuguucgugugugugucguugcaggccuuauucaagcuuaccaugggccagaucgugaccuucuuccaggaggucccccacgugaucgaggaggugaugaacaucguccugaucgcccucagcauccuggccgugcugaaggggcucuacaacuucgcgaccugcggccugguggggcuggucacguuccuccugcugugcggccgcuccugcaccaucagccucuacaaggggguguacgagcugcagacccuggagcucaacauggagacccugaacaugacgaugccgcuguccugcaccaagaacaacagccaccacuacaucauggugggcaacgagaccggccucgagcugacccugacgaacaccuccaucaucaaccacaaguucugcaaccucagcgacgcccacaagaagaaccuguacgaccacgcccugauguccaucaucagcaccuuccaccucuccauccccaacuucaaccaguacgaggccaugagcugcgacuucaacgggggcaagaucuccguccaguacaaccugagccacuccuacgccggggacgcggccaaccacugcggcaccguggccaacggggugcugcagacguucaugcggauggccuggggcggcagcuacaucgcgcucgacuccgggcgcgaccggugggacugcaucaugaccagcuaccaguaccugaucauccagaacaccaccugggaggaccacugccaguucucccgccccagccccaucggcuaccuggggcuccugucccagcggacgcgcgacaucuacaucagccggcgccugcucggcaccuucaccuggacccugagcgacuccgagggcaaggacacgcccgggggcuacugccugacccgguggaugcucaucgaggccgagcugaagugcuucgggaacaccgccgucgccaagugcaacgagaagcacgacgaggaguucugcgacaugcugcgccucuucgacuucaacaagcaggccauccagcggcugaaggcggaggcccagaugagcauccagcugaucaacaaggccgugaacgcccucaucaacgaccagcugaucaugaagaaccaccuccgcgacaucaugggcauccccuacugcaacuacuccaaguacugguaccugaaccacaccacgaccgggaagaccagccugcccaagugcuggcugguguccaacggcagcuaccucaacgagacccacuucuccgacgacaucgagcagcaggccgacaacaugaucacggagaugcugcagaaggaguacauggagcggcagggcaagaccccgcuggggcuggucgaccucuucguguucagcaccuccuucuaccugaucagcaucuuccugcaccucgugaagaucccgugaggacuaguaauaaggaaacuguaugaaugucugugggcaggaagugaagagauccuucuguaaagguuuuuggaauuaugucugcugaauaauaaacuuuuuugaaauaauaaaucugguagaaaaaugagaucucaaaggcucuuuucagagccaccaaaaaaaaaaaaaaaaaaaaaaaaaaaaaaaaaaaaaaaaaaaaaaaaaaaaaaaaaaaaaaaaaaaaaaaaaaaaaaaaaaaaaaaaaaaaaaaaaaaaa

SEQ ID NO: 42725 - RNA, 1698 nt, Artificial Sequence
  mRNA product Design b-4 (hSL-A100) comprising derived and/or modified sequence from LASV(Josiah;Clade IV)__NP_694870__GPCmut13 (opt4)
aggagagucccgcagucggcguccagcggcucugcuuguucgugugugugucguugcaggccuuauucaagcuuaccaugggccagaucgugaccuucuuccaggaggugccccacgugaucgaggaggugaugaacaucgugcugaucgcccugagcgugcuggccgugcugaagggccuguacaacuucgccaccugcggccuggugggccuggugaccuuccugcugcugugcggcagaagcugcaccaccagccuguacaagggcguguacgagcugcagacccuggagcugaacauggagacccugaacaugaccaugccccugagcugcaccaagaacaacagccaccacuacaucauggugggcaacgagaccggccuggagcugacccugaccaacaccagcaucaucaaccacaaguucugcaaccugagcgacgcccacaagaagaaccuguacgaccacgcccugaugagcaucaucagcaccuuccaccugagcauccccaacuucaaccaguacgaggccaugagcugcgacuucaacggcggcaagaucagcgugcaguacaaccugagccacagcuacgccggcgacgccgccaaccacugcggcaccguggccaacggcgugcugcagaccuucaugagaauggccuggggcggcagcuacaucgcccuggacagcggcagaggcaacugggacugcaucaugaccagcuaccaguaccugaucauccagaacaccaccugggaggaccacugccaguucagcagacccagccccaucggcuaccugggccugcugagccagagaaccagagacaucuacaucagcagaagacugcugggcaccuucaccuggacccugagcgacagcgagggcaaggacacccccggcggcuacugccugaccagauggaugcugaucgaggccgagcugaagugcuucggcaacaccgccguggccaagugcaacgagaagcacgacgaggaguucugcgacaugcugagacuguucgacuucaacaagcaggccauccagagacugaaggccgaggcccagaugagcauccagcugaucaacaaggccgugaacgcccugaucaacgaccagcugaucaugaagaaccaccugagagacaucaugggcauccccuacugcaacuacagcaaguacugguaccugaaccacaccaccaccggcagaaccagccugcccaagugcuggcuggugagcaacggcagcuaccugaacgagacccacuucagcgacgacaucgagcagcaggccgacaacaugaucaccgagaugcugcagaaggaguacauggagagacagggcaagaccccccugggccugguggaccuguucguguucagcaccagcuucuaccugaucagcaucuuccugcaccuggugaagauccccugaggacuaguaauaaggaaacuguaugaaugucugugggcaggaagugaagagauccuucuguaaagguuuuuggaauuaugucugcugaauaauaaacuuuuuugaaauaauaaaucugguagaaaaaugagaucucaaaggcucuuuucagagccaccaaaaaaaaaaaaaaaaaaaaaaaaaaaaaaaaaaaaaaaaaaaaaaaaaaaaaaaaaaaaaaaaaaaaaaaaaaaaaaaaaaaaaaaaaaaaaaaaaaaaa

SEQ ID NO: 42726 - RNA, 1695 nt, Artificial Sequence
  mRNA product Design b-4 (hSL-A100) comprising derived and/or modified sequence from LASV(LP;Clade I)__AAF86701__GPCmut13 (opt4)
aggagagucccgcagucggcguccagcggcucugcuuguucgugugugugucguugcaggccuuauucaagcuuaccaugggccagaucaucaccuucuuccaggaggugccccacgugaucgaggaggugaugaacaucgugcugaucgcccugagccugcuggccauccugaagggccuguacaacaucgccaccugcggcaucaucggccugguggccuuccuguuccugugcggcaagagcugcagccugacccugaagggcggcuacgagcugcagacccuggagcugaacauggagacccugaacaugaccaugccccugagcugcaccaagaacagcagccaccacuacaucagagugggcaacgagaccggccuggagcugacccugaccaacaccagcaucaucaaccacaaguucugcaaccugagcgacgcccacaagaagaaccuguacgaccacgcccugaugagcaucaucagcaccuuccaccugagcauccccaacuucaaccaguacgaggccaugagcugcgacuucaacggcggcaagaucagcgugcaguacaaccugagccacagcuacgccggcgacgccgccgagcacugcggcaccguggccaacggcgugcugcagaccuucaugagaauggccuggggcggcagauacaucgcccuggacagcggcaagggcaacugggacugcaucaugaccagcuaccaguaccugaucauccagaacaccaccugggaggaccacugccaguucagcagacccagccccaucggcuaccugggccugcugagccagagaaccagagacaucuacaucagcagaagacugcugggcaccuucaccuggacccugagcgacagcgagggcaacgagacccccggcggcuacugccugaccagauggaugcugaucgaggccgagcugaagugcuucggcaacaccgccguggccaagugcaacgagaagcacgacgaggaguucugcgacaugcugagacuguucgacuucaacaagcaggccaucagaagacugaaggccgaggcccagaugagcauccagcugaucaacaaggccgugaacgcccugaucaacgaccagcugaucaugaagaaccaccugagagacaucaugggcauccccuacugcaacuacagcaaguacugguaccugaaccacaccagcagcggcagaaccagccugcccaagugcuggcugaucagcaacggcagcuaccugaacgagacccaguucagcgacgacaucgagcagcaggccgacaacaugaucaccgagaugcugcagaaggaguacaucgagagacagggcaagaccccccugggccugguggacaucuucaucuucagcaccagcuucuaccugaucagcaucuuccugcaccugaucaagauccccugaggacuaguaauaaggaaacuguaugaaugucugugggcaggaagugaagagauccuucuguaaagguuuuuggaauuaugucugcugaauaauaaacuuuuuugaaauaauaaaucugguagaaaaaugagaucucaaaggcucuuuucagagccaccaaaaaaaaaaaaaaaaaaaaaaaaaaaaaaaaaaaaaaaaaaaaaaaaaaaaaaaaaaaaaaaaaaaaaaaaaaaaaaaaaaaaaaaaaaaaaaaaaaaaa

SEQ ID NO: 42727 - RNA, 1695 nt, Artificial Sequence
  mRNA product Design b-4 (hSL-A100) comprising derived and/or modified sequence from LASV(803213;Clade II)__AAF86703__GPCmut13 (opt4)
aggagagucccgcagucggcguccagcggcucugcuuguucgugugugugucguugcaggccuuauucaagcuuaccaugggccagaucaucaccuucuuccaggaggugccccacgugaucgaggaggugaugaacaucgugcugaucgcccugagccugcuggccauccugaagggcaucuacaacguggccaccugcggccuguucggccugaucagcuuccugcugcugugcggcagaagcugcagcgugaccuacaagggcguguacgagcugcagacccuggagcugaacauggccaaccugaacaugaccaugccccugagcugcaccaagaacaacagccaccacuacaucauggugggcaacgagaccggccuggagcugacccugaccaacaccagcaucaucaaccacaaguucugcaaccugagcgacgcccacaagaagaaccuguacgaccacgcccugaugagcaucaucagcaccuuccaccugagcauccccaacuucaaccaguacgaggccaugagcugcgacuucaacggcggcaagaucagcgugcaguacaaccugagccacagcuucgccguggacgccgccaaccacugcggcaccaucgccaacggcgugcugcagaccuucaugagaauggccuggggcggcagcuacaucgcccuggacagcggcaagggcaacugggacugcaucaugaccagcuaccaguaccugaucauccagaacaccaccugggaggaccacugccaguucagcagacccagccccaucggcuaccugggccugcugagccagagaaccagagacaucuacaucagcagaagacugcugggcaccuucaccuggacccugagcgacagcgagggcaacgaggcccccggcggcuacugccugaccagauggaugcugaucgaggccgagcugaagugcuucggcaacaccgccguggccaagugcaacgagaagcacgacgaggaguucugcgacaugcugagacuguucgacuucaacaagcaggccaucaagagacugaagaccgaggcccagaugagcauccagcugaucaacaaggccgugaacgcccugaucaacgaccagcugaucaugaagaaccaccugagagacaucaugggcauccccuacugcaacuacagcagauacugguaccugaaccacaccgugaccggcaagaccagccugcccagaugcuggcuggugagcaacggcagcuaccugaacgagacccacuucagcgacgacaucgagcagcaggccgacaacaugaucaccgagaugcugcagaaggaguacauggacagacagggcaagaccccccugggccugguggaccuguucguguucagcaccagcuucuaccugaucagcaucuuccugcaccuggugaagauccccugaggacuaguaauaaggaaacuguaugaaugucugugggcaggaagugaagagauccuucuguaaagguuuuuggaauuaugucugcugaauaauaaacuuuuuugaaauaauaaaucugguagaaaaaugagaucucaaaggcucuuuucagagccaccaaaaaaaaaaaaaaaaaaaaaaaaaaaaaaaaaaaaaaaaaaaaaaaaaaaaaaaaaaaaaaaaaaaaaaaaaaaaaaaaaaaaaaaaaaaaaaaaaaaaa

SEQ ID NO: 42728 - RNA, 1695 nt, Artificial Sequence
  mRNA product Design b-4 (hSL-A100) comprising derived and/or modified sequence from LASV(GA391;Clade III)__CAA36645__GPCmut13 (opt4)
aggagagucccgcagucggcguccagcggcucugcuuguucgugugugugucguugcaggccuuauucaagcuuaccaugggccagaucgugaccuucuuccaggaggugccccacgugaucgaggaggugaugaacaucgugcugaucgcccugagcauccuggccauccugaagggccuguacaacguggccaccugcggccugaucggccuggugaccuuccugcugcugagcggcagaagcugcagccugaucuacaagggcaccuacgagcugcagacccuggagcugaacauggagacccugaacaugaccaugccccugagcugcaccaagaacaacagccaccacuacaucagagugggcaacgagaccggccuggagcugacccugaccaacaccagcauccugaaccacaaguucugcaaccugagcgacgcccacaagagaaaccuguacgaccacagccugaugagcaucaucagcaccuuccaccugagcauccccaacuucaaccaguacgaggccaugagcugcgacuucaacggcggcaagaucaccgugcaguacaaccugagccacagcuucgccguggacgccgccggccacugcggcacccuggccaacggcgugcugcagaccuucaugagaauggccuggggcggcagcuacaucgcccuggacagcggcagaggcaacugggacugcaucaugaccagcuaccaguaccugaucauccagaacaccaccugggacgaccacugccaguucagcagacccagccccaucggcuaccugggccugcugagccagagaaccagagacaucuacaucagcagaagacugcugggcaccuucaccuggacccugagcgacagcgagggcaacgagacccccggcggcuacugccugaccagauggaugcugaucgaggccgagcugaagugcuucggcaacaccgccguggccaagugcaacgagaagcacgacgaggaguucugcgacaugcugagacuguucgacuucaacaagcaggccaucagaagacugaagaccgaggcccagaugagcauccagcugaucaacaaggccgugaacgcccugaucaacgaccagcugaucaugaagaaccaccugagagacaucaugggcauccccuacugcaacuacagcagauacugguaccugaaccacaccagcaccggcaagaccagccugcccagaugcuggcugaucagcaacggcagcuaccugaacgagaccaaguucagcgacgacaucgagcagcaggccgacaacaugaucaccgagaugcugcagaaggaguacaucgacagacagggcaagaccccccugggccugguggaccuguucguguucagcaccagcuucuaccugaucagcaucuuccugcaccuggugaagauccccugaggacuaguaauaaggaaacuguaugaaugucugugggcaggaagugaagagauccuucuguaaagguuuuuggaauuaugucugcugaauaauaaacuuuuuugaaauaauaaaucugguagaaaaaugagaucucaaaggcucuuuucagagccaccaaaaaaaaaaaaaaaaaaaaaaaaaaaaaaaaaaaaaaaaaaaaaaaaaaaaaaaaaaaaaaaaaaaaaaaaaaaaaaaaaaaaaaaaaaaaaaaaaaaaa

SEQ ID NO: 42729 - RNA, 1698 nt, Artificial Sequence
  mRNA product Design b-4 (hSL-A100) comprising derived and/or modified sequence from LASV(AV;Clade V)__CCA30314__GPCmut13 (opt4)
aggagagucccgcagucggcguccagcggcucugcuuguucgugugugugucguugcaggccuuauucaagcuuaccaugggccagaucgugaccuucuuccaggaggugccccacgugaucgaggaggugaugaacaucgugcugaucgcccugagcauccuggccgugcugaagggccuguacaacaucgccaccugcggccugaucggccugaucaccuuccugcugcugugcggcagaagcugcagcagcaaccuguacaagggcguguacgagcugcagagccuggaccugaacauggagacccugaacaugaccaugccccugagcugcaccaagaacaacagccaccacuacaucagagugggcaacgacaccggccuggagcugacccugaccaacaccagcauccugaaccacaaguucugcaaccugagcgacgcccacaagaaggaccuguacgaccacgcccugaugagcaucaucagcaccuuccaccugagcauccccaacuucaaccaguacgaggccaugagcugcgacuucaacggcggcaagaucagcgugcaguacaaccugagccacagcuacgccaucgacgccgccaaccacugcggcaccguggccaacggcauccugcagaccuucaugagaauggccuggggcggcagcuacaucgcccuggacagcggcagaggcaacugggacugcaucaugaccagcuaccaguaccugaucauccagaacaccaccugggagaaccacugccaguucagcagacccagccccaucggcuaccugggccugcugagccagagaaccagagacaucuacaucagcagaagacugcugggcaccuucaccuggacccugagcgacagcgagggcaacgccacccccggcggcuacugccugaccagauggaugcugaucgaggccgagcugaagugcuucggcaacaccgccguggccaagugcaacgagaagcacgacgaggaguucugcgacaugcugagacuguucgacuucaacaagcaggccaucagcagacugaagagcgaggcccagaugagcauccagcugaucaacaaggccgugaacgcccugaucaacgaccagcugaucaugaagaaccaccugagagacaucaugggcauccccuacugcaacuacagcaaguacugguaccugaaccacaccaucaccggcaagaccagccugcccaagugcuggcuggugagcaacggcagcuaccugaacgagacccacuucagcgacgacaucgagcagcaggccgacaacaugaucaccgagaugcugcagaaggaguacauggagagacagggcaagaccccccugggccugguggaccuguucguguucagcaccagcuucuaccugaucagcaucuuccugagacuggugaagauccccugaggacuaguaauaaggaaacuguaugaaugucugugggcaggaagugaagagauccuucuguaaagguuuuuggaauuaugucugcugaauaauaaacuuuuuugaaauaauaaaucugguagaaaaaugagaucucaaaggcucuuuucagagccaccaaaaaaaaaaaaaaaaaaaaaaaaaaaaaaaaaaaaaaaaaaaaaaaaaaaaaaaaaaaaaaaaaaaaaaaaaaaaaaaaaaaaaaaaaaaaaaaaaaaaa

SEQ ID NO: 42730 - RNA, 1695 nt, Artificial Sequence
  mRNA product Design b-4 (hSL-A100) comprising derived and/or modified sequence from LASV(Togo/2016/7082;Clade VI)__AMR44577__GPCmut13 (opt4)
aggagagucccgcagucggcguccagcggcucugcuuguucgugugugugucguugcaggccuuauucaagcuuaccaugggccagaucaucaccuucuuccaggaggugccccacgugaucgaggaggugaugaacaucgugcugaucgcccugagccugcuggccauccugaagggcguguacaacguggccaccugcggcaucaucggccuggugaccuuccuguuccugugcggcagaagcugcagccugaucuacaagggcagcuacgagcugcagacccuggagcugaacauggagacccugaacaugaccaugccccugagcugcaccaagaacagcagccaccacuacaucagagugggcaacgagaccggccuggagcugacccugaccaacaccagcaucaucaaccacaaguucugcaaccugagcgacgcccacaagagaaaccuguacgaccacgcccugaugagcauccugagcaccuuccaccugagcauccccaacuucaaccaguacgaggccaugagcugcgacuucaacggcggcaagaucagcgugcaguacaaccugagccacgccuacgccguggacgccgccgagcacugcggcaccguggccaacggcgugcugcagaccuucaugagaauggccuggggcggcagcuacaucgcccuggacagcggcagaggcaacugggacugcaucaugaccagcuaccaguaccugaucauccagaacaccaccugggaggaccacugccaguucagcagacccagccccaucggcuaccugggccugcugagccagagaaccagagacaucuacaucagcagaagacugcugggcaccuucaccuggacccugagcgacagcgagggcaacgagacccccggcggcuacugccugaccagauggaugcugaucgaggccgagcugaagugcuucggcaacaccgccguggccaagugcaacgagaagcacgacgaggaguucugcgacaugcugagacuguucgacuucaacaagcaggccauccagagacugaagagcgaggcccagaugagcauccagcugaucaacaaggccgugaacgcccugaucaacgaccagcugaucaugaagaaccaccugagagacaugaugggcauccccuacugcaacuacagcaaguacugguaccugaaccacaccagcagcggcagaaccagccugcccaagugcuggcuggugagcaacggcagcuaccugaacgagacccacuucagcgacgacaucgagcagcaggccgacaacaugaucaccgagaugcugcagaaggaguacaucgacagacagggcaagaccccccugggccugguggaccuguucguguucagcaccagcuucuaccugaucagcaucuuccugcaccugaucaagauccccugaggacuaguaauaaggaaacuguaugaaugucugugggcaggaagugaagagauccuucuguaaagguuuuuggaauuaugucugcugaauaauaaacuuuuuugaaauaauaaaucugguagaaaaaugagaucucaaaggcucuuuucagagccaccaaaaaaaaaaaaaaaaaaaaaaaaaaaaaaaaaaaaaaaaaaaaaaaaaaaaaaaaaaaaaaaaaaaaaaaaaaaaaaaaaaaaaaaaaaaaaaaaaaaaa

SEQ ID NO: 42731 - RNA, 1695 nt, Artificial Sequence
  mRNA product Design b-4 (hSL-A100) comprising derived and/or modified sequence from LASV(KAK-428;Clade n.d. (VII))__ANH09740__GPCmut13 (opt4)
aggagagucccgcagucggcguccagcggcucugcuuguucgugugugugucguugcaggccuuauucaagcuuaccaugggccagaucgugaccuucuuccaggaggugccccacgugaucgaggaggugaugaacaucgugcugaucgcccugagccugcuggccauccugaagggccuguacaacuucgccaccugcggcgugaucggccugaucaccuuccugcugcugugcggcagaagcugcagcgccaccuacaagggccaguacgagcugcagacccuggagcugaacauggagagccugaacaugaccaugccccugagcugcaccaagaacaacagccaccacuacaucagagccggcaacaacaccggccuggagcugacccugaccaacaccagcaucaucagccacaaguucugcaaccugagcgacgcccacaagaagaaccuguacgaccacacccugaugagcaucaucaccaccuuccaccugagcauccccaacuucaaccaguacgaggccaugagcugcgacuucaacggcggcaagaucagcauccaguacaaccugagccacagcuacgccggcgacgccgcccagcacugcggcaccguggccaacggcgugcugcagaccuucaugagaauggccuggggcggcagcuaccuggcccuggacagcggcagaagaggcugggacugcaucaucagcagcuaccaguaccugaucauccagaacaccaccugggacgaccacugccaguucagcagacccagccccaucggcuaccugggcuucgugagccagaagaccagagacaucuacaucagcagaagacugcugggcaccuucaccuggacccugagcgacagcgagggccacgacaugcccggcggcuacugccugaccagauggaugcugaucgaggccgaccugaagugcuucggcaacaccgccguggccaagugcaacgagaagcacgacgaggaguucugcgacauguggagacuguucgacuucaacaagcaggccauccagagacugaaggccgaggcccagaugaacauccagcugaucaacaaggccgugaacgcccugaucaacgaccagcugaugaugaagaaccaccugagagacaucaugggcauccccuacugcaacuacagcaaguucugguaccugaacaacaccaccaccggcagaaccagccugcccagaugcuggcugaucagcaacggcagcuaccugaacgagacccacuucagcgacgacaucgagcagcaggccgacaacaugaucaccgagaugcugcagaaggaguacauggacagacagggcaagaccccccugggccugguggaccuguucguguucagcaccagcuucuaccugaucaccaucuuccugcaccuggugaagauccccugaggacuaguaauaaggaaacuguaugaaugucugugggcaggaagugaagagauccuucuguaaagguuuuuggaauuaugucugcugaauaauaaacuuuuuugaaauaauaaaucugguagaaaaaugagaucucaaaggcucuuuucagagccaccaaaaaaaaaaaaaaaaaaaaaaaaaaaaaaaaaaaaaaaaaaaaaaaaaaaaaaaaaaaaaaaaaaaaaaaaaaaaaaaaaaaaaaaaaaaaaaaaaaaaa

SEQ ID NO: 42732 - RNA, 1695 nt, Artificial Sequence; identical to SEQ ID NO: 42726
  mRNA product Design b-4 (hSL-A100) comprising derived and/or modified sequence from LASV(Pinneo-NIG-1969;Clade I)__AIT17836__GPCmut13 (opt4)

SEQ ID NO: 42733 - RNA, 1695 nt, Artificial Sequence
  mRNA product Design b-4 (hSL-A100) comprising derived and/or modified sequence from LASV(ISTH0009-NIG-2011;Clade II)__AIT17404__GPCmut13 (opt4)
aggagagucccgcagucggcguccagcggcucugcuuguucgugugugugucguugcaggccuuauucaagcuuaccaugggccagaucaucaccuucuuccaggaggugccccacgugaucgaggaggugaugaacaucgugcugaucgcccugagccugcuggccauccugaagggcaucuacaacguggccaccugcggccuguucggccuggugagcuuccugcugcugugcggcagaagcugcagcaccaccuacaagggcguguacgagcugcagacccuggagcuggacauggccagccugaacaugaccaugccccugagcugcaccaagaacaacagccaccacuacaucauggugggcaacgagaccggccuggagcugacccugaccaacaccagcaucaucaaccacaaguucugcaaccugagcgacgcccacaagaagaaccuguacgaccacgcccugaugagcaucaucagcaccuuccaccugagcauccccaacuucaaccaguacgaggccaugagcugcgacuucaacggcggcaagaucagcgugcaguacaaccugagccacgccuacgccguggacgccgccaaccacugcggcaccaucgccaacggcgugcugcagaccuucaugagaauggccuggggcggcagcuacaucgcccuggacagcggcaagggcagcugggacugcaucaugaccagcuaccaguaccugaucauccagaacaccaccugggaggaccacugccaguucagcagacccagccccaucggcuaccugggccugcugagccagagaaccagagacaucuacaucagcagaagacugcugggcaccuucaccuggacccugagcgacagcgagggcaacgagacccccggcggcuacugccugaccagauggaugcugaucgaggccgagcugaagugcuucggcaacaccgccguggccaagugcaacgagaagcacgacgaggaguucugcgacaugcugagacuguucgacuucaacaagcaggccaucagaagacugaagaccgaggcccagaugagcauccagcugaucaacaaggccgugaacgcccugaucaacgaccagcugaucaugaagaaccaccugagagacaucaugggcauccccuacugcaacuacagcaaguacugguaccugaaccacaccgugaccggcaagaccagccugcccagaugcuggcuggugagcaacggcagcuaccugaacgagacccacuucagcgacgacaucgagcagcaggccgacaacaugaucaccgagcugcugcagaaggaguacauggacagacagggcaagaccccccugggccugguggaccuguucguguucagcaccagcuucuaccugaucagcaucuuccugcaccugaucaagauccccugaggacuaguaauaaggaaacuguaugaaugucugugggcaggaagugaagagauccuucuguaaagguuuuuggaauuaugucugcugaauaauaaacuuuuuugaaauaauaaaucugguagaaaaaugagaucucaaaggcucuuuucagagccaccaaaaaaaaaaaaaaaaaaaaaaaaaaaaaaaaaaaaaaaaaaaaaaaaaaaaaaaaaaaaaaaaaaaaaaaaaaaaaaaaaaaaaaaaaaaaaaaaaaaaa

SEQ ID NO: 42734 - RNA, 1695 nt, Artificial Sequence
  mRNA product Design b-4 (hSL-A100) comprising derived and/or modified sequence from LASV(ISTH2010-NIG-2012;Clade II)__AIT17482__GPCmut13 (opt4)
aggagagucccgcagucggcguccagcggcucugcuuguucgugugugugucguugcaggccuuauucaagcuuaccaugggccagaucaucaccuucuuccaggaggugccccacgugaucgaggaggugaugaacaucgugcugaucgcccugagccugcuggccauccugaagggcaucuacaacguggccaccugcggccuguucggccuggugagcuuccugcugcugugcggcagaagcugcagcaccaccuacaagggcguguacgagcugcagacccuggagcuggacauggccagccugaacaugaccaugccccugagcugcaccaagaacaacagccaccacuacaucauggugggcaacgagaccggccuggagcugacccugaccaacaccagcaucaucaaccacaaguucugcaaccugagcgacgcccacaagaagaaccuguacgaccacgcccugaugagcaucaucagcaccuuccaccugagcauccccaacuucaaccaguacgaggccaugagcugcgacuucaacggcggcaagaucagcgugcaguacaaccugagccacgccuacgccguggacgccgccaaccacugcggcaccaucgccaacggcgugcugcagaccuucaugagaauggccuggggcggcagcuacaucgcccuggacagcggcaagggcagcugggacugcaucaugaccagcuaccaguaccugaucauccagaacaucaccugggaggaccacugccaguucagcagacccagccccaucggcuaccugggccugcugagccagagaaccagagacaucuacaucagcagaagacugcugggcaccuucaccuggacccugagcgacagcgagggcaacgagacccccggcggcuacugccugaccagauggaugcugaucgaggccgagcugaagugcuucggcaacaccgccguggccaagugcaacgagaagcacgacgaggaguucugcgacaugcugagacuguucgacuucaacaagcaggccaucagaagacugaagaccgaggcccagaugagcauccagcugaucaacaaggccgugaacgcccugaucaacgaccagcugaucaugaagaaccaccugagagacaucaugggcauccccuacugcaacuacagcaaguacugguaccugaaccacaccgugaccggcaagaccagccugcccagaugcuggcuggugagcaacggcagcuaccugaacgagacccacuucagcgacgacaucgagcagcaggccgacaacaugaucaccgagcugcugcagaaggaguacaucgacagacagggcaagaccccccugggccugguggaccuguucguguucagcaccagcuucuaccugaucagcaucuuccugcaccuggugaagauccccugaggacuaguaauaaggaaacuguaugaaugucugugggcaggaagugaagagauccuucuguaaagguuuuuggaauuaugucugcugaauaauaaacuuuuuugaaauaauaaaucugguagaaaaaugagaucucaaaggcucuuuucagagccaccaaaaaaaaaaaaaaaaaaaaaaaaaaaaaaaaaaaaaaaaaaaaaaaaaaaaaaaaaaaaaaaaaaaaaaaaaaaaaaaaaaaaaaaaaaaaaaaaaaaaa

SEQ ID NO: 42735 - RNA, 1695 nt, Artificial Sequence
  mRNA product Design b-4 (hSL-A100) comprising derived and/or modified sequence from LASV(Lassa virus/H.sapiens-wt/NGA/2015/ISTH_0543;Clade II)__AVO03639__GPCmut13 (opt4)
aggagagucccgcagucggcguccagcggcucugcuuguucgugugugugucguugcaggccuuauucaagcuuaccaugggccagaucaucaccuucuuccaggaggugccccacgugaucgaggaggugaugaacaucgugcugaucgcccugagccugcuggccauccugaagggcaucuacaacguggccaccugcggccuguucggccuggugagcuuccugcugcugugcggcagaagcugcagcaccaccuacaagggcguguacgagcugcagacccuggagcuggacauggccaaccugaacaugaccaugccccugagcugcaccaagaacaacagccaccacuacaucauggugggcaacgagaccggccuggagcugacccugaccaacaccagcaucaucaaccacaaguucugcaaccugagcgacgcccacaagaagaaccuguacgaccacgcccugaugagcaucaucagcaccuuccaccugagcauccccaacuucaaccaguacgaggccaugagcugcgacuucaacggcggcaagaucagcgugcaguacaaccugagccacaccuacgccguggacgccgccaaccacugcggcaccaucgccaacggcgugcugcagaccuucaugagaauggccuggggcggcagcuacaucgcccuggacagcggcaagggcagcugggacugcaucaugaccagcuaccaguaccuggugauccagaacaccaccugggaggaccacugccaguucagcagacccagccccaucggcuaccugggccugcugagccagagaaccagagacaucuacaucagcagaagacugcugggcaccuucaccuggacccugagcgacagcgagggcaacgagacccccggcggcuacugccugaccagauggaugcugaucgaggccgagcugaagugcuucggcaacaccgccguggccaagugcaacgagaagcacgacgaggaguucugcgacaugcugagacuguucgacuucaacaagcaggccaucagaagacugaagaccgaggcccagaugagcauccagcugaucaacaaggccgugaacgcccugaucaacgaccagcugaucaugaagaaccaccugagagacaucaugggcauccccuacugcaacuacagcaaguacugguaccugaaccacaccgugaccggcaagaccagccugcccagaugcuggcuggugagcaacggcagcuaccugaacgagacccacuucagcgacgacaucgagcagcaggccgacaacaugaucaccgagcugcugcagaaggaguacaucgacagacagggcaagaccccccugggccugguggaccuguucguguucagcaccagcuucuaccugaucagcaucuuccugcaccuggugaagauccccugaggacuaguaauaaggaaacuguaugaaugucugugggcaggaagugaagagauccuucuguaaagguuuuuggaauuaugucugcugaauaauaaacuuuuuugaaauaauaaaucugguagaaaaaugagaucucaaaggcucuuuucagagccaccaaaaaaaaaaaaaaaaaaaaaaaaaaaaaaaaaaaaaaaaaaaaaaaaaaaaaaaaaaaaaaaaaaaaaaaaaaaaaaaaaaaaaaaaaaaaaaaaaaaaa

SEQ ID NO: 42736 - RNA, 1695 nt, Artificial Sequence
  mRNA product Design b-4 (hSL-A100) comprising derived and/or modified sequence from LASV(Lassa virus/H.sapiens-wt/NGA/2016/ISTH_0009;Clade II)__AVO03571__GPCmut13 (opt4)
aggagagucccgcagucggcguccagcggcucugcuuguucgugugugugucguugcaggccuuauucaagcuuaccaugggccagaucaucaccuucuuccaggaggugccccacgugaucgaggaggugaugaacaucgugcugaucgcccugagccugcuggccauccugaagggcaucuacaacguggccaccugcggccugcugggccuggugagcuuccugcugcugugcggcagaagcugcagcaccaccuacaagggcguguacgagcugcagacccuggagcuggacauggccagccugaacaugaccaugccccugagcugcaccaagaacaacagccaccacuacaucauggugggcaacgagaccggccuggagcugacccugaccaacaccagcaucaucaaccacaaguucugcaaccugagcgacgcccacaagaagaaccuguacgaccacgcccugaugagcaucaucagcaccuuccaccugagcauccccaacuucaaccaguacgaggccaugagcugcgacuucaacggcggcagaaucagcgugcaguacaaccugagccacagcuacgccguggacgccgccaaccacugcggcaccaucgccaacggcgugcugcagaccuucaugagaauggccuggggcggcagcuacaucgcccuggacagcggcaagggcagcugggacugcaucaugaccagcuaccaguaccugaucauccagaacaccaccugggaggaccacugccaguucagcagacccagccccaucggcuaccugggccugcugagccagagaaccagagacaucuacaucagcagaagacugcugggcaccuucaccuggacccugagcgacagcgagggcaacgagacccccggcggcuacugccugaccagauggaugcugaucgaggccgagcugaagugcuucggcaacaccgccguggccaagugcaacgagaagcacgacgaggaguucugcgacaugcugagacuguucgacuucaacaagcaggccaucagaagacugaagaccgaggcccagaugagcauccagcugaucaacaaggccgugaacgcccugaucaacgaccagcugaucaugaagaaccaccugagagacaucaugggcauccccuacugcaacuacagcaaguacugguaccugaaccacaccgugaccggcaagaccagccugcccagaugcuggcuggugagcaacggcagcuaccugaacgagacccacuucagcgacgacaucgagcagcaggccgacaacaugaucaccgagcugcugcagaaggaguacaucgacagacagggcaagaccccccugggccugguggaccuguucguguucagcaccagcuucuaccugaucagcaucuuccugcaccuggugaagauccccugaggacuaguaauaaggaaacuguaugaaugucugugggcaggaagugaagagauccuucuguaaagguuuuuggaauuaugucugcugaauaauaaacuuuuuugaaauaauaaaucugguagaaaaaugagaucucaaaggcucuuuucagagccaccaaaaaaaaaaaaaaaaaaaaaaaaaaaaaaaaaaaaaaaaaaaaaaaaaaaaaaaaaaaaaaaaaaaaaaaaaaaaaaaaaaaaaaaaaaaaaaaaaaaaa

SEQ ID NO: 42737 - RNA, 1695 nt, Artificial Sequence
  mRNA product Design b-4 (hSL-A100) comprising derived and/or modified sequence from LASV(Lassa virus/H.sapiens-wt/NGA/2016/ISTH_0017;Clade II)__AVO03567__GPCmut13 (opt4)
aggagagucccgcagucggcguccagcggcucugcuuguucgugugugugucguugcaggccuuauucaagcuuaccaugggccagaucaucaccuucuuccaggaggugccccacgugaucgaggaggugaugaacaucgugcugaucgcccugagccugcuggccauccugaagggcaucuacaacguggccaccugcggccuguucggccuggugagcuuccugcugcugugcggcagaagcugcagcaccaccuacaagggcguguacgagcugcagacccuggagcuggacauggccagccugaacaugaccaugccccugagcugcaccaagaacaacagccaccacuacaucauggugggcaacgagaccggccuggagcugacccugaccaacaccagcaucaucaaccacaaguucugcaaccugagcgacgcccacaagaagaaccuguacgaccacgcccugaugagcaucaucagcaccuuccaccugagcauccccaacuucaaccaguacgaggccaugagcugcgacuucaacggcggcaagaucagcgugcaguacaaccugagccacaccuacgccaucgacgccgccaaccacugcggcaccaucgccaacggcgugcugcagaccuucaugagaauggccuggggcggcagcuacaucgcccuggacagcggcaagggcagcugggacugcaucaugaccagcuaccaguaccugaucauccagaacaccaccugggaggaccacugccaguucagcagacccagccccaucggcuaccugggccugcugagccagagaaccagagacaucuacaucagcagaagacugcugggcaccuucaccuggacccugagcgacagcgagggcaacgagacccccggcggcuacugccugaccagauggaugcugaucgaggccgagcugaagugcuucggcaacaccgccguggccaagugcaacgagaagcacgacgaggaguucugcgacaugcugagacuguucgacuucaacaagcaggccaucagaagacugaagaccgaggcccagaugagcauccagcugaucaacaaggccgugaacgcccugaucaacgaccagcugaucaugaagaaccaccugagagacaucaugggcauccccuacugcaacuacagcaaguacugguaccugaaccacaccgugaccggcaagaccagccugcccagaugcuggcuggugagcaacggcagcuaccugaacgagacccacuucagcgacgacaucgagcagcaggccgacaacaugaucaccgagcugcugcagaaggaguacauggacagacagggcaagaccccccugggccugguggaccuguucguguucagcaccagcuucuaccugaucagcaucuuccugcaccuggugagaauccccugaggacuaguaauaaggaaacuguaugaaugucugugggcaggaagugaagagauccuucuguaaagguuuuuggaauuaugucugcugaauaauaaacuuuuuugaaauaauaaaucugguagaaaaaugagaucucaaaggcucuuuucagagccaccaaaaaaaaaaaaaaaaaaaaaaaaaaaaaaaaaaaaaaaaaaaaaaaaaaaaaaaaaaaaaaaaaaaaaaaaaaaaaaaaaaaaaaaaaaaaaaaaaaaaa

SEQ ID NO: 42738 - RNA, 1695 nt, Artificial Sequence
  mRNA product Design b-4 (hSL-A100) comprising derived and/or modified sequence from LASV(Lassa virus/H.sapiens-wt/NGA/2018/ISTH_0959;Clade II)__AVV65099__GPCmut13 (opt4)
aggagagucccgcagucggcguccagcggcucugcuuguucgugugugugucguugcaggccuuauucaagcuuaccaugggccagaucaucaccuucuuccaggaggugccccacgugaucgaggaggugaugaacaucgugcugaucgcccugagccugcuggccauccugaagggcaucuacaacguggugaccugcggccuguucggccuggugagcuuccugcugcugugcggcagaagcugcagcaccaccuacaagggcguguacgagcugcagacccuggagcuggacauggccagccugaacaugaccaugccccugagcugcaccaagaacaacagccaccacuacaucauggugggcaacgagaccggccuggagcugacccugaccaacaccagcaucaucaaccacaaguucugcaaccugagcgacgcccacaagaagaaccuguacgaccacgcccugaugagcaucaucagcaccuuccaccugagcauccccaacuucaaccaguacgaggccaugagcugcgacuucaacggcggcaagaucagcgugcaguacaaccugagccacgccuacgccaucgacgccgccaaccacugcggcaccaucgccaacggcgugcugcagaccuucaugagaauggccuggggcggcagcuacaucgcccuggacagcggcaagggcagcugggacugcaucaugaccagcuaccaguaccugaucauccagaacaccaccugggaggaccacugccaguucagcagacccagccccaucggcuaccugggccugcugagccagagaaccagagacaucuacaucagcagaagacugcugggcaccuucaccuggacccugagcgacagcgagggcaacgagacccccggcggcuacugccugaccagauggaugcugaucgaggccgagcugaagugcuucggcaacaccgccguggccaagugcaacgagaagcacgacgaggaguucugcgacaugcugagacuguucgacuucaacaagcaggccaucagaagacugaagaccgaggcccagaugagcauccagcugaucaacaaggccgugaacgcccugaucaacgaccagcugaucaugaagaaccaccugagagacaucaugggcauccccuacugcaacuacagcaaguacugguaccugaaccacaccgugaccggcaagaccagccugcccagaugcuggcuggugagcaacggcagcuaccugaacgagacccacuucagcgacgacaucgagcagcaggccgacaacaugaucaccgagcugcugcagaaggaguacaucgacagacagggcaagaccccccugggccugguggaccuguucguguucagcaccagcuucuaccugaucagcaucuuccugcaccuggugaagauccccugaggacuaguaauaaggaaacuguaugaaugucugugggcaggaagugaagagauccuucuguaaagguuuuuggaauuaugucugcugaauaauaaacuuuuuugaaauaauaaaucugguagaaaaaugagaucucaaaggcucuuuucagagccaccaaaaaaaaaaaaaaaaaaaaaaaaaaaaaaaaaaaaaaaaaaaaaaaaaaaaaaaaaaaaaaaaaaaaaaaaaaaaaaaaaaaaaaaaaaaaaaaaaaaaa

SEQ ID NO: 42739 - RNA, 1695 nt, Artificial Sequence
  mRNA product Design b-4 (hSL-A100) comprising derived and/or modified sequence from LASV(LASV003-NIG-2008;Clade II)__AIT17580__GPCmut13 (opt4)
aggagagucccgcagucggcguccagcggcucugcuuguucgugugugugucguugcaggccuuauucaagcuuaccaugggccagaucaucaccuucuuccaggaggugccccacgugaucgaggaggugaugaacaucgugcugaucgcccugagccugcuggccauccugaagggcaucuacaacguggccaccugcggccuguucggccuggugagcuuccugcugcugugcggcagaagcugcagcaccaccuacaagggcguguacgagcugcagacccuggagcuggacauggccagccugaacaugaccaugccccugagcugcaccaagaacaacagccaccacuacaucauggugggcaacgagaccggccuggagcugacccugaccaacaccagcaucaucaaccacaaguucugcaaccugagcgacgcccacaagaagaaccuguacgaccacgcccugaugagcaucaucagcaccuuccaccugagcauccccaacuucaaccaguacgaggccaugagcugcgacuucaacggcggcaagaucagcgugcaguacaaccugagccacaccuacgccguggacgccgccaaccacugcggcaccaucgccaacggcgugcugcagaccuucaugagaauggccuggggcggcagcuacaucgcccuggacagcggcaagggcagcugggacugcaucaugaccagcuaccaguaccugaucauccagaacaccaccugggaggaccacugccaguucagcagacccagccccaucggcuaccugggccugcugagccagagaaccagagacaucuacaucagcagaagacugcugggcaccuucaccuggacccugagcgacagcgagagcaacgagacccccggcggcuacugccugaccagauggaugcugaucgaggccgagcugaagugcuucggcaacaccgccguggccaagugcaacgagaagcacgacgaggaguucugcgacaugcugagacuguucgacuucaacaagcaggccaucagaagacugaaggccgaggcccagaugagcauccagcugaucaacaaggccgugaacgcccugaucaacgaccagcugaucaugaagaaccaccugagagacaucaugggcauccccuacugcaacuacagcaaguacugguaccugaaccacaccgugaccggcagaaccagccugcccagaugcuggcuggugagcaacggcagcuaccugaacgagacccacuucagcgacgacaucgagcagcaggccgacaacaugaucaccgagcugcugcagaaggaguacauggacagacagggcaagaccccccugggccugguggaccuguucguguucagcaccagcuucuaccugaucagcaucuuccugcaccuggugaagauccccugaggacuaguaauaaggaaacuguaugaaugucugugggcaggaagugaagagauccuucuguaaagguuuuuggaauuaugucugcugaauaauaaacuuuuuugaaauaauaaaucugguagaaaaaugagaucucaaaggcucuuuucagagccaccaaaaaaaaaaaaaaaaaaaaaaaaaaaaaaaaaaaaaaaaaaaaaaaaaaaaaaaaaaaaaaaaaaaaaaaaaaaaaaaaaaaaaaaaaaaaaaaaaaaaa

SEQ ID NO: 42740 - RNA, 1695 nt, Artificial Sequence
  mRNA product Design b-4 (hSL-A100) comprising derived and/or modified sequence from LASV(LASV035-NIG-2009;Clade II)__AIT17588__GPCmut13 (opt4)
aggagagucccgcagucggcguccagcggcucugcuuguucgugugugugucguugcaggccuuauucaagcuuaccaugggccagaucaucaccuucuuccaggaggugccccacgugaucgaggaggugaugaacaucgugcugaucgcccugagccugcuggccauccugaagggcaucuacaacguggccaccugcggccuguucggccuggugagcuuccugcugcugugcggcagaagcugcagcaccaccuacaagggcguguacgagcugcagacccuggagcuggacauggccagccugaacaugaccaugccccugagcugcaccaagaacaacagccaccacuacaucauggugggcaacgagaccggccuggagcugacccugaccaacaccagcaucaucaaccacaaguucugcaaccugagcgacgcccacaagaagaaccuguacgaccacgcccugaugagcaucaucagcaccuuccaccugagcauccccaacuucaaccaguacgaggccaugagcugcgacuucaacggcggcaagaucagcgugcaguacaaccugagccacgccuacgccguggacgccgccaaccacugcggcaccaucgccaacggcgugcugcagaccuucaugagaauggccuggggcggcagcuacaucgcccuggacagcggcaagggcagcugggacugcaucaugaccagcuaccaguaccugaucauccagaacaccaccugggaggaccacugccaguucagcagacccagccccaucggcuaccugggccugcugagccagagaaccagagacaucuacaucagcagaagacugcugggcaccuucaccuggacccugagcgacagcgagggcaacgagacccccggcggcuacugccugaccagauggaugcugaucgaggccgagcugaagugcuucggcaacaccgccguggccaagugcaacgagaagcacgacgaggaguucugcgacaugcugagacuguucgacuucaacaagcaggccaucagaagacugaaggccgaggcccagaugagcauccagcugaucaacaaggccgugaacgcccugaucaacgaccagcugaucaugaagaaccaccugagagacaucaugggcauccccuacugcaacuacagcaaguacugguaccugaaccacaccgugaccggcaagaccagccugcccagaugcuggcuggugagcaacggcagcuaccugaacgagacccacuucagcgacgacaucgagcagcaggccgacaacaugaucaccgagcugcugcagaaggaguacaucgacagacagggcaagaccccccugggccugguggaccuguucguguucagcaccagcuucuaccugaucagcaucuuccugcaccuggugaagauccccugaggacuaguaauaaggaaacuguaugaaugucugugggcaggaagugaagagauccuucuguaaagguuuuuggaauuaugucugcugaauaauaaacuuuuuugaaauaauaaaucugguagaaaaaugagaucucaaaggcucuuuucagagccaccaaaaaaaaaaaaaaaaaaaaaaaaaaaaaaaaaaaaaaaaaaaaaaaaaaaaaaaaaaaaaaaaaaaaaaaaaaaaaaaaaaaaaaaaaaaaaaaaaaaaa

SEQ ID NO: 42741 - RNA, 1695 nt, Artificial Sequence
  mRNA product Design b-4 (hSL-A100) comprising derived and/or modified sequence from LASV(LASV1000-NIG-2009;Clade II)__AIT17782__GPCmut13 (opt4)
aggagagucccgcagucggcguccagcggcucugcuuguucgugugugugucguugcaggccuuauucaagcuuaccaugggccagaucaucaccuucuuccaggaggugccccacgugaucgaggaggugaugaacaucgugcugaucgcccugagccugcuggccauccugaagggcaucuacaacguggccaccugcggccuguucggccuggugagcuuccugcugcugugcggcagaagcugcagcaccaccuacaagggcguguacgagcugcagacccuggagcuggacauggccagccugaacaugaccaugccccugagcugcaccaagaacaacagccaccacuacaucauggugggcaacgagaccggccuggagcugacccugaccaacaccagcaucaucaaccacaaguucugcaaccugagcgacgcccacaagaagaaccuguacgaccacgcccugaugagcaucaucagcaccuuccaccugagcauccccaacuucaaccaguacgaggccaugagcugcgacuucaacggcggcaagaucagcgugcaguacaaccugagccacaccuacgccguggacgccgccaaccacugcggcaccaucgccaacggcgugcugcagaccuucaugagaauggccuggggcggcagcuacaucgcccuggacagcggcaagggcagcugggacugcaucaugaccagcuaccaguaccugaucauccagaacaccaccugggaggaccacugccaguucagcagacccagccccaucggcuaccugggccugcugagccagagaaccagagacaucuacaucagcagaagacugcugggcaccuucaccuggacccugagcgacagcgagggcaacgagacccccggcggcuacugccugaccagauggaugcugaucgaggccgagcugaagugcuucggcaacaccgccguggccaagugcaacgagaagcacgacgaggaguucugcgacaugcugagacuguucgacuucaacaagcaggccaucaagagacugaagaccgaggcccagaugagcauccagcugaucaacaaggccgugaacgcccugaucaacgaccagcugaucaugaagaaccaccugagagacaucaugggcauccccuacugcaacuacagcaaguacugguaccugaaccacaccgugaccggcaagaccagccugcccagaugcuggcuggugagcaacggcagcuaccugaacgagacccacuucagcgacgacaucgagcagcaggccgacaacaugaucaccgagcugcugcagaaggaguacaucgacagacagggcaagaccccccugggccugguggaccuguucguguucagcaccagcuucuaccugaucagcaucuuccugcaccuggugaagauccccugaggacuaguaauaaggaaacuguaugaaugucugugggcaggaagugaagagauccuucuguaaagguuuuuggaauuaugucugcugaauaauaaacuuuuuugaaauaauaaaucugguagaaaaaugagaucucaaaggcucuuuucagagccaccaaaaaaaaaaaaaaaaaaaaaaaaaaaaaaaaaaaaaaaaaaaaaaaaaaaaaaaaaaaaaaaaaaaaaaaaaaaaaaaaaaaaaaaaaaaaaaaaaaaaa

SEQ ID NO: 42742 - RNA, 1695 nt, Artificial Sequence
  mRNA product Design b-4 (hSL-A100) comprising derived and/or modified sequence from LASV(LASV221-NIG-2010;Clade II)__AIT17624__GPCmut13 (opt4)
aggagagucccgcagucggcguccagcggcucugcuuguucgugugugugucguugcaggccuuauucaagcuuaccaugggccagaucaucaccuucuuccaggaggugccccacgugaucgaggaggugaugaacaucgugcugaucgcccugagccugcuggccauccugaagggcaucuacaacguggccaccugcggccuguucggccuggugagcuuccugcugcugugcggcagaagcugcagcaccaccuacaagggcguguacgagcugcagacccuggagcuggacauggccagccugaacaugaccaugccccugagcugcaccaagaacaacagccaccacuacaucauggugggcaacgagaccggccuggagcugacccugaccaacaccagcaucaucaaccacaaguucugcaaccugagcgacgcccacaagaagaaccuguacgaccacgcccugaugagcaucaucagcaccuuccaccugagcauccccaacuucaaccaguacgaggccaugagcugcgacuucaacggcggcaagaucagcgugcaguacaaccugagccacaccuacgccaucgacgccgccaaccacugcggcaccaucgccaacggcgugcugcagaccuucaugagaauggccuggggcggcagcuacaucgcccuggacagcggcaagggcagcugggacugcaucaugaccagcuaccaguaccugaucauccagaacaccaccugggaggaccacugccaguucagcagacccagccccaucggcuaccugggccugcugagccagagaaccagagacaucuacaucagcagaagacugcugggcaccuucaccuggacccugagcgacagcgagggcaacgagacccccggcggcuacugccugaccagauggaugcugaucgaggccgagcugaagugcuucggcaacaccgccguggccaagugcaacgagaagcacgacgaggaguucugcgacaugcugagacuguucgacuucaacaagcaggccaucagaagacugaagaccgaggcccagaugagcauccagcugaucaacaaggccgugaacgcccugaucaacgaccagcugaucaugaagaaccaccugagagacaucaugggcauccccuacugcaacuacagcaaguacugguaccugaaccacaccgugaccggcaagaccagccugcccagaugcuggcuggugagcaacggcagcuaccugaacgagacccacuucagcgacgacaucgagcagcaggccgacaacaugaucaccgagaugcugcagaaggaguacauggacagacagggcaagaccccccugggccugguggaccuguucguguucagcaccagcuucuaccugaucagcaucuuccugcaccuggugaagauccccugaggacuaguaauaaggaaacuguaugaaugucugugggcaggaagugaagagauccuucuguaaagguuuuuggaauuaugucugcugaauaauaaacuuuuuugaaauaauaaaucugguagaaaaaugagaucucaaaggcucuuuucagagccaccaaaaaaaaaaaaaaaaaaaaaaaaaaaaaaaaaaaaaaaaaaaaaaaaaaaaaaaaaaaaaaaaaaaaaaaaaaaaaaaaaaaaaaaaaaaaaaaaaaaaa

SEQ ID NO: 42743 - RNA, 1695 nt, Artificial Sequence
  mRNA product Design b-4 (hSL-A100) comprising derived and/or modified sequence from LASV(LASV237-NIG-2010;Clade II)__AIT17638__GPCmut13 (opt4)
aggagagucccgcagucggcguccagcggcucugcuuguucgugugugugucguugcaggccuuauucaagcuuaccaugggccagaucaucaccuucuuccaggaggugccccacgugaucgaggaggugaugaacaucgugcugaucgcccugagccugcuggccauccugaagggcaucuacaacguggccaccugcggccuguucggccuggugagcuuccugcugcugugcggcagaagcugcagcaccaccuacaagggcguguacgagcugcagacccuggagcuggacauggccagccugaacaugaccaugccccugagcugcaccaagaacaacagccaccacuacaucauggugggcaacgagaccggccuggagcugacccugaccaacaccagcaucaucaaccacaaguucugcaaccugagcgacgcccacaagaaggaccuguacgaccacgcccugaugagcaucaucagcaccuuccaccugagcauccccaacuucaaccaguacgaggccaugagcugcgacuucaacggcggcaagaucagcgugcaguacaaccugagccacaccuacgccguggacgccgccaaccacugcggcaccaucgccaacggcgugcugcagaccuucaugagaauggccuggggcggcagcuacaucgcccuggacagcggcaagggcagcugggacugcaucaugaccagcuaccaguaccugaucauccagaacaccaccugggaggaccacugccaguucagcagacccagccccaucggcuaccugggccugcugagccagagaaccagagacaucuacaucagcagaagacugcugggcaccuucaccuggacccugagcgacagcgagggcaacgagacccccggcggcuacugccugaccagauggaugcugaucgaggccgagcugaagugcuucggcaacaccgccguggccaagugcaacgagaagcacgacgaggaguucugcgacaugcugagacuguucgacuucaacaagcaggccaucagaagacugaagaccgaggcccagaugagcauccagcugaucaacaaggccgugaacgcccugaucaacgaccagcugaucaugaagaaccaccugagagacaucaugggcauccccuacugcaacuacagcaaguacugguaccugaaccacaccgugaccggcaagaccagccugcccagaugcuggcuggugagcaacggcagcuaccugaacgagacccacuucagcgacgacaucgagcagcaggccgacaacaugaucaccgagcugcugcagaaggaguacauggacagacagggcaagaccccccugggccugguggaccuguucguguucagcaccagcuucuaccugaucagcaucuuccugcaccugaucaagauccccugaggacuaguaauaaggaaacuguaugaaugucugugggcaggaagugaagagauccuucuguaaagguuuuuggaauuaugucugcugaauaauaaacuuuuuugaaauaauaaaucugguagaaaaaugagaucucaaaggcucuuuucagagccaccaaaaaaaaaaaaaaaaaaaaaaaaaaaaaaaaaaaaaaaaaaaaaaaaaaaaaaaaaaaaaaaaaaaaaaaaaaaaaaaaaaaaaaaaaaaaaaaaaaaaa

SEQ ID NO: 42744 - RNA, 1695 nt, Artificial Sequence
  mRNA product Design b-4 (hSL-A100) comprising derived and/or modified sequence from LASV(LASV253-NIG-2011;Clade II)__AIT17670__GPCmut13 (opt4)
aggagagucccgcagucggcguccagcggcucugcuuguucgugugugugucguugcaggccuuauucaagcuuaccaugggccagaucaucaccuucuuccaggaggugccccacgugaucgaggaggugaugaacaucgugcugaucgcccugagccugcuggccauccugaagggcaucuacaacguggccaccugcggccuguucggccuggugagcuuccugcugcugugcggcagaagcugcagcaccaccuacaagggcguguacgagcugcagacccuggagcuggacauggccagccugaacaugaccaugccccugagcugcaccaagaacaacagccaccacuacaucauggugggcaacgagaccggccuggagcugacccugaccaacaccagcaucaucaaccacaaguucugcaaccugagcgacgcccacaagaagaaccuguacgaccacgcccugaugagcaucaucagcaccuuccaccugagcauccccaacuucaaccaguacgaggccaugagcugcgacuucaacggcggcaagaucagcgugcaguacaaccugagccacaccuacgccguggacgccgccaaccacugcggcaccaucgccaacggcgugcugcagaccuucaugagaauggccuggggcggcagcuacaucgcccuggacagcggcaagggcagcugggacugcaucaugaccagcuaccaguaccugaucauccagaacaccaccugggaggaccacugccaguucagcagacccagccccaucggcuaccugggccugcugagccagagaaccagagacaucuacaucagcagaagacugcugggcaccuucaccuggacccugagcgacagcgagggcaacgagacccccggcggcuacugccugaccagauggaugcugaucgaggccgagcugaagugcuucggcaacaccgccguggccaagugcaacgagaagcacgacgaggaguucugcgacaugcugagacuguucgacuucaacaagcaggccaucagaagacugaaggccgaggcccagaugagcauccagcugaucaacaaggccgugaacgcccugaucaacgaccagcugaucaugaagaaccaccugagagacaucaugggcauccccuacugcaacuacagcaaguacugguaccugaaccacaccgugaccggcagaaccagccugcccagaugcuggcuggugagcaacggcagcuaccugaacgagacccacuucagcgacgacaucgagcagcaggccgacaacaugaucaccgagcugcugcagaaggaguacaucgacagacagggcaagaccccccugggccugguggaccuguucguguucagcaccagcuucuaccugaucagcaucuuccugcaccuggugaagauccccugaggacuaguaauaaggaaacuguaugaaugucugugggcaggaagugaagagauccuucuguaaagguuuuuggaauuaugucugcugaauaauaaacuuuuuugaaauaauaaaucugguagaaaaaugagaucucaaaggcucuuuucagagccaccaaaaaaaaaaaaaaaaaaaaaaaaaaaaaaaaaaaaaaaaaaaaaaaaaaaaaaaaaaaaaaaaaaaaaaaaaaaaaaaaaaaaaaaaaaaaaaaaaaaaa

SEQ ID NO: 42745 - RNA, 1695 nt, Artificial Sequence
  mRNA product Design b-4 (hSL-A100) comprising derived and/or modified sequence from LASV(LASV254-NIG-2011;Clade II)__AIT17674__GPCmut13 (opt4)
aggagagucccgcagucggcguccagcggcucugcuuguucgugugugugucguugcaggccuuauucaagcuuaccaugggccagaucaucaccuucuuccaggaggugccccacgugaucgaggaggugaugaacaucgugcugaucgcccugagccugcuggccauccugaagggcaucuacaacguggccaccugcggccuguucggccuggugagcuuccugcugcugugcggcagaagcugcagcaccaccuacaagggcguguacgagcugcagacccuggagcuggacaugaccaaccugaacaugaccaugccccugagcugcaccaagaacaacagccaccacuacaucauggugggcaacgagaccggccuggagcugacccugaccaacaccagcaucaucaaccacaaguucugcaaccugagcgacgcccacaagaagaaccuguacaaccacgcccugaugagcaucaucagcaccuuccaccugagcauccccaacuucaaccaguacgaggccaugagcugcgacuucaacggcggcaagaucagcgugcaguacaaccugagccacagcuacgccguggacgccgccaaccacugcggcaccaucgccaacggcgugcugcagaccuucaugagaauggccuggggcggcagcuacaucgcccuggacagcggcaagggcaacugggacugcaucaugaccagcuaccaguaccugaucauccagaacaccaccugggaggaccacugccaguucagcagacccagccccaucggcuaccugggccugcugagccagagaaccagagacaucuacaucagcagaagacugcugggcaccuucaccuggacccugagcgacagcgagggcaacgagacccccggcggcuacugccugaccagauggaugcugaucgaggccgagcugaagugcuucggcaacaccgccguggccaagugcaacgagaagcacgacgaggaguucugcgacaugcugagacuguucgacuucaacaagcaggccaucagaagacugaagaccgaggcccaggccaacauccagcugaucaacaaggccgugaacgcccugaucaacgaccagcugaucaugaagaaccaccugagagacaucaugggcauccccuacugcaacuacagcaaguacugguaccugaaccacaccgugaccggcaagaccagccugcccagaugcuggcuggugagcaacggcagcuaccugaacgagacccacuucagcgacgacaucgagcagcaggccgacaacaugaucaccgagcugcugcagaaggaguacauggacagacagggcaagaccccccugggccugguggaccuguucguguucagcaccagcuucuaccugaucagcaucuuccugcaccuggugaagauccccugaggacuaguaauaaggaaacuguaugaaugucugugggcaggaagugaagagauccuucuguaaagguuuuuggaauuaugucugcugaauaauaaacuuuuuugaaauaauaaaucugguagaaaaaugagaucucaaaggcucuuuucagagccaccaaaaaaaaaaaaaaaaaaaaaaaaaaaaaaaaaaaaaaaaaaaaaaaaaaaaaaaaaaaaaaaaaaaaaaaaaaaaaaaaaaaaaaaaaaaaaaaaaaaaa

SEQ ID NO: 42746 - RNA, 1695 nt, Artificial Sequence
  mRNA product Design b-4 (hSL-A100) comprising derived and/or modified sequence from LASV(Nig08-A19;Clade III)__ADU56618__GPCmut13 (opt4)
aggagagucccgcagucggcguccagcggcucugcuuguucgugugugugucguugcaggccuuauucaagcuuaccaugggccagaucgugaccuucuuccaggaggugccccacgugaucgaggaggugaugaacaucgugcugaucgcccugagcauccuggccauccugaagggccuguacaacaucgccaccugcggccugaucggccuggugaccuuccugcugcugagcggcagaagcugcagcaugaccuacaagggcguguacgagcugcagacccuggagcugaacaugaacacccugaacaugaccaugccccugagcugcaccaagaacaacagccaccacuacaucauggugggcaacgagaccggccuggagcugacccugaccaacaccagccugcugcaccacaaguucugcaaccugagcgacgcccacaagaagaaccuguacgaccacacccugaugagcaucaucagcaccuuccaccugagcauccccaacuucaaccaguacgaggccaugagcugcgacuucaacggcggcaagaucaccgugcaguacaaccugagccacagcuacgccaucgacgccgccaaccacugcggcaccguggccaacggcgugcugcagaccuucaugagaauggccuggggcggcagcuacaucgcccuggacagcggcagaggcaagugggacugcaucaugaccagcuaccaguaccugaucauccagaacaccaccugggaggaccacugccaguucagcagacccagccccaucggcuaccugggccugcugagccagagaaccagagacaucuacaucagcagaagacugcugggcaccuucaccuggacccugagcgacagcgagggcaacgagacccccggcggcuacugccugaccagauggaugcugaucgaggccgagcugaagugcuucggcaacaccgccguggccaagugcaacgagaagcacgacgaggaguucugcgacaugcugagacuguucgacuucaacaagcaggccaucagaagacugaaggccgaggcccagaugagcauccagcugaucaacaaggccgugaacgcccugaucaacgaccagcugaucaugaagaaccaccugagagacaucaugggcauccccuacugcaacuacagcaaguacugguaccugaaccacaccagcaccggcagaaccagccugcccagaugcuggcuggugagcaacggcagcuaccugaacgagacccacuucagcgacgacaucgagcagcaggccgacaacaugaucaccgagaugcugcagaaggaguaccuggacagacagggcaagaccccccugggccugguggaccuguucguguucagcaccagcuucuaccugaucagcaucuuccugcaccuggugaagauccccugaggacuaguaauaaggaaacuguaugaaugucugugggcaggaagugaagagauccuucuguaaagguuuuuggaauuaugucugcugaauaauaaacuuuuuugaaauaauaaaucugguagaaaaaugagaucucaaaggcucuuuucagagccaccaaaaaaaaaaaaaaaaaaaaaaaaaaaaaaaaaaaaaaaaaaaaaaaaaaaaaaaaaaaaaaaaaaaaaaaaaaaaaaaaaaaaaaaaaaaaaaaaaaaaa

SEQ ID NO: 42747 - RNA, 1698 nt, Artificial Sequence
  mRNA product Design b-4 (hSL-A100) comprising derived and/or modified sequence from LASV(G1180-SLE-2010;Clade IV)__AIT17168__GPCmut13 (opt4)
aggagagucccgcagucggcguccagcggcucugcuuguucgugugugugucguugcaggccuuauucaagcuuaccaugggccagaucgugaccuucuuccaggaggugccccacgugaucgaggaggugaugaacaucgugcugaucgcccugagcauccuggccgugcugaagggccuguacaacuucgccaccugcggccuggugggccugcugaccuuccugcugcugugcggcagaagcugcaccgccagcagauacaagggcguguacgagcugcagacccuggagcugaacauggagacccugaacaugaccaugccccugagcugcaccaagaacaacagccaccacuacaucauggugggcaacgagaccggccuggagcugacccugaccaacaccagcaucaucaaccacaaguucugcaaccugagcgacgcccacaagaagaaccuguacgaccacgcccugaugagcaucaucagcaccuuccaccugagcauccccaacuucaaccaguacgaggccaugagcugcgacuucaacggcggcaagaucagcgugcaguacaaccugagccacagcuacgccggcgacgccgccaaccacugcggcaccguggccaacggcgugcugcagaccuucaugagaauggccuggggcggcagcuacaucgcccuggacagcggccacggcagcugggacugcaucaugaccagcuaccaguaccugaucauccagaacaccaccugggaggaccacugccaguucagcagacccagccccaucggcuaccugggccugcugagccagagaaccagagacaucuacaucagcagaagacugcugggcaccuucaccuggacccugagcgacagcgagggcaaggacacccccggcggcuacugccugaccagauggaugcugaucgaggccgagcugaagugcuucggcaacaccgccguggccaagugcaacgagaagcacgacgaggaguucugcgacaugcugagacuguucgacuucaacaagcaggccauccagagacugaaggccgaggcccagaugagcauccagcugaucaacaaggccgugaacgcccugaucaacgaccagcugaucaugaagaaccaccugagagacaucaugggcauccccuacugcaacuacagcaaguacugguaccugaaccacaccaccaccggcaagaccagccugcccaagugcuggcuggugagcaacggcagcuaccugaacgagacccacuucagcgacgacaucgagcagcaggccgacaacaugaucaccgagaugcugcagaaggaguacauggagagacagggcaagaccccccugggccugguggaccuguucguguucagcaccagcuucuaccugaucagcaucuuccugcaccuggugaagauccccugaggacuaguaauaaggaaacuguaugaaugucugugggcaggaagugaagagauccuucuguaaagguuuuuggaauuaugucugcugaauaauaaacuuuuuugaaauaauaaaucugguagaaaaaugagaucucaaaggcucuuuucagagccaccaaaaaaaaaaaaaaaaaaaaaaaaaaaaaaaaaaaaaaaaaaaaaaaaaaaaaaaaaaaaaaaaaaaaaaaaaaaaaaaaaaaaaaaaaaaaaaaaaaaaa

SEQ ID NO: 42748 - RNA, 1698 nt, Artificial Sequence
  mRNA product Design b-4 (hSL-A100) comprising derived and/or modified sequence from LASV(G1442-SLE-2011;Clade IV)__AIT17180__GPCmut13 (opt4)
aggagagucccgcagucggcguccagcggcucugcuuguucgugugugugucguugcaggccuuauucaagcuuaccaugggccagaucgugaccuucuuccaggaggugccccacgugaucgaggaggugaugaacaucgugcugaucgcccugagcauccuggccgugcugaagggccuguacaacguggccaccugcggccugaucggccuggugaccuuccugcugcugugcggcagaagcugcaccaccacccuguacaagggcguguacgagcugcagacccuggagcugaacauggagacccugaacaugaccaugccccugagcugcaccaagaacaacagccaccacuacaucagagugggcaacgagaccggccuggagcugacccugaccaacaccagcaucaucaaccacaaguucugcaaccugagcgacgcccacaagaagaaccuguacgaccacgcccugaugagcaucaucagcaccuuccaccugagcauccccaacuucaaccaguacgaggccaugagcugcgacuucaacggcggcaagaucagcgugcaguacaaccugagccacagcuacgccggcgacgccgccaaccacugcggcaccguggccaacggcgugcugcagaccuucaugagaauggccuggggcggcagcuacaucgcccuggacagcggcagaggcaacugggacugcaucaugaccagcuaccaguaccugaucauccagaacaccaccugggacgaccacugccaguucagcagacccagccccaucggcuaccugggccugcugagccagagaaccagagacguguacaucagcagaagacugcugggcaccuucaccuggacccugagcgacagcgagggcaaggacacccccggcggcuacugccugaccagauggaugcugaucgaggccgagcugaagugcuucggcaacaccgccguggccaagugcaacgagaagcacgacgaggaguucugcgacaugcugagacuguucgacuucaacaagcaggccauccagagacugaaggccgaggcccagaugagcauccagcugaucaacaaggccgugaacgcccugaucaacgaccagcugaucaugaagaaccaccugagagacaucaugggcauccccuacugcaacuacagcaaguacugguaccugaacaacaccgccaccggcaagaccagccugcccaagugcuggcugaucagcaacggcagcuaccugaacgagacccacuucagcgacgacaucgagcaggaggccgacaacaugaucaccgagaugcugcagaaggaguacauggagagacagggcaagaccccccugggccugguggaccuguucguguucagcaccagcuucuaccugaucagcaucuuccugcaccuggugaagauccccugaggacuaguaauaaggaaacuguaugaaugucugugggcaggaagugaagagauccuucuguaaagguuuuuggaauuaugucugcugaauaauaaacuuuuuugaaauaauaaaucugguagaaaaaugagaucucaaaggcucuuuucagagccaccaaaaaaaaaaaaaaaaaaaaaaaaaaaaaaaaaaaaaaaaaaaaaaaaaaaaaaaaaaaaaaaaaaaaaaaaaaaaaaaaaaaaaaaaaaaaaaaaaaaaa

SEQ ID NO: 42749 - RNA, 1698 nt, Artificial Sequence
  mRNA product Design b-4 (hSL-A100) comprising derived and/or modified sequence from LASV(G3010-SLE-2013;Clade IV)__AIT17344__GPCmut13 (opt4)
aggagagucccgcagucggcguccagcggcucugcuuguucgugugugugucguugcaggccuuauucaagcuuaccaugggccagaucgugaccuucuuccaggaggugccccacgugaucgaggaggugaugaacaucgugcugaucgcccugagcauccuggccgugcugaagggccuguacaacuucgccaccugcggccuggugggccuggugaccuuccugcugcugugcggcagaagcugcaccaccagccuguacaagggcguguacgagcugcagacccuggagcugaacauggagacccugaacaugaccaugccccugagcugcaccaagaacaacagccaccacuacaucauggugggcaacgagaccggccuggagcugacccugaccaacaccagcaucaucaaccacaaguucugcaaccugagcgacgcccacaagaagaaccuguacaaccacgcccugaugagcaucaucagcaccuuccaccugagcauccccaacuucaaccaguacgaggccaugagcugcgacuucaacggcggcaagaucagcgugcaguacaaccugagccacagcuacgccggcgacgccgccagccacugcggcaccguggccaacggcgugcugcagaccuucaugagaauggccuggggcggcagcuacaucgcccuggacagcggcuacggcaagugggacugcaucaugaccagcuaccaguaccugaucauccagaacaccaccugggaggaccacugccaguucagcagacccagccccaucggcuaccugggccugcugagccagagaaccagagacaucuacaucagcagaagacugcugggcaccuucaccuggacccugagcgacagcgagggcaaggacacccccggcggcuacugccugaccagauggaugcugaucgaggccgagcugaagugcuucggcaacaccgccguggccaagugcaacgagaagcacgacgaggaguucugcgacaugcugagacuguucgacuucaacaagcaggccauccagagacugaagaccgaggcccagaugagcauccagcugaucaacaaggccgugaacgcccugaucaacgaccagcugaucaugaagaaccaccugagagacaucaugggcauccccuacugcaacuacagcaaguacugguaccugaaccacaccaccaccggcaagaccagccugcccaagugcuggcuggugagcaacggcagcuaccugaacgagacccacuucagcgacgacaucgagcagcaggccgacaacaugaucaccgagaugcugcagaaggaguacauggagagacagggcaagaccccccugggccugguggaccuguucguguucagcaccagcuucuaccugaucagcaucuuccugcaccuggugaagauccccugaggacuaguaauaaggaaacuguaugaaugucugugggcaggaagugaagagauccuucuguaaagguuuuuggaauuaugucugcugaauaauaaacuuuuuugaaauaauaaaucugguagaaaaaugagaucucaaaggcucuuuucagagccaccaaaaaaaaaaaaaaaaaaaaaaaaaaaaaaaaaaaaaaaaaaaaaaaaaaaaaaaaaaaaaaaaaaaaaaaaaaaaaaaaaaaaaaaaaaaaaaaaaaaaa

SEQ ID NO: 42750 - RNA, 1698 nt, Artificial Sequence
  mRNA product Design b-4 (hSL-A100) comprising derived and/or modified sequence from LASV(G502-SLE-2009;Clade IV)__AIT17126__GPCmut13 (opt4)
aggagagucccgcagucggcguccagcggcucugcuuguucgugugugugucguugcaggccuuauucaagcuuaccaugggccagaucgugaccuucuuccaggaggugccccacgugaucgaggaggugaugaacaucgugcugaucgcccugagcauccuggccgugcugaagggccuguacaacuucgccaccugcggccuggugggccugcugaccuuccugcugcugugcggcagaagcugcaccaccggccuguacaagggcguguacgagcugcagacccuggagcugaacauggagacccugaacaugaccaugccccugagcugcaccaagaacaacagccaccacuacaucauggugggcaacgagaccggccuggagcugacccugaccaacaccagcaucaucaaccacaaguucugcaaccugagcgacgcccacaagaagaaccuguacgaccacgcccugaugagcaucaucagcaccuuccaccugagcauccccaacuucaaccaguacgaggccaugagcugcgacuucaacggcggcaagaucagcgugcaguacaaccugagccacagcuacgccggcgacgccgccgaccacugcggcaccguggccaacggcgugcugcagaccuucaugagaauggccuggggcggcagcuacaucgcccuggacagcggcagaggcagaugggacugcaucaugaccagcuaccaguaccugaucauccagaacaccaccugggaggaccacugccaguucagcagacccagccccaucggcuaccugggccugcugagccagagaaccagagacaucuacaucagcagaagacugcugggcaccuucaccuggacccugagcgacagcgagggcaaggacacccccggcggcuacugccugaccagauggaugcugaucgaggccgagcugaagugcuucggcaacaccgccguggccaagugcaacgagaagcacgacgaggaguucugcgacaugcugagacuguucgacuucaacaagcaggccauccagagacugaaggccgaggcccagaugagcauccagcugaucaacaaggccgugaacgcccugaucaacgaccagcuggugaugaagaaccaccugagagacaucaugggcauccccuacugcaacuacagcagauacugguaccugaaccacaccaccaccggcagaaccagccugcccaagugcuggcuggugagcaacggcagcuaccugaacgagacccacuucagcgacgacaucgagcagcaggccgacaacaugaucaccgagaugcugcagaaggaguacauggagagacagggcaagaccccccugggccugguggaccuguucguguucagcaccagcuucuaccugaucagcaucuuccugcaccuggugaagauccccugaggacuaguaauaaggaaacuguaugaaugucugugggcaggaagugaagagauccuucuguaaagguuuuuggaauuaugucugcugaauaauaaacuuuuuugaaauaauaaaucugguagaaaaaugagaucucaaaggcucuuuucagagccaccaaaaaaaaaaaaaaaaaaaaaaaaaaaaaaaaaaaaaaaaaaaaaaaaaaaaaaaaaaaaaaaaaaaaaaaaaaaaaaaaaaaaaaaaaaaaaaaaaaaaa

SEQ ID NO: 42751 - RNA, 1698 nt, Artificial Sequence
  mRNA product Design b-4 (hSL-A100) comprising derived and/or modified sequence from LASV(G733-SLE-2010;Clade IV)__AIT17154__GPCmut13 (opt4)
aggagagucccgcagucggcguccagcggcucugcuuguucgugugugugucguugcaggccuuauucaagcuuaccaugggccagaucgugaccuucuuccaggaggugccccacgugaucgaggaggugaugaacaucgugcugaucgcccugagcauccuggccgugcugaagggccuguacaacuucgccaccugcggcaucgugggccuggugagcuuccugcugcugugcggcagaagcugcaccaccagccuguacaagggcguguacgagcugcagacccuggagcugaacauggagacccugaacaugaccaugccccugagcugcaccaagaacaacagccaccacuacaucauggugggcaacgagaccggccuggagcugacccugaccaacaccagcaucaucaaccacaaguucugcaaccugagcgacgcccacaagaagaaccuguacgaccacgcccugaugagcaucaucagcaccuuccaccugagcauccccaacuucaaccaguacgaggccaugagcugcgacuucaacggcggcaagaucagcgugcaguacaaccugagccacagcuacgccggcgacgccgccaaccacugcggcaccaucgccaacggcgugcugcagaccuucaugagaauggccuggggcggcagcuacaucgcccuggacagcggcagagacagaugggacugcaucaugaccagcuaccaguaccugaucauccagaacaccaccugggaggaccacugccaguucagcagacccagccccaucggcuaccugggccugcugagccagagaaccagagacaucuacaucagcagaagacugcugggcaccuucaccuggacccugagcgacagcgagggcaaggacacccccggcggcuacugccugaccagauggaugcugaucgaggccgagcugaagugcuucggcaacaccgccguggccaagugcaacgagaagcacgacgaggaguucugcgacaugcugagacuguucgacuucaacaagcaggccauccagagacugaaggccgaggcccagaugagcauccagcugaucaacaaggccgugaacgcccugaucaacgaccagcugaucaugaagaaccaccugagagacaucaugggcauccccuacugcaacuacagcaaguacugguaccugaaccacaccaccaccggcaagaccagccugcccaagugcuggcuggugagcaacggcagcuaccugaacgagacccacuucagcgacgacaucgagcagcaggccgacaacaugaucaccgagaugcugcagaaggaguacauggagagacagggcaagaccccccugggccugguggaccuguucguguucagcaccagcuucuaccugaucagcaucuuccugcaccuggugaagauccccugaggacuaguaauaaggaaacuguaugaaugucugugggcaggaagugaagagauccuucuguaaagguuuuuggaauuaugucugcugaauaauaaacuuuuuugaaauaauaaaucugguagaaaaaugagaucucaaaggcucuuuucagagccaccaaaaaaaaaaaaaaaaaaaaaaaaaaaaaaaaaaaaaaaaaaaaaaaaaaaaaaaaaaaaaaaaaaaaaaaaaaaaaaaaaaaaaaaaaaaaaaaaaaaaa

SEQ ID NO: 42752 - RNA, 1698 nt, Artificial Sequence
  mRNA product Design b-4 (hSL-A100) comprising derived and/or modified sequence from MOPV/LASV reassortant(IGS-1;Clade IV)__AFY05576__GPCmut13 (opt4)
aggagagucccgcagucggcguccagcggcucugcuuguucgugugugugucguugcaggccuuauucaagcuuaccaugggccagaucgugaccuucuuccaggaggugccccacgugaucgaggaggugaugaacaucgugcugaucgcccugagcgugcuggccgugcugaagggccuguacaacuucgccaccugcggccuggugggccuggugaccuuccugcugcugugcggcagaagcugcaccaccagccuguacaagggcguguacgagcugcagacccuggagcugaacauggagacccugaacaugaccaugccccugagcugcaccaagaacaacagccaccacuacaucauggugggcaacgagaccggccuggagcugacccugaccaacaccagcaucaucaaccacaaguucugcaaccugagcgacgcccacaagaagaaccuguacgaccacgcccugaugagcaucaucagcaccuuccaccugagcauccccaacuucaaccaguacgaggccaugagcugcgacuucaacggcggcaagaucagcgugcaguacaaccugagccacagcuacgccggcgacgccgccaaccacugcggcaccguggccaacggcgugcugcagaccuucaugagaauggccuggggcggcagcuacaucgcccuggacagcggcagaggcaacugggacugcaucaugaccagcuaccaguaccugaucauccagaacaccaccugggaggaccacugccaguucagcagacccagccccaucggcuaccugggccugcugagccagagaaccagagacaucuacaucagcagaagacugcugggcaccuucaccuggacccugagcgacagcgagggcgaggacacccccggcggcuacugccugaccagauggaugcugaucgaggccgagcugaagugcuucggcaacaccgccguggccaagugcaacgagaagcacgacgaggaguucugcgacaugcugagacuguucgacuucaacaagcaggccauccagagacugaaggccgaggcccagaugagcauccagcugaucaacaaggccgugaacgcccugaucaacgaccagcugaucaugaagaaccaccugagagacaucaugggcauccccuacugcaacuacagcaaguacugguaccugaaccacaccaccaccggcagaaccagccugcccaagugcuggcuggugagcaacggcagcuaccugaacgagacccacuucagcgacgacaucgagcagcaggccgacaacaugaucaccgagaugcugcagaaggaguacauggagagacagggcaagaccccccugggccugguggaccuguucguguucagcaccagcuucuaccugaucagcaucuuccugcaccuggugaagauccccugaggacuaguaauaaggaaacuguaugaaugucugugggcaggaagugaagagauccuucuguaaagguuuuuggaauuaugucugcugaauaauaaacuuuuuugaaauaauaaaucugguagaaaaaugagaucucaaaggcucuuuucagagccaccaaaaaaaaaaaaaaaaaaaaaaaaaaaaaaaaaaaaaaaaaaaaaaaaaaaaaaaaaaaaaaaaaaaaaaaaaaaaaaaaaaaaaaaaaaaaaaaaaaaaa

SEQ ID NO: 42753 - RNA, 1698 nt, Artificial Sequence
  mRNA product Design b-4 (hSL-A100) comprising derived and/or modified sequence from LASV(LM765-SLE-2012;Clade IV)__AIT17814__GPCmut13 (opt4)
aggagagucccgcagucggcguccagcggcucugcuuguucgugugugugucguugcaggccuuauucaagcuuaccaugggccagaucgugaccuucuuccaggaggugccccacgugaucgaggaggugaugaacaucgugcugaucgcccugagcauccuggccgugcugaagggccuguacaacuucgccaccugcggccuggugggccuggugaccuuccugcugcugugcggcagaagcugcaccaccagccuguacaagggcguguacgagcugcagacccuggagcugaacauggagacccugaacaugaccaugccccugagcugcaccaagaacaacagccaccacuacaucauggugggcaacgagaccggccuggagcugacccugaccaacaccagcaucaucgaccacaaguucugcaaccugagcgacgcccacagaaagaaccuguacgaccacgcccugaugagcaucaucagcaccuuccaccugagcauccccaacuucaaccaguacgaggccaugagcugcgacuucaacggcggcaagaucagcgugcaguacaaccugagccacagcuacgccaaggacgccgccgaccacugcggcaccguggccaacggcgugcugcagaccuucaugagaauggccuggggcggcagcuacaucgcccuggacagcggcagaggcagaugggacugcaucaugaccagcuaccaguaccugaucauccagaacaccaccugggaggaccacugccaguucagcagacccagccccaucggcuaccugggccugcugagccagagaaccagagacaucuacaucagcagaagacugcugggcaccuucaccuggacccugagcgacagcgagggcaaggacacccccggcggcuacugccugaccagauggaugcugaucgaggccgagcugaagugcuucggcaacaccgccguggccaagugcaacgagaagcacgacgaggaguucugcgacaugcugagacuguucgacuucaacaagcaggccauccagagacugaaggccgaggcccagaugagcauccagcugaucaacaaggccgugaacgcccugaucaacgaccagcugaucaugaagaaccaccugagagacaucaugggcauccccuacugcaacuacagcaaguacugguaccugaaccacaccaccaccggcaagaccagccugcccaagugcuggcuggugagcaacggcagcuaccugaacgagacccacuucagcgacgacaucgagcagcaggccgacaacaugaucaccgagaugcugcagaaggaguacauggagagacagggcaagaccccccugggccugguggaccuguucguguucagcaccagcuucuaccugaucagcaucuuccugcaccuggugaagauccccugaggacuaguaauaaggaaacuguaugaaugucugugggcaggaagugaagagauccuucuguaaagguuuuuggaauuaugucugcugaauaauaaacuuuuuugaaauaauaaaucugguagaaaaaugagaucucaaaggcucuuuucagagccaccaaaaaaaaaaaaaaaaaaaaaaaaaaaaaaaaaaaaaaaaaaaaaaaaaaaaaaaaaaaaaaaaaaaaaaaaaaaaaaaaaaaaaaaaaaaaaaaaaaaaa

SEQ ID NO: 42754 - RNA, 1698 nt, Artificial Sequence
  mRNA product Design b-4 (hSL-A100) comprising derived and/or modified sequence from LASV(LM776-SLE-2012;Clade IV)__AIT17824__GPCmut13 (opt4)
aggagagucccgcagucggcguccagcggcucugcuuguucgugugugugucguugcaggccuuauucaagcuuaccaugggccagaucgugaccuucuuccaggaggugccccacgugaucgaggaggugaugaacaucgugcugaucgcccugagcauccuggccgugcugaagggccuguacaacuucgccaccugcggccuggugggccuggugaccuuccugcugcugugcggcagaagcugcaccaccagcguguacaagggcguguacgagcugcagacccuggagcugaacauggagacccugaacaugaccaugccccugagcugcaccaagaacaacagccaccacuacaucauggugggcaacgagaccggccuggagcugacccugaccaacaccagcaucaucaaccacaaguucugcaaccugagcgacgcccacaagaagaaccuguacgaccacgcccugaugagcaucaucagcaccuuccaccugagcauccccaacuucaaccaguacgaggccaugagcugcgacuucaacggcggcaagaucagcgugcaguacaaccugagccacagcuacgccggcgacgccgccaaccacugcggcaccguggccaacggcgugcugcagaccuucaugagaauggccuggggcggcagcuacaucgcccuggacagcggccacggcaagugggacugcaucaugaccagcuaccaguaccugaucauccagaacaccaccugggaggaccacugccaguucagcagacccagccccaucggcuaccugggccugcugagccagagaaccagagacaucuacaucagcagaagacugcugggcaccuucaccuggacccugagcgacagcgagggcaaggacacccccggcggcuacugccugaccagauggaugcugaucgaggccgagcugaagugcuucggcaacaccgccguggccaagugcaacgagaagcacgacgaggaguucugcgacaugcugagacuguucgacuucaacaagcaggccauccagagacugaaggccgaggcccagaugagcauccagcugaucaacaaggccgugaacgcccugaucaacgaccagcugaucaugaagaaccaccugagagacaucaugggcauccccuacugcaacuacagcaaguacugguaccugaaccacaccaccaccggcaagaccagccugcccaagugcuggcuggugagcaacggcagcuaccugaacgagacccacuucagcgacgacaucgagcagcaggccgacaacaugaucaccgagaugcugcagaaggaguacauggagagacagggcaagaccccccugggccugguggaccuguucguguucagcaccagcuucuaccugaucagcaucuuccugcaccuggugaagauccccugaggacuaguaauaaggaaacuguaugaaugucugugggcaggaagugaagagauccuucuguaaagguuuuuggaauuaugucugcugaauaauaaacuuuuuugaaauaauaaaucugguagaaaaaugagaucucaaaggcucuuuucagagccaccaaaaaaaaaaaaaaaaaaaaaaaaaaaaaaaaaaaaaaaaaaaaaaaaaaaaaaaaaaaaaaaaaaaaaaaaaaaaaaaaaaaaaaaaaaaaaaaaaaaaa

SEQ ID NO: 42755 - RNA, 1698 nt, Artificial Sequence
  mRNA product Design b-4 (hSL-A100) comprising derived and/or modified sequence from LASV(Mad39;Clade IV)__ANH09722__GPCmut13 (opt4)
aggagagucccgcagucggcguccagcggcucugcuuguucgugugugugucguugcaggccuuauucaagcuuaccaugggccagaucgugaccuucuuccaggaggugccccacgugaucgaggaggugaugaacaucgugcugaucgcccugagcauccuggccgugcugaagggccuguacaacguggccaccugcggccugaucggccuggugaccuuccugcugcugugcggcagaagcugcaccaccacccuguacaagggcguguacgagcugcaggcccuggagcugaacauggagacccugaacaugaccaugccccugagcugcaccaagaacaacagccaccacuacaucagagugggcaacgagaccggccuggagcugacccugaccaacaccagccugaucaaccacaaguucugcaaccugagcgacgcccacaagaagaaccuguacgaccacgcccugaugagcaucaucagcaccuuccaccugagcauccccaacuucaaccaguacgaggccaugagcugcgacuucaacgacggcaagaucagcgugcaguacaaccugagccacaccuacgccggcgacaccgccaaccacugcggcaccguggccaacggcgugcugcagaccuucaugagaauggccuggggcggcagcuacaucgcccuggacagcggcagaggcggcugggacugcaucaugaccagcuaccaguaccugaucauccagaacaccaccugggaggaccacugccaguucagcagacccagccccaucggcuaccugggccugcugagccagagaaccagagacaucuacaucagcagaagacugcugggcaccuucaccuggacccugagcgacagcgagggcaaggacacccccggcggcuacugccugaccagauggaugcugaucgaggccgagcugaagugcuucggcaacaccgccguggccaagugcaacgagaagcacgacgaggaguucugcgacaugcugagacuguucgacuucaacaagcaggccauccagagacugaaggccgaggcccagaugagcauccagcugaucaacaaggccgugaacgcccugaucaacgaccagcugaucaugaagaaccaccugagagacaucaugggcauccccuacugcaacuacagcaaguacugguaccugaaccacaccgugaccggcaagaccagccugcccaagugcuggcuggugagcaacggcagcuaccugaacgagacccacuucagcgacgacaucgagcagcaggccgacaacaugaucaccgagaugcugcagaaggaguacauggagagacagggcaagaccccccugggccugguggaccuguucguguucagcaccagcuucuaccugaucagcaucuuccugcaccuggugaagauccccugaggacuaguaauaaggaaacuguaugaaugucugugggcaggaagugaagagauccuucuguaaagguuuuuggaauuaugucugcugaauaauaaacuuuuuugaaauaauaaaucugguagaaaaaugagaucucaaaggcucuuuucagagccaccaaaaaaaaaaaaaaaaaaaaaaaaaaaaaaaaaaaaaaaaaaaaaaaaaaaaaaaaaaaaaaaaaaaaaaaaaaaaaaaaaaaaaaaaaaaaaaaaaaaaa

SEQ ID NO: 42756 - RNA, 1698 nt, Artificial Sequence
  mRNA product Design b-4 (hSL-A100) comprising derived and/or modified sequence from LASV(Z0947-SLE-2011;Clade IV)__AIT17840__GPCmut13 (opt4)
aggagagucccgcagucggcguccagcggcucugcuuguucgugugugugucguugcaggccuuauucaagcuuaccaugggccagaucgugaccuucuuccaggaggugccccacgugaucgaggaggugaugaacaucgugcugaucgcccugagcauccuggccgugcugaagggccuguacaacuucgccaccugcggccuggugggccuggugaccuuccugcugcugugcggcagaagcugcaccaucagccuguacaagggcguguacgagcugcagacccuggagcugaacauggagacccugaacaugaccaugccccugagcugcaccaagaacaacagccaccacuacaucauggugggcaacgagaccggccuggagcugacccugaccaacaccagcaucaucaaccacaaguucugcaaccugagcgacgcccacaagaagaaccuguacgaccacgcccugaugagcaucaucagcaccuuccaccugagcauccccaacuucaaccaguacgaggccaugagcugcgacuucaacggcggcaagaucagcgugcaguacaaccugagccacagcuacgccggcgacgccgccaaccacugcggcaccguggccaacggcgugcugcagaccuucaugagaauggccuggggcggcagcuacaucgcccuggacagcggcagagacagaugggacugcaucaugaccagcuaccaguaccugaucauccagaacaccaccugggaggaccacugccaguucagcagacccagccccaucggcuaccugggccugcugagccagagaaccagagacaucuacaucagcagaagacugcugggcaccuucaccuggacccugagcgacagcgagggcaaggacacccccggcggcuacugccugaccagauggaugcugaucgaggccgagcugaagugcuucggcaacaccgccguggccaagugcaacgagaagcacgacgaggaguucugcgacaugcugagacuguucgacuucaacaagcaggccauccagagacugaaggccgaggcccagaugagcauccagcugaucaacaaggccgugaacgcccugaucaacgaccagcugaucaugaagaaccaccugagagacaucaugggcauccccuacugcaacuacagcaaguacugguaccugaaccacaccaccaccggcaagaccagccugcccaagugcuggcuggugagcaacggcagcuaccugaacgagacccacuucagcgacgacaucgagcagcaggccgacaacaugaucaccgagaugcugcagaaggaguacauggagagacagggcaagaccccccugggccugguggaccuguucguguucagcaccagcuucuaccugaucagcaucuuccugcaccuggugaagauccccugaggacuaguaauaaggaaacuguaugaaugucugugggcaggaagugaagagauccuucuguaaagguuuuuggaauuaugucugcugaauaauaaacuuuuuugaaauaauaaaucugguagaaaaaugagaucucaaaggcucuuuucagagccaccaaaaaaaaaaaaaaaaaaaaaaaaaaaaaaaaaaaaaaaaaaaaaaaaaaaaaaaaaaaaaaaaaaaaaaaaaaaaaaaaaaaaaaaaaaaaaaaaaaaaa

SEQ ID NO: 42757 - RNA, 1698 nt, Artificial Sequence
  mRNA product Design b-4 (hSL-A100) comprising derived and/or modified sequence from LASV(Josiah;Clade IV)__NP_694870__GPCmut13 (opt5)
aggagagucccgcagucggcguccagcggcucugcuuguucgugugugugucguugcaggccuuauucaagcuuaccaugggccagaucgugaccuucuuucaagaggucccccacguuauugaagaggugaugaacaucgugcugauugcccucagcguccuggcugugcuuaaggggcuguacaauuucgccacaugcggacucguuggccuggugacguuucuucugcucugugggagauccugcaccacaucucuguauaaaggagucuacgaacugcagacccucgagcugaacauggaaacacuuaauaugaccaugccucugagcuguacaaagaacaauucccaucacuauaucauggugggcaacgagaccgggcucgagcugacgcuuaccaauacaucuauuaucaaccauaaauucugcaaucugagcgacgcgcacaagaaaaaccucuacgaucaugcucugauguccaucauuucuaccuuucaccugagcaucccgaauuucaaccaguaugaagccauguccugugacuuuaauggaggcaagauuagcguucaguacaaccucucucacuccuaugccggcgaugcugccaaucauugcgggacaguggcuaacggaguccugcaaaccuucaugcggauggccuggggcgggagcuacaucgcgcuugacucuggacgcggcaacugggauuguauuaugacguccuaccaguaucugaucauucagaauacaaccugggaggaccacugccaguuuagcagacccucuccuaucggguaccucggacugcuuucccaacggacacgcgauaucuauauuagcagacggcugcucggcaccuucaccuggacacuguccgacucugaaggcaaggauacgcccgggggauacugucugacccgcuggaugcucaucgaggccgagcugaaaugcuuuggcaacacagcuguggccaaguguaaugaaaaacaugacgaggaguucugcgauaugcuuagacuguuugacuucaacaagcaggcuauucagcggcucaaagccgaagcgcagaugagcauccaacugauuaauaaggccgugaacgcucuuaucaaugaucagcugaucaugaagaaccaccuccgcgacauuauggggaucccuuauugcaauuacuccaaauauugguaccugaaccacaccacaaccggaagaacgagccugcccaaguguuggcucgucucuaauggcuccuaccugaacgaaacacauuucagcgacgauauugagcagcaagccgacaauaugaucaccgagaugcuucagaaagaauauauggagcggcaggggaagaccccucugggacucguugaucuguuuguguucucuaccagcuuuuaccugauuuccaucuuccuucaccucgugaaaaucccgugaggacuaguaauaaggaaacuguaugaaugucugugggcaggaagugaagagauccuucuguaaagguuuuuggaauuaugucugcugaauaauaaacuuuuuugaaauaauaaaucugguagaaaaaugagaucucaaaggcucuuuucagagccaccaaaaaaaaaaaaaaaaaaaaaaaaaaaaaaaaaaaaaaaaaaaaaaaaaaaaaaaaaaaaaaaaaaaaaaaaaaaaaaaaaaaaaaaaaaaaaaaaaaaaa

SEQ ID NO: 42758 - RNA, 1695 nt, Artificial Sequence
  mRNA product Design b-4 (hSL-A100) comprising derived and/or modified sequence from LASV(LP;Clade I)__AAF86701__GPCmut13 (opt5)
aggagagucccgcagucggcguccagcggcucugcuuguucgugugugugucguugcaggccuuauucaagcuuaccaugggccagaucauuaccuucuuucaagaggugccccacgucaucgaagagguuaugaacauugugcugaucgcccucagccugcuugcuauucugaaggggcucuacaauaucgccacaugcggaaucauuggccugguggcguuccuuuuucugugugggaaauccugcucucucacgcugaagggaggcuaugaacugcagacccucgagcugaacauggaaacacuuaauaugaccaugccucugagcuguaccaaaaacuccucucaucacuacaucagagucgggaaugagacaggacucgagcugacacuuaccaacacgagcauuaucaaucauaaguucugcaaccuguccgacgcucacaaaaagaaucucuaugaucaugcccugaugucuauuaucagcaccuuucaccuguccauuccgaacuucaaucaguacgaagccaugagcugugacuuuaacggcggcaagaucucugugcaguauaaucucucccacagcuacgcuggggaugccgcugagcauugcggaacaguugccaacggcgugcugcaaaccuucaugcggauggcguggggagggcgcuauaucgcccuugacucuggcaaagggaauugggauuguauuaugacauccuaccaguaccugaucauucagaacaccacgugggaagaccacugccaguuuagcagacccucuccuaucggauaucucggccugcuuucccaacggacacgcgauauuuacaucagcagacggcugcucggcaccuucacauggacccuguccgacucugaggggaacgagacccccggaggcuauugucugacacgcuggaugcucaucgaagcugagcugaagugcuuugggaauacggccgucgcuaaauguaacgaaaagcaugaugaggaguucugcgacaugcuuagacuguuugauuucaauaaacaggccauucggcgccucaaggcggaagcccagaugagcauccagcugauuaacaaggcugugaaugcccuuaucaacgaccaacugauuaugaaaaaucaccucagagauaucaugggaaucccuuacugcaacuauuccaaguacugguaucugaaucacaccagcucuggccggacaucccugcccaaauguuggcucauuagcaacgggucuuaccugaaugagacccaguucagcgacgacaucgaacagcaagcugauaacaugauuacagagaugcuucagaaggaauacaucgagcgccagggaaaaaccccucugggccucguugacauuuuuaucuucuccacgucuuuuuaucugauuagcaucuuccugcaucuuaucaagauuccgugaggacuaguaauaaggaaacuguaugaaugucugugggcaggaagugaagagauccuucuguaaagguuuuuggaauuaugucugcugaauaauaaacuuuuuugaaauaauaaaucugguagaaaaaugagaucucaaaggcucuuuucagagccaccaaaaaaaaaaaaaaaaaaaaaaaaaaaaaaaaaaaaaaaaaaaaaaaaaaaaaaaaaaaaaaaaaaaaaaaaaaaaaaaaaaaaaaaaaaaaaaaaaaaaa

SEQ ID NO: 42759 - RNA, 1695 nt, Artificial Sequence
  mRNA product Design b-4 (hSL-A100) comprising derived and/or modified sequence from LASV(803213;Clade II)__AAF86703__GPCmut13 (opt5)
aggagagucccgcagucggcguccagcggcucugcuuguucgugugugugucguugcaggccuuauucaagcuuaccaugggccagaucauuaccuucuuucaagaggugccccacgucaucgaagagguuaugaacauugugcugaucgcccucagccugcuugcuauucugaaggggaucuacaauguggccacaugcggacucuucggccugaucuccuuucuucugcucugugggagaucuugcagcgucacguauaaaggaguguacgaacugcagacccuggagcucaacauggcgaaucugaacaugacaaugccucuuuccuguaccaagaauaacucucaucacuauauuaugguuggcaaugaaacagggcuggagcucacccugacaaacaccagcaucauuaaucauaaauucugcaaccuuuccgacgcucacaagaaaaaucuguacgaucaugcccucaugucuaucauuagcacguuucaccuguccaucccgaacuucaaucaguaugaggccaugagcugugacuuuaacggaggcaagauuucugugcaguacaaucugucccacagcuucgcugucgaugccgcuaaccauugcggcaccaucgccaacggggugcuccaaacauuuaugcggauggcguggggaggcucuuauaucgcccuggacuccgggaagggaaauugggauuguauuaugaccagcuaccaguaccuuaucauucagaacacaaccugggaagaccacugccaguucucucgccccuccccuaucggcuaucuggggcuccugagccaaagaacgcgggauauuuacaucucccgcagacuucugggaacauuuaccuggacacucucugacagcgagggcaaugaagcucccggcggguauugucugacccgguggaugcugaucgaggccgagcucaaaugcuucggaaacaccgcuguugccaaguguaaugaaaaacaugaugaggaauuuugcgacaugcugcgccuuuucgauuucaacaagcaggcgauuaaaagacugaagacagaggcccagauguccauccagcucauuaauaaggcugugaacgcccugaucaaugaccaacuuauuaugaaaaaccaucugcgggauaucaugggcaucccuuacugcaauuauagccgcuacugguaucucaaccacacggucaccgggaagacaucucugcccagauguuggcugguguccaauggaagcuaccucaacgaaacccacuuuucugacgacauugagcagcaggcugauaauaugaucacagagaugcugcaaaaagaauacauggaccggcagggcaagaccccucuugggcugguggaucucuucgucuuuagcacguccuucuaucugauuucuaucuuucugcaccuuguuaaaauuccgugaggacuaguaauaaggaaacuguaugaaugucugugggcaggaagugaagagauccuucuguaaagguuuuuggaauuaugucugcugaauaauaaacuuuuuugaaauaauaaaucugguagaaaaaugagaucucaaaggcucuuuucagagccaccaaaaaaaaaaaaaaaaaaaaaaaaaaaaaaaaaaaaaaaaaaaaaaaaaaaaaaaaaaaaaaaaaaaaaaaaaaaaaaaaaaaaaaaaaaaaaaaaaaaaa

SEQ ID NO: 42760 - RNA, 1695 nt, Artificial Sequence
  mRNA product Design b-4 (hSL-A100) comprising derived and/or modified sequence from LASV(GA391;Clade III)__CAA36645__GPCmut13 (opt5)
aggagagucccgcagucggcguccagcggcucugcuuguucgugugugugucguugcaggccuuauucaagcuuaccaugggccagaucgugaccuucuuucaagaggucccccacguuauugaagaggugaugaacaucgugcugauugcccucagcauccuggcuauucuuaaggggcuguacaaugucgccacaugcggacucaucggccuggugacguuccuucugcucuccgggagaucuuguagccugaucuauaaaggaaccuacgaacugcagacacucgagcugaacauggaaacccuuaauaugacaaugccucuguccugcaccaagaacaauucucaucacuauauucggguuggcaacgagacagggcucgagcugacccuuacgaauaccagcauccugaaccauaaauuuuguaaucucuccgacgcgcacaagcgcaaccuguacgaucauucucugaugagcauuaucuccacauuccaccucagcauuccgaauuuuaaccaguaugaagcuaugucuugcgacuucaauggaggcaaaaucaccgugcaguacaaccugucccacagcuuugccgucgaugccgcuggccauugugggacacuugccaauggagugcugcaaaccuucaugagaauggcuuggggcgggucuuauauugcccucgacuccggacggggcaacugggauugcaucaugacgagcuaccaguaccugaucauucagaacacaaccugggacgaucacugucaguuuucucgccccuccccuaucggguaucuuggacugcucagccaaagaacacgggacauuuacaucucccgcagacugcugggcaccuucaccuggacacucucugauagcgagggcaaugaaacgcccgggggauauugccugacccgguggaugcuuauugaggcggagcugaaguguuuuggcaacacagccguugcuaagugcaaugaaaaacaugacgaggaguucugugauaugcuccgccuguuugacuucaacaagcaggccaucagacggcuuaaaaccgaagcucagauguccauccagcugauuaauaaggccgugaacgcgcucaucaaugaucaacugauuaugaaaaaccaucugcgcgacaucauggggauuccuuacugcaauuauagcagauacugguaucucaaccacacaucuaccggaaagacgucccugccccggugcuggcuuaucagcaauggcucuuaccugaacgaaacaaaguucagcgacgauaucgagcagcaggccgacaauaugauuaccgagaugcuccaaaaagaauacaucgaucgccaggggaagaccccucugggacuggucgaccuuuuuguguucuccacaucuuuuuaucucauuagcaucuuccugcaccuggugaaaauuccgugaggacuaguaauaaggaaacuguaugaaugucugugggcaggaagugaagagauccuucuguaaagguuuuuggaauuaugucugcugaauaauaaacuuuuuugaaauaauaaaucugguagaaaaaugagaucucaaaggcucuuuucagagccaccaaaaaaaaaaaaaaaaaaaaaaaaaaaaaaaaaaaaaaaaaaaaaaaaaaaaaaaaaaaaaaaaaaaaaaaaaaaaaaaaaaaaaaaaaaaaaaaaaaaaa

SEQ ID NO: 42761 - RNA, 1698 nt, Artificial Sequence
  mRNA product Design b-4 (hSL-A100) comprising derived and/or modified sequence from LASV(AV;Clade V)__CCA30314__GPCmut13 (opt5)
aggagagucccgcagucggcguccagcggcucugcuuguucgugugugugucguugcaggccuuauucaagcuuaccaugggccagaucgugaccuucuuucaagaggucccccacguuauugaagaggugaugaacaucgugcugauugcccucagcauccuggcuguccuuaaggggcuguacaauauugccacaugcggacucaucggccugaucacguuccuucugcucugugggagauccugcucuagcaaccuguauaaaggaguguacgaacugcagucccucgaccugaauauggagacccuuaacaugacaaugccucugucuuguaccaagaauaacagccaucacuauauucggguuggcaaugauacagggcucgaacugacccuuacaaacaccuccauccugaaucauaaauuuugcaaccucucugacgcgcacaagaaagaucuguacgaccaugcucugaugagcauuaucuccacguuccaccucagcauuccgaauuuuaaccaguaugaggccaugucuugugauuucaauggaggcaagaucuccgugcaguacaaccugagccacucuuaugccauugacgcugccaaucauugcggcaccgucgcuaacgggauccuucaaacauuuaugcgcauggccuggggaggcuccuacaucgcgcuggauagcgggagaggaaacugggacuguauuaugaccucuuaccaguaucucaucauucagaauacaaccugggagaaccacugccaguucucccggcccagcccuaucggcuaccuggggcuucugucccaacgcacgagagauauuuauaucucucggcgccuccugggaacauuuaccuggacacugagcgacuccgaaggcaaugccacccccggcggguacugucucaccagauggaugcugaucgaggcugaacuuaagugcuucggaaacacagccguggcuaaauguaaugagaagcaugaugaggaauuuugcgacaugcugcgccucuucgauuuuaacaaacaggccauuagccggcugaagucugaggcgcagauguccauccagcuuauuaauaaagccguuaacgcucugaucaaugaccaacucauuaugaagaaccaccugagagacaucaugggcaucccuuauugcaauuacagcaaguauugguaccugaaccacacgauuaccgggaaaacaucucuccccaaguguuggcuggugagcaauggauccuaccuuaacgaaacccauuucucugaugacaucgagcagcaggccgauaauaugauuacagaaaugcugcaaaaagaguauauggagcggcagggcaagaccccucucgggcuggucgaccuguucguguuuagcacguccuucuaccuuaucagcauuuuucuccgccuggugaaaaucccgugaggacuaguaauaaggaaacuguaugaaugucugugggcaggaagugaagagauccuucuguaaagguuuuuggaauuaugucugcugaauaauaaacuuuuuugaaauaauaaaucugguagaaaaaugagaucucaaaggcucuuuucagagccaccaaaaaaaaaaaaaaaaaaaaaaaaaaaaaaaaaaaaaaaaaaaaaaaaaaaaaaaaaaaaaaaaaaaaaaaaaaaaaaaaaaaaaaaaaaaaaaaaaaaaa

SEQ ID NO: 42762 - RNA, 1695 nt, Artificial Sequence
  mRNA product Design b-4 (hSL-A100) comprising derived and/or modified sequence from LASV(Togo/2016/7082;Clade VI)__AMR44577__GPCmut13 (opt5)
aggagagucccgcagucggcguccagcggcucugcuuguucgugugugugucguugcaggccuuauucaagcuuaccaugggccagaucauuaccuucuuucaagaggugccccacgucaucgaagagguuaugaacauugugcugaucgcccucagccugcuugcuauucugaaggggguguacaaugucgccacaugcggaaucaucggccucgugacguuccuguuucuuugugggagauccugcucucugauuuauaaaggaagcuacgaacuccagacccuggagcugaacauggaaacacucaauaugaccaugccucuguccuguacaaagaacucuagccaucacuauauccggguuggcaaugagaccgggcuugagcugacacucaccaacacguccauuaucaaucauaaauucugcaaccugucugacgcgcacaagcgcaaucuuuacgaucaugcucugaugagcauucucuccaccuuucaccugagcaucccgaacuucaaucaguaugaagccaugucuugugacuuuaacggaggcaaaauuuccgugcaguacaaucugagccacgccuaugcugucgaugccgcugagcauugcggcacaguggccaacgggguucuccaaaccuucaugagaauggcguggggaggcucuuacaucgcccuggacuccgggcggggaaauugggauuguaucaugacaagcuaccaguaucuuauuauccagaacaccacgugggaagaccacugccaguuuucucgccccuccccuauuggcuaccuggggcuccugagccaaagaacacgggauaucuauauuucccgcagacuucugggaaccuucacauggacccucucugacagcgagggcaacgagacccccggcggguacugucugacacgguggaugcugaucgaagcugagcucaagugcuuuggaaauacggccguggcuaaguguaacgaaaaacaugaugaggaguucugcgacaugcugcgccuuuuugauuucaauaagcaggccauccagagacugaaauccgaagcgcagaugagcauucaacucaucaacaaggccgucaaugcucugauuaacgaccagcuuaucaugaaaaaucaucugcgggauaugaugggcauuccuuauugcaacuacucuaaguauugguaccucaaucacaccuccagcgggcgcacaucucugcccaaguguuggcuggugagcaacggauccuaccucaaugagacccacuucucugacgacaucgaacagcaagccgauaacaugaucacagagaugcugcagaaagaauauauugacagacagggcaagaccccucuugggcugguggaucucuuugucuucagcacguccuuuuaccugaucagcauuuuccugcaccuuaucaaaauuccgugaggacuaguaauaaggaaacuguaugaaugucugugggcaggaagugaagagauccuucuguaaagguuuuuggaauuaugucugcugaauaauaaacuuuuuugaaauaauaaaucugguagaaaaaugagaucucaaaggcucuuuucagagccaccaaaaaaaaaaaaaaaaaaaaaaaaaaaaaaaaaaaaaaaaaaaaaaaaaaaaaaaaaaaaaaaaaaaaaaaaaaaaaaaaaaaaaaaaaaaaaaaaaaaaa

SEQ ID NO: 42763 - RNA, 1695 nt, Artificial Sequence
  mRNA product Design b-4 (hSL-A100) comprising derived and/or modified sequence from LASV(KAK-428;Clade n.d. (VII))__ANH09740__GPCmut13 (opt5)
aggagagucccgcagucggcguccagcggcucugcuuguucgugugugugucguugcaggccuuauucaagcuuaccaugggccagaucgugaccuucuuucaagaggucccccacguuauugaagaggugaugaacaucgugcugauugcccucagccugcuugcuauccugaaggggcucuacaauuucgccacaugcggagucauuggccugaucacguuucuucugcucugugggagauccugcucugcgaccuauaaaggacaguacgaacugcagacacuggagcucaacauggaaagccugaauaugaccaugccucuuuccuguacaaagaacaauucucaucacuauauccgggcuggcaacaauaccgggcuggagcucacacugaccaacacgagcauuaucucccauaaauucugcaaucuuucugacgcccacaagaaaaaccuguacgaucauacccucaugagcauuaucacaaccuuucaccuguccauuccgaauuucaaccaguaugaggccaugagcugugacuuuaauggaggcaagaucucuauucaauacaaccugucccacagcuaugcuggcgaugccgcucagcauugcgggacaguggccaauggaguucuccagaccuucaugcgcauggcguggggcgggucuuaccuggcccuugacuccggaagacggggcugggauuguaucaucagcucuuaccaguaucugauuauccaaaacacgacaugggacgaucacugccaguuuucccgccccagcccuauuggguaccucggauucgugucccagaagaccagagacaucuauauuucucggcgccugcuuggcacauuuaccuggacccugagcgauuccgaaggccaugacaugcccgggggauacugucucacaagauggaugcugaucgaggcugaucugaaaugcuucggcaacacggccgucgcuaaguguaaugaaaaacacgacgaggaguuuugcgauauguggcgccucuucgacuucaacaagcaggccauccaacggcugaaagcggaagcccagaugaauauucagcuuaucaacaaggcugugaaugcccugauuaacgaccaacucaugaugaagaaucaccugagagauaucauggggauuccuuauugcaacuacagcaaauuuugguaucuuaauaacaccacaaccggacggacaucucugccccgcuguuggcucaucuccaauggcagcuaccugaacgagacccauuucucugacgauaucgaacagcaggcugacaauaugauuacggagaugcugcagaaggaauacauggauagacaagggaaaacaccucucggacugguugaccuuuuuguguucagcaccuccuuuuaucugaucaccauuuuccuccaccuggucaagaucccgugaggacuaguaauaaggaaacuguaugaaugucugugggcaggaagugaagagauccuucuguaaagguuuuuggaauuaugucugcugaauaauaaacuuuuuugaaauaauaaaucugguagaaaaaugagaucucaaaggcucuuuucagagccaccaaaaaaaaaaaaaaaaaaaaaaaaaaaaaaaaaaaaaaaaaaaaaaaaaaaaaaaaaaaaaaaaaaaaaaaaaaaaaaaaaaaaaaaaaaaaaaaaaaaaa

SEQ ID NO: 42764 - RNA, 1695 nt, Artificial Sequence; identical to SEQ ID NO: 42758
  mRNA product Design b-4 (hSL-A100) comprising derived and/or modified sequence from LASV(Pinneo-NIG-1969;Clade I)__AIT17836__GPCmut13 (opt5)

SEQ ID NO: 42765 - RNA, 1695 nt, Artificial Sequence
  mRNA product Design b-4 (hSL-A100) comprising derived and/or modified sequence from LASV(ISTH0009-NIG-2011;Clade II)__AIT17404__GPCmut13 (opt5)
aggagagucccgcagucggcguccagcggcucugcuuguucgugugugugucguugcaggccuuauucaagcuuaccaugggccagaucauuaccuucuuucaagaggugccccacgucaucgaagagguuaugaacauugugcugaucgcccucagccugcuugcuauucugaaggggaucuacaauguggccacaugcggacucuucggccuggucuccuuucuucugcucugugggagaucuugcagcacgaccuauaaaggaguguacgaacugcagacacuggagcucgacauggcgucccugaacaugaccaugccucuuucuuguacaaagaauaacagccaucacuauaucaugguuggcaaugaaaccgggcuggagcucacacugaccaacacguccauuaucaaucauaaauucugcaaccuuucugaugcucacaagaaaaaucuguacgaccaugcccucaugagcauuaucuccaccuuucaccugagcauuccgaacuucaaucaguaugaggccaugucuugugauuuuaacggaggcaagaucuccgugcaguacaaucugagccacgcuuaugccgucgacgcugccaaccauugcggcacaauugcgaauggggugcuccaaaccuucaugcggauggccuggggaggcucuuacaucgcucuggauuccgggaagggaagcugggacuguaucaugacaucuuaccaguaucuuauuauccagaacaccacgugggaagaucacugccaguuuucccgccccagcccuauuggcuaccuggggcuccugucccaaagaacacgggacaucuauauuucucgcagacuucugggaaccuucacauggacccucagcgauuccgagggcaacgaaacccccggcggguacugucugacacgguggaugcugaucgaggccgagcucaaaugcuuuggaaauacggcuguugccaaguguaacgaaaaacaugacgaggaguucugcgauaugcugcgccuuuuugacuucaauaagcaggcgaucagacggcugaaaaccgaagcccagaugagcauucagcucaucaacaaggcugugaaugcccugauuaacgaucaacuuaucaugaagaaucaucugcgcgacauuaugggcaucccuuauugcaacuacucuaaauauugguaccucaaucacacagucaccgggaagacaucccugcccagauguuggcuggugagcaacggaucuuaccucaaugaaacccacuucagcgacgauaucgagcagcaggcugacaacaugauuacggagcugcuucaaaaagaauauauggaucggcagggcaagacaccucuggggcucguggaccuguuugucuucuccaccucuuuuuaccugaucagcauuuuccuucaccucaucaaaauuccgugaggacuaguaauaaggaaacuguaugaaugucugugggcaggaagugaagagauccuucuguaaagguuuuuggaauuaugucugcugaauaauaaacuuuuuugaaauaauaaaucugguagaaaaaugagaucucaaaggcucuuuucagagccaccaaaaaaaaaaaaaaaaaaaaaaaaaaaaaaaaaaaaaaaaaaaaaaaaaaaaaaaaaaaaaaaaaaaaaaaaaaaaaaaaaaaaaaaaaaaaaaaaaaaaa

SEQ ID NO: 42766 - RNA, 1695 nt, Artificial Sequence
  mRNA product Design b-4 (hSL-A100) comprising derived and/or modified sequence from LASV(ISTH2010-NIG-2012;Clade II)__AIT17482__GPCmut13 (opt5)
aggagagucccgcagucggcguccagcggcucugcuuguucgugugugugucguugcaggccuuauucaagcuuaccaugggccagaucauuaccuucuuucaagaggugccccacgucaucgaagagguuaugaacauugugcugaucgcccucagccugcuugcuauucugaaggggaucuacaauguggccacaugcggacucuucggccuggucuccuuucuucugcucugugggagaucuugcagcacgaccuauaaaggaguguacgaacugcagacacuggagcucgacauggcgucccugaacaugaccaugccucuuucuuguacaaagaauaacagccaucacuauaucaugguuggcaaugaaaccgggcuggagcucacacugaccaacacguccauuaucaaucauaaauucugcaaccuuucugaugcucacaagaaaaaucuguacgaccaugcccucaugagcauuaucuccaccuuucaccugagcauuccgaacuucaaucaguaugaggccaugucuugugauuuuaacggaggcaagaucuccgugcaguacaaucugagccacgcuuaugccgucgacgcugccaaccauugcggcacaauugcgaauggggugcuccaaaccuucaugcggauggccuggggaggcucuuacaucgcucuggauuccgggaagggaagcugggacuguaucaugacaucuuaccaguaucuuauuauccagaacauuaccugggaagaucacugccaguuuucccgccccagcccuaucggcuaccuggggcuccugucccaaagaacgcgggacauuuauaucucucgcagacuucugggaacauucaccuggacacucagcgauuccgagggcaacgaaacccccggcggguacugucugacccgguggaugcugaucgaggccgagcucaaaugcuuuggaaauacagcuguugccaaguguaacgaaaaacaugacgaggaguucugcgauaugcugcgccuuuuugacuucaauaagcaggcgauuagacggcugaaaacggaagcccagaugagcauccagcucauuaacaaggcugugaaugcccugaucaacgaucaacuuauuaugaagaaucaucugcgcgacaucaugggcaucccuuauugcaacuacucuaaauauugguaccucaaucacaccgucacagggaagaccucccugcccagauguuggcuggugagcaacggaucuuaccucaaugaaacacacuucagcgacgauauugagcagcaggcugacaacaugaucaccgagcugcuucaaaaagaauauauugaucggcagggcaagacgccucuggggcucguggaccuguuugucuucuccacaucuuuuuaccugaucagcauuuuccuucaccucguuaaaaucccgugaggacuaguaauaaggaaacuguaugaaugucugugggcaggaagugaagagauccuucuguaaagguuuuuggaauuaugucugcugaauaauaaacuuuuuugaaauaauaaaucugguagaaaaaugagaucucaaaggcucuuuucagagccaccaaaaaaaaaaaaaaaaaaaaaaaaaaaaaaaaaaaaaaaaaaaaaaaaaaaaaaaaaaaaaaaaaaaaaaaaaaaaaaaaaaaaaaaaaaaaaaaaaaaaa

SEQ ID NO: 42767 - RNA, 1695 nt, Artificial Sequence
  mRNA product Design b-4 (hSL-A100) comprising derived and/or modified sequence from LASV(Lassa virus/H.sapiens-wt/NGA/2015/ISTH_0543;Clade II)__AVO03639__GPCmut13 (opt5)
aggagagucccgcagucggcguccagcggcucugcuuguucgugugugugucguugcaggccuuauucaagcuuaccaugggccagaucauuaccuucuuucaagaggugccccacgucaucgaagagguuaugaacauugugcugaucgcccucagccugcuugcuauucugaaggggaucuacaauguggccacaugcggacucuucggccuggucuccuuucuucugcucugugggagaucuugcagcacgaccuauaaaggaguguacgaacugcagacacuggagcucgacauggcgaaccugaauaugaccaugccucuuuccuguacaaagaacaauucucaucacuauaucaugguuggcaacgaaaccgggcuggagcucacacugaccaauacgagcauuaucaaccauaaauucugcaaucuuuccgaugcucacaagaaaaaccuguacgaccaugcccucaugucuauuaucagcaccuuucaccuguccauuccgaauuucaaccaguaugaggccaugagcugugauuuuaauggaggcaagaucucugugcaguacaaccugucccacacauaugcugucgacgccgcuaaucauugcggcaccauugccaacggggugcuccaaacauucaugcggauggcguggggaggcagcuacaucgcccuggauucugggaagggauccugggacuguaucaugaccagcuaccaguaucuuguuauucagaacacgacaugggaagaucacugccaguuuucucgccccuccccuaucggcuaccuggggcuccugagccaaagaacccgggacauuuauaucucccgcagacuucugggaacauucaccuggacccucucugauagcgagggcaaugaaacacccggcggguacugucugacgcgguggaugcugauugaggcugagcucaaaugcuuuggaaacaccgccguggcuaaguguaaugaaaaacaugacgaggaguucugcgauaugcugcgccuuuuugacuucaacaagcaggccaucagacggcugaaaacagaagcgcagauguccauccagcucauuaauaaggccgucaacgcucugaucaaugaucaacuuauuaugaagaaccaucugcgcgacaucaugggcauuccuuauugcaauuacagcaaauauugguaccucaaccacaccgugacagggaagaccucucugcccagauguuggcugguguccaauggaagcuaccucaacgaaacgcacuucucugacgauaucgagcagcaggccgacaauaugaucacagagcugcuucaaaaagaauauauugaucggcagggcaagaccccucuggggcucgucgaccuguuuguuuucagcaccuccuuuuaccugaucucuauuuuccuucaccucgugaaaaucccgugaggacuaguaauaaggaaacuguaugaaugucugugggcaggaagugaagagauccuucuguaaagguuuuuggaauuaugucugcugaauaauaaacuuuuuugaaauaauaaaucugguagaaaaaugagaucucaaaggcucuuuucagagccaccaaaaaaaaaaaaaaaaaaaaaaaaaaaaaaaaaaaaaaaaaaaaaaaaaaaaaaaaaaaaaaaaaaaaaaaaaaaaaaaaaaaaaaaaaaaaaaaaaaaaa

SEQ ID NO: 42768 - RNA, 1695 nt, Artificial Sequence
  mRNA product Design b-4 (hSL-A100) comprising derived and/or modified sequence from LASV(Lassa virus/H.sapiens-wt/NGA/2016/ISTH_0009;Clade II)__AVO03571__GPCmut13 (opt5)
aggagagucccgcagucggcguccagcggcucugcuuguucgugugugugucguugcaggccuuauucaagcuuaccaugggccagaucauuaccuucuuucaagaggugccccacgucaucgaagagguuaugaacauugugcugaucgcccucagccugcuugcuauucugaaggggaucuacaauguggccacaugcggacuccugggccuugucuccuuccugcuccugugugggagaucuugcagcacgaccuauaaaggaguguacgaacugcagacacucgagcuggacauggcgucccuuaacaugaccaugccucugucuuguacaaagaauaacagccaucacuauaucaugguuggcaaugaaaccgggcucgagcugacacuuaccaacacguccauuaucaaucauaaauuuugcaaccugucugaugcucacaagaaaaaucucuacgaccaugcccugaugagcauuaucuccaccuuccaccugagcauuccgaacuuuaaucaguaugaggccaugucuugugauuucaacggaggccggaucuccgugcaguacaaucucagccacucuuaugcugucgacgccgcuaaccauugcggcacaauugccaauggggugcugcaaaccuuuaugcgcauggcguggggaggcuccuacaucgcccuugauagcgggaagggaucuugggacuguaucaugacauccuaccaguaucugauuauccagaacaccacgugggaagaucacugccaguucagcagacccuccccuauuggcuaccucgggcugcuuucucaacggacacgcgacaucuauauuagcagacggcugcucggaaccuuuacauggacccuguccgauagcgagggcaacgaaacccccggcggguacugucugacacgcuggaugcucaucgaggcugagcugaagugcuucggaaauacggccguugcuaaauguaacgaaaagcaugacgaggaauuuugcgauaugcuuagacuguucgacuuuaauaaacaggccauccggcgccucaagaccgaggcgcagaugucuauucagcugaucaacaaagccgugaaugcucuuauuaacgaucaacugaucaugaagaaucaccucagagacauuaugggcaucccuuauugcaacuacuccaaguauugguaccugaaucacacagucaccgggaaaacaagccugccccgguguuggcucgugucuaacggaagcuaccugaaugaaacccauuucuccgacgauaucgagcagcaggccgacaacaugauuacggagcuucugcaaaaggaauauaucgaucgccagggcaaaacaccucucgggcugguggaccuguucgucuuuucuaccagcuucuaccuuauuuccaucuuucuccaccugguuaagauuccgugaggacuaguaauaaggaaacuguaugaaugucugugggcaggaagugaagagauccuucuguaaagguuuuuggaauuaugucugcugaauaauaaacuuuuuugaaauaauaaaucugguagaaaaaugagaucucaaaggcucuuuucagagccaccaaaaaaaaaaaaaaaaaaaaaaaaaaaaaaaaaaaaaaaaaaaaaaaaaaaaaaaaaaaaaaaaaaaaaaaaaaaaaaaaaaaaaaaaaaaaaaaaaaaaa

SEQ ID NO: 42769 - RNA, 1695 nt, Artificial Sequence
  mRNA product Design b-4 (hSL-A100) comprising derived and/or modified sequence from LASV(Lassa virus/H.sapiens-wt/NGA/2016/ISTH_0017;Clade II)__AVO03567__GPCmut13 (opt5)
aggagagucccgcagucggcguccagcggcucugcuuguucgugugugugucguugcaggccuuauucaagcuuaccaugggccagaucauuaccuucuuucaagaggugccccacgucaucgaagagguuaugaacauugugcugaucgcccucagccugcuugcuauucugaaggggaucuacaauguggccacaugcggacucuucggccuggucuccuuucuucugcucugugggagaucuugcagcacgaccuauaaaggaguguacgaacugcagacacuggagcucgacauggcgucccugaacaugaccaugccucuuucuuguacaaagaauaacagccaucacuauaucaugguuggcaaugaaaccgggcuggagcucacacugaccaacacguccauuaucaaucauaaauucugcaaccuuucugaugcucacaagaaaaaucuguacgaccaugcccucaugagcauuaucuccaccuuucaccugagcauuccgaacuucaaucaguaugaggccaugucuugugauuuuaacggaggcaagaucuccgugcaguacaaucugagccacacauaugcuauugacgccgcuaaccauugcggcaccaucgccaaugggguccuccaaacauucaugcggauggcguggggaggcucuuacaucgcccuggauuccgggaagggaagcugggacuguauuaugaccucuuaccaguaucuuaucauucagaacacgacaugggaagaucacugccaguuuucccgccccagcccuaucggcuaccuggggcuccugucccaaagaacccgggacauuuauaucucucgcagacuucugggaacauucaccuggacccucagcgauuccgagggcaacgaaacacccggcggguacugucugacgcgguggaugcugaucgaggcugagcucaaaugcuuuggaaauaccgccguggcuaaguguaacgaaaaacaugacgaggaguucugcgauaugcugcgccuuuuugacuucaauaagcaggccauuagacggcugaaaacagaagcgcagaugagcauccagcucauuaacaaggccguuaaugcucugaucaacgaucaacuuauuaugaagaaucaucugcgcgacaucaugggcaucccuuauugcaacuacucuaaauauugguaccucaaucacaccgugacagggaagaccucccugcccagauguuggcuggucagcaacggaucuuaccucaaugaaacgcacuucagcgacgauauugagcagcaggccgacaacaugaucacagagcugcuucaaaaagaauauauggaucggcagggcaagaccccucuggggcucguggaccuguuuguguucuccaccucuuuuuaccugauuagcaucuuccuucaccucguccgcauuccgugaggacuaguaauaaggaaacuguaugaaugucugugggcaggaagugaagagauccuucuguaaagguuuuuggaauuaugucugcugaauaauaaacuuuuuugaaauaauaaaucugguagaaaaaugagaucucaaaggcucuuuucagagccaccaaaaaaaaaaaaaaaaaaaaaaaaaaaaaaaaaaaaaaaaaaaaaaaaaaaaaaaaaaaaaaaaaaaaaaaaaaaaaaaaaaaaaaaaaaaaaaaaaaaaa

SEQ ID NO: 42770 - RNA, 1695 nt, Artificial Sequence
  mRNA product Design b-4 (hSL-A100) comprising derived and/or modified sequence from LASV(Lassa virus/H.sapiens-wt/NGA/2018/ISTH_0959;Clade II)__AVV65099__GPCmut13 (opt5)
aggagagucccgcagucggcguccagcggcucugcuuguucgugugugugucguugcaggccuuauucaagcuuaccaugggccagaucauuaccuucuuucaagaggugccccacgucaucgaagagguuaugaacauugugcugaucgcccucagccugcuugcuauucugaaggggaucuacaauguggucacaugcggacucuucggccugguguccuuucuucugcucugugggagaucuugcagcacgaccuauaaaggaguuuacgaacugcagacacuggagcucgacauggccucccugaacaugaccaugccucuuucuuguacaaagaauaacagccaucacuauaucauggugggcaaugaaaccgggcuggagcucacacugaccaacacguccauuaucaaucauaaauucugcaaccuuucugaugcgcacaagaaaaaucuguacgaccaugcucucaugagcauuaucuccaccuuucaccugagcauuccgaacuucaaucaguaugaggccaugucuugugauuuuaacggaggcaagaucuccguccaguacaaucugagccacgccuaugcuauugacgccgcuaaccauugcggcacaaucgccaauggggugcuccaaaccuucaugcggauggcguggggaggcucuuacaucgcccuggauuccgggaagggaagcugggacuguauuaugacaucuuaccaguaucuuaucauucagaacaccacgugggaagaucacugccaguuuucccgccccagcccuaucggcuaccuggggcuccugucccaaagaacacgggacauuuauaucucucgcagacuucugggaaccuucacauggacccucagcgauuccgagggcaacgaaacccccggcggguacugucugacacgguggaugcugaucgaggcugagcucaaaugcuuuggaaauacggccguugcuaaguguaacgaaaaacaugacgaggaguucugcgauaugcugcgccuuuuugacuucaauaagcaggccauuagacggcugaaaaccgaagcgcagaugagcauccagcucauuaacaaggccgugaaugcucugaucaacgaucaacuuauuaugaagaaucaucugcgcgacaucaugggcaucccuuauugcaacuacucuaaauauugguaccucaaucacacagucaccgggaagacaucccugcccagauguuggcuggugagcaacggaucuuaccucaaugaaacccacuucagcgacgauauugagcagcaggccgacaacaugaucacggagcugcuucaaaaagaauauauugaucggcagggcaagacaccucuggggcucguggaccuguuugucuucuccaccucuuuuuaccugaucagcauuuuccuucaccucguuaaaaucccgugaggacuaguaauaaggaaacuguaugaaugucugugggcaggaagugaagagauccuucuguaaagguuuuuggaauuaugucugcugaauaauaaacuuuuuugaaauaauaaaucugguagaaaaaugagaucucaaaggcucuuuucagagccaccaaaaaaaaaaaaaaaaaaaaaaaaaaaaaaaaaaaaaaaaaaaaaaaaaaaaaaaaaaaaaaaaaaaaaaaaaaaaaaaaaaaaaaaaaaaaaaaaaaaaa

SEQ ID NO: 42771 - RNA, 1695 nt, Artificial Sequence
  mRNA product Design b-4 (hSL-A100) comprising derived and/or modified sequence from LASV(LASV003-NIG-2008;Clade II)__AIT17580__GPCmut13 (opt5)
aggagagucccgcagucggcguccagcggcucugcuuguucgugugugugucguugcaggccuuauucaagcuuaccaugggccagaucauuaccuucuuucaagaggugccccacgucaucgaagagguuaugaacauugugcugaucgcccucagccugcuugcuauucugaaggggaucuacaauguggccacaugcggacucuucggccuggucuccuuucuucugcucugugggagaucuugcagcacgaccuauaaaggaguguacgaacugcagacacuggagcucgacauggcgucccugaacaugaccaugccucuuucuuguacaaagaauaacagccaucacuauaucaugguuggcaaugaaaccgggcuggagcucacacugaccaacacguccauuaucaaucauaaauucugcaaccuuucugaugcucacaagaaaaaucuguacgaccaugcccucaugagcauuaucuccaccuuucaccugagcauuccgaacuucaaucaguaugaggccaugucuugugauuuuaacggaggcaagaucuccgugcaguacaaucugagccacacauaugcugucgacgccgcuaaccauugcggcaccauugccaauggggugcuccaaacauucaugcggauggcguggggaggcucuuacaucgcccuggauuccgggaagggaagcugggacuguaucaugaccucuuaccaguaucuuauuauccagaacacgacaugggaagaucacugccaguuuucccgccccagcccuauuggcuaccuggggcuccugucccaaagaacccgggacaucuauauuucucgcagacuucugggaacauucaccuggacccucagcgauuccgagagcaacgaaacacccggcggcuacugucugacgcgguggaugcugaucgaggcugagcucaaaugcuuugggaauaccgccguugcuaaguguaacgaaaaacaugacgaggaguucugcgauaugcugcgccuuuuugacuucaauaagcaggccaucagacggcugaaagcggaagcccagaugucuauucagcucaucaacaaggcugugaaugcccugauuaacgaucaacuuaucaugaagaaucaucugcgcgacauuaugggaaucccuuauugcaacuacuccaaauauugguaccucaaucacacagucaccggcagaacaagccugccccgguguuggcuggugucuaacgggagcuaccucaaugaaacccacuucuccgacgauaucgagcagcaggcugacaacaugauuacggagcugcuucaaaaggaauauauggaucgccagggaaaaacaccucugggccucguggaccuguuugucuucucuaccagcuuuuaccugaucuccauuuuccuucaccucguuaagaucccgugaggacuaguaauaaggaaacuguaugaaugucugugggcaggaagugaagagauccuucuguaaagguuuuuggaauuaugucugcugaauaauaaacuuuuuugaaauaauaaaucugguagaaaaaugagaucucaaaggcucuuuucagagccaccaaaaaaaaaaaaaaaaaaaaaaaaaaaaaaaaaaaaaaaaaaaaaaaaaaaaaaaaaaaaaaaaaaaaaaaaaaaaaaaaaaaaaaaaaaaaaaaaaaaaa

SEQ ID NO: 42772 - RNA, 1695 nt, Artificial Sequence
  mRNA product Design b-4 (hSL-A100) comprising derived and/or modified sequence from LASV(LASV035-NIG-2009;Clade II)__AIT17588__GPCmut13 (opt5)
aggagagucccgcagucggcguccagcggcucugcuuguucgugugugugucguugcaggccuuauucaagcuuaccaugggccagaucauuaccuucuuucaagaggugccccacgucaucgaagagguuaugaacauugugcugaucgcccucagccugcuugcuauucugaaggggaucuacaauguggccacaugcggacucuucggccuggucuccuuucuucugcucugugggagaucuugcagcacgaccuauaaaggaguguacgaacugcagacacuggagcucgacauggcgucccugaacaugaccaugccucuuucuuguacaaagaauaacagccaucacuauaucaugguuggcaaugaaaccgggcuggagcucacacugaccaacacguccauuaucaaucauaaauucugcaaccuuucugaugcucacaagaaaaaucuguacgaccaugcccucaugagcauuaucuccaccuuucaccugagcauuccgaacuucaaucaguaugaggccaugucuugugauuuuaacggaggcaagaucuccgugcaguacaaucugagccacgcuuaugccgucgacgcugccaaccauugcggcacaauugcgaauggggugcuccaaaccuucaugcggauggccuggggaggcucuuacaucgcucuggauuccgggaagggaagcugggacuguaucaugacaucuuaccaguaucuuauuauccagaacaccacgugggaagaucacugccaguuuucccgccccagcccuauuggcuaccuggggcuccugucccaaagaacacgggacaucuauauuucucgcagacuucugggaaccuucacauggacccucagcgauuccgagggcaacgaaacccccggcggguacugucugacacgguggaugcugaucgaggccgagcucaaaugcuuuggaaauacggcuguugccaaguguaacgaaaaacaugacgaggaguucugcgauaugcugcgccuuuuugacuucaauaagcaggcgaucagacggcugaaagccgaagcucagaugagcauucagcucaucaacaaggccgugaaugcucugauuaacgaucaacuuaucaugaagaaucaucugcgcgacauuaugggcaucccuuauugcaacuacucuaaauauugguaccucaaucacaccgucacagggaagaccucccugcccagauguuggcuggugagcaacggaucuuaccucaaugaaacacacuucagcgacgauaucgagcagcaggccgacaacaugauuaccgagcugcuucaaaaagaauauaucgaucggcagggcaagacgccucuggggcucguggaccuguuugucuucuccacaucuuuuuaccugauuagcaucuuccuucaccucguuaaaauuccgugaggacuaguaauaaggaaacuguaugaaugucugugggcaggaagugaagagauccuucuguaaagguuuuuggaauuaugucugcugaauaauaaacuuuuuugaaauaauaaaucugguagaaaaaugagaucucaaaggcucuuuucagagccaccaaaaaaaaaaaaaaaaaaaaaaaaaaaaaaaaaaaaaaaaaaaaaaaaaaaaaaaaaaaaaaaaaaaaaaaaaaaaaaaaaaaaaaaaaaaaaaaaaaaaa

SEQ ID NO: 42773 - RNA, 1695 nt, Artificial Sequence
  mRNA product Design b-4 (hSL-A100) comprising derived and/or modified sequence from LASV(LASV1000-NIG-2009;Clade II)__AIT17782__GPCmut13 (opt5)
aggagagucccgcagucggcguccagcggcucugcuuguucgugugugugucguugcaggccuuauucaagcuuaccaugggccagaucauuaccuucuuucaagaggugccccacgucaucgaagagguuaugaacauugugcugaucgcccucagccugcuugcuauucugaaggggaucuacaauguggccacaugcggacucuucggccuggucuccuuucuucugcucugugggagaucuugcagcacgaccuauaaaggaguguacgaacugcagacacuggagcucgacauggcgucccugaacaugaccaugccucuuucuuguacaaagaauaacagccaucacuauaucaugguuggcaaugaaaccgggcuggagcucacacugaccaacacguccauuaucaaucauaaauucugcaaccuuucugaugcucacaagaaaaaucuguacgaccaugcccucaugagcauuaucuccaccuuucaccugagcauuccgaacuucaaucaguaugaggccaugucuugugauuuuaacggaggcaagaucuccgugcaguacaaucugagccacacauaugcugucgacgccgcuaaccauugcggcaccauugccaauggggugcuccaaacauucaugcggauggcguggggaggcucuuacaucgcccuggauuccgggaagggaagcugggacuguaucaugaccucuuaccaguaucuuauuauccagaacacgacaugggaagaucacugccaguuuucccgccccagcccuauuggcuaccuggggcuccugucccaaagaacccgggacaucuauauuucucgcagacuucugggaacauucaccuggacccucagcgauuccgagggcaacgaaacacccggcggguacugucugacgcgguggaugcugaucgaggcugagcucaaaugcuuuggaaauaccgccguugcuaaguguaacgaaaaacaugacgaggaguucugcgauaugcugcgccuuuuugacuucaauaagcaggccaucaaaagacugaagacagaagcgcagaugagcauucagcucaucaacaaggccgugaaugcucugauuaacgaucaacuuaucaugaaaaaucaucugcgggacauuaugggcaucccuuauugcaacuacucuaaguauugguaccucaaucacaccgucacagggaaaaccucccugccccgcuguuggcuggugagcaacggaucuuaccucaaugaaacgcacuucagcgacgauaucgagcagcaggccgacaacaugauuacagagcugcuucaaaaggaauauaucgauagacagggcaaaaccccucuggggcucguggaccuguuugucuucuccaccucuuuuuaccugauuagcaucuuccuucaccucguuaagauuccgugaggacuaguaauaaggaaacuguaugaaugucugugggcaggaagugaagagauccuucuguaaagguuuuuggaauuaugucugcugaauaauaaacuuuuuugaaauaauaaaucugguagaaaaaugagaucucaaaggcucuuuucagagccaccaaaaaaaaaaaaaaaaaaaaaaaaaaaaaaaaaaaaaaaaaaaaaaaaaaaaaaaaaaaaaaaaaaaaaaaaaaaaaaaaaaaaaaaaaaaaaaaaaaaaa

SEQ ID NO: 42774 - RNA, 1695 nt, Artificial Sequence
  mRNA product Design b-4 (hSL-A100) comprising derived and/or modified sequence from LASV(LASV221-NIG-2010;Clade II)__AIT17624__GPCmut13 (opt5)
aggagagucccgcagucggcguccagcggcucugcuuguucgugugugugucguugcaggccuuauucaagcuuaccaugggccagaucauuaccuucuuucaagaggugccccacgucaucgaagagguuaugaacauugugcugaucgcccucagccugcuugcuauucugaaggggaucuacaauguggccacaugcggacucuucggccuggucuccuuucuucugcucugugggagaucuugcagcacgaccuauaaaggaguguacgaacugcagacacuggagcucgacauggcgucccugaacaugaccaugccucuuucuuguacaaagaauaacagccaucacuauaucaugguuggcaaugaaaccgggcuggagcucacacugaccaacacguccauuaucaaucauaaauucugcaaccuuucugaugcucacaagaaaaaucuguacgaccaugcccucaugagcauuaucuccaccuuucaccugagcauuccgaacuucaaucaguaugaggccaugucuugugauuuuaacggaggcaagaucuccgugcaguacaaucugagccacacauaugcuauugacgccgcuaaccauugcggcaccaucgccaaugggguccuccaaacauucaugcggauggcguggggaggcucuuacaucgcccuggauuccgggaagggaagcugggacuguauuaugaccucuuaccaguaucuuaucauucagaacacgacaugggaagaucacugccaguuuucccgccccagcccuaucggcuaccuggggcuccugucccaaagaacccgggacauuuauaucucucgcagacuucugggaacauucaccuggacccucagcgauuccgagggcaacgaaacacccggcggguacugucugacgcgguggaugcugaucgaggcugagcucaaaugcuuuggaaauaccgccguggcuaaguguaacgaaaaacaugacgaggaguucugcgauaugcugcgccuuuuugacuucaauaagcaggccauuagacggcugaaaacagaagcgcagaugagcauccagcucauuaacaaggccguuaaugcucugaucaacgaucaacuuauuaugaagaaucaucugcgcgacaucaugggcaucccuuauugcaacuacucuaaauauugguaccucaaucacaccgugacagggaagaccucccugcccagauguuggcuggucagcaacggaucuuaccucaaugaaacgcacuucagcgacgauauugagcagcaggccgacaacaugaucacagagaugcugcaaaaagaauauauggaucggcagggcaagaccccucuugggcugguggaccucuuuguguucuccaccucuuuuuaccugauuagcaucuuccugcaccuugucaaaauuccgugaggacuaguaauaaggaaacuguaugaaugucugugggcaggaagugaagagauccuucuguaaagguuuuuggaauuaugucugcugaauaauaaacuuuuuugaaauaauaaaucugguagaaaaaugagaucucaaaggcucuuuucagagccaccaaaaaaaaaaaaaaaaaaaaaaaaaaaaaaaaaaaaaaaaaaaaaaaaaaaaaaaaaaaaaaaaaaaaaaaaaaaaaaaaaaaaaaaaaaaaaaaaaaaaa

SEQ ID NO: 42775 - RNA, 1695 nt, Artificial Sequence
  mRNA product Design b-4 (hSL-A100) comprising derived and/or modified sequence from LASV(LASV237-NIG-2010;Clade II)__AIT17638__GPCmut13 (opt5)
aggagagucccgcagucggcguccagcggcucugcuuguucgugugugugucguugcaggccuuauucaagcuuaccaugggccagaucauuaccuucuuucaagaggugccccacgucaucgaagagguuaugaacauugugcugaucgcccucagccugcuugcuauucugaaggggaucuacaauguggccacaugcggacucuucggccuggucuccuuucuucugcucugugggagaucuugcagcacgaccuauaaaggaguguacgaacugcagacacuggagcucgacauggcgucccugaacaugaccaugccucuuucuuguacaaagaauaacagccaucacuauaucaugguuggcaaugaaaccgggcuggagcucacacugaccaacacguccauuaucaaucauaaauucugcaaccuuucugaugcucacaagaaagaccuguacgaucaugcccucaugagcauuaucuccaccuuucaccugagcauuccgaauuucaaccaguaugaggccaugucuugugacuuuaauggaggcaagaucuccgugcaguacaaccugagccacacauaugcugucgaugccgcuaaucauugcggcaccauugccaacggggugcuccaaacauucaugcggauggcguggggaggcucuuacaucgcccuggacuccgggaagggaagcugggauuguaucaugaccucuuaccaguaucuuauuauccagaauacgacaugggaagaccacugccaguuuucccgccccagcccuauuggcuaccuggggcuccugucccaaagaacccgggauaucuauauuucucgcagacuucugggaacauucaccuggacccucagcgacuccgagggcaacgaaacacccggcggguacugucugacgcgguggaugcugaucgaggcugagcucaaaugcuuuggaaacaccgccguugcuaaguguaaugaaaaacaugaugaggaguucugcgacaugcugcgccuuuuugauuucaacaagcaggccaucagacggcugaaaacagaagcgcagaugagcauucagcucaucaauaaggccgugaacgcucugauuaaugaccaacuuaucaugaagaaccaucugcgcgacauuaugggcaucccuuauugcaauuacucuaaauauugguaccucaaccacaccgucacagggaagaccucccugcccagauguuggcuggugagcaauggaucuuaccucaacgaaacgcacuucagcgaugacaucgagcagcaggccgauaauaugauuacagagcugcuucaaaaagaauauauggaccggcagggcaagaccccucuggggcucguggaucuguuugucuucuccaccucuuuuuaccugaucagcauuuuccuucaccucaucaaaauuccgugaggacuaguaauaaggaaacuguaugaaugucugugggcaggaagugaagagauccuucuguaaagguuuuuggaauuaugucugcugaauaauaaacuuuuuugaaauaauaaaucugguagaaaaaugagaucucaaaggcucuuuucagagccaccaaaaaaaaaaaaaaaaaaaaaaaaaaaaaaaaaaaaaaaaaaaaaaaaaaaaaaaaaaaaaaaaaaaaaaaaaaaaaaaaaaaaaaaaaaaaaaaaaaaaa

SEQ ID NO: 42776 - RNA, 1695 nt, Artificial Sequence
  mRNA product Design b-4 (hSL-A100) comprising derived and/or modified sequence from LASV(LASV253-NIG-2011;Clade II)__AIT17670__GPCmut13 (opt5)
aggagagucccgcagucggcguccagcggcucugcuuguucgugugugugucguugcaggccuuauucaagcuuaccaugggccagaucauuaccuucuuucaagaggugccccacgucaucgaagagguuaugaacauugugcugaucgcccucagccugcuugcuauucugaaggggaucuacaauguggccacaugcggacucuucggccuggucuccuuucuucugcucugugggagaucuugcagcacgaccuauaaaggaguguacgaacugcagacacuggagcucgacauggcgucccugaacaugaccaugccucuuucuuguacaaagaauaacagccaucacuauaucaugguuggcaaugaaaccgggcuggagcucacacugaccaacacguccauuaucaaucauaaauucugcaaccuuucugaugcucacaagaaaaaucuguacgaccaugcccucaugagcauuaucuccaccuuucaccugagcauuccgaacuucaaucaguaugaggccaugucuugugauuuuaacggaggcaagaucuccgugcaguacaaucugagccacacauaugcugucgacgccgcuaaccauugcggcaccauugccaauggggugcuccaaacauucaugcggauggcguggggaggcucuuacaucgcccuggauuccgggaagggaagcugggacuguaucaugaccucuuaccaguaucuuauuauccagaacacgacaugggaagaucacugccaguuuucccgccccagcccuauuggcuaccuggggcuccugucccaaagaacccgggacaucuauauuucucgcagacuucugggaacauucaccuggacccucagcgauuccgagggcaacgaaacacccggcggguacugucugacgcgguggaugcugaucgaggcugagcucaaaugcuuuggaaauaccgccguugcuaaguguaacgaaaaacaugacgaggaguucugcgauaugcugcgccuuuuugacuucaauaagcaggccaucagacggcugaaagcggaagcccagaugagcauucagcucaucaacaaggcugugaaugcccugauuaacgaucaacuuaucaugaagaaucaucugcgcgacauuaugggcaucccuuauugcaacuacucuaaauauugguaccucaaucacacagucaccgggagaacaucccugccccgguguuggcuggugagcaacggaucuuaccucaaugaaacccacuucagcgacgauaucgagcagcaggcugacaacaugauuacggagcugcuucaaaaggaauauaucgaucgccagggcaaaacaccucuggggcucguggaccuguuugucuucuccaccucuuuuuaccugauuagcaucuuccuucaccucguuaagauuccgugaggacuaguaauaaggaaacuguaugaaugucugugggcaggaagugaagagauccuucuguaaagguuuuuggaauuaugucugcugaauaauaaacuuuuuugaaauaauaaaucugguagaaaaaugagaucucaaaggcucuuuucagagccaccaaaaaaaaaaaaaaaaaaaaaaaaaaaaaaaaaaaaaaaaaaaaaaaaaaaaaaaaaaaaaaaaaaaaaaaaaaaaaaaaaaaaaaaaaaaaaaaaaaaaa

SEQ ID NO: 42777 - RNA, 1695 nt, Artificial Sequence
  mRNA product Design b-4 (hSL-A100) comprising derived and/or modified sequence from LASV(LASV254-NIG-2011;Clade II)__AIT17674__GPCmut13 (opt5)
aggagagucccgcagucggcguccagcggcucugcuuguucgugugugugucguugcaggccuuauucaagcuuaccaugggccagaucauuaccuucuuucaagaggugccccacgucaucgaagagguuaugaacauugugcugaucgcccucagccugcuugcuauucugaaggggaucuacaauguggccacaugcggacucuucggccuggucuccuuucuucugcucugugggagaucuugcagcacgaccuauaaaggaguguacgaacugcagacacuggagcucgacaugaccaaccugaauaugacaaugccucuuuccuguaccaagaacaauucucaucacuauaucaugguuggcaacgaaacagggcuggagcucacccugacgaauaccagcauuaucaaccauaaauucugcaaucuuuccgaugcgcacaagaaaaaccuguacaaucaugcucucaugucuauuaucagcacauuucaccuguccauuccgaacuucaaucaguaugaggccaugagcugugacuuuaacggaggcaagaucucugugcaguacaaucugucccacagcuaugccgucgaugcugccaaccauugcggcaccauugcuaacggggugcuccaaacauucaugcggauggccuggggaggcucuuacaucgcgcuggacuccgggaagggaaauugggauuguaucaugaccagcuaccaguaucuuauuauccagaacacgacaugggaagaccacugccaguuuucucgccccuccccuauuggcuaccuggggcuccugagccaaagaacccgggauaucuauauuucccgcagacuucugggaacauucaccuggacccucucugacagcgagggcaaugaaacacccggcggguacugucugacgcgguggaugcugaucgaggccgagcucaaaugcuuuggaaacaccgcuguugccaaguguaaugaaaaacaugaugaggaguucugcgacaugcugcgccuuuuugauuucaacaagcaggcuaucagacggcugaaaacagaagcccaggcgaauauucagcucaucaacaaggccgugaaugcucugauuaacgaccaacuuaucaugaagaaucaucugcgcgauauuaugggcaucccuuauugcaacuacuccaaauauugguaccucaaucacaccgucacagggaagaccagccugcccagauguuggcuggugucuaacggauccuaccucaaugaaacgcacuucagcgacgacaucgagcagcaggccgauaacaugauuacagagcugcuucaaaaagaauauauggaccggcagggcaagaccccucuggggcucguggaucuguuugucuucucuaccagcuuuuaccugaucuccauuuuccuucaccucguuaaaaucccgugaggacuaguaauaaggaaacuguaugaaugucugugggcaggaagugaagagauccuucuguaaagguuuuuggaauuaugucugcugaauaauaaacuuuuuugaaauaauaaaucugguagaaaaaugagaucucaaaggcucuuuucagagccaccaaaaaaaaaaaaaaaaaaaaaaaaaaaaaaaaaaaaaaaaaaaaaaaaaaaaaaaaaaaaaaaaaaaaaaaaaaaaaaaaaaaaaaaaaaaaaaaaaaaaa

SEQ ID NO: 42778 - RNA, 1695 nt, Artificial Sequence
  mRNA product Design b-4 (hSL-A100) comprising derived and/or modified sequence from LASV(Nig08-A19;Clade III)__ADU56618__GPCmut13 (opt5)
aggagagucccgcagucggcguccagcggcucugcuuguucgugugugugucguugcaggccuuauucaagcuuaccaugggccagaucgugaccuucuuucaagaggucccccacguuauugaagaggugaugaacaucgugcugauugcccucagcauccuggcuauucuuaaggggcuguacaauaucgccacaugcggacucaucggccuggucacguuccuucugcucuccgggagaucuuguagcaugaccuauaaaggaguguacgaacugcagacacuggagcucaacaugaauacccugaacaugacaaugccucuuuccugcaccaagaauaacucucaucacuauauuaugguuggcaaugaaacagggcuggagcucacccugacgaacaccagccuucugcaucacaaauuuuguaaucucuccgacgcgcauaagaaaaaccuguacgaucacacacugaugucuaucauuagcaccuuccaccucuccaucccgaauuuuaaccaguaugaggcuaugagcugcgacuucaauggaggcaagauuacagugcaguacaaccugucucauuccuaugccaucgaugccgcuaaucacuguggcaccgucgccaacggggugcuucaaacguuuaugcggauggcuuggggaggcagcuacauugcccuggacucugggcgcggaaagugggauugcaucaugacauccuaccaguaucucaucauucagaacaccacaugggaagaccauugucaguucagcagacccucuccuaucggcuaccuggggcuucugucccaacggacccgcgauauuuauaucagcagacggcuccugggaaccuuuacauggacgcuguccgacucugagggcaaugaaacccccggcggguacugccucacacgcuggaugcugauugaggcggagcuuaaauguuucggaaacaccgccguugcuaagugcaaugaaaaacacgaugaggaauuuugugacaugcugagacucuucgauuuuaacaagcaggccauccggcgccugaaagcugaggcccagaugagcauccagcuuauuaauaaggcggugaacgcccugaucaaugaccaacucauuaugaagaaccaccugagagauaucaugggcauuccuuauugcaauuacuccaaauauugguaccugaaccauacaagcaccgggcggacgucucucccccgcugcuggcuggucuccaauggaagcuaccuuaacgaaacacacuucucugacgacaucgagcagcaggcugauaauaugaucaccgagaugcugcaaaaggaauaucucgacagacagggcaaaaccccucuggggcugguggaucuuuucguguuuagcacauccuucuaccucauuucuaucuuucugcaucuggucaagauuccgugaggacuaguaauaaggaaacuguaugaaugucugugggcaggaagugaagagauccuucuguaaagguuuuuggaauuaugucugcugaauaauaaacuuuuuugaaauaauaaaucugguagaaaaaugagaucucaaaggcucuuuucagagccaccaaaaaaaaaaaaaaaaaaaaaaaaaaaaaaaaaaaaaaaaaaaaaaaaaaaaaaaaaaaaaaaaaaaaaaaaaaaaaaaaaaaaaaaaaaaaaaaaaaaaa

SEQ ID NO: 42779 - RNA, 1698 nt, Artificial Sequence
  mRNA product Design b-4 (hSL-A100) comprising derived and/or modified sequence from LASV(G1180-SLE-2010;Clade IV)__AIT17168__GPCmut13 (opt5)
aggagagucccgcagucggcguccagcggcucugcuuguucgugugugugucguugcaggccuuauucaagcuuaccaugggccagaucgugaccuucuuucaagaggucccccacguuauugaagaggugaugaacaucgugcugauugcccucagcauccuggcuguccuuaaggggcuguacaauuucgccacaugcggacucgugggccugcuuacguuucugcuccugugugggagauccugcaccgcgucucgguauaaaggaguuuacgaacugcagacacucgagcugaacauggaaacccuuaauaugacaaugccucugagcuguaccaagaacaauucccaucacuauauuauggugggcaacgagacagggcucgagcugacccuuacgaauaccucuaucaucaaccauaaauucugcaaucugagcgacgcucacaagaaaaaccucuacgaucaugcccugauguccauuaucucuacauuucaccugagcauuccgaauuucaaccaguaugaagccauguccugugacuuuaauggaggcaagaucagcguccaguacaaccucucucacuccuaugcuggcgaugccgcuaaucauugcgggaccguggccaacggaguucugcaaacauucaugcgcauggcguggggcgggagcuacauugcccuugacucuggacacggcuccugggauuguaucaugaccagcuaccaguaucugauuauccagaacacgacaugggaggaccauugccaguuuucuagacccuccccuaucggguaccucggacugcuuagccaacggacccgcgauauuuauaucuccagacggcugcucggcacauucaccuggacccugucugacagcgaaggcaaggauacacccgggggauacugucugacgcgcuggaugcucauugaggcugagcugaaaugcuuuggcaauaccgccguggcuaaguguaacgaaaaacacgacgaggaguucugcgauaugcuuagacuguuugacuucaauaagcaggccauccagcggcucaaagcggaagcccagauguccauucaacugaucaacaaggcugucaaugcccuuaucaacgaucagcugauuaugaagaaucaccuccgcgacaucauggggauuccuuauugcaacuacagcaaauauugguaccugaaucauacaaccacaggaaagaccucucugcccaaauguuggcucguguccaacggcagcuaccugaaugaaacgcacuucucugacgauaucgagcagcaagcugacaacaugauuacagagaugcuucagaaggaauauauggagagacaggggaaaaccccucugggacucguggaucuguuugucuucagcaccuccuuuuaccugaucucuaucuuccuucaucucguuaagauuccgugaggacuaguaauaaggaaacuguaugaaugucugugggcaggaagugaagagauccuucuguaaagguuuuuggaauuaugucugcugaauaauaaacuuuuuugaaauaauaaaucugguagaaaaaugagaucucaaaggcucuuuucagagccaccaaaaaaaaaaaaaaaaaaaaaaaaaaaaaaaaaaaaaaaaaaaaaaaaaaaaaaaaaaaaaaaaaaaaaaaaaaaaaaaaaaaaaaaaaaaaaaaaaaaaa

SEQ ID NO: 42780 - RNA, 1698 nt, Artificial Sequence
  mRNA product Design b-4 (hSL-A100) comprising derived and/or modified sequence from LASV(G1442-SLE-2011;Clade IV)__AIT17180__GPCmut13 (opt5)
aggagagucccgcagucggcguccagcggcucugcuuguucgugugugugucguugcaggccuuauucaagcuuaccaugggccagaucgugaccuucuuucaagaggucccccacguuauugaagaggugaugaacaucgugcugauugcccucagcauccuggcuguccuuaaggggcuguacaauguggccacaugcggacucauuggccugguuacguuccuucugcucugugggagauccugcaccacaacccuguauaaaggaguguacgaacugcagacacucgagcugaacauggaaacccuuaauaugacaaugccucugucuuguaccaagaacaauagccaucacuauauccgggucggcaacgagacggggcucgagcugacccuuacaaauaccuccaucauuaaccauaaauuuugcaaucugucugacgcgcacaagaaaaaccucuacgaucaugcucugaugagcaucauuuccacauuccaccugucuaucccgaauuuuaaccaguaugaagccaugagcugugacuucaauggaggcaagauuuccgugcaguacaaccucagccacucuuaugccggcgaugcugccaaucauugcgggaccguugcuaacggagugcugcaaacguuuaugcgcauggccuggggcggguccuacaucgcgcuugacagcggaagaggcaacugggauuguauuaugacaucuuaccaguaucugaucauccagaauaccacaugggacgaucacugccaguucucccggcccagcccuauuggguaccucggacugcuuucucaacgcaccagagacgucuauaucucccggcgccugcucggcaccuuuacauggacgcugagcgauuccgagggcaaggacacccccgggggauacugucugacaagauggaugcucauugaagccgagcugaaaugcuucggcaacaccgcuguggccaaguguaaugagaaacaugaugaagaguuuugcgacaugcuucggcuguucgauuuuaacaagcaggcuauccagcgccucaaagccgaagcgcagaugucuauucaacugaucaauaaggccgugaacgcucuuaucaaugaccagcugauuaugaagaaccaccucagagacaucauggggauuccuuauugcaauuacagcaaauauugguaccugaacaauacagccaccggaaagacgucccugcccaaauguuggcucaucagcaacggcucuuaccugaaugagacacacuucuccgaugacauugaacaggaggcugauaacaugaucaccgagaugcuucaaaaggaauauauggagcggcaggggaaaaccccucugggacucgucgaccuguucguuuuuagcacaucuuucuaccugaucagcauuuuucuucaucucgugaagaucccgugaggacuaguaauaaggaaacuguaugaaugucugugggcaggaagugaagagauccuucuguaaagguuuuuggaauuaugucugcugaauaauaaacuuuuuugaaauaauaaaucugguagaaaaaugagaucucaaaggcucuuuucagagccaccaaaaaaaaaaaaaaaaaaaaaaaaaaaaaaaaaaaaaaaaaaaaaaaaaaaaaaaaaaaaaaaaaaaaaaaaaaaaaaaaaaaaaaaaaaaaaaaaaaaaa

SEQ ID NO: 42781 - RNA, 1698 nt, Artificial Sequence
  mRNA product Design b-4 (hSL-A100) comprising derived and/or modified sequence from LASV(G3010-SLE-2013;Clade IV)__AIT17344__GPCmut13 (opt5)
aggagagucccgcagucggcguccagcggcucugcuuguucgugugugugucguugcaggccuuauucaagcuuaccaugggccagaucgugaccuucuuucaagaggucccccacguuauugaagaggugaugaacaucgugcugauugcccucagcauccuggcuguccuuaaggggcuguacaauuucgccacaugcggacucgugggccugguuacguuucuucugcucugugggagauccugcaccacaucucuguauaaaggaguguacgaacugcagacccucgagcugaacauggaaacacuuaauaugaccaugccucugagcuguacaaagaacaauucccaucacuauauuauggucggcaacgagaccgggcucgagcugacgcuuaccaauacaucuaucaucaaccauaaauucugcaaucugagcgacgcgcacaagaaaaaccucuacaaucaugcucugauguccauuaucucuaccuuucaccugagcauuccgaacuucaaucaguaugaagccauguccugugauuuuaacggaggcaagaucagcgugcaguacaaucucucucacuccuaugccggcgacgcugccagccauugcgggacaguugcuaacggagugcugcaaaccuucaugcggauggccuggggcgggucuuacauugcgcuugauuccggauacggcaagugggacuguaucaugacgagcuaucaguaccugauuauccagaacacaaccugggaggaucacugccaguuuucucgccccuccccuaucggguaucucggacugcuuagccaaagaacacgggacauuuacaucucccgcagacugcucggcaccuucaccuggacacugucugauagcgaaggcaaagacacgcccgggggauauugucugacccgguggaugcucauugaggccgagcugaagugcuuuggcaauacagcugucgccaaauguaacgaaaagcaugaugaggaguucugcgacaugcuucgccuguuugauuucaauaaacaggcuauccagagacucaagaccgaagcccagauguccauucaacugaucaacaaggcggugaaugcccuuaucaacgaccagcugauuaugaaaaaucaccuccgggauaucauggggauuccuuacugcaacuauagcaaguacugguaccugaaucacacaaccacgggaaaaacaucucugcccaaguguuggcucguguccaacggcagcuaucugaaugaaacccauuucucugacgacaucgagcagcaagcugauaacaugauuaccgagaugcuucagaaagaauacauggagcgccaggggaagacaccucugggacucgucgaccuguuuguuuucagcaccuccuuuuaucugaucucuaucuuccuucaccucgugaaaauuccgugaggacuaguaauaaggaaacuguaugaaugucugugggcaggaagugaagagauccuucuguaaagguuuuuggaauuaugucugcugaauaauaaacuuuuuugaaauaauaaaucugguagaaaaaugagaucucaaaggcucuuuucagagccaccaaaaaaaaaaaaaaaaaaaaaaaaaaaaaaaaaaaaaaaaaaaaaaaaaaaaaaaaaaaaaaaaaaaaaaaaaaaaaaaaaaaaaaaaaaaaaaaaaaaaa

SEQ ID NO: 42782 - RNA, 1698 nt, Artificial Sequence
  mRNA product Design b-4 (hSL-A100) comprising derived and/or modified sequence from LASV(G502-SLE-2009;Clade IV)__AIT17126__GPCmut13 (opt5)
aggagagucccgcagucggcguccagcggcucugcuuguucgugugugugucguugcaggccuuauucaagcuuaccaugggccagaucgugaccuucuuucaagaggucccccacguuauugaagaggugaugaacaucgugcugauugcccucagcauccuggcuguccuuaaggggcuguacaauuucgccacaugcggacucgugggccugcuuacguuucugcuccugugugggagauccugcaccacaggacuguauaaaggcguuuacgaacuccagacccuggagcuuaacauggaaacacugaauaugaccaugccucucucuuguacaaagaacaauagccaucacuauauuaugguggggaacgagaccggacuggagcuuacgcugaccaauacauccaucaucaaccauaaauucugcaaucucucugacgcgcacaagaaaaaccuguacgaucaugcucugaugagcauuaucuccaccuuucaccucucuauuccgaauuucaaccaguaugaagccaugagcugugacuuuaauggcggcaagaucuccguccaguacaaccugagccacucuuaugccggggaugcugccgaccauugcggaacaguggcuaauggcguucuucaaaccuucaugcggauggccuggggaggguccuacauugcgcuggauagcggccgcgggagaugggacuguaucaugacgucuuaccaguaucucauuauccagaacacaaccugggaggaucacugccaguuuucccggcccagcccuaucggauaccugggccuucugucucaacgcacaagagacauuuauaucucccggcgccuccugggcaccuucaccuggacacugagcgauuccgaagggaaggacacgcccggaggcuacugucucaccagauggaugcugauugaggccgagcuuaaaugcuuugggaacacagcuguggccaaguguaaugaaaaacaugaugaggaguucugcgacaugcugcggcucuuugauuucaacaagcaggcuauccagcgccugaaagccgaagcgcagaugucuauucaacuuaucaauaaggccgucaacgcucugaucaaugaccagcucgugaugaagaaccaccugagagacauuaugggaaucccuuauugcaauuacagccgguauugguaccugaaccacaccacaaccggccgcacgucccuccccaaauguuggcuggugagcaaugggucuuaccuuaacgaaacacauuucuccgaugacauugagcagcaagccgauaauaugaucaccgagaugcugcagaaggaauauauggagagacagggaaaaaccccucucggccuggucgaccuguuuguuuucagcacaucuuuuuaccuuauuagcaucuuccuccaccuggugaagaucccgugaggacuaguaauaaggaaacuguaugaaugucugugggcaggaagugaagagauccuucuguaaagguuuuuggaauuaugucugcugaauaauaaacuuuuuugaaauaauaaaucugguagaaaaaugagaucucaaaggcucuuuucagagccaccaaaaaaaaaaaaaaaaaaaaaaaaaaaaaaaaaaaaaaaaaaaaaaaaaaaaaaaaaaaaaaaaaaaaaaaaaaaaaaaaaaaaaaaaaaaaaaaaaaaaa

SEQ ID NO: 42783 - RNA, 1698 nt, Artificial Sequence
  mRNA product Design b-4 (hSL-A100) comprising derived and/or modified sequence from LASV(G733-SLE-2010;Clade IV)__AIT17154__GPCmut13 (opt5)
aggagagucccgcagucggcguccagcggcucugcuuguucgugugugugucguugcaggccuuauucaagcuuaccaugggccagaucgugaccuucuuucaagaggucccccacguuauugaagaggugaugaacaucgugcugauugcccucagcauccuggcuguccuuaaggggcuguacaauuucgccacaugcggaauugugggccucguuuccuuucugcuucugugugggagaucuugcacgaccagccucuauaaaggaguguacgaacugcagacacuggagcucaacauggaaacccugaauaugacaaugccucuuuccuguaccaagaacaauucucaucacuauaucauggucggcaacgagacagggcuggagcucacccugacgaauaccagcaucauuaaccauaaauucugcaaucuuuccgacgcgcacaagaaaaaccuguacgaucaugcucucaugucuaucauuagcacauuucaccuguccaucccgaauuucaaccaguaugaagccaugagcugugacuuuaauggaggcaagauuucugugcaguacaaccugucccacagcuaugccggcgaugcugccaaucauugcgggaccaucgcuaacggaguucuccaaacauucaugcggauggccuggggcgggucuuacauugcgcuggacuccggacgcgauagaugggacuguaucaugaccagcuaccaguaucuuaucauucagaacacgacaugggaggaucacugccaguuuucucggcccuccccuaucggcuaccuggggcuccugagccaacgcaccagagacauuuauaucucccggcgccuucugggaacauucaccuggacccucucugauagcgaaggcaaggacacacccggcggguacugucugacgagauggaugcugauugaggccgagcucaaaugcuuuggaaauaccgcuguggccaaguguaacgaaaaacaugaugaggaguucugcgacaugcugcggcuuuuugauuucaauaagcaggcuauccagcgccugaaagccgaagcgcagauguccauccaacucauuaacaaggccgucaaugcucugaucaacgaccagcuuauuaugaagaaucaccugagagacaucaugggcauuccuuauugcaacuacagcaaauauugguaccucaaucacacaaccacagggaagaccucucugcccaaauguuggcugguguccaacggaagcuaccucaaugaaacgcauuucucugaugacaucgagcagcaagccgauaacaugaucacagagaugcugcagaaggaauauauggagcggcagggcaaaaccccucuugggcugguggaccucuuugucuucagcaccuccuuuuaccugauuucuaucuuccugcaccuuguuaagauuccgugaggacuaguaauaaggaaacuguaugaaugucugugggcaggaagugaagagauccuucuguaaagguuuuuggaauuaugucugcugaauaauaaacuuuuuugaaauaauaaaucugguagaaaaaugagaucucaaaggcucuuuucagagccaccaaaaaaaaaaaaaaaaaaaaaaaaaaaaaaaaaaaaaaaaaaaaaaaaaaaaaaaaaaaaaaaaaaaaaaaaaaaaaaaaaaaaaaaaaaaaaaaaaaaaa

SEQ ID NO: 42784 - RNA, 1698 nt, Artificial Sequence
  mRNA product Design b-4 (hSL-A100) comprising derived and/or modified sequence from MOPV/LASV reassortant(IGS-1;Clade IV)__AFY05576__GPCmut13 (opt5)
aggagagucccgcagucggcguccagcggcucugcuuguucgugugugugucguugcaggccuuauucaagcuuaccaugggccagaucgugaccuucuuucaagaggucccccacguuauugaagaggugaugaacaucgugcugauugcccucagcguccuggcugugcuuaaggggcuguacaauuucgccacaugcggacucguuggccuggugacguuucuucugcucugugggagauccugcaccacaucucuguauaaaggagucuacgaacugcagacccucgagcugaacauggaaacacuuaauaugaccaugccucugagcuguacaaagaacaauucccaucacuauaucauggugggcaacgagaccgggcucgagcugacgcuuaccaauacaucuauuaucaaccauaaauucugcaaucugagcgacgcgcacaagaaaaaccucuacgaucaugcucugauguccaucauuucuaccuuucaccugagcaucccgaauuucaaccaguaugaagccauguccugugacuuuaauggaggcaagauuagcguucaguacaaccucucucacuccuaugccggcgaugcugccaaucauugcgggacaguggcuaacggaguccugcaaaccuucaugcggauggccuggggcgggagcuacaucgcgcuugacucuggacgcggcaacugggauuguauuaugacguccuaccaguaucugaucauucagaauacaaccugggaggaccacugccaguuuagcagacccucuccuaucggguaccucggacugcuuucccaacggacacgcgauaucuauauuagcagacggcugcucggcaccuucaccuggacacuguccgacucugaaggcgaggauacgcccgggggauacugucugacccgcuggaugcucaucgaggccgaacugaagugcuuuggcaacacagcuguggccaaauguaaugagaagcaugacgaagaguucugcgauaugcuuagacuguuugacuucaacaaacaggcuauucagcggcucaaggccgaagcgcagaugagcauccaacugauuaauaaagccgugaacgcucuuaucaaugaucagcugaucaugaagaaccaccuccgcgacauuauggggaucccuuauugcaauuacuccaaguauugguaccugaaccacaccacaaccggaagaacgagccugcccaaauguuggcucgucucuaauggcuccuaccugaacgagacacauuucagcgacgauauugagcagcaagccgacaauaugaucaccgaaaugcuucagaaggaguauauggaacggcaggggaaaaccccucugggacucguugaucuguuuguguucucuaccagcuuuuaccugauuuccaucuuccuucaccucgugaagaucccgugaggacuaguaauaaggaaacuguaugaaugucugugggcaggaagugaagagauccuucuguaaagguuuuuggaauuaugucugcugaauaauaaacuuuuuugaaauaauaaaucugguagaaaaaugagaucucaaaggcucuuuucagagccaccaaaaaaaaaaaaaaaaaaaaaaaaaaaaaaaaaaaaaaaaaaaaaaaaaaaaaaaaaaaaaaaaaaaaaaaaaaaaaaaaaaaaaaaaaaaaaaaaaaaaa

SEQ ID NO: 42785 - RNA, 1698 nt, Artificial Sequence
  mRNA product Design b-4 (hSL-A100) comprising derived and/or modified sequence from LASV(LM765-SLE-2012;Clade IV)__AIT17814__GPCmut13 (opt5)
aggagagucccgcagucggcguccagcggcucugcuuguucgugugugugucguugcaggccuuauucaagcuuaccaugggccagaucgugaccuucuuucaagaggucccccacguuauugaagaggugaugaacaucgugcugauugcccucagcauccuggcuguccuuaaggggcuguacaauuucgccacaugcggacucgugggccugguuacguuucuucugcucugugggagauccugcaccacaucucuguauaaaggaguguacgaacugcagacccucgagcugaacauggaaacacuuaauaugaccaugccucugagcuguacaaagaacaauucccaucacuauauuauggucggcaacgagaccgggcucgagcugacgcuuaccaauacaucuaucaucgaccauaaauucugcaaccugagcgaugcgcaccggaagaaucucuacgaccaugcucugauguccauuaucucuaccuuucaccugagcauuccgaacuucaaucaguaugaagccauguccugugauuuuaacggaggcaaaaucagcgugcaguacaaucucucucacuccuaugccaaggacgcugccgaucauugcggcacaguugcuaacggggugcugcaaaccuucaugcgcauggccuggggaggcagcuacauugcgcuugacucugggagaggacggugggauuguaucaugacguccuaccaguaucugauuauccagaauacaaccugggaggaccacugccaguuuagccgccccucuccuaucggcuaccucgggcugcuuucccaaagaacacgggauauuuauaucagccgcagacugcucggaaccuucaccuggacacuguccgacucugaaggcaaggauacgcccggcggguacugucugacccgguggaugcucauugaggccgagcugaaaugcuuuggaaacacagcugucgccaaguguaacgaaaaacaugacgaggaguucugcgauaugcuucgccuguuugacuucaauaagcaggcuauccagagacucaaagccgaagcgcagaugagcauucaacugaucaacaaggccgugaaugcucuuaucaacgaccagcugauuaugaagaaucaccuccgggauaucaugggcauuccuuauugcaacuacuccaaauauugguaccugaaucacaccacaaccgggaagacgagccugcccaaauguuggcucgugucuaacggauccuaccugaaugaaacacauuucagcgacgauaucgagcagcaagccgacaacaugauuaccgagaugcuucagaaggaauauauggagcgccagggcaaaaccccucuggggcucgucgaucuguuuguuuucucuaccagcuuuuaccugaucuccaucuuccuucaccucgugaagauuccgugaggacuaguaauaaggaaacuguaugaaugucugugggcaggaagugaagagauccuucuguaaagguuuuuggaauuaugucugcugaauaauaaacuuuuuugaaauaauaaaucugguagaaaaaugagaucucaaaggcucuuuucagagccaccaaaaaaaaaaaaaaaaaaaaaaaaaaaaaaaaaaaaaaaaaaaaaaaaaaaaaaaaaaaaaaaaaaaaaaaaaaaaaaaaaaaaaaaaaaaaaaaaaaaaa

SEQ ID NO: 42786 - RNA, 1698 nt, Artificial Sequence
  mRNA product Design b-4 (hSL-A100) comprising derived and/or modified sequence from LASV(LM776-SLE-2012;Clade IV)__AIT17824__GPCmut13 (opt5)
aggagagucccgcagucggcguccagcggcucugcuuguucgugugugugucguugcaggccuuauucaagcuuaccaugggccagaucgugaccuucuuucaagaggucccccacguuauugaagaggugaugaacaucgugcugauugcccucagcauccuggcuguccuuaaggggcuguacaauuucgccacaugcggacucgugggccugguuacguuucuucugcucugugggagauccugcaccacaucuguguauaaaggagucuacgaacugcagacccuggagcucaacauggaaacacugaauaugaccaugccucuuagcuguacaaagaacaauucccaucacuauauuauggugggcaacgagaccgggcuggagcucacgcugaccaauacaucuaucaucaaccauaaauucugcaaucuuagcgacgcgcacaagaaaaaccuguacgaucaugcucucauguccauuaucucuaccuuucaccugagcauuccgaauuucaaccaguaugaagccauguccugugacuuuaauggaggcaagaucagcguucaguacaaccugucucacuccuaugccggcgaugcugccaaucauugcgggacaguggcuaacggaguccuccaaaccuucaugcggauggccuggggcgggagcuacauugcgcuggacucuggacacggcaagugggauuguaucaugacguccuaccaguaucuuauuauccagaacacaaccugggaggaccauugccaguuuagccgccccucuccuaucggguaccugggacuccugucccaaagaacacgggauauuuauaucagccgcagacuucugggcaccuucaccuggacacucuccgacucugaaggcaaagauacgcccgggggauacugucugacccgguggaugcugauugaggccgagcucaagugcuuuggcaauacagcuguggccaaauguaacgaaaagcacgacgaggaguucugcgauaugcugcgccuuuuugacuucaauaaacaggcuauccagagacugaaggccgaagcgcagaugagcauucaacucaucaacaaggccgugaaugcucugaucaacgaucagcuuauuaugaaaaaucaucugcgggacaucauggggauuccuuauugcaacuacuccaaguauugguaccucaaucacaccacaaccggaaaaacgagccugcccaaguguuggcuggucucuaacggcuccuaccucaaugaaacacacuucagcgacgauaucgagcagcaagccgacaacaugauuaccgagaugcugcagaaagaauauauggagcgccaggggaagaccccucuuggacugguugaucucuuuguguucucuaccagcuuuuaccugaucuccaucuuccugcaucuugugaaaauuccgugaggacuaguaauaaggaaacuguaugaaugucugugggcaggaagugaagagauccuucuguaaagguuuuuggaauuaugucugcugaauaauaaacuuuuuugaaauaauaaaucugguagaaaaaugagaucucaaaggcucuuuucagagccaccaaaaaaaaaaaaaaaaaaaaaaaaaaaaaaaaaaaaaaaaaaaaaaaaaaaaaaaaaaaaaaaaaaaaaaaaaaaaaaaaaaaaaaaaaaaaaaaaaaaaa

SEQ ID NO: 42787 - RNA, 1698 nt, Artificial Sequence
  mRNA product Design b-4 (hSL-A100) comprising derived and/or modified sequence from LASV(Mad39;Clade IV)__ANH09722__GPCmut13 (opt5)
aggagagucccgcagucggcguccagcggcucugcuuguucgugugugugucguugcaggccuuauucaagcuuaccaugggccagaucgugaccuucuuucaagaggucccccacguuauugaagaggugaugaacaucgugcugauugcccucagcauccuggcuguccuuaaggggcuguacaauguggccacaugcggacucauuggccugguuacguuccuucugcucugugggagauccugcaccacaacccuguauaaaggaguguacgaacugcaggcgcucgagcugaacauggaaacacuuaauaugaccaugccucugucuuguacaaagaacaauagccaucacuauauccgggucggcaacgagaccgggcucgagcugacgcuuaccaauacaucccugaucaaccauaaauuuugcaaucucucugacgcucacaagaaaaaccuguacgaucaugcccugaugagcauuaucuccaccuuccaccucucuauuccgaauuuuaaccaguaugaagccaugagcugugacuucaaugauggaaagaucuccgugcaguacaaccugagccacacauaugcuggcgacaccgccaaucauugcggcacgguugcuaacggggugcuucaaacauuuaugcgcauggccuggggaggcucuuacauugcgcuggauuccgggagaggaggcugggacuguaucaugaccagcuaccaguaucucauuauccagaacacaaccugggaggaucacugccaguucucucggcccuccccuaucggguaccugggacuucugagccaacgcaccagagacauuuauaucucucggcgccuccugggcacauuuacguggacccuguccgauagcgaaggcaaggacacacccgggggauacugucucaccagauggaugcugauugaggccgagcuuaaaugcuucggcaauacagcugucgccaaguguaacgaaaaacaugaugaggaauuuugcgacaugcugcgccucuucgauuuuaauaagcaggcuauccagcggcugaaagccgaggcgcagauguccauucaacuuaucaacaaggccgugaaugcucugaucaacgaccagcucauuaugaagaaucaccugagagacaucauggggauuccuuauugcaacuacucuaaauauugguaccugaaucacaccgugacgggaaagacaagccuccccaaauguuggcuggucuccaacggcagcuaccuuaaugaaacccauuucucugaugacaucgagcagcaagccgauaacaugauuaccgagaugcugcagaaggaauauauggagcggcaggggaaaacaccucucggacugguugaccuguucguguuuuccaccagcuucuaccuuaucucuaucuuucuccaccuggugaagauuccgugaggacuaguaauaaggaaacuguaugaaugucugugggcaggaagugaagagauccuucuguaaagguuuuuggaauuaugucugcugaauaauaaacuuuuuugaaauaauaaaucugguagaaaaaugagaucucaaaggcucuuuucagagccaccaaaaaaaaaaaaaaaaaaaaaaaaaaaaaaaaaaaaaaaaaaaaaaaaaaaaaaaaaaaaaaaaaaaaaaaaaaaaaaaaaaaaaaaaaaaaaaaaaaaaa

SEQ ID NO: 42788 - RNA, 1698 nt, Artificial Sequence
  mRNA product Design b-4 (hSL-A100) comprising derived and/or modified sequence from LASV(Z0947-SLE-2011;Clade IV)__AIT17840__GPCmut13 (opt5)
aggagagucccgcagucggcguccagcggcucugcuuguucgugugugugucguugcaggccuuauucaagcuuaccaugggccagaucgugaccuucuuucaagaggucccccacguuauugaagaggugaugaacaucgugcugauugcccucagcauccuggcuguccuuaaggggcuguacaauuucgccacaugcggacucgugggccugguuacguuucuucugcucugugggagauccugcaccauuucucuguauaaaggaguguacgaacugcagacacucgagcugaacauggaaacccuuaauaugacaaugccucugagcuguaccaagaacaauucccaucacuauaucauggucggcaacgagacagggcucgagcugacccuuacgaauaccucuaucauuaaccauaaauucugcaaucugagcgacgcgcacaagaaaaaccucuacgaucaugcucugauguccaucauuucuacauuucaccugagcaucccgaauuucaaccaguaugaagccauguccugugacuuuaauggaggcaagauuagcgugcaguacaaccucucucacuccuaugccggcgaugcugccaaucauugcgggaccguugcuaacggagugcugcaaacauucaugcggauggccuggggcgggagcuacaucgcgcuugacucuggacgcgauagaugggacuguauuaugaccuccuaccaguaucugaucauccagaacacgacaugggaggaucacugccaguuuagccggcccucuccuauuggcuaccucgggcugcuuucccaacgcaccagagacaucuauauuagccggcgccugcucggaacauucaccuggacccuguccgauucugaaggcaaggacacacccggcggguacugucugacgagauggaugcucaucgaggccgagcugaaaugcuuuggaaauaccgcugucgccaaguguaacgaaaaacaugaugaggaguucugcgacaugcuucggcuguuugauuucaauaagcaggcuauucagcgccucaaagccgaagcgcagaugagcauccaacugaucaacaaggccgugaaugcucuuauuaacgaccagcugaucaugaagaaucaccucagagacauuaugggcaucccuuauugcaacuacuccaaauauugguaccugaaucacacaaccacagggaagaccagccugcccaaauguuggcucgugucuaacggauccuaccugaaugaaacgcauuucagcgaugacauugagcagcaagccgauaacaugaucacagagaugcuucagaaggaauauauggagcggcagggcaaaaccccucuggggcucgucgaccuguuuguuuucucuaccagcuuuuaccugaucuccauuuuccuucaccucgugaagaucccgugaggacuaguaauaaggaaacuguaugaaugucugugggcaggaagugaagagauccuucuguaaagguuuuuggaauuaugucugcugaauaauaaacuuuuuugaaauaauaaaucugguagaaaaaugagaucucaaaggcucuuuucagagccaccaaaaaaaaaaaaaaaaaaaaaaaaaaaaaaaaaaaaaaaaaaaaaaaaaaaaaaaaaaaaaaaaaaaaaaaaaaaaaaaaaaaaaaaaaaaaaaaaaaaaa

SEQ ID NO: 42789 - RNA, 1674 nt, Artificial Sequence
  mRNA product Design b-4 (A100) comprising derived and/or modified sequence from LASV(Josiah;Clade IV)__NP_694870__GPCmut13 (opt1)
aggagagucccgcagucggcguccagcggcucugcuuguucgugugugugucguugcaggccuuauucaagcuuaccaugggccagaucgugaccuucuuccaggaggucccccacgugaucgaggaggugaugaacaucguccugaucgcccucagcgugcuggccgugcugaaggggcucuacaacuucgcgaccugcggccuggucgggcuggugacguuccuccugcugugcggccgcuccugcaccaccagccucuacaaggggguguacgagcugcagacccuggagcucaacauggagacgcugaacaugaccaugccgcuguccugcaccaagaacaacagccaccacuacaucauggucggcaacgagaccggccucgagcugacgcugaccaacaccuccaucaucaaccacaaguucugcaaccucagcgacgcccacaagaagaaccuguacgaccacgcccugauguccaucaucagcaccuuccaccucuccauccccaacuucaaccaguacgaggccaugagcugcgacuucaacgggggcaagaucuccgugcaguacaaccugagccacuccuacgccggggacgcggccaaccacugcggcacgguggccaacgggguccugcagaccuucaugcggauggccuggggcggcagcuacaucgcgcucgacuccgggcgcggcaacugggacugcaucaugaccagcuaccaguaccugaucauccagaacaccacgugggaggaccacugccaguucucccggcccagccccaucggguaccugggccuccugucccagcgcacccgggacaucuacaucagccgccggcugcucggcaccuucaccuggacgcugagcgacuccgaggggaaggacaccccgggcggguacugccugacccgcuggaugcucaucgaggccgagcugaagugcuucggcaacaccgccguggccaagugcaacgagaagcacgacgaggaguucugcgacaugcugcggcuguucgacuucaacaagcaggccauccagcgccugaaggcggaggcccagaugagcauccagcugaucaacaaggccgugaacgcccucaucaacgaccagcugaucaugaagaaccaccuccgggacaucauggggauccccuacugcaacuacuccaaguacugguaccucaaccacacgaccaccggccgcaccagccugcccaagugcuggcuggucuccaacggcagcuaccucaacgagacgcacuucuccgacgacaucgagcagcaggccgacaacaugaucaccgagaugcugcagaaggaguacauggagcggcaggggaagacgccccugggccucguggaccuguucguguucagcaccuccuucuaccugaucagcaucuuccugcaccucgucaagaucccgugaggacuaguaauaaggaaacuguaugaaugucugugggcaggaagugaagagauccuucuguaaagguuuuuggaauuaugucugcugaauaauaaacuuuuuugaaauaauaaaucugguagaaaaaugagaucuaaaaaaaaaaaaaaaaaaaaaaaaaaaaaaaaaaaaaaaaaaaaaaaaaaaaaaaaaaaaaaaaaaaaaaaaaaaaaaaaaaaaaaaaaaaaaaaaaaaa

SEQ ID NO: 42790 - RNA, 1671 nt, Artificial Sequence
  mRNA product Design b-4 (A100) comprising derived and/or modified sequence from LASV(LP;Clade I)__AAF86701__GPCmut13 (opt1)
aggagagucccgcagucggcguccagcggcucugcuuguucgugugugugucguugcaggccuuauucaagcuuaccaugggccagaucaucaccuucuuccaggaggugccccacgucaucgaggaggugaugaacaucgugcugaucgcccucagccugcuggccauccucaaggggcuguacaacaucgcgaccugcggcaucaucgggcuggucgccuuccucuuccugugcggcaaguccugcagccugacgcucaagggcggguacgagcugcagacccuggagcucaacauggagacccugaacaugaccaugccgcuguccugcacgaagaacagcucccaccacuacauccgcgugggcaacgagaccgggcucgagcugacccugaccaacacgagcaucaucaaccacaaguucugcaaccucuccgacgcccacaagaagaaccuguacgaccacgcccugaugagcaucaucuccaccuuccaccucagcauccccaacuucaaccaguacgaggccauguccugcgacuucaacggcgggaagaucagcgugcaguacaaccugucccacagcuacgcgggcgacgccgccgagcacugcgggaccgucgccaacggcgugcugcagaccuucaugcggauggcguggggcgggcgcuacaucgcccucgacuccggcaaggggaacugggacugcaucaugacgagcuaccaguaccugaucauccagaacaccaccugggaggaccacugccaguucucccggcccagccccaucggcuaccugggccuccugucccagcgcacccgggacaucuacaucagccgccggcugcucgggacguucaccuggacccugagcgacuccgagggcaacgagacccccgggggcuacugccugacgcgcuggaugcucaucgaggccgagcugaagugcuucgggaacaccgccguggccaagugcaacgagaagcacgacgaggaguucugcgacaugcugcggcuguucgacuucaacaagcaggcgauccgccggcugaaggccgaggcccagaugagcauccagcugaucaacaaggccgucaacgcccucaucaacgaccagcugaucaugaagaaccaccuccgcgacaucaugggcauccccuacugcaacuacuccaaguacugguaccucaaccacaccagcuccggccggaccagccugcccaagugcuggcugaucuccaacgggagcuaccucaacgagacgcaguucuccgacgacaucgagcagcaggcggacaacaugaucaccgagaugcugcagaaggaguacaucgagcgccagggcaagaccccgcuggggcucguggacaucuucaucuucagcaccuccuucuaccugaucagcaucuuccugcaccugaucaagaucccgugaggacuaguaauaaggaaacuguaugaaugucugugggcaggaagugaagagauccuucuguaaagguuuuuggaauuaugucugcugaauaauaaacuuuuuugaaauaauaaaucugguagaaaaaugagaucuaaaaaaaaaaaaaaaaaaaaaaaaaaaaaaaaaaaaaaaaaaaaaaaaaaaaaaaaaaaaaaaaaaaaaaaaaaaaaaaaaaaaaaaaaaaaaaaaaaaa

SEQ ID NO: 42791 - RNA, 1671 nt, Artificial Sequence
  mRNA product Design b-4 (A100) comprising derived and/or modified sequence from LASV(803213;Clade II)__AAF86703__GPCmut13 (opt1)
aggagagucccgcagucggcguccagcggcucugcuuguucgugugugugucguugcaggccuuauucaagcuuaccaugggccagaucaucaccuucuuccaggaggugccccacgucaucgaggaggugaugaacaucgugcugaucgcccucagccugcuggccauccucaaggggaucuacaacgucgcgaccugcggccuguucgggcugaucuccuuccuccugcugugcggccgcagcugcuccgugacguacaaggggguguacgagcuccagacccuggagcugaacauggccaaccucaacaugaccaugccgcugagcugcaccaagaacaacucccaccacuacaucauggucggcaacgagacgggccuggagcucacccugaccaacaccagcaucaucaaccacaaguucugcaaccuguccgacgcccacaagaagaaccucuacgaccacgcccugaugagcaucaucuccacguuccaccugagcauccccaacuucaaccaguacgaggccauguccugcgacuucaacgggggcaagaucagcgugcaguacaaccucucccacagcuucgcgguggacgccgccaaccacugcgggaccaucgccaacggcguccugcagaccuucaugcggauggcguggggcggguccuacaucgcccuggacagcggcaaggggaacugggacugcaucaugaccuccuaccaguaccucaucauccagaacacgaccugggaggaccacugccaguucagccgccccucccccaucggcuaccuggggcugcucagccagcggacccgcgacaucuacaucagccggcgccugcugggcaccuucacguggacccucuccgacagcgagggcaacgaggcccccgggggcuacugccugacccgguggaugcugaucgaggccgagcucaagugcuucgggaacaccgccguggcgaagugcaacgagaagcacgacgaggaguucugcgacaugcugcgccuguucgacuucaacaagcaggccaucaagcggcucaagacggaggcccagauguccauccagcugaucaacaaggccgugaacgcccugaucaacgaccagcucaucaugaagaaccaccuccgcgacaucaugggcauccccuacugcaacuacagccgguacugguaccugaaccacaccgucaccgggaagaccucccugccccgcugcuggcuggugagcaacggcuccuaccugaacgagacgcacuucagcgacgacaucgagcagcaggcggacaacaugaucaccgagaugcuccagaaggaguacauggaccggcagggcaagaccccgcuggggcugguggaccucuucgucuucuccaccagcuucuaccugaucuccaucuuccugcaccuggugaagaucccgugaggacuaguaauaaggaaacuguaugaaugucugugggcaggaagugaagagauccuucuguaaagguuuuuggaauuaugucugcugaauaauaaacuuuuuugaaauaauaaaucugguagaaaaaugagaucuaaaaaaaaaaaaaaaaaaaaaaaaaaaaaaaaaaaaaaaaaaaaaaaaaaaaaaaaaaaaaaaaaaaaaaaaaaaaaaaaaaaaaaaaaaaaaaaaaaaa

SEQ ID NO: 42792 - RNA, 1671 nt, Artificial Sequence
  mRNA product Design b-4 (A100) comprising derived and/or modified sequence from LASV(GA391;Clade III)__CAA36645__GPCmut13 (opt1)
aggagagucccgcagucggcguccagcggcucugcuuguucgugugugugucguugcaggccuuauucaagcuuaccaugggccagaucgugaccuucuuccaggaggucccccacgugaucgaggaggugaugaacaucguccugaucgcccucagcauccuggccauccugaaggggcucuacaacguggcgaccugcggccugaucgggcuggugacguuccuccugcuguccggccgcagcugcucccucaucuacaaggggaccuacgagcugcagacccuggagcucaacauggagacccugaacaugacgaugccgcugagcugcaccaagaacaacucccaccacuacauccgggucggcaacgagaccggccucgagcugacccugacgaacaccagcauccucaaccacaaguucugcaaccuguccgacgcccacaagcgcaaccuguacgaccacagccucauguccaucaucagcaccuuccaccuguccauccccaacuucaaccaguacgaggccaugagcugcgacuucaacgggggcaagaucaccgugcaguacaaccugucccacagcuucgccguggacgccgcggggcacugcggcacgcucgccaacgggguccugcagaccuucaugcggauggccuggggcggcuccuacaucgcccuggacagcgggcgcggcaacugggacugcaucaugaccuccuaccaguaccucaucauccagaacaccacgugggacgaccacugccaguucagccggcccucccccaucggguaccugggccugcucagccagcgcacccgggacaucuacaucagccgccggcugcugggcaccuucaccuggacgcucuccgacagcgaggggaacgagaccccgggcggguacugccugacccgcuggaugcugaucgaggcggagcucaagugcuucggcaacaccgccguggccaagugcaacgagaagcacgacgaggaguucugcgacaugcugcggcuguucgacuucaacaagcaggccauccgccggcucaagacggaggcccagauguccauccagcugaucaacaaggcggugaacgcccugaucaacgaccagcucaucaugaagaaccaccuccgcgacaucauggggauccccuacugcaacuacagccgguacugguaccugaaccacaccuccaccggcaagaccagccugccccgcugcuggcugaucuccaacggcagcuaccugaacgagacgaaguucuccgacgacaucgagcagcaggccgacaacaugaucaccgagaugcuccagaaggaguacaucgaccggcaggggaagacgccccugggccuggucgaccuguucguguucagcaccuccuucuaccucaucagcaucuuccugcaccuggugaagaucccgugaggacuaguaauaaggaaacuguaugaaugucugugggcaggaagugaagagauccuucuguaaagguuuuuggaauuaugucugcugaauaauaaacuuuuuugaaauaauaaaucugguagaaaaaugagaucuaaaaaaaaaaaaaaaaaaaaaaaaaaaaaaaaaaaaaaaaaaaaaaaaaaaaaaaaaaaaaaaaaaaaaaaaaaaaaaaaaaaaaaaaaaaaaaaaaaaa

SEQ ID NO: 42793 - RNA, 1674 nt, Artificial Sequence
  mRNA product Design b-4 (A100) comprising derived and/or modified sequence from LASV(AV;Clade V)__CCA30314__GPCmut13 (opt1)
aggagagucccgcagucggcguccagcggcucugcuuguucgugugugugucguugcaggccuuauucaagcuuaccaugggccagaucgugaccuucuuccaggaggucccccacgugaucgaggaggugaugaacaucguccugaucgcccucagcauccuggccgugcugaaggggcucuacaacaucgcgaccugcggccugaucgggcugaucacguuccuccugcugugcggccgcuccugcagcuccaaccucuacaaggggguguacgagcugcagagccuggaccucaacauggagacccugaacaugaccaugccgcuguccugcaccaagaacaacagccaccacuacauccgggucggcaacgacacgggccucgagcugacccugaccaacaccuccauccucaaccacaaguucugcaaccugagcgacgcccacaagaaggaccuguacgaccacgcccucauguccaucaucagcacguuccaccuguccauccccaacuucaaccaguacgaggccaugagcugcgacuucaacgggggcaagaucuccgugcaguacaaccugagccacuccuacgccaucgacgcggccaaccacugcgggaccguggccaacggcauccuccagaccuucaugcgcauggccuggggcgggagcuacaucgcgcuggacuccggccgggggaacugggacugcaucaugaccagcuaccaguaccugaucauccagaacacgaccugggagaaccacugccaguucucccgccccagccccaucggcuaccucgggcugcugagccagcggacccgcgacaucuacaucucccggcgccuccugggcaccuucacguggacccugagcgacuccgagggcaacgccacccccgggggcuacugccucacccgguggaugcugaucgaggccgagcugaagugcuucgggaacacggccgucgccaagugcaacgagaagcacgacgaggaguucugcgacaugcuccgccuguucgacuucaacaagcaggcgaucagccggcugaaguccgaggcccagaugagcauccagcucaucaacaaggccgugaacgcccugaucaacgaccagcugaucaugaagaaccaccuccgcgacaucaugggcauccccuacugcaacuacuccaaguacugguaccugaaccacaccaucaccgggaagaccagccugcccaagugcuggcucguguccaacggcagcuaccugaacgagacgcacuucuccgacgacaucgagcagcaggccgacaacaugaucaccgagaugcugcagaaggaguacauggagcggcagggcaagaccccgcucgggcuggucgaccuguucguguucagcaccuccuucuaccugaucagcaucuuccuccgccuggugaagaucccgugaggacuaguaauaaggaaacuguaugaaugucugugggcaggaagugaagagauccuucuguaaagguuuuuggaauuaugucugcugaauaauaaacuuuuuugaaauaauaaaucugguagaaaaaugagaucuaaaaaaaaaaaaaaaaaaaaaaaaaaaaaaaaaaaaaaaaaaaaaaaaaaaaaaaaaaaaaaaaaaaaaaaaaaaaaaaaaaaaaaaaaaaaaaaaaaaa

SEQ ID NO: 42794 - RNA, 1671 nt, Artificial Sequence
  mRNA product Design b-4 (A100) comprising derived and/or modified sequence from LASV(Togo/2016/7082;Clade VI)__AMR44577__GPCmut13 (opt1)
aggagagucccgcagucggcguccagcggcucugcuuguucgugugugugucguugcaggccuuauucaagcuuaccaugggccagaucaucaccuucuuccaggaggugccccacgucaucgaggaggugaugaacaucgugcugaucgcccucagccugcuggccauccucaagggggucuacaacguggcgaccugcggcaucaucgggcuggugacguuccuguuccucugcggccgcuccugcagccugaucuacaagggguccuacgagcugcagacccucgagcugaacauggagacccugaacaugaccaugccgcucagcugcacgaagaacuccagccaccacuacauccgggucggcaacgagaccggccuggagcugacccucaccaacacguccaucaucaaccacaaguucugcaaccugagcgacgcccacaagcgcaaccuguacgaccacgcccucauguccauccugagcaccuuccaccuguccauccccaacuucaaccaguacgaggccaugagcugcgacuucaacgggggcaagaucuccgugcaguacaaccucagccacgccuacgcgguggacgccgccgagcacugcgggaccgucgccaacggcgugcugcagaccuucaugcggauggcguggggcggguccuacaucgcccuggacagcggccgcgggaacugggacugcaucaugacguccuaccaguaccucaucauccagaacaccaccugggaggaccacugccaguucagccggcccucccccaucggcuaccuggggcugcucagccagcgcacccgggacaucuacaucagccgccggcugcugggcacguucaccuggacccucuccgacagcgagggcaacgagacccccgggggcuacugccugacgcgcuggaugcugaucgaggccgagcucaagugcuucgggaacaccgccguggccaagugcaacgagaagcacgacgaggaguucugcgacaugcugcggcuguucgacuucaacaagcaggcgauccagcgccucaaguccgaggcccagaugagcauccagcugaucaacaaggccgucaacgcccugaucaacgaccagcucaucaugaagaaccaccuccgggacaugaugggcauccccuacugcaacuacuccaaguacugguaccugaaccacaccagcuccgggcgcaccagccugcccaagugcuggcugguguccaacggcagcuaccugaacgagacgcacuucuccgacgacaucgagcagcaggccgacaacaugaucaccgagaugcuccagaaggaguacaucgaccggcagggcaagaccccgcuggggcugguggaccucuucgucuucagcaccuccuucuaccugaucagcaucuuccugcaccugaucaagaucccgugaggacuaguaauaaggaaacuguaugaaugucugugggcaggaagugaagagauccuucuguaaagguuuuuggaauuaugucugcugaauaauaaacuuuuuugaaauaauaaaucugguagaaaaaugagaucuaaaaaaaaaaaaaaaaaaaaaaaaaaaaaaaaaaaaaaaaaaaaaaaaaaaaaaaaaaaaaaaaaaaaaaaaaaaaaaaaaaaaaaaaaaaaaaaaaaaa

SEQ ID NO: 42795 - RNA, 1671 nt, Artificial Sequence
  mRNA product Design b-4 (A100) comprising derived and/or modified sequence from LASV(KAK-428;Clade n.d. (VII))__ANH09740__GPCmut13 (opt1)
aggagagucccgcagucggcguccagcggcucugcuuguucgugugugugucguugcaggccuuauucaagcuuaccaugggccagaucgugaccuucuuccaggaggucccccacgugaucgaggaggugaugaacaucguccugaucgcccucagccugcuggccauccucaaggggcuguacaacuucgcgaccugcggcgugaucgggcugaucacguuccuccugcugugcggccgcuccugcagcgccaccuacaaggggcaguacgagcuccagacccuggagcugaacauggagucccucaacaugaccaugccgcugagcugcacgaagaacaacucccaccacuacauccgggccggcaacaacaccggccuggagcucacccugaccaacacgagcaucaucucccacaaguucugcaaccugagcgacgcccacaagaagaaccucuacgaccacacccugauguccaucaucaccaccuuccaccugagcauccccaacuucaaccaguacgaggccauguccugcgacuucaacgggggcaagaucagcauccaguacaaccucucccacagcuacgcgggggacgccgcccagcacugcggcacgguggccaacgggguccugcagaccuucaugcgcauggcguggggcggcuccuaccuggcccucgacagcgggcggcgcggcugggacugcaucaucuccagcuaccaguaccugaucauccagaacaccaccugggacgaccacugccaguucucccggcccagccccaucggguaccugggcuucgugagccagaagacgcgcgacaucuacaucucccggcgccuccugggcaccuucaccuggacccugagcgacuccgaggggcacgacaugccgggcggguacugccucacgcgguggaugcugaucgaggccgaccugaagugcuucggcaacaccgccguggccaagugcaacgagaagcacgacgaggaguucugcgacauguggcgccucuucgacuucaacaagcaggcgauccagcggcugaaggccgaggcccagaugaacauccagcugaucaacaaggccgucaacgcccucaucaacgaccagcugaugaugaagaaccaccuccgcgacaucauggggauccccuacugcaacuacagcaaguucugguaccugaacaacaccaccacgggccggaccucccugccccgcugcuggcugaucagcaacggcuccuaccucaacgagacccacuucagcgacgacaucgagcagcaggcggacaacaugaucaccgagaugcugcagaaggaguacauggaccggcaggggaagacgccccugggccucguggaccuguucguguucuccaccagcuucuaccugaucaccaucuuccuccaccuggucaagaucccgugaggacuaguaauaaggaaacuguaugaaugucugugggcaggaagugaagagauccuucuguaaagguuuuuggaauuaugucugcugaauaauaaacuuuuuugaaauaauaaaucugguagaaaaaugagaucuaaaaaaaaaaaaaaaaaaaaaaaaaaaaaaaaaaaaaaaaaaaaaaaaaaaaaaaaaaaaaaaaaaaaaaaaaaaaaaaaaaaaaaaaaaaaaaaaaaaa

SEQ ID NO: 42796 - RNA, 1671 nt, Artificial Sequence; identical to SEQ ID NO: 42790
  mRNA product Design b-4 (A100) comprising derived and/or modified sequence from LASV(Pinneo-NIG-1969;Clade I)__AIT17836__GPCmut13 (opt1)

SEQ ID NO: 42797 - RNA, 1671 nt, Artificial Sequence
  mRNA product Design b-4 (A100) comprising derived and/or modified sequence from LASV(ISTH0009-NIG-2011;Clade II)__AIT17404__GPCmut13 (opt1)
aggagagucccgcagucggcguccagcggcucugcuuguucgugugugugucguugcaggccuuauucaagcuuaccaugggccagaucaucaccuucuuccaggaggugccccacgucaucgaggaggugaugaacaucgugcugaucgcccucagccugcuggccauccucaaggggaucuacaacgucgcgaccugcggccuguucgggcugguguccuuccuccugcugugcggccgcagcugcuccacgaccuacaaggggguguacgagcuccagacccuggagcuggacauggccagccucaacaugaccaugccgcuguccugcacgaagaacaacagccaccacuacaucauggucggcaacgagaccggccuggagcucacccugaccaacacguccaucaucaaccacaaguucugcaaccugagcgacgcccacaagaagaaccucuacgaccacgcccugauguccaucaucagcaccuuccaccuguccauccccaacuucaaccaguacgaggccaugagcugcgacuucaacgggggcaagaucuccgugcaguacaaccucagccacgcguacgccguggacgccgccaaccacugcgggaccaucgcgaacggcguccugcagaccuucaugcggauggccuggggcggguccuacaucgcccuggacagcggcaagggguccugggacugcaucaugacgagcuaccaguaccucaucauccagaacaccaccugggaggaccacugccaguucucccgccccagccccaucggcuaccuggggcugcucagccagcggacccgcgacaucuacaucucccggcgccugcugggcacguucaccuggacccucagcgacuccgagggcaacgagacccccgggggcuacugccugacgcgguggaugcugaucgaggccgagcucaagugcuucgggaacaccgccguggcgaagugcaacgagaagcacgacgaggaguucugcgacaugcugcgccuguucgacuucaacaagcaggccauccggcgccucaagaccgaggcccagaugagcauccagcugaucaacaaggccgugaacgcccugaucaacgaccagcucaucaugaagaaccaccuccgggacaucaugggcaucccguacugcaacuacuccaaguacugguaccugaaccacaccgucacggggaagaccagccugccccgcugcuggcugguguccaacggcagcuaccugaacgagacccacuucuccgacgacaucgagcagcaggcggacaacaugaucaccgagcuccugcagaaggaguacauggaccggcagggcaagacgccccuggggcucguggaccuguucgucuucagcaccuccuucuaccugaucagcaucuuccugcaccucaucaagaucccgugaggacuaguaauaaggaaacuguaugaaugucugugggcaggaagugaagagauccuucuguaaagguuuuuggaauuaugucugcugaauaauaaacuuuuuugaaauaauaaaucugguagaaaaaugagaucuaaaaaaaaaaaaaaaaaaaaaaaaaaaaaaaaaaaaaaaaaaaaaaaaaaaaaaaaaaaaaaaaaaaaaaaaaaaaaaaaaaaaaaaaaaaaaaaaaaaa

SEQ ID NO: 42798 - RNA, 1671 nt, Artificial Sequence
  mRNA product Design b-4 (A100) comprising derived and/or modified sequence from LASV(ISTH2010-NIG-2012;Clade II)__AIT17482__GPCmut13 (opt1)
aggagagucccgcagucggcguccagcggcucugcuuguucgugugugugucguugcaggccuuauucaagcuuaccaugggccagaucaucaccuucuuccaggaggugccccacgucaucgaggaggugaugaacaucgugcugaucgcccucagccugcuggccauccucaaggggaucuacaacgucgcgaccugcggccuguucgggcugguguccuuccuccugcugugcggccgcagcugcuccacgaccuacaaggggguguacgagcuccagacccuggagcuggacauggccagccucaacaugaccaugccgcuguccugcacgaagaacaacagccaccacuacaucauggucggcaacgagaccggccuggagcucacccugaccaacacguccaucaucaaccacaaguucugcaaccugagcgacgcccacaagaagaaccucuacgaccacgcccugauguccaucaucagcaccuuccaccuguccauccccaacuucaaccaguacgaggccaugagcugcgacuucaacgggggcaagaucuccgugcaguacaaccucagccacgcguacgccguggacgccgccaaccacugcgggaccaucgcgaacggcguccugcagaccuucaugcggauggccuggggcggguccuacaucgcccuggacagcggcaagggguccugggacugcaucaugacgagcuaccaguaccucaucauccagaacaucaccugggaggaccacugccaguucucccgccccagccccaucggcuaccuggggcugcucagccagcggacccgcgacaucuacaucucccggcgccugcugggcaccuucacguggacccucagcgacuccgagggcaacgagacccccgggggcuacugccugacccgguggaugcugaucgaggccgagcucaagugcuucgggaacacggccguggcgaagugcaacgagaagcacgacgaggaguucugcgacaugcugcgccuguucgacuucaacaagcaggccauccggcgccucaagaccgaggcccagaugagcauccagcugaucaacaaggccgugaacgcccugaucaacgaccagcucaucaugaagaaccaccuccgggacaucaugggcauccccuacugcaacuacuccaaguacugguaccugaaccacaccgucaccgggaagacgagccugccccgcugcuggcugguguccaacggcagcuaccugaacgagacccacuucuccgacgacaucgagcagcaggcggacaacaugaucaccgagcuccugcagaaggaguacaucgaccggcagggcaagaccccgcuggggcucguggaccuguucgucuucagcacguccuucuaccugaucagcaucuuccugcaccucgugaagaucccgugaggacuaguaauaaggaaacuguaugaaugucugugggcaggaagugaagagauccuucuguaaagguuuuuggaauuaugucugcugaauaauaaacuuuuuugaaauaauaaaucugguagaaaaaugagaucuaaaaaaaaaaaaaaaaaaaaaaaaaaaaaaaaaaaaaaaaaaaaaaaaaaaaaaaaaaaaaaaaaaaaaaaaaaaaaaaaaaaaaaaaaaaaaaaaaaaa

SEQ ID NO: 42799 - RNA, 1671 nt, Artificial Sequence
  mRNA product Design b-4 (A100) comprising derived and/or modified sequence from LASV(Lassa virus/H.sapiens-wt/NGA/2015/ISTH_0543;Clade II)__AVO03639__GPCmut13 (opt1)
aggagagucccgcagucggcguccagcggcucugcuuguucgugugugugucguugcaggccuuauucaagcuuaccaugggccagaucaucaccuucuuccaggaggugccccacgucaucgaggaggugaugaacaucgugcugaucgcccucagccugcuggccauccucaaggggaucuacaacgucgcgaccugcggccuguucgggcugguguccuuccuccugcugugcggccgcagcugcuccacgaccuacaaggggguguacgagcuccagacccuggagcuggacauggccaaccucaacaugaccaugccgcugagcugcacgaagaacaacucccaccacuacaucauggucggcaacgagaccggccuggagcucacccugaccaacacgagcaucaucaaccacaaguucugcaaccuguccgacgcccacaagaagaaccucuacgaccacgcccugaugagcaucaucuccaccuuccaccugagcauccccaacuucaaccaguacgaggccauguccugcgacuucaacgggggcaagaucagcgugcaguacaaccucucccacaccuacgcgguggacgccgccaaccacugcgggaccaucgccaacggcguccugcagacguucaugcggauggcguggggcgggagcuacaucgcccuggacuccggcaaggggagcugggacugcaucaugaccuccuaccaguaccucgugauccagaacaccaccugggaggaccacugccaguucagccgccccucccccaucggcuaccuggggcugcucagccagcggacgcgcgacaucuacaucagccggcgccugcugggcaccuucaccuggacccucuccgacagcgagggcaacgagacgcccgggggcuacugccugacccgguggaugcugaucgaggccgagcucaagugcuucgggaacaccgccguggccaagugcaacgagaagcacgacgaggaguucugcgacaugcugcgccuguucgacuucaacaagcaggcgauccggcgccucaagaccgaggcccagauguccauccagcugaucaacaaggccgucaacgcccugaucaacgaccagcucaucaugaagaaccaccuccgggacaucaugggcauccccuacugcaacuacagcaaguacugguaccugaaccacacggugaccgggaagaccucccugccccgcugcuggcuggugagcaacggcuccuaccugaacgagacccacuucagcgacgacaucgagcagcaggccgacaacaugaucacggagcuccugcagaaggaguacaucgaccggcagggcaagaccccgcuggggcucgucgaccuguucguguucuccaccagcuucuaccugaucuccaucuuccugcaccucgugaagaucccgugaggacuaguaauaaggaaacuguaugaaugucugugggcaggaagugaagagauccuucuguaaagguuuuuggaauuaugucugcugaauaauaaacuuuuuugaaauaauaaaucugguagaaaaaugagaucuaaaaaaaaaaaaaaaaaaaaaaaaaaaaaaaaaaaaaaaaaaaaaaaaaaaaaaaaaaaaaaaaaaaaaaaaaaaaaaaaaaaaaaaaaaaaaaaaaaaa

SEQ ID NO: 42800 - RNA, 1671 nt, Artificial Sequence
  mRNA product Design b-4 (A100) comprising derived and/or modified sequence from LASV(Lassa virus/H.sapiens-wt/NGA/2016/ISTH_0009;Clade II)__AVO03571__GPCmut13 (opt1)
aggagagucccgcagucggcguccagcggcucugcuuguucgugugugugucguugcaggccuuauucaagcuuaccaugggccagaucaucaccuucuuccaggaggugccccacgucaucgaggaggugaugaacaucgugcugaucgcccucagccugcuggccauccucaaggggaucuacaacgucgcgaccugcggccugcuggggcucguguccuuccugcugcucugcggccgcagcugcuccacgaccuacaaggggguguacgagcugcagacccuggagcucgacauggccagccugaacaugaccaugccgcuguccugcacgaagaacaacagccaccacuacaucauggucggcaacgagaccggccucgagcugacccugaccaacacguccaucaucaaccacaaguucugcaaccucagcgacgcccacaagaagaaccuguacgaccacgcccugauguccaucaucagcaccuuccaccucuccauccccaacuucaaccaguacgaggccaugagcugcgacuucaacgggggccggaucuccgugcaguacaaccugagccacuccuacgcgguggacgccgccaaccacugcgggaccaucgccaacggcguccugcagaccuucaugcgcauggcguggggcgggagcuacaucgcccucgacuccggcaaggggagcugggacugcaucaugacguccuaccaguaccugaucauccagaacaccaccugggaggaccacugccaguucagccggcccagccccaucggcuaccuggggcuccugucccagcgcacccgggacaucuacaucagccgccggcugcucggcacguucaccuggacccuguccgacagcgagggcaacgagacccccgggggcuacugccugacgcgcuggaugcucaucgaggccgagcugaagugcuucgggaacaccgccguggccaagugcaacgagaagcacgacgaggaguucugcgacaugcugcggcuguucgacuucaacaagcaggcgauccgccggcugaagaccgaggcccagauguccauccagcugaucaacaaggccgugaacgcccucaucaacgaccagcugaucaugaagaaccaccuccgcgacaucaugggcaucccguacugcaacuacagcaaguacugguaccucaaccacaccgucacggggaagaccucccugccccggugcuggcuggugagcaacggcuccuaccucaacgagacccacuucagcgacgacaucgagcagcaggccgacaacaugaucaccgagcugcugcagaaggaguacaucgaccgccagggcaagacgccccucgggcugguggaccuguucgucuucuccaccagcuucuaccugaucuccaucuuccuccaccuggugaagaucccgugaggacuaguaauaaggaaacuguaugaaugucugugggcaggaagugaagagauccuucuguaaagguuuuuggaauuaugucugcugaauaauaaacuuuuuugaaauaauaaaucugguagaaaaaugagaucuaaaaaaaaaaaaaaaaaaaaaaaaaaaaaaaaaaaaaaaaaaaaaaaaaaaaaaaaaaaaaaaaaaaaaaaaaaaaaaaaaaaaaaaaaaaaaaaaaaaa

SEQ ID NO: 42801 - RNA, 1671 nt, Artificial Sequence
  mRNA product Design b-4 (A100) comprising derived and/or modified sequence from LASV(Lassa virus/H.sapiens-wt/NGA/2016/ISTH_0017;Clade II)__AVO03567__GPCmut13 (opt1)
aggagagucccgcagucggcguccagcggcucugcuuguucgugugugugucguugcaggccuuauucaagcuuaccaugggccagaucaucaccuucuuccaggaggugccccacgucaucgaggaggugaugaacaucgugcugaucgcccucagccugcuggccauccucaaggggaucuacaacgucgcgaccugcggccuguucgggcugguguccuuccuccugcugugcggccgcagcugcuccacgaccuacaaggggguguacgagcuccagacccuggagcuggacauggccagccucaacaugaccaugccgcuguccugcacgaagaacaacagccaccacuacaucauggucggcaacgagaccggccuggagcucacccugaccaacacguccaucaucaaccacaaguucugcaaccugagcgacgcccacaagaagaaccucuacgaccacgcccugauguccaucaucagcaccuuccaccuguccauccccaacuucaaccaguacgaggccaugagcugcgacuucaacgggggcaagaucuccgugcaguacaaccucagccacaccuacgcgaucgacgccgccaaccacugcgggaccaucgccaacggcgugcugcagacguucaugcggauggcguggggcggguccuacaucgcccuggacagcggcaagggguccugggacugcaucaugaccagcuaccaguaccucaucauccagaacaccaccugggaggaccacugccaguucucccgccccagccccaucggcuaccuggggcugcucagccagcggacgcgcgacaucuacaucucccggcgccugcugggcaccuucaccuggacccucagcgacuccgagggcaacgagacgcccgggggcuacugccugacccgguggaugcugaucgaggccgagcucaagugcuucgggaacaccgccgucgccaagugcaacgagaagcacgacgaggaguucugcgacaugcugcgccuguucgacuucaacaagcaggcgauccggcgccucaagaccgaggcccagaugagcauccagcugaucaacaaggccgugaacgcccugaucaacgaccagcucaucaugaagaaccaccuccgggacaucaugggcauccccuacugcaacuacuccaaguacugguaccugaaccacacggugaccgggaagaccagccugccccgcugcuggcuggucuccaacggcagcuaccugaacgagacccacuucuccgacgacaucgagcagcaggccgacaacaugaucacggagcuccugcagaaggaguacauggaccggcagggcaagaccccgcuggggcucguggaccuguucguguucagcaccuccuucuaccugaucagcaucuuccugcaccucguccgcaucccgugaggacuaguaauaaggaaacuguaugaaugucugugggcaggaagugaagagauccuucuguaaagguuuuuggaauuaugucugcugaauaauaaacuuuuuugaaauaauaaaucugguagaaaaaugagaucuaaaaaaaaaaaaaaaaaaaaaaaaaaaaaaaaaaaaaaaaaaaaaaaaaaaaaaaaaaaaaaaaaaaaaaaaaaaaaaaaaaaaaaaaaaaaaaaaaaaa

SEQ ID NO: 42802 - RNA, 1671 nt, Artificial Sequence
  mRNA product Design b-4 (A100) comprising derived and/or modified sequence from LASV(Lassa virus/H.sapiens-wt/NGA/2018/ISTH_0959;Clade II)__AVV65099__GPCmut13 (opt1)
aggagagucccgcagucggcguccagcggcucugcuuguucgugugugugucguugcaggccuuauucaagcuuaccaugggccagaucaucaccuucuuccaggaggugccccacgucaucgaggaggugaugaacaucgugcugaucgcccucagccugcuggccauccucaaggggaucuacaacgucgugaccugcggccuguucgggcugguguccuuccuccugcugugcggccgcagcugcuccacgaccuacaagggggucuacgagcuccagacccuggagcuggacauggcgagccucaacaugaccaugccgcuguccugcacgaagaacaacagccaccacuacaucauggugggcaacgagaccggccuggagcucacccugaccaacacguccaucaucaaccacaaguucugcaaccugagcgacgcccacaagaagaaccucuacgaccacgcccugauguccaucaucagcaccuuccaccuguccauccccaacuucaaccaguacgaggccaugagcugcgacuucaacgggggcaagaucuccgugcaguacaaccucagccacgccuacgcgaucgacgccgccaaccacugcgggaccaucgccaacggcguccugcagaccuucaugcggauggcguggggcggguccuacaucgcccuggacagcggcaagggguccugggacugcaucaugacgagcuaccaguaccucaucauccagaacaccaccugggaggaccacugccaguucucccgccccagccccaucggcuaccuggggcugcucagccagcggacccgcgacaucuacaucucccggcgccugcugggcacguucaccuggacccucagcgacuccgagggcaacgagacccccgggggcuacugccugacgcgguggaugcugaucgaggccgagcucaagugcuucgggaacaccgccguggccaagugcaacgagaagcacgacgaggaguucugcgacaugcugcgccuguucgacuucaacaagcaggcgauccggcgccucaagaccgaggcccagaugagcauccagcugaucaacaaggccgugaacgcccugaucaacgaccagcucaucaugaagaaccaccuccgggacaucaugggcaucccguacugcaacuacuccaaguacugguaccugaaccacaccgucacggggaagaccagccugccccgcugcuggcugguguccaacggcagcuaccugaacgagacccacuucuccgacgacaucgagcagcaggccgacaacaugaucaccgagcuccugcagaaggaguacaucgaccggcagggcaagacgccccuggggcucguggaccuguucgucuucagcaccuccuucuaccugaucagcaucuuccugcaccucgugaagaucccgugaggacuaguaauaaggaaacuguaugaaugucugugggcaggaagugaagagauccuucuguaaagguuuuuggaauuaugucugcugaauaauaaacuuuuuugaaauaauaaaucugguagaaaaaugagaucuaaaaaaaaaaaaaaaaaaaaaaaaaaaaaaaaaaaaaaaaaaaaaaaaaaaaaaaaaaaaaaaaaaaaaaaaaaaaaaaaaaaaaaaaaaaaaaaaaaaa

SEQ ID NO: 42803 - RNA, 1671 nt, Artificial Sequence
  mRNA product Design b-4 (A100) comprising derived and/or modified sequence from LASV(LASV003-NIG-2008;Clade II)__AIT17580__GPCmut13 (opt1)
aggagagucccgcagucggcguccagcggcucugcuuguucgugugugugucguugcaggccuuauucaagcuuaccaugggccagaucaucaccuucuuccaggaggugccccacgucaucgaggaggugaugaacaucgugcugaucgcccucagccugcuggccauccucaaggggaucuacaacgucgcgaccugcggccuguucgggcugguguccuuccuccugcugugcggccgcagcugcuccacgaccuacaaggggguguacgagcuccagacccuggagcuggacauggccagccucaacaugaccaugccgcuguccugcacgaagaacaacagccaccacuacaucauggucggcaacgagaccggccuggagcucacccugaccaacacguccaucaucaaccacaaguucugcaaccugagcgacgcccacaagaagaaccucuacgaccacgcccugauguccaucaucagcaccuuccaccuguccauccccaacuucaaccaguacgaggccaugagcugcgacuucaacgggggcaagaucuccgugcaguacaaccucagccacaccuacgcgguggacgccgccaaccacugcgggaccaucgccaacggcguccugcagacguucaugcggauggcguggggcggguccuacaucgcccuggacagcggcaagggguccugggacugcaucaugaccagcuaccaguaccucaucauccagaacaccaccugggaggaccacugccaguucucccgccccagccccaucggcuaccuggggcugcucagccagcggacgcgcgacaucuacaucucccggcgccugcugggcaccuucaccuggacccucagcgacuccgagagcaacgagacgccgggcggguacugccugacccgguggaugcugaucgaggccgagcucaagugcuucggcaacaccgccguggccaagugcaacgagaagcacgacgaggaguucugcgacaugcugcgccuguucgacuucaacaagcaggcgauccggcgccucaaggccgaggcccagauguccauccagcugaucaacaaggccgugaacgcccugaucaacgaccagcucaucaugaagaaccaccuccgggacaucauggggauccccuacugcaacuacagcaaguacugguaccugaaccacaccgucacgggccgcaccucccugccccggugcuggcuggugagcaacggguccuaccugaacgagacccacuucagcgacgacaucgagcagcaggcggacaacaugaucaccgagcuccugcagaaggaguacauggaccgccagggcaagacgccccugggccucguggaccuguucgucuucuccaccagcuucuaccugaucuccaucuuccugcaccucgugaagaucccgugaggacuaguaauaaggaaacuguaugaaugucugugggcaggaagugaagagauccuucuguaaagguuuuuggaauuaugucugcugaauaauaaacuuuuuugaaauaauaaaucugguagaaaaaugagaucuaaaaaaaaaaaaaaaaaaaaaaaaaaaaaaaaaaaaaaaaaaaaaaaaaaaaaaaaaaaaaaaaaaaaaaaaaaaaaaaaaaaaaaaaaaaaaaaaaaaa

SEQ ID NO: 42804 - RNA, 1671 nt, Artificial Sequence
  mRNA product Design b-4 (A100) comprising derived and/or modified sequence from LASV(LASV035-NIG-2009;Clade II)__AIT17588__GPCmut13 (opt1)
aggagagucccgcagucggcguccagcggcucugcuuguucgugugugugucguugcaggccuuauucaagcuuaccaugggccagaucaucaccuucuuccaggaggugccccacgucaucgaggaggugaugaacaucgugcugaucgcccucagccugcuggccauccucaaggggaucuacaacgucgcgaccugcggccuguucgggcugguguccuuccuccugcugugcggccgcagcugcuccacgaccuacaaggggguguacgagcuccagacccuggagcuggacauggccagccucaacaugaccaugccgcuguccugcacgaagaacaacagccaccacuacaucauggucggcaacgagaccggccuggagcucacccugaccaacacguccaucaucaaccacaaguucugcaaccugagcgacgcccacaagaagaaccucuacgaccacgcccugauguccaucaucagcaccuuccaccuguccauccccaacuucaaccaguacgaggccaugagcugcgacuucaacgggggcaagaucuccgugcaguacaaccucagccacgcguacgccguggacgccgccaaccacugcgggaccaucgcgaacggcguccugcagaccuucaugcggauggccuggggcggguccuacaucgcccuggacagcggcaagggguccugggacugcaucaugacgagcuaccaguaccucaucauccagaacaccaccugggaggaccacugccaguucucccgccccagccccaucggcuaccuggggcugcucagccagcggacccgcgacaucuacaucucccggcgccugcugggcacguucaccuggacccucagcgacuccgagggcaacgagacccccgggggcuacugccugacgcgguggaugcugaucgaggccgagcucaagugcuucgggaacaccgccguggcgaagugcaacgagaagcacgacgaggaguucugcgacaugcugcgccuguucgacuucaacaagcaggccauccggcgccucaaggccgaggcccagaugagcauccagcugaucaacaaggccgugaacgcgcugaucaacgaccagcucaucaugaagaaccaccuccgggacaucaugggcauccccuacugcaacuacuccaaguacugguaccugaaccacaccgucaccgggaagacgagccugccccgcugcuggcugguguccaacggcagcuaccugaacgagacccacuucuccgacgacaucgagcagcaggccgacaacaugaucaccgagcuccugcagaaggaguacaucgaccggcagggcaagaccccgcuggggcucguggaccuguucgucuucagcacguccuucuaccugaucagcaucuuccugcaccucgugaagaucccgugaggacuaguaauaaggaaacuguaugaaugucugugggcaggaagugaagagauccuucuguaaagguuuuuggaauuaugucugcugaauaauaaacuuuuuugaaauaauaaaucugguagaaaaaugagaucuaaaaaaaaaaaaaaaaaaaaaaaaaaaaaaaaaaaaaaaaaaaaaaaaaaaaaaaaaaaaaaaaaaaaaaaaaaaaaaaaaaaaaaaaaaaaaaaaaaaa

SEQ ID NO: 42805 - RNA, 1671 nt, Artificial Sequence
  mRNA product Design b-4 (A100) comprising derived and/or modified sequence from LASV(LASV1000-NIG-2009;Clade II)__AIT17782__GPCmut13 (opt1)
aggagagucccgcagucggcguccagcggcucugcuuguucgugugugugucguugcaggccuuauucaagcuuaccaugggccagaucaucaccuucuuccaggaggugccccacgucaucgaggaggugaugaacaucgugcugaucgcccucagccugcuggccauccucaaggggaucuacaacgucgcgaccugcggccuguucgggcugguguccuuccuccugcugugcggccgcagcugcuccacgaccuacaaggggguguacgagcuccagacccuggagcuggacauggccagccucaacaugaccaugccgcuguccugcacgaagaacaacagccaccacuacaucauggucggcaacgagaccggccuggagcucacccugaccaacacguccaucaucaaccacaaguucugcaaccugagcgacgcccacaagaagaaccucuacgaccacgcccugauguccaucaucagcaccuuccaccuguccauccccaacuucaaccaguacgaggccaugagcugcgacuucaacgggggcaagaucuccgugcaguacaaccucagccacaccuacgcgguggacgccgccaaccacugcgggaccaucgccaacggcguccugcagacguucaugcggauggcguggggcggguccuacaucgcccuggacagcggcaagggguccugggacugcaucaugaccagcuaccaguaccucaucauccagaacaccaccugggaggaccacugccaguucucccgccccagccccaucggcuaccuggggcugcucagccagcggacgcgcgacaucuacaucucccggcgccugcugggcaccuucaccuggacccucagcgacuccgagggcaacgagacgcccgggggcuacugccugacccgguggaugcugaucgaggccgagcucaagugcuucgggaacaccgccguggccaagugcaacgagaagcacgacgaggaguucugcgacaugcugcgccuguucgacuucaacaagcaggcgaucaagcggcucaagaccgaggcccagaugagcauccagcugaucaacaaggccgugaacgcccugaucaacgaccagcucaucaugaagaaccaccuccgcgacaucaugggcauccccuacugcaacuacuccaaguacugguaccugaaccacacggucaccgggaagaccagccugccccggugcuggcugguguccaacggcagcuaccugaacgagacccacuucuccgacgacaucgagcagcaggccgacaacaugaucacggagcuccugcagaaggaguacaucgaccgccagggcaagaccccgcuggggcucguggaccuguucgucuucagcaccuccuucuaccugaucagcaucuuccugcaccucgugaagaucccgugaggacuaguaauaaggaaacuguaugaaugucugugggcaggaagugaagagauccuucuguaaagguuuuuggaauuaugucugcugaauaauaaacuuuuuugaaauaauaaaucugguagaaaaaugagaucuaaaaaaaaaaaaaaaaaaaaaaaaaaaaaaaaaaaaaaaaaaaaaaaaaaaaaaaaaaaaaaaaaaaaaaaaaaaaaaaaaaaaaaaaaaaaaaaaaaaa

SEQ ID NO: 42806 - RNA, 1671 nt, Artificial Sequence
  mRNA product Design b-4 (A100) comprising derived and/or modified sequence from LASV(LASV221-NIG-2010;Clade II)__AIT17624__GPCmut13 (opt1)
aggagagucccgcagucggcguccagcggcucugcuuguucgugugugugucguugcaggccuuauucaagcuuaccaugggccagaucaucaccuucuuccaggaggugccccacgucaucgaggaggugaugaacaucgugcugaucgcccucagccugcuggccauccucaaggggaucuacaacgucgcgaccugcggccuguucgggcugguguccuuccuccugcugugcggccgcagcugcuccacgaccuacaaggggguguacgagcuccagacccuggagcuggacauggccagccucaacaugaccaugccgcuguccugcacgaagaacaacagccaccacuacaucauggucggcaacgagaccggccuggagcucacccugaccaacacguccaucaucaaccacaaguucugcaaccugagcgacgcccacaagaagaaccucuacgaccacgcccugauguccaucaucagcaccuuccaccuguccauccccaacuucaaccaguacgaggccaugagcugcgacuucaacgggggcaagaucuccgugcaguacaaccucagccacaccuacgcgaucgacgccgccaaccacugcgggaccaucgccaacggcgugcugcagacguucaugcggauggcguggggcggguccuacaucgcccuggacagcggcaagggguccugggacugcaucaugaccagcuaccaguaccucaucauccagaacaccaccugggaggaccacugccaguucucccgccccagccccaucggcuaccuggggcugcucagccagcggacgcgcgacaucuacaucucccggcgccugcugggcaccuucaccuggacccucagcgacuccgagggcaacgagacgcccgggggcuacugccugacccgguggaugcugaucgaggccgagcucaagugcuucgggaacaccgccgucgccaagugcaacgagaagcacgacgaggaguucugcgacaugcugcgccuguucgacuucaacaagcaggcgauccggcgccucaagaccgaggcccagaugagcauccagcugaucaacaaggccgugaacgcccugaucaacgaccagcucaucaugaagaaccaccuccgggacaucaugggcauccccuacugcaacuacuccaaguacugguaccugaaccacacggugaccgggaagaccagccugccccgcugcuggcuggucuccaacggcagcuaccugaacgagacccacuucuccgacgacaucgagcagcaggccgacaacaugaucacggagaugcuccagaaggaguacauggaccggcagggcaagaccccgcuggggcugguggaccucuucguguucagcaccuccuucuaccugaucagcaucuuccugcaccuggucaagaucccgugaggacuaguaauaaggaaacuguaugaaugucugugggcaggaagugaagagauccuucuguaaagguuuuuggaauuaugucugcugaauaauaaacuuuuuugaaauaauaaaucugguagaaaaaugagaucuaaaaaaaaaaaaaaaaaaaaaaaaaaaaaaaaaaaaaaaaaaaaaaaaaaaaaaaaaaaaaaaaaaaaaaaaaaaaaaaaaaaaaaaaaaaaaaaaaaaa

SEQ ID NO: 42807 - RNA, 1671 nt, Artificial Sequence
  mRNA product Design b-4 (A100) comprising derived and/or modified sequence from LASV(LASV237-NIG-2010;Clade II)__AIT17638__GPCmut13 (opt1)
aggagagucccgcagucggcguccagcggcucugcuuguucgugugugugucguugcaggccuuauucaagcuuaccaugggccagaucaucaccuucuuccaggaggugccccacgucaucgaggaggugaugaacaucgugcugaucgcccucagccugcuggccauccucaaggggaucuacaacgucgcgaccugcggccuguucgggcugguguccuuccuccugcugugcggccgcagcugcuccacgaccuacaaggggguguacgagcuccagacccuggagcuggacauggccagccucaacaugaccaugccgcuguccugcacgaagaacaacagccaccacuacaucauggucggcaacgagaccggccuggagcucacccugaccaacacguccaucaucaaccacaaguucugcaaccugagcgacgcccacaagaaggaccucuacgaccacgcccugauguccaucaucagcaccuuccaccuguccauccccaacuucaaccaguacgaggccaugagcugcgacuucaacgggggcaagaucuccgugcaguacaaccucagccacaccuacgcgguggacgccgccaaccacugcgggaccaucgccaacggcguccugcagacguucaugcggauggcguggggcggguccuacaucgcccuggacagcggcaagggguccugggacugcaucaugaccagcuaccaguaccucaucauccagaacaccaccugggaggaccacugccaguucucccgccccagccccaucggcuaccuggggcugcucagccagcggacgcgcgacaucuacaucucccggcgccugcugggcaccuucaccuggacccucagcgacuccgagggcaacgagacgcccgggggcuacugccugacccgguggaugcugaucgaggccgagcucaagugcuucgggaacaccgccguggccaagugcaacgagaagcacgacgaggaguucugcgacaugcugcgccuguucgacuucaacaagcaggcgauccggcgccucaagaccgaggcccagaugagcauccagcugaucaacaaggccgugaacgcccugaucaacgaccagcucaucaugaagaaccaccuccgggacaucaugggcauccccuacugcaacuacuccaaguacugguaccugaaccacacggucaccgggaagaccagccugccccgcugcuggcugguguccaacggcagcuaccugaacgagacccacuucuccgacgacaucgagcagcaggccgacaacaugaucacggagcuccugcagaaggaguacauggaccggcagggcaagaccccgcuggggcucguggaccuguucgucuucagcaccuccuucuaccugaucagcaucuuccugcaccucaucaagaucccgugaggacuaguaauaaggaaacuguaugaaugucugugggcaggaagugaagagauccuucuguaaagguuuuuggaauuaugucugcugaauaauaaacuuuuuugaaauaauaaaucugguagaaaaaugagaucuaaaaaaaaaaaaaaaaaaaaaaaaaaaaaaaaaaaaaaaaaaaaaaaaaaaaaaaaaaaaaaaaaaaaaaaaaaaaaaaaaaaaaaaaaaaaaaaaaaaa

SEQ ID NO: 42808 - RNA, 1671 nt, Artificial Sequence
  mRNA product Design b-4 (A100) comprising derived and/or modified sequence from LASV(LASV253-NIG-2011;Clade II)__AIT17670__GPCmut13 (opt1)
aggagagucccgcagucggcguccagcggcucugcuuguucgugugugugucguugcaggccuuauucaagcuuaccaugggccagaucaucaccuucuuccaggaggugccccacgucaucgaggaggugaugaacaucgugcugaucgcccucagccugcuggccauccucaaggggaucuacaacgucgcgaccugcggccuguucgggcugguguccuuccuccugcugugcggccgcagcugcuccacgaccuacaaggggguguacgagcuccagacccuggagcuggacauggccagccucaacaugaccaugccgcuguccugcacgaagaacaacagccaccacuacaucauggucggcaacgagaccggccuggagcucacccugaccaacacguccaucaucaaccacaaguucugcaaccugagcgacgcccacaagaagaaccucuacgaccacgcccugauguccaucaucagcaccuuccaccuguccauccccaacuucaaccaguacgaggccaugagcugcgacuucaacgggggcaagaucuccgugcaguacaaccucagccacaccuacgcgguggacgccgccaaccacugcgggaccaucgccaacggcguccugcagacguucaugcggauggcguggggcggguccuacaucgcccuggacagcggcaagggguccugggacugcaucaugaccagcuaccaguaccucaucauccagaacaccaccugggaggaccacugccaguucucccgccccagccccaucggcuaccuggggcugcucagccagcggacgcgcgacaucuacaucucccggcgccugcugggcaccuucaccuggacccucagcgacuccgagggcaacgagacgcccgggggcuacugccugacccgguggaugcugaucgaggccgagcucaagugcuucgggaacaccgccguggccaagugcaacgagaagcacgacgaggaguucugcgacaugcugcgccuguucgacuucaacaagcaggcgauccggcgccucaaggccgaggcccagaugagcauccagcugaucaacaaggccgugaacgcccugaucaacgaccagcucaucaugaagaaccaccuccgggacaucaugggcaucccguacugcaacuacuccaaguacugguaccugaaccacaccgucacggggcgcaccagccugccccggugcuggcugguguccaacggcagcuaccugaacgagacccacuucuccgacgacaucgagcagcaggcggacaacaugaucaccgagcuccugcagaaggaguacaucgaccgccagggcaagacgccccuggggcucguggaccuguucgucuucagcaccuccuucuaccugaucagcaucuuccugcaccucgugaagaucccgugaggacuaguaauaaggaaacuguaugaaugucugugggcaggaagugaagagauccuucuguaaagguuuuuggaauuaugucugcugaauaauaaacuuuuuugaaauaauaaaucugguagaaaaaugagaucuaaaaaaaaaaaaaaaaaaaaaaaaaaaaaaaaaaaaaaaaaaaaaaaaaaaaaaaaaaaaaaaaaaaaaaaaaaaaaaaaaaaaaaaaaaaaaaaaaaaa

SEQ ID NO: 42809 - RNA, 1671 nt, Artificial Sequence
  mRNA product Design b-4 (A100) comprising derived and/or modified sequence from LASV(LASV254-NIG-2011;Clade II)__AIT17674__GPCmut13 (opt1)
aggagagucccgcagucggcguccagcggcucugcuuguucgugugugugucguugcaggccuuauucaagcuuaccaugggccagaucaucaccuucuuccaggaggugccccacgucaucgaggaggugaugaacaucgugcugaucgcccucagccugcuggccauccucaaggggaucuacaacgucgcgaccugcggccuguucgggcugguguccuuccuccugcugugcggccgcagcugcuccacgaccuacaaggggguguacgagcuccagacccuggagcuggacaugaccaaccucaacaugacgaugccgcugagcugcaccaagaacaacucccaccacuacaucauggucggcaacgagaccggccuggagcucacccugacgaacaccagcaucaucaaccacaaguucugcaaccuguccgacgcccacaagaagaaccucuacaaccacgcccugaugagcaucaucuccaccuuccaccugagcauccccaacuucaaccaguacgaggccauguccugcgacuucaacgggggcaagaucagcgugcaguacaaccucucccacagcuacgccguggacgcggccaaccacugcgggaccaucgccaacggcguccugcagacguucaugcggauggccuggggcggguccuacaucgcgcuggacagcggcaaggggaacugggacugcaucaugaccuccuaccaguaccucaucauccagaacaccaccugggaggaccacugccaguucagccgccccucccccaucggcuaccuggggcugcucagccagcggacgcgcgacaucuacaucagccggcgccugcugggcaccuucaccuggacccucuccgacagcgagggcaacgagacgcccgggggcuacugccugacccgguggaugcugaucgaggccgagcucaagugcuucgggaacaccgccguggccaagugcaacgagaagcacgacgaggaguucugcgacaugcugcgccuguucgacuucaacaagcaggccauccggcgccucaagaccgaggcgcaggccaacauccagcugaucaacaaggccgugaacgcccugaucaacgaccagcucaucaugaagaaccaccuccgggacaucaugggcauccccuacugcaacuacuccaaguacugguaccugaaccacacggucaccgggaagaccagccugccccgcugcuggcugguguccaacggcagcuaccugaacgagacccacuucuccgacgacaucgagcagcaggccgacaacaugaucacggagcuccugcagaaggaguacauggaccggcagggcaagaccccgcuggggcucguggaccuguucgucuucagcaccuccuucuaccugaucagcaucuuccugcaccucgugaagaucccgugaggacuaguaauaaggaaacuguaugaaugucugugggcaggaagugaagagauccuucuguaaagguuuuuggaauuaugucugcugaauaauaaacuuuuuugaaauaauaaaucugguagaaaaaugagaucuaaaaaaaaaaaaaaaaaaaaaaaaaaaaaaaaaaaaaaaaaaaaaaaaaaaaaaaaaaaaaaaaaaaaaaaaaaaaaaaaaaaaaaaaaaaaaaaaaaaa

SEQ ID NO: 42810 - RNA, 1671 nt, Artificial Sequence
  mRNA product Design b-4 (A100) comprising derived and/or modified sequence from LASV(Nig08-A19;Clade III)__ADU56618__GPCmut13 (opt1)
aggagagucccgcagucggcguccagcggcucugcuuguucgugugugugucguugcaggccuuauucaagcuuaccaugggccagaucgugaccuucuuccaggaggucccccacgugaucgaggaggugaugaacaucguccugaucgcccucagcauccuggccauccugaaggggcucuacaacaucgcgaccugcggccugaucgggcuggugacguuccuccugcuguccggccgcagcugcuccaugaccuacaaggggguguacgagcuccagacccuggagcugaacaugaacacccucaacaugacgaugccgcugagcugcaccaagaacaacucccaccacuacaucauggucggcaacgagaccggccuggagcucacccugacgaacaccagccugcuccaccacaaguucugcaaccuguccgacgcccacaagaagaaccuguacgaccacacccucaugagcaucaucuccaccuuccaccugagcauccccaacuucaaccaguacgaggccauguccugcgacuucaacgggggcaagaucacggugcaguacaaccugagccacuccuacgccaucgacgccgcgaaccacugcgggaccguggccaacggcguccuccagaccuucaugcggauggccuggggcgggagcuacaucgcccuggacuccggccgcgggaagugggacugcaucaugaccagcuaccaguaccugaucauccagaacacgaccugggaggaccacugccaguucucccggcccagccccaucggcuaccucgggcugcugucccagcgcacccgggacaucuacaucagccgccggcuccugggcaccuucacguggacccugagcgacuccgagggcaacgagacccccgggggcuacugccucacccgcuggaugcugaucgaggcggagcugaagugcuucgggaacacggccguggccaagugcaacgagaagcacgacgaggaguucugcgacaugcuccggcuguucgacuucaacaagcaggccauccgccggcugaaggccgaggcgcagaugagcauccagcucaucaacaaggccgugaacgcccugaucaacgaccagcugaucaugaagaaccaccuccgcgacaucaugggcauccccuacugcaacuacuccaaguacugguaccugaaccacaccagcaccgggcggaccucccugccccgcugcuggcucgucagcaacggcuccuaccugaacgagacgcacuucagcgacgacaucgagcagcaggccgacaacaugaucaccgagaugcugcagaaggaguaccucgaccggcagggcaagaccccgcuggggcugguggaccuguucguguucuccaccagcuucuaccucaucuccaucuuccugcaccuggucaagaucccgugaggacuaguaauaaggaaacuguaugaaugucugugggcaggaagugaagagauccuucuguaaagguuuuuggaauuaugucugcugaauaauaaacuuuuuugaaauaauaaaucugguagaaaaaugagaucuaaaaaaaaaaaaaaaaaaaaaaaaaaaaaaaaaaaaaaaaaaaaaaaaaaaaaaaaaaaaaaaaaaaaaaaaaaaaaaaaaaaaaaaaaaaaaaaaaaaa

SEQ ID NO: 42811 - RNA, 1674 nt, Artificial Sequence
  mRNA product Design b-4 (A100) comprising derived and/or modified sequence from LASV(G1180-SLE-2010;Clade IV)__AIT17168__GPCmut13 (opt1)
aggagagucccgcagucggcguccagcggcucugcuuguucgugugugugucguugcaggccuuauucaagcuuaccaugggccagaucgugaccuucuuccaggaggucccccacgugaucgaggaggugaugaacaucguccugaucgcccucagcauccuggccgugcugaaggggcucuacaacuucgcgaccugcggccugguggggcugcucaccuuccugcugcucugcggccgcuccugcaccgccagccgguacaagggggucuacgagcugcagacccuggagcucaacauggagacccugaacaugacgaugccgcuguccugcaccaagaacaacagccaccacuacaucauggugggcaacgagaccggccucgagcugacccugacgaacaccuccaucaucaaccacaaguucugcaaccucagcgacgcccacaagaagaaccuguacgaccacgcccugauguccaucaucagcaccuuccaccucuccauccccaacuucaaccaguacgaggccaugagcugcgacuucaacgggggcaagaucuccgugcaguacaaccugagccacuccuacgcgggggacgccgccaaccacugcggcaccgucgccaacggggugcugcagacguucaugcgcauggcguggggcggcagcuacaucgcccucgacuccgggcacggcagcugggacugcaucaugaccuccuaccaguaccugaucauccagaacaccaccugggaggaccacugccaguucagccggcccucccccaucggguaccugggccuccugagccagcgcacgcgggacaucuacaucagccgccggcugcucggcaccuucaccuggacccuguccgacagcgaggggaaggacacgccgggcggguacugccugacccgcuggaugcucaucgaggccgagcugaagugcuucggcaacaccgccguggccaagugcaacgagaagcacgacgaggaguucugcgacaugcugcggcuguucgacuucaacaagcaggcgauccagcgccugaaggccgaggcccagauguccauccagcugaucaacaaggccgucaacgcccucaucaacgaccagcugaucaugaagaaccaccuccgggacaucauggggauccccuacugcaacuacagcaaguacugguaccucaaccacaccacgaccggcaagaccucccugcccaagugcuggcuggugagcaacggcuccuaccucaacgagacccacuucagcgacgacaucgagcagcaggcggacaacaugaucacggagaugcugcagaaggaguacauggagcgccaggggaagacgccccugggccucguggaccuguucgucuucuccaccagcuucuaccugaucuccaucuuccugcaccucgugaagaucccgugaggacuaguaauaaggaaacuguaugaaugucugugggcaggaagugaagagauccuucuguaaagguuuuuggaauuaugucugcugaauaauaaacuuuuuugaaauaauaaaucugguagaaaaaugagaucuaaaaaaaaaaaaaaaaaaaaaaaaaaaaaaaaaaaaaaaaaaaaaaaaaaaaaaaaaaaaaaaaaaaaaaaaaaaaaaaaaaaaaaaaaaaaaaaaaaaa

SEQ ID NO: 42812 - RNA, 1674 nt, Artificial Sequence
  mRNA product Design b-4 (A100) comprising derived and/or modified sequence from LASV(G1442-SLE-2011;Clade IV)__AIT17180__GPCmut13 (opt1)
aggagagucccgcagucggcguccagcggcucugcuuguucgugugugugucguugcaggccuuauucaagcuuaccaugggccagaucgugaccuucuuccaggaggucccccacgugaucgaggaggugaugaacaucguccugaucgcccucagcauccuggccgugcugaaggggcucuacaacguggcgaccugcggccugaucgggcuggucacguuccuccugcugugcggccgcuccugcaccaccacccucuacaaggggguguacgagcugcagacgcuggagcucaacauggagacccugaacaugaccaugccgcugagcugcaccaagaacaacucccaccacuacauccgggugggcaacgagacgggccucgagcugacccugaccaacaccagcaucaucaaccacaaguucugcaaccucuccgacgcccacaagaagaaccuguacgaccacgcccugaugagcaucaucuccacguuccaccucagcauccccaacuucaaccaguacgaggccauguccugcgacuucaacgggggcaagaucagcguccaguacaaccugucccacagcuacgccggggacgcggccaaccacugcggcaccguggccaacggggugcugcagaccuucaugcgcauggccuggggcggcuccuacaucgcgcucgacagcgggcggggcaacugggacugcaucaugaccuccuaccaguaccugaucauccagaacacgaccugggacgaccacugccaguucagccgccccucccccaucggguaccugggccuccugagccagcggacccgcgacgucuacaucucccggcgccugcucggcaccuucacguggacccugagcgacagcgaggggaaggacaccccgggcggguacugccugacccgguggaugcucaucgaggccgagcugaagugcuucggcaacacggccguggccaagugcaacgagaagcacgacgaggaguucugcgacaugcugcgccucuucgacuucaacaagcaggccauccagcggcugaaggcggaggcccagauguccauccagcugaucaacaaggccgugaacgcccucaucaacgaccagcugaucaugaagaaccaccuccgcgacaucauggggauccccuacugcaacuacagcaaguacugguaccugaacaacaccgccaccggcaagaccucccugcccaagugcuggcugaucagcaacggcuccuaccucaacgagacgcacuucagcgacgacaucgagcaggaggcggacaacaugaucaccgagaugcugcagaaggaguacauggagcggcaggggaagacgccccugggccucgucgaccuguucguguucuccaccagcuucuaccugaucuccaucuuccugcaccucgugaagaucccgugaggacuaguaauaaggaaacuguaugaaugucugugggcaggaagugaagagauccuucuguaaagguuuuuggaauuaugucugcugaauaauaaacuuuuuugaaauaauaaaucugguagaaaaaugagaucuaaaaaaaaaaaaaaaaaaaaaaaaaaaaaaaaaaaaaaaaaaaaaaaaaaaaaaaaaaaaaaaaaaaaaaaaaaaaaaaaaaaaaaaaaaaaaaaaaaaa

SEQ ID NO: 42813 - RNA, 1674 nt, Artificial Sequence
  mRNA product Design b-4 (A100) comprising derived and/or modified sequence from LASV(G3010-SLE-2013;Clade IV)__AIT17344__GPCmut13 (opt1)
aggagagucccgcagucggcguccagcggcucugcuuguucgugugugugucguugcaggccuuauucaagcuuaccaugggccagaucgugaccuucuuccaggaggucccccacgugaucgaggaggugaugaacaucguccugaucgcccucagcauccuggccgugcugaaggggcucuacaacuucgcgaccugcggccugguggggcuggucacguuccuccugcugugcggccgcuccugcaccaccagccucuacaaggggguguacgagcugcagacccuggagcucaacauggagacgcugaacaugaccaugccgcuguccugcaccaagaacaacagccaccacuacaucauggugggcaacgagaccggccucgagcugacgcugaccaacaccuccaucaucaaccacaaguucugcaaccucagcgacgcccacaagaagaaccuguacaaccacgcccugauguccaucaucagcaccuuccaccucuccauccccaacuucaaccaguacgaggccaugagcugcgacuucaacgggggcaagaucuccguccaguacaaccugagccacuccuacgccggggacgcggccagccacugcggcacgguggccaacggggugcugcagaccuucaugcggauggccuggggcggcuccuacaucgcgcucgacagcggguacggcaagugggacugcaucaugaccuccuaccaguaccugaucauccagaacaccacgugggaggaccacugccaguucagccgccccucccccaucggguaccugggccuccugagccagcggacccgcgacaucuacaucagccggcgccugcucggcaccuucaccuggacgcuguccgacagcgaggggaaggacaccccgggcggguacugccugacccgguggaugcucaucgaggccgagcugaagugcuucggcaacaccgccgucgccaagugcaacgagaagcacgacgaggaguucugcgacaugcugcgccucuucgacuucaacaagcaggccauccagcggcugaagacggaggcgcagauguccauccagcugaucaacaaggccgugaacgcccucaucaacgaccagcugaucaugaagaaccaccuccgcgacaucauggggauccccuacugcaacuacagcaaguacugguaccugaaccacaccaccaccggcaagacgucccugcccaagugcuggcuggugagcaacggcuccuaccucaacgagacccacuucagcgacgacaucgagcagcaggccgacaacaugaucaccgagaugcugcagaaggaguacauggagcggcaggggaagacgccccugggccucgucgaccuguucguguucuccaccagcuucuaccugaucuccaucuuccugcaccucgugaagaucccgugaggacuaguaauaaggaaacuguaugaaugucugugggcaggaagugaagagauccuucuguaaagguuuuuggaauuaugucugcugaauaauaaacuuuuuugaaauaauaaaucugguagaaaaaugagaucuaaaaaaaaaaaaaaaaaaaaaaaaaaaaaaaaaaaaaaaaaaaaaaaaaaaaaaaaaaaaaaaaaaaaaaaaaaaaaaaaaaaaaaaaaaaaaaaaaaaa

SEQ ID NO: 42814 - RNA, 1674 nt, Artificial Sequence
  mRNA product Design b-4 (A100) comprising derived and/or modified sequence from LASV(G502-SLE-2009;Clade IV)__AIT17126__GPCmut13 (opt1)
aggagagucccgcagucggcguccagcggcucugcuuguucgugugugugucguugcaggccuuauucaagcuuaccaugggccagaucgugaccuucuuccaggaggucccccacgugaucgaggaggugaugaacaucguccugaucgcccucagcauccuggccgugcugaaggggcucuacaacuucgcgaccugcggccugguggggcugcucacguuccugcugcucugcggccgcuccugcaccaccgggcuguacaagggcgucuacgagcugcagacccucgagcugaacauggagacgcugaacaugaccaugccgcucagcugcaccaagaacaacucccaccacuacaucauggugggcaacgagaccgggcuggagcugacgcucaccaacaccagcaucaucaaccacaaguucugcaaccuguccgacgcccacaagaagaaccuguacgaccacgcccucaugagcaucaucuccaccuuccaccugagcauccccaacuucaaccaguacgaggccauguccugcgacuucaacggcgggaagaucagcgugcaguacaaccugucccacagcuacgccggcgacgcggccgaccacugcgggacggucgccaacggcgugcuccagaccuucaugcggauggccuggggcggguccuacaucgcgcuggacagcggccgcgggcggugggacugcaucaugaccuccuaccaguaccugaucauccagaacaccacgugggaggaccacugccaguucagccgccccucccccaucggcuaccucggccugcugagccagcggacccgcgacaucuacaucucccggcgccuccuggggaccuucaccuggacgcugagcgacagcgagggcaaggacacccccgggggcuacugccucacccgguggaugcugaucgaggccgagcugaagugcuucgggaacaccgccguggccaagugcaacgagaagcacgacgaggaguucugcgacaugcuccgccuguucgacuucaacaagcaggccauccagcggcugaaggcggaggcccagauguccauccagcucaucaacaaggccgucaacgcccugaucaacgaccagcuggugaugaagaaccaccuccgcgacaucaugggcauccccuacugcaacuacagccgguacugguaccugaaccacacgaccaccggccgcaccucccugcccaagugcuggcucgugagcaacggguccuaccugaacgagacgcacuucagcgacgacaucgagcagcaggccgacaacaugaucaccgagaugcugcagaaggaguacauggagcggcagggcaagaccccgcucgggcuggucgaccuguucguguucuccaccagcuucuaccugaucuccaucuuccuccaccuggugaagaucccgugaggacuaguaauaaggaaacuguaugaaugucugugggcaggaagugaagagauccuucuguaaagguuuuuggaauuaugucugcugaauaauaaacuuuuuugaaauaauaaaucugguagaaaaaugagaucuaaaaaaaaaaaaaaaaaaaaaaaaaaaaaaaaaaaaaaaaaaaaaaaaaaaaaaaaaaaaaaaaaaaaaaaaaaaaaaaaaaaaaaaaaaaaaaaaaaaa

SEQ ID NO: 42815 - RNA, 1674 nt, Artificial Sequence
  mRNA product Design b-4 (A100) comprising derived and/or modified sequence from LASV(G733-SLE-2010;Clade IV)__AIT17154__GPCmut13 (opt1)
aggagagucccgcagucggcguccagcggcucugcuuguucgugugugugucguugcaggccuuauucaagcuuaccaugggccagaucgugaccuucuuccaggaggucccccacgugaucgaggaggugaugaacaucguccugaucgcccucagcauccuggccgugcugaaggggcucuacaacuucgcgaccugcggcaucguggggcuggucuccuuccugcuccugugcggccgcagcugcacgaccucccuguacaaggggguguacgagcuccagacccuggagcugaacauggagacccucaacaugacgaugccgcugagcugcaccaagaacaacucccaccacuacaucauggugggcaacgagaccggccuggagcucacccugacgaacaccagcaucaucaaccacaaguucugcaaccuguccgacgcccacaagaagaaccucuacgaccacgcccugaugagcaucaucuccaccuuccaccugagcauccccaacuucaaccaguacgaggccauguccugcgacuucaacgggggcaagaucagcguccaguacaaccucucccacagcuacgccggggacgcggccaaccacugcggcaccaucgccaacggggugcugcagacguucaugcggauggccuggggcggcuccuacaucgcgcuggacagcgggcgcgaccggugggacugcaucaugaccuccuaccaguaccucaucauccagaacaccaccugggaggaccacugccaguucagccgccccucccccaucggcuaccuggggcugcucagccagcggacgcgcgacaucuacaucagccggcgccugcugggcaccuucaccuggacccucuccgacagcgagggcaaggacacgcccgggggcuacugccugacccgguggaugcugaucgaggccgagcucaagugcuucgggaacaccgccguggccaagugcaacgagaagcacgacgaggaguucugcgacaugcugcgccuguucgacuucaacaagcaggccauccagcggcucaaggcggaggcccagauguccauccagcugaucaacaaggccgucaacgcccugaucaacgaccagcucaucaugaagaaccaccuccgcgacaucaugggcauccccuacugcaacuacagcaaguacugguaccugaaccacaccacgaccgggaagaccucccugcccaagugcuggcuggugagcaacggcuccuaccugaacgagacccacuucagcgacgacaucgagcagcaggccgacaacaugaucacggagaugcuccagaaggaguacauggagcggcagggcaagaccccgcuggggcugguggaccucuucgucuucuccaccagcuucuaccugaucuccaucuuccugcaccuggugaagaucccgugaggacuaguaauaaggaaacuguaugaaugucugugggcaggaagugaagagauccuucuguaaagguuuuuggaauuaugucugcugaauaauaaacuuuuuugaaauaauaaaucugguagaaaaaugagaucuaaaaaaaaaaaaaaaaaaaaaaaaaaaaaaaaaaaaaaaaaaaaaaaaaaaaaaaaaaaaaaaaaaaaaaaaaaaaaaaaaaaaaaaaaaaaaaaaaaaa

SEQ ID NO: 42816 - RNA, 1674 nt, Artificial Sequence
  mRNA product Design b-4 (A100) comprising derived and/or modified sequence from MOPV/LASV reassortant(IGS-1;Clade IV)__AFY05576__GPCmut13 (opt1)
aggagagucccgcagucggcguccagcggcucugcuuguucgugugugugucguugcaggccuuauucaagcuuaccaugggccagaucgugaccuucuuccaggaggucccccacgugaucgaggaggugaugaacaucguccugaucgcccucagcgugcuggccgugcugaaggggcucuacaacuucgcgaccugcggccuggucgggcuggugacguuccuccugcugugcggccgcuccugcaccaccagccucuacaaggggguguacgagcugcagacccuggagcucaacauggagacgcugaacaugaccaugccgcuguccugcaccaagaacaacagccaccacuacaucauggucggcaacgagaccggccucgagcugacgcugaccaacaccuccaucaucaaccacaaguucugcaaccucagcgacgcccacaagaagaaccuguacgaccacgcccugauguccaucaucagcaccuuccaccucuccauccccaacuucaaccaguacgaggccaugagcugcgacuucaacgggggcaagaucuccgugcaguacaaccugagccacuccuacgccggggacgcggccaaccacugcggcacgguggccaacgggguccugcagaccuucaugcggauggccuggggcggcagcuacaucgcgcucgacuccgggcgcggcaacugggacugcaucaugaccagcuaccaguaccugaucauccagaacaccacgugggaggaccacugccaguucucccggcccagccccaucggguaccugggccuccugucccagcgcacccgggacaucuacaucagccgccggcugcucggcaccuucaccuggacgcugagcgacuccgagggggaggacaccccgggcggguacugccugacccgcuggaugcucaucgaggccgagcugaagugcuucggcaacaccgccguggccaagugcaacgagaagcacgacgaggaguucugcgacaugcugcggcuguucgacuucaacaagcaggccauccagcgccugaaggcggaggcccagaugagcauccagcugaucaacaaggccgugaacgcccucaucaacgaccagcugaucaugaagaaccaccuccgggacaucauggggauccccuacugcaacuacuccaaguacugguaccucaaccacacgaccaccggccgcaccagccugcccaagugcuggcuggucuccaacggcagcuaccucaacgagacgcacuucuccgacgacaucgagcagcaggccgacaacaugaucaccgagaugcugcagaaggaguacauggagcggcaggggaagacgccccugggccucguggaccuguucguguucagcaccuccuucuaccugaucagcaucuuccugcaccucgucaagaucccgugaggacuaguaauaaggaaacuguaugaaugucugugggcaggaagugaagagauccuucuguaaagguuuuuggaauuaugucugcugaauaauaaacuuuuuugaaauaauaaaucugguagaaaaaugagaucuaaaaaaaaaaaaaaaaaaaaaaaaaaaaaaaaaaaaaaaaaaaaaaaaaaaaaaaaaaaaaaaaaaaaaaaaaaaaaaaaaaaaaaaaaaaaaaaaaaaa

SEQ ID NO: 42817 - RNA, 1674 nt, Artificial Sequence
  mRNA product Design b-4 (A100) comprising derived and/or modified sequence from LASV(LM765-SLE-2012;Clade IV)__AIT17814__GPCmut13 (opt1)
aggagagucccgcagucggcguccagcggcucugcuuguucgugugugugucguugcaggccuuauucaagcuuaccaugggccagaucgugaccuucuuccaggaggucccccacgugaucgaggaggugaugaacaucguccugaucgcccucagcauccuggccgugcugaaggggcucuacaacuucgcgaccugcggccugguggggcuggucacguuccuccugcugugcggccgcuccugcaccaccagccucuacaaggggguguacgagcugcagacccuggagcucaacauggagacgcugaacaugaccaugccgcuguccugcaccaagaacaacagccaccacuacaucauggugggcaacgagaccggccucgagcugacgcugaccaacaccuccaucaucgaccacaaguucugcaaccucagcgacgcccaccggaagaaccuguacgaccacgcccugauguccaucaucagcaccuuccaccucuccauccccaacuucaaccaguacgaggccaugagcugcgacuucaacgggggcaagaucuccguccaguacaaccugagccacuccuacgccaaggacgcggccgaccacugcgggacgguggccaacggcgugcugcagaccuucaugcgcauggccuggggcgggagcuacaucgcgcucgacuccggccgggggcgcugggacugcaucaugaccagcuaccaguaccugaucauccagaacaccacgugggaggaccacugccaguucucccggcccagccccaucggcuaccuggggcuccugucccagcgcacccgggacaucuacaucagccgccggcugcucggcaccuucaccuggacgcugagcgacuccgagggcaaggacacccccgggggcuacugccugacccgcuggaugcucaucgaggccgagcugaagugcuucgggaacaccgccgucgccaagugcaacgagaagcacgacgaggaguucugcgacaugcugcggcuguucgacuucaacaagcaggccauccagcgccugaaggcggaggcccagaugagcauccagcugaucaacaaggccgugaacgcccucaucaacgaccagcugaucaugaagaaccaccuccgggacaucaugggcauccccuacugcaacuacuccaaguacugguaccucaaccacacgaccaccgggaagaccagccugcccaagugcuggcugguguccaacggcagcuaccucaacgagacgcacuucuccgacgacaucgagcagcaggccgacaacaugaucaccgagaugcugcagaaggaguacauggagcgccagggcaagaccccgcuggggcucgucgaccuguucguguucagcaccuccuucuaccugaucagcaucuuccugcaccucgugaagaucccgugaggacuaguaauaaggaaacuguaugaaugucugugggcaggaagugaagagauccuucuguaaagguuuuuggaauuaugucugcugaauaauaaacuuuuuugaaauaauaaaucugguagaaaaaugagaucuaaaaaaaaaaaaaaaaaaaaaaaaaaaaaaaaaaaaaaaaaaaaaaaaaaaaaaaaaaaaaaaaaaaaaaaaaaaaaaaaaaaaaaaaaaaaaaaaaaaa

SEQ ID NO: 42818 - RNA, 1674 nt, Artificial Sequence
  mRNA product Design b-4 (A100) comprising derived and/or modified sequence from LASV(LM776-SLE-2012;Clade IV)__AIT17824__GPCmut13 (opt1)
aggagagucccgcagucggcguccagcggcucugcuuguucgugugugugucguugcaggccuuauucaagcuuaccaugggccagaucgugaccuucuuccaggaggucccccacgugaucgaggaggugaugaacaucguccugaucgcccucagcauccuggccgugcugaaggggcucuacaacuucgcgaccugcggccugguggggcuggucacguuccuccugcugugcggccgcuccugcaccaccagcguguacaaggggguguacgagcuccagacccuggagcugaacauggagacgcucaacaugaccaugccgcuguccugcaccaagaacaacagccaccacuacaucauggucggcaacgagaccggccuggagcucacgcugaccaacaccuccaucaucaaccacaaguucugcaaccugagcgacgcccacaagaagaaccucuacgaccacgcccugauguccaucaucagcaccuuccaccuguccauccccaacuucaaccaguacgaggccaugagcugcgacuucaacgggggcaagaucuccgugcaguacaaccucagccacuccuacgccggggacgcggccaaccacugcggcacgguggccaacgggguccugcagaccuucaugcggauggccuggggcggcagcuacaucgcgcuggacuccgggcacggcaagugggacugcaucaugaccagcuaccaguaccucaucauccagaacaccacgugggaggaccacugccaguucucccgccccagccccaucggguaccugggccugcucucccagcggacccgcgacaucuacaucagccggcgccugcugggcaccuucaccuggacgcucagcgacuccgaggggaaggacaccccgggcggguacugccugacccgguggaugcugaucgaggccgagcucaagugcuucggcaacaccgccguggccaagugcaacgagaagcacgacgaggaguucugcgacaugcugcgccuguucgacuucaacaagcaggccauccagcggcucaaggcggaggcccagaugagcauccagcugaucaacaaggccgugaacgcccugaucaacgaccagcucaucaugaagaaccaccuccgcgacaucauggggauccccuacugcaacuacuccaaguacugguaccugaaccacacgaccaccggcaagaccagccugcccaagugcuggcuggucuccaacggcagcuaccugaacgagacgcacuucuccgacgacaucgagcagcaggccgacaacaugaucaccgagaugcuccagaaggaguacauggagcggcaggggaagacgccccugggccugguggaccucuucguguucagcaccuccuucuaccugaucagcaucuuccugcaccuggucaagaucccgugaggacuaguaauaaggaaacuguaugaaugucugugggcaggaagugaagagauccuucuguaaagguuuuuggaauuaugucugcugaauaauaaacuuuuuugaaauaauaaaucugguagaaaaaugagaucuaaaaaaaaaaaaaaaaaaaaaaaaaaaaaaaaaaaaaaaaaaaaaaaaaaaaaaaaaaaaaaaaaaaaaaaaaaaaaaaaaaaaaaaaaaaaaaaaaaaa

SEQ ID NO: 42819 - RNA, 1674 nt, Artificial Sequence
  mRNA product Design b-4 (A100) comprising derived and/or modified sequence from LASV(Mad39;Clade IV)__ANH09722__GPCmut13 (opt1)
aggagagucccgcagucggcguccagcggcucugcuuguucgugugugugucguugcaggccuuauucaagcuuaccaugggccagaucgugaccuucuuccaggaggucccccacgugaucgaggaggugaugaacaucguccugaucgcccucagcauccuggccgugcugaaggggcucuacaacguggcgaccugcggccugaucgggcuggucacguuccuccugcugugcggccgcuccugcaccaccacccucuacaaggggguguacgagcugcaggcccuggagcucaacauggagacgcugaacaugaccaugccgcugagcugcaccaagaacaacucccaccacuacauccgggugggcaacgagaccggccucgagcugacgcugaccaacaccagccucaucaaccacaaguucugcaaccuguccgacgcccacaagaagaaccuguacgaccacgcccucaugagcaucaucuccaccuuccaccugagcauccccaacuucaaccaguacgaggccauguccugcgacuucaacgacgggaagaucagcguccaguacaaccugucccacacguacgcgggcgacaccgccaaccacugcgggaccguggccaacggcgugcuccagaccuucaugcgcauggccuggggcgggagcuacaucgcgcuggacuccggccgcgggggcugggacugcaucaugacgagcuaccaguaccugaucauccagaacaccaccugggaggaccacugccaguucucccggcccagccccaucggguaccucggccugcugucccagcggacccgcgacaucuacaucagccggcgccuccugggcacguucaccuggacccuguccgacagcgaggggaaggacaccccgggcggguacugccucacgcgguggaugcugaucgaggccgagcugaagugcuucggcaacaccgccgucgccaagugcaacgagaagcacgacgaggaguucugcgacaugcuccgccuguucgacuucaacaagcaggccauccagcggcugaaggcggaggcccagaugagcauccagcucaucaacaaggccgugaacgcccugaucaacgaccagcugaucaugaagaaccaccuccgcgacaucauggggauccccuacugcaacuacuccaaguacugguaccugaaccacaccgugaccggcaagacgagccugcccaagugcuggcucgucuccaacggcagcuaccugaacgagacccacuucuccgacgacaucgagcagcaggccgacaacaugaucaccgagaugcugcagaaggaguacauggagcggcaggggaagacgccccucggccugguggaccuguucguguucagcaccuccuucuaccugaucagcaucuuccuccaccuggucaagaucccgugaggacuaguaauaaggaaacuguaugaaugucugugggcaggaagugaagagauccuucuguaaagguuuuuggaauuaugucugcugaauaauaaacuuuuuugaaauaauaaaucugguagaaaaaugagaucuaaaaaaaaaaaaaaaaaaaaaaaaaaaaaaaaaaaaaaaaaaaaaaaaaaaaaaaaaaaaaaaaaaaaaaaaaaaaaaaaaaaaaaaaaaaaaaaaaaaa

SEQ ID NO: 42820 - RNA, 1674 nt, Artificial Sequence
  mRNA product Design b-4 (A100) comprising derived and/or modified sequence from LASV(Z0947-SLE-2011;Clade IV)__AIT17840__GPCmut13 (opt1)
aggagagucccgcagucggcguccagcggcucugcuuguucgugugugugucguugcaggccuuauucaagcuuaccaugggccagaucgugaccuucuuccaggaggucccccacgugaucgaggaggugaugaacaucguccugaucgcccucagcauccuggccgugcugaaggggcucuacaacuucgcgaccugcggccugguggggcuggucacguuccuccugcugugcggccgcuccugcaccaucagccucuacaaggggguguacgagcugcagacccuggagcucaacauggagacccugaacaugacgaugccgcuguccugcaccaagaacaacagccaccacuacaucauggugggcaacgagaccggccucgagcugacccugacgaacaccuccaucaucaaccacaaguucugcaaccucagcgacgcccacaagaagaaccuguacgaccacgcccugauguccaucaucagcaccuuccaccucuccauccccaacuucaaccaguacgaggccaugagcugcgacuucaacgggggcaagaucuccguccaguacaaccugagccacuccuacgccggggacgcggccaaccacugcggcaccguggccaacggggugcugcagacguucaugcggauggccuggggcggcagcuacaucgcgcucgacuccgggcgcgaccggugggacugcaucaugaccagcuaccaguaccugaucauccagaacaccaccugggaggaccacugccaguucucccgccccagccccaucggcuaccuggggcuccugucccagcggacgcgcgacaucuacaucagccggcgccugcucggcaccuucaccuggacccugagcgacuccgagggcaaggacacgcccgggggcuacugccugacccgguggaugcucaucgaggccgagcugaagugcuucgggaacaccgccgucgccaagugcaacgagaagcacgacgaggaguucugcgacaugcugcgccucuucgacuucaacaagcaggccauccagcggcugaaggcggaggcccagaugagcauccagcugaucaacaaggccgugaacgcccucaucaacgaccagcugaucaugaagaaccaccuccgcgacaucaugggcauccccuacugcaacuacuccaaguacugguaccugaaccacaccacgaccgggaagaccagccugcccaagugcuggcugguguccaacggcagcuaccucaacgagacccacuucuccgacgacaucgagcagcaggccgacaacaugaucacggagaugcugcagaaggaguacauggagcggcagggcaagaccccgcuggggcucgucgaccuguucguguucagcaccuccuucuaccugaucagcaucuuccugcaccucgugaagaucccgugaggacuaguaauaaggaaacuguaugaaugucugugggcaggaagugaagagauccuucuguaaagguuuuuggaauuaugucugcugaauaauaaacuuuuuugaaauaauaaaucugguagaaaaaugagaucuaaaaaaaaaaaaaaaaaaaaaaaaaaaaaaaaaaaaaaaaaaaaaaaaaaaaaaaaaaaaaaaaaaaaaaaaaaaaaaaaaaaaaaaaaaaaaaaaaaaa

SEQ ID NO: 42821 - RNA, 1674 nt, Artificial Sequence
  mRNA product Design b-4 (A100) comprising derived and/or modified sequence from LASV(Josiah;Clade IV)__NP_694870__GPCmut13 (opt1)
aggagagucccgcagucggcguccagcggcucugcuuguucgugugugugucguugcaggccuuauucaagcuuaccaugggccagaucgugaccuucuuccaggaggucccccacgugaucgaggaggugaugaacaucguccugaucgcccucagcgugcuggccgugcugaaggggcucuacaacuucgcgaccugcggccuggucgggcuggugacguuccuccugcugugcggccgcuccugcaccaccagccucuacaaggggguguacgagcugcagacccuggagcucaacauggagacgcugaacaugaccaugccgcuguccugcaccaagaacaacagccaccacuacaucauggucggcaacgagaccggccucgagcugacgcugaccaacaccuccaucaucaaccacaaguucugcaaccucagcgacgcccacaagaagaaccuguacgaccacgcccugauguccaucaucagcaccuuccaccucuccauccccaacuucaaccaguacgaggccaugagcugcgacuucaacgggggcaagaucuccgugcaguacaaccugagccacuccuacgccggggacgcggccaaccacugcggcacgguggccaacgggguccugcagaccuucaugcggauggccuggggcggcagcuacaucgcgcucgacuccgggcgcggcaacugggacugcaucaugaccagcuaccaguaccugaucauccagaacaccacgugggaggaccacugccaguucucccggcccagccccaucggguaccugggccuccugucccagcgcacccgggacaucuacaucagccgccggcugcucggcaccuucaccuggacgcugagcgacuccgaggggaaggacaccccgggcggguacugccugacccgcuggaugcucaucgaggccgagcugaagugcuucggcaacaccgccguggccaagugcaacgagaagcacgacgaggaguucugcgacaugcugcggcuguucgacuucaacaagcaggccauccagcgccugaaggcggaggcccagaugagcauccagcugaucaacaaggccgugaacgcccucaucaacgaccagcugaucaugaagaaccaccuccgggacaucauggggauccccuacugcaacuacuccaaguacugguaccucaaccacacgaccaccggccgcaccagccugcccaagugcuggcuggucuccaacggcagcuaccucaacgagacgcacuucuccgacgacaucgagcagcaggccgacaacaugaucaccgagaugcugcagaaggaguacauggagcggcaggggaagacgccccugggccugguggaccucuucguguucagcaccuccuucuaccugaucagcaucuuccugcaccucgucaagaucccgugaggacuaguaauaaggaaacuguaugaaugucugugggcaggaagugaagagauccuucuguaaagguuuuuggaauuaugucugcugaauaauaaacuuuuuugaaauaauaaaucugguagaaaaaugagaucuaaaaaaaaaaaaaaaaaaaaaaaaaaaaaaaaaaaaaaaaaaaaaaaaaaaaaaaaaaaaaaaaaaaaaaaaaaaaaaaaaaaaaaaaaaaaaaaaaaaa

SEQ ID NO: 42822 - RNA, 1671 nt, Artificial Sequence
  mRNA product Design b-4 (A100) comprising derived and/or modified sequence from LASV(LP;Clade I)__AAF86701__GPCmut13 (opt1)
aggagagucccgcagucggcguccagcggcucugcuuguucgugugugugucguugcaggccuuauucaagcuuaccaugggccagaucaucaccuucuuccaggaggugccccacgucaucgaggaggugaugaacaucgugcugaucgcccucagccugcuggccauccucaaggggcuguacaacaucgcgaccugcggcaucaucgggcuggucgccuuccucuuccugugcggcaaguccugcagccugacgcucaagggcggguacgagcugcagacccuggagcucaacauggagacccugaacaugaccaugccgcuguccugcacgaagaacagcucccaccacuacauccgcgugggcaacgagaccgggcucgagcugacccugaccaacacgagcaucaucaaccacaaguucugcaaccucuccgacgcccacaagaagaaccuguacgaccacgcccugaugagcaucaucuccaccuuccaccucagcauccccaacuucaaccaguacgaggccauguccugcgacuucaacggcgggaagaucagcgugcaguacaaccugucccacagcuacgcgggcgacgccgccgagcacugcgggaccgucgccaacggcgugcugcagaccuucaugcggauggcguggggcgggcgcuacaucgcccucgacuccggcaaggggaacugggacugcaucaugacgagcuaccaguaccugaucauccagaacaccaccugggaggaccacugccaguucucccggcccagccccaucggcuaccugggccuccugucccagcgcacccgggacaucuacaucagccgccggcugcucgggacguucaccuggacccugagcgacuccgagggcaacgagacccccgggggcuacugccugacgcgcuggaugcucaucgaggccgagcugaagugcuucgggaacaccgccguggccaagugcaacgagaagcacgacgaggaguucugcgacaugcugcggcuguucgacuucaacaagcaggcgauccgccggcugaaggccgaggcccagaugagcauccagcugaucaacaaggccgucaacgcccucaucaacgaccagcugaucaugaagaaccaccuccgcgacaucaugggcauccccuacugcaacuacuccaaguacugguaccucaaccacaccagcuccggccggaccagccugcccaagugcuggcugaucuccaacgggagcuaccucaacgagacgcaguucuccgacgacaucgagcagcaggcggacaacaugaucaccgagaugcugcagaaggaguacaucgagcgccagggcaagaccccgcuggggcugguggacaucuucaucuucagcaccuccuucuaccucaucagcaucuuccugcaccugaucaagaucccgugaggacuaguaauaaggaaacuguaugaaugucugugggcaggaagugaagagauccuucuguaaagguuuuuggaauuaugucugcugaauaauaaacuuuuuugaaauaauaaaucugguagaaaaaugagaucuaaaaaaaaaaaaaaaaaaaaaaaaaaaaaaaaaaaaaaaaaaaaaaaaaaaaaaaaaaaaaaaaaaaaaaaaaaaaaaaaaaaaaaaaaaaaaaaaaaaa

SEQ ID NO: 42823 - RNA, 1671 nt, Artificial Sequence
  mRNA product Design b-4 (A100) comprising derived and/or modified sequence from LASV(803213;Clade II)__AAF86703__GPCmut13 (opt1)
aggagagucccgcagucggcguccagcggcucugcuuguucgugugugugucguugcaggccuuauucaagcuuaccaugggccagaucaucaccuucuuccaggaggugccccacgucaucgaggaggugaugaacaucgugcugaucgcccucagccugcuggccauccucaaggggaucuacaacgucgcgaccugcggccuguucgggcugaucuccuuccuccugcugugcggccgcagcugcuccgugacguacaaggggguguacgagcuccagacccuggagcugaacauggccaaccucaacaugaccaugccgcugagcugcaccaagaacaacucccaccacuacaucauggucggcaacgagacgggccuggagcucacccugaccaacaccagcaucaucaaccacaaguucugcaaccuguccgacgcccacaagaagaaccucuacgaccacgcccugaugagcaucaucuccacguuccaccugagcauccccaacuucaaccaguacgaggccauguccugcgacuucaacgggggcaagaucagcgugcaguacaaccucucccacagcuucgcgguggacgccgccaaccacugcgggaccaucgccaacggcguccugcagaccuucaugcggauggcguggggcggguccuacaucgcccuggacagcggcaaggggaacugggacugcaucaugaccuccuaccaguaccucaucauccagaacacgaccugggaggaccacugccaguucagccgccccucccccaucggcuaccuggggcugcucagccagcggacccgcgacaucuacaucagccggcgccugcugggcaccuucacguggacccucuccgacagcgagggcaacgaggcccccgggggcuacugccugacccgguggaugcugaucgaggccgagcucaagugcuucgggaacaccgccguggcgaagugcaacgagaagcacgacgaggaguucugcgacaugcugcgccuguucgacuucaacaagcaggccaucaagcggcucaagacggaggcccagauguccauccagcugaucaacaaggccgugaacgcccugaucaacgaccagcucaucaugaagaaccaccuccgcgacaucaugggcauccccuacugcaacuacagccgguacugguaccugaaccacaccgucaccgggaagaccucccugccccgcugcuggcuggugagcaacggcuccuaccugaacgagacgcacuucagcgacgacaucgagcagcaggcggacaacaugaucaccgagaugcuccagaaggaguacauggaccggcagggcaagaccccgcuggggcugguggaccuguucgucuucuccaccagcuucuaccucaucuccaucuuccugcaccuggugaagaucccgugaggacuaguaauaaggaaacuguaugaaugucugugggcaggaagugaagagauccuucuguaaagguuuuuggaauuaugucugcugaauaauaaacuuuuuugaaauaauaaaucugguagaaaaaugagaucuaaaaaaaaaaaaaaaaaaaaaaaaaaaaaaaaaaaaaaaaaaaaaaaaaaaaaaaaaaaaaaaaaaaaaaaaaaaaaaaaaaaaaaaaaaaaaaaaaaaa
